United States Patent Application Publication US 2005/0228172 A9 - sequence listing, part 210

SEQ ID NO: 951627 - DNA, 606 bp, Homo sapiens
catttttatttcatttatttctactctaattttaatttattttcctatgcttactttggatttaatttgcttttgttctacttttctaaggtgattaattttttttaaatttaataagtttttgggaaacaggtggtgtttggctacatgaataaattctttatttgcgatttctgagattttggtgaaccgatcacccaagcagcgtacactgtacccaatatctatgtagtgttttatccctcaacctcctcccaccctttcccccaaaatccccaaagtctattatatcattcttatgcctttgcatcatcatagcttagctcccacttatgagtaagaacatatgatgtttggttttccattcctgagttgcttcacttagaataatggtatccaattccaaggttgctcaaatgtcattattttgttcctttgtatggctgagtagtatttcattttatatatatatatatatattatatatatatatatwttttatatatatacacacatatatctatatcacattttctttatccactgttgattgatggcatttgggctggttccatatgtttgcaattgtgaattgtgctgctataa

SEQ ID NO: 951628 - DNA, 573 bp, Homo sapiens
aatctctgtctccatcatcaaatggccctgtctctgtgtatgtctaaattttccccttgtttaaacttttaattttaggtttgkggggtacatgggaaggtttgttacataggtaaaccaatgtcatgggagtttgttgtatgcattattttatcatccaagtgttaggccaagtacccaatagttaccttttctgcttctttccctcctgatgccctccccacttaagtaggtcccagtgtcttttgtttccttctttgtgttcgtagttcttatcatttagctcctacttataagtgagaacatattgtatttggttttctgttcctccattagtttgctaaggataatagtctccagctccatccatgttcccgcaaaagacatgatcttgttctttttttatagctgcatagtattccctggtatataagtatcacattctctttatccaatctgtcattgatggtcatttgggttgattctatatctttgctattgtgaatagtgctgcaataaacatttgcatgtgtgtgtctttatggtagaatgatttatattcttctggatata

SEQ ID NO: 951629 - DNA, 587 bp, Homo sapiens
tcacggtagccaagatatggaaacaacctaaatatccatggatggatgaatggagaatattattcagccataaaaaggaatgaaatcctgtcttttgcaacaacatggatgaacttagaggaaattatgggaagtgaaataatctagacccagaaagacaaataatgtatggtcttatttatatgtagaatattaaaaagttgaattcatagaagtagagagtagaacagtagttactgggtacatggggaaatggtggtcacagggcacaaacattcagttataacatgaacaaattctggggatctggtgtatgacatgggtgatgatggatatgttaatgaatttgattgtggtcatcattaaacaatgtatatcaaatcatcagtcatacaccttaaaatataaaatctttttgtcaattaaatactaaacaaacacataaaaaatccaayatatgcactgctgaattggaggtggaacagaattttacaaacttcaataactcacactgcatcattaatgcttttttgccatattcgggtaccacctatactactactaacttaatagtcttctttaaagag

SEQ ID NO: 951630 - DNA, 750 bp, Homo sapiens
tgaatatatgaatagaatttcctgaactaaaagtgaaaatccaacttaaaaatggacaaatggggccaggcacagtggctcatccttgtaatcccagcactttgggaagctgaggtgggaggatcgcttgagcccaggagttccaggctgcagtgagctatgatcacactgtactccaacctgggcaacaaggtaaggcctggtttctaaaaaataaaaaataaagataaaatgaacaaaatatctgaatagacatttctctaaagaaggatatacaaatggccgataaacacataaaaaaagatgctcaacatccttagccattaggaaaatcaaaactataatgagatgccactttacactcattaagacggctaaagtaaggccgggcgtggtggctcacgcctgtaatcccaccactttgggaggctaaggcagcaggatcacctgaggtcgggagtttgagaccagcctgaccaacatggtgaaacctcgtctctaccaaaaaatacaaaattagccaggcatggtgtcgcatgactgtaattccagctactccggaggctgaggcaggagaatcgcttgaacccaggaggcggaggttgtggtgagcccacattgtgccattatactccagcctgggcaacaagagtgaaactctgtctcaatttaaaaaaaaaaaaaaggytaaagtagacagaagaaagtatggacaaggatgtggataaattagaaccctgacacattgct

SEQ ID NO: 951631 - DNA, 607 bp, Homo sapiens
atattttcttaaagagataattgcacaagtgtattagtccattcttaaactgacataaagaactacatgacactgggtaatttataaagaaaagaagcttaatcagctcatggttccatgggctatacaggcttctgtttctggagaggcctcaggaaacttacaatcatggcagaaggtgaagcacatcttcacatggctggcaagagagagcaagcaaagggggaagtgctacacacttttaaacaaccagatctcatgaaaactcactcactgtgacaaaaacagcaaggggggaagtccacccacatgatccaatcacctcctaccaggcccgtcctccaacattgagaattataaattgacatgagatttgggtggggacacagagtcaagccatatcattctgtccctggcctgtcccaaatcttatgttcttctcacatttcaaaacacaattatgccttcccagttatcccccaaagtcttaactcactccagcattaactcaaaagtccaagtccaacatctcctctgagacaaggcaagtcccttctgcctrtaagcctgtaaaataaaaatcaagacatccgagacacaatggggg

SEQ ID NO: 951632 - DNA, 623 bp, Homo sapiens
gagaaacagtgtaaactggcagtgtaaacaagagcagggcatgtatgagtagttgagaaaggtgaataggagtacgactagayagaagatagtagggatgacaagttttctggggcacagtccaagttggtctggtgtctggaatgagactggggcctaataaaagggagcatccatacaggagctcaaatgggctgtaccctgtagcattccgaagacaggcctgaattctgagaagggaaagtggtaaaagtattgtccagtcctttttaagttagtggctgagcttggtgaggtgtgtttttaaaagaacattaatccgttctacctttcctgaagactgaggaccgtaagggatataaaagtttcactgaataccaagagcctgaaaaaatgcttggctgatttaactaataaaggctggtccgttatcagactgtatagaggtgggaaggccaaaccaaggaattatgtctgacagaagggaagagatgactgtggtggccttctcagaccctgtaggaaaggcctctacccatccagtgaaagtgtctacccagactaagaggtattttagttttctgactcggggcatgttgagtaaagccaatttgccagtcctg

SEQ ID NO: 951633 - DNA, 804 bp, Homo sapiens
cggtaccaattaaacagtaattctccattccctcctcctccaagcccctggcaaccaccattctactttctataactatgaatctgactactttgggtacctcccataggtagaatcattcaatatttgtccttttgtgtctggcttatttcacttagcataatgtcttcaaggtccatccatgttactgtatgtgttgagatttctttcttttgtaaggttaaataatattccattgtatatatatataccacgttttttctatccattcatccattgatgaatacttggttaggatctcttcatcttttggctattgtgaatgatgcagctatgaatattggtgtacaaatatctgttctgagtccctactttcaattcttccaatatatgggaagattatattggaagaagtggaattgctggatcatacagcaattctctctctttctctttgctttttttttttttttgagctgaggttttgctctgtcacccagactggagtgtaggggtgtgatctctgctccctgcaacattgaactcccgggctcaagtggtcctcttgcctcagcctcctgagtaactgggacctcaggcatgtgccaccatgctggtctaattttttatatttttagtagacacaaggtctttctatgttgcccaggctggtctcgaactcctgagctcaagcaattctcctgccttggcctcccaaagtgctaggattckagttatgagccactgcgtccagcctgatatggcaattctatatttattttttgaggaaccactgtattgttt

SEQ ID NO: 951634 - DNA, 535 bp, Homo sapiens
tgattgaacagtttggaaacaatctttttatactgtcgtcaagtggatattttgagctgtttgaggcctatggtggaaaaggaaatatcttcacctaaatactacacagaagcattcggagaaactyctttgtgatgtctgcattcagctcacagagttgaacctttcttttgattgagcagttatgaaaccctctttttataggatctgcaagtggatattggaagctatttgagacctattgtggaaaacgaaatatcttcacataaaaactatacagaagcattttcagaaacttttttgtgatgtgtgctttcatctcacagagttgaacctttcttttcattgagcggtttggaaacaccatttttgtagaatctgcaagtggatattttgagtgctttgtgatctatggtggaaaaggaaatatcttcacataaaaactacagaagcattctgagaaaattctttgtgatgtgcggatttatctcacagagttgaacctttcttttgattgagcagtttctaaacactc

SEQ ID NO: 951635 - DNA, 625 bp, Homo sapiens
tctcattttctgactattctgtctccagtgatttcttacagcagcttaccttggttcctgaaaattcaccattgttcatttctaakgcaggctggaaattcaggctattgttaaatactagcatggtcctatcaaaatactattaactgagagggggaatattaaagcaggattggagagcaggtaagaagattggtgttttgggaaaataaatcttactgaccgtaagacgtattgggaataaggaagagacggaaactcagtaatgaactgctgtgtagtctctccatagctatggcttgaaatcaattgaggtggacattggcttcctgggaattatgtttatgtggggaaaaggcatatttatctctgttcagttgtagatgtgaacaaagggaaacctaagcaacagagttagactcaaggtttctttgttttgtttcatttgaataaaagcttctctagaaccaacatctatatgaaaacttacatattagcagaatagtcttttgttcccagtcatgtgaacgctgaatgcagtgaatacacaatctagtcaaaggcagtttcttgctcccctaactctctgttgcaaactaaaaatgattcaaaatatatctataat

SEQ ID NO: 951636 - DNA, 595 bp, Homo sapiens
tcccaccatagtctcccgagtagctaggactacaggcatgtgccaccatgcctcaatttttgtgttttttgtagagacagggttttgccatgttgcccaggctggtctcaaactcctgggttcaagcaatcctcctgccttggcctcccaaagtgctgagattacaagtgtgagccaccatgccaggcagataaaatatttttggtttactaaatctggcaactctaggctgggggttacacagaacatccccaggcaatgacctggggtgatctctgttgcatacttagccctgagagaattgagacagtttgtatcctgcagcttaacagttaggactgggaccaaggccacctccatcaacatgactttcatgactttgctattagttccagaaaattcgtgctcagaaagataataactattgctttactcaggagacgtcccaatcccaaccagatccccacattggaagacctgcccagactccaaaatgctgtaaatatccaccctggcttcctctttctgagacacttctaagactatcaaggttgtattctcccttaytgctgtagggaataaactgactttgacc

SEQ ID NO: 951637 - DNA, 605 bp, Homo sapiens
acaaaggtaagcatgaggaattgagcatcccccatctgcaccttggacaactatagtcctgaccactggagacscctgtagtcctcacaggcactaagcccagctaaagaagctgcctggaatccacgtggctgtactcctgctaacgaaggagccaacactgtgccctgccccctgtggtccatgtgcctactgcactatatactattttggaaattgaactactgctggagtatgttctgctccaggggtgagtagccagggcaccctttcatccctgagtctaagctgccacagaatcacccttttcctgtgtccagacattcttaagctgatctatgagcagttgttacacccttccctgtgggggccaagtgggcagtagagctgctccacctacccctcccagtggcagctatgtcccatcctcttaagctggaattgaagctgtacactgtctcctggggaaatggtgccttggggcagagtcgcttctcagtagcttctgtgccctgccctcatgtgccagagctgaagcaacacctgacaatcaggggaaatggtgccttggcaacccagagcagtcatgccccctgtgcctgtgc

SEQ ID NO: 951638 - DNA, 705 bp, Homo sapiens
gaaggttaatatgattagaccccaaaatgctaaggactctacctctaatggtatggagaacaccgatagtccttggggtaaactgcttagaaacttrtgcaaaataaatgcatctggcactcctgattcaccactcaagagaggtaaggagtttagtgactctctatataatatctttgactatattagagaaccaaggaacataatgaagttggatggttgctcttaagttcactggacaaagtgatgaaataaaatgatggactcagggattctaactccaagcttcagaagcagacactgagcctcaaacctgctaaaatcgccttgagtgagagtcttatctcctgcagaaaaaaagctgaaattgtggaaaaacagacacaagcacttatcatgtgagtggctgacctgtaacaaaaggtgcaggtacagctttgccaggtgtctactgttaaagtaagggcattgattggatcaggctgaatttattggtttggacccactcaatagggaatctgcatttaatgttgcagcttagggagttaaaaaacatttgaatagtttatttgcttggttagctaaaacatggattaaaagatggcccactgtgagtgagctggaaatgcctgatctctcttggtttaatgtagaggaaggaatccaaaagcttagggaaattgggatgctggagtggattagtca

SEQ ID NO: 951639 - DNA, 584 bp, Homo sapiens
gaggcacggctgggtttgcaggttccacaggtcaacaggagctgggatcaggcggagcccctcccgctactgargtgaagtaggagccccatgctcccaggcacagctacagccacccagccacagctccctacctgggcatccttgtgctctcgggaacctgggaagcccctctgcccacacagggtcagaagtgcctgcttcctctcactggcctctccctgctcctggtgaccactccaattttggagcaaagttgttgccaagcccaggcactgtcacaacctggccacgtgtgcacacactcagggcagcactgacacgctagcaccctcccagccccacctcagccccctccagaacttgggtgctgacaagtgcaggagggaggcctgtggggtgctgagggcagctcagtgtgagcctgcaggtgacccttagcacaaacagcctgggtgccatggatgacatgttaatggcagcaagagtcagacagactcctggacagaaaggggcgggtcgccctgtgaagccccaccttcaagtcagtgttcacccaaagcctggaggctaggctgtcagtt

SEQ ID NO: 951640 - DNA, 558 bp, Homo sapiens
ggacatggatgaagctggaaaccatcattctcagcaaactatcgcaaggacaaaaaamcctaacaccacgtgttctcactcataggtgggaattgaaaaatgagaacacatggaaacaggaaggggaacatcacacacttgggcctgttgtggggtagggggaagggggagggatagcattaggagatgtacctaatgttaaatgacgagttaatgggtgcagcacaccgacatggcacatgtatatatatgtaacaaacctgcatgttgtgcacatgtaccctaaaacttaaagtataatttaaaaaaaacctgtgatctctatgtttagcaatttctgtctctgtcatagataataagagagagaggtccaccccagctttatcaaattttgtcactttacaaaatacatcatggttttatatatatgatttaattaagtgagcaattagaagttggtatgtgctcagcatggatagtaactagttagtgacttgttacattaagaagatttaactattacttaaaatagtagctgggcgtggtggcttgtgccta

SEQ ID NO: 951641 - DNA, 588 bp, Homo sapiens
tttctgcaataaatttcttaatttttaagaattctatttttttgaatatccattttatatcacaccttgttcttgttgtattatcttccctctctgaggaaattaataattacttttttcccacactgtatagaytctgtttactttcagttgttttgtttattttttgtttctgtgtttgttattggctgtacctagaatctcgtgattgttggttatctgtttgtgttcaagagcaatacaataaacgtttccagtaagcttcaggttcttaggtaataattgtcaactgtggcttccagacagggcaatcaggtcgagaagttttcccagaaaagctcctcatgacatatccactggtctattcctttgggctgatcatgatcttccaactagagtcttccagtcttctctgaggatataagactaatagactgttatgttttgaatctagatagaggtgaaaattggggagatctagctttcagtagttactgttcattttgcccccctaatttatgtatgaccgttgaagatgatattgccagtactaagattccctgttacctctctagacagcaaatgtct

SEQ ID NO: 951642 - DNA, 543 bp, Homo sapiens
aagccttggcagcttcctcgtggtgttgagctgcacatgcatagaagtcaagaattgaggtttggagacccccacctagatttcagaggatgtattaaaataccgggatgtccaagcagaagcttgctgcaggggtggggctctgatggagaacctctgctggggctgtgcagaaaggaaatgtggggttggagcccctacacagagtccctactggggcacttcctagtggagctttgaggagagggccactctcctccaggccccagaatggtagattcactgatggcttgcactgtgagcctggaaaagctgcagtcactcaacatcagcccatgaaaccagccaggaggtgggctataccctgcaaagccacagggacagaactacccaaggctgtgggagcccacctcttgcatcagcatgatcttgatgtgaaacatgaagtcaatggagatcattttggagctttaaaatttgactaccttgctggatttcagacttgcatgggrcctgtaacccctttgttttggccaatttctc

SEQ ID NO: 951643 - DNA, 493 bp, Homo sapiens
gccatagatcataagcactccaacttttaagaaaaaaaaattccataataacaaatactaaaggagaatctcatgaagaatgacaaaaaattttagacakttttaataactcactagttactgttactagaataaataggcactaaaatgtaataaatatcagagccctaaaataaaataccagggtattgttcagtatgagtaaagagaggtgagaataaagagaatggggtaatgaaatcatgtgaacatgtcaaagaaggtgctgaagaaagtttaaattatcaaccagtaggaaggttatgaaaggtcaaagggcagagaaagggaatttcgtgaaaaggttttctggagcaagatgaaaattcccatgatcctccctgtctccagtagaaggagttgctgccacttctctcagaagtatgtgtcccctgaatttggaaggcttggtcatcaggaactagactcaactgataaattgcaagcagtccat

SEQ ID NO: 951644 - DNA, 439 bp, Homo sapiens
catctcattgggactggttgcacagtgggtgcagcccaaggagggcaagtcaaagcagggtgtggcgctgtctcacctgggaagcgcaaggagtctgggaactccctctcctarctaaggaacaccattagggactgtaccatgcactctggccaagatactgcgcttttcccatggtctttgcaacccacagatcaggagattccctccggtgcctacgccaccagggccctgggtttccagcaccaaactgggtggctatttgggcagacactgagctagccacaggagttttttttcataccccagtggcacctggaatgccaaggagacagaactgttcactcccctggaaaaggggctgaagccagggagccaagtggtttggctcacgggtcccaccctcatggggcctagcaagctgagatccactggcttg

SEQ ID NO: 951645 - DNA, 623 bp, Homo sapiens
gatacttctattcttccaattggatgaggctcatcctcttccctggcactatataagatacaaagcttatccccaaaattctctaccacttgcagggcggcctgcttttcagcagtagtcagggtttgattcaaaagtaacataacatccttccaggagagttcaaatacttgggttaaattctggaaagccactgtatacctgtcagagtcgtcggcaaacttgcaaaagattccccttgatttgccttaagtcctatagagaaaacggaacctgaatcctaatggggccggattcacctggcatctgttgtaggggcaggagtgagactgggacctgcctacaatgaagatttctaggatggggcaagcttgagaaagaatctggatatggaggatggggtggaccagaaggggcaggactggaggggttgactcccctactgaaggtacctctagggtttgcttccctagtcccttgggattgctctttgcagcctctcctgggatggctgcyaggactgaatcaattcaataacatcagcaaaggtctggattaccctgcaaggcaaagaaagtcagcaagtatggaaccttggaccatttgccctcatgtttacagaa

SEQ ID NO: 951646 - DNA, 782 bp, Homo sapiens
tcttggctccaatatctgttttgcttgtttctttgtttatgcaatcagtgttaaattgtccagtctaaaatcatgtattatattattttcaagcctcatggtaatttcaaatcaaaaagtgtaccacagatatacaaaaagtaaaaagcaagaaattagattataattcaagagaaatcaccttcactaaaaggaagacagaaagaaaggaaagaaggaagagaggaaaaaaatcaatcagaaaacaaaaaatagcagaagtaagtgcttatgactgataacattgaatttaaatgaactaaatactccagtcaaaagaaaaatagtggatgagtggatagagaagcagaacaataatctgtgacctacaaaaaaacacactttacctataaagatacatttagactgaaaataaaaggatggaaaaagttattccatgccaatagagaataaaaaaagtagaaatagccatacttataccagacaaaaatagatttcaacaaaagactataggaagaaattaaaaggtcattatatgataataaagagatcaattcatcaagaggatataataattgaaaatatatatgcacccaacactaaagcacctagataaatgaagcaaatattataagagctaaagaaagagacctcaatacaataatggctggacacttcaacaccccactttagtcattggatagatcttccagacagaaaataaataaagaaacatcagamctaatctgtactatagaacaaatgaaactaatagatattta

SEQ ID NO: 951647 - DNA, 677 bp, Homo sapiens
aaaaaggaaatgtctcaataatgagaagaaaacttgatcaatagatacagaaatgrcaaataagatggaattagtaggcaacaatattaaaacagttattgtaatgataacattccacaagaagaaggtaaagggaagctagaacatggaagtagagacatggaagacccagcttgaatttctagaggtgaaaaatacaatgtctgagatgaaaaatatactaaatggcatttaaaatagaatagatattatataaaaaaggattggtcaactggaagatgtagcagtagaaactatcaaaaatggaacatggagaaaataatggaaaaaactgaacagaaaatcagcaccaacaggactaatatatgtggaattggagttcctgaagaaggtggggaggagtagaagaaaaaatatttgaaaaaactgtggctgaaaaaatttaaatttgagaaaaactgtaaacccagagatctaagaaccaatgaacccctagcacaagagacatgaggatgacacactgaagcatatcataatcaaattgccccaaaccagtgacaaagataaaatctgaaaggttaccaaagggaaaaggacattatacagagaggaacaaagatgaaaataggctgagcgtagtggctcacacctgtaatcccagcactttgggaggctga

SEQ ID NO: 951648 - DNA, 775 bp, Homo sapiens
ggtcctggtcctgctgccatctgttcggatgcggaggtcacccaggtgtctgagggtgggacagctccacttccgaaggagccagggcagcaaacccaaaatccccgtgtgccgcggtaggttgggagattccttctgcctgggaagcctggctgggctgcagcagaggggcgacccttgctgtctggctcacaaaagccccctgttccccacgccctggcatgggtgaaggcgaccaaggagggagggtggcacccgctgtgggccgcgttgcacaggctgcctgcttgcgcgggttccctgctaccctggcctggatgcctggaccttcgattctgacacgaaatctgaatcctggactccaataggcaggtctctctggccagttcgggtacgggttccgctcaaagcacgctggcagggcatctttttcgttcgggttacaaaccagtctccttcgccgtcctcgtcctcgggctttcgcggggaaggggctgtcagaaggtgtcgggagagccattgcgagggcacctggccggaatttcacggacagacacgggcagagagagcgcggcggctcccgtgggcctcagttggcctctgtgctgcaggcaggtccaggcaggagtccgaccccgccagtggcccttataaagacccaccagcttyacgccttcatgaatatgcatgaacacccaagggccctgggtaacctgccctccgaagggcccagaaaccacagacacagggccttgtgtggtaggtgaaggtgggg

SEQ ID NO: 951649 - DNA, 582 bp, Homo sapiens
gaaaaggtacctatgtgacattggcctttgcactactgtacccttttgggtcaggaaaaagctgttcccttaaagtcctaaaatctcttctgtcaggtctaaagggtgggtgggaaayatagtttttaaattttagccacagatgttttattccttgcttaaagcagtgactagataaaggccactagaagagtctccaacgttcctttagaagcatgtgtctgagaacatcttcctgaaacactcccttgtctctgcccaaaatcaccttaggtaggaaaatcacaactcagcaggctgaggggatccaaggggatcattgagctctgaggcttatgagagaagagagagaggtctaagactttttgtgtataaatttatgggttccaagtgcaattttgctgtaagcacggatggcatagtggtgaagtcagggcttttagggtatccatcactggaataatgcacattgtacccattaagtaatttctcactgttcacctcttccatcccctcaccctgctgagtctccattatcattccactctctacatcaatacctacacatcttttagcacccgc

SEQ ID NO: 951650 - DNA, 579 bp, Homo sapiens
cgtgatgtgttgacgtgctattggactctaagagaacttaaggggcagtctaggccacaaggacttcaattatyaggcaagtcatattccgagctgggctcagagccagttgaatgtggagggtggggagaatgaggtctactgagacagcaaccagagaagctaagggagtgctcacaacaccactaacccactcccacctagcagcagccacacaacacagagaaacctgtgaatttgggagagggagcgcacagtgattagaggaaccagaataaaaaacagtgacaaccaggtaatacaccatgggcattgggctctgagaagcgctaacttcaggggtgacccagtacatttccagctgtggtagctgtggtgaaagacttctgtttgagaaaagcaggggggaaagtaaagggacctctgcgttgcacatgatatgccagctcaaccgcagtggggtagagcaccaagcggattcttagagtccctgagtccaggcctagggtcttcttggtcagcatttctgcacttgccctgggccaaaggtcgagtcccaggcattgcagaatttatctc

SEQ ID NO: 951651 - DNA, 579 bp, Homo sapiens
cgtgatgtgttgacgtgctattggactctaagagaacttaaggggcagtctaggccacaaggacttcaattattaggcaagtcatattccgagctgggctcagagccagttgaatgtggagggtggggagaatgaggtctactgagacagcaaccagagaagctaagggagtgctcacaacaccactaacccactcccacctagcagcagccacacaacacagagaaacctgtgaatttgggagagggagcgcacagtgattagaggaaccagaataaaaaacagtgacaaccaggtaatacaccatgggcattgggctctgagaagcgctaacttcaggggtgacccagtacatttccagctgtggtagctgtggtgaaagacttctgtttgagaaaagcaggggggaaagtaaagggacctctgcgttgcacatgatatgccagctcaaccgcagtggggtagagcaccaagcggattcttagagtccctgagtccaggcctagggtcttcttggtcagcatttctgcayttgccctgggccaaaggtcgagtcccaggcattgcagaatttatctc

SEQ ID NO: 951652 - DNA, 680 bp, Homo sapiens
gatgtcagaaggcagacaggctcctgggtagaaagggtcaggtctccagtgaaactccaccttcaggccaggaacagcctgaggccttggggctgggctgccagctccatggaccagagtgagaaaatatcgtgctttttctgggtgtccatgatccaatcagcatgcacttcctcccctgtgaagcccataaaagcccagactcagccagacttgggcagaaaatgggatgacctgcctgtggataggagctacccactccttggtcactggtctcctctctgctgagagctggacacttgtcagaatgacctgcatgcagaaaggagctactcactgcagttctcctctgcccggttctgttgttgaataaagcacctcttcaccttgtgggtctcctctgccctgttctgtcactcaataaagcacctaattattcctggacatgggacaagagcttggagcctgctgaatgacagggctgaaagagctgtaacacaaacagggctgaaacaagccccttgctcgccatattgtggcaacaagaaggagagaagagagaaagatagaagagctatggcccttcagggagccccgacctggaaactctctgagccagggctgtaacaccctctytggggctctgcagttcctggtacctccaagtttccaggtgccac

SEQ ID NO: 951653 - DNA, 579 bp, Homo sapiens
gaaaagcacaatgaattccaaatagaataaactcaaagagatccacaccagacatgttataatcaaacttttggaggacaaagaaaaaaagaaaatcttagaagcattgagagagaatcaacttgccacatacaagagattctcaatgataataataactaatttgtatcagaaattatagaagctagcaagtaggggaattatatttaaattgctaaagacaaaactcttaaccaagaattctgtatttggtaaacctcttcttgcaaaatgaaggaggcattacagataaataaaaattcagatagtttgtcattagtagacctttcctaccagaaatgttaaagaatgtcctttaggctgaaataaaagaaaattaataatctgaatacatacaaagaaaagaacaccagtaagggcaatttcataagcagatatgcatgtcaggattgatatatcttttgtttgaaactcctcttatttccttatgayttaaaaggcaagtacaaaaaacagtattataaatctgtgtagataaaaacacagtgtttaaagataatatttgtgacaacaacatat

SEQ ID NO: 951654 - DNA, 722 bp, Homo sapiens
taacttgctgtgctcccatttgtctatttttgatttggttgcctgtacttatggggttttatccaagaaatctttgcccggggcaatgtcctggagaatttctttaacgttttcttttagtggtttcatagttagaagtttcatagatttaagtctttaatccattttgattttatttttgtatgtggcaggagatatgggtctagctctattcttctgcatatggatatccagttttcccagcaccatttattgcagagaaaatccttttcccaatgtatgtttttggcacctcttttgaatattagttcactgtagatctatggatctctgtgttttgttcttttccttcagtctatgtatctgtttttatggcagtaccatgctgtttttgttactatagctctatggtaatatttggtgtcaggaaatgtaattactccagtttgttatgttttgttttctcaagatgcatttgactattctgggtcttttttggttccatataaattttagaaacactaattgggaacctatactgagatagtgtggaggtaaaatgtggggttggagcctgcacacagagtccycactgggtcctgcctagtagagctatgagaagatggccacctccctctggactccagaatggtaggtcaattggcagcttgcatcatgaacatgaaaacatgaaaaagctggacgcatccaactacaacctg

SEQ ID NO: 951655 - DNA, 601 bp, Homo sapiens
ataaccagaggcctcttctggttttttggtgttcctcttcttgaaaggtccatacttaatatttccattatgatgcagtaaagatggaaggcaacagtaggagccatagaagtacaacaatccatggactctttagcctcagtagtagcacagaatacacaggccctagatatccttacagtcaaggtaggggcacctgtgcagtcttaaatgaagcatgctctttctggatcaatccctctagtcaagtagaagaaaacctacaagtgcttaaagatccagttaaaatcattgacaggttaagagaaaaatgcaggctccaaccctggatggttacaatttctctttaatgaattccagtcttctgtgtggaactagttagctccattgctaagccccctcttgctcatatgttttatattaatgtttagacgttgtctactcaatactatagctcaaattgtttyctctcacctagaaacaattaaactccaaatggtgctgcagactgaaccacacatagacacgcctttcttccaaggaccattagattggcctcaggaggagccctagctgctgttcctaatacaatgcacctttt

SEQ ID NO: 951656 - DNA, 580 bp, Homo sapiens
gcttgaaacccagggccctggtggtggaggcacactaggaaatctcctggtctgcagattgcraaaacagtgggaaaatcatagtatctgggctggatagcacagtccctcacagcttcccttggctgggaaagggaggccacctgcaccttgcacttcttgggtgaggtgatgccccaccctgcttctgctcaccctccgtgggctgcacccactgcccagccagtcccaatgagatgaacagggtacctcagttggaaatgctgaaatcccctgcctgctgcattggtcttgtggggagctgtagaccagagctgttccaatttggccatcttgccaggtcctcacatgtatggattcttataaactcaaggtaaagggatggaaaaaatatttcatgcaaatggaaaccaaagtgagcaggagtagctcttatatcagacaaaacaaactttaaagcaataacagaaaaaaagaaggttcaatttacaataataaaaagatcagtctaacaaaaaatgttacaatcctaaatatatatgcacctaactctagagctccagattcataaaacaattac

SEQ ID NO: 951657 - DNA, 496 bp, Homo sapiens
gagggctgctttgccgaggttgtgtcccttatggaatagaccacatccatggctgattgatgagggagcataaagatctgtatgttagcccratttgaaacaactctgaggaatcattctagctctaaaaagctaacacgtggttggctaagcctgtcattggatctgtataaccacttgacttctctatctgcccaattctgctttcttcttcccttccacaagtgttgatcccaagggcactcttcgaaaagtcttgcatgctaaactccacctcagtcagcttccaggaaacttaatctatgacaagtgacatgacattgcttatgccatagaagggtcttcctggctgctacaaggaaagggagcaggatggaagctccctttcctgcttgttgttaggagactactacagaggtccagatggaagatgacagttgcttgcgctagaacggcagcagagggaaggtaaaaagtagttagattctagggatac

SEQ ID NO: 951658 - DNA, 590 bp, Homo sapiens
gcaaacatatccatgtaactgtcactcaaaaaatataaaagattacatggatccccaaagtctccctcttgcatctttccaggcattaccccactctaaaaggaaacacttgtgtgatcctgatgatcatagaygcatttgtctgctcttgaacttattataaatggaaataaacagtacttttactcaacatattgttcaaaagagtaataattattattactagagttcattcttttatatatagtggtattaacatatgtcaattcattaattcattgtaatatgactgacatttgtgtcatttctggttttgggtgtttatgaatgatgctcctatgcattcttgtgtcatcttttggtgcagataaccataaattgttgttaattatgtactgaggagtacaatagcaggttattggatatgaaagagttcagcattagtaggtactgccaaacagtttcccagagtgattgcaccaatttacactctcaggagcattaatgcaattatatattcccactaccaacaggcattgtcctccctcttcttcaaattttaggcatttaagtgaatatgtggtgctcct

SEQ ID NO: 951659 - DNA, 694 bp, Homo sapiens
tttctcctcagaaaatgggattttcttttctactgcattatcaggctgcaatttttccaaacstttttgctctgcttcccttataaaactgaatgcctttaacagcacccaagtcacctcttgcatgctttgctgcttagaaatttctcccaccagataccttaaatcatctttctcaagttcaaagttccacaaatctctagggcaggggcaaaatgccacgaatctctttgctaaaccacaacaagagtcaccttagctccagtttctaatgagttcctcatctccatctgagaccatgtcagcctggaccttattgttcattcactattagcatttttgttaaagccattcaatgagtctctaggaagtcctaaactttcccatgttttcctgtcttctgagccctccaaactgttaacaaccttgcctgttacccagttccaaagtcacttccacatttttggttatcttttcagcaacacccactctactggtaccagttttctatattagtccattttcatactggtgagaggcaaggaggagcaaatcacatcttatgtggattgcagcaggcaaagagagcttgtacagggcaactcccgtttttaaaaccatcaaatcttgtgagacccattcactatcatgagaacagcacaggaaacacccacctccattattcaatcatctc

SEQ ID NO: 951660 - DNA, 571 bp, Homo sapiens
gatacagggcccatggatgtccgaaatccagcggggcactcaaatctcaaaggtccaaaatgatcttctttgactccatgtctcacatctgggtcacactgatgcaagaggtgggttcccatggtcttgggcagctccacgcctgtggttctgcagggtacagtctctctcctggctgctttcacaggctggcattgagtgcctgcagtttttccaggcacacagtgcaagccctcagtggatctactattctggggtctggaggatggtgatcctcttctcacagttccactaggcagtgccccaacagggactctgtgtgggggctctgactccaaatctcccttctgaactgccctagcagaggttctccatgagggccctgcccctgaagcacacctctgcctcagcatccaggtatttccatacatcttctgaaatctaggcagatgttcccaaacctcaatccttgatttctgtgcacccacaggctcaacaccacatgggagctkccaaggctgtggcttgcaccatttgaaaccatggtctgagttctacgttggcccctttc

SEQ ID NO: 951661 - DNA, 612 bp, Homo sapiens
acatgtatagatttgtgcaattaccagcaccactawcaggataggggacaatgttatcacccccacagaactccctcatgtatccttttagaataaagcttccaccaccccaaacctctgataaccactgatctgctttctatcattatagttgtgtcttttccagaatgtcatataaatgaaattgtaaagtatgtaaccttttaagactggcttgtttcactcggcataatgactttgaaatccatgcatgttgttgtgtgtgtcaatagtttgctcttttttattgctaagtagcttttcactgtgtgaatataccatattttctccattcaagtgttcgagaaactttgggttgttttgcaatgaaaggttttgacaataatgaatatgggtgcttcaaacatttctctaccctttagtggcattgctgcattatctggtaagtgtatgtttatctttgtaagaaactgtcagactgtttttcagaatggttataccactttgcattccctccagcaaagtaaaataaatccagttcctctgtatccttgccagtggttggtattgactttttaaaaaatttttatccattttaatagtgtgtagtgg

SEQ ID NO: 951662 - DNA, 711 bp, Homo sapiens
aagcccctactttaactggaggaccacaatgacgttttgtttcccctggaatcagcgtcagctcagagccagtgttcagtatttccccaaatgtctgattatttccctttcccaatgcacagttatcctggtaaacggctggaggtctccttggggaagcatggcagaaagattcactgtataaattttcagtattgtatgtggtgtccttccttaagagaacccggcctccccttcattcaaggggttctgggtttgtaaactggctcaagtctgaaaattgattgaggggccatgattcactgcttttataattcaaattagtctttgtttccatttgatctagaagttttctgcttatataaattaagtaggaatgcagctagcttcttaccaatttcacttctaggaatgccatgattgattagccaatgccagaactctacattagtcagattattctgattgctgctttgcctctgctgtccattacagtaggtacacccactatgcctttgacagttgagtgctaccatttggcccctgccaccttgggatccaattcttcccattgtatttaaattttgtagttgagtgactgtcrttcccaccgttagatatgacatgcagagaagggcaattacagggctcttcaaagatgcaagtgctgccctcacgaatctgttttgcaaggcattggtcgagggttta

SEQ ID NO: 951663 - DNA, 610 bp, Homo sapiens
gcaacagtaacccaaacagcatagtactggtacagaaacagacacatagaccaatggaacagaaaagagaatgaagaaataaaaccacacacagccatctgatcttcaacaaagttgacaaaaataggcaaygcagaaaggactccctgttcaacacatggtgctgagatagctggctaggcatatgcagaagaatgaaactgtcccctacttttcaccatttacaaaaattaactcaatgtaaattaaaattttaaatgtaagatctcaaactaagaatcctagaagaaaacctaggaagcaccattctggacagtagctttgagaaagaatttatgacaaagtactcaaaagtaattgcaacaaaaatgaaaattggcaggtgagacctaattaaactaaagagcatttgcacagcaaaagaaactgtcaaaagagtaaacagacaacctaccaaatggaagaatgtatttgcaaacaacgcatccaaaaaagatctaatattggggatctttaaggaactgaaacaattaaactagcaacaaaacccaaataactccattaaaaagttggagaaagacatgaatggacacttctcaaaagaaatact

SEQ ID NO: 951664 - DNA, 579 bp, Homo sapiens
gggaaagagtacaaaagagagaaattttaaagctgggtgtccgggggagacatcacatgttggcaggttccgtgatgctccctgagccgcaaaaccagcaagtttttattagcaattttcaaaggggagggagtgtatgaatagggggtgggtcacagagatcacatgcttcaagggcaacaaaagatcacaacgcagaaggtcagggcaagatcacaagttcagggagaaactagaatcattaatgaacttccatgtcccgctgtgcacacattgtcattgataaacatcttaacagggttcaagagcaaagaaccaatctgactagaattcgccaggctggaatttcctaatcctagcaagcctgggggtgccataggaggccagggcgtgtttcatcccttatctacaactgcataaggcagacacccccagagcggccattttagaggcckccccctgggaatgcattcttttcccagggctgttaattattaatattccttactggggaaagaattcagctatatttctcttaacctttttcagtaataatagaaatatggctctgttctgcct

SEQ ID NO: 951665 - DNA, 619 bp, Homo sapiens
ggaaattttaagatatgctgtctctatgctggaaaaccaggaaagccaatagtgtaaytcagccaaagtccaaaggtttgagagttaagggagctaatggtgtaactgcctgtccaaggccaaaagcctgagaaccagggaggagcagtaggggatggatgagaggcagctctggggtgagtctctgagttcaaaggcccaagaaccaggggctctgatgtccaagggcaggagaacatggctatcccaactcaagaagagagagaaataattggcccttcctctacctttttgttccatttggaccctcgatggataagatgatggctgcccacattggtgagggagaactgtgtttactcagtctactgagtaaaatactgatcttctctggaaacaccctcacacacacacccaaaaataacattttatcagctatctgggcattccttttcttagttaagttgacatataaaattatcatcacaatctggcaacatgcaagacacatatcattctaagagaatgccttgttgataatgtccaatatttcatttaattttaacttatccaaggtccttcaagaacaatatacaaggaggcccagattggctctgtc

SEQ ID NO: 951666 - DNA, 585 bp, Homo sapiens
tgaattgattcacagagaagaaacacaccgcatatcaagtacctcactcttatatttacctgcaaggtctggaaggatgctagctctatagggarctaaatgaagtctatagccctcaaaacaaagtgattacaaatgcacaagtaaaatgcaaacatttgagttacgtatgcatgtttgcctttattttatcttacttcttttgttttctttctttctttccccttgtcctgttctctgtcttagcctggctttgaagtgatctagccattaaaatcctaggttcctgttgtaaagtagaatcctttccaaaatataaaaacaaaatctcactcacttcttacaaatgatgatgaggatggtaatcatgatgatcgtgatgataattgagtccagaaacttactgttttcctacaatttctagataaaaaaattccagaaataatttttatccaagattaacacagactttagaatctgaaagactgtttacacatcccagctctgcactgaccaagtatgtgatcttgggactcagttttcttttctgtaaaaagatacaatgcacttacctcaaagagagaa

SEQ ID NO: 951667 - DNA, 597 bp, Homo sapiens
gcctccacagaccttcaggtaaccctcccaccctgtccctccacacccccaggagaacaccaaggctggcgggaacatcagggctgcagccttctgtgtgctgtttgctcaggccccacaaatatcctgtccaaacaggggcctggcggagatggccctgtcaccaccctcctgccaggtgtggaaacttctctgcagcattttcaaagccggaattctttaaggctttaatgtcaagggactgggactggctagagcggtcatgacctctgcactggattgttcagggaacccattgtcctatgatcaaaggagcttagaatcctcagaaaatgggtaatacctgcataagataagaaacaaatacaaattacaaaaggggtaaacagtcagtttccttcctccctccccagggctgagtccttccccaagatagccacagttaccagtttcttgggtatccttccagaaataatccatgcatatccatgtatctttttaggaagacaaatggtagcttattagagatactattcaggattgacccttaaaaaattyttcatagtacatgtggaaattctttcatgtaagtgcatg

SEQ ID NO: 951668 - DNA, 458 bp, Homo sapiens
cacagtcgctggagttaacagcagggaccctcatcmctaagggtcttcacctttgtggttcctgctgaatctctggcacccaaaaggtgaggggggcaggctagaggacggggctggaagcaggagagaaagcctctcactccctctctccctactcctccacccccaggttctgggccctctgtgccaggcaggcttgcctacctgctaatcccacctttatatatggggtctatcactgaccaaaacgtccttatgtggcccttgactatacttggaaccacagtcccaccaggtccaccggcctagaccttgaccaggaaggtaccagggagaggcctgaggggttggggcaggggggcgagtgcagagcctgaggcctgccagcttgccctgggctcagctttgccccttgagggccagccatccagacagtcctgaagcctcagtctgcccac

SEQ ID NO: 951669 - DNA, 640 bp, Homo sapiens
aaaaagtacaatgcctcaggctgggcagggtggctcatgcctctaatcccagcactttgggaagtcgaggcgggcagattacctgaggtcaggagttgagaccagcctggccaacatggtgaaaccccgtcactactaaaaatacaaaaattagccaggtgtggtggtgggtgcctgtagtcccagctacttgggaggcatgagaatcatttgaacctgggtggcagaggttgcagtgagcctagatcacaccactgctctccagcctgggtgacagagcaagaatccatctcaaaaaaaaagagtacaatgcctcaattagacaaaagcaatatggttttattttctttgagatagattgcacagcagtgtgaatatagtaacagtgtttcatacatttcaaaataactaagagagtaaattttaaatgttctcaccacaaaaaggaataagtatttgaggtgataaatacattaattagcttgatttattattccacgttgtatttataaatcataacatcactttgtatcccataaatatattcaattataatttrccaatttacaattaaaataaaatttaaaaaattctacaaggaaacaaacaaacaaaaaacaagaaaaagaaaacaggataa

SEQ ID NO: 951670 - DNA, 551 bp, Homo sapiens
caggctctttcacaagctggcctcaggtctcatctctgaaggaatttaattttacatttaaatttgagtcttagtacctcttaggcttgcttcagaamgaatggtttccttgtaattgataccttaactatttcttaaaataaacaaaaaacctagcaaagacgtagaataaaagcaccagatggttaaacatatagatctggcagtgtatgcaagaaaggaagtgatcatgtcaggaacctcagatatgtttgttactaaatgtaagaataaaatagcaccaacccccctgactgccatggcaaaaacagaaaagtgatgaattgcccggctttgattatgtgatcaaaagtgtcattatccattcttcagaggagacaaccttcttctactgggcagaagatctgaggaagagttttatcacctgaatccttatatgagggatacaaagtcacataaaggaccagatcttcaacactgatctttcaggcaatggggaaacattctacatataacaaattattatactgacacttaaataaaagctgaga

SEQ ID NO: 951671 - DNA, 566 bp, Homo sapiens
aattggctggggttcattttcaaacgcacattcatcaacccaactcagacctgctgcatcagagtttttgaagttgaaggctagactctacatttttaacaagcatttttgtgacttttatacgactaaatttccagaacactggcttttgtgggaagcgagtgtttggagagggtagggaattgctgccagagctgaacattaccctatagctggtgttattttaccatactttttttttttttttttttttggatggagtctcgttctgtcacccaggctggagtgcagtggcgtgatctcagctcactgcaaccactgcctcctgggttcaagcgattctcctgcctcagcctcccaagtagctgggactactggcacgtgccaccacgcccggctacttttttgtatttttagtagagatgggctttcaccgtgttagccaggatggtctcaatctcctaaccccatgatctgcccacctctgcctcccaaagtgctgagattacaggtgtgagccatsgcacccggcctccatgagtgttttaacagttagtctatatgta

SEQ ID NO: 951672 - DNA, 627 bp, Homo sapiens
tttttatttctgtttatgtggtgtaccacatttattgacttgcaaatgttaaaccatccctgcatccctggtatgaaaaccacttgatcatggtggattatctttttgatatgctgttggatttggttagctagtaatttgttgaggatttttgcatctatgtacatcagggatattagtctgaagttttctttttttgttatgttcttctctggttttggtattagggttataccggcttcatagaatgatttagggggggttccttcttttcttttcctgtgaaatagtgtcttaggcaaagacttcatgacaaagaacccaaaagcaaatgcaacaaaaacaaaaattaaaaatgggacttaattaagctaaaaagattatgcaaaggaaaagaaataatcagcagagttaacagacaacccacagaatgggagaaaatcttcataatctgtacatctgaccaaggactaatatccagaatctacaaataactcaaataaatcagcaagaaaaaaaacaagcaatcccatcaaaaagtgggctaaggacatgaatagacaattctcaaaagaagatatacaaatggccaacaagcatatggawaaatgctcaacaacattaatt

SEQ ID NO: 951673 - DNA, 714 bp, Homo sapiens
caaggccggcaatatacctttactgtccaacctcaggggtatatcaactttccagctttgtgtcataatcttatttggagataatttgattgcttttcgcttctgcargatatcacactggtccattatattgatgacattatgctgattggatccagtgagcaagaagtagcaaacatactggacttattggtgacacttttgcataccagaggatgggaaataaatttgactaaaattcagggaccttctatctcagtaaaatttatggaggtccaatggtgtggggcccattgagatatatcctgtaaggtaaagggtatgttgctgcatttggcccctcctaaaactaagaaagagacacaacactttgtaggcctatttggattttggaggcaacacattcctcatttcagctgtgttactctggccaatttatcaggtgacctgaaagttgctagctttgagtggtgtccagaagaggaaaaggctctgcaacaggtccaggctgctgtgcaatctgctctgccacttgggcgttataacttagcagatccaatggtgcttgaggtgtcagcggcagacggagatgctgtttgcagcccctggcaggcccccataagtaaatcacagcagaggctgccaggattttggagcaaggccctgccatcttctgcagataactagcttccttttgagagacatctcttggcc

SEQ ID NO: 951674 - DNA, 450 bp, Homo sapiens
atgttccaattaaaaggcaccaactggcaaattggatagtcaagacccattggtgtgctgtagtcaggagacccatytcatatgcaaagacacacacaggctcaaaataaaggaatggaggaatatttaccaagcaaatggaaagcaaaaaaaaaaaaaaaaaaagcagtggttgcaaacctagtctctgataaaacagactttaagccaacaaagatcaaaaaagaccaagaagggcattacataatggtaaagggatcaatgcaacaagaagagctaactatcctaaatatatatgcaccaaatacaggagcacccagattcataaagcaagttcttagagaccaacagtgtgacttagactcccacacaataatagtgagagactttaacaccccactgtcaatattagacagataaacaagacagaaaattaacaaagacatctac

SEQ ID NO: 951675 - DNA, 450 bp, Homo sapiens
atgttccaattaaaaggcaccaactggcaaattggatagtcaagacccattggtgtgctgtagtcaggagacccatctcatatgcaaagacacacacaggctcaaaataaaggaatggaggaatatttwccaagcaaatggaaagcaaaaaaaaaaaaaaaaaaagcagtggttgcaaacctagtctctgataaaacagactttaagccaacaaagatcaaaaaagaccaagaagggcattacataatggtaaagggatcaatgcaacaagaagagctaactatcctaaatatatatgcaccaaatacaggagcacccagattcataaagcaagttcttagagaccaacagtgtgacttagactcccacacaataatagtgagagactttaacaccccactgtcaatattagacagataaacaagacagaaaattaacaaagacatctac

SEQ ID NO: 951676 - DNA, 836 bp, Homo sapiens
agctgaattctaccagaggtacaaagaggagctggtatcatttcttttgaaactactctaaacaattaaaaagggtggactcctccctaacwttttgaggccagcattatcctaataccaaaacctggcagggatacaatgaaacttcaggccaatatccctaatgatcattgatgtgaaaatcctcaataaaatactggcaaacagaatccaccagcacatcaaaagctcatctaccacgatcaagttggcttcaacccgggctgccaggctggttcaacataagccaatcgataaatataaatcatcacatacatagaactaaagacaaaaaccatgtgattatctcaatagtcacagaaaggccttcaataaaattcaacatctcttcatgtttaaactctcaataaaccaggtattgaaggaacatacttcaaaataatgaaagctatttatgacaaacccacagccaatatcatatcgaatgggcaaaagccaaaaacattccccttgaaaactggcacaagacaaggatgccctctctcactactcttattcaacatattattggaagttctggctagggcaatcaggcaagagaaagaaataaagggtattcaaataggaagagaggaagtcaaattgtctttgtttacagacgacatgatcctatatctaaagaaccccattgtctcagcgcaaaagcttcttaagctgataagcaacttcagcaaattctcaggatataaaatcaatgtgcagaaatcacaagcattcctttacacgacaacagataagcagagagccaaatcatgaataaactccaatttacaatt

SEQ ID NO: 951677 - DNA, 592 bp, Homo sapiens
tcactgcagcctcaacctcaggcttatgcgttcctctcacgccagcctcctgagtagttgggactacaggtgggcacaccatgcctggctaaaattttaaawtttttttgtagagactgggtcttgctatgttgcccaggctggtctcgaactcctgggctcaagtgatcctcctgcctcagcctcccaaagtactgcgattacaggcatgaaccaccatgcccagcaggttaaagatcttgaattgaaaaggttatcttggattattgggatgggccctaagtgcaatcacaagtatccttataagagagaggtagaggatgattcagtcccgatggaagagggaaaggcaatgtgactgtggaggcagagattggaatgatataaccacaagctatagaactctggtagccaccagaaactggaagaagcaaggaatgcatcctttcttataaccgacaagggcagtatagacctactgacattttgatttgggcccagtaatattgatttcagacttctggcttctggaactgtgagagaatatatttctgttgttttaaaccactaattttgtagtaattattatagt

SEQ ID NO: 951678 - DNA, 632 bp, Homo sapiens
tctagatccttgaggaatcgccacactgacttccacaatggttgaactagtttacactcccaccaacagtgtaaaagcgttcctatttctccacatcctctccagcacctgttgtttcctgactttttaatgattgccattcgaactggtgtgagatggtatctcattgtgattttgatttgcatttctctgatggccagtgatgatgagcattttttcatgtgtctgttggctgcataaatgtcttcttttgagaagtgtcagaaataacagtatttcttttacagagtttatataaaagttcaataagatcatgggtaacacatttagtacagagtctgcatcatgtgttcaggaagtatttacttgctatgataattactattaacaataaagatcttaaataatttcatatatagaatgtctttgtaaggccgaattgtcagcattgaaaactaattttccaaaaccatttttatcatcttctgtttataaccttcctgtcgtatccackcataaccctaaggacggaacgtgccgcagatctgaggtctgttgagaggtatggcactgtccttggccccagcaagtcatatcccactcttaagacctgtgacctggcctggcacggt

SEQ ID NO: 951679 - DNA, 196 bp, Homo sapiens
ctcctcaccccagcccctgggactgcctctcgctggccaagaactacagcttcccctaccccttctcagtccgtctcctggccccgctggacaggcgctcaggtccacacacccccaggagggcagaagcatgtggctggggccycagactaggcaggcacgtgtgggtttctattaacacgactatactgagcac

SEQ ID NO: 951680 - DNA, 782 bp, Homo sapiens
gaaatgaactgaaggcacagaagttaaggagcttgtgcacagtcccatagctgtttaatgctgggatttgaagcgtagtagtccagggccgaagcccgcatttaccccctcatgacacagcctcatttataatttttggagcacatattatgaagtaggtgagctggaaaagtcacaggtggtggtcagatagtgacatgcttgacatcaagagttcaaaagtttgaacatgggaaaaggaggtggggtagagaaaatatcactggttatgaggaggtcaagtaaataagaagtccgggagttaaatgaaagatcatcgcagatatcaaggccttcaagggtagtggcaagaggtaagggaacagatttctttacagcaggatttctgaaagagtgttgtggtgccaatttattttatgagatgccaaaagggagaagcatatgttgcatttctcatatttattcaccatgatatcctttctttcagaacacatgtattctgagaatcataatatattcctaggaatctaatccaaaaaacattactgcagagaaatgagctccaagacaaagcccaggtcacatccccaccccatttcccatgcccacatatccaaccctgatcccactcaaaattaaccaagaaacagttatgaaactgtttatgcctcactgaggggcaagcatgtgcctttgaagaattattcatctcaaactctgaaagcttccatcttccttcatctgaacagtttagtyaaaactacatttctgcttgccagaaa

SEQ ID NO: 951681 - DNA, 741 bp, Homo sapiens
tgtttctaagaggtcagatacttcccatgtctttccacagttgtgaccttaaaatacatcactattatttgacgctcatgctgctgcagcttgactgccataagaggactcaaggagttctatttgtgaaaatataatttatatttttcaaaagactactcaaccaatactcttgttattatactcccacaaggtttcctattcctcatgcttttctttctgctgaaatgttccttcagatctatactgaacaataaacatatgtcaatacattcaagtcccaggcattaacttttcaggtcccagcttttacaatactgcagtttaaaatgtctctctatgcatccaattagaacttttgtacatctagatgtaagacagaatcatatatttgcccatagctggaatcagtgtaattctttcacttttagacaaatgtacttcagatcccatgtgaatttctagtgaattctaagccttagtttttacactataccactttggcttcttaaattaatcgtacaaattcccagaatttcactatgaagcagtaatctacttagcacatagattctccattaagcatattctgaaaaatatcaaaaataatttcggggtgacatatgaagaggcgagaaaataaagcctaagcctctgcctttatgttttcatatcatgcaatactaatattaaamaaaaatcaataacacatagtacctcagaatcccaagaattttcttc

SEQ ID NO: 951682 - DNA, 593 bp, Homo sapiens
aactgctgaatagatttcaagtagcaactgtcatgttaggttctttccaaattcctggcccacaaaatcaraaacaaagtcaaatgattaatgttctacaacactaaatttgtgggaaattagttatacagcaatagtagttgacataggaaagaacactcttcatctgataaaaattatctgtgaaaacttacagctaacatcatattcaacaatgaaatattgagcatttccccatgctgctggggaaaagacaaggatttccttttcaccacttttattcggcttggtattgaaggtcctagccagggcaataagtcaaggaaaagaaataatagttacaaagactggaaaggaagaggaaaaatatccttcattcacacatgatgtaattatgtacgtttaaaaaatccaaaagaatctacaaaaaataattagacatgatgagtgaatttaacaatgtatatggaatcaaaatcaaatatttaaaaaatacatatttttacataacaagtgaaaaattaaattttagaaaattaatatttcactaagcataatatatcaaatatctgtaaataaatctaacaaagata

SEQ ID NO: 951683 - DNA, 620 bp, Homo sapiens
accaactaagtatctgctgtcttcaagagactcaaataacacacaaggactcacataaacttaaggtaaaggggtagaacaagatattccatgcaaatgggcaccaaaaacaagcaggggtagctattcttttgtcagacaaaacaaactgtaaagcaacagcagttaaaaaagacaaaaaggagctggacacagtggctcatgcctgtaatcctagcacgttgggaggctgaggcaggaggatcacctgaggtcaggagttcaagaccagcctggccaacatggtgaaaccctgtctctgcaaaaatacaaaaggtagctggtatggtggcatgcacctgtaataccagccactccggaggctgaggcagaagaagcacttgaacccaggaggcagagtttgcagtgagccgagatcatgccattgcactccagcctgggtgacagagcaagactctatctcaaaacaaacaaacaaacaaacaaacaaaaaacagacaaaaagggacattatataatgataaaacgatttgcccaacaggaaaatttcacartcctaaatatatatgtacctaacactggagctcccagatttataaaataattactactagacctaa

SEQ ID NO: 951684 - DNA, 776 bp, Homo sapiens
tccaaacttttatgctctgcttcccttataaaactgagtatctttaacagcacccaagtcacctgttgaatgctttgctgcttaraaatttcctctgccagataccctaaatcatctctctcaagttcaaagttccacaaatctcttgggcagggggaaaatgcttcctgtttctttgctaaaacataccaagagtcacctttgctccatttcccaacaagtttctcatttccatctgagaccacctcagcctggactttcttgtccatatcactatcagcatttttgtcaaagccattcaaccagtctctagggagttccaaactttcccacatttccctatcttcttctgagccctccgaactgttccagcctctgcctattaccaagttccaaagttgcttccacatttttgggtatcttttcagcaatgcactctaatcttaccaatttgctgtattagttcattttcatgctgctgataaagacatacaagagactaagaaatctacaaaagaaagaggcttattggacttacatttccacgtggctggagacctcacaatcatggcagaaggtgaaaggcacgtctcacatggcagcagacaagagaagagagagcttgtgcagggaaactcccatttttgataccatcagatctcatgagacttattcactgtcatgagaaaggcatgggaaagacctgcccccatgattcatttatctcccaccaggtccctcccacaacatatgggaattatgggagccacaaggtg

SEQ ID NO: 951685 - DNA, 634 bp, Homo sapiens
actgggctgcccaccccccaaccaccttcagttgcagatacacaccaagaattacctcctccaaccaggtatggggatgaatggaaacctgttgttgcctgcccctgtggcctacccctgtggcccctgaaggcagggaacagaaaacctggctttggccatggaccctccaagaccccactgccagtggttggccatcatagctctcttgggggagggcctacatcatgacttgcatgtcactccttgggtgttcaatacatggcccctgcggttgaccgttcatagagaaatggccagggaaggaacccttctccaggggacatatgtactgtctgtgtggcctatcatgagcttccctgtgactttggcacagatacaagactcaaaggaaccatgcggagctgataaagtgtggcaccatctcccagggcaaaaactgttggcatctgcattgttatccagagatgaaaggttagactgtattttgcctgagggacatgatttaactctgttagtacytgtgcctgctctgtcatttcgaccgtaggttgacatgctccaactgcattgtggactgggcccacaccttcactgaggtgaccaatgtttccaactgttggatctgcaccat

SEQ ID NO: 951686 - DNA, 682 bp, Homo sapiens
actgtctttgtctggatttgtatcaaagtgacattggtctcccttttctggaagaactgttataaatctagaattattttttctctttaatgtataaatgtatagataatagcatttatccatgaagccattgggcctggaatttgtgtgtgtgtgtgtgtgtgtgtgtgtgtgtaaaagtgtttttgtttctttttaaccacaattcaattccttcaataaatatgaagctattcaggttatttatcttgagtgagctttcctaacttgtatctttcaaggaattttccaatttcatctaagttattaaatttattggtgtcaatttgttcataatattccccccttgttatccttttaatatgcagaaactatagtaagatcagttctctcattcttgatataatttctatactttcgttttctttcgataaattgtattttaatttcatgccattaaaaatttctatttgccttcttttttgacccatgggttatttagatgtgcttatttccaaatatttggagacatttcagataccattctgttattgattgattygcattttaatttcattttgttcagagaatgtactttgtatgacttaaacacgtttaaatcaagacttgttttgtaatacagaatatagtttattattgtgaatgtgccatgtccacttga

SEQ ID NO: 951687 - DNA, 605 bp, Homo sapiens
agagcagcctggccaacatggcaaaacygcgtctctactgaaaaaatacaaaaattagccaggtgtggtggtgcatgcctgtagcccccagctactcgggaggctgaggcaggagaattgcttgaactagggaggcggaggttgcagtttgccgagatcgcaccattatactccagcctgggtgacagagcaagactccctctcaagacaaacaaacaaacaagtcaaacaaacgaagagacaaaaaaaaaaaatatatcaggcttagatcacatttaacatcctctgcaaagaatgggcatggaaataccaagttcctctgactaacttggagaaaaaaaatatgaatgggaactgctgcttccacaaatacacccatgcaaatttaaccagccccggggtgctgctgggagatgagattagagggactgacttgagtcacctacaaacctgaagaaaatcttccatctgctgacaaagttcaccatcccgctggatgttttcttttagtgattttgtcctgacaaacagcaagtgcagttctgcctccgtgttctccagagataatctaaaagaagaaaggggagagtgggcagttggaacaa

SEQ ID NO: 951688 - DNA, 755 bp, Homo sapiens
aatgctccacactctttggcaaagagattctacttctaggaatgtttcctagtgaactattgagagtctgtgcaaaaaaatgagcagcgaggatttttttagtgttatttataacagggaaatatttaatgtccaataatagattgactatttaaatgatcacatatttctcaaatggaatactacagcattaaacattattttagaagaacatttaataatctggaaagacatccatagtattttaaataaaaaagcagattgcaaaactggatggtagtatgctcttactttgtttataaatagacttttatatgtggaattttaagcgtgtgtatatactttttaaaggactagaagattgatcaccaaaaatatttcatagtacttgttgctggttggttggattctaatgaaattttcctcctttcgtaactggccaaggggttcaccttgctggctgcctagacagagccaattcctcaagacaggggaattgcaatagagaaagagtaattcacgcagagctgggctggctgtgcgggagaccagagttttattactactcaaatcagtctcctggagcattcagggagcagagtttttaaggataatttggtgggtggggaaaagccaatgagccaagrgtgctgattggtcggagatgaaatcataggaagtcggagctgtcttcttgagctcagtcatgtcctgggtgggggccacaagatcagatgagccagtttattgatctg

SEQ ID NO: 951689 - DNA, 632 bp, Homo sapiens
caactgcgcttcaacaaaataaaaaaaaaattaagcaaagtggaaaggctccctattcaataaatattgctgcagtaactgaccaaccatatgcagaagaaagaggctggatcccttttttatcrccatatacaaaaattagcttaagatggattaaagacttaaatataagacctcaaactatgaaaatcctagaagaaaacctagaacacaccattctggaaattggccttggaaaacaaatcatgaataagttgctcaaaagcaattgttctaaagcatttacaagaaaaacaaaaattgacctgtgggacctaattaaactgaagagcttttgcatagcaaaaagtacagagtatacaacctatagaatgggagaaaatatttgcaaacgatgtatccaaaaaggtatgatatccagatctataaggaacttaaagaaatcaataagtaaaaacaaaccctattaaaaagtgaacaaatgacatggacagacacttctcaacagtagacatacaaatggccaacaaacgtggaaaattctcaacatcactcgtcatcagagaatgcaaataaaaaccacaataaaacaccatcttttgtcagtcagaatggttattattaaaaagtca

SEQ ID NO: 951690 - DNA, 577 bp, Homo sapiens
tgctaaggaaagcttttaaatgactcagagattagccaaatgagatactgatgtcaagagtttgaagacattaaatacaagagacaaatagaaaaataaaacactatttaaatctctctctatccaatttagttaatatcattaagtggatatttgctattatatctatattcctacatgtcttgataatcaagtttgctaaatgtttttttctgggcctttttattggcaaattgggtattcactttgcattttggattatgttatatcaaggaatggttagtagagggcaaaatggaaatgttcctcctctgaaaaggcaactttctccagttcaggcactctgatttatcatcattttctctaaattgaattaagcccaattgaactttttactttaacctattgctctttttgagtcacatataactttaatatcttttcattgtgatagccttttaaatattaaataaacatacacactctcttttaccyctcctccccccctcacccccccgagatagagtcttgctctgtcacccaggctggagtgcagtggcatgatctcggctcactg

SEQ ID NO: 951691 - DNA, 648 bp, Homo sapiens
acctagggcagtgagatagaagcaaggaacccagtgaggaagctttgcagtaatccaggggacagaggatggtggctcagatcaagatggcaggaatgcaggtggtgagacgtggttgaatcctggatgttttttaaaagtagctaacagattttctgatggactggctgtgagccgtgagataaaaaggggagtcaaggatgatgccaagcgttttggctcttgtgatgggaaggctggagttaccaatggagagaaataaggctgtgagtggagaaggtttgggggagggacagcagagctctgcattggacataccaagtttgaggtgtctgctaaacacataagggaagtatgacacaggctgctggacataggagcctggagctcagggaaagctggagacaggctggaggcatcatgagtaagcacatggtatttaaataaagtcttatgactggatggggtgatcaagggcttaagtacagacagtgaagagaagagggtcaaggaccctgcctggggatcctccagcatcaagaggtcagagagaaatgagaccgagaaggagtgacmagtgagcggggaggaaaaccatgagcaaatcaagtcctagaagccaagtggaccaagcgtttccaggaagag

SEQ ID NO: 951692 - DNA, 405 bp, Homo sapiens
taaataatagaggtaaaagtgggtatccttattacattccagaacttacgggaaatactttcagttttttccctattcagtatgctactagctgttgatctttcatatwtagctcttattgttttgaggtatgttccttcaatgcctactttcttgagggttttgaccattaagggatgttgaattttatcaaatgatttttcagcatcatttgaagtggtcaatggtttttgtccttcattctgttggtatgatctatcttgctgattgatacatgtaaattgaactatcctggtatctctggggtaaatctcactttggtcatgatgaatgatctttgtaatgtattgttgaattaagtttgctactattttgttgaggatttttgtatcagtttcatcaggg

SEQ ID NO: 951693 - DNA, 567 bp, Homo sapiens
tcctcactatttcttcatacctggaactgtagctggcatatagaagattactcgataaatgtttattgattgactcactacattcataaattattggctatactcccaacatatatgaagaatgttaccattcttaccacctctgttgctaccatgtggtccaagataccatcatctcttcttggatttttctaggagcctcctaagtgatctgcctgcctccccgcttgccacactgatcctgtttaaatgtaagtgagatcatgtgactgttcagttcagactcttctgtggtcccaacttcacccaaagcaaaagcaaaaggtcttacaatgatgtacaagaccttggagatcctgcctaccctaatctctacttcacatcccactttcccccatctcaccacactccagacataatggtctcctggttgttcattcttgtcttgtggcatttgtactggctatttcttcagcctgaaacacycttctccagatacctacatagctcactcactctatgcaggtctgtttttggctaccttctcagtgaggaacaccctactaa

SEQ ID NO: 951694 - DNA, 445 bp, Homo sapiens
ctaaaccaaatgctgagcacttctgagccacaaagctctgtgcaactctcgtgaacctagagatgctacataatccagttactgtcttgggtccttttcaaaatatatccagagttttctgtaagtttgaaaagagatgatatcacccacctaattatataaattctcatactcaaagctcctagttaccttggggttaactactggactggatcttttgtttccgaaattctcctggatattgcctaattccctcagaatagctgaaatgttggtatttttcttaaaaacatgacctcacacagaattagttcacctctycctggcccagccccacacattcccactgctataggagagtaccatgtgctctgttgtcaactcagagttttctaaggggctcactctcgcccaagaaagacatggcactcctcccaacactatc

SEQ ID NO: 951695 - DNA, 584 bp, Homo sapiens
accaaatgctgatgcagatgtagaayaacaggaaactatttattgctggtggaattgcaaaatggtgcagctactttgaaaaatagtgggataatttcttataaaactaaacttactttcagcatttgatccaacgaccaaacttcttggtatttacccaaatgtgttgaatacttatatccagacaagaccctatacatggatgtgtagggctgctttattcataattgaaagcaactaagatatctttttgtagtcgaatgaataaataaactttggtacatccaggcaatggaatattatttagtgctaaaaataataagaatattatttagtgctattaaaccatcaaaaaaaaaaagaaaagaaatttcaatgcatattactaaataaaaggagccaatccggaaaggttacatggtctgtgactccaactatatgacattctgaaaaaagcacaatggaaacggtaaaaagatgagtggttgcctgcggatagggaattcgggaaggaatgaacaggtggagcacagaggatttagggggcagtgaggctattctgtatgatactataatggtggata

SEQ ID NO: 951696 - DNA, 599 bp, Homo sapiens
tccattcatccagtgtgtatttttaaaatcggcatttaattcatttatattcaaggttatacttgataggtgaagaygttttttgtctgcctgtgttatttcaaaggacctgtcttcaaattcagaaattttttattctgcttggtctagtctgatgttaaagctcttgattgtattttttatttcattcatttaattcctcatagcattcctgtggttctttttttaatgacatctatctctttgttgaagtactcattcaaatcatgatttttcccctgatttcattgaatcctcaatctgtattctcttgtatctcagtgtttccttaagattattattttgaatatttttctggaattttatatatttccttatgctaggggtctgttactagataattatcgtgttcctttgtgtcatgtttccttgctttttcatgtttgatatgtctctatgtagatttcacatatctggtgtaatagtcacgtcttttggggaaggttttgtagggaaagacttatttgtttagatgggtcttgggtgttggttcagcagggtacactggatttgattctggatggacacagtagtatagt

SEQ ID NO: 951697 - DNA, 655 bp, Homo sapiens
aatgtactgtaaatgtctgttaagtccctttggtctatgatgtagtttaaatccaatgtttctttttgattttctttctagggatgtctccaatgctaatagtggattgttgaagtctccatctattatcgtattggagcctatccctctctttagatctaataatatttgctttatatatctgggtgctgtggtattgggtgcatatacatttacaattgttattttcttgctgacttgatccttttgttattattatataatgttcttcattgtttcttttgacagctttttacttgaagtctgttttgtctgatataggtatagctatccctgcttgcttttcgtttctgtttgtgtggaatatctttttctctctctttgctttcaagtgtttgacagtgaagtgattctattttaggcaacatatatttgcatcttgttatgtttatccattcatccagtgtgtatttttaaaatcggcatttaattcatttatattcaaggttatacttgataggtgaagacgttttttgtctgcctgtgttatttcaaaggacctgtctwcaaattcagaaattttttattctgcttggtctagtctgatgttaaagctcttgattgtattttttatttcattcatttaattcctcat

SEQ ID NO: 951698 - DNA, 599 bp, Homo sapiens
tccattcatccagtgtgtatttttaaaatcggcatttaattcatttatattcaaggttatacttgataggtgaagacgttttttgtctgcctgtgttatttcaaaggacctgtcttcaaattcagaaattttttattctgcttggtctagtctgatgttaaagctcttgattgtattttttatttcattcatttaattcctcatagcattcctgtggttctttttttaatgacatctatctctttgttgaagtactcattcaaatcatgatttttcccctgatttcattgaatcctcaatctgtattctcttgtatctcagtgtttccttaagattattattttgaatatttttctggaattttatatatttccttatgctaggggtctgttactagataattatcgtgttcctttgtgtcatgtttccttgctttttcatgtttgatatgtctctatgtagatttcacatatctggtgtaatagtcacrtcttttggggaaggttttgtagggaaagacttatttgtttagatgggtcttgggtgttggttcagcagggtacactggatttgattctggatggacacagtagtatagt

SEQ ID NO: 951699 - DNA, 628 bp, Homo sapiens
agctggggagattttgcaaacccagtgcccaggctctgcaacccagatcaattattacagaatctcttggggatgaaacatgggcatcagtattttgtgtgtgtttgygtgttgttttttttttttttttttttttgagatggaatcttgttctgtcacccaggctggaatgctgtggtgcaatctcagctcactgcaacctctgcctcccgggttcaacccattttcctacctcagccttccgagtagctgggattataggcatgcaccgccacgcctggctaatttttgtatttttaatagaaatagggtttcaccatattgggcaggcaggtctcaaacacccagcctcacgtgatcctcccgccttggcctcctaaagtgctgggattacaggcatgagccattgctcctagcagtatttttttaatgaggcaaaattcacataacatacaaatccctgtatgaaaccatacacttcagtatcattaaatacattcataatgttaagcaatcatcatctctgtctagttccaaaacattttcattaacgccccccgccccccccaaaaaaaccctgtatccatcaagaaccccacatcccctcccctttcccccagctcctggc

SEQ ID NO: 951700 - DNA, 628 bp, Homo sapiens
agctggggagattttgcaaacccagtgcccaggctctgcaacccagatcaattattacagaatctcttggggatgaaacatgggcatcagtattttgtgtgtgtttgtgtgttkttttttttttttttttttttttgagatggaatcttgttctgtcacccaggctggaatgctgtggtgcaatctcagctcactgcaacctctgcctcccgggttcaacccattttcctacctcagccttccgagtagctgggattataggcatgcaccgccacgcctggctaatttttgtatttttaatagaaatagggtttcaccatattgggcaggcaggtctcaaacacccagcctcacgtgatcctcccgccttggcctcctaaagtgctgggattacaggcatgagccattgctcctagcagtatttttttaatgaggcaaaattcacataacatacaaatccctgtatgaaaccatacacttcagtatcattaaatacattcataatgttaagcaatcatcatctctgtctagttccaaaacattttcattaacgccccccgccccccccaaaaaaaccctgtatccatcaagaaccccacatcccctcccctttcccccagctcctggc

SEQ ID NO: 951701 - DNA, 765 bp, Homo sapiens
aacagctgcttctgagggatacgttttcaatgacctttttcattttcaaagccttcgcaatgttatttggatcttttctgggcatatatcacccaatgtcccatctgggacctaggtggaggtctatcatgggattcagtcctcaaagtctttgttatgttgtgttggagcactatatgcatatttgagggtcaatctaggagttcataaacaactgtgtatatatggtaagtttctctaccaactcctatgcactatctaatttctgagactttcttttggttctgtgattacaaagctgtggaattatttattttactctataatgacttcccaccagtatgttttagcttgaggtcaagcagcaggagaaaagagagagagagagagacagacagacacacacacacacacacacacacacacacacaaagagacatattttccacacctatttgtgaccatagcttctgatgagaaattgaagttcatctccctcagagttttaggtaactgtggattccagatgctaccagttttgcttataggacccccatttctcactctttgagcctgagctatgtattacccagtgtccagtctcactctctgagcctgagctataatgcccttcygaagctctctctgttcatgcccatgaccacttgtcagtttttggcagccttgagagaaggccaggggatactagaggatgaaaaaacaattatctctgactcagtggaatttcaaattctactcttctct

SEQ ID NO: 951702 - DNA, 671 bp, Homo sapiens
gagaatctggagttaccacctcacttattacattcaatggaccaaatyccccctcaattctcaaaggggtagctggtcaaacatttataacatttttcaaggtaagtgaaagtcaactaattattaatgaaggcaaccaaaaaagagagaagtatatgttttttatttatagaaaccttccctttatgacacagtatgaatctatgaacataaaaatcttagattcagtattctcataatttatcaagatatgtctaagaatcaggatctaaacataaatttccacattggcaggccaaatgacaaaacttcaggttccaaaaggcagaggagtgccattgaatagctttgtaattagctctctggtgggtagacctgggcatcatagaagagcttcaccaatcaatctcaagtatcaaaaagaacatagaaacagaagcaaaacaccaaagaatataacaaacactcaatgtaaagaggtcttaccaagagttactcttgttttttcactctttggtgaaaatataaaagatgcatagaaaaatacgaaaaaagacagggatggtatccctaattccagtgccctagcatagtaattattatatttgagtgcttccctttaataacaatagaaacaacagcaattgattacattcctttatttcaaaaac

SEQ ID NO: 951703 - DNA, 646 bp, Homo sapiens
taggtggcgcttaaacttagtggtcagtaggtagcctctcactcagtcacatggtcccctatatttcctctcatttttagccatgctccctctcaattctctgaaggtgtgggctcctctccctcttgagtgctggctatagatgacagcttggcactcctaggctgcccaccacaactttggggcgatctcagagtttatattccttctccaacttggaggcagcagaggaagggaccttagtagtggttgtggccatgggtcttttacttgcctcctggggctccactccagtgagatgcagagcagcaattgctcagtgcaatcagctcaggatgggggtgcaggtgtctgtgctgtgtgcccaagccaggggggccttgcctagtggtgagcagtgggggtgggtgggaaccatgggaaacagagtggcctcctctccttgggcctacttcaacttgatggaggtgtagatgagacagggtgtttgctcctttgccagtgcaaaggaagcaagggcagtaccactacagaggcagtgtsagaggggctttcagttgctcctgcgggctccacctccaggaaaactggagccactactattaggagtattcagccaggagggtggggtggctgcactgctggt

SEQ ID NO: 951704 - DNA, 646 bp, Homo sapiens
taggtggcgcttaaacttagtggtcagtaggtagcctctcactcagtcacatggtcccctatatttcctctcatttttagccatgctccctctcaattctctgaaggtgtgggctcctctccctcttgagtgctggctatagatgacagcttggcactcctaggctgcccaccacaactttggggcgatctcagagtttatattccttctccaacttggaggcagcagaggaagggaccttagtagtggttgtggccatgggtcttttacttgcctcctggggctccactccagtgagatgcagagcagcaattgctcagtgcaatcagctcaggatgggggtgcaggtgtctgtgctgtgtgcccaagccaggggggccttgcctagtggtgagcagtgggggtgggtgggaaccatgggaaacagagtggcctcctctccttgggcctacttcaacttgatggaggtgtagatgagacagggtgtttgctcctttgccagtgcaaaggaagcaagggcagtaccactacagaggcagtgtgagaggggctttcagttgctcctgcgggctccacctccaggaaaactggagccactactattaggagtrttcagccaggagggtggggtggctgcactgctggt

SEQ ID NO: 951705 - DNA, 519 bp, Homo sapiens
ggaggccgaggcaggaaaatcgcctggacccaggaggtggaggttgtagtgagccgagatcgtgccactgcactccagcctgggcarcagagcaagactcagtctcaaaaaaaaagaaaaaaaaagagtaccccatcagcctgggccccaaggatggaaatgaatcacagataacactggccacagggatggtatagaaaggtactaggtccccagggtacccggaagggatgaagtagagatgaacagaatggagtttaggtcacggagcttaagaaggccaggttactacttctgcttctaagacacaaccataggcaatacggctcaagaggatcacctaccccgagccaggagacaaccttaaactgaagtctagtgtggttccttggaaatccttgtgacttggccctcttgtgaggcataaattgaatctggcctgagaatatcctaatactctgtttcctctgacaacaaattgtgtttagtgacctccccatagtgactgctctattccta

SEQ ID NO: 951706 - DNA, 727 bp, Homo sapiens
aacacgcagcggtttgctgattttcctccttactctgtggaagtcagctttaaacggtgtgtcccragggaagcccagtcggtatatttatacatgaggatgcctagaaagccacgtcttcacagtatttcatatatttacagaaaacaaacatatggctcagcagtgtgttgaatatattttatatatctatagctgtatatttctacctttctgtgtgtatctaaaaccacagattattaaattcgaaataggtggtagagatcatcctgtaactagtagatttccatgccacagttcacttttaggtgaggaaaatgaaagtctacagagagtaaatgacttgtccaaggaggcaaagctattacagttggtgacagagtcaggctagaaaacagggggtctgctttttcctggttcctgcttcaccccaacaggatccattcttgctgctctctgccctctctgtgcctccaaagactaactccttgagttgcatctcttgggctccccttcccattggcttctggttggtttggccaatgagaggcactggtgtaaggtggaggggaggtagagagggaggctggggtgtttctgcccaccacccctgctttgacatctcacctctgacagtagctctgacccttcatgacgacagccttctcctctaggttccagctctcacctgcctttccttgctcctttagtcgtagggaaggtggca

SEQ ID NO: 951707 - DNA, 727 bp, Homo sapiens
aacacgcagcggtttgctgattttcctccttactctgtggaagtcagctttaaacggtgtgtcccaagggaagcccagtcggtatatttatacatgaggatgccyagaaagccacgtcttcacagtatttcatatatttacagaaaacaaacatatggctcagcagtgtgttgaatatattttatatatctatagctgtatatttctacctttctgtgtgtatctaaaaccacagattattaaattcgaaataggtggtagagatcatcctgtaactagtagatttccatgccacagttcacttttaggtgaggaaaatgaaagtctacagagagtaaatgacttgtccaaggaggcaaagctattacagttggtgacagagtcaggctagaaaacagggggtctgctttttcctggttcctgcttcaccccaacaggatccattcttgctgctctctgccctctctgtgcctccaaagactaactccttgagttgcatctcttgggctccccttcccattggcttctggttggtttggccaatgagaggcactggtgtaaggtggaggggaggtagagagggaggctggggtgtttctgcccaccacccctgctttgacatctcacctctgacagtagctctgacccttcatgacgacagccttctcctctaggttccagctctcacctgcctttccttgctcctttagtcgtagggaaggtggca

SEQ ID NO: 951708 - DNA, 578 bp, Homo sapiens
gccacagattatgcagctggcctgatttgctgtgtggttagtccttaaagaggttgggctcatatgcagaaaattggraatggatcccttccttatgccagttaacacaagatggattaaagacttaaatgtaaaatgcaaaattattaaaaccccggaagacaacctaggcaataccatttaggacataggcatgggcaaagatttcatgacaaagacatgtaaagcaattgcaacaaaagcaaaaactgacaaatgggatctaattaaagtaaagagcatctgcacagcaaaagaaactatcatcagagtaaacagacaatctacagaatgggagaaaatttttgcaaacgatgcatctgacaaaggtctaatatccagcctctataagtaacttaaagaaatttacaagaaaaaacaaacaaccccattcaaaagtgggcaaaaaacacaaacagacacttctcaacagaagacatacatgtgaccaacaatcatatgaaagaaagctcaacatcactgatcattagagaaatggaaatcaaaaccacaatgagataccatatcataccacttag

SEQ ID NO: 951709 - DNA, 457 bp, Homo sapiens
aagaagatagaaagatgtaggaaagtttggaacttcctaaagacttgttgaatggttttggccaaaatgctgatagtgatatggacaataaagttcaggctgaggtggtctcagatggagatgaggaacttcttggaactggagtaaaggtcactctaggtatgccttagcaaagagactggtggcattttgcccctgccctaaggatctgtggaactttgaacttgagggaaatgatttagggtatctagcaaaagaaacttctaagcagcaaagcattatagaggtgacagaacatacaagtttggaaaatttgtagcctgaggctgcagtagaaaakaaaaacccattttttgggggagaaattaaatatgactgcagaaatttacgtaagtaactaggagccaaatgttgttcaccaaagacaatggggaaaatgtctccagggcatgtcaca

SEQ ID NO: 951710 - DNA, 457 bp, Homo sapiens
aagaagatagaaagatgtaggaaagtttggaacttcctaaagacttgttgaatggttttggccaaaatgctgatagtgatatggacaataaagttcaggctgaggtggtctcagatggagatgaggaacttcttggaactggagtaaaggtcactctaggtatgccttagcaaagagactggtggcattttgcccctgccctaaggatctgtggaactttgaacttgagggaaatgatttagggtatctagcaaaagaaacttctaagcagcaaagcattatagaggtgacagaacatacaagtttggaaaatttgtagcctgaggctgcagtagaaaataaaaacccatttttkgggggagaaattaaatatgactgcagaaatttacgtaagtaactaggagccaaatgttgttcaccaaagacaatggggaaaatgtctccagggcatgtcaca

SEQ ID NO: 951711 - DNA, 618 bp, Homo sapiens
agatgttccaagaataactggtatcaatcatattgaaacgattaaaaaaattgataaacaggaactcctctctaactcattctaagaagctagcatcagcctgataccaaaatctggtggagataaaacaaaaaaggaaatcttcaggccagtatccctggcgaacatagaggcaaaaatcctcaatgaaatatgatcaaactgaagccagcaacacatcaaaaagctaattcttcatgatcaactgggctttattcctgggatgtaaagctgggttgacatttgcaaatcaataaaactcattcgccacataaacagaattaaaagcaaaaccatatgacaatctccatagacacagaaaaacttttcataaaatccaacattccttcatgataaaatccttaacagactaggtatcaaatggccatacctcaaaacaataagagccatctatgacaaacccacagacaacatcatactgaacaggcaaacgatgggctgttccccctgaggcctggaacaacgcaagrgtgcccactctcaccactcctattcaacatagtactggaaatcctagcctgagcaatcaggcaagataaataaataaaaggcatccaa

SEQ ID NO: 951712 - DNA, 685 bp, Homo sapiens
aagataaagtaattataatgtttaagcttatatgggcacatattaacatttattcagcatatataaagcaaaaatgtayaggctacaatgaaattgtaacaaatctaccattatagtaagaaatttaaacagacctatctcaggtattgacatgaaaagcagatcaaaactagcaatgttatagaaattgtaaacacaatgaacatgaatgtcctaataaacatattaagaacatttatccaattattggataattctggataattctttttgacatgcaaggaacattttcacaaatttatcacatactaggccaaaaagtctttaaatatttccaaaagtaccacagactaccttctctcacaagaaggaaaataatgtagctattagtaataaaaggaaaattaagacaatttcatacatttgacagtttaaaagcaaacttctaaatacctcctaggtcaaagaatactttataatagaaagtaaaaaaatacttagaactaaatgataatgagaatataagataagttacgtgggctgcagttagagtaccagaaaacttcagtgccctacaactactaaagaagtcaaatcaatattttaaaagcctcctcataaatagaacaccaaatacaaatagttctataagaaaatataacaaatgttatcatcaaattttaat

SEQ ID NO: 951713 - DNA, 581 bp, Homo sapiens
acaatttaatgaagttgaaagttagttttcttaaaagtccactaaaatagagaaaaaaatatttgaaattacagtctttgaaagaaaaaagaaggctgaaagaaatcaactttaggaaaaaagaaaaaaggcaccaagaagccaactttagggggaaataactatagataaaagggatgatttaaaggaaaataaaaagaaggcaagaaagaaaaaaggaaaataatgtttaacgttaagctagtatattagacaatattacttggaaaaaaattcttaccatcattgactcataaaggaaaatgaaaaggaagtcaagctttacctttaaaagtatcactaaatccaaatagactcagggttggctttcattaaagctttaatgaacataatatctacctcacagatacatacatatactcatgcatacatacatatgtattccacagtacgtcaattccttgtcattgtatttccataagagaaatataccacacrtgaaccaggaagtacatacaataatttttattgaagtttttttttgtttttgttttctttgagacggagtctccctctattgc

SEQ ID NO: 951714 - DNA, 561 bp, Homo sapiens
ttggcatatttcactgcaatttacacagtgctgggggtagggggcagggaatggaagctggggttttttttttttttcatatgtatattctgaaggaaagaaaggcaaataaagaaaataaaggagatggataaagtcttttctctttcacttcttcctgaatttcccctccttttgttttgtccttgcatctacctcgttcctgttctgatgaaactctatcctttattaaacaaacttacaatatttagatgtggcaattcagacatccaccattgaaaatatagaagcagaggtggttaaaaaaaattccagccaactcactgtgcaaaaggggatggtcaactgattttgaaaacttcagaagaaaagcaaatgaaagtttcaaaatctgtcatttcagtttgtaaactcttccagtaaatagtagccttattattagaagtatatatcagaaaaatagcatcctggcagctctgctgtgccaggaaccatagtaaggggttggcatgaatgttcgcataaggraaggacagtaggctgggtgatttaaatagagta

SEQ ID NO: 951715 - DNA, 573 bp, Homo sapiens
gctgtgcaagctgctctgccacttgggccatatgatccagcagatccaatggtgtttaaggtgtcagtcgccgacagggatgctgtttggagactttggcaggctcccataggtgaatcacagcagaggcttctaggattttggagcaaggccctgccatcttctgcagataactactctccttttaagagacagctcttggcctgttactaagctttggtggaaactgtacatttggctatgggtcatcaatgtgacctgaactgcctatgtgacccgaactgcctatcatgaactgggtgctttctgacccatgtagccataaagtgagtcgtgcacagcagcatttcatcatcaaatggaagtggcatatacgggattgggcttgagcaggtcctgaaggcacaagtaagttacatgaggaagtggctcaaatgcccatgatctccactcctgccatcctgccttctcttccccagcctacaccgatggcctcatggggagctccctatgatcagttgacaggaagagaagwccagggcctggttcacagatggttctgcacaatacgcg

SEQ ID NO: 951716 - DNA, 628 bp, Homo sapiens
acaagtatacacgtacaattaaatagatattcatcttaaaatgtatttaatttaatttttttatttttttttaaagagatgaggtctatgttgcccaagttggtctcaaactcctgagctcaagtgatcctcccacctcagcctcccaaagtgctaggattacaggcatgaaccaccaagcctggccttaaaatgtattttagcaagtacatactgtgtgtcaggcatcattacaggtgttggaccacagcagagaacaacagaaaagtttaaagaaccctgacaggtttatagtatttacccattgatagggcttatagtatttacccattgttgcaggttaggctctccaaggaaatgggctctgagattggggtttagtgcacaggatgtttctctttttaaaatttcttttaaaattattattaatttttttttggtagagacaaggcctcactatgttgcccaggttggtcttgaacttctgggcttaagctatcctcctgccttggccttccaaagtgctgggattataagcatgagccaccacaccsggcctgcagaatgtttcttaggcagtgctcttgggaatatctttggagaggaggggaaagccagattgggcaga

SEQ ID NO: 951717 - DNA, 625 bp, Homo sapiens
aagttgttaatgttccttcaaaatgtgaaattctagagcttaatatcyataaatagagctttcattgttatgcctcaaaattcaacagctttctcagttgacagacatttgtctcatattccttaagttaccttttcctactcaggaataaccttttcttacttttcaaagaataaaagacatacagatttggcaacaagtaggttattagtaacattcaagcaaataatagcgcaactttttaatgatagtagatttaattataaagccttataaaggaaattgataatatattccaaatgagacatcttattcgaatgctctgtggatcattaaaacacatttattactgttggtcaaggaatgcaaccctattccacttcatattaaggtgagaattatgaattaattccttagtattcataatgtttaaatagattaagatcaatttccttaaactccagtgtctctaaatacctttctaatttactgtttccattgtcatccgttgtatagcatggtgtcttttacctggtcaacatatcacctcctcttgctggctagtctatgtatgttccagtttgactgttcagctatagtctgagtaagaactggatatgtcctt

SEQ ID NO: 951718 - DNA, 638 bp, Homo sapiens
cagaaagggtccaattcttctcccaaccgcgtgttgcaaaactaatgcttcaaaagttgaacgaagttttgcctcatctgccatatttgcctgatctctcaccaactgatcaccacttttttaagcatctcgacagcacaactttttgcagggaaaatgcttccacaaccagcaggatgcagaaaatgctttccaagggttcatttaatcctgaaccatagattgttagctacaggaataaacaaacttatttctcactggcaaaaatttgttgattataatggttcctattttgattaataaagatgtgtttgagcctagttataatgatttaaaattcacggtctgaaaccgcaattacttttgcactagcctaataagtaagtgtgtacttgtgtgtgtgtgtgtatttaatatatatttgtatatataactcatagtgtgtgtgtttgtgtagtttccctattggtgtctttcctaatctagtgaaaccttgcctgtgttcccctccaactatggcccaacttcttattatctgtttacaaaacttggagaactgcactggctatagctaattttcttacctcacatrtttattccagcccactggaaactttatttatttctcacgttgtatt

SEQ ID NO: 951719 - DNA, 610 bp, Homo sapiens
ttgtacctctcttagaatttggctgtgaatctgtttggtcctggtcrttttttggttggtaggttatttattactgactcaatttcagagtcgttaatggtctatttaagggtttgacttcttcctagtttagtcttgtgagggtgtgtgtgtccaggaatttatccatttcttctagattttctagtttatttgcgcagaggtatttatagtattctctgatggtagtttgtatttctgtggggtcagtggtgatatcccctttatcattttttattatgtctatttgattcttctctcttttcttctttattagtccagctactggtctatctattttattaatttttttagccagctcctggattcattgattttttttgaagggttttttgtgttctatctccttcagttctgctctgatcttcattatttcttatcttctgctagtttttggatttctttgctcttgcttttcttgttcttttagctgtgatgttagagtgtcaatttgacatttttctagctttccagtgtggctactcagtgctataaatttccctcttaatactgctttagctgagtgccagagattctggtacgttgtcta

SEQ ID NO: 951720 - DNA, 708 bp, Homo sapiens
aaaaatcctggactcagtcagactcacgcagacattgagactactggctgcaggaaggagctacccattttgggtctccccaacttgttgggatgacctgcctgtggaaaggagctacccattctgggtcccctcttctctgagagctggacactcattggatgacctgcctgtggaaaggagctacccattctgggtctccctccactgagagctggacacttgggactatctgcctgcagaaaggagatacccactatgggtatcctctctgctgagagctgggtgcttattgggatgacctgcctgtggaaaggaactacccacttcaggtctcctgagagctgttctgtcattcaatgaggcacctctccaccttgctcaccctccagttgtccgcatacctcattcctcctggacacagggcaagaactcaggacctgccaaatgatgggactgaaagagctgtaacacaaacagggctgaaacacactccctacttgccatgttgcaggtgatgagaagaagagaagaactgcagcccttcggtgaccccagacctaggaactccctgagccagggctatgactccctctttggggctctgcaattcctggcaactccaagcttctgggtgccaccacrttccctggtgcctgcagtggtagccacttgtggtatgcctggtccagccgcagccttgcaggg

SEQ ID NO: 951721 - DNA, 586 bp, Homo sapiens
agcatctctatctgccactgacacctcaagcatcattggatctgctggctcatatggcccaagtggcagagcaacttgcacagcagactggacctgttgcagggccttcttctgttctggactccactcaaaactggcagcctttcgggtcactaaataaatgggctggggtaacacatccaaatgaagaatgtgttgccagcaaaatccaagtaggcccactaggcattgtgcctctttcttggttgtaggagaggccaaatgcagaaacttttccttcactttggaaggaatatcttgacaggccccacatccctgtactcctagaaattttactgaggtagaagttccctgaattttaatcatatttatttcccatcctctggcatgcaaatgtctcatcaataagtccagtgagtttgctacttcttgctcactggatccaatcagcataatgtcatcaatgtaatgaaccagtgtgatattttgtggaagtgraaaacaatcaaagtctctccaaataagattatgacacaaagccagagttgatatacctctgaggtaggacagtaaagttatatttttg

SEQ ID NO: 951722 - DNA, 586 bp, Homo sapiens
agcatctctatctgccactgacacctcaagcatcattggatctgctggctcatatggcccaagtggcagagcaacttgcacagcagactggacctgttgcagggccttcttctgttctggactccactcaaaactggcagcctttcgggtcactaaataaatgggctggggtaacacatccaaatgaagaatgtgttgccagcaaaatccaagtaggcccactaggcattgtgcctctttcttggttgtaggagaggccaaatgcagaaacttttccttcactttggaaggaatatcttgacaggccccacatccctgtactcctagaaattttactgaggtagaagttccctgaattttaatcatatttatttcccatcctctggcatgcaaatgtctcatcaataagtccagtgagtttgctacttcttgctcactggatccaatcagcataatgtcatcaatgtaatgaaccagtgtgatattttgtggaagtggaaaacaatcaaagtctctccaaataagattatgacacaaagccaragttgatatacctctgaggtaggacagtaaagttatatttttg

SEQ ID NO: 951723 - DNA, 554 bp, Homo sapiens
gccacctcctggcgggaggccaaccaacacaaaaccagcacacttaacaaaaatacaaccaaagaccctcacagagtccatttcattcccccrctacctccactggagcaggtgctgattttcatgctgaaagacctgaaaacggaacacattacaggactctttgcagacactccccagtaccagcctggagcccagtagctctgtggggtggctaaatccagaagtaaaataaaaatccctgtagtttggctctcaggaagccccatccccagggaaaagaggagagcaccacatcaagggagcaccctgtggggcaaaagaatttgaatagcagcccttgagtcccagaacttcccccgacataggctacccaatgagaaggaaccagaaaaacaattatggtaatgtgacaaaacaaggtttttcaacaccccaaaagatcacactagcttaccagcaatggatctaaaccaagacaaaatctctgaattgccagaaaaagaattcagaaggttgactattaaactaatcaaggaggcatcagagaaagg

SEQ ID NO: 951724 - DNA, 599 bp, Homo sapiens
  misc_feature 1, 2, 3, 4, 5, 6, 7, 8, 9, 10, 11, 12, 13, 14, 15, 16, 17,18, 19, 20, 21, 22, 23, 24, 25, 26, 27, 28, 29: n = A,T,C or G
nnnnnnnnnnnnnnnnnnnnnnnnnnnnnacaaaaaccacggtcttgctaaatttgctaagaataggagctattamacaaattatcacattcctcctaactttgatttataactcagatcactgcaactctggacagagtactgaccttacaaatactcttttctgacaagcaactgcagaccttaagctagtttcagcagcttatagaaagtgcacacaaactgtccctgtgtcttgtagttcaccttttgatgtaaagaaccaaattccatctcgtttgtttgtctgtttttgagatggagccttgctctgtcacccaggctggagtgcagtatcaggatcttggctcactgcaacctctgcctcttgggttcaagtgattctcctgcctcagcctcccgagtagctgggcttacaggcacccgccaccatgcccagcaattcttttgtatttttagtagagacagggtttcaccacattggtcacgctggcctcaaactcctgacctcaagtgatccacccgctttggcctcctaaagtgctgggattacaggtgtgagcaactgcacctggtcccacctctttttgatgctaaaa

SEQ ID NO: 951725 - DNA, 479 bp, Homo sapiens
accagctgttctgaggggcccagcagaaagctgattcatggaagaatgcagtttccacatcctgattattattattattattattattattattttgagacagtgtctcactctgttgcccaggctggagtgcaacggcgcaatctcggctcactgcaacctcctgctcctgggttcaagtgattctcctgcctcagcctcctgagtaactggatctataggcatgcgccaccatgcccagctaacttttgtatttttagtagagatggggtttcaccatgtagtccaggcaggtcttgaactcctgacctcaggtgatctgcctgcctcagcctcccaaagtgctgggactataggcgtaagccactgcacygggtcaacacattctgattatttcgttcactttactccaaccaatcaatgaccccagttttctagcccttcaccctccatgatccccttaaaaacctttgcccaga

SEQ ID NO: 951726 - DNA, 479 bp, Homo sapiens
accagctgttctgaggggcccagcagaaagctgattcatggaagaatgcagtttccacatcctgattattattattattattattattattattttgagacagtgtctcactctgttgcccaggctggagtgcaacggcgcaatctcggctcactgcaacctcctgctcctgggttcaagtgattctcctgcctcagcctcctgagtaactggatctataggcatgcgccaccatgcccagctaacttttgtatttttagtagagatggggtttcaccatgtagtccaggcaggtcttgaactcctgacctcaggtgatctgcctgcctcagcctcccaaagtgctgggactataggcgtaagccactgcactgggtcaacacattctgattatttcrttcactttactccaaccaatcaatgaccccagttttctagcccttcaccctccatgatccccttaaaaacctttgcccaga

SEQ ID NO: 951727 - DNA, 732 bp, Homo sapiens
agcagtatacctttactctcctacctcaggggtatgtcaactctccagctttktgtcataatcttatttggagagaccttggccactttttgcttctgcaagatatcacactggtcctttacattgatgacattttgctgattggatccagtaagcaagaagtagcagacccactggacttattggtgagacatttgcatgcaaaaggatgggaaataaatccaactaaaattcagggaacttctacctcagtaaaatttctaggggtccagtggtgtggggccagttgagacattccttctaagatgaaggataagttgctgcatctggcccttcctacaaccaagaaagaggcacaatgcctagtgggcctattaggattttgaaggcaacacattcctcatttgagtgtgttactctggcccatttattgagtgacctgaaaggctgccagttttgagtggggtccagaacaggagaatgctctgctacaggtccaggctgctgtgcaagctgctctgccacttgggccatatgacccaccagatccaatggtgcttgaggtgtcagtggcagataggaaagctctttggagcccttggcaggcccccataggtgaatcacagcaaaggcctctaggattttagagcaaggccctgccatcttctgcagataactactctccttttgagagacagctctgcctgttactgggctttggtggacacggaa

SEQ ID NO: 951728 - DNA, 665 bp, Homo sapiens
tacctttactctcctacctcaggggtatgtcaactctccagctttgtgtcataatcttatttkgagagaccttggccactttttgcttctgcaagatatcacactggtcctttacattgatgacattttgctgattggatccagtaagcaagaagtagcagacccactggacttattggtgagacatttgcatgcaaaaggatgggaaataaatccaactaaaattcagggaacttctacctcagtaaaatttctaggggtccagtggtgtggggccagttgagacattccttctaagatgaaggataagttgctgcatctggcccttcctacaaccaagaaagaggcacaatgcctagtgggcctattaggattttgaaggcaacacattcctcatttgagtgtgttactctggcccatttattgagtgacctgaaaggctgccagttttgagtggggtccagaacaggagaatgctctgctacaggtccaggctgctgtgcaagctgctctgccacttgggccatatgacccaccagatccaatggtgcttgaggtgtcagtggcagataggaaagctctttggagcccttggcaggcccccataggtgaatcacagcaaaggcctctaggattttagagcaaggccctgccatcttctgcag

SEQ ID NO: 951729 - DNA, 614 bp, Homo sapiens
gttcagtatttcgccattaattatgttgttagctgtagagttttcagataacttttattaaattgaggaaaattccttttattcctggtttgcaaagaatttttgggttttgttgttgttgttttatcatgttttgttttattttatcataaatgggtattgaattttatcaagtacctttcctggatatgttgaaataaacatatagtttttctcctttatgtgtcaatatggtgacttatattggttttttaacatgtctaaatactaaattatatattttattacatatttaataatcctccattatatattttcttaaagcaaggacattataactatagtacagttaccaaaattaggaaactaatattgataataacatgtaacttacatgccttagtaaatttctgtgttgtccttttcagtgtctgcgtttcaatccaagattacattttgtattgacttatgtcttcttagtctcctttaacctctaatagttctatagtctttgtttttttgtctttgacactttcaaagwgtattgagcattattagtcattttttaaaatgtctctcaatttggatttgtctgatgtttcctcatgatttga

SEQ ID NO: 951730 - DNA, 550 bp, Homo sapiens
ctccacaagccagaagagtgggggccgatattcaacatgcttaaagaaagaattttcaacctagaatttcatatctagccaaagtaagcttcataagtgaaggagaaataaaatcctttacagacaagcaaatgctgagagattttgtcaccaccaggcctgccctacaagagctactgaaggaagcactaaacatggaaaggaacaaccggtaccagccactgcaaaaacatgccaaattgtaaagaccatcgatgctaggaagaaactgcatcaactaacaagcaaaataaccagctaacatcataatgaatcaaattcacacataaaaatattaaccttaaatgtaaatgggctaaatgttccaattaaaacacacagactggcaaattggataaagattcaagacccatcagtgggctgaattcaggagacccatctcacrtgcagagacacacataggctcaaaataaagggatgggtgaagatctaccaagcaaatggaaaacaaaaaaaggcaggggttgcaatcctagtctctgataaaaca

SEQ ID NO: 951731 - DNA, 733 bp, Homo sapiens
tcagaaggaaaactaacaaacagaaaagaatagcatcaacatcaacaaaaaggacatccatgccaaacccacatctgtaggtcaccatcatcaaagaccaaaggtagataaaaccacaaagatggggagaaaccagagcagaaaacctggcaattccaaaaaccagagcacctcttctcctccaaaagattgcagctcctcgccagcaacagaacaaagctggatggagaatgactttgacaagctgacagaagtaggcttcagaaggttggtaataacaaacatctccgaactaaaggagcatgttctaacccattgcagggagggtaaaaaccttgaaagaaggtgagatgaatggctaactagaataaacagcgtagagaagaccttaaatgacctgatggagctgaaaaccatggcacaagaacttcgtgacacatgcacaagcttcagtagccaatttgataaagttgaacaaaggatatcagtgattgaaaatcaaattaatgaaataaagctagaagacaagtttagacaaaaaagagtaaaaagaaacaaacaaagcctccaagaaatattggactatgtgaaaagaccaattctacrtttgactggtgtacctgaaagtgatggggagaatggaaccaagttggaaaacactcttcaggatattatccaggagaacaaccccaacctagcaaggcaggccaacattcaaattcaggaaattcag

SEQ ID NO: 951732 - DNA, 711 bp, Homo sapiens
ctttttgtctttgatttttggcaatttaattataatgtatcttcgggcagtcttttttagatggaatcagattacagacctttgactttcgtgtacctggatatttacgtctttctccaggtttagaaggtttcctgttacaattttttaaaaaaagttttctacccctttctctttttcttctttaactcctattactcaaatatttgctgttttgaggctgtcctataaatcctataaatttctttcttccttttcactcttcacttttttctcttctgactgtatattttcaagtaacctgtcttcaagtttaaagatctctcgctgcttaatctggtctgctgttgatgctctctattgcatttttcattttgtttattgcatttttcagatccaggatttctgtttgatatacaatctctctattaaatttctcatatttcttgttctggtctcttactgttttaatcatattattgaattgtctctccgtattttcttgaaggtcactgagcttccttaaaacagttattttgaattatttgtcaagctgttcatatattttcacttctttagggtcagtaaatggcacctkattttgtttgtttggtaacataatgtttactgattgttcctgatttttgtgcttgtacatcaatgtctgtgaatttgaagaagtatttattttagtctttgcaaactgaaaag

SEQ ID NO: 951733 - DNA, 564 bp, Homo sapiens
gggaaagagtacaaaagagagaaattttaaagctgggtgtccgggggagacatcacatgttggcaggttccgtgatgctccctgagccgcaaaaccagcaagtttttattagcaattttcaaaggggagggagtgtatgaatagggggtgggtcacagagatcacatgcttcaagggcaacaaaagatcacaacgcagaaggtcagggcaagatcacaagttcagggagaaactagaatcattaatgaacttccatgtcccgctgtgcacacattgtcattgataaacatcttaacagggttcaagagcaaagaaccaatctgactagaattcgccaggctggaatttcctaatcctagcaagcctgggggtgccataggaggccagggcgtgtttcatcccttatctacaactgcataaggcagacacccccagagcggccattttagaggcckccccctgggaatgcattcttttcccagggctgttaattattaatattccttactggggaaagaattcagctatatttctcttaacctttttcagtaataatagaaatat

SEQ ID NO: 951734 - DNA, 638 bp, Homo sapiens
tgtccaacctcaggacactgctggctgcattcctgaggctccagctccagccttggctgaaagatgcacaggtacagcttgggtcactgcttcagagggtgcaagcttcaaggcttggtggcttccacatwgtgttaagccagcagctgcacacagcacaaaactagacgcttgcaagcctttgtctagactccagagtatgtacggaaaaacctgggtgttcacacagaatcttttccaagaggcagagcctcgtgggaaacttttactagggcagtacagaaggagaatttagggctggagtccctaaatatggaggcaccattctccagactccagattcatagactcaccaacagctggcacccttagtatggaaatgctacaggcactcaacatcagcccagcccatgagggcagctgtggggtatagaccctgcacagccacaggtgcagagctgcccaaggccttggaagcccaggcatcacacacctgtgctctagatgtgagatgtagattcagaaaagatgatttggagctgtaggattcaatgactggcctgctgggtttttgacttgcatggggtctgtaagtccttgtacatttcagtaaatgctggaatgagttaagtcattgg

SEQ ID NO: 951735 - DNA, 611 bp, Homo sapiens
ttaatttctgcttttagtttctccttaccattagaacactcagtaatcatatgaattgtgcatttcttgttttgcttaactstttttgtttgtttatgcctggggctttattgttgtttcacttttctcccgtctcttcctgatttggtcaaatccaaaggaattttccaaattgtaggcagcaagtcctctgaattggctaaaactcctatggctgcaaacaaacaaacaaacaaacaaataaacaacaacaaaaaacattccagttagcagaaattattttttaaaactttttttttttacataagtggtctcatctacataacaaggccacccttttgctagccaaggctaaactgaaggagtagtggtggtgacccaatgtgaagattctgccctgttcactacagaaacctgagtttggttcctaagtctagttctttctgtttgatatttgtgttacttttaaagcgtcagcagtttgtcccagctatgatgtggtaataaaagattcaaaaggattttctttgcaagttctatgattaaaagcttaattaaaagcaaatttcttctttttaattatactttaagttctggggtacatgtgcaga

SEQ ID NO: 951736 - DNA, 456 bp, Homo sapiens
tcagctgctggtaacatctggcctttgggcaggctcaaaactttgaaagttaataatgtaagattcaattgtgtatgggctatcccgtaatccctgtttctcccccttttttgtttttattatcagttgttcatctgtatgaaatcttaactgagcattttcaattaactgtgtggaatgacccatgtatgaagaatcagaaatcacattaacaggcatatcaaaagcagccaacacctcaattacagctacaagctccgccttttgagctgaagtatagggtgtctggaaaactttagcttttgatccagaataagaacctttaccattactagwcccatctgtgaaacaaggaaaacgcttagcaggctgcaggttgtttactgcaggaattgtaaatgcaaaccgttcacagtcttgctcagctaaaagggtagtaaagaaacagtcttttaa

SEQ ID NO: 951737 - DNA, 456 bp, Homo sapiens
tcagctgctggtaacatctggcctttgggcaggctcaaaactttgaaagttaataatgtaagattcaattgtgtatgggctatcccgtaatccctgtttctcccccttttttgtttttattatcagttgttcatctgtatgaaatcttaactgagcattttcaattaactgtgtggaatgacccatgtatgaagaatcagaaatcacattaacaggcatatcaaaagcagccaacacctcaattacagctacaagctccgccttttgagctgaagtatagggtgtctggaaaactttagcttttgatccagaataagaacctttaccattactagtcccatctgtgaaacaakgaaaacgcttagcaggctgcaggttgtttactgcaggaattgtaaatgcaaaccgttcacagtcttgctcagctaaaagggtagtaaagaaacagtcttttaa

SEQ ID NO: 951738 - DNA, 540 bp, Homo sapiens
atccctcctaggttttatgactgttaaggacaaacttccccaacagcttcttggtactgctgacacttcccccaaacctctccatgctgcccacccctccacctaatgctctgcaactcttgtctgtgccgtccacccttccccctgagcccctttacatttctaagcccttatctaggcaccaggcgccagggtgaagccagcagacttcacctatcagggcttgctgcgataagcaaaccccaattacaaaccacccggaccgcacgggggaggtcatgggaagcataaacaaactttacctacacctgtaaattcctgctgttcatctagttgctaccataaacgtcacaaagtgatatgtgacaaaattaaacagcaaacaaccccggaatgtggccataccaaagaactccttcaaacacccctcctcaatataaactcctcactttgtaagctcagggctgcttcctctgagtgtgatggagcagccggcaggttcaataaacktactcgcctgactttgggtctattctttct

SEQ ID NO: 951739 - DNA, 570 bp, Homo sapiens
ggagcgaccagaatcataaaacaagttcttagagacctacctacaaagagacttagataaccacataataatactgggagacttcaacaccttactcataatgttagatcattgakgcagaaaaccaacaaagatattcaggacctaaatttgacacttgaccaaacagaactaacagatatctaaagaatactctacccagcaaaaacaggatatacattcttctcatttgcacaaggcacatgctctaagatcgaccacatgctcagccataaagcaattctcaaccaatttaaaaaagcccaaatcataccaacaacactctttgaccacataacattgaaaataaaaatcaataccaagaagagcactcaaagccatatgatagaatggaaattaaacatttgcttgggaatgacttttgggtaaagaacgaaattaaggcagaaataaaaaaaaaatatttgaaactgatgaaaacaaagaaacaacatcccagtatctatgggatacaggtaaagtaggcttgtatttaaaaaagcaacttttaagttcaggggtacatgtgca

SEQ ID NO: 951740 - DNA, 608 bp, Homo sapiens
ggccttagtcttctcttcctctgtcaactgatcctagggaactccttatgaggccatcggtgcaggctcggggagagaaggcagggtggcaggagtaragaccgtggacatttgagccacttcctcatgtaactcacttgtgccttcaggacctgctcgagcctgatcacgtatatgtcagttccaattgatgatggaatgttgctgtgcatgacccactttatggctagatgggtcagaaatcactcaggccatggtaggcagttaaggtcacatggtgactcaatgacccatagtcaaacattcagtttccaccaaagcccagtaacaggccaagtgctgtctctcaaaaggagagtagctatctgcaggagatgacagggccttgatccaaaatcctagaggcttccactgtgattcgcctatggagcttcccaaaggctaacacctcaagcaccactggatctgatgggtcatatggcccaagtggcagagcagcttgcacagcagcctggacctgttgcagagcttctgctgttctggaccccactcaaaactgtcaggctttcaggtcacttaataaatgggccagaataacacacccaaat

SEQ ID NO: 951741 - DNA, 634 bp, Homo sapiens
tatcatgcagaaccatctgtgaaccaggccttagtcttctcttcctctgtcaactgatcctagggaactccttatgaggccatcggtgcaggctcggggagagaaggcagggtggcaggagtaaagaccrtggacatttgagccacttcctcatgtaactcacttgtgccttcaggacctgctcgagcctgatcacgtatatgtcagttccaattgatgatggaatgttgctgtgcatgacccactttatggctagatgggtcagaaatcactcaggccatggtaggcagttaaggtcacatggtgactcaatgacccatagtcaaacattcagtttccaccaaagcccagtaacaggccaagtgctgtctctcaaaaggagagtagctatctgcaggagatgacagggccttgatccaaaatcctagaggcttccactgtgattcgcctatggagcttcccaaaggctaacacctcaagcaccactggatctgatgggtcatatggcccaagtggcagagcagcttgcacagcagcctggacctgttgcagagcttctgctgttctggaccccactcaaaactgtcaggctttcaggtcacttaataaatgggccagaataacacacccaaat

SEQ ID NO: 951742 - DNA, 658 bp, Homo sapiens
  misc_feature 640: n = A,T,C or G
atttcccaacaacaaggccaaggagactgcagtctcaggagctatggagcagaagggtgtgtgcatggaccagaccccggcacaagggccccaaatcccygaacccagcaccaggcatgggggtagacaggggacacgcagaaggaatagattctccgagtcctccactgtgcccggtcctcatctctgtcagggtggggttcttgagagcctggttgccgctcactctcagatggtatctcccgcttctcccctcagcttcagttccctcttaaggactctgttctccttccacttccgctgtgaagatccctcagcgtgatgaagatgcaggggcaagtcagaggttacacagtgggggctgccctgctagtgtgctgaagccacgccaactgttcagggcagctttctgcttccaggaagaacacattgacctggctcctttcaacagtctgggcgttgtcttaagcctgagcttcttcagttgcctgctgaccccagacaccccctccagtccctacccatctccagcagccagatgctgaccaagcccaggagcttaccagacgtaagagccactagaatcgcctcctccccactcttccatgctctttcaaatttgatttccctagaaatcttncggcagggtgtgtctgct

SEQ ID NO: 951743 - DNA, 570 bp, Homo sapiens
ggaggtgtcccggagggtcagggctcagagcatgtacactgactcccctgccaccccccacacagaggcagacagggcggcccagcccaggtcacgcagcaagtctgtggccaggccaacaccaaggctcgggtctgcaggctcccagcccagggcttgtcccccagggtctcattgccttgagccagagtggccacgctggtccaacaggtgacctcctctaggccttcagcgtacagcagatgcccagtgaatatttctcaaatctaataggaaacaggaaatgcgctgagtgactgcagggcactgtccagtggatgggggggtgatgatgaataacccatgtcacatcatctttcagttcctgtgtccaggcaaacaccagggactgcactcagcacctccacccacaacccaggtcacagagctgcaaatggcaaaaccacacagttgggcaccggacccagacctgcccagacctcaagccagctctcaactccctctctgggaggagctgaggggctgagctagtcccaccagggaccccastctctctccaggcagctgctg

SEQ ID NO: 951744 - DNA, 654 bp, Homo sapiens
gcacctggccaggatggtgggatggggcatgggtgtctgccacaactttagcccagggtttaactctctttaaaaatgctttgcaattttcaagattttcytcaaaatatattttccattccagggaattttttataatacctccaagaaaggtattttgttatgtactatgctttaaaaatattttttctatgttttacaaagttagtgtttgttccattttgtaaatcacttccaattgacattgaattactaaagtcttcaaataaagtttgactctaactctctgagctgaatttgctggaaatgaagaactttggaatgttggatctgtgagaaactttagaaaacatctactttagtcctccagtatccaaggggggtacattctaaggcccccagtggatacctgaaaccacaaccaaactctttatatatactattatatatctatgatgaagtttaatttataatttaggcacagtaagagactaaccataataactaataataaaatagaacaatcataacagtatgccaacatcactacttttgtgctttggggccactattaagtaaaataagggttccttgaagagaaatcccccaattttagtcagttggagagatggatttgagacttattttctgttc

SEQ ID NO: 951745 - DNA, 649 bp, Homo sapiens
ccagctcatctcactgggactggttagagagtgggtgcagcccayggagggcaagctgagcagggtgaggcatcgcctcacccagaaggacaaggggtcgaggaactccctcccctagccaagggaagccatgagggactgcaccatgaggaatggtgtactcaggcccagatagtacgcttttcccatggtcttcacaacctgcagaccaggagattcccttgggtgcctatgacaccagggccctgggtttcaagcacaaaactgggcggccatttggacagacactgagctagctgcaggaatttttttttttcatacccccgtggtgcctggaatgccagaaagacagaatcgttcactcccctgaaaagggggctgaagccagggagccaagcagtctagctcagcggatcccacccccacagagaccagcaagctaagatccactagcttgaaattctcactgccagtacagcagtctgaagtcaacctggaacactcgagcttagtgggggaaggggtgtctgccattattaaggcttcagtaggcggttttcccctcatagtgaaaacaaagctgcagggaagttcaaactaggtggagcccaccacagctctgcaaagatgctgcggcctgactgcctct

SEQ ID NO: 951746 - DNA, 601 bp, Homo sapiens
ccaatttgccactctgtgtcttttaattggggcatttagcttgtttacacttaaggttaatattattatgtgtgaatttgatcctgtcattatgatgatagctgcttattttgcccattagttgatgcggtttcttcatagtgtcgatgttctttacaatttgcaatgtttttgcagtggctggtaccagtttttccttcccatatttagtgcttccttcagaagttcttgtaaggcagtcctcgtagtgacaaaatctttcggcatttgcttctctgtaaaggattttatttttcctcgttttgggaattttcagcctttttgtgctgttttttcctcacttacatggatttatctacctttggtattagatgttggtgaccttcagatggggtttttgggtggaagtcctttttgttgatgttgatgctattcctttctgtttgttagttttccttctaacagtcaggcccctctgttgcaggtctgctggaggttcactccagaccccgtatgcctttgtattaccagrtgaggctgcagaacagcaaagattgctgccttttccttcctctggaagcttcatcccagaggggcacct

SEQ ID NO: 951747 - DNA, 583 bp, Homo sapiens
aaggcttggggcttgcactctctgaagcaatggcccaacctgtacctcagccccttttagccattgctggagctggcgtggtggggacacaaagcaccaagtcctgaagctgcacagagcagtgcagccctgggccccgctcatgaagtcgtttttctctcctaggcctctgggcctgtgatgggaggggctaccgtgaaggtctctgacatgcatgggagacattttcccaattgtcttggctattaacattcagctcctcattacttatgcaaatttctgcagccagcttgaattcctcctcagaaaatgggtttttcttttctaccatatgttcaggctgcaaaatttccaaaccttcatgctctgcttcccttttaaacatagcttccaatttcaaaccatctctttgtgaacgcatataactgaacactttcagaataagccacgtcacatcttgaatgctttgctgcttakaaatttcttccacccaataccctaaatcatctctctcaagttcaaagttccacagatctctagggcagggacaaaatgccactttgctaaagcattagtctctttg

SEQ ID NO: 951748 - DNA, 498 bp, Homo sapiens
ccctcagaccacaatggaataaaaactgaaagcaacaagatctcccaaaaccacataattacatgaaaattaaacaacttgcacctgaatgacttgtgtaaacaataaaattgaggcaaaaagaattatttgaaataaataaaaacagagacacaacattccaaaatcaccaggatgcagcaaaagcagtgttaagggggaattttatagctctaaacatctacatcaagaagttagaaagattccaaattaccaatctaacatcacatgtaaagaacctagtgaacaaactaacccaaaactagaagaaataactaaaatcagaacaaaactgaatgtaattgagactcaaaaatacatataaaaaatcaactgagcaaaamttggtttcttgaaagagtaaacaaaattgatagatcactacctaaattaacaaaaataaggagaaaagatccaaataagaacaatcagaaatgacaaaaatagcattacaactgc

SEQ ID NO: 951749 - DNA, 664 bp, Homo sapiens
atagaggcttcattttcccccatgcattttgatccccaaaaagatggtgagctgtggactggcccttaaagccagaacacacatacatttcattggcaaaagctagtcgcatgtttgtgcctcatgtcagcttgggtaaggaagtacaatgctgctacatgtttggaaggaacatacaatagccctgagggtgatcacatacagtgataggaggcctggaagagaaattaaggagtataacagggaatagggagcactgagagagagaatgctctttaatagtgagcagtcagtgagggccttaatgataaagtgacatttcagtggtgatacgaggaggcaaaggggtaggtcttgcagttatctgaaggaagagtactctagtccgagaagacagccagagtaaaggtatggttatttttgtcatgtttgaacatcaacaagaaggtctgggtgattgaaatggaggaagcaagggagagaaggtcaaagagagagatggagttggataaggtagagcctacaaggtcactgtgaggactttrgcttttgggctgagtgggattggcgggctttaggcattttgaaaggagagatgtggtctgacttatatgtttatagtatctctggctgctgtgtgaggaaggaggtgattgagttgtgc

SEQ ID NO: 951750 - DNA, 596 bp, Homo sapiens
ttataccattctctcctggcctgtgaggtttccacttaagtctgctgtcggacatgttgaagctccattatatgttgtttcctttctcttgctgttttgagaattatttawccttaacctttggaagtttgactgttaagtgctttgaggtagtcttctttgggttaaatctgcttggtgttttataaccttcttgtacttggatactgatatcgttctctaggtttaggaagctctcttattatccctttgaataaattttctatcccatctctctctctacctctgttttaagacgaataagtcttagattttcccttttgaagctattttctagaccttgtaggcttgttttactctttttgtctcctctgtgtatttcaaatagcctgccttcaagctcactagttttttattgtttaattaattctgctgttaagagaatctgctgcaatcttcagtgtttcagttgcatttttcaactccagaatcttgcttatttttatttcattttttttgttaaatttatctgataggattctgaattccttctgttatcttgaatttcactgagtttcctcgaaacagctattttt

SEQ ID NO: 951751 - DNA, 586 bp, Homo sapiens
caaagataaatcgcccttgattttaaatacccttgatatgatgtgacgataatggtactttacctctgtggtctttctcccaaaaaaactatgaccccagtctcatcctgagaaaaacatcagaaaartccccatcgacagacattctacaagatacccaaccagtatttctcaagaccgttaaggtcatcaaaaacaaggaaagtctaaaaaactatcacagctaagaagagcctaagggggcatggcagctaaaggtaatatggtatcttgtgtaagatcctagaaccagaaatgaacctttggtatatacaaatgaaatctgaattaagtgtaaattttagttaataataatctatcattatgggctcattaactgtagcaaatgtaccaaagtatagtcaagtgttaaggaaactggtgtgggatatgtgggaattctctgtaccatcttcataatttttctgtaaatctaaaacttataaaaaataaattttacctagaaaactacaaacctaatgatgtgcatactattactactccccctttataggggaggaaacccaatcatggagaaaataattac

SEQ ID NO: 951752 - DNA, 599 bp, Homo sapiens
aggaaactcaaagaaaattaagataacacggagaaggagttcagaattctatcagataaatgtaagaaagacattgaaataatttaaaagaatcaagaagaaattttcagtttaaaaatgcaattatcatactgaagaatgcatcagagtctttccacagcagaattgatcaaggagaagaaagaaattgtgaacttgaagacaggctatttgaaaacacacagaggagacaaaagaataaagaataaaaaacaatgtgtaactgcccaaatttgtaaccacccaaggggttcaccttgcccgctacctagatagaactgatttatcaagacaggggaattgcaataaagagtaattcacacagagctggctgtgctagagtctggagttttattactactcaaattagtctctccaagcacttgaggatccaaatttttaaggataatttcatgagtaggggccagtgagttgagagtgctgattgattgggtcagatatgaaatcayagagagtcaaagctgtcctcttgcattgagtcagttcctgggtggggaccacaagatcagatgagcacttatattgatctggctgggtgg

SEQ ID NO: 951753 - DNA, 708 bp, Homo sapiens
gctgaggcaggagaatggcgtgaacccgggaggcggagcttgcagtgagctgagatagcaccactgcactccagcttgggtgacagagcaagactctgtctcaaaaaawaaaaaaaaaaataaataaataaataaataaataaaataaacaaataaataaaaataagtaaaaaagacaatgctgatatcagatatctaaaatggactttgtaaaatcacctctaaattcctgaaagagataaaaagtattaaagcataattaatttgatcctgtatggcattcccaaaactctactaaaagattgcaccagtgtgaatatacaaatacatatactttacaaacgggtatatttaccacaggagctttctacttgtatcactagaaacttttaaaacaatcacccttcttacaaacttttattacgtatctccaagggatagctctctaaaaacctccgaaataccacttactgcttagaaattttgtagaaaaactttttttttaaagcaaaaacagttgtaaacatattcaattaatacaaatgcttaatcaagaaaagggttttgggggagttttttgtttggctttttgtttgtttttttgctgtctgggtttattttctttgcttaatttacagagaattcacttcccagccaactttgcttatttttgaaatactatgcaatttggtcttctaagaatagttg

SEQ ID NO: 951754 - DNA, 583 bp, Homo sapiens
ataaataaataaataagaaaatcaaggttttaggtagaaggaaagttgcttttacatctgttatgtaattaccaccacacatgaaatataaacaagaaaaaaaaaacakttgtaacaatcacttcatatttttctttgaaacctcattaaataccacaacaaaatgctaacagtaactacctatagcattgactaacttcttgatatacttacttctttcttctatttacttacgccttcctatatttctcaaattttcttcaaaaaatgttttaacatttttaaactttactacaaaaaggaagcaggggccaggtgcagtggctcacgcctgtaatcccaacactttgggaagccaaggtgggtggattgcttgaggccaggagatcaagatcagcctagacaacatggtgaaaccctgtctctactgaaaatacaaaaattagccaggcatagtggtgtgcgcttgtagtcccagctactcgggaggctgagacacaagaattactggaaccccggaggcggaggttgcagggagccaagatcgcatcacggcactccagtcactgggcaactaagtgag

SEQ ID NO: 951755 - DNA, 575 bp, Homo sapiens
cctaagcaagcctgggcaattgcgggtgcccctcccccagccttgctgcygccttgcagtttgatctcagactgctgtgctagcaatcagtgagactccgtgggcattggaccctcccagccatgtgtgggatataatctcctggtgggccgttttttaagcctgtcagaaaagcgcagtattagggtgggagtgacctgattttccaggtgccgtctgtcacccctttgtttgactaggaaagggaactccctgaccccttgcacttcccaagtgaggcaatgcctcgccctgcttcggctcgagcacggtgtgtgcacccactgacctgctcccattgtctggcactccctagtgagatgaacccagtaccttagatggaaatgcagaaatcacccgtcttctgcgtcgctcacactgggagctgtagacctgagctgttcctattcggccatcttggctcctcccccagatctttctttctaaaggaatatttcttacacatctttaggacttcattgttaatatctcttcctctataaaacttttcaaagtaatactctgtattattctgt

SEQ ID NO: 951756 - DNA, 575 bp, Homo sapiens
cctaagcaagcctgggcaattgcgggtgcccctcccccagccttgctgccgccttgcagtttgatctcagactgctgtgctagcaatcagtgagactccgtgggcattggaccctcccagccatgtgtgggatataatctcctggtgggccgttttttaagcctgtcagaaaagcgcagtattagggtgggagtgacctgattttccaggtgccgtctgtcacccctttgtttgactaggaaagggaactccctgaccccttgcacttcccaagtgaggcaatgcctcgccctgcttcggctcgagcacggtgtgtgcacccactgacctgctcccattgtctggcactccctagtgagatgaacccagtaccttagatggaaatgcagaaatcacccgtcttctgcgtcgctcacactgggagctgtagacctgagctgttcctattcggccatcttggctcctcccccagatctttctttctaaaggaatatttcttacacatctttaggacttcattgttaatatstcttcctctataaaacttttcaaagtaatactctgtattattctgt

SEQ ID NO: 951757 - DNA, 710 bp, Homo sapiens
tataaactttattgatatgctaatgtagtgaattacaatgatacattttttgagtgatgaactaattcaatcaaactctaattataatgttttgttatcttaatacactgctggatcaactttacaaatattttaattaagatacctgtacatatggtcatagctgagatagcttaaatgtttgattgcttatctctctaggtttctggctatctgtccatttggttatttgtctggatactatacctggtctggttttgatatcagagttatgtttatttcacagaatgcattagaaatactttttttttttttttggcccaagaagggtttaagtagcataaatatggtcaatttcttgaaggcccaaaagaagtttattaaagctatattggtttagtgccttttttagaggtagagttctgtattgtttatctattgctgtgttagaaattatcccaaaactcaatggcctaaaacaacaataaccattcattatctcattgattctgtgagtcaggaatttgggagcagctcagttatgtggttctggcttaaggtttctcatgaggttgcacttagatgttggctgggtccacagtgatcacaaagctttattggggctgrtggatcaaaatgtctcactaacatgactgccaagtcagtgctggctattggccaggaacctctgttccttttctcatgggtct

SEQ ID NO: 951758 - DNA, 563 bp, Homo sapiens
aaatctacttaaggcattgatttcgctgcttatcaccaaagtcctggaaatttttcatgcaaaaataaattttttttttttgagacagtcttgcactgttgcccaggctgcagtgcagtggcartctcggctcactgcaaactctgcctcctgggttcacgccattctcctgcctcagcttcccgagtagctgggactacaggcacctgccaccacgcccggctaatgttttgtatttttagtagagatggggtttcacggtgttagccaggatggtctcgatctcctgacctcgtgatccgtccgcctcggcctcccaaagtgctgggattacaggcatgagccactgcgcccggccaaaaatttttttaaatatagttttatagccctatagtttcattgcctgtgtcttattacctttcagattggaagccttcagaccagggaccatgtcttatttttgttttttgttgcaaaacagattctggtgtcatgtgaacatttaattatataaatggtatgtgatggactcagccacctgccaatacaatagttaaatgctc

SEQ ID NO: 951759 - DNA, 559 bp, Homo sapiens
aggttttattatctctgcagaggtgggatgaggcagattcaaaggatgttattgtttcaataaacctttttaagaatagttttagattcacacaaagattgtgaagatactacatagagttcccgtattgcacacccaatttcacgtattcttaccatcttacattactaatgcactggtattacattgccacaactatgaaccaatttggcaattattaagtaaagttcatttatattttcttagtctttatctaattttattttcctgttcctggatcccacattatgtttagcttttatatctccttatccccctctgggctctgactgtgtctcagactttccttacttttgatgactttgaacgttttgaggagtcctggtcaagtatttttcaacatgccctcaattgggatttttcttatcttgttctcatgactatamtgaggttacagtttttggtaaaataccattttcatccaatctatttattatttcaatttgtttattttaaatttgaaaaatagaaaaaagcttatataataagatataaagaa

SEQ ID NO: 951760 - DNA, 757 bp, Homo sapiens
tggctaaactaccaaaaactaacaataccaattgctagtgaggctacagagcaacggaaactctcattcatttctggtgggaatgtaaaatggtctagccactttggaagacagtttcacagtgtcttataaagctaaatacagtctaaccacacgatcagcaatcacacccctaggtattactgatttgaaaacatgttcacacgaaacctacacacaaatgtttgtaacaactttcttcataaagttttgttggtaagacatattttgccaatggtacagatgtggggtgtgagggaaaagggagaagtcaagtttaacttacaggtttttgacttcctcaactggtgaatggcaatgccatttactgagaaataaagacaaccaactgcagaaggaataggtctaggaagaaaagtcacaatttccttttttgacatgttaaggtgagatacatctaaatttgtcaagtaggtagttggtaatactgggcaggtgagaaaatagagtaaaatctgtaaatttgtatgtaattagtgtctatacatgatatttaaactcatgtatccagaggcagaagcataatacaaaagagggctcaacactgagccctgggatattccaatatttagaagttgaatagaaaaggaggagtgaaaaaacaagagtgaaaaggaacatacagtgaggtaagaagaaaaccaagagagcacmgtaaattcaaagtcaagtaaagaagctgtttcaaggaagtgac

SEQ ID NO: 951761 - DNA, 483 bp, Homo sapiens
atagtgtataccatctctgtgatatcgatgaggaagactttatttctaaaagaattcaaaaatatggatttatcagactgaccaaaataatcttatccctcggttttctatattagttagatcggtccatttttctagcactttgagagagaggatagaggataccaagaagtacaaattgtcccgtcttcgtggcacttaaagtattatttaaagaaatttcttttttcctgtaataccagtgaaacgagacatggcaagtctgtaatagccaatcacagtcatcttcttagtagatttcccctgacagtatgtatagtagactgcttttcatggaattaagaaaagaatgcagttgactcagtaataatgacatatacatgaacctgccagtcataggtgtaccacatgrccggctcagccaagctttgacttgtatttttttcttcaagattggcttcttggtggtctgcacctatagtc

SEQ ID NO: 951762 - DNA, 639 bp, Homo sapiens
gctgaatgaacatgtaaaaattaatagcatttctccccaagtcataaatagaaaatgtaatggcaataaaaatctcatttataatgacaacagaaaatataaggtacttaagcataacactcatgtcttgcatgatggtcatcaagaactttaaaaattctaaataaaaattaacatgttcataaagggaatatgagaaaagtatccccaaaattagtttacaaattcaataaagtttttatcaaaattccctccaaattctttgaaatttaaactgaccctaaaactcatatagaagagaacgtctaaaactcatatagaagagaacgtctaaaactgatatagaagagaacgtctaaaactcatatagaagagaatgtctaaaactcatatagaagagaatgtctaaaactcatatagaagagaatgtctaaaactcatatagaagagaatgtctgaaactcatatagaagagaatgtctgaagctcatatagaagagaatgtctgaarctcatatagaagagaatgtctgaaactcatatagaagagaatgtctgaaactcatatagaagagaatgtctgaaactcatatagaagagaatgtctgaaactcatatagaagagaatgtctgaaactc

SEQ ID NO: 951763 - DNA, 662 bp, Homo sapiens
tctagctgcagctaaaagggccccagatacatcttaggccactgccccagaggcyacaaacccaaaactgccaaggcttccacatagtgttaagcctgcaggtgcacagagggtaagagttgaggcttggaagcctctgcccggatttcagaggatgtatggaaaagcctgtatgtccaggcagaagtctgctgcaggggtggagagctcatggagaatctctactatgtcagtgtggaggggaaatgtggaggtagaatcccctcacagagccccaactgggaaactgcctagtggagctatgagaagacagctaccatcctccagatgtcagaatagtagattcaccaacagcttgcaccatgcacctggaaaagccacaggcactcaacaccagcccatgaaaacagccacaggggctgtatcctgcagaaccacaggagtggagctgctcaaggccttgggagcccaccccttgtatcagtgttgcctgagacattgagtcaaagaaattattttggagctttgatatttattgactgccctgctaggttttggatgtgcatgggccctgtagcttctttgttttggccaatttctcccttttggaatgagagcatttacccaatgcctgtaccctcattgtatcatggaagcaacta

SEQ ID NO: 951764 - DNA, 588 bp, Homo sapiens
acagattagaagaaattgccttttccttcacatgaggccatgtacttgagtcttagctgttgttcttatgagtgatttctgtcttgaytgttccgtgtgataagattattatcaaagtcctgcccaccaaatgccatgatcaccccaaaagtgtatttgaaataggtttaaggtttcatttccaacttatatttaggacagatgtaagtgtaatatataaaataaattgaaatcaatttttatgaagttgtcagctactccttagaatcaactgacctgtttcctttttttagtggtactttcatttgaaactatttctaatgtgcaggaatttttttcctttagtgttgggcaaccattccaaggggcttacctggaaatcaacaagaaccccaagtataagaaactcaaagatgccattgaagaaaagatcatcattgctgaagtcgtgaacaaaattaaccgtgctaatgggaaggtaaaaatgctaaccttgaagactgataagaagtacctattagttgggatagtcaccctgttttctgaatgtaaaaatttgcatttcatgttctcagtagagttaactat

SEQ ID NO: 951765 - DNA, 627 bp, Homo sapiens
taagtgaaagaaatgaggcacaaaataattaaatatcctatttacacaacaaatggaaaattagatcaacagaaaatagataagttgttgcctaagaccaggagtaggggcagaaattaactgcaaagagacatacaggaatactattggagtatggaaatattctaaaatttggttatgttgatggttgcacatctgcaaatatttaccaaatatcatcaagctttatacttaaaataggtgaaatttatcgtgaatacatacctcaagaaagctgcaacaataccatttactttagcattaggaacatgaaaaatacataaagattttaaaaaatctaaaatattattgacagaaattttaaaaatctaaatcaatttagatatgtgacattttcatggactggaagacttaatattgttaatatgatcattcttcccagttgctttatagattcaaagatacttgacaccctaagagtttaatacatgttgagaagctaaggacctagactaatmaaaccattttcaaataaaaaatatacagttggtgaacttaaaatagctgattttaagacttactataaagagcaataatcaaaagagcgtgcaattggcctaagatgta

SEQ ID NO: 951766 - DNA, 576 bp, Homo sapiens
gcccactgccctgaagggagagacagggttttgagcccagcatggcaccagtacttgcccaggaattgcagtctttgttgcctagactgccttgcaaatttgtttagaaacccagagccctttagccaacggtggcaggccttgttggtactcaggtcccaaccattgagacagaagatttacccatggctagggctagtataaatgcctcctccatgggctctggcagagttctgccccatgttgctttccactgtgacagggcaggactgagttccagtgcaaaatcctgtaatcactgtgctctgcctcccttaagcacacagattctctctctgtgccatgaagctgctgccagggaattggggacgggaggtgcaggtgattcaagaatgtctttcctaccttcttcagtgctcctttccttaatatgatgttaaaaccaggyactattatagctcatctgagttttttgttcttgtgaaggggcttttttgtgtgggtagttgttcaatttggtcttcctgtgagggagatgattgccagaggcttctatttggctatcttgctctgcct

SEQ ID NO: 951767 - DNA, 590 bp, Homo sapiens
agcttcttgctcattgtgtytttttggacacaccacccctcttctatacgcccactccaacccatcctacatgctactgccagagcatctttctagaatgttgctcccctgcttatggtcatccagactctttcagttgtaaggaccttcatgctgtaccttctgccttcttttctatcctcaacaccctgagatatggaatctatgcctctagggtctccgacaacttgtggcatcccaaatgcatcatgttcttcattccttggcgtgattgttacttctagttgaatttttcttcatctcttctcttcctctctcccagctcctgcaccaccctcactcacctgactgctcatcgtttaagatcattattatgtgacacctcatctggaaagccttctgactacacccagatgaagcttgatgctaatcttctatgttcccatagcagtctgcaagaagttatataataacatttaccgtacttgattacatttttttctatttgaccaaacttcctatatactatgaaatctttgagcatagaagctagatctttatttatcttatttttaccccagcagctataa

SEQ ID NO: 951768 - DNA, 563 bp, Homo sapiens
atatccatacaacggaatatagtttagcaataaaaagaaataagctatcaaaccataaaagaacaagaagaatcttaaatgcatatcgccaggtgaaagaggccaatctaaaatcgctgtatactrtatgattccaagcacctgacatcctggaaaaggcaaaactttggagacagaaaaagaacagtggttgcagaggttttggggagggagggaggaatgaaaaggtggaacacagcagatttttagggtagtataaaactattctctgacactataatggtggctacatgtcattacacattggtcaaaatccatagaatgtacagtgtaaagagtgaagcctaatgtaaactatggactttaattaatgtctcaatattggctcataagttacaacaaatataccacaccaacacaagattttaatgataggagaaattgtgtgtatgtggtgggtggagagcaagtatatgggaagtctccgatctttttttttctttttttttaagttctgggatacatgaatacacgtgctgagcgtgcaggtttgttacataggt

SEQ ID NO: 951769 - DNA, 440 bp, Homo sapiens
gacctggtgggaggtgattggataataagtgtagtttcccccrtactgttcaaatgatagtgaaggaattctcacaggatctgatagttttaaaagtggcagtttcccatgcactctatctctcctgatgccttgtgaagaaggtgcttgcttctccttctgccatgactgtaaatttcctgagacctccccagccatgtggaactgtgagtgaattaaacttcttttatttataaattacacaatcttggatagtatctttatagcagtgtgaaaattgactaatacaccagggtaaagcctgccaaacttcctgagttgaggtggagctgagagtctacagagaacaaggaaattagagatttcaggacaaataattatacagtagatattttcaagagagagaactacaaagttctgtagaagttgccttagagtat

SEQ ID NO: 951770 - DNA, 440 bp, Homo sapiens
gacctggtgggaggtgattggataataagtgtagtttcccccgtactgttcaaatgatagtgaaggaattctcacaggatctgatagttttaaaagtggcagtttcccatgcactctatctctcctgatgccttgtgaagaaggtgcttgcttctccttctgccatgactgtaaatttcctgagacctccccagccatgtggaactgtgagtgaattaaacttcttttatttataaattacacaatcttggatagtatctttatagcagtgtgaaaattgactaatacaccagggtaaagcctgccaaacttcctgagttgaggtggagctgagagtctacagagaacaaggaaaytagagatttcaggacaaataattatacagtagatattttcaagagagagaactacaaagttctgtagaagttgccttagagtat

SEQ ID NO: 951771 - DNA, 498 bp, Homo sapiens
ttatgagttaatttttgtataaggtgtgaatttacattaagaatctttttttttcttgatgatggatgttaaatggctctagtgcctttttttggcaggaaaccactcctccactgaattactttcatttctttgtcaaagattatttagacatatttgtgtagatatatttttggattctttatttggttccattgatctataggtatcttcttctgggaatactacatgttcttgattactgtaggatgaatgaaatagatctttccaaatgtattagtcaggattccctagagggacagaactaataagagagaaatgtatattaacttatgcaatcacaaggtcctacaataggccgtctgcaagcttgaggagccaggagagccagtcaaagcctcaaaaytgaagaacttggagtctgatgtttgagggcaagaagcatccagcacgagtgaaagatgtaggctgggaagctaggccagtctcgccttttca

SEQ ID NO: 951772 - DNA, 574 bp, Homo sapiens
tccagggctttttttgggtggtagggtaygtattactgattcagtttcaaaacttgttattagtctctttatgattgcagttttttcttggttcaatcttcaaaagttgtatatttccaggaatttattcattttttctaggttttctagtttgtgcacatacacatgttcataatagtctcctgtacttctgtggggtctgtggtagtgttacctttgtcatttctgattgtgtttacttggatcacctctctttttttctctttattagtctagctagcagtctattaatatttgttattcttttaagaaaacaacttttggcttcatttatcttttatatgggttttcacgtctcaatgttgttcagctcagctctgattttagttatatcttttcttttgctaacgttggggttggtttgcttctgttttttctagtacatctaggtgtgatgttagttttttaatttgagatctttctaccttcttgatataggcatatagtgctataaactttcctcttgctgcttgaactgtgtttcagagattctggtatcgtgtatctttgtttt

SEQ ID NO: 951773 - DNA, 705 bp, Homo sapiens
ttaccatgctctgtgattaaggtcaagggaaactacaccagctcaatccaggcaggagtacaaacggctcagacccttcaggaatgaaggtttgggtcagtccaccagggaaaacaaacaaacaaacaaacaaaaaacatgacctgctgaggtgcttgctgaagacaaagggaatacagaacatgtagtagaagttagtcacaatactagctacgaccacgtgaccagttgcagaaacgaggactgtaattgtcaagagtatttcctccttttgttaaaacatgtttgtgcatgtgtacacttgtactaagaaaatatcttcattttatttcctttttccttatcatgtgacataagatttattgacttcatatcggcatttaagtgttgttaactttatttaatagcatttggattggggattggtgcatttctggttgtacaaaggatggtcgtattatgctacgtgcaattatgcccctattattgtctttatttgaagattatgtaggatctcaggagatgtttataggttcaggttgacaagggatggacctgtgatggttaatacggaatgtcagcttgattggattgaaggatgcaaagtattgatcctggatgtgtcggtgaggktattgccagaggatacatttgagtcagtgggctgggaaaggaagacccacacttaatctgggtgggcacaat

SEQ ID NO: 951774 - DNA, 667 bp, Homo sapiens
tcactttgaactccttcaggctgagagtgtgatttctggaagagtatttatcacttcacagttcctctatgaataamccgtttgggcaagcaagggtggtgggggatgtcctatagagttcattatacagagattttcttttttaggaaagaaatgcacatggaggctccaataaggcaataaaagcaaatacaccttagctctagacttgtgcttctaaaactttaatgtgcatacaagtcacctgggatcttgttaaaaggtggatgctgattcatttggtctggagtggggcctgagactcggcatttctaataagctcccaggtgaagcagttaccactgatccaaggaccacactttgattagccatgcttgagaccaaggcattccttaaaataagttgcttctgctccagactttctgccatcattctcaattactgaatgcaaatggcctgtgaggagcagaagtctcacccaatatctaatcttcaggtgatacacagagctgaaaatcagccctcggagagtgcttttttttcatccacaaaaaagtgtatatttaatggacactgttctgaaatgtggattttcatttttgattgctttcaatggaaaaggaacaccgcaatggcaagatataatcgtctcagctaggagaaaaaa

SEQ ID NO: 951775 - DNA, 616 bp, Homo sapiens
taaaccacaatgaagaaaagggtattatgtatactttttggcttggttgtcattttttttttttttttttttttcaaaaggagggaraaaaggtaggtagtttttaagcatggtttgggctgctgagatgggagaccagagcaaatgtaccagggagtccctgggcatctgatgatggactattacagaggataagagtaatctaggccgggcgcggtggctcatgccagcaatcccagcactttgggagaccaaggcaggcagatcacgaggtcaggatttcgacacctgcctgaccaacatggtgaaaactagtctttactaaaaatacaaaaattagccaggtgtggtggtacttgcctgtaattccagcttcttgggaggctgaggcaggggaatcacttgaacccaggaggcagaggttgcaggagttgagattgcaccattccactctagcctggcgacagagcgagactccgtctcaaataacaaacaaacaaaaaaagagtaatctagacaagggccaaagatagctcatttcaggaatgtgcttaagacctgcacttatctaggtaaggaaacaatacttctatttcattttcatctcttccacatc

SEQ ID NO: 951776 - DNA, 616 bp, Homo sapiens
taaaccacaatgaagaaaagggtattatgtatactttttggcttggttgtcattttttttttttttttttttttcaaaaggagggaaaraaggtaggtagtttttaagcatggtttgggctgctgagatgggagaccagagcaaatgtaccagggagtccctgggcatctgatgatggactattacagaggataagagtaatctaggccgggcgcggtggctcatgccagcaatcccagcactttgggagaccaaggcaggcagatcacgaggtcaggatttcgacacctgcctgaccaacatggtgaaaactagtctttactaaaaatacaaaaattagccaggtgtggtggtacttgcctgtaattccagcttcttgggaggctgaggcaggggaatcacttgaacccaggaggcagaggttgcaggagttgagattgcaccattccactctagcctggcgacagagcgagactccgtctcaaataacaaacaaacaaaaaaagagtaatctagacaagggccaaagatagctcatttcaggaatgtgcttaagacctgcacttatctaggtaaggaaacaatacttctatttcattttcatctcttccacatc

SEQ ID NO: 951777 - DNA, 424 bp, Homo sapiens
gactattatccaaaaataaaacaaacagaaaataacaagcattggcaaggatgtggagaaattgaaacccccatgcattgttggtgggaatrtaaaatggtgcagccgctgtggaaaacagtttgatggctcctcagaaaaccatacacagaattaacatatgatccagcattgccactttcaggtatatacccaaaacaatagcatgaaacacataaagagacatgttcatagcagtattattcagaataactaaaaggtggaagccatgttaagtgttcattgacagatgaatggataagcaaaatgtggtatatccatacaatgaaatattattcagcttttaaaaggaaggaaatttgatacatgcaacaacatggatgaatcttcaggacattgcgttcagtgaaataaaccagtcaca

SEQ ID NO: 951778 - DNA, 424 bp, Homo sapiens
gactattatccaaaaataaaacaaacagaaaataacaagcattggcaaggatgtggagaaattgaaacccccatgcattgttggtgggaatgtaaaatggtgcagccgctgtggaaaacagtttgatggctcctcagaaaaccatacacagaattaacatatgatccagcattgccactttcaggtatatacccaaaacaatagcatgaaacacataaagagacatgttcatagcagtattattcagaataactaaaaggtggaagccatgttaagtgttcattgacagatgaatggataagcaraatgtggtatatccatacaatgaaatattattcagcttttaaaaggaaggaaatttgatacatgcaacaacatggatgaatcttcaggacattgcgttcagtgaaataaaccagtcaca

SEQ ID NO: 951779 - DNA, 424 bp, Homo sapiens
gactattatccaaaaataaaacaaacagaaaataacaagcattggcaaggatgtggagaaattgaaacccccatgcattgttggtgggaatgtaaaatggtgcagccgctgtggaaaacagtttgatggctcctcagaaaaccatacacagaattaacatatgatccagcattgccactttcaggtatatacccaaaacaatagcatgaaacacataaagagacatgttcatagcagtattattcagaataactaaaaggtggaagccatgttaagtgttcattgacagatgaatggataagcaaaatgtggtatatccatacaatgaaatattattcagcttttaaaaggaaggaaatttgatacatgcaacaacatgratgaatcttcaggacattgcgttcagtgaaataaaccagtcaca

SEQ ID NO: 951780 - DNA, 873 bp, Homo sapiens
tggttatctgaggctctgcctgtctgcccatttggagacttgatggcttcttggcaagaaatagaaacaagctttacaaggtaagtatgcatgaatcaaacatgtattatacaaggaaagaatctagtgccaaagattacagaaagaagtgaaatatactaacaacgttgtatcctgagctctctcaccctgataaaatagattaaaccttgtataggagcagttaaactttaagagggagtagctgttcttgtcaaatctgtagcagttaagaggtgaaccttaggaattctggagtttgtgagcttgaatggtggccattaaagcttctgcctctttcttgtgtctgaaagaccaatgtggcccctttcaaaaggtcctctaatgtactatctggtcccatggtccgtttctgagtataaactggaggtggtgaagtttgttgcccattctgaaagacagggaatttggcatccctcattcccttcctcctttcagcgaaaactcggaatgtgaggtggaaagaaagcaggcacacctccttttctttcccatccttatccccaagtcccagtgtccttggcaggtgccacccatggatgccaatgtggcttgcacccataaaccagtgaaggcctagaaaataggaattatccacactcatctatgcctctacctcccctactgtcgacaacctttgagtttcctgggtctcatttatgccatgcagcatggcctccttccatgaagtgggggtttaatcagcaagaattagtcctgctcatttacactgtgcctrttgcctggctttagctccctcagatctggttttcctttctagggcctcaatctaaagctcgaaatcgagtttgg

SEQ ID NO: 951781 - DNA, 564 bp, Homo sapiens
cttttgagctgagactgaggttttctagttatagaatcatgttgtctgcaaacagggataatttgacttcctatttagatgtcctttatttgtttctcttgtctgatygttctggccaggacttccaatactatgttgaataggagtggtgagagagggtatccttgtcttgtgccagttttcaaggggaatgctttcagctttttcccattaagtatgatgtcggctatgggtttatcattgatgcctctttttatttttggggtatgttctcccaatacttaatttgctgagagtttttaacatgaagatgtgtttgtggagttttatcaaaagccttttctgcatctattgagataatcatgtggtttttgtcttttgttctgtttatgtgatgaatcacatttattgatttgcatatgttgaaccaactttacattttagtgataaagcctagttgatcatggtggataagctttttgatgtgctgctgggtttgttttaccagtattttgttgagaatttttctattgatattcatcaaaaatattggctgaagttttc

SEQ ID NO: 951782 - DNA, 591 bp, Homo sapiens
tgggagacattggccaaaacaaagggtctacaggccccatgcaagtctgaaatccaayagggcaattgttaaactttagagtccccaaatgatctcctttgactccatgtctcacatccaggtcatgctgatgcaagaagagggttcccagggtattgggcagctcttcccctgtggctttgtagggtacagccccactcctggctgctttcatgggctggcattgagtgtctgcagattttccaggctcacagtgcaagctgtcagtggatctaccattctggggtctggaggatgttggccctcttgtcacagctccattaggcagtgccccagggggactttgtgtgggagcttcaaccttacattactctcccatactgccctagcagaggttctccatgagggctctgcccctgtagcaaacttctgcctgaacatccaggcgttttcatacatcctctgaaatttaggcagaagttcccaaaactcaattcttggcttctgcacacccaaggaaggcaccaaggcttgggcttgcaccttctgaagcaatggctcataccttggcctcttttagccaccgctgga

SEQ ID NO: 951783 - DNA, 676 bp, Homo sapiens
gctgaaaggcatcaaggaagttctcactctggatcgcagactccacctgtaactggcagtccagcccccagatttcaggtcatctctgatttgaagtctgggcctcactggggattcgccccttcctgcctaggaacctgtttgcctccagctgccatcaatactacctaagactatttacacattcaatgcaatctctgtgaaaatgcatataacattcttcaaatagagaaaacaatcctaaaatttatatggaaccacaaaagaacctgaatagccaaagcaatcctgggcaaaaagaacaaagctggaggcatcataccaccagatttcaaaatgtagtacaaagataaactaaccatataagcatgctgtggcataagaaaaggcacattgaccaatggagcctttgttttttatttatatgtgttataaataacacatataaatccacacttttacagccaactcattttgagaaaggctcccaaaacaaacagtgggaaaaaagcattctcttcaataaatggtgtggggaaaactggatatccataagcagaagaatgaaattaaacccctgtctttcactgtatgtaaaaataaaatcaaaatggtttaaagcattagatctawgatctgaaactatgacattactagaagaaagcattggtgaaag

SEQ ID NO: 951784 - DNA, 602 bp, Homo sapiens
atttccagaagacactggagccacatctattaataaaaaataaacattagaaaaaaatgtgaccccacttggttttcaagtatgaagatctgagatgagcagttttgaacatcatctctttgatttttatatatgtaaatatcactataatgtctctagttatggactttttggcattattttgagccctttaaatttgagttttttaatttagttctgagtatttacaatcattatttctttgaaaagatctatcccttctacctcttaggtcttatgctatattttctatctctttgtattttcttcctattctttatttctatgatagtttctcattctgtttttactctcatcagttaattctttggtagagttactcctgcttagggatctattactttttatttcagtgattattttttatacctagtattttcatttgactctttatttatttacttttttgagatgaagtttcactctgtcgcccagatgtagtgcagtggcacaatctcagctcactgcagcctccacctcctggcttcaatcrgttctcctgcctcaacctccagagtagctgagattacaggtgtgtgcca

SEQ ID NO: 951785 - DNA, 558 bp, Homo sapiens
ccaagtcccatgagaaatggrcaagtcctagggactgtcctccctggaccccagaggtagagattagcccctttatgtgaaaggagaacaggatgacagagagccaaggatcaaaattatcaggcaccacccatggacccgagggccacattcttcttctctgttgcagaaaactttacctgcttttgatactgaatcccgttaatggagggctgataaaagaatccagaaaatataaaaatggagtgcccattttccgggccattccatttgaaaggaaagactatttgggagaaccatccaacagcctcagcacttattcagaacaactttttctgctgatggattgaatttggcaaacagagatgaatgctaaagtgattacaaattgtactgcagggaatatccaaaaaggaaaggcagtagtttcaataatcagttgtaccaaactaatactcaagctagctttttcatctgtagaatttcctctctctgctggtattgtcttcatgttacttagcctgagacaacatgggccccttaagggtctgggctgag

SEQ ID NO: 951786 - DNA, 558 bp, Homo sapiens
ccaagtcccatgagaaatggacaagtcctagggactgtcctccctggaccccagaggtagagattagcccctttatgtgaaaggagaacaggatgacagagagccaaggatcaaaattatcaggcaccacycatggacccgagggccacattcttcttctctgttgcagaaaactttacctgcttttgatactgaatcccgttaatggagggctgataaaagaatccagaaaatataaaaatggagtgcccattttccgggccattccatttgaaaggaaagactatttgggagaaccatccaacagcctcagcacttattcagaacaactttttctgctgatggattgaatttggcaaacagagatgaatgctaaagtgattacaaattgtactgcagggaatatccaaaaaggaaaggcagtagtttcaataatcagttgtaccaaactaatactcaagctagctttttcatctgtagaatttcctctctctgctggtattgtcttcatgttacttagcctgagacaacatgggccccttaagggtctgggctgag

SEQ ID NO: 951787 - DNA, 638 bp, Homo sapiens
tataggagagtgtggggggaacaggcagagcacagaagatttttagtgcagtgaaactcttccgtgtgatactataatggtggatactggtcattatacaatggtcaaacacgtagaaatgtacaacaccaagagtgaacactaatgtaaactatggaagctgagtgataatgatgtgtccatgcaagttcatcagttgtactaaatgtactaatctggtgggggatgttcataatgagggaggttaagcacatgtagggcagaggatatatggaaaatctctgcacttcccgcttaattttgtcatgaacctatacctgctctaaaaaataaagtcttttaaaaataaataattaaataaataacaaataaaataatatcacttgtatttctatttaccagtgatgaacacatgaacaacaaaataaaaatatgataccatttacaatcactttaaaaatgaaatacctaggcgtaacaacaaaacggggcatgtatgctgaaaactagaaagtgytgatgcaggaaatcaaagatcaaaataaatggagagacataatatattcatggattgtaaacaaactcagtaaatatgttaatttcctaaagttgttatacaggttcaatacaattgctat

SEQ ID NO: 951788 - DNA, 709 bp, Homo sapiens
ctgggggcctgtccctgggaagacagagtcataacccagtaataaagaagcatgtttctgacacaggggtgtctatgtctatcctaattcctccctcaccatcatcaccggagcatgttccttgcatcagataaacagagagaaagagaagcatgaaaagcccattgtccacacatgagtcacagctactcttaagagaatggcctccaggcttttcatgtgctgtctctgattctcagaaatctacaaggtcagtgtgaccaccctgctccaaatctaagaaaatagaggctccagaggaaggagaaatttcacctagcatcacacagcttgcaagaagcagagtggaagtcgattccagctctgcctgcaagaccctctcgtcccccttctgcttcccttcttgacaaacggtcttctctactttggaagcgccatccatgggcacaaagagctctggggagatggggattcctgaagagctgcaggggaactgggagagggttttctgacggaataatcttacatagagatatcagtttggcatggttatcacatttctttaacttctaggtaataccaaattttaagtgcactatgacataargaataattttgtccatggaaaaatgaggtgggaattctcaacaacagaagttttaaaaatatgtttgatttcaagtgtacaagtcccatcgtgtgtgatcag

SEQ ID NO: 951789 - DNA, 446 bp, Homo sapiens
actcatgaggctgaggcaggagaatcacttgaacacaggaggcagagttcgcagtgagctgagatcgcrccgctgcactccagcctgggcaacagagcaagactccctctcaaaacaacaacaacaacaacaacaacaaactttagagcgggactaagaggaagtaaagtacacttggaagagggccagggggcgacttgagagatcaagtgcactgtttgacctttgacttggggttttatctgttgacatagttccagggttgtacatcccttctcccctgattcttccctgggagtgggctgtccacgtgtgcagtggtctgtccacgtgtgcagtggtctgctagcagttgggcggtgagcacgcagtgtgtttactggagttgtgtgcatgctcacttgaggcattcttcccctaccaggtgaatgtccctagaagttaaa

SEQ ID NO: 951790 - DNA, 590 bp, Homo sapiens
ccagagtgtggccccttgtgtgacatggcggcagggctccaggagggaatgtcccaggagtagtcagtccaggagacccaggccgaagctgcaaggcttttcatgccygagcctcagacatcccagaatgtcccttctaccactttttggtcaagcaagtcactgagaccaacccagattccagggacaggagttagaatccccaccgccttttgaagagcagttcatgctgtgtcgcccaggctagagtgcagtggcgcagtcttagttcaccgtaacctctaactcctggggctaaagcaatcctcctgcctcacttcccaagcagttgggactacaggcatgcagcaccaccaccggctcacttccctctcaatacaagcggctaacgtttatccagctcttgttttgtgccggccccgggttaagcgatgcacatatgtagccagtttcatgaaggacacatgtcctgttaaagtgaacattaacaaaaggtttaattttctctgataaacaccaccagctctgtttgttcgaaatctccatttccactgagcataagattccccacgagggcactcagtatgatt

SEQ ID NO: 951791 - DNA, 661 bp, Homo sapiens
taagtgtctattccagtgaggacaaacctctgccctttccatgatataagaggtccaatataatcagcctgccactaggtagctcgctgatcaccccaaggaatggtgctatatcgagccctcagtgttggtctctgctgctgtcatatttggcactctgcagttgccgtagccaggtcagccttggtgactggaagtccatgttgctgagtccatgcacaacctccattcctgccaccatatccgctttgttcatgtgcccattgggcgatgacaggggtggctgaggaaagaggctgagtggtgtacacagaatgagtcattctatccagttgattattcaactcctcctccactgtggtcacccactggtgagcactaacatgggatacaaatattttcagtttttgactactcagagagatccatccacatacttcttccccaaatttcattgtcaccaattttccaattatgcttctttcaagtccctgaccatccagccaaaccattggctacagcccatgaatcagaatataattgcacatctgtccatttctccttcaaggcaaagtgcacaaccaggtgcacttctagaagttctgcccactgggaagaattyccttcacggctgtccttcagggatgtcctagaaagcggc

SEQ ID NO: 951792 - DNA, 596 bp, Homo sapiens
aacttatctaggctctgcctacagtggcattttgacatatctctgcactgatcacccaggtgatctaactcttttctaggatctgcctacatggtgctttgtgacatatccctgcaatgatcacacaggtgatgtaccacttgccaaggctctgcctacagggagattgcgatgtatctctgcactgatcacctaggtcatgtaactcttgtctaagctttgcctacagtggcattgtgacgtatctctgcactgatcatccaagtgatgtaactcttgtctacgatctgcctaaagggactttgtgacataaatctgcactgatcatccaggtgttgtggcttttgtctaggctctgcctaaggggacattgtgatatatttctgcaatgatcacccaggtaacggactcatgtcttgggtctgcctatgggggcattgtgacatatttctgcactgagcacccaggtgatgwaactgttgtataagctctgcctacaggggaattgtgagagatgttgccactgatcacccaagtgacgtaactattgtctaggctttgcctacagggggctttgtgtcatacctttgcactga

SEQ ID NO: 951793 - DNA, 596 bp, Homo sapiens
aacttatctaggctctgcctacagtggcattttgacatatctctgcactgatcacccaggtgatctaactcttttctaggatctgcctacatggtgctttgtgacatatccctgcaatgatcacacaggtgatgtaccacttgccaaggctctgcctacagggagattgcgatgtatctctgcactgatcacctaggtcatgtaactcttgtctaagctttgcctacagtggcattgtgacgtatctctgcactgatcatccaagtgatgtaactcttgtctacgatctgcctaaagggactttgtgacataaatctgcactgatcatccaggtgttgtggcttttgtctaggctctgcctaaggggacattgtgatatatttctgcaatgatcacccaggtaacggactcatgtcttgggtctgcctatgggggcattgtgacatatttctgcactgagcacccaggtgatgaaactgttgtataagctctgcctacaggggaattgtgagagatgttgccactgatcacccaastgacgtaactattgtctaggctttgcctacagggggctttgtgtcatacctttgcactga

SEQ ID NO: 951794 - DNA, 596 bp, Homo sapiens
aacttatctaggctctgcctacagtggcattttgacatatctctgcactgatcacccaggtgatctaactcttttctaggatctgcctacatggtgctttgtgacatatccctgcaatgatcacacaggtgatgtaccacttgccaaggctctgcctacagggagattgcgatgtatctctgcactgatcacctaggtcatgtaactcttgtctaagctttgcctacagtggcattgtgacgtatctctgcactgatcatccaagtgatgtaactcttgtctacgatctgcctaaagggactttgtgacataaatctgcactgatcatccaggtgttgtggcttttgtctaggctctgcctaaggggacattgtgatatatttctgcaatgatcacccaggtaacggactcatgtcttgggtctgcctatgggggcattgtgacatatttctgcactgagcacccaggtgatgaaactgttgtataagctctgcctacaggggaattgtgagagatgttgccactgatcacccaagtgaygtaactattgtctaggctttgcctacagggggctttgtgtcatacctttgcactga

SEQ ID NO: 951795 - DNA, 634 bp, Homo sapiens
cttgtctaggctctggctacaggggtcttgtgacacatgwctgcactgatcacccaggtgatgtaacccttttctaggctctgccaaaaggcggcattgtgacataattctgcactgatcacccaggtgatgggactcttgtctaggctcttcctataggggcattgtgacatctctgcagtggtcacgcaggtgatataactcttgtctatatatgcctagtggcggcattgtggcatatttctgcactgatcacccaggtgatggactcttgtcttggatctgcctatgggggcatagtgacatatctctgcactgatcagtcatgtgatgtaacgcttgtctaagctgcccctaaaggagtgttgtgacagatatctccactggtcacccaagtgatgtaacaattttctgggatttgtccacaggggggtttgtgacatatcattgcactgatcacccaggagatgaaactcttgtctaggctctgcctgcaggggctttgtgacatatttcttcagtgatcatccaggtgatataactcttgtctaggctccacatactgggggtattttgaagtatctcttcactgatcacccaggtgatgttacatttatctaggatctgcctacag

SEQ ID NO: 951796 - DNA, 597 bp, Homo sapiens
taaaataaaattatcctggattatcttgatgagcccagctatggtttaaatgtttgyaccttttacttttttatttgtttattttttcattatgaaattttacatcagtaagtataagggttacctttttttattatactttaagttctagggtacatgtgcacaacgtgcaagtttgttacatgtgtatacatgtgccatgttggtgtgctgcacccattaacttgtcatttacattaggtatttcccctaatgctatccctcccccctccctccaccccatgacaggccctggtgtgtgatgttcccctccctgcatccaagtgttctcattgttcaattcccacctatgagtgagaacatgtggtgtttggttttctgtccttgcaatagtttgctcagaatgatggtttccagcttcatccatgtccctacaaaggacatgaactcatccttttttatggctgcatagtattccatagtgtatatgtgccacattttcttaatccagtctatcattgatggacatttgggttggttccaagtctttgctattgtgaatagtgctgcagtaaacatacgtgtgcatgtgtcttt

SEQ ID NO: 951797 - DNA, 566 bp, Homo sapiens
tgtaaaatgggaatgatcacagaacttcctctgatttggcatcaatgttttcatagtraacattgtatcgatgttttcatagtgaacgttgtattaatgtttactaataaaatgagtttttaataataaaatgagtttttaaaaaaacattgtattgagtttaatgctcagtccaatagtattaaactcatcattttaagtatcaatgagataatctgtgtaaagtgaatgagataatctgtgtaaagtgcttaagacagtgtctggaatttaagaaggcttaataaacaagagttaccagcaacttcattatcaccatcctcatctcattatcatatttgtcactgtcataaaaagtaaatgccttactagacttaccagtattccaataagtaaaatcagcaaataaccaccatccactcacaccttctcaggacactgaaatgcccccatagaacctggagggaacaggagcttgcaaagcacatccctggagtatttttctaagtcatccctagtgatctcagggaattctctagagtctcaggggcgagttcagttcccca

SEQ ID NO: 951798 - DNA, 566 bp, Homo sapiens
tgtaaaatgggaatgatcacagaacttcctctgatttggcatcaatgttttcatagtaaacattgtatygatgttttcatagtgaacgttgtattaatgtttactaataaaatgagtttttaataataaaatgagtttttaaaaaaacattgtattgagtttaatgctcagtccaatagtattaaactcatcattttaagtatcaatgagataatctgtgtaaagtgaatgagataatctgtgtaaagtgcttaagacagtgtctggaatttaagaaggcttaataaacaagagttaccagcaacttcattatcaccatcctcatctcattatcatatttgtcactgtcataaaaagtaaatgccttactagacttaccagtattccaataagtaaaatcagcaaataaccaccatccactcacaccttctcaggacactgaaatgcccccatagaacctggagggaacaggagcttgcaaagcacatccctggagtatttttctaagtcatccctagtgatctcagggaattctctagagtctcaggggcgagttcagttcccca

SEQ ID NO: 951799 - DNA, 566 bp, Homo sapiens
tgtaaaatgggaatgatcacagaacttcctctgatttggcatcaatgttttcatagtaaacattgtatcratgttttcatagtgaacgttgtattaatgtttactaataaaatgagtttttaataataaaatgagtttttaaaaaaacattgtattgagtttaatgctcagtccaatagtattaaactcatcattttaagtatcaatgagataatctgtgtaaagtgaatgagataatctgtgtaaagtgcttaagacagtgtctggaatttaagaaggcttaataaacaagagttaccagcaacttcattatcaccatcctcatctcattatcatatttgtcactgtcataaaaagtaaatgccttactagacttaccagtattccaataagtaaaatcagcaaataaccaccatccactcacaccttctcaggacactgaaatgcccccatagaacctggagggaacaggagcttgcaaagcacatccctggagtatttttctaagtcatccctagtgatctcagggaattctctagagtctcaggggcgagttcagttcccca

SEQ ID NO: 951800 - DNA, 656 bp, Homo sapiens
gaaccgccttgctgtatcagctcccatttcctgtgctcctagagaagtggggtgtgtttttttgtatttattagtccttttagtttctacttccaaaggggtgtgtgtgtgtgtgtgtgtgtrtatatatatatatatatttaaggagggtggtggcctggaagtggggacatccaggaacacaagaggaggatgcagtgtagatgggattgagagggagggaagaggcaggctgtgggtctcaggctcagcctaggacacttcccccagggctggatcctccagactccccttccccactttcctccagggtgagatccaagctctcgatactccatccagctacattaggtgaatgcacatccaccaggactttcttcctccatcaccttcccgttaaggcactcggctggagaagcccggcatcctcacccccagcttgtggctctcactcagatgaaagcactcctcagtacaatgtgcaggagacagaggccatctctgatgttcctcgaaaataccagtgcccattgtcattttgctctgatattgcaagcactgcggacatgctttcttgatgaaggcttctttctgttgaattttccagagggacctttaaaagcagaatttgctagaacaaaataaaggagtgcgca

SEQ ID NO: 951801 - DNA, 598 bp, Homo sapiens
tttctaaatatacaattatgtcatctgcaaacagagataatttgacttcctctcttcctatttgagtacsctttatttctttctcttgccggattgccctggccagaacttccaatactatgttgaataggagtggtgagagagagggcatctttgtcttgtgcccattttcaaagagaatgcttccagcttttgcccagttagtatgatattgtctgtgggtttgtcataaatagctcttattattttgagatatgatccatcaatacctagtttcttgagtgcttttagcatgaagcggtgttgagttttatcaaaggccttttctgcatctattgggataatcatgtggtttttgccattggttctgtttatgtgatggagtacgtttattgatttgtgtatgttgaaccagccttgcatcccagggatgaagctgacttgatcatggtggataagctttttgatgtggtgctggatttggtctgccagtattttattgaggattttcgcatcgatgttcatcagggatattggcctgaaatttccttttttttgttgtgtctctgccacgttttggtatcaggatgatgctggc

SEQ ID NO: 951802 - DNA, 537 bp, Homo sapiens
ctaatttttgtatttttagtagagaagggrtttcaccatcttggccaggctggtctcgaactcctgactctcaggtgatccactcgcctcgacctcccaaagtgctgggattacaggcgtgagccaccgcatccggccaacactggtttctttaaaactatccatgcctgttgtcccttgtaaagtctttgcataaaaccagttggaagaccattgttctctacttcatttaggtgatttgtgttttcttttatattgtccaagatccctttacttgtctgtaatatttcatcttcactgttgagacttcagcaggtacagacagttaggtgattgggatgtatttacagtttgatcacttaacctccttgggccttggtttcttaatctatataatataattctctcatgttacttttgttccaatattttatttttctaataccattctatgggctagcaagattccattatgtgttgactctcccaatttctattattcataccacagattaagttcaaaatctttgagaggaa

SEQ ID NO: 951803 - DNA, 635 bp, Homo sapiens
tcttatttctaggttttctatcggttaccatcaggactttaaataatattctcaaaactttattctgtagtctttcaccttaaaacagttcctcttccctctgtgctatttaatagtagggttcccacacgcccatcaggtctctttctctgcttccacctcccaaactattgtcataaatttcaatgtggacattgccagggctcataggatttatattctctttcagaattaaaattatgccttctgtgacttgttgatgagttgattctgtgaaataaaaattaataaacagattactatacaatgaatatgtaaatattcactgcagaatcagctctggaaattttactatttctttgataattttcatttctctatttcttttccattatttggatattgggcctcttaggatttttaaaaaatatctcttaactcatattttaccttttgggtttttgtgtttttgcttttttgctctttattctgggagattttcttaagtttatcttttagcctttytcatgtatttcagcaatgtcttttaatttgtgagacatcttttatattccacaaacctacacaagtaggttaaatctattaaacagattagaaaatataggcctatgaaa

SEQ ID NO: 951804 - DNA, 595 bp, Homo sapiens
agagatgggtctctcatagagttttatgagccatccaactcagatttttccagatgcattggaaaatcagtcataaatattaaaaaaaatttaaagaccctgaaataggtccccagtctcagccctgattttcactggggttcaggagctttttgtgaatgaacttggatcttggccatgaaaaagaaccagatatctaccaagatatgtctgatgaaagaggctgtgcgaacagaagttaaattacagaggaggacaaagaaactcctgaaagaaaaattgtgccatctaggtttaaggagtctggctgggagggtcagatgttatgaggttctgagatttaggaagaagctgcagttcaggatccattagaaagcttctcttaaacaccccctgactccaacgcctctttgtgcttctccaaaatctcaaaaagagggaattatgttcttagaggccctctggaagaactggacattaggtaagaaggaatkgggagagacaagactatgtgctgcaagtagggatctatcagcccctggggaaagctagaggagggaatgcgcgggactaagtttaggtgaaggccacgcta

SEQ ID NO: 951805 - DNA, 619 bp, Homo sapiens
agaaataaatttagcaaaagatgtacaatacttgtatacagaaaattacaaagcaaaatcagaattaaagaaatcctaaataaatgagggtgatacagtatgtttatgaaaaagaaaattcaacatttttaagaattctacttctaatttctcaaattcaataaaattctaattaaaaccacaagaatacttttccaaggaatttgataagctgattctcattttatatgaatgcgtcaggcagctcctaatgaaaatacagatacttgtcctactagatatcaagactcattagaattatagtaattaaaactatatcatgtactatttgtgcagagatagacaacttgatgaatagaacggaagagcccaacacagaactaggcaaaaaaagaatcatgaaatgacagatggcactctagccactggactattcaataaagttactaaaacaaatagttatccatatggagaaaaatgaaattggactactaccttacccttttcaaagaatcaattccaaataaatttggaacactaagggcaagcctttgaaaaaaaaataaagatatcctcgagaccttgggacagaragtaatttcttaaccatgacacaaaa

SEQ ID NO: 951806 - DNA, 626 bp, Homo sapiens
gtccctgcctgggggtgagggcctgcagggtgtttgtagacgcaactcttgaaaggccctgaggttggggcttggtcatgagggtgcccggggcccatccgggagtagaagtaagtgcactaggcatttggccaagggtcacgttaggccttatttatttattttttgagacagtctcactcttttgcccaggctggagtgcagtggcgtgatctcagctcactgcaaccttcgcctcccgggttcaagcgattctcttgcctcggcctcccgagtagctgggattacaggcacctgccaccatgcgcagctaatttttgtatttttagtagagacggggtttcaccatgttggccaggccggtctcaaactcctgacctcaagtggtccacccacctcagcctcccaaagtgctgggattacaggcgtgagctgccactcctggccaggtcttttttcaaataaatgtctaagcaaaatgaatttggggtgaagtagtcacagagctgtcaggaggagcagggtggctgcgtgcccctgggagctgcygtgggtgatgaccaggtgatgccgggaaggtcactttcagacacatagttgtcatcgtcggatgagaattattctca

SEQ ID NO: 951807 - DNA, 553 bp, Homo sapiens
cacacagacataaagatggaaacaacagacagtgcrgactcgaaatggagggaaggagagtggatggcaagggctgaaaaacttcctcttgggtactatgttcactgtctgggtgacaggatcagtagaggctcaaacctcagcaccacactatatacccttgaaacaaacatgcacatgtactccctgaatctaaaactgaaattaatattttaaaaagaattttaaagaaatactaaatgaattttaaaaataaaatactttctactttcttgcccaagatctagtcagcatactgccatcagtgaacgttttgtggaatgccaagataatcaagaactctgcagactatctgtggcagagagcaggagaattgacacagctctgaggccacactgtgaagatatactattggcactgctgggtaaaagcaaactgtgactagtggtcccttcaaattggtatgcagaaaaaaatagcatgagccacatcaattactacataccaaatgccagcagttttgctgatttgctccagtaaagacacaacagag

SEQ ID NO: 951808 - DNA, 614 bp, Homo sapiens
gcacgtgtacccctggactgaaaataaaggttaacaaaataaaaacaaataaagatttaacaaaaccaaaggtgggaaaatgtggttggtatatacatgcaataaaatatttagcctttaaaaaaaggaaattctgacacatgctacaacataaatggaccttgaggacatgctaagttcaataaaccagtcacaaaaggacaagtattgtatttttctaatcatatggggtgtttagagtagtcaaattcagagacagaaggtaaatcatgattgctgggaactataaggagagggaatgggatattgttgtttaatgaatgtatagtttcaatttgcaagatgaaatgggttctggagattggttgaacatggatttacttaactacagaactgtacacttaaaaaatggttaactggtaaattttatgctatatgtattttaaccacaattaaaattttaaaaataaaaattaagaaaaaagggaagkctaggccgggcatggtggctcacgccagtaatcccagcactttgggaggccaaggcgggtggatcacctgaggtcatgagattgagagcatcctggccaacatagtgaaaccccgcctctact

SEQ ID NO: 951809 - DNA, 608 bp, Homo sapiens
gcccctgtgggagccacagtagcctcccagcacctgtgagtgggaccccactctacctcctactttgctttccacttatacttctggttcctctgaaaagccagaggcctcacaattaattattgtagcagttgctccttttgcaaagatatctctgattccttccatttctgctacccatagccagtctccctgagtcttggatgacaccagacatccagtaaaaagagctctcttccaaacagtaatcttcagatgcaggaggtggtggccaccactggcagtgtccccacagacagaaccactatatcacaaagggaattatgtaaccatacaaagattaacctcccccttctagtcacaattcaccagtccctctaacaactggctggggatcttgggggtctaaaggctgcatcccaagggaatggtgtggttttgcttccctgaaagtgacaagaggaatgttttctctttatctacctcaagaggtgcctaccaggcaaggcctcagtggttcaggacatttcaggcaaagaagaggctggagccagacggcagtcwtctttggggaagatggggaactacagggctcgctcctaaggcag

SEQ ID NO: 951810 - DNA, 543 bp, Homo sapiens
aatggatgagtttattaggtgctttcccatgaataggtgaagactggaaggaggaacagagggagcatgagacacctggtcttccaggaagaggtaccagtaagactctgctacacgtcagagggaatccaagcaactacctagttcagaagttccaatttacaccccacaggccaattctagcctgttttgttggtctaaagtagtatctaatttaaaaaatctgaatttgatttccttaataagactatgatccctccagttcatcgcagaccctatcagtccacagtctcacatcagtctgcttcatttgttcagggcacctggcctgcaggtatgtgagttgttgacatctgcattctagtccagttttccattacatgcaaaagccctttcaacaacattatgtattctttatttattcatacattcattaaaaaaatatgtgctgaacaggtactacaagyaggctcataaatgcacagaattttagagcaggaagagagcttggagttgttctagtctgacctgctcctgaatgac

SEQ ID NO: 951811 - DNA, 409 bp, Homo sapiens
tgcaccgggttccgacgtctaccctcctcgtcaacacttgtcagtttctgtccttttggtcctggccagcctaacgggtgtgaggtatcgagggggatgcccgtctcttttgctcactgctgcgttccccagagcctaacccttcacaatggctcagtgagtatctggtgaaaaggaatgaatgggcctaaactctcagtctgtgattccctctgcaaaatggtggcaggacatttattttgcaggtgcgtgcgaggaggggcggggatccgagatgaagccacttaagggccagtctgtcctcatcacccaggccccaaacctcagcgccgtcctttcgtttttttttttttktttttttttttctgagatggagtctcactctgtcgcccaggctggagtgcagtgg

SEQ ID NO: 951812 - DNA, 586 bp, Homo sapiens
ctgagctcttcatactatcccagtgcaccagaactcagcgaatatccctgaatttaagttttcycaagtgtcagatttaccatcccagtcttatggaagaacaaaaacttttctggttccacttttactctcagcagagtcctgcccaggttaaggctgatccttagtccacaccaagaatcagcaaatgttctgagagctaaaaccacctgcagtcatcagctcacctggagtgattctcttttctctgtaattatagctcacctagtagtcattgctctcacagctctttgatgactttaaaaatgtgattttggccgggcacggtggctcacacctgtaatcccagccctttgggaggctgaggtgggcagatcactaggtcaagagatcgagaccatcttggtcaacatagtaaaaccccgtctctactaaaaatacaaaaattagccagggcttggtggtacgtgcctgtagtcccagctactagggaggctgaggcaggagaattgcttgaacccgggaggcagaggttgcagtgagctgagatcacgccattgcattccagcctagagacagagcaagc

SEQ ID NO: 951813 - DNA, 611 bp, Homo sapiens
aggagaaggaagaggagggcctggtccttgaaggtctgcaattcttgtggaactccaagtgcgcaggtttgtccaracagccacatggaactatctcctgtacataggtgattattttaattcttccctttttttttctgtgtttcctgccaccacatgcattgactcaccccctgaatctcttgaatgcaccacttcctttattgtctattaccacttttctataggaccttcatatccctagacttggaagttgcctttctcctggcacacagtgctctgcaatttcaacccatcctccaccgtagtgccagagaaatcgccataaagtacttcttgcaagtgccgtgctgccttgcttcaagtcattcctggcccctgctggagccaggtggagagttctagctccagagcctggtgtgtgaaactgaagaggaccctggccttgtggttggatactccagcatatctggacactggcgtaccatcctagccaaatcctgagtgtgtttattaacacagacttggttttgttttttctttgtttggtttgtcctctgtttggtttttcctcttgctgcttgctggtaatgacagtctgtcctgggggc

SEQ ID NO: 951814 - DNA, 541 bp, Homo sapiens
ctgggctcaagggatcctcccacytcagcctcccaagtagctgggactgcaggagcatgccatcacacccagctaattttttcattttttttgtagagacatggtctcactatgtctcccaggctggtctcaaaactcctgacctcaagatcctcctgcctcagtctctcaagctgctggaattacaagtatgagccatcatgcctggccaactggtgtccttataagtacacagccatgtgaagacccagacacacagggagaatgccatatggagacactagcaaagactggcatgatgcattgatgagccaagaaactcctggaatgatcagcatgaaaggaggcaagaaagatccccacttagaaacttcagagggagcttgatcctactatactttgattttagactttcagctttcagaactgtgagacaataaatttctcttgttttaagccaacaagctggtggtactttgttacagcagccaagggaaactaataaacctgtaaggtagcatattcacaggtttcaaggtgg

SEQ ID NO: 951815 - DNA, 532 bp, Homo sapiens
cctggcctcattcagtctttctgttggctcttcctcatcctggaaatgagctccgggttttatgggaacatgtatgaaatccattagtcctttagcttcccaggagctacyacagaccgaccacctgatgatgcccagtggatacttctcatggagtatttatagaacattttattagtttattaccaatggacctaatgatactccttgcatatgaataagctttcttccagcttaattttcttgactcaattttaggcatccctgcccacatgcttactcttaaaactgtttattttctcaggctccaaaaggaagaacctggacctcttcggggtaaagatgttagctaccaccttaaataagcctgtatcttcagccccaaaatgagccatcagacaggaccatgtgcatggcaggatgcaggcttgtcatctcaggtgatctccctggcattgcacctgggctggggcagagaggagcgtggcccatgacagcatcacacgatacaaaaatccagaaaaatggccta

SEQ ID NO: 951816 - DNA, 587 bp, Homo sapiens
gcttttctttttccccctactgcttggtgatgaagaatatcatgattactagtttggtttggagccaccaccttgattcctgctaaggcactaggagtcttcccacgacaacttgggtaccagcataaatgtcaacacagtgaaaagatgagtcatatcttaatagtatcaaaaaaatagctttaaccacaaaaactccttgaaaaggactcaggggtatagggaccacacattgagaaccacagaattaaaacactttaggctggggaagtcattatattttgtaataggactggaggtagtgtattttccaccatgtgggtaaatggtggagattcagacacagtctgtatagctagtgtttcatatctgtccttatttttgactctgcgaatggccacccaaggctgccaagggctcatcattgagatagtgctgggcttgttaagctggatatcctaactcctgggccttctggtttgaaagatgtggggaccaggcagataagcacagggcaagccacctgggccacagggaaacactctccccaacagaaacyacttattttcctcctattgaaaataagc

SEQ ID NO: 951817 - DNA, 691 bp, Homo sapiens
cctgagtagcctttggtgggggtggtgctggaagtcagctcccccagactgtgaccttcctactctccagcatcagggacctgcagtggagaggcggagtttccacccagggaacaaagaccaaaccacgcrccgccctccactggggtggtgcagggcccgacacacacgggtctgccatggaggctgtgctcagagctccagctctcctcgtctggtagaggtggggggagcttgggagctgccaacagtggccgagggagagagatgggcccttgcaaggagggcgcaaacctcctaatgcacaaacataccgcttagggactgggagaactgtcacaaatcaacatggtgttgtgcaggctgccaaaagggctcatgagtgagctgaagaccagataggcaagccccttggaaattccattgcagggtcctgaggatgacgcaggaccccctgcaacattcatggcaggaaatgaacattaaattagagccaggcttgcttcttcccactaagaatagccaaggcacgtggacaaatgaagagcacttttccctcacggtttcagggatggcgctgctggctgaggcagaagctccaaggagtcacaatctctagaacaggcatgctctttctcttttctatggggagtgggagggatgggggatgctgacttgtttagttgtctaa

SEQ ID NO: 951818 - DNA, 594 bp, Homo sapiens
tgggttgctttttcattctgatcatgtcccacttacacatgtttggaatttttgagtttaaatgtatttttttcttttgttgtctatgtgctgttgtcatatcattcctttacttatttaagcatgttttcaaaagttttttaaatgtatttataatagctgatttgaagtctttgtctgctaatttcaacatctggggcttctgaaaggcagagtcttttactaactttttttcttgtatatgggtcgcacattgctatttctttgtaagtctcataatatttagttgaaaaaagaattttatgtaatgtattttagcaactctgaaaacctttccttccacagtggggtttatttttgtttgcatatttaattgtttattatctgggcttggctttttcagtgacatctatttccccatagtatgcagtccctgatgtaccccttagagggtataaccttgagcatgttcacaattaccctgtgttgacagtgggcttaacatgattctctttgwctatctgtttatctgatctttctattattaagctgtgtgtctttattggtattacacttagcagatagcttgcacgg

SEQ ID NO: 951819 - DNA, 631 bp, Homo sapiens
tccactaatttttatctgatttttccttctttgataattytgaagggacaaaacaaggcatcctttgtgtatgtccaaatctagagtcagtaaatcctcacttgatttaatgagatgtccaatatgtctttccagttaaaacggtgtattgaggccggatgaggtggctcacgcctgtaatcccattgggaggccaaggtgggtggatcacctgaggttgggaatttgagaccagcctgaccaacaaggattgggaggccgagatgggtggatcacctgaggtcgggagttcgagaccagcgtgaccaacatggagaaaccccatctctactaaaaatacaaaattagccgggcatggtggcacatgcctgtaatcccaggtactcaggaggctgaggcaggagaattgcttgaacccaggaggcagaggttgcagtgagctgagatggcgccactgcactccagcctgggcaacaagagcgaaactccatctcaaataataacaacataaaataaaataaaatgatgtattgaaatgttcccaactttctgcataaaattttgaatcttactcatgttcagatatgtgaaatacataacatctattctactaaatccagacctaagtgta

SEQ ID NO: 951820 - DNA, 581 bp, Homo sapiens
ctcatgcctgtaatcccagcactttyggaggccaaggtgggcaggtcacccgaagtcaggagttcaagaccagcgtggccaacatggtgaaaccctgtctctacaaaaatacaaaattagcctggcgtgatggtgtgcacctgtaatcccagctacttgggagtctgaggcaggagaatcacttgaacccaggaggtggagcttgcagtgagccaagatcgtgtagcactgcactccagcctggacaacaagaatgagattccatctcaggaaaaaaaagtccctttttaaagatagtaattatttttactttccaatttacaaataatggaatgtattttctaagggggtagaagggaaatgaaatattctatctatatgctttgaattcactccctgtctcagcactcactatgtggccagagaccagagaagaaaggaagcctggaagaggtcccacctacctgactgcagcctcggttttcatggagatgatttaggcagtgtctggggatctgcttgccatggatgatagcctgcccctcagaggacaaggagaaaagtgtgggagaagcccggcc

SEQ ID NO: 951821 - DNA, 634 bp, Homo sapiens; identical to SEQ ID NO: 945581

SEQ ID NO: 951822 - DNA, 580 bp, Homo sapiens
gtggtggcccagccagaagaggcctctgggcagagtgccagcagcatctactctgcagggacccagcaccttccaggtagcctgaccccagctaaggaaatgaaaacctgaaacctgcctttccaggtgaagtggctccgagggtcaccgggcgtaatttgctacctaaggaaagtccagtggttcttgattaccatcccctgccctccatgctgctcaggtttcctgctcgtcctttgggctggcctggagaagaaagaaacaatacgtcttcttttcttcatgtccctacaatgtgccaggaactctccaagagacttggcctatattatctcatctaactttcccagcaaccccgagaaatgggcctggtaatgcccgtgcctgcaaggtggaagccgtggctggcagaggtgaaataccttcctgggaataccttcacagctaggaatggcagtgccaggactcgaagccaaccctcctgggccaaagcctatgctcttccctaccatcgccatgggcgtgggttgkggggaagatgcatcacaagactgtgccttcctgttctttctctttctcc

SEQ ID NO: 951823 - DNA, 580 bp, Homo sapiens
cagaccaaccctatgaatggctttcatataaacaggtgagtttgtatgagacaggctctgtggactcctcttgcaagcaggggtgcttctgtatgtgcattcttggagcyggaaggtttctccagagtgtatgtgctggaccagctcagagccttgccgtaagcatggggcatccaaggagaaacttgacacaaaggtttggggagaacaagttaaggaatttaacaggtggttcaaagcattgtatttcaaagctgatgtggatacattgtgaagtcaagtataatttttaagataaaattctagaaactctcccggtccccctggcggcatagcattatttctctccacttgaggggtactagaaaaactcagaagctggaacgtgggaatacatcttcatttcacagatgaggaggacctgtctcaggaaaagaggtgactcacccaaggttatagctggttagtggcagaaccaggaccagaagcaaggcctgcagcctcttgtgtaggctttcctagtgcatgctgctgaccctcaaagctgtccttggccaactcaccacctgtgtgacactta

SEQ ID NO: 951824 - DNA, 798 bp, Homo sapiens
gaaggctgacattctcttctaatccttttttgcactgggggagtcttcattctcctccactggccacagragtctggtctcgtttcccctatccctgcggtgtcctgctccagctttccaccctaaccccgcatctaccagcacctcctcctccaggcagccttcccaggcccgggggaactcctgttctcttcagatcgtcttggcgtatggctttgtgcaccgtctgcagcaagccgagacccttcccgccagatccaggccgggccttggatggccattcgccaacgaatcagcgaccagcattctagagcgcgttttgcaaccgaccaaacgctcgctttctttggtaaacaaaaaccgctcgagccatcctggagaaccgcaagcggcagctcggtcccccagccggatttatgctccagtttacggtctgtggtttgcagtaagaaaacaccagggtcttcaaaataagaaaactgattcccagtcagagaataaaactccactaacaaagtctggcaaaccgcaggcaatacgtatttgctgaatattttgctttcaagctagcactttgagactcactactttggacggcactccccctccccacaaaacgacacgacactggctgacgtctctcccacccgccaggcagtgttaggccccgacaggcccgtgcaggtgggatcactgttatccccactagactgaggaggaagccggggacccgggcgattggccactcgggcgacctccacagtggagcaccaacagcgccgggaggcgcaaaccacg

SEQ ID NO: 951825 - DNA, 553 bp, Homo sapiens
tcaaatctcatcttgaattgtagctcccataattcctatgtgttgtgggagggacccagtgggacataattgaatcatgcgggcagtttcccccayactgttcttgtggtagtgaatgagtctcaccagatctgatgtctttaaaaggggtttcccctttcacttggctctcattctcttttgcccgccaccatgtaaagacgtgccttttgtcttccaccctaattgtgaggcttccccagcctcatggaactgtgagtccattaaacccccttttctttataaattacccagtattaggcaagtctttatcagcagtgcagcagtgtgaaaatggattaatacatgccctgaaccccaataaaggctttggcacactggctccttcctccctctctgctccccacctgctggttaagtgttcatacttaactggtatctaatttaaatttctccatcactataaacatttttttaattttccaaacagcaagctggagctctgggagtggacaccgatctcctgtgagcaacactgctttggtcccaccaa

SEQ ID NO: 951826 - DNA, 467 bp, Homo sapiens
acagtcgctggagttaacagcagggaccctcatcmctaagggtcttcacctttgtggttcctgctgaatctctggcacccaaaaggtgaggggggcaggctagaggacggggctggaagcaggagagaaagcctctcactccctctctccctactcctccacccccaggttctgggccctctgtgccaggcaggcttgcctacctgctaatcccacctttatatatggggtctatcactgaccaaaacgtccttatgtggcccttgactatacttggaaccacagtcccaccaggtccaccggcctagaccttgaccaggaaggtaccagggagaggcctgaggggttggggcaggggggcgagtgcagagcctgaggcctgccagcttgccctgggctcagctttgccccttgagggccagccatccagacagtcctgaagcctcagtctgcccacaacagggaaa

SEQ ID NO: 951827 - DNA, 600 bp, Homo sapiens
tgcatgcacttacatgaaagaatttccacatgtactatgaaraattttttaagggtcaatcctgaatagtatctctaataagctaccatttgtcttcctaaaaagatacatggatatgcatggattatttctggaaggatacccaagaaactggtaactgtggctatcttggggaaggactcagccctggggagggaggaaggaaactgactgtttaccccttttgtaatttgtatttgtttcttatcttatgcaggtattacccattttctgaggattctaagctcctttgatcataggacaatgggttccctgaacaatccagtgcagaggtcatgaccgctctagccagtcccagtcccttgacattaaagccttaaagaattccggctttgaaaatgctgcagagaagtttccacacctggcaggagggtggtgacagggccatctccgccaggcccctgtttggacaggatatttgtggggcctgagcaaacagcacacagaaggctgcagccctgatgttcccgccagccttggtgttctcctgggggtgtggagggacagggtgggagggttacctgaaggtctgtggaggcg

SEQ ID NO: 951828 - DNA, 713 bp, Homo sapiens
tgggaggggccaggggcaggatgatatggtttggctgtgtccccacccaaatctcatcttgaattcctgtgggagataattgaatcatggtggcaagtctttcctgtgctgttctcatgacagtgaataagtgtcatgagatctcatggttttaaaaagaggagttcccctgcacaagctctctctttttgcctgctgtcattcatgtaagacgtgacttgctcctccttgccttcagccataattgttaggcttccccagccatgtggaactgtaagtccaattaaacctctttcttttgtaaattgctctatcttaggtatgtctttatcagcagtgtgaaaacggattaatataggtcccatttatttatttttggttttgtcacatttgcttttggggtgttagtcatgaattctttgcctaggccaatgtccagaaaagttttccaatgttatattccagaatttttatggtttcaggtcttagatttaagtctttatacatcttgagttgatttttgtatagggcgagagatggagatccagtttcactctttttttttttttttttttgagayggagtctcactctgttgcccaggctggagtgcagtggcacgatctcagctcactgcaacctccaccctccaagttcaagcgattttcctgcctcagcgtcccaaataactgagattacaagcacctgccactg

SEQ ID NO: 951829 - DNA, 713 bp, Homo sapiens
tgggaggggccaggggcaggatgatatggtttggctgtgtccccacccaaatctcatcttgaattcctgtgggagataattgaatcatggtggcaagtctttcctgtgctgttctcatgacagtgaataagtgtcatgagatctcatggttttaaaaagaggagttcccctgcacaagctctctctttttgcctgctgtcattcatgtaagacgtgacttgctcctccttgccttcagccataattgttaggcttccccagccatgtggaactgtaagtccaattaaacctctttcttttgtaaattgctctatcttaggtatgtctttatcagcagtgtgaaaacggattaatataggtcccatttatttatttttggttttgtcacatttgcttttggggtgttagtcatgaattctttgcctaggccaatgtccagaaaagttttccaatgttatattccagaatttttatggtttcaggtcttagatttaagtctttatacatcttgagttgatttttgtatagggcgagagatggagatccagtttcactctttttttttttttttttttgagatggagtstcactctgttgcccaggctggagtgcagtggcacgatctcagctcactgcaacctccaccctccaagttcaagcgattttcctgcctcagcgtcccaaataactgagattacaagcacctgccactg

SEQ ID NO: 951830 - DNA, 624 bp, Homo sapiens
gaacactacatagtaatttaaagccataagaagaaataagtaaatctggtgaaagtaaccatacaggtacatttaaaagacagtattactgtactttggctcataactcacttctttcatacatgatttaaaaggaaaatgcggctgggtgcagtggctcatgcctgtaatcccagcactttgggaggtcaaggtgggtggatcacctgaggtcaggagttcaagaccagcctggccaacatggtgaaaccttgtctctactaaaaatacaaaaattagccaggcgtggtggcgggcacctgtaatctcagctactcgggaggctgaggcaggagaattgcttgaacctgggaggcagaggttgcagtgagccaagatcacgccaccgcactccagcctgggcaacagagtgagactctgtctcaaataaatacataactaaataaataaataaaaggaaaatgcataaaacagtaactgtaaatctaaatctaagtaaatgggaatayagcctataaagatgtgattcgtgataataaaaaataaagggagggaaaatacagatgtagaagagcaatgtgtccatatgctattgaaacaaatttgctactattcaaactaggt

SEQ ID NO: 951831 - DNA, 592 bp, Homo sapiens
aaaaaatgagttcaggccatgatgggaagggggcgctggacatgcctcatgctaccctcctccctgttgggattactgatagggcagtctcttcaagtctgataaaaatatttacaatgtgttctcactcaagcctgctacctggaggcttcgtctgcatgataaagtcttggtctccataaccccttctcataatccagacattcctttctattgataataactctctcaaccaagtgccaatcagaaaatctttgaatccaccgacgacttggaagctcccccggccccctcaacttcaatgtacatcatacatgtattgattgataactgtgtctccctaaaatgtacaaaaccaagttgtggcctgaccactttgggaacatggtctcaggatctcctgagggctgtgtcatgggccataggtgacttatatttggctcagaataaatctaatattttacagagttggactcttttcattaacaaacaaaaascacacaaatgtgaaaaacaagacactaaatagactgcaaaaaatgaccctggcttccaggatgagggctgaaacaagatgggagactgtcgcctc

SEQ ID NO: 951832 - DNA, 583 bp, Homo sapiens
gctgcaccattttgtattcccactgacagtgcacaagggttccaatttctccacatgtgtcttcaaaacttgttttgtttttgttttttatagtacccatcctaatgggatgagttgttgtctcattgtscttttgatttgtgttttccaaatgattaaagatgttgagtatctttttatgtgcttactggcccttgtgggtttttgttttgttttgttttttgacaaatttaagttctttgaccagtttttaattggattgtttggtttcttgttgttgagttttaagtgttgtttgtttattttggatattaaccgcttatcagatgtaggatttgaaatatattctcccaatccatgtgttgccttttcactctattgattatgtcctttgatgcacaacatgtttttattcccatgtagtccagtttatctatttttgcttttgttgtctttgcttttgttgtcatatccaagaaatcattgccaaatccaatgtcattaagtttttttctttttgttttccacgaggaattttatagttttaggtcttaagtttaggtctcttacccatttttagata

SEQ ID NO: 951833 - DNA, 569 bp, Homo sapiens
caatcctaatgatagaacctggataccccggttgttggtgcaggattcacatgctgttttgtttcttttctgtaggagactcccactgcggctgtttctatcagctatcttggccccaccccacttacctatgagcaatggtggggaggtggaaagaggtttggaagaaaagtgtattgataaatttcagaaattatagtagtagtgatccatttggctgcaaatctaaactatgttttctacgataatcatcaactgaaaaaaacagatgtttatcatatccacccttttgccttttgaaaaatcaattgttgctgaacttaggtttatgggtctcataaaccttagccaaagcatgtcatattatgaacatcaaagtaattaaaccattgaggtttatttgtatggagtaaattatgttgttattctataaactgttcagttttatttcagagttctgttttgtactattaggacaggagtagggccaactaaggctaaaaaatacttaatttgagaagagttattgaaatcrtaattaaaactcttattctggcagaacacacttg

SEQ ID NO: 951834 - DNA, 576 bp, Homo sapiens
agctgatgctgtcttgaaagccccacctcctggctggaggccaaccaacaaaaaacaagcacactaaataaagctacaaccaaggactctcacagagtccacttcactcccctgctacctccaatggagcaggtgctggtatatgtggctgagagacctgatgatatcacaggactctttgcagacattccccagtaccagcctggagccccatagctcttctgtatggctagatccagaagagtgataacaatcactgcagctcggctctcaggaggccccatcgctaggggaagggggagaacaccacatcaaaggagcatcatgtggaacaaaagaatctgagcagcagtccttgagtccaggatcttccctctgacatagtctacccaaaagagaaggaaccaaaaaaacaattctggtaatatgacaaaacaaggttctttaatgtcccccgaaagatcacactagctcaccactgatggatccaaaccaagacraaatctctgaactgccagaaaaagaattcagaaagtcaattattaagctactcaaggaggcaccagagaaaggtga

SEQ ID NO: 951835 - DNA, 580 bp, Homo sapiens
tggttgctccacagcctgcttttcctcccccaaaaaacttcatttctctgccacatggccatgctgcaaattttctaaatggttttgctctgcttcctgtttaaacataaattccaagttaagtcatttctctgctcctgcatatgagcttaagatgttagaaacaaccaagccacatcttgaacactttactgcttagaaatttcttcctccagatgccctaggccatcactctcaagttcaaacttccacaaatccgtaaggcatggacacaatgcagccaagttctttgcaaaggcataacacacatgatctttgctccagttcccaataacttcctcatttccatttgagaccacctcagcctggacttcactgttcatatcactaccagcattttggtcacagtcatttaaccagtatctaagaagtcccaaactccccttcatctctctatcttcttctgagtcctctaaactcttccaacctctgaccattacscagtttcaaagttccttccatattttcagttatctttataatgccccacttctcagtaccaattttctgtattaggcca

SEQ ID NO: 951836 - DNA, 609 bp, Homo sapiens
acgcttcatgcttctcctgctctgataaggtttttcattaaacattctttaggactgcaataattcaaacaagacattctccaaaggatacctgctcagtaacagcatctccgtcaatgaactgataacaactctggctttgaacctatggaacccatggactctgtttctaagcagcttatgaaaatctttttttgctaataaaagttccccttacacagaacacactggatgcttgccattaatgcattacagattgtaatttttcttttatccccaagtaaactcaacatatttagagagaattttctctagtgtttttgttttgtttttcagacggtctcactcagtcacccaggctggagtgcaatggcataatctccgctcaatgtaacctccatctcccaggttcaagcggttctcctgcctcagcctccagagtagctgggaatacaggtgcgtgccatcatgcctggctttttttttttttttttttttttttttttgaratggagtcttgctctgtcacccaggctggagtgcagtggcgctatttcagctcactgcaagctccgcctcccaggttcacgacattctcctgcctcagcc

SEQ ID NO: 951837 - DNA, 567 bp, Homo sapiens
tcgccattttgactggtatgagatggtatctcattgtggttttgatttgcctttctctaatgatcagtgatgttgagctttttttcatatgttttttggccatatgartgtcttcttttgagaagcatctgtgtgtgtcctttgcccactttttaatgaggttgttttttcttgtaaatttgtttaagttccttatgaactctggatattagacctctgtcagatggatagattgcaaaaactttctctcattgtgtaggttgtatgttcactatgatgatagtttcttttgcagtggagaagctctttagtttaattagatcccattcgtcaatttttgcttttgttgctcttctttttttttttttttgacatttttgtcatgaaatctttgcccgtgactatgtcccgaatggtattgcctagattttcttctagggtttttatagttttgggttttacatttaagtctttaagcatcttgagttaatttttgtataaggtgtaaggagggggtccagttttaatctttacctcagtctctcaagtagctgggataacaggcga

SEQ ID NO: 951838 - DNA, 554 bp, Homo sapiens
caaagacactataagaaaaggcaattatggaccaatatccctgataaacatggatgtaaaaatcctcatcaaaatactagcaaatgaaattcaaccacaaatttaaaaaagcattcaccatgatcgagtgggatttatccctgggatgcaggaagtttcaacatacacaaatccataaacatgatacaccacatcaacaagatgaaggacaaaatctttataatctcaatagatgcaggaaaagcatttaacagaattcagcaccctttcatgatttaaaaaaactcaacaaaatatagaaggactgtaccccaacacaataaagaccagatatgacaaacccacagctaacattctcaacagtgaaaagttaaaagcttttcttctgagatcaggaacaagacaataatgctcactctctcgacttctgttcatcgtaacgttggaagttytagacagagcaattagacaaaaaaaaaaaaagagataaaaggcatccaaactgaaaaggaagaagttaaattgtccctgtttacagatatcatgatcttctg

SEQ ID NO: 951839 - DNA, 611 bp, Homo sapiens
ctgatcgattgtgaactcacatttcctctacacacctcatgtttagcatcccagcatggagagaccatggattgggaaacatcsaaccttaggctcttcatgaagagtttttgtttgctgagttgggtgtctcgtgattgtgttgagcaccacctaacctgcctcctcctccctttccatcatcagagtgtggatcaggctgtcagaaaaggcaggctgggtacttgcaatctctcctcccaccccaatcctctgcagcctcacaagcccaagtacatacttttatacagtgtttgttgtgttaacatatgtagagttatataattcattgcgtaatgcaggtgcttgatttcatccgatttagagttcagaaaaccagtggtaagttacttgtttgacagcatgccactaataagatggggaatgagattctgaacccaggcatttccatggaacattctgtgtgaagtgaatattgaaaatcttgagggtcgttattcattccagacaggttggcaaaatagctataatacacattttctaatgaatggtggttttatagtttaaatgtgtatgtgattctttttgatgtttgtcgatttacttccact

SEQ ID NO: 951840 - DNA, 607 bp, Homo sapiens
atggactaatacagcaaattggtaccagtagagtggtgcgctgctgaaaagatacccaaaaatgtggaagcaactttggaactgggtaacaggcagatgttggaacagtttggaggrctcagaagaagacagggaaatgtggaaaagtttggaactccctagagacttgttgaatgactttgaccaaaatgctgataataatgtggacaattaaatccaggctgagttggtctcacatggagatgaggaacttgttgtaaactggagcaaaggttgggatatggacaaagaaatccaggctgaggtggtctcagatggagatgaggaacttgttgggacctggagcaaaggtgactcttgttatgttttagcaaagagactgccagcattttgcctccgccttagagatttgtggaactttgaacttgagagagatgatttagggtatctggcagaagaaatttctaagcagcaaagcattcaagaggtgactggggtgctgttaaaggcattcagttttaaaagggaaacagagcataaaattttgcaaaatctgcagcctgacaacgtgatagaaaagaaaatcccattttctgaagagaaattc

SEQ ID NO: 951841 - DNA, 585 bp, Homo sapiens
acagagcagagacccctccctcttaaggggacaccagcactgccaccctaccccacacaaggagataraggaaaatcttgagtcctttcaggggaacttccaggtacccagctaggcctgagaagtaaatgagcagcttgataagcaagaaggtaatagtaacataaaacaatagccaaggaagttagagtcagatgtttggttccctatagaaactgaagataagatcttcacgtatgtccctgagttgtttttcagcaccacactctaaccaactgagctaaccggccaccgaccctgagcttttcaaaaacctggacccccaccacatggagtctgctggcacatagactccagagaacggggagctgagcactgaactctgacctcttgctgttctttgatctacatttcttcctgaggggcctgaaagaagccacatccacaggccagaccttaacattcctttctgctgaccccaagtttttagacaaagtctagattccttaatcaatggcaaatcagagagtctttgaatctacctatgacccagaagtgcacccacttcaagacatcccacgtttt

SEQ ID NO: 951842 - DNA, 741 bp, Homo sapiens
cctgagcttttcaaaaacctggacccccaccacatggagtctgctggcacatagactccagagaacggggagctgagcactgaactctgacctcttgctgttctttgatctacatttcttcctgaggggcctgaaagaagccacatccacaggccagaccttaacattcctttctgctgaccccaagtttttagacaaagtctagattccttaatcaatggcaaatcagagagtctttgaatctacctatgacccagaagtgcacccacttcaagacatcccacgtttttaggccaaaccaatgtgtagcccctgtatattgatttatgattgtacttgtaacttctgctttcctgaaatgtacccctgtctttaagaagccttgtttgtaagccactggggaggttgggtctcaagtatgagctgtccccattctccttgcttggtgccctgcaaataagtgccctctcttctcctgctgcaaaacctcagtgtggatgtttggctttactgcacttggcaagcagaccccagtccagtgtggtagcaagggctcaatccccaagactgctccccaacttccaatgtcaatcaaaagccccaggttgtttcacctctgcttctggccaactagcttgaaattggggttcccatggccacatccttgggtttaacttgctrgagtggctcacggaacttagggagacacttacttatatttactggtttatcacaagagat

SEQ ID NO: 951843 - DNA, 566 bp, Homo sapiens
tcttgaaagcaccacctcctggctggaggccaaccaatgcaaaactagtgcaataaacaaaattacaactaaggaccttcacagattccatttcagtcccctaccacctccactggagcaggtgctggtatccrtggctgagagatctgaagacagtgcacatcacaggactctgtgcagacactccccagtaccagcctggagcccagtagctctgcttggtggctaaatccagaagaaaaataacaatcactgcagtttggctctcaggaagccccatccctaggggaaggaagagagaactacatcaagggagcaccacgtgggacaaaagaatctgaacagcagccttgagccccagatcttccttctgaaatagtctgttcaaatgagaaggaacaagaagagaaattctggtaatattacaaagcaaggttctttaacactcccaagagattacagtaggtcagcagcaatggatccaaaccaagaagaaatccctaaatgcgagaaaaagaattcagaaagtcaattattaagctaatcaaggcagcatcagagaaagg

SEQ ID NO: 951844 - DNA, 778 bp, Homo sapiens
ctgagagtagcagctcggggcagctatgcagtcatatttatacttactttttaattacatgtagattgagaaatggtttatgcagaaatttctgggaaaagggtaataaygtttgggttgtcaggtcattgccatggaaaagggcagtaactcccagatgttgccatggcaatggtaaactaatatggcataccagtgagcatgtcttatggaaagctgcttttgcccagtctctgttttagctagtccccaatttggtccagtgtccaatcctcacctctggagtaaagacccaactcctaactcggtacaacaccaagaataaaccctaatgtaaactaaaaactttatgtgataaaaatgtatcaatatgggtccttcagttgtagcaaatataccactctggtgggggctgtcggtaatgggggaagctgtgcatgtcagtgggggcagggggcatatgggaaatgtctgtaccctctgttcaattttgctatgaacctaaaactgctctaaaaaataaagcctattttttaaaaagaggcagcgggtgtgatgaaagtggatgtggctagaaaagagcaactgagagatttatttccttgtagtgattgactgtaccattgtccatatcctggttgtaatagtgtactgtatttttataagatgtacctattgggggaaactcggtaaaatgtacacaagggccctctgtattatttcttacaacagtatatgaatctaaaattatgtcaaaatgaaaattttaacttagaaa

SEQ ID NO: 951845 - DNA, 761 bp, Homo sapiens
gaccattcttccagatctggaaatgctaacaatgtttcattaccacagccctgaccagcttgaagcaaccttcctcatacccaaatcaaatacctgtgtggagagactaaatctgtctaaaggcgacacaacccaccccgactcatgtgttcatgcatgcactcaataggaaaacagggccaggtgtggtggctcacgcctgtaatcctagcattttgggaggcctaggtgggcatatcacctgaggtcaggagttcgagaccagcctggccaacatggtgaaaccccatctctactaaaaacacacacacacaaaattagctgagcatggggtgggcacccataatcccagctacttgggaggctgaggcaggaggatcacttgaacctgggaggcggaggctgcagtgagccaagattgcaccaccgcactccagcctgggtgacagagtgagactctgtctcaaaaaaaaccaaaaccaaaacaaaacaaaatatatatatatatgaaaacagaagaaaagggcactgcaagctggaaggtgtcctaagagaggatggcacagaggggatctcctaaattagcctgagctttcttccagacccttccttccaggaatgctaacattgttagcatttctcctaatgcatcctgcagagctcaaatattttcagagtscctactttgtgtaaccacgattgcacctctggctattttttaaagtccaagaatagcctagatcagccagatgcttatagat

SEQ ID NO: 951846 - DNA, 633 bp, Homo sapiens
tgcatatgtttgtattttttacggtgtgagttcaagtagtttggacacccctgagttatacagacacaagcagcaggattctagtggatggaagattacaggcttccactcttaggtaktatttgctccccaaggtggtcttagaaatcagccctctcccctcaaattctacatccttgctgagtgcagtttgaagacactcatcctcaacctcttcattcacagatgaggaagctgaggctcagagcagagctgtggcccatgcaaaggcacagaactagtaagcagctcagtggggaactaatccaggtcttggaattgcccggggtctttctgctgagcccaaacctcgagatactccttagaagtgctggagccagagtgaggcagtggaaatgcaagaagacagggaccagggcctgagatttttcttctcgtcccccccaccgcccgagaggccacttaagcggcgcttaaccgccctgtgatgtattgaaccctctctctgcgcataaatgcggccggtcaaccgctaggcagaaatgccacatatatttcctcccattagatgaaatatgcccctaatttggctggggttttgttttattagacctacggcagcgagggggccct

SEQ ID NO: 951847 - DNA, 623 bp, Homo sapiens
ctggcttctttcattcaacataaggttttggagactggtttttgttgttgcatgtagcagtactttgtcctttttactgttgtgtaggattccaatgtatgaatataccacaattgacttatttattctcttgtttatggtcattgggttatctccagtttgaggccactataaataaagcttcaagaacattgtgatacaaatctttttgtgaacatttatttttatgtctcttggtaaatacttaagcattgaattgctgggtcagaaggtaggactatgttgagtgctgtaagaaaccacataagatgtttctccaaaattctggtaccattttacattcctgccaacaatgtatgagagttccagttactccacatccttgtcaacattcgatgttgtcagtatttttcatgttattcattcttgtgggtatgtagtagtctcactgtgtgtatagacctctttaaaaaagtcagtgccaaattctcttycacttcataaaatgcctgaactggaaggacctttatcttttagatgaggaaactgaggtctggagaggaaaagagactgacccaccattttatagtgtcttaaaggtaatgccagattaataacccagg

SEQ ID NO: 951848 - DNA, 560 bp, Homo sapiens
ctcaaattgggtcaagctatatatattgttctaaattagctctgtttctcgcaataataatagtgtgcaggtttgttacatgggtatattgcatgaggtttggggtacaattgatcccatcacccaggtagtaagcatagcacccagcacgtagttttgtttaagttttttgagacaaggtaggtctctgtcccccaggctggattgcaatattgcaatcactggtcactgcagttttgacctcttgggctcagccgatcctcccagctcagcctccggggtagctgggactacagtggtgggccaccataccctgctattttttgtatttttttgtagagactgggtttcgccctgttacccaggctggtctcgaactcctggactcaagcaatccacccaccttggcctcccaaagtgctgggattataggcgtgagctactgtacccagcygccagtaggcagttttgagctttcgccccttcccatcctctcctctctgttagttccctgtatctattgttcccatgtttatgtccatgtttaccccatgtttagc

SEQ ID NO: 951849 - DNA, 615 bp, Homo sapiens
gggctatttttgtttcccacagatgtttacaccagaatggctgttgcccggtttgattgcgccagtgtctgacrgctgtgtggtgcctgtatcataacagttgttaaataatttgaatatataatgtttaaatatgtagcttgtctttgatcttttgacaacagagatagcttcatttacctaaaggggtactgattttaaaaattaattcatttgaatttaaacacagcatatgctagacaaaactcttagggaaagaatatgtatatacgtgcatgtaaaccacacagactgaaagagaagcattcagtacataaattattaggctcaagtaggaggttactatagagttagctgctacttattttcagaatttgattttatattttgaattggaagaatgccgatctgggagtcaaaaactcttaattttgagccatggatgcataaccttgggtattttaatattgggcttagtttactggtttgcaaaagagatgagtggacaagatatctttaaagtctattctaggcatgaattttcatgattctgcagtatatgttccttttaagaagtgagacattaccaggataaatataggaaaaactagtagt

SEQ ID NO: 951850 - DNA, 575 bp, Homo sapiens
gtttgatatgacctaagtttaaattcctcttcttcgttgtagtgattccggcctgagtccttccatkccaatggcttcgaattcaggtaattatttctcaggccagaacaagtcttaattgtgaagtttgcatcgtaggggttatagtgacccagcaatcttccttcctctgtggtgtcagggtgcttaggcagagtaacagtaatcaagtgttagcccaatatataaacatcagtatgttttcagaaccttcatggccagacagagactatcctcagagtgacagtatagagtatagacagtatagagacaggggaaaaaagaacttcagagaggtaacttctttattttaccaatgttcatgagcagttagtttactgcagttgtgtctaccactaattttgagacttatttcacaggagataaattaaaagctttttattttattattttttatttatttacttattttttgagacagagtctcggtctgtcgcccaggctggagtgcagtggtgtgatctcggctcactgcaacctccgcttcccaggttcaagtgattcttctgccccag

SEQ ID NO: 951851 - DNA, 625 bp, Homo sapiens
aagggcaagtcctaagagaacaargtagcagtgtgcgacatgtttgtgctctggcctcggaagcatcatttctactgtatttttttgtttgtttgttgctttaaagacagcgtcattctgtcgcctaggttggagtgcagtggcgccatcgtagccccctacaaccttgaactcctgagctgaagcggtcgtcctgcctcagcctcccaaagtgctgggattacaagcatgagctccacgcccagcctttagtgtattcttttggttgaagccatcacaaaggtttctcagggttcaaatgaggggacatcagccccactgttggatgggaggagtgtcaagattacactgtagggtctggccacagtggcttatgcctgtaatcccagcactttgggaggccgaggtaggtagattgcttgagcccaggagtttgagaccagcgtgggcaacatggggaaaccctgtctctataaaaaatacaaacattagctagccatggtggcgcacacctgtggttccagcaacgtgaggaggctgaggtgggaggatcacttgaacctgggaggcggaagtggcagtgagccaaaatcataccactgcactccagcctgggctacagagg

SEQ ID NO: 951852 - DNA, 625 bp, Homo sapiens
aagggcaagtcctaagagaacaaggtagcagtgtgcgacatgtttgtgctctggcctcggaagcatcatttctactgtatttttttgtttgtttgttgctttaaagacagcgtcrttctgtcgcctaggttggagtgcagtggcgccatcgtagccccctacaaccttgaactcctgagctgaagcggtcgtcctgcctcagcctcccaaagtgctgggattacaagcatgagctccacgcccagcctttagtgtattcttttggttgaagccatcacaaaggtttctcagggttcaaatgaggggacatcagccccactgttggatgggaggagtgtcaagattacactgtagggtctggccacagtggcttatgcctgtaatcccagcactttgggaggccgaggtaggtagattgcttgagcccaggagtttgagaccagcgtgggcaacatggggaaaccctgtctctataaaaaatacaaacattagctagccatggtggcgcacacctgtggttccagcaacgtgaggaggctgaggtgggaggatcacttgaacctgggaggcggaagtggcagtgagccaaaatcataccactgcactccagcctgggctacagagg

SEQ ID NO: 951853 - DNA, 540 bp, Homo sapiens
ctagcctcaagaagatgaactagtatttgtattgtagacagtaaagtaccaattgccacagtctgctgacaggtatatttctcagtttttttttttccattgaataccaactctaattggaatatttagcagtttacaaaaataaatttaattaaaaatactgtggtctaaataagccttttaatgtgaatatttttgagcttctgtaacataaatatggttatcaggtattcatgtcttgcaacattcaaacaactttttctacacattataaattagtgtctggagtctctaaagacaaaatgtctgctccattactcctcaaatgagggcaaaagtacttttcttcctggctgatagaatattagacacgatgcatggaaagtctttttcaagttccttttcttttggtatcactccctagttatattcttgaccttatcctcactactcactcccttaggttaaactatcrtatttaggttaaaccacatgtgagttttaacttgtgtatatttatgatggtcaaaagtccctatc

SEQ ID NO: 951854 - DNA, 814 bp, Homo sapiens
tgaactaatttacattcccaccagtagggtataagtattcccttttctctgcagcttcatcagcatctgttattattattattattatttttctttttaataaaagccattctgggagggaccaatatggccaagtaggaacagctccagtctgcagctcccagtgaggccaatgcagaaggcgggtgatttctgcatttccaactgaggtacctgattcatctcaatgggactggttaggcagtgggtgcaacccacagagagtgagcagaagcagggtgggtgttgcttcacctgtgaagtgcaaggagctgtaggacctccctcccccagccaagggaagatgtgagggactgtgctacccggcctgggtactatgcttttcccacagttttgcaatccgcagattaggagattccctcatgtgcctacactaccaaggccctgggtttcaagcacaaaagtgggtggctgtttgggcagacaccgaactagctgcatgagtttttttttttggtaccccagtggtacctggaaccccagcgagacagaaccgttcactcccctggaaaggggactgaagccagggagccaagtagttttcgttcagtgggtcccactcccatggagcccagcaagctaagaaccgctggctggaaaatctcactgccagcacagcaatgtgaagtcaaccagagataatcaagcttggtgggtggagggacatctgccattactraggctttagtaggtagttttctcctgacggtgctaagggggctaggaggtttggactgggtggaattcatcacag

SEQ ID NO: 951855 - DNA, 598 bp, Homo sapiens
aaaaatgcacaagtgttccaatttctccacatccttaacgatacttgttattttctgggtttttttttttwaaaaaaaatagtagttctactagtggttgtgaggtgatattttactgtgatttgaacttgcatttccctaatgattagtgaggttgagcatcttttcatgtgtttgttggccatttctataggtttttttggagaaatgtctattcaattcctttgcccattttttattcttgggtgtgtgtacatgtgtgcctatctctgtgtttgtgtgttttgttggtggtgagttgcaggacttctgttatgggttaaattgtgtttcccccaaattcatatgttgaattccttacccccagtacctcagtatgtgactacatttgtagataggacctttaaagaggtaattaaattaaaatgaggacgttagggtgggcactggtgtctttataagaagaagacactagcacatagactgacacagaaggaagactatgtgaagttctagggagaaggtggccatccatgaggcaaagagagagacctctaatgaaatcagtcttgccagcaccttaatcttagacttctag

SEQ ID NO: 951856 - DNA, 592 bp, Homo sapiens
ctgaattgggcttatattccctgcctccagaccctatttttctgcctcaatctgaacttgtcctatgtaaataggggcatctcaagaacttcartctgttcctaatcgatcccactatctcactcttcctaaaacccagctcttcaacccatgctccttccaccataaaagcatctttatggctcctcatttccactaactcacttccttggtctggtatttgagcttccccacctcatgcgctggcccatccaaaatctggggcatccacatctgaggcttgaaaaggaggggaagaaagtgctgccaaaattctggctaaagccattgaccagcaggaatggcatttaactgaagctttaaaaaaaatgagtgcagggtgggttaagtggctcacacctgtaatcccagcactttgggaggctgaggtgggaagatcgcttgaggccaggagttcaagaccagcctgggcaatatagtgagaactcatctctactaaaaatcaaaaaaattagccgggtgtagtggtgtacacctgtagtcctggctactggggaggctgaggtgggaggatcacttgagtccaggaggt

SEQ ID NO: 951857 - DNA, 590 bp, Homo sapiens
ctgaatggcagaggttgcaaaattacatttctgggtctgaaatgattccagtaggggtgatagtaaattggagttcctggcaggagggtgtggagggtgggagtagtgccagtttagtcagcaagccagctcttggcatagttctgggcagtgttcctggaagctgaatcttgagcctggttctttagcaccctagcattccatgagttacccatttttgttattgttaataaacaccttttctgcttcattagtcagagtcagtttctgctacctgcaacaagaatctctataaatatcataacacagcagtctgtgtacagctccaaatgttatcaagcctagttggaattgtatccagagtggaagaaaaagaatacagaaattaaattataaaactattattttcaagtacaaatgattaccaggagtggtcttaagtgcttaccatacattatctcatttaattttcacaagtgcttgatgaggaatatagtatccccatgaagccagtgcrtaaactgaggcagagattaactaacttgccaaagatcttagtgctattgatcaccagagccctatgatagaag

SEQ ID NO: 951858 - DNA, 623 bp, Homo sapiens
taaaaacaactgctgtacaaattaagtttatccaaatttgggtatttggcagacactatctcaaaaaatatatgcagtaaaactattacttcaagaaaaactactgacaatatttgttggcaataaaaactttgaatttgaagttcaagttaaaaatttaaaaatctcatatccaaatcttcttaccttcccaatactactagatttttctgatgagagtggtactactattaatgaatgtggtttatttatactctctaataaaatgtatcaacatttggaagaactgcattgttgagtgaaacaatattttccaaatgactaatgcatgatattacgaaattgtttatgggtaatctagctattgaaaaatgcaagatagatcaatggattttgccttaataggaaacaaaaaattaattgatactgtttaaatttcatattgccaataaccttaaatactaccacttattgagttttgacataaaggagaatatacacaattatctggaaaagctaytaaatatagtcctttattttccatctgtgatattgtgggaggtcagattttcttcatatatttcaatcaaaacaatgaaatgtaacagattgaatatagtagc

SEQ ID NO: 951859 - DNA, 581 bp, Homo sapiens
gcagtgagccaagatcacgccactgcactccagcctggcaacagagtgagactccgttaaaaaaaaamaaaagaaaaaagaaaagcaagaacaaatttaaaaggccatatatttacattaataattctataggttccatggaaatgtaattaatataacaaagtttagaataagaattgattaaattttaaatattttacatgcatttgttatcacattttaacatgaaatatattactgtataattaaaaccagtataaaatgatattaaacttcattttttctgaagataattttatcataatgtacgttgtaatttgaagggggttatcttcagacagctatacctaaaggaaacctagattattttggaaatgaggtattaaaaagcagacaaaaaaaattctacaaaaagttaagtcacttattcccatatataagcatattaaacttggcattaatgcaacgagaataatttgttattctttttaaagaaaaatttaaatgttaaaaatatcaagagcggtaaaaccatcaatgttttaattttgcatcgatctctcttttggtatgtgtgtgca

SEQ ID NO: 951860 - DNA, 716 bp, Homo sapiens
gcaggctgccatttttgctgtttcacatccttcactgttgagaccttcaatgtactggaaattctgaggagactaagaactggagcagatccccagcatactgcagcagccctatggaatagtggtcagactattatgtgggtgcctgttcccatatctcctcaccaggcaggtcctccaaccctgggccactaaccaccccctgctggggcaattgagttggtagcagttctgcaacttccaaaacagagactccaggggcaactgaaagcctctctgcactgcttctgcaatggaactgcccttgctactctcacacacagaggagcaaagaccttaagtgtcatcacaacctccagcaagctgcagttgacagaaaaagaggagtccagtctgtttcccatgggtcccaccaacccctgctgctcatcatcagacaaggaacccttggcttgggcccacagcacagaacctccatgctgtgctgattgcactgagtgattatgacttgcatctctctggggtggagcccccaggagacaagcaaacaatcatcggccacaaccattacaaatgtccctttctctggtgcctccaagttgggaaaggaacgtaaaccctaagattrccccagagcttcagtaggcagcccaggagtgccaagatgcaatgtacagccaaccctcacggggagaggaccccacattttcagtgca

SEQ ID NO: 951861 - DNA, 619 bp, Homo sapiens
gactggggcaggacattggagttgagctrgaggatgtccaaacaatataggagacaactgaaaaagctcccagtggctgtagctgaaaaaaaacagagcaacagagtagcatgaattatcacccagaatagaaaatatatacccatgagcccataatcacataaataaatgagggaaaagacacatctctcatgcagaaaaattccacataattttcatagatgctatgccctcaaggaggtggagcctaactcctcattctgaagtgggctgtagagaatgacttccttccaaagagtgtagtttagaaaatggtggaaaaaggagctcacacacgtgaaaaggacaaacgctgcctcaatgaggtgaccccgacggcatcggggtgactgtacacatggatggtgttgacggtgaccacacccctcacccccaccaggatgtgatgagaataaggtttcacctctagggtcttcctctcaaaaccaataacccctgtcttcttaagagaagagcatcaaataaatcccaattcaagaatattctataaaattcctaaccaaaaactgtcaaagtcttcagtggaagcctgagaaactgtcccagtggagaggactct

SEQ ID NO: 951862 - DNA, 571 bp, Homo sapiens
tacaatagaacaccagatagactttcaaggtgttttactcaggtcactgattcctggatggtatctctggacccacctggtgtctggggaaacttaacgctcagaagggaaggatacagacctggctgcctttgccacttgctgattgtagaaatccggggccttgagtgagcctaggctgtagccagggagtgtttacagcaggccttgggcaagacccagtgctgtgctgacttcaggtctcactcagtgttgttgtagtggtagtggccacaggggtgcttgtttcatttaactcccagctataggtagctcagaaaagagagagggagagagactctgctagtttgggagaaagtagaggaagagaagaagtgtctctgcttggtaatccagagacttatctaggatcttctccaagaccatcaaggcagtacctctacaagtctgcaggaacyacagcgttactgggcttggggtgccccctgaagctcttcaatgttcagacactaaagaacatctaaaatcaacatcatccaggaaagcatgagcttgcctaataaagtaaata

SEQ ID NO: 951863 - DNA, 571 bp, Homo sapiens
tacaatagaacaccagatagactttcaaggtgttttactcaggtcactgattcctggatggtatctctggacccacctggtgtctggggaaacttaacgctcagaagggaaggatacagacctggctgcctttgccacttgctgattgtagaaatccggggccttgagtgagcctaggctgtagccagggagtgtttacagcaggccttgggcaagacccagtgctgtgctgacttcaggtctcactcagtgttgttgtagtggtagtggccacaggggtgcttgtttcatttaactcccagctataggtagctcagaaaagagagagggagagagactctgctagtttgggagaaagtagaggaagagaagaagtgtctctgcttggtaatccagagacttatctaggatcttctccaagaccatcaaggcagtacctctacaagtctgcaggaactacagcgttactgggcttggggtgccccctgaagctcttcaatgttcagacactaaagaacrtctaaaatcaacatcatccaggaaagcatgagcttgcctaataaagtaaata

SEQ ID NO: 951864 - DNA, 609 bp, Homo sapiens
tcagcactttgggagtccaaggtgggtggatcacttgaggtcaggagttgagatctgcctggccaacatgatgaaaccccatctcaactaaaaayacaaacattagccaggcatggtggcaggcacctgtaattccagctactcaggaggctgagggaggagaaccacttgaacctgggagatggaggttgcagtgagccaagatcgcaccactgcactccagcctggacaatagagtgagtctctgtctcaaaacaaagaaacaaacaaacaattttatctccacttctttttctagaaatctttctcttccattatgtggcaaaaatcctcaacagggttttccacacactttcttcaaatcctaccttccccattctcccttatacactgtttaattgggcttttgtatccatgcctttattagaatttcccagaatctttgataaatcctattatctttcttggcagttagcagtcctttgacccaagtaactattctccatttattgaaatactttccagttttcactgaattgtctccctatatcttcactgtatcctctgctgcttcttcctcatatttagggctttataatagagaaatgc

SEQ ID NO: 951865 - DNA, 743 bp, Homo sapiens
atgttcagctcctagcagagagggtatctcctctctgctaggcaagtcatcctgacaagagttcagtggggcagagacggtggctcccctctgaagctggtcatcctgactgctcaactctgactgagctcggggcttttatgggcctcagaggggaggaagttcttgtcgattggtccatgggcggccatgggtaggcctggaaaagccaccatatattcccattttgatctgtgggactggcagccctgacgccagccttcaggccttccctggcctgaaggtggggcctcactggggacctgcccccttctgcccaggaacgtgtttgcctcctgctgtcattcatggtgtccaggctgtaggtgccaatgggtgcctgcaggccagcactgagcggccctcagcacccccttggcttccctcctatgttcatcagtgcccaagtatggaaggggccaaggtggcaggggctggcatgtcagcagtgccctgagcctgtgcacacctggctgggctgcaacagctcccaggctaggccctgactttgctctgagatcagagcaggtgccaatagcagggagaagccaggctgtgggagcaggcagtcttcctgggcccccaagagtgcaaagatgcctggatccacagccgcagtttgggtggctgcagtctgcgcctggaaggcagggctcccacstgctcctgggcctcaagaatgcagggatgcccgggtctgcagc

SEQ ID NO: 951866 - DNA, 594 bp, Homo sapiens
caccatgcctggctaatatttttttttttttgtattttttactagagacggggtttcattgtgttagaatggtctcaatctcctgatctcgtgatctgcccacgtcggcctcccaaagtgctgggattacaggtgtgagccaccacgcctggccatgcacacatatgtttactgcagcactgttcacaatagcaaagacttggaaccaacccaaatgcccatcaatgatagactggataaagaaaacgtggcacatatacaccatggaatactatgcagccataaaaaaggatgagttcatgtcctttgcagggacatggatgaagctagaaaccattattctcagcaaaataacacaagaacagaaaaccaaacactgcatgttctcactcataagtggtagttgaacaatgagaacacatggacacagggaggggaacttcacataccagggcctgtcmtggggtgggacactgggggagggatagctttaggagaaatacgtaacgtagatgatgggttgatgggtgtagcaaaccaccacagcacatatatacctaagtaacaaagctgcactttctgcacatgtacccc

SEQ ID NO: 951867 - DNA, 707 bp, Homo sapiens
ctcaaaaacagaagaatacacattgttctcaagtgcacagggaacattctccaggatagatcatatgttagacaacaaaacaagtcccaataatataaaaaatactgcactcatataaagtatgttctctggtcacctgtgaaaaacccacagaaaacaacatgtttttgcaaaaagactgaaaatcttcccctaagatgaggaacgtgacaaggatgtctgcctttgtgacccctattctgttatactggaggttctaactggagaaattaggcatgggagaaaaaggtatctacatatataaattatataattataattatacatgtatgcagatgacatgacattttatagaaataatactaaaaaattcacacaaaaactattagagccaataaaagagttcagcaagattgcaggacaggaggtcaatacacacacaaaaaatggttgtttttccatccagtaggaatgaaaagtttgaaaataataataaaagacaattccatatataatagactcacaaagaataaaatacttaagaataaatgtagcatgggaagtgtaaggtttacacactgaaaaccacaaaacttaattgaaagatattaaataaaacctaaataaatgaaatgacgttccatstttgtggattttgagacagtatttttagatgccaatactccccaaatttatctacagatttg

SEQ ID NO: 951868 - DNA, 677 bp, Homo sapiens
acatgtgctacacttagtggactccaacagccacctctcatgaaaaaaaatcacgctgagaaacgcaatgmtttttgaatagcaagatgggcttgccaattcttatatcacattcattcacaaatagagatgcctgtgcacaactatcacacagttgtcctttggtgtccatcggggattgattccgggactctccaaggataccaaagtccatggatgctcaagttcttttataaaatgatgcatataacctatgcacgtaacctatgcacatccttccatataatttaaatagtctccagattatttatagcacatgaaacaatgtaaatgctgtctactattgttatactgtattgtttaggaagtagtgacaaggaaaaaagtctatacatgtttagtacagacacaaccatccatttaaaaaaaaaatttcaatctgtagttgtttgaatacatgggtgtagaatccttgcataagaagggctgactgtattagctaaatataaattttaaacaacactcatttcaccggtgacaaattatttctaacacttctcatgctaattaacaaatcctctacagttacctttctagtactattgatttgcttccttcaaatgcaaactaaccaattctagactatgaattctctttagggcacttcatttgtttaa

SEQ ID NO: 951869 - DNA, 756 bp, Homo sapiens
tgagtactatgtctattcctcattttatcctcacaaaattgctgcaagatagaaaaaaatcattctccctatttggcagatagaggatcagagaggccaagtaatttgcccaaggttgcacagatagtaaattatacagccctgattagaacctagagccatctggctccaaagctttgttttcataagcatgtttttttctggctttgtgtactcagataactttttaaataagacttttcttctctacttgtatgaccaacactttcgtctgcccaagtcatctcttatcaatccattgcagccttttcttgctaagtctcagcttccagccacacacagacactggaaacttacttgagctaaaactcattaacttgcctcttataaatatgctaattgtaaagttttctttccttatgataatgtgtcattgagtctttccttctttttttttttttttttttttttttttgagaccaagtttcactcttgttgcccaggctggagtgcagtggcatgatcttggctcactgcaacctcagtctcccagtttccagcaattctcctgcctcggcctcccaagtagctgggattacaggcaccagccaacaagcctgactaattttgtakttttagtagagaccagcatgttccccatgttggtaaggctggtctcaaactcccgagctcagatgatccacccgcctgggcctcccaaagtgctgggattatagacgtgagccactgcacctg

SEQ ID NO: 951870 - DNA, 586 bp, Homo sapiens
aaaatgctggtagtgatatgaagagtaaagtctaggctgatgaagtctcagttggaaatgagggacttattggaaactggagcaaggtcacttttgttaygcattagcaagaggttggctgcattgtgcccctgctttagggatctgtggaactttgaacttgagagtcatgatttagggtatctggcagaagaaatttctaagcagcaaagcattcaagatgtagcctggctgtttctaataacctatgcttatttgcatgaacaaagaaatgatctgaaattggaacttacatttaaaagggaagcagagcatagaagtttggaaacttgcagcctggccatgtggtagaaaagaaaaacccattttcagggggaggaattcatgcaggttgcagaaatttacataactaaaaagaaggcaagtactaatagccaagacaatgggaaaaaggccctgaagtcatttcagagagcttcatggcagcccgtcccatcataggcccagaggcccaggagggaagaatagtttcaggggccagaaccagggtctctactcccctgcacagctttgggacactgtttcc

SEQ ID NO: 951871 - DNA, 567 bp, Homo sapiens
acatctgtaataccagcactttgggagattgaggcagatcacttgagctcaggagtttgagaccagtctgggcaacatggtgaaaccccatctctactaaaaatacaaaaaattacccaggtgtggtggcgcacacttgtaatcccagctactgggaaggctgaggcaggaaaattgcttgaacccaggaggtggaggtttcagtgagccgagatcacgccactgctctccagcctgggcaggcgacagagagagactgtgtctcaaaaaaaaaaaaaaaaaaaaaaaaaaagaaagaaagaaagaaaagaaaagaaaagaaaagaaaattagcagggtgtggaggtgcacacctgtagtcccagctactcatgaggccaaggtgggaggattacttgagcacaggaggtcaaggctgcagtgagttgtgattacattgctgcactmcagcttgggtgacagagtgagactctgtctaaaaaagaaagaaaagaaagactattgatacgtgcaaggatatggatgaatctgagaacaattttgctgagcgaaagaaagcagaggaaa

SEQ ID NO: 951872 - DNA, 586 bp, Homo sapiens
gctgatattaactggccaagtcattttgtctaygtggttgtttagtgcctctgccatggtggatgctctctagtaggctttaacatgaaaaccaaaaatattcccccttctttcttactcccataatgtccatctacatgtgtctaccccagcctttcttgatcctgatattccagtctttctcctcccaggtccctgaacagccagccaagccattcgccactgatgttgagctagtatatattctaacctctgaaccacctcttcttccacacaaaggtgtaccactcaaagccctgctcactgggagcatattccttcattacatccttcaaggctgccccaagaagggctgttgtgcaaccaccatgattttcagcttaaacacacataccaagtcaagccattcacaaacgaagctcagggttttttcctcttccatcagatggtcataaaggatccatttgcaatcacagaagtgagctgagggagggacactgatgcagtcatagtgggtgacgtggggctctgggtgccctgactctatagctgttttgtgccccctggtcctattcatgcttagccc

SEQ ID NO: 951873 - DNA, 563 bp, Homo sapiens
ggctgatattaactggccaagtcattttgtctacgtggttgtttagtgcctctgccatggtggatgctctctagtaggctttaacrtgaaaaccaaaaatattcccccttctttcttactcccataatgtccatctacatgtgtctaccccagcctttcttgatcctgatattccagtctttctcctcccaggtccctgaacagccagccaagccattcgccactgatgttgagctagtatatattctaacctctgaaccacctcttcttccacacaaaggtgtaccactcaaagccctgctcactgggagcatattccttcattacatccttcaaggctgccccaagaagggctgttgtgcaaccaccatgattttcagcttaaacacacataccaagtcaagccattcacaaacgaagctcagggttttttcctcttccatcagatggtcataaaggatccatttgcaatcacagaagtgagctgagggagggacactgatgcagtcatagtgggtgacgtggggctctgggtgccctgactctatagctgttttgtgccc

SEQ ID NO: 951874 - DNA, 561 bp, Homo sapiens
gctgcctttgccagtttcttttctgaacataaacacatggtcctttcttgtctttataattggtactgtcatcagactgtttatgatgcatcactattcaactcatcggttagcaaatattaactgaatgattatagcagggagtaaaaggcagagtaaaagacagttggctgaggaatgctttggtatcacaagtgcactgtctcattaatgtttgcttctgcttgttgcatagcctgaattttgctataatagtttgaagacataatagcctaaacaatagtggtgcaaacttgatagtaatgcttttcctctaatgattggcaaattaagagtttatatcagccaatcagtacaaattcagcatttagcatgtagagatattaagctaaatgttggaggggaagttcatggagctaatgtttattgactgcttagtagctgttatgcatcwtgcattatactgtgtgcaaaggatagctgggtaaataagccatagcccctgcgtgaggcacacacaactaagtgggagaagatacaaaaggaatgggtaaatgtttc

SEQ ID NO: 951875 - DNA, 604 bp, Homo sapiens
tggcatttaagaagcagatgccagttgggtgccatggctcatgtctgtaattccagcactttgggaggccaaggagagaggaccacttgaggccaggagtctgaaaccagcctaggcaaaatagcaagactctatctctaccaaaaaaaaaaaagaaaaaaaaattagaaattaactgactgtggtggtgcacacctgtagtcctaactacttgggagactgaggtgggagaatcacctgagaccaggagttcaagactggagtgaactataatcgtgccactatactccagcctggggcacatagtgagatgctgcctccaaaaagaaaaaagaagaaggaagaagaggaggagtggggcaggggaggaggaagagaaagaagaggaggaggaagaaggaaaagaagaaggagaaggaacagcagatgcgggaaagctctctgttctgtgtctatgtggcttaaagcaggacatgaatttacaaagtcaaaaaatctcacttcccctctctaacagggagaacgaaggttaaccactgaagacaattttagacccttawgggcgtgaagattgcaccagagtgatctatattaacaagctcta

SEQ ID NO: 951876 - DNA, 626 bp, Homo sapiens
gcccctccagaggaacgatcaggcagcaacatttgctgttcagcaatattcgctgttatgcagcctccactgctgatacccaggtaaacagggtctggagtggacatcyagcaaaatccaacagacctgcagctgagggtcctgactgttaaaaggaagactgacaaacagaaaggacatctacaccaaaaaaagctgaaattctaaaaatcagaacacctctccccctccaaaggaaggcagctcctcgccagcaatggaacaaagctggatggagaatgactttgacaacttgagagaagaaggcttcagatgatcaaacttctctgagctaaaggcagaagttcaaacccatctcaaagaagctaaaaaccttgaaaaaagattagatgaatggctaactagaataaccagtgtagagaagtccttaaatgacctgatggagctgaaaaccatggaacgagaactacgcaaagaatgcacaagcttcagtagctgattcaatcaactggtggaaaacactctgcaggatattatccaggagaactgccccagcctagcaaggcaggacaacattcaaattcaggaaataaagacaatgccacaaagatactcctcaagaagag

SEQ ID NO: 951877 - DNA, 626 bp, Homo sapiens
gcccctccagaggaacgatcaggcagcaacatttgctgttcagcaatattcgctgttatgcagcctccactgctgatacccaggtaaacagggtctggagtggacatctagcaaaatccaacagacctgcagctgagggtcctgactgttaaaaggaagactgacaaacagaaaggacatctacaccaaaaaaagctgaaattctaaaaatcagaacacctctccccctccaaaggaaggcagctcctcgccagcaatggaacaaagctggatggagaatgactttgacaacttgagagaagaaggcttcagatgatcaaacttctctgagctaaaggcagaagttcaaacccatctcaaagaagctaaaaaccttgaaaaaagattagatgaatggctaactagaataaccagtgtagagaagtccttaaatgacctgatggagctgaaaaccatggaacgagaactacgcaaagaatgcacaagcttcagtagctgattcaatcaactggtggaaaacactctgcaggatattatccaggagaactgccccagcctagcaaggcaggmcaacattcaaattcaggaaataaagacaatgccacaaagatactcctcaagaagag

SEQ ID NO: 951878 - DNA, 803 bp, Homo sapiens
agacaaagtccttcccactcttccctccccttttgataagcagaggagactcttatgtccaccaccaccayaggtccttggggagtattgccaggccacagccaatgttcacttaaggcccaagggctcttcagtcaggttgtggtgcatgttgctaaacctaggacccactttcacaaaagtgggctcccctctggcccaagataggtccagaaattcctcctaacagccaaggcctggaattggggatcccgagatcccacttcatactctgccacactgtggccgagctgcaaggctgaggtatctaaactgcaagacagagtcctctttactcttccctctgcttttcttaagcagaaggagtctctcttggtagccactacagttgtgaatgtgccagatcacacctgaagccaggacatctcagagtctcatccaaggcccagggtgtttcctaactggctactgctcctgattattcagtgcccaagggctctttagtcagcaggtgatgaattgtgccaggactgcatccctcccttcaagccagtgggttttcttctggcccatgtgtgtctagaaatgtcttccaggagctagggcctaagatgggggcctcactactctacccattgccctatcctgctgtggctgagctggtatccaagttgcaaagtcctctttactcttttctcttcctctcctcaagtggaatgaaggggtcttctttggagcagtgagctgtgctgcctggggttgggggagggatggcacaaccacttctttagctaggtatatca

SEQ ID NO: 951879 - DNA, 685 bp, Homo sapiens
acatctcagagtctcatccaaggcccagggtgtttcctaactggctactgctcctgattattcagtgcccaagggctctttagtcagcaggtgatgaattgtgccaggactrcatccctcccttcaagccagtgggttttcttctggcccatgtgtgtctagaaatgtcttccaggagctagggcctaagatgggggcctcactactctacccattgccctatcctgctgtggctgagctggtatccaagttgcaaagtcctctttactcttttctcttcctctcctcaagtggaatgaaggggtcttctttggagcagtgagctgtgctgcctggggttgggggagggatggcacaaccacttctttagctaggtatatcactaggtcatgtgcacctcaagcccactggctctgaccccacacggcactaaaacttgcctaggagttgcagttcttgtggcctagactgcctttcaagttgtttagagcctcagaacactttagcccatggtggcaaggtttgccaaaactcaggttgtaacatctggaatgggtgatttccctctggctagggctgctctaagtggtccctccatgggcatttgctgaggtctgtgcatgttggcagcaccgagttccaacacaaagtcccactctccctccctgagaacagagattctcag

SEQ ID NO: 951880 - DNA, 545 bp, Homo sapiens
tgtccgcttctagcttccctatcttagtgtgcctaaagggaaaggaatgtgcttattaaggcccactgtttttactggggcccactgtatgagtgtgaagtttagtgattatccaggagactcgccccctccttctgtgaccgagttgtttatctgtgttttacagcctgacctgatcttcttatctgtccaggtacaccccaagtttttcccaaggctgttttattttttgcctgttgctatgtgacttttcaggcaggctgcttctgctgtctgaatttttccaatgatttttcctttccttctctctcattcctctcttcaggagaggaaaccctaactgctgttaggcagatgggtgttgatctttctggctacttcctgctggagaggggaattgtgtggggaacagcagctaggattcctccaggggctggtataagggtcctcagatgaaacgcatgtttatacgtgattccatttgcattaccacttggagcttgatagcstctaggcaaaaagaaataatttgggttattagggga

SEQ ID NO: 951881 - DNA, 463 bp, Homo sapiens
aggggccaaggtacagctcggcctatggtttcagacagtgcaagccccaaaccttggcagcttccacatggtgttgagcctgcgggtgtacagaagtcaaaaattgaggcttgggaacctccacccagatttcagatgactggaaacgtctggatgcccagatagaagtttgctgcaggggtggagccctcaggggaacctctgctagggcagcatggaagggaaatgtgggatcagagcccccccacacacagagttcctactggggcaccacctagtggagctatgagaagagggccaccatcctccagaccccagaatggtaggtccaccracaacgtgcactgtatgcctggaaaagctgcagacactcaacatcagcccgtgaaagcagccaggagtggggctttaccctgcaaagccacagaggtggactgctcaagactatgagaacccacctctt

SEQ ID NO: 951882 - DNA, 775 bp, Homo sapiens
agtgccaaataggaggcaaaaatgctggaatatctcctctcttaccaacctttttccttcttttcctttctccagcaatcccaccctaagcccaaaaaattctacatttcttaatttctactattcagaaaggtgagtcaactaaactcactctctttttttattttttaagtagggatggggtttcaccatgttggccaggatggtctcaatctcctgacctcgtgatccgctggccttggccttccaaagtgctgggattatgggcatgagccactgtgctcggcttaaactcactttcaaaataaggatgttaatacccataagactatttgcaatgtataaaagcattataaatatataaatatatcaaaggtgataattaggaaaaatcataaaaattttaatgggaaattctgcagacagaaacagccttaaaatagatgcttctatcctatgactacatcccaaatgatgatttggaatcgttgagatttagagaaggttgccccctctaaaatagagtcttcccagctttcctgaagtactatgtataacgtgtcaagcttacactattccaaggtccaccagatgttgccatgtcttattttaaagtggaaaatccaaataaattcagtcatttcttttttctttttctttctttctttcttttttttttttttgagacagagccttggtctaytgcccaggctggagtgcagtggcacatcttagttcactgcaacctccgcctcctgggttcaagtgaccctcc

SEQ ID NO: 951883 - DNA, 606 bp, Homo sapiens
ctcctctatattttggaatagtttaagtaggatttgtattagtttttctttaaacgtttcatagaattcagcattgaaactaagtcctgggattttgtttactgggagaatttttattacgttttgatattgttacttgttattggtgtgttcaccttttggatttttttttatggttcagtctttgtacgttgtatgtgtctaggaattttaccatttcttctagatttttcactttgtggacttacgttgctcatagaggccacaaataatcctttgaatttctgggatagcagttgtaacgtctccattttcatttctgattttatttatttggaccttttctcattttttctttgtctggctaaagtttgtcaattttgtttaatttttaaaaaaacaactttttgtttcattgatttttgttgttttttatttcagtttcatttatttccgctctgatctttattatttattttcttctaattttgggtttggtttgctcttgcttttatagttstttaaggtttagaattaggtgttttttgaagttttttctcttatttgttataggcacttaaagctacaagcttccctctgagtagt

SEQ ID NO: 951884 - DNA, 632 bp, Homo sapiens
gatttgggtgggtgcacagccaaaccatatcattcttcccctggaccctcccaaatctcatgtcctcacatttcaaaatgatatgtctccgatgagtggaggaacacccggttcttcatcttsagtcaaattagataaaacaacatggatacacatggaatggttttgagaagtggagagtttaatatgcaagaaggaagtggggagaaagaaagaagcagatccctggtacacagacagagggagggggcctccaaagccaaaagagggaacttcaagtgccaaggataccagccagttttatgagtaggctggaggaggtggtgtctgatttgcatagggctcacgggattggtttcaccaggtatgtcgttcacatagcccgtgaaaaagctggccctcccaccctagcctgttgatatgcaaatgcagggcaccatgatgttctacacactggggatatgtgggggtggctatgctgctaggcatatgtgagggcaaggataagaggacaatggtggtgagaattgccatgtttgatggactcagtttctaatggctggcatttgcacatcaaagattgcctgccaggctctaaaagtgggggttttccttctagacaagaagcattt

SEQ ID NO: 951885 - DNA, 591 bp, Homo sapiens
ttgaggtcaggagtttgagaccagtgtgaccaacacagtaaattaaaaccctatctctactaaaaatacaaaaattagctgggcatggtggcaggcacctgtaatctcagctactcaggagtctgaggcaggtgaattgcttgaacctgggaagtggaggttgcagtgagctgagattgagccactccactccagcctgggtgacaaggcaagaccctgtttcaaaaacaaaacaaaacaaaacaaaacatctcttgcttgtaagctattggagagttcaggtcttaagcattcgctgctcaattctctgtttggcaccctgccacaaacgcctaactttctctccctgcaaatcctagtatcagtgtttggatttttgtgcatgctgggtgagaggactcaagttcagttgggtaacactgctgacatcgtggaccagatgactctttgttatggtgggctgtctgtgcattggagaatgtctgacagcatccctggtctctactcactagatgtactactcactagcaccccctagatgyaacaacaaaaaatgcctctagacattaccaaaagttccctggggggcaa

SEQ ID NO: 951886 - DNA, 438 bp, Homo sapiens
tgttgctgcaaagaacatgatttcattgtttctttttatggctgtgtgatattccttggtatatacatatataccacattttcttyatccaatccaccattaatggccacctagattgattgcatgtctttgctattgtgaatagtgctgcaacaaacatacgagtacatgtgttttttggtagaatgatttatttacttttggatatatgtattatatacccagtgatgggattgtgagtcaatggtggttctgtttcagttctttgagaaatctccaaactgctttccagactggctgcactcattcacattcccaccaacagtgtataagtgtttccttttctctgcagcctcacgaacatctgttgtattttgactcttttgaacatccattgtattttgactctttagtaatagccattctgacaggtgtgag

SEQ ID NO: 951887 - DNA, 438 bp, Homo sapiens
tgttgctgcaaagaacatgatttcattgtttctttttatggctgtgtgatattccttggtatatacatatataccacattttcttcatccaatccaccattaatggccacctagattgattgcatgtctttgctattgtgaatagtgctgcaacaaacatacgagtacatgtgttttttggtagaatgatttatttacttttggatatatgtattatatacccagtgatgggattgtgagtcaatggtggttctgtttcagttctttgagaaatctccaaactgctttccagactggctgcactcattcacattcccaccaacagtgtataagtgtttccttttctctgcagcctcacgaacatctgktgtattttgactcttttgaacatccattgtattttgactctttagtaatagccattctgacaggtgtgag

SEQ ID NO: 951888 - DNA, 686 bp, Homo sapiens
atacccttgacaaatgccttgcaaaatagacttgtgagggcagcacctgtatcactgaagagctttgtaattgytcttccctgtatgtcagatctaacagtgggaacacaatcactccactacaaaatttaaatataatgggaataattggatcccagggtggcaggggccaagtggcagcactcaaccatcaaaggcaagaggggcatagctactgaaatggacagcagaggcacagtgacaatcagaatagtctgactcctgtagagttctgacattggctaattaatcatggtgttcctagaagtaaaattgataggaagcccactgcattcttgcttaatttatataaacagaaaacttctaggtccaatggatgaaaagctaatttgaattataaaaacagagaatcatggcccatcaataaatttttgggcttgagccagtttacagacccacaaccccttgaaagaaggggaggctgggtcaccttgtgtaaggaccccatattactgaaatttatgcagtgaatctttctcccatccttccctaaggagacctccagccttataccagggtagctgtgcactggggaaagggaaatgatcagacatttcagggactactggacactggctctgagctgacattgattccagaggacccaaaatgtcattgtggtcccc

SEQ ID NO: 951889 - DNA, 561 bp, Homo sapiens
tctgcttatgttcagcttgtctccaagttgggggtcaaattcaggtctgtgctccacgcctttccattctgggacacagactaaaggaatatccactgtctgtgatgtgttgtttttaataaattattgcagatgctaaagagggcaggcaggttcttatagcgcttccaaaagttgctgcttggatgtgatgtaacatcacaactttgtatctaactggctaaagcaagtcatgaagtcaagtataatatggagttgggaagtggatgcctcccagaaggttggttgttagagaataaacatttcctgaaccatgatgtaagctgccacagtgaagagttaagccaaagagccttcataaaagtatcactttccgtttagggccaaatcataatgatgcaatgtaagttactggttaagaagtgttttagtcagccctttgtatctgtgggttytgcatctgtgtatttaaccaaccatgaatttaaaatctttggaaaaaagtcgtgtctgaactacacacacacagacattttttcatcattattccctaaacagtac

SEQ ID NO: 951890 - DNA, 564 bp, Homo sapiens
ctcccttaacactgtcctcacctgtcccttcattttcttcacctrccacttttaaggggccatctcttgcagaaagaaccctgattgatacagtggaacatgaaaatgtacaaaggggactaactgcttgatgggtatggggtctccttttggggtgatgaacatgttttgaatctagatagagatgatggttgcacagcaccgtgaatgtactaaatgccactgaattgtacactttttttttttgagacaggatctcattctgttgcttaggctggaacgcagtgtcgcgaccgtagctcgctgcagcctcaaactcccaggctccagtgatcctcccacctcagcctcctgagtggctggggctacaggcatgtatcaccatgcctggctaatttttaaattttttttggagagacaaggtcttgctatgtttcccaggctagtcttgaactcctagcctcaaaggatcctcctgtctcagcctcccaaggtactgggattataggtgtgagccaccatgcccagccatgaatcctacactttaaaatggtgaatttaatg

SEQ ID NO: 951891 - DNA, 601 bp, Homo sapiens
gcactgaggcagcaccacctccatccccttcctcccgaggacccaccgtgaagctggacagtgaggacgttggcacctcaccactgttccttaagagagtcttaaaactttccgaaatgctcttttatttggaaatctagaacccgggggcatactggagctcactgcatggcagttctcaagcacaagcccaggcctatgcgaggcaaacccatggacctggagcccaggggcccccgggaccctccttcagctctctggatatcccagtgcagtaatggcttcagaacaatgaagccgcttcaattttattccgtttcctgtagccattaccaacaattaaccaattaaatgtgtctagagttggcatataggttaagtttttgtccaattaaattatctaagaagtcttgcttagctccaactctcttatgaccacaacttatcttttacaaaatacttaataaattcaaagctacgtctacaccagattcaccccatggcatgcactggaacagaaggagtcatgcagggaaaagcgctctgaaacctccagggcccgcgccgctgctcctcaccagwagtgacctcgttgaaggac

SEQ ID NO: 951892 - DNA, 791 bp, Homo sapiens
ttaacattaaaatgaagaccttaggactgatagaacagactgtttgtagtaataagataccagcatgrcagatagcaggccctaaaggaaatcaaagtattttatcccaaaatatatttatttgacattttttgaaatggccctgcaaatctaaatcttatggggaaaatctgcattctgtagagaatcctcttccctttccaggtctttttcctgatccaggagagaatgaacttaaaagagtctagcactttttttttttctttttttgaaacagagcctcgctctgtcacccaggctggagtgcagtggcacgatctcggctcactgcaagctctgcctccagggttcatgccattctcctgcctcagcctcccaagtagctgggactacaggtgcctgccaccacacctgggtaattttttgtatttttagtagagacggggtttcaccatgttagccaggatgttcttaatctcctgacctcataatctgcccacctcagcctcccaaagtgctaggattacaggtgtgagccaccactcccagcctgacactttttaaatctgataagaaacatttacaatctattctctctgaagcctgctaggtggaggcttcatctgcactatgcaaaccttggtctccacaaccccttatcttaacccagacattcccttctattgattacaggtctttaaataaactctttcaatcaattgccaatcaggaaatctttgaatctacctatgacctggaagcctcacctcctccagttgtcccacctttcc

SEQ ID NO: 951893 - DNA, 489 bp, Homo sapiens
atgcatttttgattaaataggcaggcttgctaatatttgccgatctgaaggatgtaagatggtatctttgtgttttaatatacatttccctaattactgcagagatcgagtttctttttgtctgtttatatgtttcatatgtttattggtcatagaaatcattcctttgttcattttccttttggatggtttgtccttttctcattatttgtagtggttttttttttttttttatgggggggttctgggtttttttttttttttttttaaaacggagtctctgttgcccaggctggagtgcagtggcatgatctcagctcactgcaacctctgcctcctgggttcaagcgattctcctgcctcagcttcccaagtagctgggactacaggtgcccatcatcacsccctgctaatttttgtatttttagtaaagatggtgtttcaccatattggccaggctggtctggaattcctgacctcaagtgatct

SEQ ID NO: 951894 - DNA, 636 bp, Homo sapiens
atatttgttgcagctctgtttacaatagctaaaatttgtaagcaacctaactgtccatcaacacatgaattaatgatgaaaatgtggtacatacacacaatggagtagtattcagccataagaaagaacgaggctgggtgcagtggctcacgccagtaatctcagcactttgggaggccaaggtgggcggatcatgaggtcaggagttcgagaccagcctgaccaacatggcgaaaccccatctctactaaaaatacaaaaattagctgggcgtggtggcaggcacctgtaatcccagctactcaggaggttgaggcatgagaatcagttgaacccgggaggcagaggttgcagtgagctgagattgcaccactgcactccagcctcactgacagagtgagactatgtcaaaaaaaaaaaaaaaaaaagagagagagagagaaaaagaatgagatgcagtcatttgcaacaacgtggatggaattggagatcattatgttaatgaaaataagccaggckcaaaaagacaaacatcacacgttctcactcatttgtgggatctaaaaatcaaaacaattgaactcatggacatagagagtagaaggatggttaccagaggctggaaagggtagtaga

SEQ ID NO: 951895 - DNA, 443 bp, Homo sapiens
aatcaataagcaataaaataatagaaaattarggtagaaaagaagcttattcaaacttacactcactgtaatgtgtaactcctatttatctatccatttatttatcatctatcatttataatggtacagatatttgaactcagattcacctcctgtggcttctacgcaatgatcctgttctatttctccaacaaaaacaaaatataactctttctcacacattgtagccctctgaatgctttaaaacaaatatatctcttctttgtcttctgttctgctaattaaacatctcaacttcatagttttctttatgagacatagatatcagaagtctcaccatagtgcttacctatttctccagactgttttatgtggaaatcttaaagctgatagatgaaactttgtatcttgttgggaaaaatcacacaaattatttttaaccc

SEQ ID NO: 951896 - DNA, 554 bp, Homo sapiens
tgtctccttcgacctttaagtcaatgccgacaaaaaccagcaggtggcaacagcttggcttctttgagtttggaaatggccaagcagtttgtggtcaataaaaataaattctccccaactaattaattaattctccccaattaattaattttttttagacggagtctcgctgtgttgaccaggctggagtgcagtggcgccatctcggctcacggcaacctctgcctcctgggttcaagtgattctcctgcctcagcctcccaagtagcaggaattacaggcatgcaccactacgcctagctaatttttgcatttttagtagagacaggtttcatcatgttggccaggctggtttccaactcctgacctcaaatgatccacccgccttggcatcccaaagtgctgagattacaggcgtgacgactgcgccaggcctcattttatttttatatgccacttttaccaaaagataaacactgcctgaaaatctagaaaacatagccaccaccatgccactgatacaycaagctatggtattagaatgccttgtcagt

SEQ ID NO: 951897 - DNA, 571 bp, Homo sapiens
gactgcaagtattatgagtccattatcacactgctatgaaaaataacctgatactgggtgatttacaaaraaaagaggtttaattgactcacagttccacatggctggggaaacctcaggaaacttacaatcatggcataaagtgacaggaaagcaagtcacatcttgccattgtggagcagaagagagaaagagagagagagagagaatgaatggggaagttccacacttttaaaccatcagatctcatgagaactcccttactatcatgagaacagaaaagaagaaatccacccctatgatccaatctcctcccaccaggcccctctcctgacatgtggggattacaattcaacatgagatttggatggggacacagaaccaaaccatatccttctgctcctggccccttccaaatatcatttccatcttacattttgaaaccaatcatgccttctcaacagtcccccaaagtcttaactcattctggaattaactcaaaagtccaagtccaaagtttcatctgagacatggcaagtccctcccacctatgagcctggaagataaaaaa

SEQ ID NO: 951898 - DNA, 627 bp, Homo sapiens
gcagttgacaggttttatccctacctaggtgaaaggcctaatgaagccttttaagaactttccattggccagtagccagcagatgaagcttgccatcctgattgtagtcgtcctgaggactgaaagatgtatccccaagaggtagcccattctatttccacaggggaatattgaggttttatttatctgatgggaccctccaagatcagtggggcttcaagtgggtcagaaatttgggcctctctcactgctgatttagctacttggtctgcctgcctattttcctcagctatttcatccatctctttttggtggcctttacaatgtattactgccacttcctgtgggaggaaaactgaggataatagtttattaatttcctgatggtatttaatgggagacccattagccatgaggaagtttgtctctttccagatagtggcatgggcatagaggactagcaaagcatacttagaatcagtataaatgctgtttttcctttgcttaatttgagcaccctcrtgagggtagttagttcagctactttagcacttgtgcccagggagagatgtgctgtgttagtccatttttcatgctgctgataaagacatacccgagactgggaag

SEQ ID NO: 951899 - DNA, 626 bp, Homo sapiens
ggagataagactctcattcagggcaatcttagcagatttgaggctcagtatctgcttctgaagctggcagatagatagaatccttgagttcatcattttcttttaccatgttgtccactgagcctaggagcaacaaactaacttcattatgttccatggttctgcatatatggtcgaaggtattgtgtatattgtcactaaactctttgcctctcatgagcgatgaaacaggagtgtcaaatgcatttattttgcataactctctaaatagtgcatgccaaggactatcagtgttctccatactattagaagtagaatccttagcatattggggtctaatcatattaagcagtcaactccataaaccccaaagccaacaaaataactccatccttaatattctgttcctctagacccattcctggtgccaaaatctgtattagtcagggttctctagagggacagaactaatggaatatatatacatagagagagaatatatatatatatakagagagagagagagaatatatatatttttattatatatatgtatatatatacaatatatttatgggagtttattaagtattaactcacacaaggtcccacaataggatatcttc

SEQ ID NO: 951900 - DNA, 559 bp, Homo sapiens
gagcaaggagattgaatcagtaataaaaagtacctccaataaaaaagcccaggacccgattatttcactgttgaaactgtgaaataaaggatgatatttaagaattaatatcatccttttcaagctgtttaaaaaaattcaacagatggtaacattttatggtcatgttataaggtcagcattaccctgataccaaagccagataaggacactataagaacaaaaaattacaggccagtacctcaatacctctgatgaacatagttgtaaaaattctcaacaaaatcctggcaagtgatatttaacagcccattaaaagtttcatacattttaatcaagtggaatttatccctgggatgcaagtatgattaaacataaacaaatcaataaatgtgatacattgattaatagaatacaagacaaaatcatacaatcatcttaatagakgcagaaagactatttgataagatttgacatctttgcataataaaaactctaaaaaaattagatataaaagaatgtacctccaaagaataaaggccatatgtgacaaactcac

SEQ ID NO: 951901 - DNA, 590 bp, Homo sapiens
attggatgcaacccaagtcatccataaaaagatgcaaactactgatacacaygacactgtggctgaatctcaaatggttatgctaaatgtaagaaactagactcaaaagcgtacatactgagtgattctacttacatgacattctggagaagacaagatgatagagactgaaaacagataagtgcttgtggggaacagaggttggggcagggactgactacagtagaacatcaagggagaattttgggggccaatagaaatgttctaaaacttggtcgtggtggtggtcaggagacattttccaaagctcattgacatgctcaccacaaagagtaaattttactatatttaaatttttatttatttttattttttattttttgagatggagtctcactctgtcacccagactggagtgatgtggcacggtcttgactcactgcaacctccgcctcctgggttcaagcgattctccggcctcagcctccaaagtagctgggattacaggtgcctgccaccacacccccctaatttttgtattttcagtagagatggggttttgccatgcctctgttggccagattggtctc

SEQ ID NO: 951902 - DNA, 590 bp, Homo sapiens
attggatgcaacccaagtcatccataaaaagatgcaaactactgatacacacgacactgtggctgaatctcaaatggttatgctaaatgtaagaaactagactcaaaagcgtacatactgagtgattctacttacatgacattctggagaagacaagatgatagagactgaaaacagataagtgcttgtggggaacagaggttggggcagggactgactacagtagaacatcaagggagaattttgggggccaatagaaatgttctaaaacttggtcgtggtggtggtcaggagacattttccaaagctcattgacatgctcaccacaaagagtaaattttactatatttaaatttttatttatttttattttttattttttgagatggagtctcactctgtcacccagactggagtgatgtggcacggtcttgactcactgcaacctccgcctcctgggttcaagcgattctccggcctcagcctccaaagtagctgggattacaggtgcctgccaccacaccccmctaatttttgtattttcagtagagatggggttttgccatgcctctgttggccagattggtctc

SEQ ID NO: 951903 - DNA, 577 bp, Homo sapiens
gattgcttagtctcttgaaagaagattttcttttgaatgctgactttatatgtagaacagtgaagactaaagtcaacagcatttatgcctagaaatragcaagcctcttctgctaattattaatgctggagttggcatcaatgtactcaggatttgagttgcatttgtgttttgctgatgtggttcctctgaatatcttctgtatacaatcaattgcaaatttctctaacattgtcttatatatatgatataagctgggttactggaggatttttatagtcctttttcttcatcttctacttttgtttttctctgagcttgtgcttaagagggagtttttgtctccatactcttgctccttttgcaacagaagactgccatttctcgttactcagtgcttcctagcctagaggtggtggcagaagtgattctctgtgtcccagcccagcctcagttttaggcatgccccccattcttgggcctcaatagttggctctctcagtgatcctgctactcctccatgtggtagctgaactctaacttgggttttgtgtggggaagagttttatgctacctc

SEQ ID NO: 951904 - DNA, 601 bp, Homo sapiens
aatagcataaaatctataaattactttgggcagtatggccatgttcacgatagtgaacatagatgagcatggactgtttttccatttgtttgtgtcctctctgatttccttgaacagtgctttgtagttctccktgaagaggtccttctcttcccttgttagctgtattccgaggtattttattctctttatagcaattgtgaataggagttcattcatgatttggttctgtttgcctgtcattggtgtatagaaatgctagcaatttttgcacattgatttttttatcctgagactgctgaagtagcttaccaggttaagaagcttttgggctgagatgatcaggttttctagatataggatcgtgtcatctgcaaagataatctgacgtcctctcatcctatttgagtacactttatttctttctcttgcctgattgcctggccagaacttccaacagtatgttgaataggagtggtgaaagagggcatctttgtcttgtgctggttttcaaggtgaatgcttccagtttttgtccattcagcatgatgtttgctgtggatttttcatatatgtctcttattattgaggtaggttaatt

SEQ ID NO: 951905 - DNA, 509 bp, Homo sapiens
ggaaccacgataaggagtagtggcccaaggcaggaaagcccgtcccatagggatgaaggggactgaccattaatccaacccagagtggctgggggcagcaggagtggcctgccaatttgattgaacctcgtgtccccactaacaaagtgaaaatggttcacagaatctggagacaggaactgggggtgtgtgggtgcatgtgaacctacctgggacatgagagaggctcatttcatccgatgaggagtcctggggtaggagtgatgggtttatgtgtgtgaatgtgggagcctaactaggctcacccaggacacaagagaggttcatttcatccagtgaggagtcctggggcaggggaggtgtgtgaaagtgtgtgaaagagatggtctcaggagaggccaacatggggactgatgtggggaggcacagatcccttagtgcaggctgtgtgctctgaggcragtgtaggcaaaatcaaacctaggatgttgcatacggctgataggatc

SEQ ID NO: 951906 - DNA, 779 bp, Homo sapiens
cccactgcttggagtggacataatgggggaatattggcactctttgactcattgtttacccctttgtatatctccttttggaccattagggttgaaggggtgtccttattagttggggaaggagtcggggggacactggggtagggagatagactctgagggcttcctgtagggctttttacataattgtactttttacataatcacaagttgtcccttaatgaaaagaaagtttgcacatatggcacttcactccatttgccttcctttttacaaaagaggtctagctgtaagatggtgttatagtttatacttccctcaggaggccaggttttttccccttgaagaggatatcatggtgaggttgtactgcagaagaatataagtcatttctttcttagtgtctgagggtcaattggccccaattctccagaatatatcttagggacatttttgccttggggggaacatttcccatctgaaaaaagaacatagggatgccagcacccctggtcattttccaataagcattagtcatagagcggcctctatgttcttaatgcttattcctttccagggtgcataaccacccataggcctctgcttatcagattagttatgttcactgatgtagcagtcctgcacctcttttcccacctctcttgaccacaaagaaaggggtccaggctgctggattctagtggtcctttaccaamttgcccaacattgtttttgtgctcaggggtgagtactagacctgggctgggttcctaagtatt

SEQ ID NO: 951907 - DNA, 585 bp, Homo sapiens
attttaatttaaccaactgttgcctagaaattgatgataatgaccgagctgtcatggaaatcacagctagaatgcaygagttcacctatgttccagttcaaacttgatctgggtggtccctggattccttgtttggaggatggttctcaaccttaaaaaaaaaaaaattaaaaccctcattggtgggttcttgcttatttttggcatctgcctcatcctcccttgccttttacctctgtttattaggagtattcagtcaactatagaggcaatagtaaccaaaaaaactaccgtgcagttgatggcattaacaagattatcagccactgccagtagaagaagaagcacagccctgtgaagaggtgacagatagtggtgctttctgttaacatctttgttataaaaagcaccaaagggaggaatggaacaggaataaaaagaaattaaagaatgtgtaaacagaaactcggttgtatgtatgagaaagagaaagagctggagtcctttaaaaattaactgcctgtttttctgtggctagtgagccttatctcttctttcccaggcattgtgaagactctgtttctc

SEQ ID NO: 951908 - DNA, 577 bp, Homo sapiens
tgaccacaggtgcacaacaccacacctggctaattttttgttttgttggtagaggcagggttttgctatgttgcctaggctggcctcgaactcctgggctcaagcaatccacccgccttggcctcccaaagtactgggattccaggtgtgagccacccttccccctggccaatcttaactgagaaaattaatataaagaattattagagatatcacaggtattggagaattaaaaagggaaaatggaacaaagaagtagtgactgtaagaagtagacaggggaaataaaaggtcaagattgagattactgggaccaaacacttgaaggaggagcccagctaatttttgtatttatagtagagaccgtgtttcaccatgttagccaggctggtctcgaactcccgacctcaggtgatccacctgccttggcctcccaaagtgctgggattacaggcatgagccaccgtgcccagcccagaacaatttctttataaccagcamagttaggcaatcattgttcagattacatacaacgacatgagggagaagcaagagtctaggacatttcacaggtttc

SEQ ID NO: 951909 - DNA, 731 bp, Homo sapiens
gcagtggcagccttgacctcctgggctcgagtgatcctcctgcctcagccccccaagtagctgggactacaggtgtgtaccaccacactggctaatttttgtattgtttatagagatgargtttcaccatgctgcgcaggctggtcttgaactcctgggttcaagtgactcacccgccttggccttccaaaatgctgggattacaggtgtgaaccaccacacgcagctccaaatcattttttaatggctttattgagaagtaattcacacaccatacaattcttcaaagtgtacaatttaatgattttagtatattcatagagtcgtgcaaacatcaccgtagtctaattttagaacatttttatcaccccaaaaagaaacccataccaattagaagtcagtccctatccctggactccctgagaccccagccctaggcaaccactaatatttctgtctttcgagatctgggtgttttgtgtaaaaggaatcatacaatgtgtagtcttttgtgactgactgctttaacttaggataatgtactgaagattcttccatgctatagcatgtttcagtacttcattctttttattactgaatgaaatttcatcctgtggtatatttattttgtagggctgtggtcaaagtaacacaaactgctgacttaaaacaacagaggtttattctctcgcagttaaggaagctagaagttcaaaattaaggtgtcagca

SEQ ID NO: 951910 - DNA, 731 bp, Homo sapiens
gcagtggcagccttgacctcctgggctcgagtgatcctcctgcctcagccccccaagtagctgggactacaggtgtgtaccaccacactggctaatttttgtattgtttatagagatgaagtttcaccatgytgcgcaggctggtcttgaactcctgggttcaagtgactcacccgccttggccttccaaaatgctgggattacaggtgtgaaccaccacacgcagctccaaatcattttttaatggctttattgagaagtaattcacacaccatacaattcttcaaagtgtacaatttaatgattttagtatattcatagagtcgtgcaaacatcaccgtagtctaattttagaacatttttatcaccccaaaaagaaacccataccaattagaagtcagtccctatccctggactccctgagaccccagccctaggcaaccactaatatttctgtctttcgagatctgggtgttttgtgtaaaaggaatcatacaatgtgtagtcttttgtgactgactgctttaacttaggataatgtactgaagattcttccatgctatagcatgtttcagtacttcattctttttattactgaatgaaatttcatcctgtggtatatttattttgtagggctgtggtcaaagtaacacaaactgctgacttaaaacaacagaggtttattctctcgcagttaaggaagctagaagttcaaaattaaggtgtcagca

SEQ ID NO: 951911 - DNA, 578 bp, Homo sapiens
tggttaaatgaaataaggcaggcacagaaagayaaacatcacatgttctcacttatttgtgggatctaaaaatcaaaacaattgaacttatggaaatagagagtagaaggatggttgccataggctgggaaaggcagtgagggagctgaggggaggtagggatggctaacaggcacacacacacacacacataaaaatagaaagagtgaataagatgtactacttgatagcacaatatggtgactatagtcaataataacataattgtatattttaaagtaacttaaacagtataattggattgtttgtaactcaaaggataaatgcttgaggggatggatatcccattctccatgatgtgcttatttcacactgaaataaggaatcttggaggcctgtatcaaacaatctcattacgccataaatatatacacctactatgtacccacaaaaaaaaaagtttctaaaaagtgattcttaatccacttattgaatatagactggacttaatgattcacttttagcaaacagaatatagatgacgtgatggaggaaaaatctgagactgggttataaaa

SEQ ID NO: 951912 - DNA, 646 bp, Homo sapiens
taccccatatgggacagatagcattccaaaaattttctacagccaaggcaaagtggagcttaaggtgccatccgatcccaaaaaaggatgtagtaatttagcagaaaggaaatccaacaggtaaattgcaaagaacctctaagtaaatatgtccaagaaaaacaaaacaagccagatagagaagactggaataaataactaattattcaatatgaagatatgcccacaagaaacagcagcaggcaggcaaccatgacctccccaaatggacaaagcaagaagccagtgaccgaccctaatgagatagctataggacattggtctgagcaaagattttttgggggagtaaacctcaaaagcacagacaacaaaaggaaaaatagacaaatgagataacattaagctaaacaacttctgaacagcaaagaaaaccatcacaaagtgaagagacaacttacagaatatgagaaaatatttgcaaactattcatctgacaagggattaataaccagaatatataaggaattcaaacacatatyaaaaaaatggtctgacttaaaaacaagcaaaacgatctgaatagacatttttcaaaagaagatatataaatggccaagaggtatatggaaaaaaaaaaaggacagca

SEQ ID NO: 951913 - DNA, 691 bp, Homo sapiens
agaaggagaattctcccagcacagtgcttgagctctgctaagggacagactgtctcctcaaatggttcsctgacccctgtgcctcctgacagggagacatctcccagcaagggtcaacagacacctcatacaggagagctctggctggcatcaagctggtgcccctctgggatgaagcttccagaggaaggagcaagcagcaatctttgctgttctgcagcctccactggtgatacccaggcaaacagggtctggagtggacctccagcaaactgcaacagacctgcagaagaggagcctaactgttagaagaaaaactaacaaacaaaaagcaaccacatcaacatcaacaaaaaggacccccacacaaaaactccatccaaaggttatcagcctcaaagatcaaaggtagataaatccatgaaaatgaggaaaaaccagcccagaaatgctgaaaattccaaagaccagaatgactcttctccaaatgattgcaactcctctccagcaagggcacaaacctggatggagaatgagattgacgaattgacagaagtaggactcagaagatgggtaataacaagctcctctgagctaaaggagcatgttctaccccaatgcaaggaagctaagaaccttgataaaaggttacaggaactgctaactaaaataaccagtttagagaagaaca

SEQ ID NO: 951914 - DNA, 816 bp, Homo sapiens
aagactcaaataaatagaacagaaccagagaagactctagatttgctratttttccaactcagcattaacctactggtgttattgtctaagagcaggacttagtagaatggctttttcttccacatactaattcatggactctaactccttatttaaatcaaatcgctactatgataggaaatgggagaacttggattgttaatttacatggatatgatcctggaaaaattgtcgtccctctcacgaaggcacaaatacagcaagcctttataaatagtcttacttggcaaacccatttagctgatttcacgggtgttcttgaaaatcactttccgaaaacaaaattatttcaatttttgaaattaactaattggattctccctaaaattaaatttaaaccaattgaaggtgctgaaaatgtttttacagatgggtctagtaatggtaaatcttcttattctggcttgaaaggtaaggtttttcagactccctatacttcagctcaaaaagccgagcttgtagctgtaattgaggtattgactgcttttattatgcctattaatgtgatttctgattcttcatatgtggttcattccacacaattaattgaaaatgctcagttatgatttgatacagatgaacaactgatgactttatttacccaattgcaaacagcagttaggactagaatgcactctttttaatatcactcacattagggctcatacacctcttccaggacctttaactgaagggaatcaaatggctgatcacctagttgctactgcaatatctaatgccagacactttcacaa

SEQ ID NO: 951915 - DNA, 556 bp, Homo sapiens
acaaaagaaaacaaaactaagttcattccttgggtcgagtggttattcttcctcactatgtctgggccggaaagatttcttcttcacatgtcccktggcaaactgttatccttctgacctaatttggagactaggtgttctccagtggctgaaatggtgaggaaatgagatgcaactgtattttgtttcagttttgtatgtacttgggtacctttcttgcagtgggtcatgagtttcgggcatcttatagaaaacctgggagcccttggtgctgaaaaaattgagtttcagatagaatgtgcttttagaactcctgattagagaatgctgggaatacaagtttcttgctttattttgaaagttctttttcctctaaaccacgcaaatgtttttttcaaaaacttttctcattcttgatgatgatgatgatttttttgcctacaaatgggaacaaaaaagatttttttctgcataaagaataaaaggaatatatatcttgctttgaaaatttctcctagtccaatattttttgacaccttgtgaattgtaacaggag

SEQ ID NO: 951916 - DNA, 563 bp, Homo sapiens
cctgtgcgttatgcctcactagcaatgcataggtcaaggtgctgtgcaaaaccaccgtgaagaccgtccatccacacggtatttccatcaaamctgcacatgtgtctgcgatgtgctggctcacgtcatgtgtctcatttttactgagtaaaatttcttttttggcacattatggagaaaaataagtaggttcaattttgttaaaaaaaaaagaaactttatctatgtttctatattttatggccaatctgtgcattctcatttcataataaaataaaattagaacactacactatatgaaataacagaaaagagcattggcttcagaatcttcaaatctgggattaggttctgactgcactcaaatgtgtttttccacctctaccagcctcagatgttcatctgtaatcaggtcttcatctgtaaaataaatttgcttggtgggggtaggggagtatcaaatcagatagtttacgacatttgaaatgctttagactataaactactacaacattgctcctattattgaaatttaacagtattttatcaaacaacactttgat

SEQ ID NO: 951917 - DNA, 594 bp, Homo sapiens
gaggggcaatgtaaggaagataaatcttcagttctttctccccctaatatcttataatgaaaaattgcaaacatacaaaaaagttgaaataattatatagtaaacacccatataactcaaaaactagattctatagtgaatattttactatcttcggtttaacacgtatctattgtttctctatcaaactgtcttatttatgcatttcagtgcaacttgctctcatcagcacacctagtccttaacatttcagcacacatattattgttagttctttttggacactttctagcactcccttcacaatctctcttgcctcattttccctcattctctccactttctcaattttcatttctgtgcccttcctcctactctatatctccaaagttctaaattgtaaaaagaaagtgtagaaatttgagcatggaacagtattgaagtggaaaaggtcaatggttaccatccaggacctcacaaggtgctgtcaccacaggcctgggatagatgagatcctcatgaacaagttgatccaaaccaactcaccagagacagaggtatatattaaaatgccaamttaataattgaaaaaca

SEQ ID NO: 951918 - DNA, 601 bp, Homo sapiens
cagggagaatccaaatggagtcagtgggtttgtgacttgtagagacagaagttgtagyttggggaggcagaagcagtcactatttgtggccagagtaccagaggggagggacagacagttgcagagacagaaagttctagatatctgcagatggtccccttttagtctttggctaaatattcatctgcacacacaggggataaaccttttcaggctaggggaaacactactacaaagtagcaagccaaacaattcccagaactcacatagtgaaatgtgacagcgtgctggcagccctcgcagtcctcgcagccctggctggctctcggcacctcctcggccttggcgcccactcttgccatgcttgaggagcccttcagcccaccgctgcactgtgggagcccctttctgggctggccaaggctggagctggctccctcagcttgtggggaggtgtggagggagaggtgcacgcgggaactggggctgcatggggcgcttgcaggccagtgcgagttccgggtgggcgtgggctctgcgggccagcactcagagcagccaggtggcggcaagccccgggcagtgaggggcttagcacctg

SEQ ID NO: 951919 - DNA, 638 bp, Homo sapiens
gtgacttttttaaagggaaggattaattcagaaactttgggcggaagaaggggggaggatgtggggatgctgcctcaccgtctcgagacatgcccacagagagacacttcttgaagcgacattgctggcagcggttgcgattgatgcggacgatggagcaattctcattcttcagacaccttttgtactggatgttctgctggatgctccgacggaaaaagccctggagggcaggggtggttagtgaccacctccatcatggctgggcctctgtgtccagggggagggggccacctgcccctgcccttacccccagtccgcctcaccttgcagccctcgcaggcgtgcacaccgtagtggaagcccgaggcaacgtccccacacactttacacagtaacaccatgccattcagctctgtggaagagacgggcagcaggtgagcaggagaggccaggctgagtggccacaggtgtggaggctttctgggccggagatccagggagggaaaagctaaggaggaactccagtgttgaggggcactggagtgacaaaactgggctgaagaggggctggtgccactctaggagaaatccctgaagccagaataggycctggcaagactggtgtcacgtaaaaa

SEQ ID NO: 951920 - DNA, 559 bp, Homo sapiens
gagtgtaatagcccagtgggttcaccttgaccactgcctagacagagccaatttatcaggacaggaagaattgcaatagagaaaacagtaaagagtaattcaagcagagttagctgtgcaggagaccrgagtcttattattactcaaatcagtctccctgagcatatgggaatcagagttgttggtttttttgagatagagtcttgctctgtcacccaggctagagtgcagtggcgcgatctctccgcctcccaggttcatgccattctcctgcctcagcctcccgagtagctaggactacaggcgcccgccactgcacctggctaattttttgtatttttagtagagatggggtttcaccgtggtctcgatctcctgacctcgtaatccacctgcctcaggaatcagagttttgaaggataatttggtgagtagggggacagccagtgagtcaggagtgttgattggttgggtcagacatgaactcacctgggtgaattccacaagaacacagatggatgggggccacaagatcagatgagccaatttatggatctgg

SEQ ID NO: 951921 - DNA, 547 bp, Homo sapiens
aataccatatttattaatttcctgctatgaatatgacactatctgccgatgctttattaaaatgtaaaatgactcttcctcctcaagtagggtagaggcagtatagtttagtggttaaggcggataaggatactgattgactgaaagtctgggttcaaaccctctttttgttttgttttgtttgagacaggctcttgccctgtcacccagcctggagtgcagtggcactaacacagcctgggttcaagcagtctccccccttggcctcccaaagtgttgcgattactggtgtgagccattgcacctggctcaaaccctctttttactacttactagccatgtgacttgtacaagtcacctaaactccctaagcctcaggtttttttgttgttgttgtttttgtttttttagatggaatctcgctctgtcacccaggctggagtgcrgtggcaagatctcggctcacagcaacctccgcctcccaggttcaagcaattctcctgtctcagcctcccaagcagctgggattacaggcacatgctggcac

SEQ ID NO: 951922 - DNA, 509 bp, Homo sapiens
gtttacaatcctttagctagacmcaaaagttctccaagtccccacccgacccagaagcccagctggcttcacctctcactagacaagtggtgacaggtgaaaggaaggagaacctgcagcaaaagcagttttgatttttttcactttttagaaagttttcccatgtgacaagcagcagcaacccactcatgcttcctcaaatggaaatggcatctattggaagtctatgggggctctggcaatcagtgggtgcccaaaggtgcaggttgggaagatgggtaggagctgagaaggagccttggagaggagccctgcaggtgacggccagcagggatactgcaaccatgatctccccgggagagcttctcatcacctcttcatctcctgggtagtagcatctaagtgacagtgcttaggtgtgcctgggctcctggctcccaggaggtgaaaagtaccacgaggagctgttcaattctaatcagatatttctgcctggggaaggttctcag

SEQ ID NO: 951923 - DNA, 625 bp, Homo sapiens
ttttttttttttcttgagatggagtctcactctttcacccaggttggagtgcagtggtgcaatctcagctcactgcaagctctgcctcccgttttcaagcaattctcctgcctcagcctcctgagtatctgggactacaggtgtgtgctaccacacccagctactttttctttttttctttcttttcttttctttttttttttttttttttggatttttagtagagacagggtttcaccatgttagccaggatggtctcaatctcctgacctcgtgatccgctcgcctcagcctcccaaagtgcggggattacaggcatgagccatcgcacccagccatttctttttttcttgtttcttttttttttttttttttttgagacagagtcttgctctgtcgcccaggccagagtgcagtggctcaatctcggctcactgcaacctctgcctcctgcgttcaagcgattcttgtgcctcagcctcctgagtagctggaactacaggygcctgccaccacatcaggctaatttgtgtatttttagtagagacagggtttcagcatgttggccaggctggtctcgaactcctggcctcaagtgatccaactgccttggcctcccaaagtg

SEQ ID NO: 951924 - DNA, 614 bp, Homo sapiens
aaaacagtttagtagtttctcaaaatgttaaacatagagttaccatcaggtccagcagttccattcctaggtatatatctacccagtagaaatgaaaacataccttctacaaaaaattacatatgaatrttcatagcaacattattcacaatagccaacaagtggaaataactcaaatgtccatcagtgatgtatggttacatacaatgtggcatattcatacaatggaatatcatgtgacaataaaaaagccagtcacaaaacactacatgttataggattctagttctatgaagactctgggattgtcacatctagagaaagtgaaaatagaatattgttttccaggggcaaagttaagagtttgggagtgaagggtaatagtaagtgaatactaattaatataagggtttcttttcttaaatttttccttccttccttccttcatccctctctccctccctctctctctctcccattccctccctctctccttcccttcctttctcttttctttcttcctttttttctatttttctttatccctctctttctctccttttcccttccttccttctttcctttcttgatgatatccaagagacaagaaaagg

SEQ ID NO: 951925 - DNA, 575 bp, Homo sapiens
ctccctatcgtattcctaatagtaktaaataattttatgattatactgcagatgggaacatttatttactcttttccaggtactttgacctacttttgtgattgccacaaaaccttgaaatgtgtttatctcccaattttgctcatcagggcagagagcttggaaaggtagtttcttgcagaagatcacaaagctagcagattgccaagtgaagtccctaatgtaggccttctatctccaaagatcacactcttttccttatagtgggatgcctctcatgtttaccaattaaaaatgctacactttggtgaaatcacgtcttatttatcttgcctaagttaaattctaaatcacaattgtgattcaaataatcaagttatgccacggtcacaacccaaattattttgagtgggtgggtagatggtgttaaaagtgggaattttgtttgattttgtttttattgtcataatgtgttttctggctattgttacaagcttatgaattatcataattacatcttgtttttggcaaaaataaaaataaaaatccagtgacaaattggaaacttgaaggat

SEQ ID NO: 951926 - DNA, 759 bp, Homo sapiens
ttaattctctgaattaccaggcagagattcttgttctcttctcttactttctcccaaacaaataaagtctctctctctttctgttctgaaccacttggagctgtgggtggagtgacacaagcaccactgtggccaccaaagctataactgatgggtcagacctgaagccagcagtgcagttggtttcacctaagccctgctgtaactattctctggctgtggcctatgttcgctcaaggtcctgtgcctctacaatcagcaggtggcaaagccagccaggcctatgctcttcccctcaggacagtgagttctcccaagccccagacagattcagagttgctgtatgggtgtcaaggactagagtgaaaaagcttagaagtcttcctggtgttatatcatactgcatctgagctgttactcaattgacaagatgcaatcttttgcaccttttcttcccttttccaaaggcagagaagcctcatcccatggccgccgccacctcaggccaacttgaagtactgccagactactttcaatgttcccttaaggcccaagggctcttaagtcagctagtggtgaatgctgtctggcctaagagctacatttcagggcaatggactcctccctgtcctaggtcaggttcagaaatgccatccaaaagkcaagtactggagtcaggggccccaagagctcacttggtactccacccgcctgtggcagagctggtaactttccttttcccttttctttttcaagcat

SEQ ID NO: 951927 - DNA, 759 bp, Homo sapiens
ttaattctctgaattaccaggcagagattcttgttctcttctcttactttctcccaaacaaataaagtctctctctctttctgttctgaaccacttggagctgtgggtggagtgacacaagcaccactgtggccaccaaagctataactgatgggtcagacctgaagccagcagtgcagttggtttcacctaagccctgctgtaactattctctggctgtggcctatgttcgctcaaggtcctgtgcctctacaatcagcaggtggcaaagccagccaggcctatgctcttcccctcaggacagtgagttctcccaagccccagacagattcagagttgctgtatgggtgtcaaggactagagtgaaaaagcttagaagtcttcctggtgttatatcatactgcatctgagctgttactcaattgacaagatgcaatcttttgcaccttttcttcccttttccaaaggcagagaagcctcatcccatggccgccgccacctcaggccaacttgaagtactgccagactactttcaatgttcccttaaggcccaagggctcttaagtcagctagtggtgaatgctgtctggcctaagagctacatttcagggcaatggactcctccctgtcctaggtcaggttcagaaatgccatccaaaaggcaagtactggagtcaggggccccaagagctcacttggtactccaccygcctgtggcagagctggtaactttccttttcccttttctttttcaagcat

SEQ ID NO: 951928 - DNA, 582 bp, Homo sapiens
aagataacatattctcctagttgttctacctcactggccattccttctctcaccccattattggttccttctaatctccaagacctataaccatctattttctatctatacttctattcagtccatagcttaaaatgccatctattcattgactgatctcaaaatatatactgctagcctggttctcactcttgaactcaagacttgtatattcaactataccattattttcttgacatttctacctggatgttactgggcatatcaaatctaatacgacctaaaacaacttctgatagtttcaccagattacacttgtccccaaatcattcttacctgagtaaattacaaattcatcactgtaagttgctcatgcttagaatcatttttattcctctctctttcctcatactgctcatccaatctatcaacaaatcatactgcctcaaccttaaaaatatatctacaatcttatcacttccactgtacaccctgttctatgtcaacatcacctcttgcctggatcatcataatagcccrtaacaactttccctacttcccacttatagagtacagtgatct

SEQ ID NO: 951929 - DNA, 740 bp, Homo sapiens
cagagggtgcgccaggtcccccagcagtgcaggccccctggcactgcgtttgayttcttgctgggccttagctgcctccccatggagcagggcttgggacctgcagcccaccatgcctgagcctccaccctgtgccccccgcggtgggcttctgcacagcccgagcctccccaacaagtgccacccctgctccacggaacctggtccagtcgaccgcccaagggctgaggagtgcgggagcacagcgcaggactggcaggcagctccaactgcggccccagtgcgggatccactgggtgaagccagctaggctcctgagtctggtggggacttggagaacctttgtgtctagctaggggattgtaaatacaccaatcagcaccctgtatctagctcaaggtttgtaaacacaccgatcagcaacctgtgtctagctcagggtttgtggatgcaccaattggcactctgtatctagctaatctagtggggagaaaggagaaaaccagtgagtgacttcagccatcaacattgcctgcaacatcctggctaaccaggaggtcctgagtctgtccacgtaatcagttcactaatattacaaagagcattcaagaaaaccagaacactaaggtgatctataaccaagaaatctcacagagtctatgtcattcctttgctgcccccatcagagctggtgcagatactcaccactaggaaaacttgaggagaggtcatattactgg

SEQ ID NO: 951930 - DNA, 590 bp, Homo sapiens
gtgttctggcccagagtgtgtctatgtgatctgtgatctgggaactagtcttaaacaggtacctcacaactctgacaggtactgtagcctggtgtggctgagctgttatccagggtgcaagacatcgtccactccacttttccctctcctctctttaacgggagggaaagggtctcttttggagatgcgtgctgtgcagcctggttgagaggtgatgccagtactcccttaattgccctaggtggtgtctcagtaggtcacatggctccccagtcctctgtctctgggactagttcaaccctaggactcatttaagatttgcagtccttgtgtcttagactgcttttcaagtatactaacagactcagagaacttcagcccacggtggtgtgctttgcaagaactcaagttccaactgccgggatgggtgattcgcttctggctagagctggtttaaatgcattgtctgtgggtgggcatcggctgagtttggtctagttttcctatctgctctaacaagacagcactgagttcawtgcctcataattgctgtgttctctctccctcagtgcccagagaagttctctgta

SEQ ID NO: 951931 - DNA, 432 bp, Homo sapiens
gtttaccttcaagcaggggagacagacaaaacaatcacaaatacatggaacatacctcagaaggtgatgactgctttagagcaaaataaagcctgagaggcagctaaatagtgccagacaggatgggggaggtgggtttttatatagcgtatccaaaggaaaactcactgagaaggtgatatttcagcagagattgaaggaaaacaggtgggaaagttattcaggctgagtgaacaggaaagcagagaggctcatttggctagagccaagtgggcgagaggaatttggtgggagatgtgttcagagaagtagcaagggtcagaccacataggacctaataggcctttagaaggactttgarttgagttggctgacatgtattcttaaaagatattttcatgcacattgtgaaagtatccatttcttttaaaa

SEQ ID NO: 951932 - DNA, 623 bp, Homo sapiens
caagcaatcctcctgccttggcttcccaragtgttgggatcacagacattagccatggtggcagcctacactgtgtttgtataaacagttcagaattgagtcttggattatctgacaatctctcttttaattcaggggttcccaactcctgggcgatggaccggtaccagtcccagtccgtggcctgttaggaaccagactgcacagcaagtgagcgcccagcaagtgagcattcccacctaagacccacctcctgtcagatcagcagcgggcattagattctcataggagtgggaacgctggccacacctgtgaatcctggcctaggttgcctgatccttataagaatctaactaatgcctgatgatgacctggggtggaacagtttcatcccgaaaccatacccctaccccaccttgttcagtggaaaaattgtcttccacaaaactggtccctggtgccaaaaaggttggggactgctgtattaattgctgcatttaggacattttcatttaatgtaattattgacataggtggattaaaacatcatcttgccaagtgtttcctatttgttctgcttgttctttgtttcttataaccgtttattattttgattgactttt

SEQ ID NO: 951933 - DNA, 458 bp, Homo sapiens
gactttaagttgaagccaatgctaatttctcattacaaaaattctagggcctttgtgccaaatctactctgcttgtcctctataaataaaacaacaaagcctgggtgacagcactgtttacatctgtttacagcatggtttactgaatattttaagcccacttttgagacctactgctcaaaaagattcctttcaaaatatcactgcccactgacaatgcacttggtcacccatgaattttgatggagatgtaccaaggaaattaatgttttcatgtctgctaacacagcatccattctgtggctcatggatcagagtaatttcaacgtttgccttaytacttaagaaacacattttataaggctatagatagtgattcctctgatgaatctgggcaaagtaagttgaaaacctggagagaattcatcattctaggtgctattaagaacatttgtgat

SEQ ID NO: 951934 - DNA, 575 bp, Homo sapiens
ctgatcagataacaaaggccaagcaggagacgaaagctgaggaagaggtagagggttgccagatttagaaaactgtggtaactgcagggggtcacaggattggtatgtcattaggatgtcacataccgtgggccgattaccccaaacagtgatgggaacataatttcctgttgggaccagttcccggaattttgcacaaacatgatcccttacttccacatctaagattcctttttcaggaaaccaaggacagtgttcttccactgccctgaatagagtgaccatattttccatggagactcaaactccctcctgttttaacaggagcttaatatagcagagataagcataatgtttagactccgcgtgacccatggttgacctggacaactcaccaatcgtcagggaaccaaacaagcgtttctgtggaccggaccaatgaacgtttctctgcaactaccaaagggaatcaggttctcacatgtacttaagaaaaagaaagaccatgttggtgctccagatatcaggggaaccagcccccaatatttcaacrtaggttctttctgttttcccta

SEQ ID NO: 951935 - DNA, 613 bp, Homo sapiens
aaggggtgggggtttctcgccctccagaaaagcagagaawgggttgggacactgaaataagggattggggcacagagataagaagttggggtgtggaaataagggattggggtgcagagatataagaggtaggggtgcggaaagaagggattggggcacagagatataagaggttggggcatggaaataagggattgggtgcagagataagaggttggggcacggaaataagggattgggggttcttgccccctagaaaagcgggacttgccgctaagggtgaaggagaaggggttgaggagtacttgcccctctcccagaaaagcagaacaggggtagagacaaggagagaaggggttggggtacttccctcttctccagaaaagcgggacttgccgctaagggtgaaggaccaaggcaggcgtccctgcgtggtctgacacctttgaaacgtgggtgaatagtcagagaggtgtccctgcaatgattaaacaccaagggaaggctgccttcccagtccatgactggcgcccgagttttgggtccacggataaaatgtgtctcctttgtctctaccagaaaatgaaaggaattgaaattaagggagagattg

SEQ ID NO: 951936 - DNA, 581 bp, Homo sapiens
gtggcttatgcctataatcccagcactttgggaggccgaggcgggtggatcacctgaggtcaggagttcgaaaccagcctcaacatggagaaaccctgtctctaytagaaatacaaaattatccgggcatggtggtgcatacttgtaatcccagctactcaggaggctgaggcaggagaattgcttgaacctgggaggcggatgttgcggtcagccaagatcgcgccattgcactccagcctgggcaacaagagtgaaactccatctcaaaaaaaaaaaaaaaaaaaactctcagcaaaattggcctacaagggacacacctcagtgtaataaaagccatctatgacaaacccacagccaacataatactgaatggggaaaagttgaaagcattcgttctgagaactggaacaagacaaggatgcccactctcactactcctcttcaacatagtactggcagcctagccagagcaatatgacaagggaaagaaataaagggcatccaaatcggcaaagaagaagtcaaactgtcactgtttgctgacaatatgatcatttacctcaaaaaccctaaagact

SEQ ID NO: 951937 - DNA, 601 bp, Homo sapiens
cagaagtaggtgtaaggcagagggagagactcaggcaagttttagagcaggagtgaaagtttattaaaaagtcttagagcaggagcaaaagggagtaaaggacactyggaagagagccaagtgagtggcttgagagagtcaagtgccctgccctgttcggcccttgagttggcgtttatacattggcatggttccggggtttgcgtgccttctcccttgattcttcccttgtggcaggctgtccacatgctcagcggcctgtcagcacttgggaggggccacatgcgtagtgtgtttactgacgttgtgcttgtgcttacatgaggtgtttttcccttaccagttgagccttctgccattttgccccttaatgtacatgcttgaccccacttgcccaactcctaagatcttatcataaagctgccgatcaacagcttcagatgttttctatctaatgagaaactctctttccctggtgacagcggtgaccagttatcattttagaaagacagtttaacaactgtctaaccatcacctgatagttgcctgacatttctggagaagtcctctcctgccctgctcacgtctgcctgacaaccta

SEQ ID NO: 951938 - DNA, 601 bp, Homo sapiens
cagaagtaggtgtaaggcagagggagagactcaggcaagttttagagcaggagtgaaagtttattaaaaagtcttagagcaggagcaaaagggagtaaaggacacttggaagagagccaagtgagtgrcttgagagagtcaagtgccctgccctgttcggcccttgagttggcgtttatacattggcatggttccggggtttgcgtgccttctcccttgattcttcccttgtggcaggctgtccacatgctcagcggcctgtcagcacttgggaggggccacatgcgtagtgtgtttactgacgttgtgcttgtgcttacatgaggtgtttttcccttaccagttgagccttctgccattttgccccttaatgtacatgcttgaccccacttgcccaactcctaagatcttatcataaagctgccgatcaacagcttcagatgttttctatctaatgagaaactctctttccctggtgacagcggtgaccagttatcattttagaaagacagtttaacaactgtctaaccatcacctgatagttgcctgacatttctggagaagtcctctcctgccctgctcacgtctgcctgacaaccta

SEQ ID NO: 951939 - DNA, 582 bp, Homo sapiens
atggccaagatacagaatcaacacaagtgtccttcagtggattaatggataaagaaaatgtggtacatgcatgcaagggaatactattaatacagcctttaaaaggagggaaatcctgccattttcaacaacatagatgaatctggaagacattatgctaagtgaaataagccaggcacagaaagacagataccacatgatttcacctacatgtggaatctaaaaatgttcaactcacaaaagtagcatagactgatggttaccagaggtcagaggagctgaaaaaagagggaatagggaattgttgatcaaagggcagagtttcagacagaaagaacaggttttgaaatctattgcacagaacagtcgctatactcagtaataacgtactaaatcaaatgtctgaccctaagaaatcataggtaatcaaattgatgaatgctaattcggttgatttaattattccacattctatgcatgtatcaaaacactgcatttcaccccataaatgtrtatttgttaattaacaacaataataaaaaattaaaaattgaacctaggacttccaggtagctgaagaaa

SEQ ID NO: 951940 - DNA, 578 bp, Homo sapiens
ttataagatagtatttgcaagcctcatagtaacctcaaaccaaaaagcataaaatggatatacaaaaaataaaaagcaagaaactaaacataccactagagaaaaatatcttcactagaggaagacaggaacaacataaagaaggaagagaaaaccagaaaacaaataacaaaatggcaagagtaagaccttgcttgtcaacaacaacattgactgtaaatggactaaactctcccatcaaaagacatagactggctgaatgaaacaacaaggcccattgatctgttgcctatatgaaacacatttcacctataaagacacacataggctgaaaataaagagacagaaaaagatattccatgccaatggaaaccaaggagcaggagtcactatactatatcagacaaaacagatttcaagacaaaaactgtaagaagagacaaagaagggcaccatataatggcaaaggggtcaataaagyaagataatgtaacaattttaaatatgtatgtacccaatagagaagtaccctgatatataaaggaaatattattccatctaaagaaagagataggtcc

SEQ ID NO: 951941 - DNA, 562 bp, Homo sapiens
ggaggcggctgagaagcagggagaagaacaccaggcttggagtcaggtgggtggctctgggcaggtcgtgtccctctctggggcccattttcctcacctctaagagagggatggtaacactgcactcatcaggggtcctaaggacaaaattgcatcacacatgtgaaaaggctttgcaacggaaagactgccctgaatgacttttttttttttgagacagagtcttgctctgttgccctagctggagtgtagtagtgcaaactcagctcactccaacctccgcctcctgggctcaagcaattctcctacctcagcctcccaagtagctgggaccacagacatgttccaccacacccggctaattttttatatttttcatagagatgaggttttgccatgttggccaggctggtctcaaactcctgacctcaagtgatctgcccgccttggcctcccaaagtgcttggattacaggygtgagccaccgtgcccagccctgaattactatttttgctcccttctggtagacttttttttcttcttaagagcatagactctgaag

SEQ ID NO: 951942 - DNA, 570 bp, Homo sapiens
cacagagagcccacaagcctgaccagtaagaaattcttacccttttgcctgcatgccaggtttctgggttccctttccctgagtgaccttagtgaccctgcttgccacatcatagccctggggrccaagctgcaacaccaaagaaaatcatctttttccttttcatggaaccacaggcaaaagtctctcaattttgtaagatgccgttcaagggattgcatgggataaccaaattaacattttccatccggccagagcaaaatacgtgtgacaaaacatagatattaaccactctgcttagcacccaatatcgaactggtaaggctcaaacttgcccctgtttgagccctgtcatctttattcaaagtggggtggaatgatctccgaccagcagtttcaacatttggtctctgggcaagatggtcgccctgagtaacagaaaagataggaaagggaaaggagagaacgagagagagaaaagcattgcctgcgatgaggtggggaaggcaaggagctcagggggtgggagaaagacccacccattgcagcgacactgactcaaaagttcag

SEQ ID NO: 951943 - DNA, 735 bp, Homo sapiens
gaggctgctgcctttttttcagagatgccctgcccagagaggagaaatctggcagtctggccagagcagccttgctgagcagcagtgggctacacctagttcaaacttcccagtggctttgtttacactgtgagtgtaaaaccacctactcaagcctcagcaatggcggacgtccctcctcccaccaagctagagcatcccatttggatctcagactgctgctgtgctggcagtgagaatttcaagccagtggatcttagtttgttgggctccatgggggtgggacctgctgagacagaccacttggctccctggcttcagcacccctttccaggggagtgaatggttctgtcttgctggcattccaggcgccactggggtatggaaaaactcctacagctagttcggtgtctgcccaaatggctacccagttttgtgcttgaaacccagggccctggtggggtaggcaccggagggaatctcctggtttgtgggttgtgaaaatcataggacaagcacagtttctgtgccagagttcctcagggctcagtccctcatggtttcacttgggttggggagaaaattctccgacgccttgcacttccagggtgaggtgatgtcccactctgcttcrgctcaccctccgtgggctgcacccactgtccacccattctcagtgagatgaaccgagtacctcagttggaaatgcagaaatcacccaccttctgcgttgat

SEQ ID NO: 951944 - DNA, 735 bp, Homo sapiens
gaggctgctgcctttttttcagagatgccctgcccagagaggagaaatctggcagtctggccagagcagccttgctgagcagcagtgggctacacctagttcaaacttcccagtggctttgtttacactgtgagtgtaaaaccacctactcaagcctcagcaatggcggacgtccctcctcccaccaagctagagcatcccatttggatctcagactgctgctgtgctggcagtgagaatttcaagccagtggatcttagtttgttgggctccatgggggtgggacctgctgagacagaccacttggctccctggcttcagcacccctttccaggggagtgaatggttctgtcttgctggcattccaggcgccactggggtatggaaaaactcctacagctagttcggtgtctgcccaaatggctacccagttttgtgcttgaaacccagggccctggtggggtaggcaccggagggaatctcctggtttgtgggttgtgaaaatcataggacaagcacagtttctgtgccagagttcctcagggctcagtccctcatggtttcacttgggttggggagaaaattctccgacgccttgcacttccagggtgaggtgatgtcccactctgcttcggctcaccctccrtgggctgcacccactgtccacccattctcagtgagatgaaccgagtacctcagttggaaatgcagaaatcacccaccttctgcgttgat

SEQ ID NO: 951945 - DNA, 534 bp, Homo sapiens
attctgctgaggatggatgtgtaaaaagggaaacccttgtacacagttggtgagaatgtaaattagtaaaatcactatgaagaatagtatggaggttcctcaaacaactaaaaataaaactaccatatgacctagcaatcccactgctggatagatacctaatagaaaggaaatcagtatatcaaagagatatacttccatgtttattatagcagtattcacaatagccaagatatggaatcaatctaagttctatcaatggattaatggataaagaaaatgtggtacatatacacaatagaatattattcagccataaaaaatgaaatcctgtcacttgcagtaacagggatggaacgggaagacattatgttaagtgaaataagacaggcacagaaagacaaatatcacaggtcctcactaayatgttgaagctaaagaaaaattgaactcatggagatatacagtagaatgatggttaccaggggctggtgtgggtagtggggatggaaggataaagagggatggttagtg

SEQ ID NO: 951946 - DNA, 545 bp, Homo sapiens
attattaaatgcctcagggtagtcttctttgtgttaaatctgcttggtgttctataaccttcttgtactttctctaggtttggaaagttatctatttttatcccttcaagtgaactytctacttttatctcttcttctacctcctctttaaggccaataactcttagatttgctcttttgaggctattttctagatcctgtagtcatgcttcattgttttttattattttttctttttgtctcctctgtgtattttcaaatagcctctattcgagctaattctgctttatccattctaattctgctttatccattctgctattgagagactctgatgctttactcagtatgtcaaatacatttttctattgcagaatttgtgctgcttttttaaattttcaatccctttgttaaatttatcttatagaattctgaatttcttctctgtgttatcttgaatttctttcttcaagtttcttcaaaacagctattttgaattctctgtctgaaaggttacatatctttgtttctccaggattttttcc

SEQ ID NO: 951947 - DNA, 586 bp, Homo sapiens
tcaagcttcagccatgcatggaccgaccagcctccagtgtggtcggagcagggcagttgtccttgtcagcagcagcttggtttcactgcaggatcagccgtgtcrggtggtctgggttttgttgactggtccactggtcctgggaggtggctactgctggtttcagccagctatgatgaacccaaggtgtgatacctgaaactttaacagcagtgggggtagacaagatcacaatatggggaccatctcataaaggccttaaagtggatgggttccatcatttgatctagacagagtctccaggttggaagtgatgtactgcatctgtgaggctaacaggtatcctttctcttacccacccttgtatttcctgcacggcctcacctaaggcttgcatttgccttcttaaggttaatcccccaatttcttttaaatctccttttatctgagttatgatagggggtggtcggctgaacaatctcatagagtgaatacccagttaatttagtaggggtgcacctgattcggagaaggaccatgggcagcacctgatcccaccttagatgagtttcttggcaaaacttct

SEQ ID NO: 951948 - DNA, 586 bp, Homo sapiens
tcaagcttcagccatgcatggaccgaccagcctccagtgtggtcggagcagggcagttgtccttgtcagcagcagcttggtttcactgcaggatcagccgtgtcgggtggtctgggttttgttgactggtccactggtcctgggaggtggctactgctggtttcagccagctatgatgaacccaaggtgtgatacctgaaactttaacagcagtgggggtagacaagatcacaatatggggaccatctcataaaggccttaaagtggatgggttccatcatttgatctagacagagtctccaggttggaagtgatgtactgcatctgtgaggctaacaggtatcctttctcttacccacccttgtatttcctgcacggcctcacctaaggcttgcatttgccttcttaaggttaatcccccaatttcttttaaatctccttttatctgagttatgatagrgggtggtcggctgaacaatctcatagagtgaatacccagttaatttagtaggggtgcacctgattcggagaaggaccatgggcagcacctgatcccaccttagatgagtttcttggcaaaacttct

SEQ ID NO: 951949 - DNA, 591 bp, Homo sapiens
gtgctgtgccaggaaatatggacatgctcaaagaatgacaaaagcaagtcaaaaggacacgggaccagtctgacatgtctcccactggccaaacttgggacaccatgagtatcaaaataatcatggtaaagaaccgcaatccactgagtaaaataagaatccatcaatcttctttactgatataacaaagaaaggacatgcactttagtagtagtatcctagctactcaggaggctaaggcagaaggattgcttactccaggctgggcaacagggcaaggacctgtctctaaaggcaaataataaataagtcaaggaaagagggaagctcctttcagtcaaatgcagaaggaatacagaattagaaaaacacaccacagtacatgcttctttcaggcaagactcctcaatggaagctaaaactaggaggtaaaagcttaatgagaaaaaggctgggtgcagtggcacatgcctgtaatccctgtaatccctgcactttgagargctgaggcaggaggaacgcttgagcccaggagtttgagaccagcctgggcaacatggcgaaaccctgtctctaccaatgatacaaaaa

SEQ ID NO: 951950 - DNA, 631 bp, Homo sapiens
tagcacgcgctcatagtcctagctactcaggaggatcacttgagcccaggaattttaggctrcagtgagctatgattgcaccacggcacaccagcttgggcaacaaagcaagacccccacctttaagaaaaaaaaattgtggctgggcgaggtggctcacacctgtaatcccagcactttgggaggcagaggcgggcagatcacaaggtcaggagatcgagaccatcctggctaacacagtgtaaccccgtctctactaaaaatacaaaaaattagcctggcgtggtggcgggtgcctgtagtcccagctactcaggagactgaggcagaagaatggcgtgaacccgggaggcggagcttgcagtgagccgagattgcaccactgcactccagcctgggtgacagagcgagactccgtctcaaaaaacgaaaaaaaattgttcaaattacatgaacatgtatgacaaacttccactattgatacagtcctgtctgctaaaaatatcttttctattttctggcaaagcttccgaccttaagagtttagtagtcttataacattacagatgggaagaaagtcagtgtcattagaatatagtgtgctttgtttatttcaattttctacaggcaa

SEQ ID NO: 951951 - DNA, 625 bp, Homo sapiens
gaagctgggagaggcaaggaaggattcccctctggagcttttggagggaatgtggccctgctgacaccttgatttcactctgtcctccaaaactgtgaagaaaaaaacatctcttgttttaagccaccaagtttgtggtaatttgttacagcagctacagaaaactaatacactttgattcgaagtactcattgctatctgaccttaaatcatatgatcaagcacaggaaagttatttatgaaaagttatataggtactagtatatatagtatataagggggcgggggtgagccgggcgcagtggctcacgcctgtaatcccagcactttgggaggccgaggtgggaggaatgcttgagaccaagagttcacgaccagtctgggtaacatggcaaaaccctgtcttcataaaaaatacaaaaattagctgggcatggtggcatgcacctgtagtcccagctactcaggaggctgaggtgggaggatcacttgagcccaggaagttgagctgcagtgagccatgattgcaccactgcactccagcctgggcaacaggaatgagaccctgtctcaaaaaaaaaaaaaaaaaraaaagaaaagaaaagaaaaagtggtgtgatttatg

SEQ ID NO: 951952 - DNA, 765 bp, Homo sapiens
aggggaatcacctatcccagcggtcagaacttgagttttascaagttgccaccactggctggagtgctctgaggccatcagtaaacatgaagggcagtctaggacacaagaactgcaactttttggtgagttctggtgctgtgtcgggatgagagccggtgaacttggaaggcacatggcctactgagacacaagctggggcagctaagggagtgcttgcaccacccctctcccaaccccagactgcacagttcatggctccaaaagagaccccttctgaccccttcaggagagaagaggaagagtaaaggggccttttgtcttgcattttggataccagctcagccaacagaaagctaaggcactggacaaagtcatgaggcccccattcctgatcttagctcctggacaatctttctagacacactgaacaaaaagggaacctgctaccttgaagggaaggacctagttctcgcaggatctatcacctgctaactaaggagatcctggaccctgaataaccagcagcaatacccaggtagtaggctgggggccttgggtgagactctaacatgtgatggtttcagttaagactcagtacattcctagttctgatggctattacaagagattccatgtgcttgaaaaaagcagagaaaaaagtaaggggacttcatcttgtaccttaattagcagcttgaccacagggaagtagagaaccaggtggactcctggggtccctgattccacgtcttggctctggga

SEQ ID NO: 951953 - DNA, 599 bp, Homo sapiens
gggatctggcttcttaccagaaacaatgaaggccaaaagatgagagaacatctcttaagttctataaaatatgtcaacccagaattacttttccatcaaaaatataattcaaaaattagggaaaaataaagtcattttcaggtaagtgtaactgagagaatttgtcaccctcagatctgtattataaaaaagaagtataacagctaaagataaatatatgagatgaaatatgggtctacagaaacagcactgataatgctaaatatgtgagtaaatataaaaatgaaaattctctcttaattcatttaaaagatatcactgtttaaagaaaaaaaaagtggccacgtgcagtgactcatgcctgtaatcccagcactttgggaggccgaggtgggtggatcacaaggtcaagaggttgagaccatcctggctaacatggtgaaaccccgtctctaccaaaattacaaaaagtagctgggcgtggttgtgcgygcctgtagtcccagctactcaggaggctgaggcaggagaatctcttgaacccgggaggtggaggttgcagcgtcactgcactccaacctggcggcacagtgagactc

SEQ ID NO: 951954 - DNA, 618 bp, Homo sapiens
atcaatactgtaaaaatgaccgtgctttattagaagtgtgagattggacaaatgcagtaaattggtactgggtgttggggtgctgctgtaaagatacccaaaaatgtggacgcaactttggaactgggtaatcagcagaggtggaaacagtttggagggctcaaaagaagacagaaagatgtgggaaagtttggaacgtcctggagacttgttgaatggctttgaccacaatgctgatagtgatgtgtacaatgaagttcaggctgaggtgatctcagatggagatgaggaacttgttgggaactggaataaaagtgactcttgctatgttttagcaaagacactggtgacattttacccctgccctaaagatctgaggaactttgaacttcagagagatgatttagggtacctggtggaagaaatttctaagcagcaaagcattcaagatgcaacctgcatgctgtttaaagcatttggttttatgtattcacaaagatatggtttggaattggaacrtatgttgaaaagggcagcagagcataaaagttccaaaaatttgcagcctgaggatgcaatagaaaagaaaaacccattttctgaggagaaattccgttc

SEQ ID NO: 951955 - DNA, 588 bp, Homo sapiens
gagggcaactcccctggccctccctccttcggcctggttgcaattctggccggaaacccgctggtgcctgtggcaaakaaagtgaggaaggcaggaacctttagacttcccagtgtgaggcaacggcagggctaggactagggtgaggctgttggtgcaagatttaaggaggcgctcactcacaggtgcggaccctgcacttacaggaccctgagagcgagtgcctccttaaatgttgcactccagggtcctcaccgtccttttcctagtcctgggctccgggttctaagcacccagatgctccttcctcaaacggaggtttccgcaagacaggactgggtctctttccttctcagccctgccctcagaattccagcccctaatcaacttttatggagatgcatgccaggccaaagggctgcccctaagctttaggaaggaaactccttaaatgctgttgacttaggagttccgccagtgccccacctgcccagagcctcttgccccagtgccccacctgggtttatggtgcccccctcccagaaatatgagctcaggggtcagaaacccaggtcctgaggtccctcc

SEQ ID NO: 951956 - DNA, 813 bp, Homo sapiens
caaagttccacagaccaactggctkatacaacggaaagttgttttttccagtttttgaggctacagttccaaaattgaggtgtcagcgggattgattgttctgcagcttgcagatgctgtcttctccctatgtcattgcctgactgtccctctgtctgtgtgagtctgcaccctactctcctcttcttataagtagactaatcctatactagttttacctcaattacctgattataggccctgtttgcaaatatagtcccatgccgaggtacttggtgttaggacttcagcttaggaattttaggaagacacaatttggcccataacagtgaatcagcaactatttatgtgtttaaacagcacaggagacctggcctgctctggaaagcaaagactttctctgctttgccctttttattttctttattaactggaacataacaatttgccgtagtgagtcactcaaagtacaccaaatccatcatcactgtttttattttttgcaaatgattaaatatcactttctttccatttatagcatcatctaagtgacagcctatccatcagcctatctgctgatgtttaactacagcattttgcattcattattccctacttatatcattcttttaaaaagaggaataacttaattctgcctcttgacagcagggaaattaaatggtgagccataaagatgagtgtttctctgaaaaacaaaacatgaactgcagatctacaaaaccaagccagcagtatgtcaccctacactaagatatacaaggacaagctgctggaaaatcctcccatttcaga

SEQ ID NO: 951957 - DNA, 677 bp, Homo sapiens
ccacacaattacatgtaaactgaataacctgctcctaaatgaattttgggaaagtaataaaattaaggcagaaagcaaggagttctttgagactaatgagaccaaagacaacataacagaatctctgggacacagctaaggcagtgttaatggggaaatttatagtagtaaatgtccacatcaaaaagttagaaagatttcaagttcacaacctaacattacaactaaaagaactgcagaaccaagaacaaaaaaatttcgaatctagcagaagacaagaaataaccaatattatagctgagctacaggagtttgagacacacaaaaaacatacaaaagatcaacgaatccaggagctggttctttgaaaaaattaataaaatagactgctaacttgactaatacagaagaaaagagagaagattaaaataaatccaatcagaatcaataagggggatatcaccactgacacaacagaaatataacaaccatcagagaatataatgaacacctctatgtgcgtaaactagaaaatccagaagaaatggataaattcctggacacatattgttccaagactgaaccaakaagcagttgaattcctgaacagaccactagtgagctctgaaattgaggcagtaataaacagccaatcaaacaaaaaaaaagcacagaac

SEQ ID NO: 951958 - DNA, 582 bp, Homo sapiens
acatctcccatgggattagccaccactcayatccccccttaagccataggaatcagtcaccaaaggccttgaaaccattcaggtcagcaccaaggtctattccttgtcctgattcctcttgtagaaaggtgggcaaccaagatccttgggttctgtctctctgttgaccacagtcacttccaggaccaagccaaagctttcagatatatttgtcatccagaacccctaccctgtttggctctgtcagccccaaatctagcccaattctctctgcccagtctctctctgccaaacccttttactatgccctctagaactcctgatcagtggtcagtaaattccttggtattcccaatgtcttgttttgaattttctctctattgcttaatctcccttttttttctttcttctcccaactttcaactgatacccgttttttcttctttcttctcccatctttcaactgatattgcctaatctaaaataacattttaaggccaggtgtggtggctcatgcctgtaattctagagctttgggaggccaaggtgggaggaacgcttgaggctaggttttcaagacca

SEQ ID NO: 951959 - DNA, 600 bp, Homo sapiens
acagtggtcccataagattagagtgaagctgaaaaattcctattgcctaatatatcttagccatcatgatatcatagcacactatgttactcacaggtctgtaatgatgctggtgtcaataaacctactgcattttatactgcatataaaagtataacacaattatatacagtacacagtactgtacttgataacgatcaaatgactatggtactggtttatataagcactacactttattttctattgtaattttagagtgtattccttctatttataaaaagaaagtgaattgtgaaacagccctaggtagatccttcaggagatatgccagaagaaggcattgttatcatgggagatgacagctccatgtgtgttacttgttactgcctctgaagaccttacaggggacaagatgtagaggtgaaagacagcaatattgataatcctgaccctgtgtaggcctaggctaatgcgtgtgtttgtggcttagtttccttttcttttttctttttttttttcctgagacaaagtttcgctcatgttgcccaggctggagtgcagkggcgcagtctcggtttactgcaacctccacctccc

SEQ ID NO: 951960 - DNA, 555 bp, Homo sapiens
tgcaagtgctgagtgaaggaaaggcaaagggcctaaccagggaactaactggtatcaacagggagggtgaacagatgttgtatgtgtgagacaaacgaatgttcattatgcaaaagcatgggaaagtactcctagggttccttacatgcctcatcagagggtggtctctccacccgcttcacccatccctcaagatgaacactgatgggtctgccatcaatttccagccaaggggttgaggccccctggtatactgaaatgagcaagataaagtacctgtaattcattactaagaatagccaaagagacagtttttaaattatttcattgtttcctatccaattggcctgattcaaagccatccatatgttttgttttgttttgcatcctttatgttttgctttcttttcttttttcttttatttttatttatttwtttttgttttgtttttttgagagagggtctcgctctgtcaccaggctgcactgcagtggcgcgatctcaggtgacagcagccttgacctcttgggctcaagcgatcctcctacctcagc

SEQ ID NO: 951961 - DNA, 581 bp, Homo sapiens
aaaccagcatgtagacaagccgataaatgtcagaatgacctgggtcatagattttaattgkgagttcaaattctttggtaaagcaaatccgatcttcataagggtcaggaaattccttaactatggcccataatttggccttcgactagggttgatagagaatcaggactccaggcaggccgggcacacacgctgctggtactggaagtgaaccactgggaccgagcatgagcaagccagtgagtgggtcccgcagccccctggacccagggccaagcatggcggctgccaaggtggctttaactgagagagcagatccaactgagcttataacaatatttttgaagtatgcaagcattgagaaaaatggtgaatttttcatgtctcccagtgactttatcactccatacttgaacatttctggagaaagccagcctaacccaaagactgtggaacttttaagtggggtggtgggtcagaccaaagatgggaggaatgttgtcccagcgttgatgatgctaagtttgatcacttgatgaaggtggcatccaccagctatttccattttaatgactagtatc

SEQ ID NO: 951962 - DNA, 674 bp, Homo sapiens
aagaatccttgcgatatgaatgactggagcaactggaaaattccagaacaaggtaacaggcttgacctcttgtcaaggttcacgtgggattrtaggaacatctgctgcaaccttgaccctggaaattatggacacaagatatcaaggcccagagttatcttccaatgtacagttaagattaggctacattccacccccccccaaatttccatgtctgcctcttatttaaagccatatatctcaaagtggagcacctatagccctgaagatatgtgacaataaactaggagagtcagaaagccacagatgaaacagggagaacttcctgggactaataactttaagatttttttaaagggcagaatattttaaatattaaaacttttttttttttgagatggagtcttggtctgtcacccagtctggagtgcagtggcatgatcttggctcactgcaacctccacctcccaggtcaagtgattctcctgcctcagcctcccaagtagctgggactatatgtgcgtgccaccacgcctggctaatttttgtatttttttagtacagatgaggtttcaccatgttggccaggctggtcttgaactcctgaccttagatgacccacctgcctcagcctcccaaagtgttgggattacaggcgtgagccactgtgcccg

SEQ ID NO: 951963 - DNA, 617 bp, Homo sapiens
ttgtccctttttatcttttattttttttactgtcacttattttttatcacttattatgttttcatcttttattattataacatacatttattattgaattaacttagaaatatataatatatgctaactaaaaatgtccagtacatgctaacataagacatacaaaagagaaagacacagaaaacttgcaaatgaaaacctgaagaaaataaataagaaaaacaaagaataacaacaaagataacaataaaacaaaccagtggagagcagaatttttaaaaagtaaaactaaaagcagaaataaattattcaaaatacagcagaacaataggataaaaattagagtctaagagctgatactcggatgagaggaattgaacagataaatctgttcattctaaaatttaaaagggaaaggaaataaacaaggagaaattgaagggaaatagaaagctaaacagaccagattgctggaagggagggtggcaagtggactgatgctaaagccatggctgatcttggagcctttcctratcttgaaaccaagaggttcaggtgttagtggccactggagcaacaggaaacaagaaaggccttgtgacctggcaaggcaggag

SEQ ID NO: 951964 - DNA, 579 bp, Homo sapiens
ataattgggctttttttactttttggctacttgaataaaactactataaacattcacatacagatttttgtgtggacataggttatcatttctcttgggcatttatcttaggaatggaatttctttgtcatatggtaagtctatgtttaacattttgaaaaaactaccaatctgtttcccaaaatgactgtaccattccacaatcccaccagtgatgtatgagtgttctaacatttctacctcctcacaacacttgttattgtccttattttagccatcctaggagatgtgcagtagtatctcattattgttgtgacctgcttttctctaattactaatattgctctcaggtggttactggacatttgtataccttctctacagaaacatctattgaaatattgtgcctatttttaaaagttacatatatgtgtatatacttttattacattttaagttctggggtacatgtacagaatgtgcagttttgttacataggtatacacatgccatggtgktttgctgcatccatgaacctgtcacctaaatgaggcatttctcctaatgttattcctcccc

SEQ ID NO: 951965 - DNA, 668 bp, Homo sapiens; identical to SEQ ID NO: 946659

SEQ ID NO: 951966 - DNA, 719 bp, Homo sapiens
tataatagatgtttctaacaatcacagaccctctgcctcaagacatttagtggtttcagtacaaccacttcaagccacactgtttatggaaatgacctgagacctcagagattattttaattcrgtgtaaacattgccagacataatttgatggatctgtatgtgaattttgtttcttcacggtatttaacttctgtcaccagcgttagcctattctaggctagtaaaaaaatgtgtaattgttagataaccaatcatatcacctctgtggtttcctggaacccagcaccaggctgagcctgggttaggtgggaataggtgaagcctatggcagagggagagaccaatacctgctcagaagcctgatgaatggcacatgaccctcaaaatccatttaggcagtaccatctttaaggtaaaaattcggcccacctctggaattatgagatttcttgccacaactactttctctttatgtaagttgagtaagctggtcatgagaatagactagggggtctaccctactgtgtggtagagatttccagctctaccacacactagctgcttgatcctgagcctcagttttcttgtctgtaaaatgcagataataatattaccatccacatgagattgtggttagggttaaataagtgtgaaggcattgagaccagtgcatcaatattgtgaagactcagtaaatgttagccagtgccatggtc

SEQ ID NO: 951967 - DNA, 595 bp, Homo sapiens
ttctaatgacatttttcacataaatagaaaaaacaattctaacatttcatatggaaccacaaaagaccccaaatcatcaaagcaatcttgagaaagaagcagaaagctgaaggcatcataytccctgatttcaaactatattacaaagctgtagtaatcaaaagagtatggtactggcataaaaatagatacatagatcaatgcagaaaaatagagagcccatgcatatatggtctactaatgtttgataatggtgccgagaatatacacactatggagaaaggaaagtctcttcaataattggagctggaaatacgggatatccacattcaaaagaaggaaattggacccttgtattacaccacataaaaaatccattcaaaatgaattgaagacttaaatgtgagatctgaaaccccaaaactcctagaagaaaacataggtggaaagcttcttatcattggtcttgatgataatttttttggctataacaccaaaagcacaaacaacaaaagtaaaaataaacgaatggtatgacatcaaactaaaaaagcttctccacataagaggaaacaagcagcaaactgaaaaggca

SEQ ID NO: 951968 - DNA, 437 bp, Homo sapiens
gctaacaggcatatgaagagcgctcaacaccactaatcatcagagaaatgcaaattaaaaccatggtgagatatcaccttacacctgtgagratcagtattgtaataaagacaagagaagtgttggtgaggatgtagagaaaagagaaccctgcacactgctggtgggaatataaatttgtagagccattatgggagagagtatggcaactcccccaaaagtcaatacaatctaataatcctatttctgtatagttaactttagcctaaagctgcttccttgtaagttcagcctaaaggttgatccatacatagtgaactgtaatctaactggatgtgtaaacagactgtaacctactcttataacaagtagccaagtctcagccaatcagaagacatactactcacaggtggccaactgttcggtgttcaaataag

SEQ ID NO: 951969 - DNA, 587 bp, Homo sapiens
tcactaagaaaattagaagcaatcagaagagaatttccagaagctttccctaccacagtctccacctttctgcatctatgyccatatactttatcttacctccttgtacataatcttacctaaggcaaaccttgtacttgtgcattagaccctatccttctgcctcctgaaagtcattgctcagcaattcttccccttcttgtgtagcatcaagtttaccctctccgtctgtccattatcatactatttatcccatctaaaagaaaatgaaaaatgacacactataacttctccagttaatacacatttctgtgctgcccctctttgaagcaaactgtcctcggtgttagcattccagtgatctgttctcagtgcccaaaagttgcctacattccttcaatcaaatgatctattctcagtcttcatcttacttggcccatcagtagtcttcaacacagtcaaacactccttcctccctgaaatgctttcttcatttgctttcaggtcatgacacttctcctagtttttcttctactttactgtcaactccttattcttcttcactggtttctgtttgcctctctgac

SEQ ID NO: 951970 - DNA, 618 bp, Homo sapiens
tcattgatctatctatcatctatcaatgtatctrtcatctatctctattatctgtctatctatcatctatgtatctctgtatctatcatctatgtaactatgtctccatcatctattatctatctctctacttatttatctacctattatctatgtatctatctatatcatctatctatctatctatctatctatctatctatctatctatctatcatccatccatccatcaatgatctatctctccatcatctatgaatcattcatttttataaatatatatccatatgcttcttgctgttttacatgtacatatgtatatatttgtcactttttttcactcaacagggtgccttaatgctatctttttctgagtgctgtatattttattccatattttattcagctcatttctatgttgaagaggacattaaacattttcaattatagtagatatttccaatttgccttccagagtgtctgtactgatttaccttctagcctgcagtatgtggtgagactagtgatccctatttccttcttttgtgtagctgtatagtattccattgtgtggctgtttatctaaacattttcccattaatgtatatttggcttgtc

SEQ ID NO: 951971 - DNA, 618 bp, Homo sapiens
tcattgatctatctatcatctatcaatgtatctatcatctatctctattatctgtctatctatcatctatgtatctctgtatctatcatctatgtaactatgtctccatcatctattatctatctctctacttatttatctacctattatctatgtatctatctatatcatctatctatctatctatctatctatctatctatctatctatctatcatccatccatccatcaatgatctatctctccatcatctatgaatcattcatttttataaatatatatccatatgcttcttgctgttttacatgtacatatgtatatatttgtcactttttttcactcaacagggtgccttaatgctatctttttctgagtgctgtatattttattccatattttattcagctcatttctatgttgaagaggacattaaacattttcaattatagtagatatttccaatttgccttccagagtgtctgtactgatttaccttctagcctgcagtatgtggtgagactagtgatccctatttccttcttttgtgtarctgtatagtattccattgtgtggctgtttatctaaacattttcccattaatgtatatttggcttgtc

SEQ ID NO: 951972 - DNA, 615 bp, Homo sapiens
actgagagaaaatgagtctgctaatttccttattttatttttattttttttagacagagtctcgctctggcgccaagctgtagtgcagtggtgctctctcagctcactgcaacctccacctcctgggttcaagtgattctcctgcctcagcctcccgagtagctgggactacaggtgcatgccaccacgcccagctaatttttgtatttttagtagagacagggtttcaccatgttggccaggatggtctcaagcttttgacctcttgatttgcccacctcggcctcccaaagtgctggggttacagacgtgagccactgagcccagtctgctaatctcctttctaaaagccaacaattcatccttaaatatgagaaagatacagtcatcccttggtatccatggggcattcggtctggtacctccttcagatatcaaaatccacagatgctcaagttcatggtataaaatggcatagtatttgcatataatctatgcacatcctcttgtawattttatatcatctctggaatacttataatacccaatacactgtaaatgctatgcaaatagttgtgctgtattggttttttttttttttttttttttttttga

SEQ ID NO: 951973 - DNA, 592 bp, Homo sapiens
tggtgggggggagtggggagggatagcattaggagatatacctaatgctaaatgttgagtgaatgggtgcagcacaccaacatggcaaatgtatacatatgtaacaatccttcacrttgtgcacatgtaccctaaaacttaaagtataataataaaattaaaaatagaatatcctgaaataaaacctagaaagaagttatctgtgaatcttatttgcgatgtgtgcaatcagctcacagagttaaacctcatttattattcagcagtttggaaacactctttttgcagaatctgtgaagtgacattttggaaggcatcaaggcctagagtgaaaaacagattatccccatataaacactagaaagaagctatatgtgaaactgctttgtgatgtgtgcattctgctcacagagtgacatatttattttgatttggcaggaaggaaacactcattttgtagaagctgcaaagggagatttaggagcccactaaagcctatagtgaaaaattaaatatcctgaaataaaaactagaaagaagctatctgtgaaactgttttatgatgtgtccattcagctcacagagttgaacc

SEQ ID NO: 951974 - DNA, 531 bp, Homo sapiens
aatctgcgaagtgacatttcagaacatagtaaggcctgtataaaaaaactaatatccctacataaaaatcagaaagaaattatctgtgaaactgcttctgatgtctgcattcagctcctagagttaaacctttccttttttcagatgtttggaaacactctttatgtagaatgtgcaaagagacattttgaagcacagtgaggcctatatgaaaaaacaaatatcctgtgataaaaactgtaaagaagctatctgtaaaactactttgtgatgtgtgcattcagctaacagagctaagcctttctattgattcagcatgttggaaacattgtttttgtagattatgcaaagggacatttcagagtacagtaaggtctatagtgaaaaacagaatatcctgcaataaaaactaaaaagaatctatctgtgaaaatgctttgtgaggtgtggattcagttcacagaattaaaacattattttgattcakcagtttagaaacactctttttctgtatatgtgaagggacatttc

SEQ ID NO: 951975 - DNA, 592 bp, Homo sapiens
tttttgtagaatctgcaaaaggacacttcaaagggcattgaggtctgtggtgaaaaccaaacatcctttgataaaagatagaaagaagctmtctgtgaaactgctttgtgatgtgtgcattcagttcacaaagttaaaccttacttttgattcagcagtttgaaaacacttttttgtagaatctgcaaagggacatttcagaggatattgaggcctatattgaaaaactgaatatcccacgataaaagcttgaaagaagttgtctgtgaaactgctttgtgatgtgtggattcagttcacagatctaaacctctctttttaataagcaggtttgtaacactctttttggagaatctgtgaaggaacatttgggagcccattgagatctatagtgaaaaaccaaatttccccagataaaaactagaaagaagctatctgtgaaactgctttgtgatgtgtgaattcaaaactattttagtagggcctgcaaggggacattttggggctctataaagccaaaaatgaaaaacagaatatcccgcaataaaaactagaaagaagctatctgtgaaactgctttgtaatgtgtgca

SEQ ID NO: 951976 - DNA, 397 bp, Homo sapiens
tatctgtgaaatggctttgtgaggtatgcattcatctcacagaattaaaactttcttttgattcagcatgttttaaacactcttttggtagattctgtgaagagacatttaagagcccattgagacctattggaaaaaaactgaatatatccaggtaaactagaaagaagctacctgtgaaactgctttatgatatgttgatacatctcacagagttaaacctttcttttgattctgcagtttggaaacattgtttttgtagaatctgtgaagggacatctaggagctcattcaggcataaggwgaaaaagcaaatatccctagataaaaaccagaaagaagctctctgtgaaactgctttgtgatatgtgggttcatctcaaagaattaaactttt

SEQ ID NO: 951977 - DNA, 561 bp, Homo sapiens
gaaactgctctgtgacatgtggatcatctcaggtgttaaactttgtttttgattcagcaagttagaaacactcttttagtagaatatgtgaaacgacattarggagcccattgaggcccatgggaaaaactgaatattccaaggtaaaaactggaaagaatctatctttgaaattgctttgtgatgtattgattcatctcacagagttaaatatttcttttgcttcagcagtttggaaacactctttttggataatctgcaaagggacattttggagaccattttggcctatgtagagacacaaaatatccccagtaaaaactagaaagaagctatctgtgaaattgctttgtgatatgtggatcatctcacagtgttaaaactttcttttcaatccaccagttggaaacactctttttggagaatctgtggagagatatttgggagctcattgaggcttatgaggaaaaaccaaatatccccagataaaagctagaaacaagcaatctatgaaactgctttgttatgtgtggattcatctcacacagttaaaactttctt

SEQ ID NO: 951978 - DNA, 635 bp, Homo sapiens
aataaagggacagagtacaaaagagagaaattttaaagttgggcatccaggggagacatcacatgtcggtaggttctgtgatgccccacaagccgcaaaaccagagagtttttattaggaattttcaaaaggggagggagtgtatgaatagggtgtgggtcacagagatcacttacttcacaaggtaatagaatatcacaaggcaaatggaggcagggtgagatcacaagaccacaggaccggggtgaaattaaaattgctaatgaagtttcgggcaccattgtcatggataacatcttattgggagacagggtttgagagcaaccagtctgaccaaaatttattaggcaggaatttcctcatcctaataagcctgggagaactatgggagactggggcttatttcacccctacagtttcaaccatagaagatggccacacccaagggggccattttagaggcccaccctcaggggcacattctctttctcagggttgtttyttgctgagaaaaagaattcagtgatatttctcccatttgcttttgaaagaagagaaatatggctctgttccgcctggctcaccagtggtcagagtttaaggttatctctcttgttccctgaacattgctttta

SEQ ID NO: 951979 - DNA, 642 bp, Homo sapiens
actcttcccctaagaaggtgcagagtcctcctttctcagcagtgaggaggtctaggcctcggtggttttggagagtcactgctgccaaagagtctatttggaattgtagagtaagaatagatttcgttatttcttgcaaactgtctgagaaatcctttgagagtgtgtggtagtaggataatgaagtagataaaccagctattccagttcctgtagcagtagccattcctaaccctataattaggggtattagttgtatggctctgcactgacggacttgagctttgaggggtactgataaaagtctgatttcctggggcaatgttaatgttgggacttagaaagactaaggtgccagtgccggtccagttagtggggaggcagatataggtcgatgttccacataagaagaatatgccttggctgggtaggcagaactttacctggcttttaaaggaatagggtacactgttttttctttactatttctatctctctctttctctcttygacttcttctttgtctctctctttctctctttctctctgactccccctttgtctcttcctctctttccttctttttgtctctgtttcttcctctctctttctctgacttcctgtctctttctctctttcctt

SEQ ID NO: 951980 - DNA, 724 bp, Homo sapiens
tgtatttaccctatgcccatacctccattgtatctaggaagtaactaacttgcttttgattttacagattcacagatgggaggtacttgccttgtttcagatgaggctttggatttggacttttgggttaatactggaatgagttaagactctggagaacttttgaaagggctgggttttgaaatgttaagacatgaaatttaggaggggatgtggaaaaatgatatggtttggctttttgtcctcacccaaatctcattttgaattgcgatcgtgtaatccccacatatcatgggacagactctgtggaggtaattgaataaggagcagtttcccctatgctgttcttgtgatagtgagtgagtctcacaaaatctgattgttttataaggttctggcatttctcccacttgctttcattctctctcctgccaccctgtgaagaagtaccttctaccatgattataagtttcctaagccctcccaagccatgcagaactgtgagtcaattaaaccgcttttctttataaattgcccagtctcaggtatttcttcatagcatcatgcaaatgtactaacacagtaaatacttgtgatggttaatattgtgtygattggattgcaggatgcaaaatattgttcctgggcatgtcagatggggtgttgtcaaaggagattaacatttgagtcaggtactgggagaggcagacatactctcagtctg

SEQ ID NO: 951981 - DNA, 449 bp, Homo sapiens
tatgcggaatgggggaaaactggaagtcttttgtctaagatctggaacataacaaggttgcccactgtcaccactgtttctcaacatagtcctggaaatgtcagctagaacaatcatagaaaaaaaattaaggtcatccagtttggaaaggaaaaaatcatattatccttctttgcagttaatatgatcttatatttggaaaaacctaaagcctccaccaaaaacctattagaactgataaataaattcagtaaagttgcaaaatacaaaatcaacatacaaaaatcagtagcatttctatatgccaacagtgaacaatctgaaaaagaaaatttaaaatttaatcccttgtacaatggccacaaataaaaytaaatacctggaaattaactttactaaatctgggaaagatgtctacaattaaaacaataaaacactggtgaaagaaa

SEQ ID NO: 951982 - DNA, 556 bp, Homo sapiens
acaatcattaaaaaaaaaaagtaaacaaaagcagtgatctgatagagctgaaaaactcacttcaataatttcataacacaatcacaagtactaaaagcaacatggaccaggatgaggaaagaatctcagtgcttgaagactggtctctgaaataacacagtcagacaaaaaataaagaataaaaaataaagataaaacaaaacctatgagaaatatgggattacataaccctatcaaatctacgactcattggcatccctgaaagagcagagaaagcaagcaactttaaaacttttttgagaatattattcataaaaattaccccaacttcgctaaagaggtaatcattcaaattgaacaaatgcagagaatccctgtgagatactatataagatgactgttcctattatgggtagttagacaggcaggagcarggcaggagaggactcttccccaaatctaggaatgtcagcaatggtttggcaattatcacattgcctctctaaaaagtcataaattggcagccagcaccagggagaggccatttcctgatgat

SEQ ID NO: 951983 - DNA, 618 bp, Homo sapiens
accagtcacaatgagtaacttaatgatagctatgatagtggtgatcacattgcctagagtattcctttaacaagggctgacacagagaacaattatacttattgggcatatttaccttttccaccacttctacggcctgtaacttggctggaccccccagtggaggtatacactaatgatagctcttggatgttcagtcctacagatgatagaggcccatctcacccacaggaggaaggaactgttatgaatatttctttaggatttgaacatctgcctatctgtttgggaaaggccactagttgcctacaccttcactatcaatcttggctggcaataatgcctggatgtaatcactctatgacacagttacacttgctttctggtcttagtatttaccataataaatctgctcctataactgaggcataccacatcaaaaacctatttgtaaacaggattggacctggtcagaaaaaataaatgtgcttgtttgggaagattgcattgcagaacaggcagaggtgctgcacaataattcccatggaatcattactgaatagtcccctaagggatgtttagcttgaattgcmcttctccatctgcatgccatggcca

SEQ ID NO: 951984 - DNA, 423 bp, Homo sapiens
atcagttctgcagtggacaccagctggctgtcctccaattcaattctgacactatctacttggagatagcatcaratcttgtgggttgagggctcagtccccaaaactgccccctgccccgacacactttgaatgccaattacaagccccaggatattttattttacctatgtgtttgtgaccaactggttataaaactataaaacagggttctttgggcttgattaatttgctagcatggctcacagaactcagggaaacacatttactgatttattacaaagattattacaaaaaatacagacggagagatgcatagggtgaggtaaggggaagcggcctggagcttccatgccatctcctagcccaacaccctccaggaaactccacatgagctatctggaagctcatccaaaccctgtt

SEQ ID NO: 951985 - DNA, 423 bp, Homo sapiens
atcagttctgcagtggacaccagctggctgtcctccaattcaattctgacactatctacttggagatagcatcaaatcttgtgggttgagggctcagtccccaaaactgccccctgccccgacacactttgaatgccaattacaagccccaggatattttattttacctatgtgtttgtgaccaactggttataaaactataaaacagggttctttgggcttgattaatttgctagcatggctcacagaactcagggaaacacatttactgatttattacaaagattattacaaaaaatacagacggagagatgcatagggtgaggtaaggggaagcggcctggagcttccatgccatctcctrgcccaacaccctccaggaaactccacatgagctatctggaagctcatccaaaccctgtt

SEQ ID NO: 951986 - DNA, 588 bp, Homo sapiens
tttgctattgtgaatagtgcttcaatgaacataggtgtgcatgcgtctttataagagaataatttatattcctttgggtatatacctaataatggaattgctgagtcgaacagtatttctgtctttaggtatgaggaattgccacactgtcttccacaatcgctgaactaatttacactcaccaacagtgtttaagtgttcctttttctccacaaccttgccagcatctgttattttttgactttttaataatagccattctgactggtatgagatggtatctcattgggggtttgaatggaagttttctaatgatcagtgatgttgagctttttttcacatgccctctcatttctttgacttttaaggcctaccatcaattgaataacagctattgagaaagtgaacacacttattgtaagtcctattctaatttcagggacactgaatgtgtcttagaatgaggatatgtgatacgtatattttcagcttmtaccacttgctaaagaaattcattttcatttatccaatattttccaagagccaagactgtgtcagaagctagggagtcagaggtaaaggacaagg

SEQ ID NO: 951987 - DNA, 756 bp, Homo sapiens
gggtatgtctttatcagcagcgttaaaatgaactaataccataaattagtaccaggagtaggtgttgctgaaaagatacccaaaaatgtggaagcgactttggaactgggtaacaggcagaggctggaacactttggagggctcagaagaagacagaaaaatgtgagaaagtttggagcctcctagagacttgttgaatggctttgacaaaaatgctgatagtgatatgaacaataaggtccaggctgaggtggtctcagatgaggacaaggaacttgttgggaactggagcaaaggtgactcttattatgttttagcaaagagactggtggcatacttcccctgccctagagatttgtggaactttgaacttgagagagatgatttagggtatctgggggaagaaacttctaagcagcaaagcactcaaaaggtgacttgggtgctattaagagcattctgttttaaaagggaaacggagcataaaagttcagaaaatttacagcctgatgatgcagtagaaaagaaaaacccatttttttgagaagaaattcaagctggctgccagaatttgcataagtagcaaggagcctaatgttaatccccaagaccacggggaaaatgtctccagaccatgtcagagaccttcayggcagcccctcccatcacaggcctggaagcccaggaggaaaaagtggttttgtgggtcaggcccagggtccccatgctgcgtgcagcctaggaacttggtgacct

SEQ ID NO: 951988 - DNA, 611 bp, Homo sapiens
cacagctgtaatccaagcactttgggaggccaaggcgggccaatcacctgaggtcaggtgttcgagaccagcctggccaacatggkgaaacgccgtctctactaaaaacacaaaaattagcctggcatgacggcaggcacctgtaatcccagctactcaggaggctgaggcaggagaatggtttgaatctaggatcagaagttgcagtgagccaagatcatgccaccgcactccagcctgggtgacagggtgagactctgtctcaaaaagaaaaaaaaaaaaaagacctcaaactataaaaatcttagaagaaaacctaggaaatacccttctcaacactggctttggcaaagaacttatggctaagtcctcaaaagcaactgcaacaaaaacaaaaattgacaaatgggacttaatgaaactaaagatcttctgcatagcaaaagaaattattaacaaagtaaacaggcaacctacagaatgagagaaaatattcacaaactatgcatctaacaaaggtctaacattcagaatctataaggaacctaaacaaatcaaacaaaaaacaaatcaatttaaaaacgggcaaaggacagacacttctcaaaaga

SEQ ID NO: 951989 - DNA, 611 bp, Homo sapiens
tttctcaggaagcttatacagaagcaacaatacagaaacatttttgtcctccaccaaaaaagagaaaaccaagttggaaaaaggcgaatgatccagaagacagaagagcctacacatgagaaagcaaagcyacttcccaggaggctggtaaaaggaaatcctgataacacccatgcaaccagtctaaactacaacaaatacacaaggggtttcagaagttgtatcaccaataattttttttaaaatagtaaagtaaataaatgtattcatagcatactatgtggttcagctctctagataatatacaaggaggtgaaaacagtgaatattggtttaaacaatactgtgatataatattggaaacatctgtgtggtaggcagagtatgggggagaattctaagcaaacaaaatattcatctttcagtagggagggagttgatggtacctaaactggaaaagtcaggaaataccagtaatggtcgggtgtggtggctcatgcctgcaatcccagcactttgggcggccaaggcgagtgaattgcttgagcccaggagtttgagatcagcctgggcaacatggcaaaaccccatctgtacaaaaaaatacaaaa

SEQ ID NO: 951990 - DNA, 592 bp, Homo sapiens
ggttgctttttcattctgatcatgtcccacttacacatgtttggaatttttgagtttaaatgtatttttttcttttgttgtctatgtgctgttgtcatatcattcctttacttatttaagcatgttttcaaaagttttttaaatgtatttataatagctgatttgaagtctttgtctgctaatttcaacatctggggcttctgaaaggcagagtcttttactaactttttttcttgtatatgggtcgcacattgctatttctttgtaagtctcataatatttagttgaaaaaagaattttatgtaatgtattttagcaactctgaaaacctttccttccacagtggggtttatttttgtttgcatatttaattgtttattatctgggcttggctttttcagtgacatctatttccccatagtatgcagtccctgatgtaccccttagagggtataaccttgagcatgttcacaattaccctgtgttgacagtgggcttaacatgattctctttgwctatctgtttatctgatctttctattattaagctgtgtgtctttattggtattacacttagcagatagcttgcacgg

SEQ ID NO: 951991 - DNA, 623 bp, Homo sapiens
aaatggtgatatcataagctggaccaactatattktaggggaccgtgttgtgaactaaatggtgatatcataaggcggatcaactatattttagggaatcatgttgtgaactaaatggtgatatcatggagatcacaatccctgcatcttttaagtttttgtgagtagcactaatcaccctgtgatataattttgttcaggatttgctatattttatggaagggattagtttcagagtcttcttcttggcatttcctaatgcaattattcttactccacagaaaccaaggtgtgggttctgtcaactactagagatgttcattcaaattatatatttgtgaaatagggctttggatgtagtggatcttctgtgagtcagatccgggccaagactccctttatgactgggccgtatgtgcttattgtctaccatagcagagagaatgagaatttaggtatctagtatctgtgtccatagcatttttttttttctaactagccattgaaatatgagatcttcctttacctctgtgtaaaattacccaagtaaattgccatataaatgtgtttagtaaaggaaggtgaaaaatcactgctgtgtacacttgctgtgctattaaagg

SEQ ID NO: 951992 - DNA, 623 bp, Homo sapiens
aaatggtgatatcataagctggaccaactatattgtaggggaycgtgttgtgaactaaatggtgatatcataaggcggatcaactatattttagggaatcatgttgtgaactaaatggtgatatcatggagatcacaatccctgcatcttttaagtttttgtgagtagcactaatcaccctgtgatataattttgttcaggatttgctatattttatggaagggattagtttcagagtcttcttcttggcatttcctaatgcaattattcttactccacagaaaccaaggtgtgggttctgtcaactactagagatgttcattcaaattatatatttgtgaaatagggctttggatgtagtggatcttctgtgagtcagatccgggccaagactccctttatgactgggccgtatgtgcttattgtctaccatagcagagagaatgagaatttaggtatctagtatctgtgtccatagcatttttttttttctaactagccattgaaatatgagatcttcctttacctctgtgtaaaattacccaagtaaattgccatataaatgtgtttagtaaaggaaggtgaaaaatcactgctgtgtacacttgctgtgctattaaagg

SEQ ID NO: 951993 - DNA, 623 bp, Homo sapiens
aaatggtgatatcataagctggaccaactatattgtaggggacygtgttgtgaactaaatggtgatatcataaggcggatcaactatattttagggaatcatgttgtgaactaaatggtgatatcatggagatcacaatccctgcatcttttaagtttttgtgagtagcactaatcaccctgtgatataattttgttcaggatttgctatattttatggaagggattagtttcagagtcttcttcttggcatttcctaatgcaattattcttactccacagaaaccaaggtgtgggttctgtcaactactagagatgttcattcaaattatatatttgtgaaatagggctttggatgtagtggatcttctgtgagtcagatccgggccaagactccctttatgactgggccgtatgtgcttattgtctaccatagcagagagaatgagaatttaggtatctagtatctgtgtccatagcatttttttttttctaactagccattgaaatatgagatcttcctttacctctgtgtaaaattacccaagtaaattgccatataaatgtgtttagtaaaggaaggtgaaaaatcactgctgtgtacacttgctgtgctattaaagg

SEQ ID NO: 951994 - DNA, 564 bp, Homo sapiens
ctgcactccccctgggcgacagagagagactccgtctcaaaaaaaaaagagaagaaaagaaaaagttctggcgctatatagtagtaatgtttgtataatatcgtgaaatgtactatagtgccactgaactgtatkttttaaatgacttaaatggtaaatttagttttttaaccacaatatttaccacaattttttaaatcagtgatgttgagatttcagggaaatacggtaataatagaagaaatacggtaataaatagccaaagtgaaggagcacggccaagttgcagaccatcccagacgcccttaccctcctcgcctgccatggccccaactagtgccccagttccccctccccccacaccccacggtccaccggggatccagggccccagcgtgcaagtcgcgccaggtgcccgggctcctggagcccctccctatctagtccaagaacgccccgggtctgacaccttctcttcggttctccgcaggggacgtcgtcgtgcaggcgcccacccaggtgcccggcttcttgggcgactccgtgacgctgccctgctaccta

SEQ ID NO: 951995 - DNA, 616 bp, Homo sapiens
tgcaccttttttataaaggcatgaagatctcaattatgagggctccatacccatgacttaatcacctcccaaaggatttacctctcaaggttaatactatcaccttgggagtgatgacttcagcattagaatttggagatatgaggagacacaaacattcaggtcatatcaccaaactgtatatatttaatttcattttgttattgcactagcaagaacttctagaatgatgttaaattggaattataagggaggatgctcttgacttattcctgatcttagaaggaaagtatctaatctgtcactgaaactggcccaatagtcccatagatatggataaacatagaaattgaccactgtggtcttaaagcttgaaccttgcatttgttttatattaattccttcctcaggaaatgatgttcaggcctctcacaaaaagtattaaagaactgaaactcaccagatcaccacattcagacaatgaaatgctggacccctattcatcatgattgcttccttgacctccctagtttctgctttcttacatatcattatattttttccctgctacaaaaamccatagttttagtaggtcggagaaacggatttgaaactg

SEQ ID NO: 951996 - DNA, 577 bp, Homo sapiens
tttagatagaacacacccttmatcaattcaccaaataaatgccccgtctcaggcctgcttcactcccttaccttagccacttggcttcttagccatttgagttggtgaaggacactctggcttgaggtgactgtaacaaagtttgtatatcatttgtctagaataatttgtgtgtgtatgtgtgcgcattcattctttgatcatttcacaaacatttaccaagcacctactatgtactgagctgaattcattgggaaagctaaagatagcagtcctaggctttgctttcaaagagcatagcctctggaggaactatgccacatgcacacccatcacttatgtacaaggtgtaacgtgacgtaaatgcagacctatgggaacttggagcagggcgacatcactttaatctgagggaacttcaaagaaggctttactaaacaggacacattttttttttttttaattagtgggtttatttttaaatgccatagagatttcagaacttcatacaggtagtggttaatgcagaaacatctgatcctgggtaaactccactgataaaattatgatatccagg

SEQ ID NO: 951997 - DNA, 565 bp, Homo sapiens
ccttgtccaaatcacttcacttccttgagcactgggtttctcatctataagacctacaatacccacctttccaggtcgtttggattagagataaagaatggacagtacctggtgcatgggaggtgtttgctagtggcgtgccccctggtgatgtatgaagtacaagggtaggggtggtgagaggaaaagtcagaagagaaggtaggacaaatcaaagggtgctgtgtactaggcaaaggaggttaggttttcatcatgtaggcaatggagagccagcaaagaattgtaagccgaggggaatttataaagagatttgcactgagaaagtataatagcgtggaagacaaattaggggaaactaagtctagaaatgggaagacctgtagggagacgatcataattgtccaagctggtcaggcatggtggctcacgcctgtaatcctaagcactttgggaggctgagrtggacttgaggtcaggagttcgagaccagcctggccaatgtggcgaaaccctgactctaccaaaaaaccccactaaaattagctgggtgtggtgacgcaca

SEQ ID NO: 951998 - DNA, 629 bp, Homo sapiens
acatgttcaaatgagaaccctcgtatccccccctcagaacttccctttcctcagacttctacatttcagtaagtagcatcatcatcatcctacttactcaggacaatacaatactctagtcatcacttttgactcctttcattcacaatttgtgttcaaaacatcagtaagacctgctggctctatctttcaagagcgttggattctaaatccaatagtgtcctaacgagtgtcccgggagctactgttgccttgatagagttaattgtcttcaccacaaatagatcaatcttacttatagtggaaattaggtcacattattttcctgctcaaagtccttcatacccaaaaccaaactccatgttcttgctgtggtctgaaagacactacatgattgcttcccccaacccccattcatcttcctatctcaactttcacatcacttacttatctcccctccttggttattaggagctaggatactggaactcttgcatgtcaaacttgttcccacttcgggatatttgcatttgtgcttgcagtttttttctccctggaaagaaygtcgttcagatattttcatgactcactccaattaagtctctgctcaaatatctctactataataa

SEQ ID NO: 951999 - DNA, 623 bp, Homo sapiens
agttcaaaacattgggttcaaaatctcagagactgagatatattccaaccaactcaaccctgtggaagtgccaagttttcctcagtgccactcttgaaaccrcatcaccaactgaccctttaatatatttttgcactatataacatttatttcttagagtaagtgcttccctagaaaagaagcagtttggacatgtatattaaagccgtcacctagaatattatcttctcattgctaggaggtggccttcaagatggctgactagaggtaccaggcactgtgtcctcccaaagaaagaccaaaacagcaagtagataatcataccttgaagagggcatgaaagagggcactagaattcagcagcaaagtgacgaggaatctctgaggcatggaaggaaaggaaaatgaagcagcagcccagccagaatcagcttaaagccaggacaggctctgcagtgtggtgaaaaggtaaaaaagagagccccagtggtccatattcccactgtggacactgcaatcctagccaagggacggtctctcagccctcgcaggccctgagactactatagggagctgcctggagtgtatgtgatggtcattgtcccagagaaggagttggcact

SEQ ID NO: 952000 - DNA, 647 bp, Homo sapiens
ctttttgtggatatctaaatatatgattctgtttctcttggataaatacctaagattagaattgctgagtcatatggtaaagggatacttaacttttaaaacctcccaaactgttcttcaaaatggttgtgccattttacatccccaccaataatgtataaaggttccagtttctcgaaatatttgccaacacttggtatggtcagtctttttgattctagtcattctagtgggtatataatgatatctcattgtaattttaatttgcattatcctaatgactgatgatgttgagcatgtcttcatttggtgtttttattattatttttagccatacatatatcttctttagtgaaatgcctattgaaatatttttcccattttcttgttgagttatttgtcaccttattactgagcttcaaaagttctttatgtattctgttcaatagccagatgacctcaccttctagcattcacacccttgagtagtgccttcctcattgctccaggattggtctgaccaacagaaccaaacaacatatggcagaaatggtggtatatcacttccaaggttaggttataagagactgtgttttccatctcagcttctttytctcccctgccaaacccctttgcatcattcattc

SEQ ID NO: 952001 - DNA, 579 bp, Homo sapiens
atattcacttaaatgcctaaaatttgaagaagagggaggacaatgcctgttggtagtgggaatatataattgcattaatgctcctgagagtgtaaattggtgcaatcactctgggaaactgtttggcagtacctactaatgctgaactctttcatatccaataacctgctattgtactcctcagtacataattaacaacaatttatggttatctgcaccaaaagatgacacaagaatgcataggagcatcattcataaacacccaaaaccagaaatgacacaaatgtcagtcatattacaatgaattgatgacttgacatatgttaataccactatatataaaagactgaactctagtaataataattattactcttttgaacaatatgttgagtaaaagtactgtttatttccatttataataagttcaagagcagacaaatgcrtctatgatcatcaggatcacacaagtgtttccttttagagtggggtaatgcctggaaagatgcaagagggagactttggggatccatgtaatcttttatattttttgagtgacagttacatggatatgtttgc

SEQ ID NO: 952002 - DNA, 602 bp, Homo sapiens
tcattgtagcactattcacactaaccaaaatatggaatcaacctcagtgtccatcagtggatgaatatggaatgggaaagcttcccctgtccccctcacacggcatgtggctcgcttcttcagtgccttgctgctcaaacctctcggggagcatacagaggggcaggctttggggatccggcaccacggcagcgtctaggggcgaatatcatagctcccagtgggtgtgggttacagggtgctcttttagtttcgctctttgtttgccatctataggtggcttgtgttaaccagctcagttagaccctctaccttgttacaaggacagagggctttctgtatcctgagttcttgccttggtgtactggaacaattagatcacacgtgggcttggagaatgagtgcaaggttttattgagcggaggtagctcttagcagatgggggaagtcaagaggggatggagtgggaaggttttcccctggagtcaggcgctcagcggcctgggctctcmctctgactgccccaggcaaactctgcgtcattctgctggttggtggcctgccgggatgctggtgcctgtcggtgtgtgtgttcctctgga

SEQ ID NO: 952003 - DNA, 571 bp, Homo sapiens
catcagacattcaaagaaaaattggtatcaattctattgacactattccacaggatagagaaagaggaaatcctccctaaatcattttttgaagccagtatcaccytaataccaaaaccagggaacgacataacaaaaaaagaaaaccacagaccaatgtccctgatgaacatagatgcaaaaatcctcaacaaaatactagctaactgaatccagcagcatatcaaaaagataatccaccatgatcaagtgggtttcataccaagaatgcagggatgatttaacatccacaagtcaataaatgtgatacaccacataaagaaaattgaaaacaaaatcacatgattatctcaatagatgcataaaaagcatttgacaaaatccagcatccctttattattaaaaccctcagcaaaattggcatagaagggacacaccttaaggtaataaaagccacctatgacaaatccacagctaacattatactgaatggggaaaagttgaaagcatttcccctgagaactggaatgagacaaggatgcccacattcaccacttctattcaacataat

SEQ ID NO: 952004 - DNA, 571 bp, Homo sapiens
catcagacattcaaagaaaaattggtatcaattctattgacactattccacaggatagagaaagaggaaatcctccctaaatcattttttgaagccagtatcaccctaayaccaaaaccagggaacgacataacaaaaaaagaaaaccacagaccaatgtccctgatgaacatagatgcaaaaatcctcaacaaaatactagctaactgaatccagcagcatatcaaaaagataatccaccatgatcaagtgggtttcataccaagaatgcagggatgatttaacatccacaagtcaataaatgtgatacaccacataaagaaaattgaaaacaaaatcacatgattatctcaatagatgcataaaaagcatttgacaaaatccagcatccctttattattaaaaccctcagcaaaattggcatagaagggacacaccttaaggtaataaaagccacctatgacaaatccacagctaacattatactgaatggggaaaagttgaaagcatttcccctgagaactggaatgagacaaggatgcccacattcaccacttctattcaacataat

SEQ ID NO: 952005 - DNA, 571 bp, Homo sapiens
catcagacattcaaagaaaaattggtatcaattctattgacactattccacaggatagagaaagaggaaatcctccctaaatcattttttgaagccagtatcaccctaataccaaaaccagggaasgacataacaaaaaaagaaaaccacagaccaatgtccctgatgaacatagatgcaaaaatcctcaacaaaatactagctaactgaatccagcagcatatcaaaaagataatccaccatgatcaagtgggtttcataccaagaatgcagggatgatttaacatccacaagtcaataaatgtgatacaccacataaagaaaattgaaaacaaaatcacatgattatctcaatagatgcataaaaagcatttgacaaaatccagcatccctttattattaaaaccctcagcaaaattggcatagaagggacacaccttaaggtaataaaagccacctatgacaaatccacagctaacattatactgaatggggaaaagttgaaagcatttcccctgagaactggaatgagacaaggatgcccacattcaccacttctattcaacataat

SEQ ID NO: 952006 - DNA, 674 bp, Homo sapiens
aattggtaccgaaatggtagggcgctactataaggatacctgaaaatgtggaagcaattttggaactgagtaacaggcagagggtggaacagtttggagggctcagaagaagacagcaagatgtgggaaagtttggaactttctagagacctgttgaatggttgtcaccaaaatgatgatagtaatatggacaatgaagtccaggctgaggtggtcttagctggagatgaggaacttcttgggaactagagcaaaggtgactcttggtatgctttagcaaagagactggttggcattttgcccctgccctagagatctgtggagctttgaacttgagagaaaaatgatttaggatatctggcagaagaactgtctaagcagcaaagcattcaagagaaagcagagtgtaaaattttggaaaatttgcaggctgatgatgcaatagaaaagaaaaaccaattttctgggaagaaattcaagcctactacagcaatttgccataagtaacaaggagctgaatgttaatcaccaagacaatgggaaaatgtctccatggcatgtccmtggggaaaatgtccttcatggcagcccctgccatcacaggcccagaggcctaagaaggaaaaatggtttcctggtctgggttcagggcccccttcctctgtgcagcctcc

SEQ ID NO: 952007 - DNA, 686 bp, Homo sapiens
taaaagaggccaatgtacagctcaggctgttgcttcagaaggtgcaagccccaaacccttgcggcttacacatggtattgggtctgtgggtgcacagaagtcaagaattaaggtttgggaacctccacctacatttcagaggatgtatggaaacacctgggtgtccaggcagatgtttgctgcaggggcagagcccccatggagaacctctgctacagcagtgtggaagggaaatgtggggttggaggcttcacaaagagtcccctctggggcactgtctggtggatctgcgagaagaaggccaacatcctccagaccccagaagggtagatccactgacaacttgcactgtgagcctggaaaagccacaggcactcaacactagcctatgaaagcagtcaggagggggcctgtaccctgcaaagccacagggagcttgggcagagctgcccaaggctgtgggagctcaccttttgcatcagcatgacctggatgtgagacaggagccaaaggagatcattttggaattttaaggtttaatgactgcccgactggattttggacttgcatggggcctgtagcccctttgtcttggtccaatttctcccattcagaatgggtgtatttacccaatgcctgtacccacattrtatctaggaagtagctaatttggttttgattttaca

SEQ ID NO: 952008 - DNA, 814 bp, Homo sapiens
tcttgataaacatcttaagcaacagaaaacagggttcaagagcagagaaccagtctgacctcaaattcaccagggtggggttttttcccccmtcctaataagcctgagggtactgcaggagatcagggtgtatttcagtccttatctcaaccacataagacagacactcccagagcggccatttattgacctccctccaggaatgcattccttccccccaggatattaactattaatattccttgctaggaaaagaattcaacggtctcttccctacttgcatgtccatttataggctctctgcaagaagaaaaatatggctctattctgcctgaccctgtaggcagtcagcccttatggttgtcttcccttgttccctaaaattgctgttattctgttctttttcaaggtgcactgatttcatattgttcaaacacacatgttttacaatcaatttgtacaatagtggtcctgaggtgacgtacattctcagcttacgaagataacaggattaagagactaaagtaagacaggcataagaaattataagagtattatttgggaactgataaatgtccatgaaattttcacagtttatgttcagatattgcagtaaagacaggcataggaaattataaaagtattaattttgggaactgataaatgtccatattaaaatgaaatcttcacaatttatgttcctctgccagagctccagccagtccctctgttcaaagtccctgacttcctgcaacagttgtcgttgttgctgttatagagatggagtctctctctgttgcccagggtggagtgc

SEQ ID NO: 952009 - DNA, 429 bp, Homo sapiens
ctggggtcaattatcttctgaatgaataaacctccaactactctctggtctggaccaccatcccctccttgcccccgcaaaaaagttcctggccagtgsctcacctctgtaatcgcagcactttgggggactgggatgagcggaccacctgaactcaggagttcaagaccagcctgggcaacatggtgaaaccctatctctacaaaaaattaaaaaattagccaggcgtggtggcatgtgcctgtagtcccagctactcaggaggctgagctgggaggattgcttgagcccagaagcttgaggctgcagtgagccgtgatcatgccattgcactccagcctggatgacagagcaagaccctgtctgaaaaaataaataaataaaaattaaaaatcaggtagttgccaggcacagtggctcacatctata

SEQ ID NO: 952010 - DNA, 582 bp, Homo sapiens
tttgtttgaggcaggacttcagcaaatataacaagcaaacacatatttgatcttcctttccagaggtatcatctataaaaatgaaccactacttttaagtaattgagatggaagtcttctgcctcactccagrcagctgcaaccactggaaatagatattccatggatcttgttggattggatgatggtttcttaactactcttctttctcaatccaggcatatgaacatcatggtgatacgtcaagatgtaccacagagaaatgataatgtaccacagcaaaaagagaactgtgttctgatatcaaaatggttgtggctatttgattatctatgcttaatgctctaaaacactgtttctagtcagaagcttaggtagatactctctcatctactgatttaacatggctgaatttacagttacagtggatatttgcaaagttgtagattacagcaattgatagcccaatctctggagtgaaatagaattggatatgaatcctgaccttattttagttttgtgatcttaggtaagttgctacttagttgcatcttcagttttttcatatatacatctcagctt

SEQ ID NO: 952011 - DNA, 673 bp, Homo sapiens
gcaatatatctttactgtcctacctcaggggtatataaactycctggctttgtgtcataatcttgctcgcagagatcttgatcgcttttcccttccacaagatatcatgatggtccattacattgatgacattatgccgactggacccagtgagcgagaagtagcaaacacactggacttactggtgagacatttgggtgccaggggatgggaaataaatcagactaaaattcagggaccttctacctcagtgaaatttctaggggcccagtgctgaggggcctgtcaagatattccttctaaggtgaaggataagttgttgcatttggcctctcctacaaccaagaaagagtcacaacgcctagtgggcctatttggattttgggggcaacacattcctcatttgagtatgttactccggcccatttattgagtcacctgaaaggctgccagttttgagtggggtttagaacaggagaaggctctgcaataggtccaggctgttgtgcaagctgctctgccacttgggctatatgacccagcagatccagtggtgcttgaggtatcagtggcagatagggatgctgtttagagcctttggtaggcccccataggtgaatcacagaggaggtccgtaggattttggagcaaggccctgccatcttctgcagat

SEQ ID NO: 952012 - DNA, 594 bp, Homo sapiens
ttgaccatcagatggttgtaggtttgtagcagtttttctgggctctctattcagttccattgttctatgtgtctgtttttgtatcagtaccacactgattagttactgtagttttgtagtatagttttgaagtcagtcaatatgacactttcagctttgttctctttgcttaagattgccttggctattcgagctcttttttggttccatattaattttacaatattttttctaattctgttaagaatgtcattggtttgaggaaatagcattgaatctacaaattgctttgggcagtatggccattttaacaatattgattttttccttccatgagcaatgactgtttttccatttgtttgtgtcgtctctgatttcttttagcagtgttttgtaatgctctttgcagaggtctttcactttcctggtagctgtattcctagaaattttattcttattgtggtcatttttttttttttttgagacrgagtttcactccttttgcccaggctggagtgcaatggcgcaacctctgtctcccaggttcaagcgattcttctgcctcaacctcccaagtagctgggattacaggtg

SEQ ID NO: 952013 - DNA, 580 bp, Homo sapiens
acatcctttctcctgtccttctggaactctgataatactaatctagatatttttaaaaaattatagttccacaggttttttcaggctctgttcatttgtttcagtctgttttctttttgtttttcagactaagttctcctgattcgttctcaagttcactgatttttatcttttggcatctttattattgtgcctttccaatgacttttaaaatttaagttattgtatttttcagttggataatatctatttgatacttttaaaataataatttctctgtatttgctggatttttctattcttttcagggatatttgtaattacttgttcaagcagttttatgatggctgttctaaaatctgtcagatatttcaacatctgattcagctcagtgttggtgtctgttggtcttttaacacttaagttgtgattttcctggttcttggtatraccagtgctttttatttgtaccctggacattttggatattatgttaggagacttctgatgctttttaaatctgtgatttcagcagacagttaccctgtttaggtttagcatgtagatttggtttgtctct

SEQ ID NO: 952014 - DNA, 647 bp, Homo sapiens
accattatagagaaaatatttgcaaacatatgtctggtaagggactaatatccaaaatacagagagaacatcaagctaggtacagtgactcatgcttgtaatcttaacactttgggaggctaaggtgagaggatggcttgaggacagaagttcaagaccagccctgaacaatgtagtgagaccctgtctatataaaaaatcaaaaaaattagccaggcatggtggcatgtgcctgcagtactagccactcaggagcctgaggtagaaagatcacttgagttcaggaatttgaggttgcagtgagctatgatcatgccactgcacttcagtctgggtaacagagtgagatcctgtatctaaaacaaacaaataaacaataaccacaaaatccaattaaataatgaacaaaggacttgaatagacactactccaaagaatatatacaaatgaccaatagcacatgaaaagatgctcaatatcactaaacactagggaagtgaaaatcaaaaccacaatgagttactacttsatacccattaggttggctgttataaaatatatatatataagattatgagtgttgacaaggatgtgaagaaattggaacctttgtgcattgctggtgggaatgtaaaatagtgcagctg

SEQ ID NO: 952015 - DNA, 658 bp, Homo sapiens
aagtttattcatgaacataattttaccaacatgctttataccttaattttktttgcacattaatggttttttctttcagaatgaagaactccctttagcatttcttgtaagatgagtcaggtagtggtgaattctctcaggtttcctttgcctggaaaacattttatatcatcttcacaataagtttgctggatacactattcttgtatgacagttttgttttttaacttttattttaggtttgaggatacatgtgaaattcctgtcatgggattttgttgtacagattatttcatcactcaggtataaagcctagtacccagtagttattttttctgcccctttcccttcctcccaccctccacactccaataggccccagtgtctgttgttatcttctttgtgttcatgagttctcatcatttagctcccacttataagtgagaacatgcagtattttcttttctgttcctgtgttagtttactaaggataatagcttctagctccatccatgttcccacaaaagacatgatctcattgttttttatggctgcatagtatcccatggtatatatgtagcacaatttctttattcagtctgtcattgttgggcatttaggttgatttcatatctttgctatcatgaataatgttgca

SEQ ID NO: 952016 - DNA, 628 bp, Homo sapiens
tagtggctcacgcctataatcccagcactttgggaggccgaggcaggcggatcatgaggtcaagagatcaagaccagcctggccaacatggtgaaacccggtctctattaaaaatacaaaaaaattagccaggcatggtggctcacgcctgtaatctcagctacttgggaggctgaggcaggataattgcttgaacctgggagccgagatcgcgccattgcactccagcctgggtgacagagcgaggctccatctcaaaaaaaaagggaagagttgagtgtttttctaggtgtttaatgtgaaggacaagtgaaaagccccagaatggcccctgcaaacagtaacagtaactaacagtcaaatgtctctgccccaggcaggttagggacgagacagaatgagggtggggagcggggctcggggagcagaggccacggtctccatgctctgctcctctggccgcagcagaaccctgtgaaccccaggcaatgacagcaggatcctgaagcccatgcaggctctgaaccacgcggccatccagaaggggtgagataaatgttggggaaaccatccccgaccccygcgagccccaggagcccaggctgccgcctcctgcctcctacacccc

SEQ ID NO: 952017 - DNA, 711 bp, Homo sapiens
ggtagctccctccttatttaaaaatagaggtcctgagaaaacaaaagaagaaaaaccagaacaaaaaaaaatagaggtcttgtaggccgggcgcagtgactcacacctataatcccagcactttgggaggcccatgcaggtggatcacctgaggtcaggagtgcgagaccagcctggccaacatggcaaaaccctatctccacaaaatatgcaaaaaattagtccggtgtagtggcaggcgcctgtaatcccagctactcaagaggctgaggcaggagaatcacttgaactgggaggtggaggttgcagtgagctgagattgtgccactgcactccagcctgggtgacggagtaagactctgtctcaaaaaatacatatatagagagagagagaaagagagagaggagagagagagagagagagagagagagatcgagatcggtcttgggcctggcacactggctcacgcctataatcccacccctttgggaggccgaggcagcaggattgctggaggccaggagtctaagaccagccagggcaacatggtgaaaccgtgtctctactgcacatacaraaattatccaggcatggtggcatcacctgtaatcccagctactcaggaggctgaggcaggaggatcccttgagcccaggagttcaaggttacagtgagctaaccttgcctgtgggaggcaagcaagcttcgat

SEQ ID NO: 952018 - DNA, 611 bp, Homo sapiens
gtgccagcacatgttcggtaaatatgaatgaatgaatgaacgaatgaatgaatgaatgaatgaatctccctctgaggtcmtgtaaacacttccaattcaacgtatcccagattgattttgtcatctcctctctccccataatttccttctcctgtctttgctacctctctcctcccagtcccccagtttagaaatcccagtgttggctgggcacggtggctcacgcctgtaatcccagcactttgggaggccgaggcaggtggatcatgaggtcaggagatcgagaccatcctggctaacacgatgaaaccccgtctctactaaaaatacaaaaaattagccgggagtggtggcgggcacctgtagtcccagctactcaggaggttgaggcaggagaatggtgtgaacctgggaggtggagcttgcagtgagcggagatcgtgccactgcactccagcctgggtgacagagtgagactccaactcaaaaaaaaaaaaaaaaaaagaaatcccagtgtcacttaacacatcaacccatcaaccagtcactgctttcccagattctacctccaatctttcccaccccacgccaccccagcccctggctcactc

SEQ ID NO: 952019 - DNA, 611 bp, Homo sapiens
gtgccagcacatgttcggtaaatatgaatgaatgaatgaacgaatgaatgaatgaatgaatgaatctccctctgaggtcctgtaaacacttccaattcaaygtatcccagattgattttgtcatctcctctctccccataatttccttctcctgtctttgctacctctctcctcccagtcccccagtttagaaatcccagtgttggctgggcacggtggctcacgcctgtaatcccagcactttgggaggccgaggcaggtggatcatgaggtcaggagatcgagaccatcctggctaacacgatgaaaccccgtctctactaaaaatacaaaaaattagccgggagtggtggcgggcacctgtagtcccagctactcaggaggttgaggcaggagaatggtgtgaacctgggaggtggagcttgcagtgagcggagatcgtgccactgcactccagcctgggtgacagagtgagactccaactcaaaaaaaaaaaaaaaaaaagaaatcccagtgtcacttaacacatcaacccatcaaccagtcactgctttcccagattctacctccaatctttcccaccccacgccaccccagcccctggctcactc

SEQ ID NO: 952020 - DNA, 494 bp, Homo sapiens
aggctgaagcaggagaaccacttgaaccccagaggttgcagtgagtagagatcacaccattgctctctagcctgggtgacagagaragagtccatctcaaaaaaaaaaaaaaaaaaaaagttttgttccctggacccagctctgcatctccttttaacaactaattcctttttcccttcctcctttttgagccaacttctctgttccctcacttagacaatcagcccactgcttagaggccttctaccacttccttgatgatagatctggtcctcctctggcctgacttctctccagtgtttgctctttaaaatcctctccttcttgggcttcctcaggccaggcctcctagttttccttctttttctttgctactgctcagcaattgggccccaggctccacctcctctgccacggcctcatgcttggtgtctcacctggcttctcactccaccgccttgggagagcccagccccaccggctgtagatcaaca

SEQ ID NO: 952021 - DNA, 462 bp, Homo sapiens
tgtacatgcttatcagattaaggaagttcccttctactccatgtttgctgaatttttttaaaaaagatcaggaatagatgttgcattttatcaaatgctttttattcatccattcagctaatcacayggtttttcttttttagttagttaatatagtaaattacactgactgcttttagaataataaactaaccttgcaatcctggaatatggactggttggccacagtgcattatctttttaatatactgttggattctatgtggtgtcattttgtttaaaatttttgcattcttgcttatgagggacaaggatctgttgctttcttttcttttattgtctttgattttgataacagggtagtattggtgtcacaaaaatgagttcgtaagtattgactcctcttcagtgttcccaaagaatgtatgtaaatttggtataatcttccttaaatctttgcta

SEQ ID NO: 952022 - DNA, 637 bp, Homo sapiens
gttcatcccaatctttcctgactctcagctctgtctccatgactctggagaacacttgattccacgtagctccactctcggttccgtagcctggaaatactcttrattcaataacctgggacaattgtaaggcttctctaatttgtttcttatctttcatggatcactggcatttgttgtcttatgtccattaacttgaaaagtattgttccgtatattttacattttttgtttgtttcatgtgaagtgtagacttgctccctctaattccatcttggatagaagcaggagttcttcacatattcttaaaatacaaatatttacatggttgcaattagagaatatgtctcatattacttgcaaataaacatatctcagacatttgcaatacttctaaatagtttcataattgccattttaatagctgcaaaatatttcacagtgtgccaaatctacttgagcacagtgtatacattaatgagtgatttatgtcccatctcttactaaaaatgaatttcagatggcttactgacaaaaaggcctactcaataagagtaatagagtatgcattagaaggaaaaataagattgaaagaaaagaaggaagtaataatgccagttatgatagtatctgctgt

SEQ ID NO: 952023 - DNA, 579 bp, Homo sapiens
aagaccagcctgggcaacatagggagactccatctctataaaaaatacaaaaattagggtgttgtggtgcttgcttgtagtcccaactactcaggaagctgaggtgggaggatcgcttctgcccygtagttccaggctgcagtgagctgagactgtgacactgctctccagcctcggtgacagagccagatgctaagtccaaaaaaatctcataatggatagatagatagataggtacatagacagacagctacaaaaggaaagttctctcttatggtagaatcccaattaaatgcagaagaaatgatgaaaattataaaataaatgatgaaaacagaaaatcgctcttttgcaaatattatagtaagaattgtttctggcaaaaaatcatcaatggatactaaaattgataagcaaattatgatattgatgagaagcagaatatttacatattctcaaaatatctccctaaaagatggctactaattaaaaatgtgaaaagtagcattacaagagagaaactgggaagtagcattaacctaatgatcaaagtaaataatagcaggaatgcaacaaagc

SEQ ID NO: 952024 - DNA, 806 bp, Homo sapiens
caacttcatgagagctcctgagccagagccacccagctaagtggctcttaaattccagattcacagaaactgagataataaaatttttatttttagtcactatgatttggggtaatttgctatgtagcagcagataactaattcaaggttataagaaaagtctattttattggcataaacattttgaaactgacccaatagtcccatagaccaggggtccccagcccccatccatggcctgttgggaaccgggctgcaaagcaggaggtgagctacgagtgagcattaccacctgagctccatcccctgtcagatcagtagcagcattagatcctcttaggagtgtgaaccctattgtgaactgtggatgccagggatctaggttgcatgcttcttatgagaatctaatgcctgatgatctgaggtggaacagtttcatcccacaaccatggccctcactgtctgtggaaaaattgtcttccacgaaaccagtccctggtgctaaaaatgttggagactgctgccatagattgtttttttcataaacatagaaattaactgttctggtcttaaagcttgaaacttacatttattttatctgggcttcttcctccagaagtcctcttaaaaaatgtgtcaaagaactgaaactcacaagatcactgcatccagacaatgagatggcagtcccttcattcattatgrtcacttccttacccctccctagttgctgttttcttatacattgttacatttctttcctgctatataaacgcctaattttagttagtcagagatggatttga

SEQ ID NO: 952025 - DNA, 738 bp, Homo sapiens
ggacttcttagagatcctcttgggcggcaaaagtctggactataatttgttggcagtcaagctcgattggttccccatcctctgggagaaaagtggcagggtggagggccacacacgtgcgtatttgaagcactggtccctcaaggagtagcgccttgtatctaagtaggcagttgtctgatagccataaacttcctttggcacctagtatgccatttacataatgagtagtccagacagtgagatcctttcattgtattattttgatagcctctgactctaagatggccactaccgcaactacctgtaaacagtgaggccagccttttgctactatatcaatttccttacttaggtatgccactggttgtggggttgtcccatgagtctgagtaaggactccaagagctattcctgctctctctgtgatgtataaagagaagttttgtctcatgggaaggtttaaggctggagcttgagtttgttccttccaatgcccagatttcagggttgattccctcctcaagcagggcacaaaaaatgggtaacttgttccccatattcatgtagataatagctccagctttgggtaatatgtccttccctaataagggcatgggactttcaggcataacaagaaagrcatgtgaaaagggcaaagtctcccaattacaactgaggaggtgggagaaatacctgattacaggccatcccaggattccttggatggtaacggac

SEQ ID NO: 952026 - DNA, 545 bp, Homo sapiens
tttcaataattccatgaatatatttatggccttctgtgtgccacacactgtggtaggcactgggtgaacagcataataacagtgtatagaacacagtcccaacctcaatgacggccaactagaatcagggcagtatatgccataatagaattaatatggagtgggtgtaggaacaagcaaaagagtgcatgcttggaggagctaagaatccgtctccaaaaaaatccagtggtagttccttctcacacgattgtgagtgtgaaagagtgtgatgagaaatgagatggaggctggggagacaagcaggacctggattgttcaaggccatccagtttagactatatccttgggacaatggctgccattaaaaggacttaagctgatttacactgtttactttggcaatgcagkggatgtattattatagcgttttcagaagtgtgtctgaaaaacttggttccgtaagatgctttaccagaaaggcttctgagctaagtaagtttaggacatgttctgtactgcatctctccaaagagttattacca

SEQ ID NO: 952027 - DNA, 594 bp, Homo sapiens
ttttaatttttcaagtttccttagaaaagctttgattttaggtttgagactttcttgttttctaatattagcatttattccaataaacttccttctaagcactgcttttgataatgttgtattttaaattttattcagttcaaaatattgtctaatatctattgagatttcctatttaagcttttaaataactttgaaatatatttttagatttccaaatatttgcagattttccagatttaatttgcagattaaatctgcagatccagatttgcagatttaatttcattatgatcaaggaacatacttgtgtgctttcaattgttttacataaggtttcattatcttttacaagatgatgattaatactaatgaatgatttcataccaacttgaaaataatgtctattctactgtcatttggtagtgtcctataaatgccaattatatccattcggtttatratactgcttagctattctatcttcttgaggattttaaaatttattattgtgttgataatttagagaagcatttcaaacctccaactacagttgtggattatacatttctactctgagatttcaaatacatg

SEQ ID NO: 952028 - DNA, 573 bp, Homo sapiens
cagggctccaagatggaatgragaatgtgacaaacaatctaattagattacacatatatgaaacaaactcacttgaagggatgagggagaactgttctggcctcagtaactttgaaataagtggaatctgtaagacaaatggcagaaggaaccatgcataagcactgtactttagctgacaaagttgtttctctatgggtaacaattctaaaactactacacaatcatacagcaattaaacacataagtaaatgaatggcagaaagaaccatgcataagcactgtactttagctgacaaagttgtttctctaggggtaacaattctaaaactactacacaatcacacagcaattaaacacatgagtaaatgaatggcaggaaatagtagccacttttcttattgctggagtagaagatcacagatagcaaggggagggagctaaaatgaacagtctagaaatggattacagttgaagacatcagtatgcaaactcatgtttagcttaataaagacacagatgcttacatataaaaatatttatagatatgtgtacacacgtatatgtctcttt

SEQ ID NO: 952029 - DNA, 600 bp, Homo sapiens
gctgagatagaaatgacatcctatgtctcttcccctatggttaataaaytgataagtgccagtgggcatactgcctgacacaggaggcaacttttctgaggtggatagagaaattgagccttcataacatgatttgcaccctcaacacagagttaagttggaagtctttcccttaaacttccagctataagaatatgtccctttttggcttgaaaaagaacatgagactgtcagaaagaaagatgatgaagtagtcttgtgtattacatatattaggtttgtaacttttagccaagtcctttgctaaaacaaatctattattttttgtttgtttgttttgacaactttcccaattctttgccgtaacttctcagagtgccttttttccctcttggcactttctcttttaggccttactttgttaagatattgactttaaaaaaaaaaaaaaaagtaacttggctgggtccggtggctcatacctgtaatcctagcgctttgggagcccaaggcggtgagtcacctgaggtcagtagctcgagaccagcctggccaaaatggtgaaaccccatctctactaaaaatacaaaaaattagctg

SEQ ID NO: 952030 - DNA, 439 bp, Homo sapiens
gctgggaagggcaccagccagagtgtgcaggcaccagcacccaacctgrctgagatatggctcttcccaggctggagaccctttagacatttgcacttaaaagtgaaagctctgcacatcttcagaggagatgtaaagacaagcaggctttgaacatttgcagactatatttttaggtcacaaggaccttccttttttgtgtgtgtgatggggtgcagggatggaaaacatatgccttagtttctgtcacttgtgccccaaaccccaaagataatggttagttgagtttcacagtagcctgttaacagattttcaagtaattttccactaatccagcagtcctctgcagatatccataggcatctagtatttccaaagagaaaaacattagcccatggtttagatatggtgatgttcattaattgtattcacatagact

SEQ ID NO: 952031 - DNA, 663 bp, Homo sapiens
agaaggagaattctcccagcacagtgcttgagctctgctaagggacagactgtctcctcaaatggttcsctgacccctgtgcctcctgacagggagacatctcccagcaagggtcaacagacacctcatacaggagagctctggctggcatcaagctggtgcccctctgggatgaagcttccagaggaaggagcaagcagcaatctttgctgttctgcagcctccactggtgatacccaggcaaacagggtctggagtggacctccagcaaactgcaacagacctgcagaagaggagcctaactgttagaagaaaaactaacaaacaaaaagcaaccacatcaacatcaacaaaaaggacccccacacaaaaactccatccaaaggttatcagcctcaaagatcaaaggtagataaatccatgaaaatgaggaaaaaccagcccagaaatgctgaaaattccaaagaccagaatgactcttctccaaatgattgcaactcctctccagcaagggcacaaacctggatggagaatgagattgacgaattgacagaagtaggactcagaagatgggtaataacaagctcctctgagctaaaggagcatgttctaccccaatgcaaggaagctaagaaccttgataaaaggttacaggaactgcta

SEQ ID NO: 952032 - DNA, 785 bp, Homo sapiens
gattcccttcagttaaaggtcctggaagaggtgtatgagccctaatgtgagtgatattaaaaagagtgcattctagtcctaactgctgtttgcaattgggtaaataaagtcatcagttgttcatctgtatcaaatcataactgagcattttcaattaattgtgtggaatgaaccacatatgaagaatcagaaatcacattaataggcataataaaagcagtcaatacctcaattacagctacaagctcggctttttgagctgaagtatagggagtctgaaaaaccttacctttcaagccagaataagaagatttaccattactagacccatctgtaaaaacattttcagcaccttcaattggtttaaatttaattttagggagaatccaattagttaatttcaaaaattgaaataattttgttttcggaaagtgattttcaagaacacccgtgaaatcagctaaatgggtttgccaagtaagactatttataaaggcttgctgtatttgtgccttcgtgagagggacgacaatttttccaggatcatatccatgtaaattaacaatccaagttctcccatttcctatcatagtagcgatttgatttaaataaggagttagagtccatgaattagtatgtggaagaaaaagccattctactaagtcctgctcttagacaataacaccagtaggttaatgctgagttggaaaaatyagcaaatctagagtcttctctggttctgttctatttatttgagtcttatgcacttgcttctcaatcagctg

SEQ ID NO: 952033 - DNA, 610 bp, Homo sapiens
atggtggtgcgggcctgtagtcctagctactcaagaggctgaggtaggagaatcacctgggcccaggaagttgaggctgcagtgagccgagatcgccttcactccatcctaagtgatgggaatcaraccctttctcaaaaataaataaataaataaataacaaaacagtgccatatctataccaatggatctcaatgtgagacgattttgctccttacaatataattggcaatgtttggatagatttttgattgtcacaactgaaggcaaggatcctactggcctctagtcagtacaggctggtgaattttccgcaatgtatctgcaaactcctcacaagaaataatatttggtacaaaatataatcagcccttcatatcagcaggattcacatcctcagattcaaccaactacaaattgaaatatttaaaaataaaaacaatacagcaataaaaataatatcaataaaaatgtcatataacaactatgtatatagcatttaattgtattagttattaccagcaatctagaggtgattgaaaatatgtggaaggatttgtgtaggttatattcaaacactgtgccattttataaaaaggacttgagtatt

SEQ ID NO: 952034 - DNA, 644 bp, Homo sapiens
aggctagcattgagtgtctgtggcttttccatgtgagtagtgcaagctgttggtggacctaccattctgggattgcaggatggtggctctcttcttccarccccactaagcagtgccccagtggggactctgtctgggggctccaaatgcacatttcctttccacactgccctactagaggttgtctatgagcacactgcccctttagcagacttaagcctggacatctaggcacactgcctcttcagcagatttctgcctggacttctaggcatttccatacagcctctgaaacctagatggcggctcttaagcctcaactcttgccctctgcacacctgaaggcttaacaccgcatggagatcttggtgttttctggcttgcagcctctgtagcagtggcctgagatgtgtctggggcccttttaaccatggctggagctggaacagttgggacacagggcaccatgtcccaaggctgcacagagcagtggggccctgggcctagcccatgaaagcatttcttcctcctgggcctcctggcctgtgatgggaggggctgcagtaaaggtctctgaaacgccttggaggcattttccccattgtcttggctattaacattcagttcccctttacttatgcaaa

SEQ ID NO: 952035 - DNA, 644 bp, Homo sapiens
aggctagcattgagtgtctgtggcttttccatgtgagtagtgcaagctgttggtggacctaccattctgggattgcaggatggtggctctcttcttccagccccactaagcagtgccccagtrgggactctgtctgggggctccaaatgcacatttcctttccacactgccctactagaggttgtctatgagcacactgcccctttagcagacttaagcctggacatctaggcacactgcctcttcagcagatttctgcctggacttctaggcatttccatacagcctctgaaacctagatggcggctcttaagcctcaactcttgccctctgcacacctgaaggcttaacaccgcatggagatcttggtgttttctggcttgcagcctctgtagcagtggcctgagatgtgtctggggcccttttaaccatggctggagctggaacagttgggacacagggcaccatgtcccaaggctgcacagagcagtggggccctgggcctagcccatgaaagcatttcttcctcctgggcctcctggcctgtgatgggaggggctgcagtaaaggtctctgaaacgccttggaggcattttccccattgtcttggctattaacattcagttcccctttacttatgcaaa

SEQ ID NO: 952036 - DNA, 624 bp, Homo sapiens
atgtgtgactgaaaataagtattgcttgtgtgatgtgaagagggtgtacccaacgccrgggcactgacatcaacacacacaggcaagaaaatagccctccagctagggccccagtgagtcctgccctacccagaagaatcgggaaatacaactctgggtatacgggaagttattaacaaaaccaaggtgtgggccagatgcagtgactcacccctgtaatcccagcactttgggaggtcgaggcaggtggatcacctgaggtcaggaattcgagaccagcctggccaacatggtgaaaccccatctctactaaaaatacaaaaattagctgggcatggtgggggcacctgtaatcccagctactcaggaggctgaggcaggagaatcatttgaacctgggaggcagaggttgcagtgagccgagattacatcattgcactccagcctgggtgacaagagtgagatctgtctcaaaacaaaacaaaaccaaggtgtgggaggaggcaaagcagggtgaaggaaaacaaagaaaggggtctaggagagatgctcctgctgacctgaaggtggagagtagtccatgagggaagtgccaagaattcagggctaaagtcacatgtccag

SEQ ID NO: 952037 - DNA, 585 bp, Homo sapiens
catctctacaaaaaatttttaaaaagtagccaggcatggtggtggcatccagttacttgggwtgctgaggtgggaagactgcttgagtctgggaagttgaggttgcaatgagccatgatcacaccactgtaagacactcctgaagaaaagaaacaaggtggggaaattaggctatcaggtatctagatttactgtaaagaaacagtagttgaagcactatggtattagtgaaggaacaacaaaaagatcaatgaaacagaatagagtgcccagaaataatcccacaatcatgcagaaacaatataagaaaaaggcagtatttcaataactgggaaaaaaaataaactatgaaatgcaaaaaaggaaagttggatccacacctcacaccatacataaaaatagtcttcatgtagcttaaatacttatatgtgaaaggcaaaattttagaatattggacaatatttttatgactctgaggtaagagtagatttctaaaaataagacattgaaaacaatgagaaatccaactatattaaaattaggaatttctattcatcaagagacaccaaaaagagactcaaagga

SEQ ID NO: 952038 - DNA, 763 bp, Homo sapiens
cgtagtacaggcatgaatagggaacagctttctagcgcagtgaaaggggatgttctgcctgcccctcagtttattaaaatgccacctctgccacacatctggatgaayggacttgatgtctagcttctgtggctccttcctttactagaaaggattctaagtgaacccatcaccaaatttatcttctaaagacagtgacaagctgtatccagggtagctggagatgggatttctattttggttgtcgacagtgtcaaacagatacttgcaacatgccgtcaaattggaattggacagaaaggacaggagattccagcttaggcaagaatctcatacctttgtgaggggcatatagaaaaaaacccgatgtgtgtcggcatgtccatgggatgatcaggccaagaagctctgggagtttcagagagtaccgttgatgacaagacaggaacatgtggctgtcacagtgtgggaggaattaaccacagttctgtacactgtaccatttaataagcatctcttgtttgatcttcccacaaccccatgggggagatgctgcccccattctacaggcagagaagctgaggctccaagaggataatagactaggccagggtaataatacactgaggaaagggtgatgcctggactggaacccaggaacctgagcctaacagcaggataatttctacacaggcacactacaaggcctgtgtcttgctaaaggcaagctgtagggagcaaagctaatggttcaggtctgggt

SEQ ID NO: 952039 - DNA, 585 bp, Homo sapiens
agtgctgacataggatctacatgttagaaaatatttacgtttccctatgtgattgatattagtacaatgctaaagtaattttctgaaaaaatacaaatataaatgcactcattcaatttcttaagtcaaaataattttgctgatctaatggcaaaggctcttcaaaagcagggtgaagggcataatcaccaggccccaacttgcctgatatagtaactccataaccactcttaccaaggtctataggctatttaattgctttctattttaggttgtagctgtattctttagaatttcaaataaggttttcaggccaaaaggcaatgggagtggcttatcaaaattcagagaattcagatttctttggtgtttgcaggttaatccctttgttatacaaagttgattgacacggaggattttccttaaatcaccaagccgtgcaaggacagtgctaggactacagttgaggtattcagaatccaagaacacctcaygctgacctttaattcctgatccttacaattggttgcatgctgcattttatctagtttcaaaagataataaggcaataaaattaaatattca

SEQ ID NO: 952040 - DNA, 585 bp, Homo sapiens
agtgctgacataggatctacatgttagaaaatatttacgtttccctatgtgattgatattagtacaatgctaaagtaattttctgaaaaaatacaaatataaatgcactcattcaatttcttaagtcaaaataattttgctgatctaatggcaaaggctcttcaaaagcagggtgaagggcataatcaccaggccccaacttgcctgatatagtaactccataaccactcttaccaaggtctataggctatttaattgctttctattttaggttgtagctgtattctttagaatttcaaataaggttttcaggccaaaaggcaatgggagtggcttatcaaaattcagagaattcagatttctttggtgtttgcaggttaatccctttgttatacaaagttgattgacacggaggattttccttaaatcaccaagccgtgcaaggacagtgctaggactacagttgaggtattcagaatccaagaacacctcatgctgacctttaattcytgatccttacaattggttgcatgctgcattttatctagtttcaaaagataataaggcaataaaattaaatattca

SEQ ID NO: 952041 - DNA, 575 bp, Homo sapiens
tgagtgtgcagcttttccaggtgcacagtgcaagctgttggtggatctatcattcttgggcctggaggatggtggccctcttcttacagctccactaggcagtgccctggtggggaatctgtgagggggtccaatttcacatttccctttcacactgccctagcagaggttctccatgaggtctctacctgtgaagcaaacttctgcctggacatccaggtgtttccatacatcctctgaaatcgaggcagaggttcccaaacctcaattcttgacttccatgtgcctgcagacccaacaccatgtgaagtcaccaaggctcgggcaatgaccaagcaatggcctgagtatattggcaccttttaaccatagctgggacacagggcaccaagtcccaagacaggcacccaagtcccaaaactgcaaggcctggggcccagcctgctaaaccattttttcctccttggcctacrtgcctgtgatgggaggggctgccaccaacatctctgaaatgccctggagacattttccccattgtcttggccattgacatttggctccttgttatttaagca

SEQ ID NO: 952042 - DNA, 603 bp, Homo sapiens
ccggctgtttgacctgaacttcccagcctccaaaactgtaaraaataaattttttttgtttataaaaataccaagtttaccatagttttttacggcatcccgaacagactaaggcaaaaatcttacaggttcgctgttaatgtactactatatactttatgtttcttgtggctattcttaatggagtcatattaaattttatttttgttattgtgggtttaggaaaaggctatacaattttctttcatgcaaaaacttgctgaactcttctttagtttaaataatttctcagttgattcttttaaatttctggcataaataactatttaattttaggtcttttcttcaacttatcacattaaaatctcccaacagctatcttacttagaataataaagatgactcccaaatgttaatcagcaactgaaacctctcttctgagcatcaccctattctaaggctgagaagaaagaaaatatgaattttctctataattaaaggagatgaagagcctatccttaccttacaagaggatttacttggagagagtattgaaataccttactctacttctttggtattcgaatacatctctctagggaa

SEQ ID NO: 952043 - DNA, 512 bp, Homo sapiens
gacctggaaaaagcaccatctgattggccaaatggtcatcaatgaagttctcattccyggcttcacctgtaaatggcagcccagcccccaggcttcaggttctctttggcttgaagtttggtttcactgaagacttgccacttcctgcctaggaacctgcctgcatccctgtgccatcaacctgccatccatggtgcccaggttgtatgtgttcaagggcaccagcaggcccatgccaaaccatgctcagtccctgagccccctcccaggcttatcagcacccaacgtttgtagggagtgtaggtggcaggggactggcatgtcagtgctgccctgagcatgtacacacctggctaggttgctacagcacccaggctcagccacaactttgctccacaccagagtgggtgctgacagcaggaagaggccagaaagcaggaacaggcacttttgagtctgcaagggcagggtcttcctgggcccctgactgcacagggatgctcaggtatgaa

SEQ ID NO: 952044 - DNA, 427 bp, Homo sapiens
agccaccatatttgttattggttgttttctagcttcttggtggaaggaagtgatctttaaaatttttgttttgtaaacaccgattccttgatttaatttatcaccaccatgactgctctcattcaccaattcaccaaaattgggtaaatccttaccttacttgttttgattcttcttttcttaaatatatgtatagctcaatttttaacattagaaatgtgttgggtctttatttagaagtttggtgatgtttttgtgaccagaaatatgccactggagtatgttttttttacaccarttagcccatggtaaaattggttttgttttacattgtttcacttaaagttgttaattctgagactaaaatcagtgtgcaggaagtttgaactcagaatcagaacatgcagggaaggcagagagagaaatc

SEQ ID NO: 952045 - DNA, 583 bp, Homo sapiens
aatatgagatcccacaggctccactagctgaatatacttcaacaggatgcccgagtcatttactttcctatctgtttctctagtgatgctgcaaaatttggaaagggtttccagacagacagctagggttaagtggtgtggggatgagggagataggaagtctaaaagacatcgcacaactctgaaaaaacagtttgataagactggaaacacaggactcggactctaaccttatttctttttctataaccatcatggaaggctacacctatggtgaactctccctttataccatttttcagttcattttttttttctttgagacaggctctctctctctttctgtctctctctctctctctccctctctctctctctctctgttacccaggctggaatacagtggcacaattacagctcactgcagcttcaacctctccaggctcaggcgttcctcccatctcagcctcccaagtagctgggactacaggaakgtgccaccacgtccgactaatttttgtatttttttgtagagacagggtttcattatgttggctaggctgggctcgaattcctgacttca

SEQ ID NO: 952046 - DNA, 569 bp, Homo sapiens
ctggctaacatggtgaaaccccgtctctactaaaaatacaaaaaattagccccttgtgctggtgggtgcctgtagtcccagctactcgggagrctgaggcaggagaatggtgtgaacccaggaggtggagcttgcagtgagcagagatcaggccactgcactcgagcctgggtgacagagcaagactccgtctcaaaaaaaaaaaaaaaaaaaaatggtagtgcagacccaaagaatgagctgcagcaagatttattgtcaagactgaaagaataaagcttccacagtggggaaggggactgcagagggttgccactgctggctcaggcagccagcatttattcccttatttggccctgcccacatcctgctgattggtccattttacagagcactgactggtccattttacagactgctgattggtccattttacagagtgttgattggtgtgtttttatagagtgctgattggtgcatttacaatccttcagctagacacagagtgctgattggtgcatttacaatcctctagctagacagaaaagttctccaagtccccactcaac

SEQ ID NO: 952047 - DNA, 569 bp, Homo sapiens
ctggctaacatggtgaaaccccgtctctactaaaaatacaaaaaattagccccttgtgctggtgggtgcctgtagtcccagctactcgggaggctgaggcaggagaatggtgtgaacccaggaggtggagcttgcagtgagcagagatcaggccactgcactcgagcctgggtgacagagcaagactccgtctcaaaaaaaaaaaaaaaaaaaaatggtagtgcagacccaaagaatgagctgcagcaagatttattgtcaagactgaaagaataaagcttccacagtggggaaggggactgcagagggttgccactgctggctcaggcagccagcatttattcccttatttggccctgcccacatcctgctgattggtccattttacagagcactgactggtccattttacagactgctgattggtccattttacagagtgttgattggtgtgtttttatagagtgctgattggtgcatttacaatccttcagctagacacagagtgctgattggtgcrtttacaatcctctagctagacagaaaagttctccaagtccccactcaac

SEQ ID NO: 952048 - DNA, 617 bp, Homo sapiens
gaccaatgaaacaaaatagagaaaacaaaaataaagccaactgattttgacaaagcatacagaaacatcgactggggaaataacaccctattgaataaatggtgatgggaacattgaatagccrcacacagaagaaagaaactggatccctatctttcatcatacacaaaaatttacttaaggtgacttcaagacttaaatctaggtcctgaaacaataaaaactctagaagaaaaccggaaaaactcttctagacattggcctaggcaaagaacttataacaaagaccccaaaagcaaattcaaaaaaagcaaaaataaatcagtgggagctaatgaaaagaaaaagcttctccaaagcaaaataaatcatcagagtaaacaaacaacctacagaatgggagaaactatttgcaaatgtactctctggcaaaggactgatagatccagaatctacaagaaattgaaacaaatcaaagaaaacacaaataatcccattaaaaagtgagcaaacaacatgcatagacgtttctcaaaagaagacacacaaacaactaataaacagggaaaaatgctccacatctctaattatcagggaaatgcaaattaaagccacaa

SEQ ID NO: 952049 - DNA, 556 bp, Homo sapiens
tgagtctggtggggacgtggagaacctttatgtctagctcaggggttgtaaatacaccaatcggcactctgtatctagctcaaggtttgtaaacacaccaatcagcaccctgtgtctaactcagggtttgtgaatgcaccaatcgacactctgtatctagctactctggtggggccttggagagcctttgtgtgacactctgtatctagctaatctggtggggaggtggagaacctttgtgtctagctcagggattgtaaacacaccaatcagcgccctgtcaaaacagaccactcggctctaccaaccagcaggatgtgggtggggccagataagagaataaaagcaggctgcctgaaccagcagtggcaatgggctggggtcccttccacactgtggaagctttgttttttcgctttttgtartaaatcttgctactgctcaccttttgggtccacagtgcttttatgagctgtaacactcaccacgaaggtctgccccttcactcctgaagccagcgagaccaggagcccagcaggaggaaggaacaactcca

SEQ ID NO: 952050 - DNA, 580 bp, Homo sapiens
aggcatgtcaatagtctaagcactcttggtatgttgtaattgagaggtgaagccggctgggcttgagtcaggtggggacttggggaacttttctgtctagctaaaggattgtaaacacaccaatcagcactctctgtctagctaaagatttttaaacgcaccaatcagcacactgtaaaaacagaccaatcagcactctgtaaaatggaccaatcagcagggtgtgggcggggccaaataagggcataaaagctggccacccgagccagaagcggcaactgctggagtccctttccaggtgtgaagctttgttctttcgctcttgctgctgctccctgtttaagtccagactacctttgtgagcttgtaacacagtgagggtctgtggctttattcgtgaagtcagctagaccacgaacccaccaagaaacaattctggacgtgccacctttaagagctgtaatacttgctgcaaaggtttgtggcttcrctcttgaaatcagcaagaccacaaacccacggaatggagaaactccagacacaccatctttaagagctgtaacactcaggataagggtca

SEQ ID NO: 952051 - DNA, 602 bp, Homo sapiens
gcaaattttttattcagtttctgagttgtattttcacttgttaatggtgtattttgaataataattttaaaaattctgttaagttcaatatrgccatatattttttctgtcacttgtatttttggtgtcatgtcatagaaactattgtgtaacctaagaccaccaagattgactcatatattatctttcatgggttttgtggttttagcgcctacattttgatctatgatccgttttcagtctaacatgtacatagtatcagggaggagtataactttcatatgggtatctatttgtcccacatttgttgaaacaaacttttaccctattgaattgtcttggtaatattgtaaaatcagttgatcataaatgtaagggttaatttttgtacacttgattctatttcattgatctatatgtttactcttacaccagtattacaatgtattgtttactgtttcattgtagtaagttttgaaatcaggatgtaggagtagagtactccaattttgttattgtttttagattgttttagctattatagacctcttgcatttccatatagattttcacatcagcttattactgcacaaaaaggcagc

SEQ ID NO: 952052 - DNA, 613 bp, Homo sapiens
cagttatagaaaagagaaaattcagaaaaataagaaagatactaagggccaggacatatttgagggagacataatttcctaatttgagtaactattagaaatacattcatgaaatatttacatatgatattgctgtggttagatgaactgaccaatatgaagtaagacactctcaaagtaaattatttttgaataaaattctccaattgcttcaggggtaaagggaaaggtaagaataatttaataagaaagttctcttacaacttgccctgcagcttctttttaaaaaaaatcctgaactaaaatcctttcttgatgcttgaccttacaagttaattttttcccaaatactttactgtgagtaccattaggcttaattagtgtgataaaatctgaaaaagaaagtctgtgtttctctacaaataatgaattatatatggatttttattaaagtttagttatactctatctggtataacaacaaaaattaaacttttgtttttatttttatattcktagtgtggttagtgtagaggtggttgtgaaatgttcattgcctgaaaacttctgaaatctaactttgaaattttttctatacatttatttttaattt

SEQ ID NO: 952053 - DNA, 799 bp, Homo sapiens
agctgagggttgaggggaggcgaaaagcagagagggcaccaakacaaagtttgttatttttctttttatcattttaacctttatttttctttgatgatatctttgtactgtattgttttttctatgcctattgcaattactaactacatgtcctgtttctttgattgttggttttatctactgcctcttctaagtacacagagtgattatgtctcaaccacccctgggagctttggtgcactgatgtgaagaattggccattcactgttagtatttaaatgccataaccgctcccccaacacacacacacactttctctctctctcacacacaccacacacacacacacacacacacacacacacacacacacacacacactgtggactccaagccagatataaccatatcctcctcaggccaccttgccactagctttggcccttcaagtaatctagggaaagggtggcccatagtgacactcttcaatcagggtccactttaccatatgatatggtttggctctgtatccccacccaaatctcatcttgtagctcccacaattcctatgtgttgtgggtgagacctggtcggagataactgaatcatggggggaagtctttcttatgcttttctcatgatagtggataagtctcatgagatctgatggttttaaaaatgtgagtttccctgcacaagctctctctttgcctactgccatccatgtaagatgtgacttgctgtttcttgttttccaccacaattgtgaggccttcccaggcatgtggaactgtaagtc

SEQ ID NO: 952054 - DNA, 604 bp, Homo sapiens
cctggatatgggacaagaacttgggacctgccgaatggtgggactgaaagagctgtaggctgggcgtggtggctcctgcctgtaatcccagcactttgggaggccgaagtgggtggatcacgaggtcaggggtttgagaccagcctggtcaatatggtgaaaccccatctctactaaaagcacaaaaagtagccagacatggtggcacatgcctgtaatcccagctacttgggagggtgaggcaggaaaatcacttgaactggggaggtggaggttgcagtgagccaagatcatgccactaaactccagcctgggagacagacactccatttcaaaaaagacaaagagaaagagctgtaacacaaacaggactgaaacacatccccccactcattatgttgtgggtgactagaaggagagaagagctgtggcccttcagggagcacagacctagggactcaccaagccagggctgtracaccctcttttggtctctgcagttcctgacatctccaagcttctagacaccactgtgttcccctcatccagacatgggtacccacagcagaagctgcatgagatacatctgctccagccagagcct

SEQ ID NO: 952055 - DNA, 575 bp, Homo sapiens
gttcactgattctatcctctgtcatctccactgtattattgagcccatccattaagtattttatttagcttattgtatttttcacttctataatttccatytggttcttttttataacttctatttctttgctgagattttctcagtatttttcgcatttgtttcaagagaatttgtgattgcttattgaagtatttttatgatggttgctttaaaattcttgtcagataattccagcatctaattcatcttgttgttggtatctgtcaattgtcttttctcattcatgttgcgattttcaattgtatcctgacagtttttatattatattctggatcatatttaatcttcttttattagcaggcagccccctgttgagatattgaagactaggtagatgtgtatgtttagcttcctgacaccatcctggcaaaaagggagtgctgactcatactgcctcactgcagtggggtgggtgggaggaagctcagctccccatttggccccactgacaccttcccagtgaaagagaggcactgactcctaccatctcctggcctccaaatgggaatgaa

SEQ ID NO: 952056 - DNA, 642 bp, Homo sapiens
atcagcgtctgcccggcatacacactactcggaggagcctttgtactctctatttacaagaggaggctgtgagcaaattagcagggtaaccagggaaaatgtttggcgtccgtgggtgagagttggagccatctgttgccaagtgctgagaaaacaccggagcactccctggagccgtggtgcccggcagagctccaggaagtgggaccaggcacctgcaggctgtgtgtcctggggcagggtgctcaccctctctgggcctcagtgtctggatccgtaaaacctgcgggtctgtccagcctcgtgattccaggatgctccctgtctcctttcccctcctgcccctctgctcctgggctccgtacatcctttctgtgcccccaccctgagaccaagcccttcctgggaaggaaggctggcggcctccaccgtgacgacagcgcccgcctgcccagcaccggcattgggggtttatttaccattggacgcatttgttcccaagctgaaaatagctttattgttccctctaaagacaaagataatayttcaccaatccagaaatgtatgctgtagaaaagtaaaccgagagagagcgcctccccgcctatgccgggcacctgtccctgagagcagcggcccagg

SEQ ID NO: 952057 - DNA, 454 bp, Homo sapiens
acaataacgagagtcagcgtgcatttggaagcttcgaagacagacactgacttctctttagctatccaagtcctagattgtatcttcttccaagagaaggctgtttgcctacactgaaaatctgttgtgtagtgccatcaccttcattgattgtcttagctagatcttctggataacttgctgcagcttccaacaaagcatttgctgcttcaccttgcacttttgtgttatggagatgaattctttccttaaacatcatgaaccaacctccgctagcttccaacttttcttctgtagcttccccacctccctaagccttcatagaattgaagagagtcagggccttggcttgagaggattaagccccaattaagagaattaggctttggcttaagaaaatgttgtcgctggtttgatctkctatccagaccatcgaaactttctccctatcaga

SEQ ID NO: 952058 - DNA, 599 bp, Homo sapiens
aattgaaataatcacatgttttttgtccttcattctgttgatatgatgtatcacattgattgatttgcgtatgttaaatcatccttttacatccctggaataaatcccacttgtcatgatgaatgatatttttatgaccttttaaaggtattgttgaattcggtttgctaatattttattgagtatttttgcatcaattttcatcaggtatattggcctgtagttttcttttttagatgtgtctttgtctggttttggtatcaggataatactgacctcgtagaatgagtttggaagtattccctccctctgtttttcagaacaatttgaacagaattggcattagttattctttaaatgtttggtagaattcagcagttaagccactgggcttttctttactgggagaatttttagcatggcttcgatattgctacttgctattgatctgttcaagttttggatttcttcatggttcaatttttataygatgatgataaaggtttatatgtctaggaatttatcaatttcctctagatattccaatttattggcatttagttgctcatagtagcaactaatgatcctttgaatttctg

SEQ ID NO: 952059 - DNA, 572 bp, Homo sapiens
atgcggccaaaaacatgaaaaaaagctcatcatcactggtcattagaagaacgcaaatcaaaaccacaatgagataccgtctcacaccagttagaatggcgatcattaaaaagtcaggaaacagcagatgctggagaggatgtggagaaataggaatgcttttacactattggtgggagtgtaaattagttcatccattgtggaagacattgtggtgattcctcaaggatctagaacaagaaataccatttgacccagcaatcccattactgtctatatacccaaaggattataaatcattctataaagacacatgcacacatatgtttattgcagcactattcacaagagcaaagacttggaaccaacctaaatgcccaccagtgatagactggataaagaaaatgtggcacatagacgccatggaatactatgcagccataaaaaggatgagtttgtgtcctttgcagggatgtggatgaagctggaaaccataattctcagcaaactaacccaggaacaaaaaracaaacaccacatgttctcaatcataagtgggatttgaacaatga

SEQ ID NO: 952060 - DNA, 593 bp, Homo sapiens
cctgtcggttagaacgtaaaccaacaaacaggaaggacatcaaggtgtacagatgggacascaaaacccatctgtacatcaccatcatcaaagaccaaaggtagataataccacaaaggtgggcaaaaaacagagcagaaaaactggaaactctaaaaatcagagcacctctcctcctccaaaggaatgcagctcctcaccagcaacagaacaaagctggatggagaatgactttgacgagttgagagaagaaggcttcagatgatcaaactactccgagctacaggaggaagtttgaaccaatggcaaagaagttaaaaactttgaaaaaaaattagacgaatggataacatctgcatcatgcaatatatccacataacaaacccacgcatgtaccttctggatctaaaataaaaataaaataaaatattttttaaaagatattccatgcacgtggaatgtaaaagcagaggtagctacatctattatttcagagaaaacagactttatgtcaaaaactgttaaaagacacaaagaaggttattatatagtgataaagcaattaactcatcaaggggatataagaattatac

SEQ ID NO: 952061 - DNA, 609 bp, Homo sapiens
gaagccaaaaaaagagttggcatatcacatggtgagagcaggagcaaggggagagggaggtgtcacacacttctaaacaaccatatctcatgagaacttacrtgagaacagcaccaagccatgaatgatcgatccccattacccaaacactttccaccaggccccacctccaacactagggattacatctcaacaggaaatttggaggggtaatccatactatatcattcttcccctggcccctcaagtctcatgtacttctcacattgaaaaatacaatcatcccttctcaatcattcttcaaaagtctcaacttttgcatttcagcgttactcaaaattccaaaatcctaagtctaaagtttcatctggaaatgagttatttttgcctaaaaatttgcaaaactgaaacaagttatttacttccaagatacaatgggagtacaggcatttggtaaacaattctattccaaaaggcagaaattggccaaaagaaaggggcctcaaggccccatgcaagtctaaaacctagcagggcagtcattaaaccttaaagctctgaaataatgtcctttgactccatgtcccacatccagggcacactgctgca

SEQ ID NO: 952062 - DNA, 625 bp, Homo sapiens
aagacaaggcaagtcccttctgcctataaacctgtaaaatcaaaaacaagttagttacttcctagatacaataggggtacaggaattgggtaaatacagcaattccaaatgggagaaactgacgaaaacaaaggagctacaggcccccaagaagggacaggccctgcaagtccaaactccagcagggcagtcaaatcttaaagctccaaaatgatctccttgaatccacgtctcacatccagatcaccctgatgcaagaggagggttcccatggtcctgggcagctctatccctatggctttgcagggtacagcctcccttctggctgtcttcaagccctggcattgagtgtctgtggcttttccaggcacacggtgcaaactgttggtggatctaccattctgggatctgaaggatggtggccatcttctcacagctctactaggcagtgccgcagcagggactctgtgtgggggctctgactccacatttcccttctgtactgccctakcaaaggttctccatgagggccccacccctgcagcaaacttctgcctgggcattcacgtgtttccatacatcttctgaaatctaggtggaggttcccaaacctcaattcttgact

SEQ ID NO: 952063 - DNA, 663 bp, Homo sapiens
ggctgtacactgcaaagctacaggggcagagcttcccaaggccacaggagcccaccttttgcatcagtgtgccctrgatgtgagacatggagtcaaaggagattatttcatagctttaagatttaataactaccccattggattttggacttgcatggggtctgtagatcctttgtttgggccaatttcttccatttggaatgggagcatttatccgttgcctgtatgcccattgtatcttggaagtaactaactttcttttgattttacagactcctatgcagaagggacttgctttgtctcagatgagactttggacttggacatttgagttaatgctgaaataagttaagactttgggggaatgtggggaacacatgattggttgtgaaatgtaaggacatgaaatttgggaggggtcagggcggaatgatatgtttaggctttgtgtccccaccaaaatctcgtcttgaattgtaatccccaggggtttaggcaggacctggtgggaagtgattggattatgggggcagttcccctcatgcttttcttatgatactgagttctcacgagatctgatggtttattaagtgtctgtcatttcccctgtttgcactccttctctctcctgctgccatgtgagatgttccaagcttgcttctc

SEQ ID NO: 952064 - DNA, 732 bp, Homo sapiens
ctgtagcccctttgttttggcaaatttctctcatttggagtgggtatatttaaccaatgtctttatctccattgtatctgggaagtaattaacttgattttgattttacaggctcatgcgcagaaggracttgccttctctcagatgagactttggactgtagacttttgggttaatgctgaaatgagttaagactttggggaactgttgggaatgcatgactggttttgaaatgtgaagtcattagatttggcaggggccagggtgaagtgatatgatttgtctgtgtccccacctaaatctcatcttgaattgtagctcctataattcccatgtgtcatgggagggacccactgggtggtaattgaataatgggggtggtcttttccatactgttcgtgtgatagtgagtaagtatcacaagatcggatgggttttataaagcagggttctcctgcacatgctctttttgcctgccagcacataagacatgactttgttcctcctcacctcccactataattgtgaagactccctgcaatatggaacttcgagtaaattaaacatctttcctttataaattacccaataatttacccaattataaattatccaatcttgggtatgtctttatgtattagcagaatgagaaaggactaatacatattctctaccatagaacacataagtggaaagtaagagagatgtggagttatcacaggatccagctgg

SEQ ID NO: 952065 - DNA, 594 bp, Homo sapiens
gaagaagatatcaagtctatccaagacaaacaattgctaggagaatttgccaccaccaggccaaacctacaggagagacttaaggaagttctaaacatggaaatgaaagaaaaatacttgctrccacaaaagcacacgagtacatagcccacagatcctataaatgaattacacaaatgagactacaaagcaattagctaacaacactatgacaagaataaaatttctatatcaatattaaccttgaatataaacagtctaaataatccacttaaaagacatagagtgacaaattggattaaaaatcaagacttatttttctgctgcatgcaagagatgatctaacttgtaatgacacacatatgctcagagtaaaaggatggagaaagaactatcaaacaaacggaaagcaaaaaagagcaggtatcagataaaatagactttaatccaacaatggtaacaaaggagaaagaaaggcattgcataatgatgaaggattcaattcaagaagaacatttgactattctaaatatatacacaccaacattggtgcacccagatttaaaaaatactacttctcgatctaaaaaaaaa

SEQ ID NO: 952066 - DNA, 628 bp, Homo sapiens
tttagccaaagagaaaagtcaagctggaaaaggaaatgggtcacacaaacctgcctccttcttttggttcctaaataatatgggtacaaaatgaaaagctacatgcctcccccatattttgcccacaaggaaattcctggtgcgttgttaaaacttcaccatggcaatgcagattgatagcttatctttacatgttcagccacgcctgccagacacaactatatatctgattgtttccctatcctcttttgtctgcattatcttaggtaaaatgcagattccacatttttcctctgccccttttgtttatgtgaaaactgtgtgcttctcaataccccgccatttcctctttaaatttggagccctcaaaatcatctttggagaaaggcatagacctgtcttctgagcatgtccttaactttggcaaataaatctcccaaaatgattgagatgtgttcatcattttcctctattgataatacatgtgtatgcctwacaccccaaacttttgcatgaaatattttaaaaattgattcacgtgctttttttactgcagaaaatgtagatatctaggtggtgatcatctgagatcttctttattaatttagccctttctcctgttttgcct

SEQ ID NO: 952067 - DNA, 614 bp, Homo sapiens
gtgctacctcaggggtatatgaactctctggctttgcrtcataatcttattcagagagaccttgatcactttttacttctgcaagataccacactggtcgattacattgatgatattatgctgattggatccagtgagcaagaagtagcaatgcattaaacttactggtcagacgtttgctggccagaggatgggaaataaatctaactaaaattcggtatacttctatcagtaaaacttctaggggtccagtggtgtggagcctattaagatattctttctaaggtgaaggataagttactgcatttggcccctcctacaaccaagaaagaggcacaatgcctagtagcctatttggattttagagacaacacatttctcattcaggtgtgttactctggcccatttatcaagtgacctgaaagtctgccagttttgagtggggtgcagaataggagaaagctctgcaacaggttcaggctgctgtgaagcttctctgccacttgggccatgtgactcagcagatccaatgctgcttctggtgtcagtggcagaaagagatgctgtttggagcctttggaggtgtcataggtgaatcacagcagaggccccta

SEQ ID NO: 952068 - DNA, 614 bp, Homo sapiens
gtgctacctcaggggtatatgaactctctggctttgcatcataatcttattcagagagaccttgatcactttttacttctgcaagataccacactggtcgattayattgatgatattatgctgattggatccagtgagcaagaagtagcaatgcattaaacttactggtcagacgtttgctggccagaggatgggaaataaatctaactaaaattcggtatacttctatcagtaaaacttctaggggtccagtggtgtggagcctattaagatattctttctaaggtgaaggataagttactgcatttggcccctcctacaaccaagaaagaggcacaatgcctagtagcctatttggattttagagacaacacatttctcattcaggtgtgttactctggcccatttatcaagtgacctgaaagtctgccagttttgagtggggtgcagaataggagaaagctctgcaacaggttcaggctgctgtgaagcttctctgccacttgggccatgtgactcagcagatccaatgctgcttctggtgtcagtggcagaaagagatgctgtttggagcctttggaggtgtcataggtgaatcacagcagaggccccta

SEQ ID NO: 952069 - DNA, 458 bp, Homo sapiens
tgggatacagcaaaagcattgctaagaggaatgttcatagccctaaacaactacatcgaaaagactgaaagagcacaaactgacattctaaggtcacacctcaaggaactatagaaacaagaacaaaccaaactcaaacccagcagaagaaaggaaataaccaagatcaaagcagaattaaatgaaattgaaacaaaaaatatacaaaagatacatgaaacaaaaagctaattctttgaaaatataaataaaattgatagaccattatcaagattaatcaagaaaagagagaaaatccaaataacctcactaagaaacaaaacaggagatattacaactgacactatggaaatacaaaacatcattcaggtaactatgaacacctttawgaatataaactagaaaacctagaagagatggataaattcctagaaaaatacaacctcctagcttaaatc

SEQ ID NO: 952070 - DNA, 449 bp, Homo sapiens
actcctttttctacctctttgtttcatttcccactggaaatacaatgccgtataagcttttccattcaaggcctatattgccttgaatgaaatcctagaggataacatgtcatacatgcaggctaccacttcccaagctggcacttcagctatgccttccacaggctattcagtgatctatcaggctgtcagcttgtgggtagtgcagaatgtgacatgaacagttgatcccatggttatgagcccaaatatcccttttgatataaagtttgctgcctgttctaatacaacattgtgtggggttttacaccagtggatcaaacacttaaatcttaagataatggtactgggtaaggccctgtggrcagaaaaagaaaacccatatctgggatatatgtctattcttctgagaatgaatcactgctccttccaggatggaaagtccccaa

SEQ ID NO: 952071 - DNA, 618 bp, Homo sapiens
aggtacagccagggctgtacttcccatggagccggcgagagccaggagcaggcagaagccctgctaccttccaagttggagaggagrgaactccaccctcccaagcaaagctgcagccacctggctgcaactgtggacctgggcatctctgcactcttgaggacctaggaagtcccccttcccctgcaggctcagaagggcctgctcccactacctggcctctccccactcatggaacccactccagttttggaggaaagttatggctgagcccaggcactgtcacaacccagcctgtgtgtgtgcacttggggaagcactgacatgccagccccctgccacctcggccccctctggactttgggtgccagcaagcatgggagggtggctgaaagagagctaagggtgactgcgttgcaggcctgcaggcatctcttggcacaaacaacctgggtgccatgggcactgtagatgggaggttaatggtggcaggatgcagacaggctcctggatggtcaggggtgggtccccagtgaagcaccaccttcaaaagccagggatggcctgaagcctggggactgggctgttagttccacagaccagagtgagaacttatgg

SEQ ID NO: 952072 - DNA, 732 bp, Homo sapiens
gtattgagttgcgacagagattgacccctgaaacttaaaatatctgctatctggctctttcccaaaaatatttgtcccttagctagatggcagagaattaaatcatttccagtaaagactatcttatcacttatttccaagtcattaagtaaatatgaccttggaggtgaaacttaaaagcgatctatttaaagatgcatatataaataatctttttaatgatcacggaggggaggtttgctttttttctgaaaaataacgttatcttttcagatatttaatatgtggaagcacttaactataatagtttttgttttctttttactttagatgaatagtggaaaataagcagtttttttcattgacaagtaaaattgtatatatttatggtgtacagcatgacgttttgatatttgtatacattgtggaacggctaactcaagctttttaacatatatagtacctcacatacttattattgtttgttttgtgtgtgtgtgtgcagtaagaacacttacaatctactcttttatcaattttcaagtacacaatatattaactgtagtccccgtgatgtataaaagatctcttgaacttattcctcttgtctaactgatattttgtgtcgtttgaacaacacgtctccaatatctccacctccccagcctctggyaactagcattttactctttctttttgtaagtttcactgttttgcttttttttttttttt

SEQ ID NO: 952073 - DNA, 739 bp, Homo sapiens
gttgccaagatttaaaaacagaaagatctgggcggagcgcagtggctcatacctgtaatcccaatactttgggaggccgaggcaggcggatcacttgagttmaggagtttgagaccagcctggccaacatgatgaaaccgcgtctctactaaaaatacaaaaattagccggggcatggtagcaggcacctgtaatcccagctactcagggggctgaggcttgagaatcacttaaacccgaaagcagaggctgcagtgagccaagatttcggcactgtactccagcctgggcgacacagtgaaattcagtctcaaaaaaaaacagaaaggtctgatatagaaatctatattccttgccaggcaaggtggcttacacctgtaatcccagcactttgggaggccgaggcgggcagatcacttgaggtcaggtttgagaacagcctgggcaacatagtgaaaccctgtctctacaaaaattacaaaaattagccaggtgtggtggtgcacacctgtactcccaactacttgggaggctgaggcaggagaatcgcttgagcctaggaggcagaggttgcagtgagccgagattgcgccactgcgctccagccttggtgatagagcaacaccctgtctaaaaaaaaaaaaaaaaatcaagattcctagtttattttgaaaaatggaaagatctagctatatgtagccctcatttccatatgttaatggtttgccactgtccttac

SEQ ID NO: 952074 - DNA, 622 bp, Homo sapiens
gagactccatcagcaattgctgaccccctattcttacctcggccccttcctgagtcccaccaggagccctgctcctcatctgggacatgcttcttggcccatggaggttgmcagctcaccttggtactttactactatttggtttctgtgaccaccaagctgttgcttaaaccaagccgcctatggtggcaccactttggagaattcttttttattttttgagacaggttctccctctggttaccgagactggagtgcagtggtatgtcttggctcactgcagcctcgacctcccgggttcaggtgattttcccacctcagcctcccccagtagctgggactattggtgcatgccactacacccggctcatttttgtatttttagtagagacgggggtttgccatgttggccgggctggtcttgaactcctgacctcaggtgatctgcccccctcggcctgtcaaagtgctgaaattacaggcgtgagccaccgcacccggctggataattctttagattttattccaagtgggttgagaagccatgggaagattgtaagcaaaggaataaaagttggttgcattctctttggaggatttccctcttccctggagaccagtc

SEQ ID NO: 952075 - DNA, 613 bp, Homo sapiens
accaaagccagccctggcctctggtcagtggcccacctctagacattccactccaaattcagaaatctgagcctcactgtgcccacctccacacacaaccctgacaacccaaggaaacctagattggaatgagtgcaaggaacacagggcagggagccttctccggagaccttctgggtattaactcgcaaatgattcagcaataggtctgcctgtcttgggatctaaagtaaagtcttgtttgttcaggcaattgcccagacctctttaaccatactggagagtaaagataattaacagtcactacctctgatcagttttgagttaatgattacatgccattttgagtctttaaccatactggagaataaagataatactacctctgatcagttttgagttaatgattacatgccatttggagtcccctggaggaaatgctgttgctcaccacagttctcaaaaagtgaaactgattttttaaagttctttgaacccaccaatgccaaaactactcggtttatatgcataatattgccctccaggctgatttggcttcatgggtaaaacttataacactatayatcatcttttcttgcaagtatctacatat

SEQ ID NO: 952076 - DNA, 624 bp, Homo sapiens; identical to SEQ ID NO: 949149

SEQ ID NO: 952077 - DNA, 474 bp, Homo sapiens
tccttagaatcacccttctcctatgtaaacatatttgggcttcttttctctycctgtttctctctctctctctctctctctttctacccccccccacctcccgctacacatgtacacacatgcacacacacacacagttgcaatcatcctgacacttcgcacgtaaatactttatcgtgtatctccttagaatcgcccttctcctatataaccacaatgccattaatttacacataaaatttcaagcgttaattaaatattattaaacagtctataaccaaattcccccaggatacccaatatcatctgtagaatttgtttgatccagaatctattgcatttggctatgtcactttcaatttagaatattttccccaccttttcctagtttttcacgtcctagaaatttttaaggtccaagccagacaatttatgtcccacagtctggatttgtctgcttcttcatgattagat

SEQ ID NO: 952078 - DNA, 626 bp, Homo sapiens
gtaggtctaaagtgactaatccarttcaccatcccaatatccctaaggcttttgatcccttcctatacattaaatcaagggaaatcaggcatttccagcttgctcatagtggtccattttttaatccatatttcagctaaccaaacaaatgaactgttagaaccttttttaactccctgagctgcaacattaaatgcagagtccctacttagcggttccaaatcaataaattcagcctgattcaactctatgttccttccaccattatcccacacccttaatatccattcccatgccggttctccatatttctgtttatataaattagaaaactcaagcagttctttttgagtgtagcacacctcctcatggatcacactctcaacctcacctctagggcccactgggacttcaatctagttataggtttagaagcaaacaggggtgttgggggtgtctcctgaggagagtcaacattattttgcctggcagttgcctcaggggaggccatcactgttgccttaggcagcacagggtttatctcctcagacaaaggtggaaaggctgatggcagcatgagtcgggttgtagaggggatgttgccactactggggatggggaagctg

SEQ ID NO: 952079 - DNA, 694 bp, Homo sapiens
ctaattccaagagcctagagaaattatttctcagtatttgaaatggtatgaaaaacaggcaagcttctcactagtttttgtaagagaggctagttttgcaatttcacatttaatagcaaaacgattggaagcattttcaactggggacctttttcttaagtcatgttggaagttgttccacttttatttcaagattttgaaacagagacaaaatctggttaagcattaaccaatggcaacacagtaaaaatgaaccaggctgtttcaaatcagtttcagaatcacatctatggacattatcccttttaagtttcccttgatgagagaactgttgtagtagcttctgtatttttatcaattattgaccactgtgtaaaaatataaaataaaatacatgaaaaatatactcagctaatgttctggggaaataaaacacaaatacatacacacacacacacacacacacacacacacactttagatatttttaaagaagtagcaaaggacccaacattcaccaatacagaagtttaacatccttgaagtgtgaaattgttaatkaagacattttatctaatgtggagctcaagatgaagcttacccaccatctgtgagttcatttgtacatgtccaatgacaaggaactcattaccttacaagacagccccttccatggcagaaaagttatgactgc

SEQ ID NO: 952080 - DNA, 553 bp, Homo sapiens
ttagatctcttccaggtgcctgattaaaaggtagggcaagaataaaaagtggaagggagaaaggcccatttaagtcacaatttctgctcccgaggacccygtaatcttgtggcggagaccacatttcacatataaactattggaaaaatacttgacattatacagtactccaaaaaaagcatggtactgacaatgaacggctcttgtggaagttttaggtgaggtcttacgtgaggtcagaaaagggttcagagcagtgagaacatggcattatgattatctatcccagcccctttaagcactcacttctcaaggaacccatctgcggaatctgataagaaacattctcccccagaaaagtttctgtggatggacatgttagtggcaccttggccatttactctgggcttcttactctccttcactttcccgtcgctgcctctgcactgagttactctccgtgtcttcaccttctctgcccactcctaggcacggcagtgtcaccagcccatccctctgcagctttcaggactgaagtgcgcactcaggcagg

SEQ ID NO: 952081 - DNA, 553 bp, Homo sapiens
ttagatctcttccaggtgcctgattaaaaggtagggcaagaataaaaagtggaagggagaaaggcccatttaagtcacaatttctgctcccgaggaccctgtaatcttgtggcrgagaccacatttcacatataaactattggaaaaatacttgacattatacagtactccaaaaaaagcatggtactgacaatgaacggctcttgtggaagttttaggtgaggtcttacgtgaggtcagaaaagggttcagagcagtgagaacatggcattatgattatctatcccagcccctttaagcactcacttctcaaggaacccatctgcggaatctgataagaaacattctcccccagaaaagtttctgtggatggacatgttagtggcaccttggccatttactctgggcttcttactctccttcactttcccgtcgctgcctctgcactgagttactctccgtgtcttcaccttctctgcccactcctaggcacggcagtgtcaccagcccatccctctgcagctttcaggactgaagtgcgcactcaggcagg

SEQ ID NO: 952082 - DNA, 553 bp, Homo sapiens
ttagatctcttccaggtgcctgattaaaaggtagggcaagaataaaaagtggaagggagaaaggcccatttaagtcacaatttctgctcccgaggaccctgtaatcttgtggcggagaccayatttcacatataaactattggaaaaatacttgacattatacagtactccaaaaaaagcatggtactgacaatgaacggctcttgtggaagttttaggtgaggtcttacgtgaggtcagaaaagggttcagagcagtgagaacatggcattatgattatctatcccagcccctttaagcactcacttctcaaggaacccatctgcggaatctgataagaaacattctcccccagaaaagtttctgtggatggacatgttagtggcaccttggccatttactctgggcttcttactctccttcactttcccgtcgctgcctctgcactgagttactctccgtgtcttcaccttctctgcccactcctaggcacggcagtgtcaccagcccatccctctgcagctttcaggactgaagtgcgcactcaggcagg

SEQ ID NO: 952083 - DNA, 629 bp, Homo sapiens
acattttttagaggtcatccgaatccaactaagttcaactcaacaaaaacttactggatgctcatcctgtgtttagatctcttccaggtgcctgattaaaaggtagggcaagaataaaaagtggaagggagaaaggcccatttaagtcacaatttctgctcccgaggaccctgtaatcttgtggcggagaccacatttcacatataaactattggaaaaatacttgacattatacagtactccaaaaaaagcatggtactgacaatgaacggctcttgtggaagttttaggtgaggtcttacgtgaggtcagaaaagggttcagagcagtgagaacatggcattatgattatctatcccagcccctttaagcactcacttctcaaggaacccatctgcggaatctgataagaaacattctcccccagaaaagtttctgtggatggacatgttagtggcaccttggccatttactctgggcttcttactctccttcactttcccgtcgctgcctctgcactgagttactctccgtgtcttcaccttctctgcccactcctaggcacrgcagtgtcaccagcccatccctctgcagctttcaggactgaagtgcgcactcaggcagggctc

SEQ ID NO: 952084 - DNA, 692 bp, Homo sapiens
ccactgtcaaataaagaagctaccactaaatatttgaaacaaacaaacaaaaaagtggaatttattgcttgctaagtgagggaaaactgtacttgtaagatgcagcctctctaaacaaaaggaaaattacttttatgtgaggtttggggaattatggagttcaaagatcgttggacttttggaagtggaagtgtttcgggattagttgaactttaactgtagaagcatcaccaatgacattcagaagtgtggttactgctgccaagatatctttgattgcttgggacagttttaaaatctggatttgttactgtggccaaaaaacaatcagatttttccttgaagaataggaaccttttattcttaccaccagaagttagtttacgaagtcagaggctaagtggcagtcctccttaagccatttccactttggggaaccccacagaagagtggacagttgctcaagtcaacaaacaggagctcttggggcatcagtgtcacatggttccaactttgatctggacagttccaaggcagcaagtcatgttgaaagtttcctgagaacattcctttttgatcagaggcaggacttgcttcccactacagtacaggatggagtggggctggagcacagggaatgtggggcyccccttgttgtaggcaaactctaggctcacaaagaatggtgacta

SEQ ID NO: 952085 - DNA, 655 bp, Homo sapiens; identical to SEQ ID NO: 947627

SEQ ID NO: 952086 - DNA, 599 bp, Homo sapiens
ggctgatgcttttataccaccttgaggttacagaaagaatgagggcttggagtgtggcaagacaggttatggtggtaaatcaggttatggtggtgagacagattatgagagagagagaagaggaggcccagctagcacaggtggtcctgtcatgtagatgaaacctcacaggtcgcagccctgagagagaatagatggaatatgtttctttctgaccttctaaggtgtcagactctcaattaatctttcctgtgtctggacaaggtagggcctcagagaaatgcctccacctcatcaatgcatattttctctacagatgcaaatctgccccacacagcttctctcagctattcttgtatttccagcccttctgaaaaccatctgaaatatgtcagagaagtatatttttgggtgaaatatttttgtttccttcataattttgccaaggcagcaggcataagctggaatttgtggtcaccccactcatggagtttttctgtgaatcaaaagaaaccttgcctgtaaagcacctarcagtgcctgacagtatgagctcaatcaagcttaactattatcatcattttaaccccctggatgtt

SEQ ID NO: 952087 - DNA, 533 bp, Homo sapiens
gagaggccagattcattttccaggaggaggccccagtgagcttagacaacattcaccgaaatgacggttctctctgcctggaaaacagcatcccagctcaggcttatgttataccccagggtttggtgtgtaatgacagaggccatcgatccattctggggacactctgggatcatagagcccctctcccatttttccctggtgataatcttgcccgtaaagggaaatagatagaccacgctttgaggattctgtggcaattataaagccttggaatcttgcaggcaggagactagacttctcagtgtccagcactagagagagggctgtggggagggaggtgctcctttcacaaccaagggttcagggtcagtggaggtcggcaaccctctcccctccccgtgaccccctccgcacactctaccagtggtctgaccttgggcaagktacctaccctcagtttttctcatccataaaatgggatactttacatgacatacatcacaggagagatgtgaggattaaattagcca

SEQ ID NO: 952088 - DNA, 574 bp, Homo sapiens
aaagaaggagaaaagaaaaaaaaagctcctgcttatagtaaaatgcgaataaacacataaggaatgatgaagcaagaaaatcgccatttggcagccagcacagtaataactgactcaggtgaaactcttcactgaatcagccagaaccagtgggtgaaagtgtgatgacaaacaagatgtatacagtctcaaactatttcccacaaattacttattatttacatcgagaaaaatagtaactttacagtggaaaactccatcagactccactttaaccaattatcaaagttagcctcaccagtaatgggacaaatgaacctcatgtgcctctgatttaatgcatgatggatcacttgacccctccttctgccctgccaaaatgcaaaacctcataatcaaaaagcaacttcaggcaaacacaaagtgagaacattccacaaaataaatggcctgcattcttcagaaatatcaattatcatgaaaaacgmagataggctgagacgatactaagtgccataaacactaaatgccgtgtgtgatcctggactggatcccgcatcaggaaatagaactg

SEQ ID NO: 952089 - DNA, 601 bp, Homo sapiens
aatactgcacttttccaacagtcttagcaaacggcacaccaggagattatatcccgcacctggctcagagggtcccatgcccatggagcctcgctcattgctagcacagcagtctgagatcaaactgcaaggcagcagtgaggctgggggaatcaatggcctgccattgatgaggcttgagtaggtaaacaaagcggccaggaagctcaaactgggtggagcccactgcagctcaagaaggcctacctgcctctgtagactccacctctggaggcagggcatagctgaacaaaagggagcagaaacttctgcaaacttaaatgtccctgtctgacagctttgaagagagtagtggttctcccagcacggagtttgagatctgagaatggtcagactgcctcctcaagtggatccctgacccctgagtagcctaactggaaggcaccccccagtaggggcagactgacagctcacacggccgkgtacccctctgagacgaagcttccagaggaacattcaggcagcaacatttgctgttcagcaatattcgttgttctgcagcctctgctgctgatacctagacaaacagggtctggggtgg

SEQ ID NO: 952090 - DNA, 602 bp, Homo sapiens
gaggaagccaaagagtctggagccagagaaggcatttggactcaaatgggatctattggattgtaccctattggcactaaggaactactgcctaccccccgcccmggcttctcatgcaggactatgacctagaattggagttatgttatagaaagatggcttcaagttcccctttgaggagctccacagtaaataagccatttaggagagagggtccccatttctctggactcaccattgcctccaaaaaaaaaaaaaaaaggctaaaatctccccaaaagaatggcaaatgaacaagggcaaggaaggagctatttcttagtgttctttagactttaacagagtattatgtactgctattattattttttaggttaacaaaagtaatacattgtctctagtgactccctgaatgctcctttgtagcttaatagttgaggctgaatgtagctattcagaatacctggacagctatggatggaaggggcttctctaggctaacttttgctctcttgtctcctgaataatctgaggggtggcatgggatgcagtctgttaacctcttagagcctgtacaacagaaatacattacatttgactta

SEQ ID NO: 952091 - DNA, 708 bp, Homo sapiens
ggtccatgtcctagtaacccagcccctgtcagagagagaccgtatttgataaaagggtctttgcagatgtgttttgagatgagctcatcctgggttacccaggtgggccctgaatccaaagaccagtgtccttagaagagacagaagaggagagagcaagactacatgaactacaggaagacaaaggcagagattggagggctgaagccgcaagccaaggaatgcctggagccaccagcatctggaagaggcagaaaggagcctccctttgagcttctggagggagtagggtcctgctgacgccttgattttggacttccaggctccagaactgttagagaataaattgctgtcgttggccgggcgaggtggctcatgcctatagtcccagcactttgggaggccgaggtgggcgcatcacttgagcccaggatttcaagatcagcctgggcaacatggcgagaccctgtctctacaaaaagcacaaaaattagccggatgtggtggcggcttgcctgtagtcccacgctgaggcaggaggatcaattgagcccaggaggtcaaggctgcagtaagccatgattgtgccactgcactccascctggaccacagagtgagaccctgtcaaaaaataataaaaaaataaaaataaatcactgttgttttaagtttcctggtttgtggtcatttttatggcagcccttagg

SEQ ID NO: 952092 - DNA, 742 bp, Homo sapiens
cagacatgtaagcatgggaaacatggctcagtggaccaaagtctgtgaattctcaccttgaaccacarttcactgctaacttctcaaccagtcactatcctatctcatgcttagttttgtctctaaaatgggaatagactaatattataaggtgcagaataaccaacaaaattgttcctgagaacttaaagatgcaaacagtaattaccttttaaaatttgtgaatagtgttttatagcagtaacctaatagttcaagagtgattgtgggcagggttggcctaagggaaaaatatgatttgatgtaaatgttgacagcagacatccagtcactccaaagaagggatatgattgttcaagaaaagataatcagggccgggcgtggtggctcatgcctgtaatcccagcacttttgggaggccgaggccggcggatcactgggtcaagagatcaacaccctcctggccaacatggtaaaaccccgtgtctaccaaaaatacaaaaaaaattagctaggcatggtggcacactcttgtagtcccagctacttgggaggctgaggcagaagaatcacttgaacctgggaggcagaggttgcagtgagccgagatcatgccactgcactccagcctggcaacagagcaagactccgtctcaaaaaaagaaagaaaggaagaaagagaaagaaagaaagaaaagatatcagaaagcacaaactaccataatacgcaaaaagagccagg

SEQ ID NO: 952093 - DNA, 588 bp, Homo sapiens
aggagctgtgatcctttggaggagaagaggctctctggcttttacaattttcagcttttctgctctggtttatccccatctttgtggttttatctacctttggtctttgatgttggtgacctacagatggggttttggtgtggatgtcctttttgttgatgttgatgctattcctttctgtttgttagttttccttgtaacagtcaggtccctcaactgcaggtctgttggagtttgctggaggtccaccccagaccctggttgcctgggtatcaccagcggagactgaagaacagcaaatattgcagaatagcaaatattgctgcctcatccttcccccggaagctttgtcccagaggggcaccctcatgtatgaggtatcagttggcccctacgggaagatgtctcccagttaagctacatgggggtcagggacccacttgaggaggcagtctgtccgttctctgagctcaaacactgtgctgggagaaccactgttctcttcagagctgtcagactgggatgtttaagtctgcagaagtttctgctgctttttgttcagctrtgccccgcccccagaggtggaga

SEQ ID NO: 952094 - DNA, 839 bp, Homo sapiens
cccctggatggtgctgactggccacaaagayagccctcacctgctgtgtgacttcagacaactcctttacctctctgaaccccagcttgctcctgtgtgaggtgggaaagataacaacccctgcccccaaggatgtttggaaggacagaggtcatataccaggcacacagtggcactcagcacatcatggccctagcctttattggcctctcctaaccttcatgcccctgtggggtttgtatggaagtgcccagcccagtgtctggcccacaggggtttgaaaattattttttccttttcttttttttgagacagagtctccctctgtcgcccaggctggagtgcagtggcgccatctcggctcactgcaacctccgcccaccaggttcaagcaattctcatacctcagcctcctgagttgctgggattacaggcacctgccaccacgcccggctgttttttgtatttttagttgagacagggtttcaccatgttggccaggctggtcttgaactcctgacctcaagtgatctgcctgccttggcctcccaaagtatggggattataggtgtgagccactgtgccaggcctgaaaatgttttttcttaatgagaaggatgtgtgagttaagcctgagctgttttgtcacctgctgtctgggttcctggccctgagctgcagggagcctgggggcagattttcctttcatgtagttgctgagtgcaggcatggggtgggggagtgggtaaggagagccctaaaacagcagggagttttccagactcaggcaggctgagctcctgggcagggcagtttggcaggatggaggagcattggag

SEQ ID NO: 952095 - DNA, 513 bp, Homo sapiens
ccttccccaaaccatctcttgcttggactaaccactcactttgtgactgttgtgcctactctactgccctctataaccaagccatgctgcagcagtggggtgatcttttaaaatcacaaatcagactgcatctctccccagcttcacgccctttcctagtgcacctatatttacaaagcttaccatcaaacttagtttaaaatccaatccccttatctttgcttgaaaggcctcataaaagctgccccagcccactgctctgatttatcctgtgccgctgccaacctcagccactccactaggatagcacaggacctccatgcactagcaccacctgcctggaacgcccttaccccaggtttctgcttaccatttaggtatcagtttttaaaatgtcatctcaggccyggcgcggtagttctaaccctgtaatctcagcactttgggaggctgaggtgggtggatcactcaaggtcaggagttcgagaccagcctggtcaacatggtgaaacc

SEQ ID NO: 952096 - DNA, 623 bp, Homo sapiens
aagataggtgacttctgcatttccaactgagtcttagcaacaggcagaccaggagataccctcccgtgcctcgmtcggcaggtgccacacccacggagacttgctcactgctagtgcagcagtctgagatccacctgatatgctgcagcttgatagaggaggggtatcagccattgctgaggcttgagtagcttactgtgtaaacaaagaggcctggaagcacgaagtgggtggagcccaccgcagctcagcaaggcctactgcctctgtagattccacttctgggggcagggcagagtagaacaaaacacaggagacagacagcctctgcagacttaaacgtccctgtctgacagctctgaagagagcagtggttctctcagcacggtattcgagctctgagaacggatagactgcctcctcaaatgtgttcctgacccccctgtagcctgactgggaaccactttccagtagaggccgacagacacttcaaacatgcgggtgcccctctgggatgaagcttccagaggaaggatgaggcagaaatatttgctgttctgcagcctctgcaggtaatacccaggcaaacagggtctgaagaggacctccagcaaactccaaaa

SEQ ID NO: 952097 - DNA, 615 bp, Homo sapiens
agctgccagatcactagacagataaactcaagtcacaaaacatatttttccttaaagagtaagaaatgatgtaatgcatgtctcaattaaataactgtctttgtttctctcttctgtagtatgcttccccctgtacagatctcccccgacccatgaaatacttaaaagataaccctttgttcaaggctcagtcctttggatattaatctgactgggctttctatcagacttgtctttctttttaaggctgaataaccttccattttgtgtatacatcacatttcgtttacccattcatatgtcaatggacacttaggctgtgtctaccttttggatattgtgaataatgctgctatgaacatggcttaaaaatatctttttggagtccagtttcagttattttcggtatatatccagaaataatatcactggatcatacagtaattgtattcttaattttctgaggaaccaccacacttttccatagtrgctgcaccattttacattcccaaatagaagctacagatgttccagttcttccatatcttcaccaacatttgctattttttagttgttttttttatagtagctatcctaatgggtgtgaggaaatat

SEQ ID NO: 952098 - DNA, 557 bp, Homo sapiens
ggtgtgtacagagtcacaatgaaactcctcaccaaaaaaaaaaaaaaaaaaaacttattaattacaaagggaagagttatcayttgacagcagagaagcccagcagactggcagacaccaccttcctcagttaattaaaggtaacatcaccagtaatgggatgttaaaatcactgccactcgataacatggtgaacacaaccttatttgtatgatactcctgtcaaaggtgaatgagctcaatctaatcaaaaggaaacatcagataaacccaaactgggagatattctacagagtaatttatctgcaaatgtgtcaaaatcataaaagttaaggaaagactgaggaattgttccagattgaaagagactaaagagtcatgaaaccaatgctacacataacctttgactggatcctgaagacgaatggagacaattgaaaggagtctgatgattagatggcagttttagattgatgttaatttcctgattttcatggttgcatactggttgggagaatgttcttgttgtcagaattccatgctaaagtattcagaaa

SEQ ID NO: 952099 - DNA, 568 bp, Homo sapiens
ctgggctctttactctgttccattggtgcgtgtgtctgtttttgtaccagtaccattgctgttttcattactgtagctttrtaatacagtttgaagttggtaatgtgatgcctctagctttgttctttttgcataggatttccttggctatttgagctctttttggttccatatacattttaaaatagttttttcgaattctgtgaagaatgtcattggtagtttgataggaatagcattgaatctgtaagttgctttgagcagtatggtcattttaacaatatttattcatcctatacatgagcatggaatgtttttccattggtttgtgtcatctctgatttctttgagcagtgttttgtaattctcattgtagagatattctgcttctctggctagctggtaaaatatctagtattcccaggtattttattctttctgtggctattgtgaattggattgcattcttggtttggctctcagcttggacattttttttgtatagaaattctactgacttttatatattaattttatatgctgaaactttgctgaagtggtttatcac

SEQ ID NO: 952100 - DNA, 565 bp, Homo sapiens
tcttagtcataaattctttgcctaggtaatactattcagccataataaagaatgaaatcacatcttttgcagcaaaatagatggaactggaggccattattttaagtgaaacaactcagaaacaaagacaaatactgcatcttcttgcttataagttggagataatgtgtacacttgaacataaagtgtagaatgatagtcagtagagacttggaaaggtggggactatggaaggggtgtggatgaagaaattacttaatgggtacaatatacgtgatttgggttacacatacactaaaagccctgacttttttcagtatattcatgtgacaaaattacacttataccccatacatttatacaaagaaagctaaagcaaaacaccaaaacattaactgtaggacagatttgctggcaatgcattctctgtctgaataggtgtttcacttttgaaaaataattttaggcctgatgaggtggcttatgcctgcagtcccagtactttgggaggctgaggtgggtggatgacatgartccaggagttcgagatcagcctagtcaacat

SEQ ID NO: 952101 - DNA, 571 bp, Homo sapiens
aaattgcaatatttcccccccggtgaagtcttttcctctggagtgttggcttttgttttgagctggtgaggttatggtggggtggaactttgggggctggggaaggagagaaggatccataacttgagtgcctgcaaaggagaactggaagagaggcagtatgaggaaagaaagtcagcaaggtctactggcttgtctcaatccaaggaattgggaaatgtggtggaaccaggaaagggaagtttaaaaagaggaagtcaccaaagttgacaaaccttgcccactgtcttcaaaggggaaatgcctgggaatggtattgtgtccagaattggtgggttcttgctctcagtgacttcaagaacgaagccgcggaccctcacggtgagtgttacggttcttaaaggcggcgtgtccggagtttgttcgttctgatgttgggatgtgttcggccttctggtggttcgtggtctcgtgagtgaagctcacagyggtgtggggaggctcaggcatggggggctgcaggacccaagccctgccctgcggggaggcagctaaggcctggcgagaaatt

SEQ ID NO: 952102 - DNA, 609 bp, Homo sapiens
ttaatagcagggtttggaggggaaatgagttagaagccccacacagaatccctactggggcactgcctagtggagttaaagctccctgaggcctccctagaagctgagctgatgccagcactatgcttgtacagcctgcagaaccatgatctgattaaacctattttctttacaaattacccagtctcaggtaattctttatcacaatgtaagaactgcctaatatagaaaattggtactgaggaatggggcattgctataaagatacctgaaaatgtggaagcagctttggaactgggtagcagaggttagaagactttgtagagatcagaagaagatgggaaaatgagggaaagtttgaaacttcttagggactggttaaattgttttgagcaaaacaatgatagtgatatggacaattaagtccaggttgccaaggtatcagatggaaatgagaaacatactgggaactggagcaaargtcacccttgttatgccttagcaaagaacttggctgcattgtgtttatgccatgagagttggtggaagtttcaactaaagagtgatttaggatatctggcagaagaaatttctaagcagcaaagcatt

SEQ ID NO: 952103 - DNA, 574 bp, Homo sapiens
tgcccccacccctaagacaccacctcatgattggtctcagctaaaaagtcacttcctccaaggtcatctcccattcccagggccactcacacctgatgacttgtyagtgtagaggtatagaggcctggctctggccccaattttgggtagctgtgcagggccatcttagtctctgggctcctggaggggttgactcactaggcctttgttgtcatcacagcctgacttcctctgcttccttcactcgcccacaggctcttcccaaaaatactcctaaatgaatttcatgcctgcacaactttatctcagcatctgctgaactgtgacagcaacatccagaaagcacagtctaatcctcactgaatgaggggaagttgaagggtgagtgtgcgagagatttgggtgggtacacagagccaaactatatcacatgagttatacctaatcagttattatttgtatattagtaaattattatagtttgtatttagttgcacccatcaacttactaaattctcttattgttagagtagtttatcacttcctgggctgtggtaatggattgcagagcatg

SEQ ID NO: 952104 - DNA, 565 bp, Homo sapiens
gcagtgagctatgatcacgccactgtactcaagcctgggtgacaaagcaagtctcaaaaaaataataatattataaaataatataaaaatataaaatatataatattataaaaaatataaaatttataaaacattataaataaatgtaatagccatataaagagatatagggcagagtatgggaaaagagtgcagagctctgaaaccctctctgggcacaccaccctcccagcatctcaatgtgtcctccaactcaaaagctctctaagtcccatcctttacagttttatggaggttccattatgtaggaacgactgattaagtcacttgccattagtgattcaatctccagcccctcacctctccctggaggtcaggggatggggctgaaacttccagccctctaaccccatcgttggttcctctggcaaccagcccccatcctccaggagttacctcatcagcataaactcaagtgtggatgaaaggagcttattatgaataacaaaagatgctcctgagtcaaatrggagttttgttttaagttctttgagaaatcaccaaa

SEQ ID NO: 952105 - DNA, 611 bp, Homo sapiens
atattaaaataaataaatatatatgtataaaatatataaataatataaatccccaagacaacggagaaaatgtctccagggcatgtcagaggtcttcatggcagccccttccatcataggcctggaggactaggagaaaaatttggttttgtgggccagactcagggtccctgtgctgtgtgcagcttgggacttggtgccctgcgtcccagccactccagccatggctggaaggggccaatgtagagcttatactgtggcttcagagggtgaaagcctcaagtcttggtagcttcaacatggtgttgagcctgcaagtgcacagaagtcaagaattgaagtttggaaaccttggcttagatttcagagaatgtacggaaatgcctggatctccaggcagaagtttgctgcaagggcagggctctcatacagaacctatgctaaggcagtgcggaagggaaatgtggggtcagagcccccacagagtccctactggggcastgcctagtggagctgtgagaagagggccactatcctccagagacagaatggtagatccactgatagcttgcgctatgcacctggagaagccacagatattcaatgccagc

SEQ ID NO: 952106 - DNA, 709 bp, Homo sapiens
gaggttccagaagacatacccttgatcaatgccttgtgaaatagatttatgagggcagcacttatgtttttgaagagtcctataaytggtcttctctgtatgtcagatctaacagtgggaaccaagtcactcaactacaaaatgtaaatacagtgggaataactggatcctgaggtggcaggggccaagtgatggcactcaactgtcaaaggcaaggtgggcatagctaccttaatggacagcagaggcaaagcagcaatcagaatagcctgactcatgtagagctctggcattggctaattaatcatggtgttcctagaagtgaaattgataagaagcctactgcatttctacttaatttatacaagcagaaaacttcgaagtcaaatggacaaaagactaatttgaattgtaaaaacagagaatcctgtcccctcaataaatttccagacttgagccagtttacagacccagaacgccttgaatgaaggggagcctggatccccttgaggaaggaccccactacattactgacaatttatgcagtgactctttttcccatcctttccccaggagatcgccagccttttaccagggtacctgtgcactggggaaagggaaatgatcagacattttggggatactggacactggctctgagctgacattgattccagggtacctaaaatgtcgttgaggtcctcccatt

SEQ ID NO: 952107 - DNA, 651 bp, Homo sapiens
gagcctggatccccttgaggaaggaccccactacattactgacaatttatgcagtgactctttttcccatcctttccccaggagatcgccagccttttaccagggtacctgtgcactggggaaagggaaatgatcagacattttggggatactggacactggctctgagctgacattgattccagggtacctaaaatgtcgttgaggtcctcccattaaagtaggggcttatggaggtcaggtaattaatggagttttagctcaggtctgacttacagtgggtctggtgggtccccagactcatcctgtagacatttccccagtgccagaatgcataactggcatagacatacttagtaactggcagaacccctacattggctccctgactggtagggtgagggctattatggtgggaaaggccaaatggaagccattagagatggctctacctagaaatatagtaaatcaaaaacaatatcgcatccctgtagggattgcagagattagtgccaccatcaaggacttgaaagatgcagaggtggtgagtcctaccacatccctgttcaactctcccatttcgcctggacagaagacagayggatcttggagaatgacagtggattatcataaacttaacaaaatggggac

SEQ ID NO: 952108 - DNA, 616 bp, Homo sapiens
tggcccctttatgataaggggtatccatattaaagtaaattgcctctagatgggttaagaacagtgtgtcataaaagtcaagtgaacaggtttcatttatatgtaccaccagatgctgcagtgcaagaatgttttctgtaatgtttgtttttattttttgccttgtattaatgctagtgtatttaagtttccactgtcagcccctgaagagcagacagacatctgctccttctagtacctaatccagtgccatagcaagaaattctcaactagtgaatcaatattgattggtgtagactagttaactatgttattgccacaaatgacatctaacctgagctagttatcccacaaatagtcctcacagttatgaaaagggaaccacagtgtgtgatgttccccttcctgtgtccatgtgtccatgtgttctcattgttcaattcccacctatgagtgagaatatgtggtgtttggttttttgtmctttcaatagtttgctgagaatgatggtttccagcttcatccatgtccctacaaaggacatgaactcatcattttttatggctgcatagcattccatggtgtatatgtgccacattttcttaatccagtctat

SEQ ID NO: 952109 - DNA, 410 bp, Homo sapiens
gaggctagagaatcgcttgaacccaggagtcagaggttgcagtgagccaagactgcaccactgcactccagcstgggtgacagagggggactccatctcaaaaaacaaaaaaagaatgcaatcccattcacagtagccacaaaagaataaagcatctagcaatacagctaaccagagaggtgaaagatctctacaatggaaattacaaaacactgcttaaaaaaatcagagattacaccaacaaatggaaaaacattacatactcatgtataggagaatcaatgttgttaaaatggccatactgcccaaaactatttacggattcaatgctatttttatcaaactaccaatgacatgttcacagaattagggtaaaaaaaattctaacattcatttgcaaccaaaaaaga

SEQ ID NO: 952110 - DNA, 737 bp, Homo sapiens
gctgtatttgccttttatagatcctctttggtgaaatgtctcttcatgtcttttgccattttctttttgaattaactgatgagttttgagagttctttatatattctagatttatyttttgttgatatttgcaaatatttgcagtttttctttgctctctcctctgggtctctcacagaataaaaatttttaactgtgatgatgaaactaccatttttttccctcatttatgaatcatgcttttggtgtcattgaaaactctttaccaagacttaggtcctgaagattttcttctaagttatcttctatatttttatacattttacacttaaatcttaaaccttttgaatttttgtataaggtgtgaagtttaggtcaaggtttattattattattttgcctatgaatatccaattgctccagcaccatttgttgaaaatactattctttttctatgtaattctttgtgcaccttttgatagggtttggctctgtgtctcctccgacatctcatctccaactgtaatcgccatgtgtcgggggaggggcctggtgggatgtggttgaatcatggggtggacttccctgttgctgttgtcatgacagcgagtgggttttcaccacttctggttgtttgaaagtgtatgacacttcctcctttgctctctctctcctccatcactgtgaagatgtgcgggcttgcccttcatcttctgccttgattttcagtttcctga

SEQ ID NO: 952111 - DNA, 456 bp, Homo sapiens
ccttcaagactcgggttagcagctttataggtaatggcagttctgatcataaacccaactgcatttgcgcaaaacagtaaagttagacgatctcytcctgccttaagtcctagtattcacttttcttccttagatctttgtgacctttttcttccagaatagggcacttttgtctgcattaaaaacttgttcaggcagatactctttctccaacaacttaatatagtttgggaactttcttaatgtagtttgggaacctactgcctcttttctggcagaagctgtttctcctgttatcttgactttttcaaagccaaacctttttctaaaattaccaaaccggccaggtgtggcggttccactctataatcccagcactttgggaggctgaggtgggtggatcacctgaggtcaggagtttgagagcagcctggccaacgtggtgaaaccccatct

SEQ ID NO: 952112 - DNA, 752 bp, Homo sapiens
tgacttcctctcttcctatttgaatgcatttatttctttctcctgcctgattgccctggccagaacttccaatactatgttgaataggagtggtgagagaggttatccttgtcttgtgccagttttcaaagggactatttccactttttgcccattcagtatgatttcggctatgggtttgtcataaatagctcttattactttgagatatgttccataaatacctagtttattgagagtttttaacatgaagcgatgttgaatttttttgaaggccttttctgcatcatttgtcaatagatgcatcatgtagtttttgtcattggttctgtttatgtgatggattacgtttattgatttgtgtatgttgaaccagcctggcatcccagggatgaagccgacttgatcgtggtggataagctttttaatgtgctgctggatttggcttgccagtattttattgagaatttttttttcttttattattatactttaagttttagggtacgtgtgcacattgtgcaggttagttacatatgtatacatgtgccatgctggtgtgctgcagagaatttttgcatcattgtttatcagggatattggcctgaagtgttctttttttttgttacgtctcttccaggttgtggtatcaggatgatgctggcctcmaagaatgagttagggaggagtctctccttttcaattgtttggaatagtttcagaaaaaaatggcaacagctcctctttgtacc

SEQ ID NO: 952113 - DNA, 421 bp, Homo sapiens
tccagatggctactgtcataaytgaaactgacaagatgtttaggcagcttttgaatatattctttgtgagtatgtgttttgagagagaacactcaacatctgattaatatgcaatgcagattgaccctaaatcctacccattttattttatataagtttattactcttcactcagtgctgtaaagtttaattaaagtcagtggctgcatcttgattaatctaattacttgacatgtagctcatgagcacttataatcctaaatactaagcagacatcagtttctcctattttattccatgagacaatttttttcttactatcaattatagaaaagacattttgctggatattggaaagaggtgactactgtcactgctttcagttagggatataatgggacatgatctatcctgatttagt

SEQ ID NO: 952114 - DNA, 723 bp, Homo sapiens
acattttatatttctggaaacccttcaatataaagttattacatgtaaaaataaaaagtctgttttagcgaactttttcttcacaaattatattttcctacttccctattagacaatttttgtaggctccatatgctattaatttacattcacttttagaagaattttcatcaaaagcaaaagtcttatgtaaattgattatatgttatttctacttctatgtatatatacgcacatagccacatacatatatgtaactccagaggcctgcctggactgtttgataactgtattgaacaacagcaagaaaaagctgttcaaatttcaaacaacaagttgaactgaagacttcacatctttgaattaaatagacactagtagcctttaaaaattaagcatttctactgttttaaaaaattatagccatcatagtatgaggaaaaaatgtaataatcttttttaattcttgccattttattaaccacggactccttatgccctaacttcattggtacccctttgagattaaacagaacacttaatttaaaattctgataaataaattaattacagcatttacttgaggtactctttcacctttcaagaaatattttgagaattcattagctaaatattgctataatgcaggctagtaataaayggaaagaatgaattcattgtaaagtttaaactaatgatggtatgatctggaatttttgttaa

SEQ ID NO: 952115 - DNA, 603 bp, Homo sapiens
ggcgtggttggagagtagctgggacagatgggagagtccctgagggatggtgaagacatgagagagamtggggagtaacgcagtgaaattggtgagtttggtggtgatttctgggtgcctgcaacggactccagctggagtgtgggtgtgtttggagagtagctgggacagtcaggcgagtccctgagggttggagataaggacgtgctagagactggggagtaactcagtgaaagtggtgggcttggcggtgatccctgtgttcctggaactgacccgctctgaaatgtgggcgtggttggagagtagctggaacagactggagggtccgtaagggctgggggtgaagacgtgagagagactggccaggatctcactgaggtctgtgagtttgtaggtgtttctggggtgtggggtacagactcccgctgaaatctgggcgtggttggagagtagctgggacagacaggagagtcatgggtggctgggggtgagctgctggatgatggcagtaagaacatatggtatattattgatgaatgaggtgactgtgaagaatctccagaggaggacacgggagaacacaatgacatgagtgactgt

SEQ ID NO: 952116 - DNA, 596 bp, Homo sapiens
tgaacactgtgagttgaacgaaaacatcccaaagtagtttctgagaatgaatctgtctggttttttatgaaamtgtttacttttctaacataggcctcaaagtgctttataaatccacttgcaaattctacaaaaggagtgtttcaaaactgctctatcaaaagaaatgttaaactctgtgagtagaacacacacaacacaaagttgtttctgagaatgattttgtctactttttatatgaagatattcctttttttacaataagcttcaaagcactctaaatatgcccttggaaattatgcaaaaagtgtgtttcaaaactgccctatcgaaaggatggttcaactcagtgagttgaatgcacacatcacaaagaattttctcagaattcttctgtccagttttataagaagaaatcccgtttccaaagaagacctcaaagaggtccaaatatccacaggtttactttacagagtgtttcaaaacagctcttacaaaagaaatgttaaactctgtgagttttacacacacatcacaaaattgattctcagaattattctatctagtttttatatgagatatttcctttcataata

SEQ ID NO: 952117 - DNA, 532 bp, Homo sapiens
ggcttcaactttgcttggatttttaaatattttccttgcatatgtaaatagaatgtggtgagttttagttcaaaattctctgttgagaataataaatgcatgaaataccttaaagctctgtgaagacttgtaacatggcagcaatcaaatggcttataaaaggatactttgaatgtggataaattgaattcagtcaatatttcagtggaatttttggctaattgcttgaattgaattgaattatactactcaattgaataatattttctcctcctccttctccccttccttcttccttctcttcctcctcctcctcttcttcttcttcttccccttctcctcctcttcctcctcctcccccttcttctacttccttctcttcctcctcctcctcttcttcttcttcctcttctcctcctcttcctcctcctccctcttcctcttcttcttcttcttctcctcctccttcttcttctccccttcctcctcctcctcctcygtcctcttcttcttcctcttctttttcttcttc

SEQ ID NO: 952118 - DNA, 640 bp, Homo sapiens
tccctcccctagccaagggaagccgtgagggactgygccatgaggaaaggtacattccggcacaggtactacgcttttcccatggtcttcacaaactgcagaccagaagactccctcgggtgcctacatcaccagggccctgggtttcaagcacaaaattgggtggccgtttgggcagacaccaagctagctgcagtttttttcataccccagtggcacctggaacaccagcaagacagaatcattcattcccctgaaaacggggctgaagccagggagccaagtggtctagctcagcagatcccacccccacagagcccaacaagctaagatccactggcttgaaattctcgctgccagcacagcagtctgatgttgaactgggatgctagagcttggtgggggaaggggcgtccgccattactgaggcttgattagatggttttcccctcacagtgtaaacaaagccccaggaagttcgaattcggcagagcccaccacagctcggctaagctgctatagccagactgcctctctagattcctcctctctgggcagggcatctctgaaagaaaggcagcagccccagtcaggggcttatagataaaactcccatctccctgggacagagcacctgggg

SEQ ID NO: 952119 - DNA, 621 bp, Homo sapiens
caagatctctctgaagtctctttctctccttataaagataccagtcctgcagcattasagtcccacccttgtgacttcatttaaccttaattacccccctatgctccctatctccaaatacagtcacattggagagtaaggctacaacatatgaattttaggagggcacaattcagtccataacaatcccctagcatgcctatttttctgtgctttttggtcttccttccacagcctgccatggcagttctcccatttctacctcattcagtggtgcccattggtttctccaagcttccaacaatgtgtgtaacaccatctcccaagggtcctgccaaggtttaaaatctcatatcatagatgagtgggcatctatcaataaactctcccttagccaactttatggcttacctcctgaattagtttactcgggctaccagaacaaaataccgcaaactgagtggcttccaacaacagaaatttattgtctcatggttctagaagcgggaagtctgaagtcaagatgttggcagggccatgctccctctgagactctgggtagaatccttccttgcctctttctagtttctggtggtgctgccaatgcttggtgctccttgg

SEQ ID NO: 952120 - DNA, 554 bp, Homo sapiens
ccagaccggtttgccatctcgggagaggctgcaaggggcaatcccagggaactaaaaaaacaaatcccagaggcatccccagcagaggagccagctccctccagccctgctcckccaggtccaccccatcctccctatccagcttcagtctctcacttgccccctcctagaaattctcaccctagacaagccccagtctcattctttcccctccaacagatgcctggtgaatttaccccataaggtccaggtactcttctctctacagaacttgaagcaaattgagggggatcttggcaagttttcagatgaccctgagagatatatagaggcttttcagaacttaacccaagtatctgagctctcctaggaagacgtcatgttactttgaaccaaaccctgactaacactgagaagcaggccactctgcaagtgacagagagatctggggatgaggtttgtatcatacgtagcacccaggaaagggggtgaatattatccaactggaagagaaggagtatcaatgaatctccctaaatgggatcccaatgaca

SEQ ID NO: 952121 - DNA, 554 bp, Homo sapiens
ccagaccggtttgccatctcgggagaggctgcaaggggcaatcccagggaactaaaaaaacaaatcccagaggcatccccagcagaggagccagctccctccagccctgctcctccaggtccaccccatcctccctatccagcttcagtctctcacttgccccctcctagaaattctcaccctagacaagccccagtctcattctttcccctccaacagatgcctggtgaatttaccccataaggtccaggtactcttctctctacagaacttgaagcaaattgagggggatcttggcaagttttcagatgaccctgagagatatatagaggcttttcagaacttaacccaagtatctgagctctcctaggaagacgtcatgttactttgaaccaaaccctgactaacactgagaagcaggccactctgcaagtgacagagagatctggggatgaggtttgtatcatacgtagcacccaggaaagggggtgaatattatccaactggaagagaaggagtatcaatgaatstccctaaatgggatcccaatgaca

SEQ ID NO: 952122 - DNA, 703 bp, Homo sapiens
aatccttggctttatcaggagatcaagcttatgtgaagctccaggatgcaggattcataacaaagggtatgcaagttatgtgataatgacaatggcggatgtttttcaagcccttcctatgtaccaggcattgtgctaggttgcatgagctccaggatacagaattcagaccaaaggctgtgggagtctgtaacagtaattgctgatgtctgtcaaggcctgagcccttcactttgtgctaaactcctttcatacattgtttcatttaatccttattgcagccctgtgatgcagtatttaggcttgtggttgctttagagtcaggaccttgaccaaggctatatattaggtcatcaggagttgtcctaattttctttttcttttttttttttttaatttcttttcttctttttttttttttttttttttttttgagctgaagtgcagtggctgtgatcttggctcactgaatctctggttcaagtgattctcctgcctcagcctcaggctgcagaaatttgcataattaagtaagagttgaattttaatagctgagacaatggagaaaatgtctccagggcaktgcagagaccttcgtggcagcctctcccatcacaggcctggaggcctaggaggaaaaaatgctttttggagggcaagcccaggaccctgctgctgtgtgtagcctcagagcatgatgccc

SEQ ID NO: 952123 - DNA, 800 bp, Homo sapiens
actacagtaggtgagcccaccctccagtttttgtttttaataacatttgttatttctctcactatgaaatcaatgtttattttagaaaataatagaaaggcaaagaaaaccctactcagagacaaccattggctgttagctttttaggtgttttcttaatatccagtaatttacatatatgtttattttcaaagtgtgtaaagtatagaaattatagaaaacagtaacagctcccatttattatggtttgcactgtaatcttactactcaaaggaaacactgtaaaccatttgatgcatttccttccagtcaaccaactttgctaggcttctctttttctttttctttgtagtttatttatgaatttatgctgtaattctttagcaggcactcccattgtgcctgggactgagctgtgagctttatgtggaatctcattcactcctctcagtaactgtatgaggaggcagtgcttttatcctcagtataaaatagagatggaaaaactacgtgaaattatgtttatttagttttgagatggcatctcaccctgtcacccaggctggagtgcattggcacaatcttggctcactgcatcctccatcttttggcctcaagcaatccccctaccttagtctcccaagtagctgggactacaagcacaccaccacagcaggctaatttttttgtatttttggtagagacaggcttttgccatgttgcccaggctggtctcaaactcctgaactcaagcagtccrcctgcctcagcctcccaaagtgttggaattacaggtgtga

SEQ ID NO: 952124 - DNA, 609 bp, Homo sapiens
tcccccagccccccagctccgttccatagcccctggccctgcccaccaggcacgcactcacccagcagctattcctccaatacctgctggagtttcctacccaggccaagtcagagtccgcctctccccttcctggtgtgttgtgtgtgactctttcagagccctgatcatggagttactatcatactacagttaacagcttctgcctcagtctcccccaatagacacgagctcccaggcttctgagttgaacacatctgggttcaaatccaccatatactaggctgcactgccccaaggaagataattaatttttctgagtctcagttcacccacctgtaaacaggaacgatgacacctagctcatattcaactacagcatggagacctccaaaagactaggttagatctccctataattacacatcagtgcagggaccgtatttccctcatatccccagttcctactacagcacctggcataaaacatatgctcaggagtgccagaggaagaaaatgtgtggttcttatccccatgtttctyacagccagcccttccctccattccacgcggctctgaaaccaccacttcaaagggctgaccagaga

SEQ ID NO: 952125 - DNA, 601 bp, Homo sapiens
ctctcttttctcctccctcacatccaatgcagttgttcctaaattgtattatttttacttgaagtggcctatatttgtgacactgtgggtttagtataacatagataattagtaagttagtacaatkaagtaatgacttatactctcaattagttatgctcctaatcctcatcctgcccctttgttttgtaatttttctttttcaaagtatttccagttgttatctcagtctactattatataaactatcttgttttattttcacatacatcatttagggaagtagaaaggtgtggtagagagttcgagttatgtgctttttacgcttgctctcatttagttttcccaataatggtatgaggtagatattcttgttcctgttgtacagatgaggaaactgagcctgagaaggtttagtaccttttctagttgcacacagttcgataagtgtcttagtcagcttaggctgtcataacaaaataccagagactaggtccttaaacaacataaatttattttgtcacagttctggaggctggaagtctgagaacatgaaggcagcatgatcaagttctgtgagggctctcttcctgccttgcag

SEQ ID NO: 952126 - DNA, 620 bp, Homo sapiens
ccctcaagcagaacatatgtaggaccagttttctgagtgccttatccagattgagaactcaggaagtctcctcctccccgggaatctggagcagggaaactgcccggggaagaatccttgcttgagagagagcagcttacttgccccgtgtccacaggcctccactaactggaccgccactggcccgaatacaccctcctctgcctgggaacaaaaagtccatccacctctaccattaagctcccaatagctgcctgtcctgggtctcctctccaccccaccccaagacgctgaatcatcccagctcttctgcagctcagaaaaacggataaaccagtaggcaatgggtgagggaagcatctttggaatgtcagcctctctgacagcaaagaaacagccaagagccattcgcattcgcctagttccttacatcagaaagaggaattgagctaataagcatttctcaattcctactccagggccaagctcccccacccctaagtgytaagttcctgaaattgcatttacatttttaatagcaatctttttcaaacaaggggaaaaaagcatgatttagatttttcatgtttgggagatgtgaaatccttcctgcttcccag

SEQ ID NO: 952127 - DNA, 742 bp, Homo sapiens
aactagaataatcagtttagagaagaacataaatgacctgatggagctgaaaaacccaggacaagaacttcgtgaagcatacacaagtatcaatagccaaattgatcaagtggaagaaaggatatcagagattgaagatcaacttactaaaataaggcaagaagacaagattaaacaaaaaggaattaaaaggaatgaacaaagcctccaagaaatatggtactgtgaaaagaccaaacctacgattgattggggtccctgaaagtgatggggagaatggaaccaacttggaaaacacacttcgggatactattcaggagaacttacccaacccagcgagacaggccgacattccaattcaggaaatacagaaacaccattaagatattcctcaagaagagcaaccccaagacacataatcatcagattacccaaggttgaaatgaaggaaaaaatgttaatggcagccagagagaaatgtcaggttacctacaaagggaatctcataagactaacagcagatctctctgcagaaacgctacaagttagaggagtgtaggggccaatattcaatattcttaaagaataaaattttcaacccagaattttatatgcagccaaactaagcttcataagtggaggaaaaataaaatcctatacagactagaaaatgctgagggatttttttcascaccaggcctgcctcctgaaggaagcactaaatatggaaagaaaaacccag

SEQ ID NO: 952128 - DNA, 420 bp, Homo sapiens
atccatctagtgcagggtctgcaaaatatctcaagcactgatcttaggttttacagtagtgatgttatccccggggccaatttgggaaggtttatactcttggagtcagaggctgcatgacccctaaacagtaatttctaatcttgcagctaatttgttagtcctgcaaagacagactggtccctaggcaaaaggggggtctcttcaggaaagagctgctattaattttgtttcagagtcaaaccatgaactgaattccttcccaaagttacttcagcttatgcccaagaatggacaaagacagcttaaagrttagaagcaagatggagtcaggtagatatgatttctttgactgtcataatttcctcagttataattttgcaaagacagttttatcataagtacaaagaacagggcctg

SEQ ID NO: 952129 - DNA, 592 bp, Homo sapiens
aagcaaaacatttaaaagacgaagtatttcgtttggaaagcaaggagaaagcccaaataagctaaaacttaaaccggaatgctctaaaagttaatgaaatcaccaacatattcagcaatgtaaattcggttacatcaacgtaaatcatgtgttttcacatagctgaaaggtaaaaattagcattcaaaattcttctccgttcctgaagacacgtccaatattcacaaaggtaaactctagctcaacatcgcccacactccaggtgtccttaatcctattaaattctaaaaatgtttccctaaccctattttttacaagaatcttacaggtcataagtttaaaagggggaggggggagagggtgaaggcttaatcggtatttaagagtcactgactcatcgaattaagattcaagagcagtttgctgcaggaggtgctcccacacattagtttccaagtgaaacagctataaaggaagtaggatggatactgaaggtatggtgactggtatgtgagtgaaaaaggacgggacaggggkctcacaggcaaaggggtagtttctactccacttccatccatccacattattccct

SEQ ID NO: 952130 - DNA, 590 bp, Homo sapiens
ttgaaaaagaatactatgaacaactttatgcaatacaactgaaaatttagggaaaagtggacaattccaaaaataagtaacattaaaattcagtcaagaagaaatgtaaaacttgaacaaacctactaaagaaattgatccagtagttaaaaacctattccctcaaaataaactaaaaataaacaaataaaaccctggacacctgccctagatggtattatcagcaaatcatatcaaacattcaaaatgcagataatctctatttacacagactattacagatgacagaaaaagaaattattcccaactcatataatgaagctaagaaaacccaaaaaccaagccaaacaagtacagcatgaacatctcacttactaacagattttaaaaacctaaataaaatgttagaaaatacaattttacaaaatcttaggcaacaccattgtcaagtacaagttatccaagtaacacaaaacaatatcatactagaaaatactttagtatgattatttaattcatcacattgacrgactaaaggagaaaaactgcattatcatcttaacaggtacaggaaaatcactctttaaaat

SEQ ID NO: 952131 - DNA, 643 bp, Homo sapiens
tctcgggtatttactccagattattaccccaataacgccacttcatcgttagtgtatatatatatatatakagagagagagagagagtaataaaatagctagcactgactgagtactaaccttgagctgtatatcaaactctttattacatattacattttattacattttattaatgtaataactcattattacatttaacccctatagtaatcctatgagatagatattattgtcatttccagtatataaatgagacaactgagcctcagatatagtactttatgtaacgaacgtggcatggcttccttcaaaatctgctctcttgacccttctgctgtcctgaatatcattaagaaacacaaatatgttatacaactaaaataaaaccatcataaagcagcttatataaccaaaggcttctcagcctccacatactggctgttttttttaagcaatattaaatgaaagaatgttctaataaaatcagaaatgtcatataatcttccgatgctcctaaaaatggaatgtgaattatggtcaaactattaataatatattaggctatccagagaaagaaggcaaagatagaggtgtgacttgctttttctctggatagataagatcgtcagaccaaatgaaa

SEQ ID NO: 952132 - DNA, 590 bp, Homo sapiens
atatttatttttttacttctgaagcttactttggttgaatatgaaatttcaggttggagctcttcttttaaggatgttgaatattggcccctaatctcttttgacttgtaggatttcagatgaaaggtttgttgtttgtctgataggctttttttggaggttacctggcttttctccctagctgcctttaaaacattttttctttcattttgaccttggagaatctcatgattatatgtcttggggatgaccttctcatgggttatcttactggggttctccacatttcctgcatttaaatgttggcctctctatctgagttagggaaattctcatggacaatatcccaaaatatgtatttcaagttgttttcattatccttattactttcaggcattctctttaattgtagatttgctttcttacataatcccatatttcttagaggttttgttcgttcctctttattcttttttcactcctcttgtcagtcttatttcagaaagcgagttgtgaagctctgagattctttcctctgyatggcctattctgctgttaatgcttgtgattatattatgcagtttttgtat

SEQ ID NO: 952133 - DNA, 732 bp, Homo sapiens
ttgtccatctctctatctccttctctgccaacctagcccaagctaccatcgtctgtcaatagcctcccaggtggtctgcccacgttcactcttagtttttcgccactgtgcagccagaatggtatttttgcaaacaaatctgatcttgccactccccctgtaagaaacattaacagcctcccagggctcttacaactcctctactggacctcagtttggcccctgctgacctcccaagcctcaagccataataacctcccacttaatccccaaggggcaaccacaaagattttggttcctcagacagaacacattcccttgattacagtgactgttcacacactgtttcctgggcctaaaatgctcctttcctctctttgcttggttaactcatactcttcctccaaatctcaaataaattatcattcattcaactcaacaaatatttactggacacctactacatgccaaataccgtgctaggtgctggaatgcagcaacaaacaaatcaagcttctgtcctcaggaagcttacattctcctagggggagggggagaggagaaaataaacacatataaaatgtaccaggtggtcataagtgccccgaagacaaaaagggtagagggagtgaggggaggcaaatgctattgtattaatatctwtagagaaggtatctatgataaagtgttatcttattttaacagagacctgaaagaagggtgggagccaca

SEQ ID NO: 952134 - DNA, 619 bp, Homo sapiens
ataaattttaacaaaactttcggatgaaactttacctagtcctttgtaaacagtatgaataaccttccttataatttaacttttacacaatgtatataaccacatagcattctctagtaataatataccatagttctgttcaacaattctctattgttgagatatttatgttgatgctaacgttttgttattataaacaatacaatgaagaacattcttgtagctatatctagtcctgattactttaaaattttttttcaattttaatagctttaggggtacaagtggtttttggttacatggatgaattgtatagcggtgaagtatgaaattttagtgcccctgtcacccgagtagtgtacactgtaccctgcctcccactctccccctttctgagtctccagcatcctttataccactttgaatgtatttgcatacccacagcttagctcccacttataagtgagaacataacagtatttggttttccattcctgagttacttcacttagaataatggyctccagttccatccaagttgcagcaaaagacactctcattcttttttatggctgagtagtattccatggtgtatacaaaccacattttctttatccac

SEQ ID NO: 952135 - DNA, 725 bp, Homo sapiens
aaatcatgaaccatctgtgaaccaggccctagtcttttcttccttgtcaacagaccatagagaactcmccaagaggccatcagtgtaggctgggggagagaatgcaggggagagaggagaccatgggcatttgagccacttcctaatgtaacttacttgtgccttcaggacctgctggagcctgatcatatatataccccttccatttgatgatggaatgctgctgtgcatgacccaccttatggctagatcggtcagaaagcactcagttcatgataggcagttcaggtcacatggtgacttgacggcccatagacaaatgttcagtttccaccaaggcccagtaacagaccatgagctatctctcaaaaggggaggagtagttatctgcagaagatgacagggcctttctccaaaattctagaggcctcctctgtgattcacctactggggcctgcaaaggctccaaacagcagccattgacacctcaagcaccactggatctgctgcatcatatggcccaagtggcagagcagcttgcacagcagcctggacctgtggcagagccttctccttttctggaccccactcaaaactgaaagccttttgtgtcactcaataaatgggccagagtaacatccaaataggcctactaggcgttatgccaatttcttggttgtaggaggggccaaatgcagcaacttatccttcaccttagaaggaat

SEQ ID NO: 952136 - DNA, 617 bp, Homo sapiens
tttttaagttgaggaaacatatttatgatcaggaaaaaaatatatttgtaatccattttctccctttcacttccttccccccaaccctctgcctttctcctattgagagaaaggmaaatttagtgggaccgtcccttcctcacccacaccttaagtgacatgctatcttttgtggctgcttttacttttttttttttttttctgagatggagtctcgctctgttgcccaggctggagtgcagtggtgcgatctcggctcactgcaagctccgccccctgggttcatgctattctcctgcctcagcctcccgagtagctgggaatataggcgccccccactacgcctggctaattttttgtatatttagtagagacggggtttcaccgtgttagccaggatggtctcgatctcctgacctcgtgatccacctgccttggcctcccaaagtgctgggattacaggcgtgagccaccgcacctggcctgcttttccttttttaacattgtgcttgtgagtgcatgtcaatgtggttgtgcctgagaaatgttgacgtaaatatggaacattacgtggaagatgtaaatatgggaaggtgttgcacttggctgtgccaact

SEQ ID NO: 952137 - DNA, 573 bp, Homo sapiens
tttctaagtcttgtttaaaagtctgtctgtgctcctagcatataaaagttttctctgttttttgcttctattgacatattttttcacatttaagtctttaacctgtttagaatctcccttcgtatttgatgttagttaaggatctagtttgcatttctcaacaaaatgatgatattaggtaataatctggttactattgctccacacagccaatttcatcaacaccatgtactgaaaaaacatttaatttgtcaatggatttttcatgccttctttaatatatgttaaattctgatacataagtggttgtttctaaattattctattccactggtctgttagttcttgacctcaaacctgctaaaatcacatgttaattctgttaatatcaggcagggcaaatttcaatatactcttctttttttttaaggtttaatgtttttaaagttgacttttattcacatttaagcatcagtttttagaacatgtggaaaaagtattgaaaatataagaatatctaataaaaataaaamaacaaacaaaaaacagtaagtttatcatcttccttgaaag

SEQ ID NO: 952138 - DNA, 583 bp, Homo sapiens
gctgggggcggggaaggagcgtccgggagtgggccgtgcccccatggattccagaaacccgcggcccggagtcgcggggcgtcccgagggagacctggcccctggtgggaggcgggcgctcctcgagggcggggagttggcgggaagaggacgaggccgcgctcaccggattcagacccagaaaccacttcctccaggcatcccggcaagaaacgggcttcggagacggcggccacccctctccctgcctaggagtgcgcccgccgcagcacccggggcctgaacgcaacgggagctccagagcccgcgagtcccagagctcaggatgcaggatccgttcctcttgaggcctacctgggaattccgtgaacgtcaagccaaagtgggaccctagggattcgctgacccggttctggattcacgccaattgcctctcatttcagagaacattgaggtagccaaggttttccagaagcctcgcccactgcatctgtgctctcctgctcggtgtttcctcctccagcaccaagctccgggtgcagcctcctctctacctgagatgcgacytcacacctccgtttgc

SEQ ID NO: 952139 - DNA, 615 bp, Homo sapiens
ggaaacaaagcaaaaacccagttttkttctttctcaggttgcctctgggcaggtgaacagctatgtctagaatgtaggtggtgctttggcaccgtaaacctgttcatggaaaggaatttagtttgcatgctctactggttgccagactgaagtctgaaaacccccttcattaaacaatgactggactgttggtttttgctttttccccttaattaaatgaaaacctagctgtgcatcccctgaccaggttatgttcttttgagtccagtactgtagccataaacacaacctaagatgatcccaggagacacaacgggaaagaatgtctttaagtgtacatggtgttctggtgagagtgatagatgaagcttcgggagaagaggggcagagatgaaaaaacggtacccacagatgggtaccaccatgtggcagccaagatagattgttccaagaacctcttaccaggaagcccacatgcagagccagatatctgaggcttctggctataaattatggagtcacaccagtttgggtgaaggagataaagcaggtgtgacaagaagaagcagcggtcactgagacacatttggcagagatattagttcattgtctgtc

SEQ ID NO: 952140 - DNA, 614 bp, Homo sapiens
gctataggaggccttaagaaaatatattcccctgtcacctgactcattagagggtcaattgatcctaaaagataagtttattacccaatcagccacagatatcaggagaaagctccaaaagtgagccctgggtcctgaacaaaatctagatgcattattaaacccggcaaccttggtgttctataatagggatcaagaggaacaggctcaaaaggaaaagtgagatcagagaaagtctgcagccttaatcatggcgctaagacaaacaaaccttagtggttcagagaggacagaaaatggagcaggccaatcacccagtagggcttgttattagtgtggtttacaaggacactttaaaaaagattgtccagtgagaagccaccccctcgtccatgcccgctatgccaaggcaatcactggaaggtgcactgccccagagtgcactggttctctgggccagaagcccccaaccaaatgatccaacaacaggactgagggtgcccggggcaagtgccagctcatgtcatcacactcactgagcccyaggtatgtttaatcattgagggccaggaaattgacttcctcctggacaatggcggggctttctcagtgtt

SEQ ID NO: 952141 - DNA, 616 bp, Homo sapiens
caggatcgccttttgaagagtcaattacacagtcaactatgtggcaagagttcarggctggagctgtgtctatcagtatgttgcatatcctttgaatcagcatctaatacattgtgctgtttctcccatagtcaggattcatgggtccaggaatcaagcaagaagtggatatgagattgcctccactagcagatacccctaaagactgaatagtgaaatttgttgattcctgttttttagttctgctggtctataagttttagctccaaaaaaggaaatgcttccactaggagacacaaccaccactgaactggaagttgagactaccatctggccgctttgggctccttatgtctctaaattaactggtaaagaagtggatgaatgtactctctggggtaattgatcctgattaccaaggggatattggactgcaaagagtatgtctagaatacaggagctctcttagatgtctcttaatattaccatatcttgtgattaaagctaatggaaaactataatatcccaatttaaacaggacacctaatggctcagaatctttagaatgaaggtttggtttaccccaccaggccaaaaagcaagaccagttgaggag

SEQ ID NO: 952142 - DNA, 477 bp, Homo sapiens
ctcaaactttctatggctcccccttccaagctggcgaattgaaagtgtcatcagctattataaagagggaagagaaatgttctataccatcgttttctgattttaaaatagtccctgtcaatcactctaatcctttctatccttgacagctctcttctttcatcttcctttcaagtttttgctttcctctcttaatgactccaagacagcataaaacacaatctggtacagtgtcttctgtctcatctgtttcagaaggtaacacagactgttaactttctactgtatctttatgcaggaggcgctgcagccctcaacctttcagtgaagagatcatttctccttcaacrtgtattttacaactttctacgtaatagtaactgaataaggatctattcagaaacataaataacaaggccaggtatggtggctcatgcctctgtaatcagtcctgtaattccagcactttgggaggcc

SEQ ID NO: 952143 - DNA, 617 bp, Homo sapiens
gtgcaatgccagaataggtttgggagagactatcaggagtatagcatagtttgagatgtttaatcatayccaggtagatacgttgagtacataattggccataggactctagggtttcaagaatggccaggactgaaactgagagttgagaatcatcgatatagagctgataggtcacaagggaggaatggaagccagagaggatcatgggttgagccccggggcactccaatattaagaaagcaggtataacagggtaaaacagcaaaggagattaacaaggagtgactaataaattaggggcaaagcaagacagcacagtacccgaagaccagggatacagggaggatgaagtaaccaatactgtcaagtgttgctcatagatcaagcaggaagaagattgagaatttactaatgaatttgagaacatgaaggtaattagtgacgctgataagagaagctttgggtatagttggagcaaatgcttgatgaaaatgggcttcagataaaatatgaggggagaaataagaacaattatttaaaggggttttgctacaaagaagagtaagaaaaatgggactgtagtttaggagatgagtagtgaggccaaaaaaaat

SEQ ID NO: 952144 - DNA, 498 bp, Homo sapiens
cttcagcctcacctatggctaaaaggggccaaggcacagctcargcccttgcttcagagtatgcaagccccaagccttggtagcttccacatggtgttgagcctgtgggtgcacagaagtcaagaattgaagtttgggaacctcttcttgatttcaaaggatatgtggaaaagcttggatgtccaggcagatgtctgctgcaggggccctcatggagaacctctgctagggaagtgtggaagggaaagtggggttggagccctggcacagagtccccactgggacactgcctagtggagctgtgagaagagggccactgtcctccagaccccagaatggtagatccaccaacagcttgcaccatgtgcttggaaaagctgcactcaatgccagcccatgaaagcagtcatgagggggcctggatcctgcaaagccacaggggcagagctgctcaaggccatgggagtctccttcttgcatcagcatgacttgggtgtg

SEQ ID NO: 952145 - DNA, 498 bp, Homo sapiens
cttcagcctcacctatggctaaaaggggccaaggcacagctcaagcccttgcttcagagtatgcaagccccaagccttggtagcttccacatggtgttgagcctgtgggtgcacagaagtcaagaattgaagtttgggaacctcttcttgatttcaaaggatatgtggaaaagcttggatgtccaggcagatgtctgctgcaggggccctcatggagaacctctgctagggaagtgtggaagggaaagtggggttggagccctggcacagagtccccactgggacactgcctagtggagctgtgagaagagggccactgtcctccagaccccagaatggtagatccaccaacagcttgcaccatgygcttggaaaagctgcactcaatgccagcccatgaaagcagtcatgagggggcctggatcctgcaaagccacaggggcagagctgctcaaggccatgggagtctccttcttgcatcagcatgacttgggtgtg

SEQ ID NO: 952146 - DNA, 481 bp, Homo sapiens
gataagagaggggatcggctgtgggacagccaaactccaggggaagatcatcttcctactccatcccccttccagctccccatccatcctgctgagagccacytccaccactcaataaaacccctacattcatccttcaagtccatgtatgacctaattttttctggatgccagacaaggacttgggtaccaagagggtccactgagctgtctaacacttaagctgtctgtggacagcaaggctaaaatagcacactgtaaccggtccccacctaggcttcaggagtcacagacatgcacccctagacacaaccatggggccagagcccaaaaagaacttgccctggctcctgcacctgcccatctgcatgctcctcctcccataaggggtttgagcacatggcggccacacacaagccacacccctgtcgcatgtgctgcaaggggggtcagggaactctcccatttcaatgatgacttt

SEQ ID NO: 952147 - DNA, 603 bp, Homo sapiens
acacgtcaggcccagcgtgccctaaagacagtctcaaagtgcagaatacagataatagtatgatatagtaatagtagaacataaagaaaagactctggagtctgaaggtatcatgggtatccctccaatartcatgaaaccttgtgcaaattatttcctctaggtctcattcctcttttccaaactaggggttggtaattccatccatccattcgtccgtccatccacctatctatctgtacatccatccaattatttagagagtagctctagagataaatgagataatgtgtataaaatacttagtatactataagcaatatagaaagaattcaaaaataaaaatgactttaaaatcttaatcctcaccacatccctctgtgatgtaggtattattatctccatttaacaaagtaactaatgcttagaaagaatgactaactttctcaatatcacataactaataagtgatgatggttttgtccttggctcttaattaccctactatattgattatttatttatttatttttaattttttcagcttttattttaggttcaggaggtccttgtgcagatttgttacatgggtaaaatgcatgt

SEQ ID NO: 952148 - DNA, 598 bp, Homo sapiens
attgccttggcatagtggacatggatgagggggcagcttgtttctcattggacaatcttttttaaagtgtcctagtaaaccatactgrtaacaagtcttaccgggtgtttggcctgctccattttctgtcctctctgaaccaccaaggtttgttggtctgagggccatgactaaggctgcggcctttctctgatctcgcttttccttttgggcctgttcctcttggtccctattataaaacactgaggttgccaggtttaataatgcctctaggttttgttcaggacccagggcttgcttttggagctttctcctgatatctgtggctgattgggtaataaacttatcttttagaatcaattgaccctcaagtgattcgggtgacaggggagtatattttcttaaggcctctcgtagccgcttgaggaaggcagaaagattttcttcctttccctgagttatggtggacatcactgaataattcatgggcttttttctaattctccttggtccttctagaacacaggtcaacagatgtttacgactccagtccccatgatctgcatcaaggtcccagtggggatccatagtggggatg

SEQ ID NO: 952149 - DNA, 571 bp, Homo sapiens
tgtattttaatagagatggggtttcatcgttttgcccaggctggtctcgaactcctgagctcaggyaatccgcccacctcggcctcccaaagtgctaggattacagacgtgagccactgcgccaggccaaggttgtttgtttgttttgagacagagtctagctctgtcaccaagctgcagtgcagtggtgggatctcggctcactgcaacctctacctcctgggttcaagcgattcccctgcctcaccctcctgagtagctgggactacaagtgcacgccaccacacccagctaatttttacatttttagtagagatggagtttcaccatattggccaggatggtctcgatctcttggcctcgtgatccacccacctcggtctcccaaagtgccaggattataagcatgagtcactgcgctcagttgttttttaataaacaatttcctacttcagtgaagtccaatttatcaattattttaaatggttatgaagatacagtatgtcatgttgacgaaatatttgcttaccctgagattataaagatattcttgtgtattttcttctagaat

SEQ ID NO: 952150 - DNA, 599 bp, Homo sapiens
caacatgccccgagtcagataactaaaatacctcttagtctaggtagacactttcactggataagtagagtcctttcctaaagggtctgagaaggccactgcagtcatttcttcccttctgtcagacataattcctcagtttagccttctcacctctatacagtctgataacagaccagcctttattagtcaaatcagccaagcagtttttcaggctcttagtattcagtgaaacctttatatcccttacagtcctcagtcttcaggaaaagtagaacagactagtggtcttttaaaaacacacctcaccaagttcagccaccaacttaaaaaggactggacaatacttttaccactttcccttctcagaagtcagacctgtcctcagaatgctacagggtacagcccatttgagctcctgtatagacgctcctttttattaggcctcagtctcattccagacaccagactaacttagactgtgcctcaaaaaacttgtcatccctactatcttctttctagtcatactcctattcactgttctgaactactcatacatacccygctcttgtttacattgctggtttacactgtttctc

SEQ ID NO: 952151 - DNA, 634 bp, Homo sapiens; identical to SEQ ID NO: 947781

SEQ ID NO: 952152 - DNA, 523 bp, Homo sapiens
tgccaggacaaaatgaaatgcaaccaagaagtcatgccccatcacaaaggtatggtcctagtcaaataccttatacttaaactgatatgatttggtgtgtccccacccaaatctcatcttgaatcrtagttcccataatccccatgtgttatgggattgacccagtgggaggtaattaaatcatgggggcagttacccccatgctgctcttctcatgatagtgagtgagttctcatgagatctaatgattttataaggggcttttccctctttgattggtacttctctctcctgctgccatgtgaagaaggacatgtttgcttccccttcttccatgattgcaagttttctgaggcctccccagccatggagaactatgagttaattaaatctatttcctttataaattgcccactcttaggcagttctttattccagcatgaaaatgggctaatacagtaaattggcaccacagaaagtggagtgctgctacaaggatacctgaaaatgtggaagcaacttt

SEQ ID NO: 952153 - DNA, 638 bp, Homo sapiens
tctctttggccttaaaattgtatgatatgaagcactttcacatgaatacattaaattagtgtattcagagaaaaggctttgctttgtttttgcttctcttggtaggtctttttgatgatgctcattgcacagggcaggggactgtttagagcgctggaagttgacacgggagccgccaagatcctaatgctgtgtagttgttgagacattcagctgttagtggacagagcattcaacagagttaagtagaactaagtgccttcctttttaatataatgactgaaagaagagaaaaaaagcacaagataaaagagcaaatctgcatgtcaccaaccaaaaacaatggaggtagcatatttccaaggagttgaaatgcttcttttatattttttcaatttataaagaatagaaatttattatttatggttctggaggctggaaggtccaaggtgccagcagatttggcaattctgattccaagatgacactttgcacactgcatgctttagagggggsgaacactgttcctcacatggcagaagagtagaagggcaaggagagggtaagagaaggcaagagggggccagactctaccagtcccatccatgagggtggagccatggcctaatcacctccca

SEQ ID NO: 952154 - DNA, 610 bp, Homo sapiens
atcaagcagaagaaaggatattagagattgaagatgaccttgctgaaataaagtgtgcagactagattacagaaaaaagaatgaaaaggaacaaacaaagcctccaagaaatatgggactaggtgaaaagaccaagcctgtgtttgattggattacctgaaagtgatggggagaatggagccaagttgagaaacacacttcaggatattatccaggagaatgtccccagcctaacaagacaggccaacatttgatttcaggaaatacacacaacacgactaagatactctatgagaagatcaacctcaagacacataatcatcagattctccaaggttgaaatgaaggaaaaaattttaagctcagccagagagaaaggttgggtcacttatgaaagaaagcccatcagactaacagtgtatctcgctgaagaaaccctgtaagccagaagagagtgggggccaatattcaacattcttaaaggaaagaattttcaacccagaatttcatatccagccaaactaagtttcataagtgaaggaggaataaattsctttccagacaagcaaatgctgagggattttgtcaacatcaggcctgccttacaaga

SEQ ID NO: 952155 - DNA, 578 bp, Homo sapiens
gtttcaatcttctactcttgccttggtctttgtggcagctagccstccttcttaacctgtctaggggcctccagccaccagtcatcttattagaagacaaaaagatacttttgtcactctagagatcccaagggactcaaaagctcttgacttagaggctccttccccagcccccttgtcctatgcaccccttccttttggctgtttctgagttgtatcctttataataaaacttaattagtaagtgtttccctgagtcctgggagccattctagcaaattattgaccccaaggaggaggtcatggagacccccaatttatatggtcagaagtgcaggaggctcagggcttgtgattggtatctgaagtgggggcagtcttctgggactgagacttaacctgtggggtctgacttgaaatccaggtagttagtgtctggattgaattgaatcactggaacagagggttgaagaattggttggtgtgggggcaaaaaacctgacagatgtggtatcagaaatgttgtgagtaaaaaatagctcttactcccacttcatcagttgtaacatatttgccag

SEQ ID NO: 952156 - DNA, 605 bp, Homo sapiens
ggagggggactgagagtttcaatcttctactcttgccttggtctttgtggcagctagccctccttcttaasctgtctaggggcctccagccaccagtcatcttattagaagacaaaaagatacttttgtcactctagagatcccaagggactcaaaagctcttgacttagaggctccttccccagcccccttgtcctatgcaccccttccttttggctgtttctgagttgtatcctttataataaaacttaattagtaagtgtttccctgagtcctgggagccattctagcaaattattgaccccaaggaggaggtcatggagacccccaatttatatggtcagaagtgcaggaggctcagggcttgtgattggtatctgaagtgggggcagtcttctgggactgagacttaacctgtggggtctgacttgaaatccaggtagttagtgtctggattgaattgaatcactggaacagagggttgaagaattggttggtgtgggggcaaaaaacctgacagatgtggtatcagaaatgttgtgagtaaaaaatagctcttactcccacttcatcagttgtaacatatttgccagcacagcactgca

SEQ ID NO: 952157 - DNA, 469 bp, Homo sapiens
ctttgagaacataatttaagaaaagacttgaaggaggtaaattatgtagctatctgagggaagaccttcccagagagtggaacagcaggtacagggctgaggtgggcatgaacagggaagagtaagaacggtcttttgggtttgaagtagaaggagcttgcaggagaatgacaggagagatgaggtcagatattacatctcaataggatctctctggctgcaatattgagaaaagccagaagggggacaaggtggaggtgggaagacgaattagaaggccactgcaataatacagacaggagatggtggtggcttagaccagggaggcagccgtggaagaggtgagaggcagttasattctgcatatattccgagagtacagccaacaggatttgctgaaagattgaatttggcatatgagagacagagaggcatccaggatccaggcatttaagatttttggcctaag

SEQ ID NO: 952158 - DNA, 608 bp, Homo sapiens
ataggagttaatgcactcccaaatatccctttgcagattctgcaaaagcagtgtttccaaactgctgaatgaaaagaaagttttgtctctgtgagatgaaagcacacatcacaaaacggtttgtcagatagcttccttcaattttttatcctgggatatttgctttttttgcccttggcctcaatgagctcccaaatggaatggacaaaaccagtgtttccaaactgctgaatcaaaagaaaagtttaattctgtgagatgaaaacacacatcacaaagcagtttctcaaaagcttctttctactttttatctgaagatattttctttttcaccatagccctctgccaagaccagctcattcagggagaccctaacccagtggtgctagaggaattaacaacacacacacagaaatacagaggtgtgaagtgggaaatcaggggtctcactgtcttcagagctgagagcctcaatcagacayttacccacaaatttattaactgcaagccagtcattaacattgtttctatagatagtaaattaacttaaagtatctcttatgggctatgaagggatgggcaaaattaaaggaataggttggggtagt

SEQ ID NO: 952159 - DNA, 602 bp, Homo sapiens
tcatataaaaactagacagaagaattctcagaaacttctttgtgatatgtgcattcaactcacagagtggaacattcctttcgatagggccgttttgaaacactcaattcgttgaatttccaagtggatatttagagcactttgaggcctatggcagaaaaggaaatatcttcgtagaaaaactagacagaatcattatcagaaactactttgtgatgtgtgcgttcaagtcacagagtttaacctttcttttgattgagcagttttgaaacactctttttgtagaattagcaagtatgtatttagagccctttgagggctatggtagaaaaggaaacatcttcataggaaaactacacagagtcattcacagaaagtactttgtgatgtgtgcattttactcacagagattaaccattctttagatagagcaggtttgaaactctctttttgtaaagtcttcaagtgtatatttggagcgytttggggccttctttggaaaagggagtatcttcacataaaagtagacagaagtattctcaggaactactttgtgatgtctgcactcaactcacagagttgaaatttccttttgatagagc

SEQ ID NO: 952160 - DNA, 602 bp, Homo sapiens
tcatataaaaactagacagaagaattctcagaaacttctttgtgatatgtgcattcaactcacagagtggaacattcctttcgatagggccgttttgaaacactcaattcgttgaatttccaagtggatatttagagcactttgaggcctatggcagaaaaggaaatatcttcgtagaaaaactagacagaatcattatcagaaactactttgtgatgtgtgcgttcaagtcacagagtttaacctttcttttgattgagcagttttgaaacactctttttgtagaattagcaagtatgtatttagagccctttgagggctatggtagaaaaggaaacatcttcataggaaaactacacagagtcattcacagaaagtactttgtgatgtgtgcattttactcacagagattaaccattctttagatagagcaggtttgaaactctctttttgtaaagtcttcaagtgtatatttggagcgctttggggccttctttggaaaagggagtatcttcacataaaagtagacagaagtattctcaggaactactttgtgatgtctgcactcaamtcacagagttgaaatttccttttgatagagc

SEQ ID NO: 952161 - DNA, 641 bp, Homo sapiens
atcactttctatggcacctataactttacaacatgtatttcttaaataatagggcttgaaagtcaaaattactccttcatctatgggctgcagaatggatgttgtgtcaacaggcatgaaaacattcatctccttgtacgtctccatcagagctcctgggtggccaggcgcattgtccatgagcagtacagtttttagttttggggtttttttttttgagacagagtctcagtctgctgcccaggctggagtgcagtggtgcaatctcagctcactgcaacctccacctcctaggttcaagcgattctcctgcctcatcttcctgagtagctgggactacagatgcgtgccaggctggtctcaaactcctgacctcaggtgatccacttgcctcggcctcccaaagtgttgagattacaggcttgagccaccgtgcccggcttgagcagtacagttttaaagaaacctttttctgagcagtagatctcaactgtgggtttaaaatattccataaatcatgctgtaaacagacatgctgccattctggctttgttcttccatccatagagcacaggaagagcagctactgcataattcttaggacctargattttcagaatggtaggtgaacatcggcttca

SEQ ID NO: 952162 - DNA, 686 bp, Homo sapiens
acgtgggggaagattggactcaacaccaaatatagcatgggaagttggagtttatagcccgggagcagggtgggggcagggcacrgcaagtcacatagaggagacatcggggcaggggaattctggctacactgacccaacagggtttcgctgaggatgggccagggcgacaggcattacctgggtgtggtggacaatgaggagcctgaacagatcatgaggttgatgtggtgtcaagggcaggggctcttgctgaactgactcagtcgcgttcttgctaaacccaggttttatagggatgagcccagataggcccaggggatgttccagagcctggctgaaatctgggcaggtagggcctttctgtcgccagagagccaggacagccccacccaccacaaggcgttcaccgtggcaggaagcaggtgcctgtgctcggaaagtctcacgggcaattcctcccagcggtgggcatgggatgtggccctggcccctgatctgtgagccccctcctctgcgagtaggtgtgaagacccatcctgccaggcctggctcctgaggaccagccgaggatgggagtggaacacaggagctttctccacacgtgctctgtgctgcagccgtgcagtcaggctggggagtttgctgggactctctgaggtgtcctgaccacttccctggctacc

SEQ ID NO: 952163 - DNA, 738 bp, Homo sapiens
cggtgctgagtgcggacagcaggatgcagcaagagtgctcgggtgattaggggaagtgagcaggttctcgttccaacaggatccccaagaaggcgctgggaaccggcaggctactttcaggagtgtggggagatgcgccagcgggaagccggcccagctccagctcttcctaacaagactgcctccctgccgcctgcctcgcgattccccagtacaacattaatcacccggctcccagccgtgtttctgcagaaggagctctttctaattcagctgctccagccaggaggagccatgagtagaacaggtggaagtgcgtgctgactctgctattcccttctccatcctgtattagaccagtttcccttatcattaaataaaaacacgaaacaaagacaaatgagggaaggtggtctctcatttatcacccagacccagcctccctgtgtcagccctccccgggtggaagtgctcctggaaaagctgcaatagagataacaaattgggaaaatccgccttcacatcacgtcaggggcaagcggcatcgcacctgggaggtggcactaggtgagggaggggagtacgggggctgcgtctctgctctttggggaggcagcattcaccgtttagcgggcagccagccacagggccgtcctcactccacaggcagatgtggggcaaacaaagcggtgctaatgtctctctwtcgtggctgagtgaattttaggctggtcttct

SEQ ID NO: 952164 - DNA, 805 bp, Homo sapiens
ctccagccagccttgtccattccccatgactccagcctcagagggcggccccggctggagggcttgtcacagggttggcctgcctgggacgcgatgccgggggatcagcctggctgttcccttactgcrtgcgtcactctgccatcatctgggtaggagtgcagactctgatgcttgtaactctaactgcaggcagacccatgctttcccagacactgccgtgaccctcccgtagcccttcctcacctggggtactgcctccatccctctggccctaggaacactcatcccagttatgacttgctccctttatctggaaatcagccgcttgtgccgtgaccgtaagcccctctgtggaggccgctgtggcgtcggagctggcctttctatcgtttagtttctaccaggacaagaacttcctggatgaggaaactgcctcggccactgcccatctgcgtggaatcctttaagtggttctcctggccatggagaacgaatcatggaacttagagctcaaccatttgtctctattttccatgtgtggtacagaaaccaattttcctgtgactgttccttaaggatgaacctctagacgctgttttggtgaataattctgtagctcacttgcaaacggcattgcactctgtctgccttaatgagagcataaacagagccttagtcacacatcagagagtgaggggctgccgagggcagggaggcagggttgagaatgaacagagagacagtcttggcagccggcggtcgcagacaagctttctgcttaaaaccaggccactgcgggaac

SEQ ID NO: 952165 - DNA, 474 bp, Homo sapiens
atagacctcatgttggaaggaagcctggataaaagatggcaaactcaagggcctacaagagccaagctgtggcactcttcacctaaagggaggctgggccctgccatcagacagcagkcatgagaggtccagagcggctaggccttctcatttttacccctataacagctttattcacataatttacataccatgcaacccatccatttaaagtacacaatttggccaggggcagtggctcatacctttaactcctgcactttgagaggccgaggtgggcgaatcacctgaggtcaggagttcaagaccagcctggccagtgtggcaaaacccagtctctactaaaaatacaaaaaattagccaggcgtgataggcacctgtaatcccactacttgggaggctgacacaggagaattgcttgaactcagcaggcggaggttgcagtgagctgagatcacgcaaaaaaataaagt

SEQ ID NO: 952166 - DNA, 466 bp, Homo sapiens
atccctgcctcctgggccttttattgcyacagacacaaagatgattctctaatcacagcaagattctagagcggcttctggctcaaccagaagatactcccaactcaatattaaatcacagtctgtatagttcagtgcaaaagtgttttctttttttattctcagtctttaaaacattggcaattctgccattgtccctttagccatccagttagccattagttagactatttagttaactaggaaaaagctagtccttcttagccaggcagacaaaatatttactttagttgcgcacatgcatttttctcatacactgttttggtgatgatattaaaaaataattcaacttaagagtttcaccttttatgtggtggtcacgtagaaatttgctttaattgcacttaaggactgtggattttgagattttaatacataaggacaaaatacgttgtaaggactatgg

SEQ ID NO: 952167 - DNA, 612 bp, Homo sapiens
tatgcctgtggtcacagctacttgggaggctgaggagaagatagtttgaacctggaaggtggaggatgcagtgagctgagatcrcgccactgcactccagcctgggctacagagggactctgtctcaaaaaaaaaaaaaaaaaaaaaaaaaagagagagagagacacacacacacacacacacacacacagagacaaagacagagagagaagaaggtgatgtaaagatggagcaaagagagacgtggccgtaagacaaggaatgctgcaagccaccggaagttggaagagacaaggaacaggattcttccctatataccttggaaggagcatggctttgctggatattggacctgatttcccagagagtaagaatacatttctcttgttttaagttattctgacaggctgtgcgcagtggctcacacctataatcccagcactttggggggctgaggagggcggatcacctgaggtcaggagtttgagaccagcctagccaacatggtgaaaccctgtctctactaataatacaacaattagccaggagtgcacatgcctgtaataccagctacttgggaagctgaggcaagagaatcacttgaacccggga

SEQ ID NO: 952168 - DNA, 608 bp, Homo sapiens
agctatggagagcacctcgcgctgaagctgacattcaaaggcctgaacggtcataactgagacccattccaaacgctgacttacatgtgatgtcattttcccccagtgttcttaactgaattgcaactgttgtatttaccatggtggggaggggcacgcatgcaaagtagagacgaggtagagaaagtagaagtattctttaaggtaaagatataaaaatattctgtagataacatgtaacttaagtggccctaccttggagcttcgtatgtaggtgagtttttatatgccacttctgtttctctcatttagatggatatatgcaatgccaaagacaaaagcttatgttaacaatcactgtaagttaaattatgcttgaaaaataagaataaaaaatattatggtgcaagaagaaggtgcttggtattgctttccattgaaatcaaaatgtaaagaaataaatgcaaagagaagatacagtggtatttatggatgtgcacaggggaggctttctctgtgtggggctgggcrggagagagacgcgtcacaggcagattgcattcgacgccgtgctcggagtggcgttctcggtgcagagttctagcatg

SEQ ID NO: 952169 - DNA, 800 bp, Homo sapiens
aacatgcattatgaccataacaactctgtctattaaaagctgtcagcctctttctgtaagttaaatgaatgatagagaaaatgctattgtattagcctcctaactcatctcttgtttattcttcatgcagcagccagtgtcatctttgaaacacaaatttactcttatgacgcccctaatcaaaatcctcctatcacttctcacagatcttgtaacgtaattctaagcctttcctatagtctgtgaagtagttttaaagtggtttcaaatgcttcggtgctcatcccatcaagaggtacagcctcttttcccaccctctgaatctgggctgacattatgacttcctttgattattagagatgtgtcagaaaggatcttgagcaggttctgaactgggtatcaagaaacctgaagctggagggacatggtggctcacacctgtaatcccagcactttaggaaactgaggcaggtggatcatttgaggacaggggtttgagaccagcctggccaacatagtgagaccccatctctactaaaaatacaaaaattagctgggcctggtggcacgtgcccataatcccagctacttgggtggctgaggtaggagaatcacttgaaaccaggaggtggaggttgcggtgagttgagatcacaccactgcactccagcctgggtgacagagtgagactctgtctcaaaaaaaaaaaaaaaagaaagaaaagaaaaaaagaaacctgaagctggactctcactctctggaacacatctgccacygtgtgaagaaacccaagatagaaa

SEQ ID NO: 952170 - DNA, 625 bp, Homo sapiens
ttatgtgaaagtgatatcagtagtaagtgttatgcagctaaaacatgtacgaaattggagaaatggaactaaaaagaaagaaagcctaagtagggttgcactatcaagcagagttccctgaagagtacttccggctccatcatcaggtcatcagggccactcaggagactggggaagtcaaacctgaaagttgtcctgaccacagggcacagaaggcacagaacctgcattattctaccccatcatttgtcagttaatttttaagattttttatgtggtgatgtaaaatgctcagcttttaaaattttggtggcccagtaagagacacagtctatattttggcagagaaaaacatgtgagcctttgtacgctaaaatagcaaatggatcacggggtgaggcggtgggtacactgacagctctgatatgtgtttctatggctgggcacaatatacttaggtttaatgaggcaagctagtaccatattagcagaaggagggagaagtcacaataattagtgaatggcagtaatgacaactacaacaaaatggacrgttgaatagaaataatagaagcgttcttagaaaaaattatttgacaactagctgcttccaagaaggagcaga

SEQ ID NO: 952171 - DNA, 567 bp, Homo sapiens
atccatatagtggaatattattcagtcataaaaaggaaggaagtgctgacccatactataacatggatgaacctagaaaaaattatgctaaatgaaagaagtcagacacaaaagtctacatattttrtgattccatttgtataaaatgtgcagaattggcaaatacatagagacaaagtagattagtggttgccagaggttgaggggaagagggaatagaacatgatcgctaatgaggacagggtatcttttaggggtgatgaaaatgttctggagttagatagtggtgatggttacttaactttgggaatatgctaaaaaccattcattcaattgtatactttgaaatgagttaaaatgataaatgttatgtaagttttatcttaaaaattcaaaataaaaaaatgcctagggaaaatgtcaagaatttggtatgtatacaagtcagcagcccagggaagaggccacaatagagatagagatttaggggagattgaaatattgatggtatataaaatgctgagtctgccctgtatttgtggataatatgattgaatgtgaagaaaa

SEQ ID NO: 952172 - DNA, 513 bp, Homo sapiens
aaacaaccctactaaaaatgggcaaaggacttgaatagatatttttccagagaagacatacaaatggccagttgatgtatgaaaaratgctcaacatcaccaagcaccagagaaatgcaaattaaaaccccaatgagtatcatctcatctcgctccagttagaatggctgttaccaagaggacaaaagatagtgagtgttgatgaggatgtggagaaaagggaaccctgtgtgctgttggtgggaatgtaaattagtacaactattgtggaaaactctggaggttcctcaaaagtcacaggactaccatgtgctccagcaacctcatttctgggtgtatatccaaagggcatgaaatcagaagctcaaagagacacctggacccccatgttcattgcagcgttattcacaatacccgagatatggaaacaacctaaaaatttttggtgtttaatgacaatgtggtgtgtgtacacaactgaatattattcagctatgaaaacgaaggaaatcc

SEQ ID NO: 952173 - DNA, 652 bp, Homo sapiens
tgtgtgcacacagcactgagaagatggtgcccgggggctgccctgtccgttctgtgatctcattagacaggaggtccggacgtgggccactgtgtgcagtcactgctctctgttgtttccataggctacgggcgcacctacttgagctgcacgtctgcccacaccagcaccagcgacggcacggccatgatcaccagggcaggccttccttgccaggacctcgagtttgttcagttccaccccacaggtagggcaggacgccttgcccggaaggcgttcggctcgtgtgtcttgtaagcgtgtggtgcctactcattgctcttccatagttttatgtaataacatggttttgaagatcagcttccatagctctcaggtcctaacttcaatgtcatttccttaaggagacttttcccacactccccttcccctaaggcagtttgggccaccatcttatgcatttctcaagagccctaaaccctgccttggtgatacttatgccagcagtaaagcagggattgaggccgggcatggtggctcacacctgtaatcccagcactttgggaggccaaggcaggtggatcacctgaggtcaggagttcaagaccagcctgcrcaacatggtgaaacctcatctctactaaacataaaa

SEQ ID NO: 952174 - DNA, 591 bp, Homo sapiens
agcttttagactcacatattcagatttcctgtttcaccctaacattacctaagatctacaaaaaaggccttgaagttagattaagattatgcaaacaacatgctgatagaattcamgagaaaagaaatttgacagcttataaaaatatttatgaccttcctcctctaattgttgatgacttccaacagtgcaataattcaataatagaaccctggataattactgttgacacctccctacaagtaactgttaatgcacaaggtactccatctacgtggaattacctgttgtgacacatcgagatacattttcatctgtgggggagcctacagtcagctttattcatgggcaacatcatgtctcaataaatggaaaataaagcaccagtgtggtctgggatatttctacattcagtttaaacttgcaaaatctgaacattggttgacatctactaacttgcaccatcatatcaaaaaagacactctacctagaggcataaactcagcaggatgggcctcagttgttagatccttcttcctctggattggggttagtaccttagaaataatggttagaaatttatccctaact

SEQ ID NO: 952175 - DNA, 617 bp, Homo sapiens
aagaccccatctctattttttaaaaataaaaaataaaaattaaaaagcaaaatagactagctagtgataaagataattgctatgaagaaaacaaaacagggtaatgagatagagaggaatattaatccattctcacactgttatgaagaaatacctgaacctgggtaattaaaggaaagaagttgaattgactgacagttctgcattgctggggaggcctcaggagacttacaatcatgctggaaggcaaaggagaagcaggcaccttcttcacagggtggcaggacagagtgagtgcaagcaggggaaatgccagacacttatgaactatcagatcttgtgagaactcattcattatcacgagaacaggatggaggaaactgcccccatgatccaatcacttcccaccaggtccctcccatgacacaattcaagatgagatttgggtggggatacagccaaactatatagagagggctggaggacaaactgttccagatgggagttggagaargccttgctatggatgtgacatttgggctgagatgtggatgatgagaaggagtcaggcagccgtgccctggaggagatagcgatgcagacagcagaagccctga

SEQ ID NO: 952176 - DNA, 636 bp, Homo sapiens
aaacaaaagtaacttcaaaagcaagaagtgtcagcttccctagatgataaggatccagcataagaattctggtaccatgtaaaatctgaatgctgtgaaaccatcaaaggatcacactagctctctagcaatggaccctaaccaaaatgaaaattcggaaattacataaaaattcaaagtatagattgtaagaaaattcaatgagatcaaagaaaaggttgaaaaccaacacacagaaaccctaaaagcaacccaggaaatgaaggaagagatagatgtcttaaaaacaaaaacaaacagaacgtttggaaatgaaaaatccacttaaatgagttcaaaatacagttgaaagctttaagagtagactagaccaagcagaagaaatcatttcagagctcgaagattggtctttcaaattaacccagttagacaaaagtaaagagaaaatatgttttaaaaaataaacaaagccttggagaaatatggaattatgtgaagtgaccaaacctatgaattatagttactcctgagagagaagaagaaaaactaagaaatgtggaaaacatatttgaaggaayaatgcaggaaaatttccttgatcttgctagagatgcagaaattcagatacaataaact

SEQ ID NO: 952177 - DNA, 627 bp, Homo sapiens
tccttaccctgcattggctcacacacagtgcactgcaccccktgtcctgcacctactgtctggcactccccagtgagatgaacctggtacttcagttggaaatgcagaaatcacatgtcttctgcattgctcatgcttggagctgtagaccggagctgttcctattcagccaacttagctcctcccaaagaagtttctaagaatgcttctgtcttgtttttatgtgaagatattaccttttccaccataggcctcagggtgctaaaaaatatccctttgcagactctacaagaacagagtttccagacagaacaaaaaaaggaacttttcactctgtgagatcaatgcacacatcacatagtagtttctcagaaaccttctttatagtttataggtgaagatattttctttatcaccataggcctcaaagcactcacaaatatcccatggcagattttacaaaaaacggtttccaacttgctcaataaaaagtatggttcaactgtgtgcaatgaaatcactcatcatgtagaagtttctcagaaagcttctgtctagtttttatgagaagatatttccttttgcaccataggcctcaaaccactcacaaatatccctttgcagttt

SEQ ID NO: 952178 - DNA, 737 bp, Homo sapiens
aacccctttttctgtccttagcatctccaaatggactagactcgacaagcaaacagtctgcagtggaccccttgggtcatccattctgatggaaacagtgagtcraattaatcctaagtctttgaatttgggctactcattgactctctcagctttatcctcaccagctcatggtgaggctgaatgcacagtagtaaaggggaccaagcatggggatggcatggaaagagtggttcctcagcagatggtagtgcctgtgcccctgtgctccttagggaggtggtctgtgggcaaaccatcgtgctttcctcaggctgacctggaccattcactgagtgcacgttgagagattttacagcaaaggaatagagacttatagagacttgacttattatttccttcttgttttacagataatgacagtaattcgcatcactaaccttccctgaaagcttactacatgtcaggaagtgctattctaaaagggcttcacatgtattcattcatttcatcctcctgacaatcctgtgatacaggtgtttttgttatgagtcctatttcaacaaagcacaagtgaatacagtaagttgcccgtggctacacagcatgtcagaggtagaggtgaacccggcattccagctcacagtccaaacccttagccacggaactctctgacctcttagagaggtcgatttcctggctaagggaaacccctgttccccagtgtgtgctgtgtg

SEQ ID NO: 952179 - DNA, 609 bp, Homo sapiens
taggggaaagaggaatgtgtctactcattaygtgcttccctttggaaggaagtcaaatgctttcattgaaaagcacacagaaagcttttcatgatttagtacacagacaaactcatagattaaggcaaagaaggacctaatgtaaacagatgcaatcagatattatgtatctcagatgtcataaatctagtctggtctggttgcaagaagcaggcagtgtgacaacttttggggtcttcctggcctaaaagctctaattagaagagcatgtctgctatttggtccccttccactattcttttggggaattattctactattcttattctaatcaagaagtctttgaacaaggagttggactcagcttcctctttgatgattggctcatcccctaaatatttctacctctggcacagaaagaagggcctaaaaaatagccctcagtcttctctactgtatctgaaataactatggcaggtcaaacatccaaaccaagcagttttttgaggaaacacatatctattggtcatttgccaagtgcagacacccatgctaggcactgtggaaatacaaagcctatgaagtccagtctctgccttccaaatgctc

SEQ ID NO: 952180 - DNA, 754 bp, Homo sapiens
cctgcttgaatcactaagaatttctgaaattaatgtcagggtggttttcttaaaaatctctgtcttaaaacaaaacagatartggaaaaacccaaagtaaccatctctcttcacctactggagcatgtaggaggggaggagaggggaaaagatgcagaaaaaatgcaaatggcaggaccccgggaaggggccaggtcctctgcaaacccaccggcaccaggcaccatctgcttggggctgtgcagtttactcatcttggactggccctgatgccgcctgctaagcagagagtggcagcaactccagggcagtcacagataaatttttttttcctttcagaatagctggacacaattttctgagctcaacagaaggctgcccctgggcacgaaagcagaaatgtgtttgtgggcccaagtcactatattttaaatggacttgggctctgtggtgtgtgtgggaggagtgggtgcttgtaggactgtacggctcagtggagacactgggaatgccacgataagaatgctctgaatctcaaaacacagcctcctctcccccaaaaaagaaaagaggtaatgacctggagttagcctcttccttcctaactcattaggtacgttgcatgtaatagagtgactcatcctttccttgggcagaagcatcacctggacatactaggtcctgctagggaaggagacatgaacactaagcttccaaggaccacagaaggagtccttagtgtggttccccagtg

SEQ ID NO: 952181 - DNA, 592 bp, Homo sapiens
tttcagcattattcaaaatagtgaattaataagtccctaaatgttctatagcaaggattggcaaaatttttctgtaaatagctagattgtaagtaatttargctttgtaggccatatgatttctgtagcaatgtcttactctattcaggctgttgtaacaaagactgtggtctgtgtagcttataaacaacagaaatttatttctcacagttctggaggctgggaagttcaagatcaagatgctggcagattcaatgtcttattagtgcctgcttcatggttcatagatagctatcttctcactgtgtcctcacatggcagatgggatgagggagctctttgaggtccctttataaggtcattaatctcgtttattaagactccaccttcatggcctaatcagttcccaaaaaccctgccttcaaataccatcacattgggaattaggtttcaacatatttaggggacacaaacattcattctatagcaagcaataactcaactctgctgaagtaatgtatagataatatgtaaatgaatagatatgtatgtgttccaataaaacttttcctatggattctgaaatttgaac

SEQ ID NO: 952182 - DNA, 629 bp, Homo sapiens
caccctctcatttttcctagttttcagtctctaacatttcacactctatgtcatatgtacacattatttagctctcacttatgagtaaaaacktgtgatatttgactttctgtttgagttgtttcacctaagataatgacctccagttccatccatgtttctgcaaaagacataatttcattctttttatggctgaatagtattctattgtgtatatatacaacattttctttagctaatcatggtatatttttgatatgcaggtatataatgcaggtatatttttgatattatgatttatttccctttgagtagattcccaggagtgggattgctaaattgaatagtagttctatttttaattctttgagaaatctccatattgttttccatagagattgtactaatttacattcccacaaacagtgcataggtgttcattttctcagcatgctcgccaacatctttttttttttactttttaataatagacgttctgtctgtatgtgtgaataaataatattttatttagctttgtttttttattgcattgcagatatatgaggcttgcttttttcacttaatattgtgtttctaaaatttatccctactgtaagtgtggtagtagt

SEQ ID NO: 952183 - DNA, 669 bp, Homo sapiens
agcctttaatcattttctttctttttttttttgagatggagttttgctcagttgcccaggccggagtgcaatggcgcaatctcagctcactgcaacctctgcctcctgggcctcccgggttcaagcgattctcccgcctcagcctcctgagtagctaggattacaggcacccgccatcatgcccagctaatttttgtatttttagtacagacggggtttcaccatgttggccaggctggtcttgaactcctgacctcaggtgatccacccaccttggcctcctaaagtgctgggattacaggcgtgacctacctcacctggccagcctttattttcttagaagatgctcagatgcagtcgcattgccgggcctggctgtgcatttgaaagcaatagaatgtgttctcctaatatacctctgaaactggtccaattgtcccatagaactgatatttatggcttcttttgaataaacatagaaactgatcctcccagtcttgaaacttgaggaagttacatttgtctttgctcagtttctttctcaggcatccaaccatcaggcttcctagatagtgtcaataaactgaaayttaccagatcactgcatctaggcaataagacatcagactcctcacctaccatggttgcctaagtggctacctgcttcct

SEQ ID NO: 952184 - DNA, 633 bp, Homo sapiens
actggccttgtggtaagtgatatgaaaacaattttcagctctaccagatgctgactgtctgatccccaccctgttccaccagccataactrtagctttgaatggacaagacattgatttcagtcactttcttttgataagagacttctgaccatggcctggttctcgccagtttacagaggctgcacacctgaatgtctcccatcctgaaaggacgtttagaccctaactgtaatacatttaatgtgaagtctccatcccaaagtgaacatgggtcatgtgttgcatacatatttgtttaatatgcatgtgtcaggaccactcttatgaatattcacagctcctcctataacctgttgaatatgtatgtttagccaacctgttcagcataaagctcctatctcaacccctcctccttttaagtgcctgtctctggtcttggctggaggtggtgcttcccagactatgaggacggccacctgctgtaacccttcataaggaataaaatctcctctctttttctaaacttacagatttgtaatcttgatttttaagttaacagtaccaatcacagagttttggccagtcacgggtggccatctgttcaaactgccttcaaacaaggcaaatacca

SEQ ID NO: 952185 - DNA, 598 bp, Homo sapiens
gtggagaaataagaatgcttttacactgttggttagtgtaagttagttcaaccattgtggaagacagtgtggcaattcctcaaggatctagaaccagaaataccatttgacccagcaagcccattactgggtatacacccaaaggattataaatcattctactgtaaagacacatgcacacttaatgtttattgcagcactattcacaatagcaaagacttggaaccaacccaaatgcccatcaaggatagactggataaagaaaatgtggcacatatgcaccatggaatactatgcagccataaaaaaggatgagttcttgtccttttcagggacatgaagctggacaccataattctcagcaaactaacacaggaacagaagcgcaaacactgcatcttctcactcaaaagtggaagttgaacagtgaaaacacatgggcacagggagggaacatcacacactggggcctgttgggtgttgggggtcctaggggagagatagcattaggagaaatacctgatgwagacgatgggttgctgtgtgtagcaaaacactgtggcatgtgtatacctatgtaacaaacctgcatgttctg

SEQ ID NO: 952186 - DNA, 609 bp, Homo sapiens
gaaggaatggagcagccagccggttcctccattcattkgcttgtgtgctccctcctacaaggggataagcggggtgggctgagtaaacagggcacccctgtcacgagtcccacgaaacagtcaagaaaataatcctgcatcaatttgactcctcgtcctcccctaatggtttgcagtctttcctatgtcataataaagctacattttattctggaaaaaaatttgctctacaagtttagagacttgctgcattttgttcgctgccaattccttaggacttagaacagtttcttgcaaattataggggctcttatttaatttcataaaaggaaggacattcctccctgcaaaagataaagaagatgatttcagaaaaatataacagatcttttctaagaaagaaaacttgacagctttatactgattttttacaaaaactgtgattactagaaaagatattgcacactattacattatgggttgtgttaagatgagatttttccttgactttgacccccttcgtggaactggagtgactcatttcactcagcctgcagcctgcagtctgtggatggctaagtgttaacagctcagtaaaaggttagggtg

SEQ ID NO: 952187 - DNA, 596 bp, Homo sapiens
cttactatcctctgattatagccatcctgaggactgcaggatgtatccctaagaggtggcccattctatttccacaagagaatattgaggttttatttctatcacggggcactcccagatcagtgggacttcaaatgggtcagagacctggggcccacttgctgctgattaaactgcttggtctgccagcctatttccctcaactatttcatctgtccctctttggcagtctttacaatgtattattgccacttcctgtgggaggaaaactgaggataatagtctattaattttctgattatatttaataggagacccattagctatgaggaagttcctctttccagatagtggtatgggcatcgaggaccaggaaagcatacttagaatcaatataaaagttaacgtttttcctttgcttaattcgagcaccctcgtgagggtgattagttcaactagctgaccatttgtgcccaaggagagaggtgcactctcaacaayatcattcagagtaactattgcataccctgctctgtgagttcctttttctacaaaaaaaacttccgtccataaacggaatccagtctgggttatct

SEQ ID NO: 952188 - DNA, 670 bp, Homo sapiens; identical to SEQ ID NO: 946504

SEQ ID NO: 952189 - DNA, 607 bp, Homo sapiens
ccttcatgcaaattattaatagaaaatggtgccccccttgaggccacttgatgagctgaggcattgagggccatgtatagttttttgttgtatattcttctttgcctttttaaagaataaccttctaaaaatgtaaaaaaaacactcttcactcataggccacacagaaaacattccacagggtcgaattggctcacagatagcaatttgccagcctctgctctgtatcttgattaggtgctggttgcatggatatatatatatttgtcaaaactcactgatcaatacacttaagacctatgctttttactatatgtagtctcaataaaatatagaacagttcttgacagttgagttaatgctcaaatgaatgttaatgttattttagcttcatataatgacatactttatttttaattataacaaagtattattattctgcattataaaacaaattcaagctatatatgtgtgtgtgtatatatatatatakagagagagagagagagagagagagattgagagagagagagtctcactctgtcacccgcacccaggctggagagcagtgtcatgatctcagcttactgcgacctctgcctcctaa

SEQ ID NO: 952190 - DNA, 655 bp, Homo sapiens
taaatgctactgtgaacatttgtgtattactttgtgtggatatatgttttcataacccttggatagataggtacctaagagtgggattgtaggttttatgataagcttgtttataactttttaagaaattgccagatggttttccaaaacaactaaaccatttacattaccatgagcaatgtgttcagggttgcaggttctccatatctttgttgatacttggtattgtcagtctttttttgtttttttttttttgagacagagtcttgccctgtcgcccaggctggagtgcagtggtgcgatctcggctcactgcaagctccacctcctgggttcacgccattctcctgcctgagcctcccgagtagctgggactacaggcacctgccatcacgcccggctaattttttgtatttttagtagagactgggtttcaccatgttagctaggatggtctcgatctcctgacctcgtgatctgcccacctcagcctcccaaagtgctgggattacaggtgtgagccaccaccatgcccagccttggtttttttttttttttgagacagagtctcactctgtcacccaggctggagtgctatggtgcagtctgggctcactgtaacctctgcctcccrggttcacggcattctcctgcc

SEQ ID NO: 952191 - DNA, 608 bp, Homo sapiens
ggaggatggcttaaggccagcaattgggagactagcctgggcaacatggcaagatcccgcttctacaagaaaaaaaaaattagttgagcatgatggcacgctcctgtagtcctagctacttgagagagactgaggcaggaggatcacttgagcctgggagtttgaggctacagtaagctatgattgtgccactgcaccctagcccggatgacaagatgagaccctgtccttagaaaaacaaacaacaacaacgaaaaacaaaaaacaaaaaaaaaattagagttctggaggatagaaataaaagtgttggctggtcatggttgctcacaactgtaatcccaacattttgggagaccaagaggggaggatctcttgaggctaggaatttgagaccagcatgggcaacagagcgagacccctgcctctacaaaagaaaaattttttttgagacagagtcttgctttgttgcccaggctggagtgcagtggtgcgatctcagctcactgcaagctgcrcctccggggttcgcaccattcttctgcctcagcctcccgagtagctgggactacagacggccgccaccacaccaggctaattttttgtatttt

SEQ ID NO: 952192 - DNA, 592 bp, Homo sapiens
ttggcatagtggacatggatgagggggcagcttgtttctcattggacaatcttttttaaagtgtcctagtaaaccatactgrtaacaagtcttaccgggtgtttggcctgctccattttctgtcctctctgaaccaccaaggtttgttggtctgagggccatgactaaggctgcggcctttctctgatctcgcttttccttttgggcctgttcctcttggtccctattataaaacactgaggttgccaggtttaataatgcctctaggttttgttcaggacccagggcttgcttttggagctttctcctgatatctgtggctgattgggtaataaacttatcttttagaatcaattgaccctcaagtgattcgggtgacaggggagtatattttcttaaggcctctcgtagccgcttgaggaaggcagaaagattttcttcctttccctgagttatggtggacatcactgaataattcatgggcttttttctaattctccttggtccttctagaacacaggtcaacagatgtttacgactccagtccccatgatctgcatcaaggtcccagtggggatccatagtggggatg

SEQ ID NO: 952193 - DNA, 621 bp, Homo sapiens
tgtttggatgccttttatttatttatcttgcctgattgctcaggctaggatttccagtactatgttgaataggagtggtgagagtgggcacycttgcgttgttccaggcctcagggggaacagcccatcgtttgcctgttcagtatgatgttgtctgtgggtttgtcatagatggctcttattgttttgaggtatggccatttgatacctagtctgttaaggattttatcatgaaggaatgttggattttatgaaaagtttttctgtgtctatggagattgtcatatggttttgcttttaattctgtttatgtggcgaatgagttttattgatttgcaaatgtcaacccagctttacatcccaggaataaagcccagttgatcatgaagaattagctttttgatgtgttgctggcttcagtttgatcatatttcattgaggatttttgcctctatgttcgccagggatactggcctgaagatttccttttttgttttatctccaccagattttggtatcaggctgatgctagcttcttagaatgagttagagaggagttcctgtttatcaatttttttaatcgtttcaatatgattgataccagttattcttggaacatct

SEQ ID NO: 952194 - DNA, 590 bp, Homo sapiens
attgtaaaactactggaagagaatatagggacaaaactcaataacatttgtttgggtgataattttttggatatgaactcaaaagcataggaaacaaaatcaaaaagagatacatgggattttgttaaattaaaaagcttctgcacagccaaggaaaacatcaatataagcagacaacctacagaatgggaaaaaaatatctgtaaatcatgtatgtgctaaaggggattaatatccaaaatatacaagaaactcaaataattcaacagtaagacaacaacccaattaaacattggtcaaaaaatctgaatagatatttcttaaaatttacaaatggtcaacagcaatctgaaaaaaaaatgctcaatataactaataatcagagaaatgcaaatcaaatccacaatgagttagcactatactaatgttagaatggttattatcaaaaagacaaaagayaacaagtgttagtgagacatggagaaaagggaacactgaacccagttggtgagagtgtaaattagtatagccattatgaaaaacagaattgaggttcctccaaaaatcaaaaacagaactaccacatgatc

SEQ ID NO: 952195 - DNA, 399 bp, Homo sapiens
aactggggttggagtgacacaagcacccctgtgtccaccacccctaggacacctaggactgtgctgtgtcagacctgaatccagtacagtgctggatctcatccaaggcctgctgtaaccaattcctggctaccacctatgtttttgctcaaagccctgggagagggctgggctacaaccagcggttggcaaagccagcccaggtctatttccttccctttgggtggtggcaagttccatcaggcctggggtaggtccagggatgctgwccaggagccaaggcctagcatcaaaaactagatgtccacctagggttctactgtactgcagctaagctggcactcaaatgacaaggcacagtccttcccattcttccctccccattccaaaggcagaggt

SEQ ID NO: 952196 - DNA, 683 bp, Homo sapiens
agagctcgaggagataataawagaaacttccaaaactgcaaaggaaaaaaaaaagaacagaatatccaagaactgtgggacaactacaaaaatggaaacatccatgtaatgaaaataacaatgaagaagacagaaagaaacagaagcaatatttggagcaaaaatgactgagaatttccccaaatcaatgtcagataccaaatcaaaaatacaagatgctcagagaacacacacacacaaacacacacacatacacacacacacactccacctggacatatcatattcaatattcagaaaatcaaagacaaacaaaaagttttgaaagaagccaggagggaaaaaaacactttatataaagaggagcaaaaataaaaattacacccacctgacctctccttagaaaccatgcaagcaaaaagagagcagagtgaaatatttaaagtattaagagaaagaaacccaccaacctagaattctgtaccccaaaaaattatccttcaaaagacacagactttctcagatgaacaaaaattgagagaatttgttgactgtacacacgcctcacaagaaatgttaaaagagttactttaggacagcagtcgccaacctttctggcaccagggactggtttcatggaagacaattttttcactgaccaggaatgatgaggtgatgaaact

SEQ ID NO: 952197 - DNA, 423 bp, Homo sapiens
ggctaaaaggggccaatgcagagctcgggccatggcttcagagggggtaagcctcaagcctcagaagcttccacatggtgttgagcctgcaagtgcaccgaagtcaagaattggggtttggaaacctctacctagacttcagaagatgtatggaaacacctggatgtccaggcagaagtttgctgcagggatggggtgctcatggagaacttctgatagggcagtgcaggagggaaaagtggggttggaacccccacacagagtccctactggggcactgcctagtggagctgtgagaagagggccaccaycctccagactccagaatggtagatctaccaacagcttgcaccatttgcctggaaaagccacagacactcaataccagcctgtgaaagtagctgagaaggaggctgtactctg

SEQ ID NO: 952198 - DNA, 641 bp, Homo sapiens
aaagttttcttgtgttcctggaataaattttaacaaaactttggatgaaactttacctagtcctttgtaaacagtatgaataaccttccttataatttaacttttacacaatgtatataaccacatagcattctctagtaataatataccatagttctgttcaacaattctctattgttgagatatttatgttgatgctaacgttttgttattataaacaatacaatgaagaacattcttgtagctatatctagtcctgattactttaaaattttttttcaattttaatagctttaggggtacaagtggtttttggttacatggatgaattgtatagcggtgaagtatgaaattttagtgcccctgtcacccgagtagtgtacactgtaccctgcctcccactctccccctttctgagtctccagcatcctttataccactttgaatgtatttgcatacccacagcttagctcccacttataagtgagaacataacagtatttggttttccattcctgagttacttcacttagaataatggyctccagttccatccaagttgcagcaaaagacactctcattcttttttatggctgagtagtattccatggtgtatacaaaccacattttctttatccact

SEQ ID NO: 952199 - DNA, 578 bp, Homo sapiens
tcgacctcccaaaatgctgggattacaggcatgagccactgtgcccggcctrtgaatacaattttaagtatgcctaatcttacaaataaaaaagaagtaaaatctcagtttttaagggtctgtaacattttctatttcattaaggactgtttagtatagtatttctctcaatatactttatagtccttagtgaccaaagggaagagtctttatttaacttcagggtcaagtctgtcattgataatataaagttaattttctattagttacttattttaatggcttgacgaaaaagagaaactctataaccacatagtattacaaataccaattagcttgctgagcatcacataggagttcaaagtgagcaaaatttgatcttagaaaaagagttttatatacctttacattgcaaaggcataaatctcaacaggtttttgaatctatagttattctatatatagatgccaatacataataggtattactattgttaattaggtttgtttattctggcatcccattcattcttggccctttaactcactgatgcattactgttattagagcaataatat

SEQ ID NO: 952200 - DNA, 627 bp, Homo sapiens
tactgtatgtaaattatgattcaataaacctgacttaagaaataatatgattattctattactttaaatcctcaattattctgttatccaaaggtgaaattcacactctatgaaatgacatatgtgtctkttagtttattagtttgttagcttataatttgtcctagttagcctttcctatgctcctctttccatattctttagccaaatcccatattcagttaaactggcatgaccagtttctaaaacatgccagtcactttctactttatatgtaagccatgtgttttaaatttatatgcattactacaatgtatagggctgaaattttcttaatttttttatgtaattgcaatcagtttgcttatgaacttccatttctactcaaaagaggaaaatgtattatctgtccctgtaaggaaactctgtgctgttcaagttaaaacagcctcttcagggtaatttctcaatcagtattgcatttaagcttagtccatttcaaattaaaacttattattagtgatactgttctctcttaataattatcccccttttccctctctctgatcttcaggggaaatattcataacctgtggcattagaaaggggtgcagagtgctgagctgt

SEQ ID NO: 952201 - DNA, 606 bp, Homo sapiens
agcgggttgccattgctggctcctggagcctgcttttagtctcttatctggccccacccacatcctgctgattggtccattttacagagagctgattggtccgttttgacagggtgcagataggtgtatttacaatcccttagctagaggtaaaggttctccaagtccccaccagagtagctagatacagagtatccattggtgcattcacaaaccctgagctagacacagggtgctgattggtgtgtttacaaaccttgagctagatacagagtgcccattggtgtatttacaatcccttagacataaaggttctccaagtccccaccagactcaggagcccagctagcttcacccagtggatcccgcaccggggccgcaggtggagctgcgtgccagtcccgcgccctgtgccggcactcctcagccgttgggtggtcgatgggactgggcgccttggagcagggggcggcgctcgtcagggaggctccagcggcrcaggagcccacggtgttaggggaggctcaggcatggcgggctgcaggtctggagccctgcaccgccgggaggcagctaaggcccggcaagaagtcgagcacagcagct

SEQ ID NO: 952202 - DNA, 500 bp, Homo sapiens
agtagtgtcataggaatcaagataaatatacagagtcagttgctttttgatataccagcaatgaagtaattgaaattaaagaaaataatacaaaatataaatgtatcagaaatacaaaatactccagaataagtctaacactatatatataatctatatgtaggatatatctacatgcacaaactctgatggcagaagtcaaaggtctaaataaatgtaaagatattctgtatcatggattggaagactcaatactgttaatatgtcaatattttccaaatcattctatctgttcaacacaattacagtcaaaatcataagatattttgtatatatcaaaaactaattataaaatatgtattgaaagggggaagacctacaatagccaagaacattttgaagaaaaataactaatttggaagctcacactacccaattgtaagacttgcaataaagatacagtaatcaagarcgcatggtattggtcaaagaatagacac

SEQ ID NO: 952203 - DNA, 649 bp, Homo sapiens
agcaatatacctttactgtcctgcctcaggggtatatcaactctctagttttgtgtcataatcttatttagagagaccttgatcctttttgcttccrtaagatatcaccctggtacattacattgatgacattatgctgattggatccagtgagcaagaactggcaaacacactagacttattggtgagacatttgcatgccagaggcatgggaaataaatccaactaaaattcagggaccttctacctcagtaaaatttctagggatccagtggtgtggggcctgtcaaaatatttcgtctaaggtgaaggataagttgctgcatttggcccctcctaccaccaagaaagaggcacaatgcccagtgggcctaattggattttggaggcaacacattcctcactggggtgtgttactccggcccatttattgagtgacctgaaaggctgccagttttgagtggggtccagaacaggagaaggctctgcaacaggtccaggctgctgtgcaagctgctctgccacatgggccatatgacacagcagatccaatggtgcttgaggtgtcagtggcaagcagggatgctgtttggagcctttggcaggccctcataggtgaaccacagcggaggcctctaggattttggag

SEQ ID NO: 952204 - DNA, 701 bp, Homo sapiens
tcaaatgcttatttaccattctgaaaatccaagggcctttaggaattgtactaaatctactctgtctgtgctctataaatgcaacaacaaagcctggatgacagcacatctgtttacagcatggtttactgaatatcttaagcccactgttgatacctactgctcagaaaaaaatattcctttcaaaatattcctgcccattgacaatgcaccttgccacccaagagctctgatggagatgtacaaggagattaatgttgttttcatgcctgctaacacaacatccattctgcagcccatggatcaaggagtaattttggctttcacatcttattatttaagaaatacattttgtaaggctatagctgccgtagatagtgattcctctgatggatctggaaaaagtaaattgaaaaccttgtggaaaggatttgccattctagatgccattaagaacattcatgattcttggggggaagtcaaagtatcaacattaagaggagtttggaagaagttggttccaaccctcatgggtgactttaagactttagtggaggaagtcactgcagatgtggtgraaatagcaagaaaactaaaagtagaagtggaaactgaagatgtgactgaattgctgaaatctcgtgataaaacttgaatggagcccagcaaggtggttcatgcctgtaatcccagcactttgg

SEQ ID NO: 952205 - DNA, 657 bp, Homo sapiens
aagaccttgaagagattgggatttggttcttcagtaactccaatttcccctatggaagcttatgcaaaactctccatcagctttctaatctattaataaataatgatagtttttaaaagaaatcacttggttaccatccttggagattaattacgtgattaatttaggtaagtgcttatgaaatataaagtgcttcataagtcctagggatttatgctccagcattctcattaggcctagaggacaaaaattctctgctgcctttccttctcctcctcctcctcctatctttttctcctttaataaaaatagatttcacaaacattgctcaaattggatcacagacttaaatacaaaatgcaacactataaaacttctgaaagaaaacataagagaaaatctgtgtccttgggtatggtgatgagtttttagatacaacatcaaaaacaccatcaagaaaaaaataataaattagagtttattgataaaaactttagtctgcaaaagacattattaagagaatcaaaacacaagctacagattgggaaaaatatttgcaaaacacatatcrtataaaatactttatccaaaatataaaaagaccttttaaaactcaaaaatcagaaagcaaagaacccaattaaaaaaatagaagta

SEQ ID NO: 952206 - DNA, 600 bp, Homo sapiens
catacagctgaaagcaggaatattttttwaatcattttaatgcacatgaagttaattctatggtgtagtgcagaggactcttgcaccaccaccaataaaggggacaccagttcttcacataaaccagagaaatgcagtgagttctctagaccactcagaaatgcttggcaggctgctaagaaaataggcagaattgtaaactgaaccagattctacaataggagccaaatcaccaagcaagtgccagatgtatagaaagaatagaaaactggtgaccctacttagatttccttgtaacatatccaatcacccacctaataattacctttaaacaagagccatactacttatatgctgtggccatggacaaacgtggactaatgcctcaaaattgggaagaacaattaacaaatacatgtccaatacttctgttttcacttcaatgtttaaattattgttcttccaatcataaacaccaaaaatatttcctgaagttcacttatttcaaatggaatacatgctcagttcaaacataactaggacatacaaatatttttatttaccagtacccaggcttatgcccaaaatatttaacaacct

SEQ ID NO: 952207 - DNA, 552 bp, Homo sapiens
acacgaccaaattcacatataacggtattaactttgaatgtagatgggctaaatgctccaattaaaagacacagactggcaaattggataaagactcaagacccatcagtgtgctgtattcaggaaacccatctcacatgcagagacacacatagactcaaaataaagggatggaggaagatctaccaagcaaatggaaaacagaaaaaggaaggggttgcaattctagtttctgataaaacagactttaaaccaacaaagatcaaagaagacaaagaaggccattacttaatggtaaagggatcaattcaacaagaagagctaactatcctaaatatatatgcacccaatacaggagcgcccagattcataaagcaagtccttagtgatctacaaagagacttagactcccacacaataataatgggagactttaacaccccactgtcaacattagacagatcaaagagacagaaagttaacaaggatacccaggaattkaactcagctccactccaagcggacctaatagacatctacagaactctccac

SEQ ID NO: 952208 - DNA, 646 bp, Homo sapiens
ttttcatgtggagttttaggtttttccaaatataagattatatcatccgcaaacaaggataaattgacttcttccttttcaatttgtatgccctttatgtcttcctcttgtctgattgctctagctgggacttctagtactatgttgaataacagtggtgacagtaggcgtccttgttgtgttctagatcttagagaaaaggctttcaatatttcttcattcagtatgatactagctgtgcatctggtcgtatacggcttttattatgttgagttatgttccttctatacatagttttttgagggcttttaatcatgaagagatgtcgaatttcatcaaatgctttttcagcatcagttgaaattatatggtttttaactttctagtactttaaagagatgtttatacaatataaatccatctgaaatacaatgttacatataagatcaaaatctatgtattttctaaaaaaaaaaatcagtgttgtaatatttgcttaccacatcaatttttgtaaatctcataggtgttcaattcgaattttgttaataagtggtgaggttgagccaaattttattttaaattacttttcctttttttgcagatttataagtgttctggatgtrtgtattatttagggttccag

SEQ ID NO: 952209 - DNA, 576 bp, Homo sapiens
aagaataagaagggaggagaagggggaggaggagggaggaaaggaagaggaaggagaaggagacgacagtgacataagagagcattctctctctctgtctctctctctcccccgcccgcccttcccgtctccctctctctgcctctgcctctctctgctatatgaagatataagagcacagcagcctgcaagccaagaacagagccctcacttgggaactgaatctactggtaccttgatcttgactttctagcctccagaactatgagcaataaatttctgttgtttaaaccacccagtctatggtattttgttgaagcagcctgagctgagtaagacaacccccttttgacttgcaagttgctgaagcatggttacatagtcaggatttcttcagagacaagctgattgtaatgctgtggcctgtcctctctgcagtgcagggctcgccactttatgccaagtgagaggcaattccaaagaaaccatgagtgtacttgacttgagtctactggagattgggagggagagtggttatggatacctgattcmtgcctgtaaaagtgtaaagcttgg

SEQ ID NO: 952210 - DNA, 552 bp, Homo sapiens
tgttccattgatctatatgtttaattttataccaattccatgctgttttgtttactataccttgtaatatattttggagtcaggtagtgtgatgctrttctttttgctcaagactgctttgggcattctggctctattttgggtttcatacaaattttatttaggcttgttttttctctttctgtggaaaaatgacattggtattttgatagagattgcattgactctatagactactttgggcagtatggttattttaacaatgtgaattcttctgatccatgaatataggatgtctttccatttgtgtcctcttcagtttctttcgtcaatgttttatagttttccttagagagatctttattcctcggtgtttttaaaactattgtaaatggtattgccttcttgatttctgttttggctatttcattataggtgtatagatatgctactgatttttgtatgttgattttctgtcctggaacttaactgaatttgtttatcaactcttagagatttttagtggagtctttgtttttttaaaatataaga

SEQ ID NO: 952211 - DNA, 585 bp, Homo sapiens
ctgcacatggagggaccatttaaaccactcctagccagaggggaatcacaaattccagtggtccaaacttgagttcccacaaacstcaccacagagggctacagtgctctgtttctccatgtaaacctgaaaggcagtctaggccataggactgcaactattaggtgagtcctagtgctgaacggggcccagggacaatggactgaaggagcatgtgccatactgatacatcaagtggggtagtcaagagagttctggcatcacccttcccctaatcccaggctgcacagctcatggcttcaagacagaccctttccttttgcttgatgagaggaaagagtggggaggtctttgtcttgcatcttggatacagtctcagccacagcagaagggatgaagcacctgtttcaggccatagcatccaggtgacatttttagacacactcgggacaaaaagggaacccactgccatgaaaggaaggatgcagtcctggcagcattaattacctgctaacttaagagcccttgggccctgaataaccagcagtatacccaagtactatgttgagggacctgtgtgactca

SEQ ID NO: 952212 - DNA, 584 bp, Homo sapiens
gcagaccaccaaggtggtacatctgtgagtttgcaagagtcatagtgttactgggcttgagatgcctctaaagcagatatggctgcagtgaccaaatacttagatcacaaccctcaattccctttgaatactgggaaagccttctcaaggaggatgggaggctgggcatggtggctcatgcctgcaatcccagcactttaggaggccaaggtgggcagatcacctgaggtggggagttcaagaccagcctgaccaacatggagaaaccccgtctctactaaaaatacaaaattggccaggcgtggtggcacatgcctgtaatcccagctacttaggaggctgaggcaggagaatcacctgaacctgggaggtggaggttgcagtgagccgagattgtgtcattgcactccaacctgggcaacaagagtgaaattccatgaggaagaagaaggagaaggagrccagatgtggtggctcatggctataattccaacaatttgggaagctgaggagggaggatcacttgaatccatgagatcaaaaccagcctgggcaacatactgagatcctgtgtctacaaaaaa

SEQ ID NO: 952213 - DNA, 465 bp, Homo sapiens
caaaatgtgttattcccagcacagtgttctgtgacatgctcctgrgcacacagtacctgcttagtacatgtgtacaggtttcccaagtgcagattcactcagacattgctgtcttctgttgtctctgtaaacttaaaaaagccaacaaaaaatataatattttggaatggagattagttgtctttatttgtagcagaagtattagtattgtgacaaatgtggtatgtgtaagggactcttctgtgcctgctttctcttgctaatgctaataatgtgtctgcgaaagcacaatcagcatttacaggggacttgttgaaaaagcccattcctggacccttttggatcccgcagaatcacattgcataaagcagggccaagattaccaagtgatttataaacttgaggggttcaagatacattcatgagagtttagttcaacctttgcatcaaaggaaggctgcactg

SEQ ID NO: 952214 - DNA, 599 bp, Homo sapiens
ttgagaggactgggtatgaagttgggaacccaggtccaaatcctggctcagccactgttaaatgtgtgaccttgggcaagttacttaacctctctgagcctcagtttcctcatctggactctgtaccaagcccacaagaccacagaagcagcccctgcttgcatctccatctggctcttccattcttctctggctgtctctctaagcccacgccacactggccaccattcttgttcctatcacagcgaagctcaatgtggcctcagggcttttgccctagctattcctgctgtctggagttaccctttccctgattttcttgtggctggttccttttcctccttcatgtctcagttcaaaggttaccttcttagagaggagagcccctcactgaccactctccacacctgccatcatcaattccattccctggcctcagtttcttccagtgcctctcgggttctgaaattgtcatatttgctttttgcattgttgttgctctttrcttgttatctgcttggcactccctctagacccatgggctctaggagatgaggaatcgtgattgtcttgttcattgctacatctccatcacctaa

SEQ ID NO: 952215 - DNA, 601 bp, Homo sapiens
ctagagtgacctgaatgcattaacaaatttggattctttcctattccttacwgcctagcaaatgaggctcagtgttaaatatcactctgtgcatgtatgtgaaatgaaaaggttctaccttataactttctccatcaagggagagaaatacagttgagacagtatacgacagaggttgacaaggcagatgtggcataaggacaagagataagaacaattttaggtgctggtaatagccttgttgatagagttgattgtggatctgagaaaggaatcaagggagctaatgggttagaatatgggtgttgagaaatcagaaaccacaaaaaaggttaagtacaggttcagtaagagtgagtgaagagaaaacagaattatgatgaacagacaaatgagataagagagattcaaagttctcaattttgaagctggaacattagttcccagagattatatgaccctttgagagacagtgtttagaggtgctgatgggggatggcaattttgaggaataagatcgtgaataagaataataaaactaaagagtgtgagagagtcctggaggtcagtggaaaacattaatgtggatgagaaaagtcag

SEQ ID NO: 952216 - DNA, 529 bp, Homo sapiens
aatataaatgtatcaacattccaattaaaaaatattgccagmgtagatataaaagaaaaacacaaatgtatgccgtcaacgaaagatgctcattaaataacagaaacagatatgttgaaaggaagataaaaagaaaacatgtaatatgaaaatggtaaacacaaaaaaatggtatggctacattaaattaaagtaaaataaggcaaaagatgttaggagattgatggcagtggtgggcagtctgggcaggaggcagactagatcttgggtggaagccccaccttcaagcaggttaggggcagtggctgaagcctgggggctgggctgctggtcttgctgaccagagtgggaacttgtggtgctttttctgggcccacccatggccacccatggaacaatcggagtgcacgtcctccccactgagacccataaaagccccagactcattcagactaagagacaatgggacgacttgcctgcaagagtatctaccggctccagggtcttctctctgctgagggctaaacag

SEQ ID NO: 952217 - DNA, 529 bp, Homo sapiens
aatataaatgtatcaacattccaattaaaaaatattgccagcgtagatataaaagaaaaacacaaatgtatgccgtcaaygaaagatgctcattaaataacagaaacagatatgttgaaaggaagataaaaagaaaacatgtaatatgaaaatggtaaacacaaaaaaatggtatggctacattaaattaaagtaaaataaggcaaaagatgttaggagattgatggcagtggtgggcagtctgggcaggaggcagactagatcttgggtggaagccccaccttcaagcaggttaggggcagtggctgaagcctgggggctgggctgctggtcttgctgaccagagtgggaacttgtggtgctttttctgggcccacccatggccacccatggaacaatcggagtgcacgtcctccccactgagacccataaaagccccagactcattcagactaagagacaatgggacgacttgcctgcaagagtatctaccggctccagggtcttctctctgctgagggctaaacag

SEQ ID NO: 952218 - DNA, 529 bp, Homo sapiens
aatataaatgtatcaacattccaattaaaaaatattgccagcgtagatataaaagaaaaacacaaatgtatgccgtcaacgaaakatgctcattaaataacagaaacagatatgttgaaaggaagataaaaagaaaacatgtaatatgaaaatggtaaacacaaaaaaatggtatggctacattaaattaaagtaaaataaggcaaaagatgttaggagattgatggcagtggtgggcagtctgggcaggaggcagactagatcttgggtggaagccccaccttcaagcaggttaggggcagtggctgaagcctgggggctgggctgctggtcttgctgaccagagtgggaacttgtggtgctttttctgggcccacccatggccacccatggaacaatcggagtgcacgtcctccccactgagacccataaaagccccagactcattcagactaagagacaatgggacgacttgcctgcaagagtatctaccggctccagggtcttctctctgctgagggctaaacag

SEQ ID NO: 952219 - DNA, 529 bp, Homo sapiens
aatataaatgtatcaacattccaattaaaaaatattgccagcgtagatataaaagaaaaacacaaatgtatgccgtcaacgaaagatgctcattaaataacagaaacagatatgttgaaaggaagataaaaagaaaacatgtaatatgaaaatggtaaacacaaaaaaatggtatggctacattaaattaaagtaaaataaggcaaaagatgttaggagattgatggcagtggtgggcagtctgggcaggaggcagactagatcttgggtggaagccccaccttcaagcaggttaggggcagtggctgaagcctgggggctgggctgctggtcttgctgaccagagtgggaacttgtggtgctttttctgggcccacccatggccacccatggaacaatcggagtgcacgtcctccccactgagacccatraaagccccagactcattcagactaagagacaatgggacgacttgcctgcaagagtatctaccggctccagggtcttctctctgctgagggctaaacag

SEQ ID NO: 952220 - DNA, 569 bp, Homo sapiens
gtataacactcgtggggtatcctcttgtaaaggcctaggaaagtggacccacctaacctggtgatacagaaggcagaaattatttaggcagatagtgagggcaacagagttcttggcagagcttcccttctaacaaaaagcagccccccaaatcattgcttttctaacaaagagcagcctgaaaaatagagctgcaaacatagataatcaagcaggaagcttgcacgggcgaatgctggcagaggcaccaatagaaaagggccacctgggggccaggcatgtccaacacggaggctccatcttcccttttcttgttaccatgtgtagagtaaagaaacgggcaacatggcacagctcaggcagaagacccgcctgcataataaaagattatggtaggggtggccagaaattcataccctatgcacacggcacatctagtcccaaccagtttttcatgacctatgcaagtggcacacctggtccaaccaatgtttcacaccctgtgtaaatcaaacactgcctcctcaccaggcatckataaaaccccttgcatttcaccatggatccgg

SEQ ID NO: 952221 - DNA, 736 bp, Homo sapiens
ccaccttggcctcccaaagtgttggggccaggtgcacaacatcacacctggcaaattattatttttaaaacttttagcagaaacagagtcttactatgttgcccaagctggtcttcaactcctggcttcaagtgatcctcttgccttggcctcccaaagtgctgggattataggcatgagccatcacgcctggccaaaatattgatgattcttgtgtgagacaggatataggctctagctgctgcagtgaataacaaacacccaaatatttaaaaggcataaacaaaacagaatgtcatttcttctcactcagaactgatacggaagctctatggtgttagacactcaagctcctcttgttactttgccataatctactggtagcttcctgtgactctaagatggctgctccagcttctgccatcttattcacacctcggcaatgggcaggtggaaacagggagggtagttattcattcattcttttctggctatctatttttgtgtaataaatcaaaaaatttagtgacctaaaacaattaatcatctctcatggtttctgtggaacaggaatttggaaagggcactcctaggaaggcttgtctctgcttcacaatgtcaggggtctcgtctgggaagatttgaaagttggaggtgaatcaatggctgagggctatygccatctgtaagcttccttaactcacatgtctgatggttgatgctggctaccatcttt

SEQ ID NO: 952222 - DNA, 661 bp, Homo sapiens
acagttcacctcacaggactctgtgcagacacccccagtaccagcccagagcctggcagccctgcttgctggctagattcagaagagaaataacaatcactacagtttggctctcagaaagccacatccctaggraaagagggggaatattacatcaagggagtaccccgtggcacaagagtctgaacagcagccttgagctccagatctcccctctgacatagcctacccgcatgagaaggaaccaggaaaacaattctggtaatatgacaagagaaggttctttaacaccccaaaaagtcgcattagctcaccagcaatggatccaaaccaagaagaaaaatctgaattgccagaaaaagaattcagaaggtcaattattaagctattcaagcaggcaccagagaaaggtgaagtccaacttaaggaaatcaaataaatgatacaagatatgaggggagaaatcttcagtgaaacaggtagcataaataacaatcacaacttcaggaaataaaggacacacttagagaaatgcaaaacatacttgagagtctcaggaatagaattgaacaagcagaagaaagaacttcagagctcaaagacaaggtttttggaataacccaatccaacaaagacaagaaaaaagaattttgaaaatgag

SEQ ID NO: 952223 - DNA, 702 bp, Homo sapiens
cgagagagaagagagaagggacagaaaactgcagaggataagatgtgacagaggaaccgaatgctagcatcaagtgagggagaggcagraggcacaggcgaagggaataagagagcagggagctcaggagtctctcaatagctgagttgctgtcttctcctttggcaatcagggcctacaggttggccccaccattgagctcatgttgttgagctgctccagttgcagttgctgctgaaatttcacttctagtgtctgcaccagtgagtttccacatccagccaaaagctgggtcatctacttcatgaactactgctgggcatcagaagacctgttagggaagttgtgcctggcatggctgggaaagagctgggagacttgggcacagacctgaagctgctgtctgccaagggtgctggagtctgaaacatcccaaagaaatcaaggctgggtaccagccagaagcctcagtccactaagtctccagtccctgctgtatctacaacagcatctgcaagaattgacaaaaagtgagagtgactccacattctgcatctgttacaagaagactgagagctgcaggcagagctgctcctgcacttagggattccccaaaaaagtggcatctaagcatcaaagttagggttttgggtaagcatctgcatcatgctatccatgcaggagctgagatcacattctgca

SEQ ID NO: 952224 - DNA, 633 bp, Homo sapiens
ttggcctgcccagtgatgcaagatcaacaaggcaattgggtacatgaacccactactttcaacacttataaagaaataagaaaaagcattagagaaaacggagctgctagcccatttacaaaaggattaattgaggccatagcagataacttccatatgaccccatgggactggtcatagctaaaacaactttagaggccagtcaatacctcctctggagggcagaatatgatgaattgtgcgaacaagaagtcaaccagaatcaattggccaggcaaaacataatggctgctatgctccaggggaggggtccctatgtcaatgtacaacaacaattaaattttgtcccccaagcctaagcacaagtgtccttgtgcaccctcaggttttgggactgaatccccaaagatggagttcaacagggatcttttgtaaatgtagaacaaaggcctcaggagcgatttgttgaatttataaatcagttaaccaaggcaattaagagacaaattagtcatgcccaggccactgatatcttattgttgcaackggcttatgaaaatgctaatgtagactgcccgcagacaatgcaggtaatcagaggaaaggcagctacagtcggggaacttatatgag

SEQ ID NO: 952225 - DNA, 565 bp, Homo sapiens
gtgcataacaaaactaaaatagaataatgcatttcaataaaacacaccccttctgagcttttcaattcctaagaattsctctgttagaaagaaaagaaatcacgtaatattgacatttggatacatttctcttgtgttagggactgaaaaatagaatctgtagagcaaacatcactagaaacaggaacagagttgtagaagctttacccaccagaatttcacagtttgaattctgaagatttttctgcttcaaagatcaacagaacccagattttaatatcaattatatatgtatatattacttgtgttatagattaatataacttaaatatttccaaactatcatcatagccatttttactacaaatattatctttacccaaatatgtttgatatggttatagaagaggaatgcttatgacgatataacacataatagcaaataaagccttttagaaattattaatctaaaaatcaaataatttttattaaaatgtcaagaaaaggtcagactttctagggaaagttttgagattaaaatgctttaagcccatcttacactgga

SEQ ID NO: 952226 - DNA, 584 bp, Homo sapiens
acttactatttattaagtggaagtggatcaccctaaaggccttcatcctcattgtcttcatgctgagtaggctgaggaggaaatggaggggttggtcttgctgtcttgggggtggcagaggtggaagaggtagagggagcaggagaggcaggcaccctcggggtgactttatggaaatacatcataatttctgttagacttttgtgcttttacatttattttaaaatgtttctatatggtaccgatccttcttccactgtttgcttctgttttagtgcctgtaacatagcagagtccatgtcttaaaagtagtccaaagcagtcttgaataatcagaacccttctgccagattgtctaatgtcagtttgtttcctggcactgcttctacatcttcctcatcctctggcactggttcagaagcactcgtctccatcaaaccatcttctgttaatttctctagtgtggtgtctatttgctcktaaatatttccatgattgctatcttgaagctcttcatcacccaccccctccaccccactgtttttgccatatccagtttctttcatgatttccttgattggctc

SEQ ID NO: 952227 - DNA, 464 bp, Homo sapiens
gtcctgagggctctcacattccatccgttctccacccagaagtcagagccacctycccaaagagcaaatcagatatattattcttccgctaaaataaaccctgcagtgtcagttttttaaaaatgcaggaaaaaggcatatcacataatttaattttttttttttttgagacggagtctccctctgttgccaggctggagtgcagtggcatgatctcggctcactgcaacctctgcctccagggttcaagcaattctcctgcctcagtctcctgagtagctgggactacaggcgtgcgccaacacgcttggctaatttttgtatttttagtaaagacgggatttcaccatattgcccaggctggtcttgaactcctgagttcaggcaatccgcccacctcggcctctcaaagtactcggattacaggccgtgagccaccacgcccggcctaaaaaaattttttt

SEQ ID NO: 952228 - DNA, 725 bp, Homo sapiens
ctgttagagtttgctggaggtccactccagaccctgcttgcctgggtatcaccagtggaggctgcagaacagcaaatattgcagaacagcaaatgttgctgcctgatccttccyctggaagcttcgtctcagaggggtacccagcggtatgaggtgtcagtcagcccctactgggagatgtctcccagttaggctactcagtggtcagggacccacttgaagaggcagtctgtctgttctcagatttcaaactccgtgctgggagaaccactactctcttcaaagctgttagacagggacatttaagtctgcagaagtttctgctgccttttgttcagctatgccctgcccccagaggtggtgtctacaaaggcaggcaggcctctttgagctgtggtgggctccacctaattagagcttcctggccactttgtttacctactcaagcctcagcaatggtggatgccactcccccagcctcgctgctgccttgcagttcaatctcaggctgctgtgctagcagtgagcgaggctccgtgggcatgggaccctctgagccatgcgcgggatataatctcctggtgtgtcatttgctaaggccgttggaaaagtgcagtattagggtgggagtgttccaattttccaggtaccatctgtcaccgcttcccttggctagggaagggaattcccagaccccctgtgcttcctgggtgaggtgaggccca

SEQ ID NO: 952229 - DNA, 595 bp, Homo sapiens
atttgttaagatttgttttgtaacctaacgtgatctgctttggcaaatgttctgtgtgtgcttgagaagaatatgtgttctgctgctgttaggtggaatgttctgtatatgtatggcagtttagttgagtttatagtgttcaagtctattgtttctttagtggtcttctgtctggatgttctgtgtattgttgaaagtatggtgttgaaatctccaattattagtgggtggctatctatttctctcttcagttctgttaatgtttgcttcatatatttgggtgctctgatgttggatatataaatatatatatattttcagatggagtttcactctgtcacccaggctggagtgcaatggcactatctcagctcactgcaacctctgcctcccaggttcaagagattctcctgactcagctacctgagtagctgggattacaggtgcccaccaccatgcttggctaatttttgtatttttttgtagagacagggttttgctatgttggccagactgctctcgaactgctgacctcagktgacctgcttgcctcggcctcccaaagtgctgggattacagttgtgacccaccattc

SEQ ID NO: 952230 - DNA, 632 bp, Homo sapiens
tgcagactactctgctgaatttcagctaaacccaataaaacttgtttgtatgcgagtatacatttatatatacacatatgagtaacataaagattataagaatcagaagaaaaagaaaggaatcaagcatacaaggatagaaaactcttaagttttatcttttattagctagtcccttccagtttaaattgatacgcataatgtggacaaacatttcccttaaaagcagaagtctagatttgctaagtccaagaataaagataaatgcacatgatcaatttctagccattattttatatatccaaaacagtgaggtagcctgaataatctccatattctgaactctccattttgctcccaatatatcagatttataatatacacaaaaaataagagaaagagaacacacaaacttgcaagcactcacctttccctctgccacttctaatccttgactagacccagtcaaattatctgaaattaccaatgggtgctcccaacagctgacaaactatgtgactttcctctaaagaaaggctttatcatctttgtaaaatttartatttaaaataaaaactagttcgaataacctgagtttttaatcaataattacatggggcaatgatttatac

SEQ ID NO: 952231 - DNA, 563 bp, Homo sapiens
tcaggctggtctcgaactcctgacctcaggtgatccacctgtctctgcctcccagagtgctgggattacaggcgtgagccaccacgcccggcctttgtgcaccggtttttaactgccccagatgggaagggctgcatctctgctcacattcctattagtcagaacttggccccatggcctcacctactgcagaggtggctgggaagggcaattgacccaggaaaggaaacagcaagatgaacacattgtattgtgtgccgcacactgccacccccacatgtcagggaaggagggtcttgggaaggctgctgggtgggtgactgccactccacctcacttccacttactccccaaccaggccagcaagtctggtcacagatgtggcaggggaggctccccttctgtgggtttccatggccttgaaggaaataaaaatatttctccctaaaayattgaggattgttaaattaaagacccttaaaacatgggaacactctacctcaccctctacttgcctgatggcaggacataaatccttccaaactggatgtgtgggtgaatgg

SEQ ID NO: 952232 - DNA, 563 bp, Homo sapiens
tcaggctggtctcgaactcctgacctcaggtgatccacctgtctctgcctcccagagtgctgggattacaggcgtgagccaccacgcccggcctttgtgcaccggtttttaactgccccagatgggaagggctgcatctctgctcacattcctattagtcagaacttggccccatggcctcacctactgcagaggtggctgggaagggcaattgacccaggaaaggaaacagcaagatgaacacattgtattgtgtgccgcacactgccacccccacatgtcagggaaggagggtcttgggaaggctgctgggtgggtgactgccactccacctcacttccacttactccccaaccaggccagcaagtctggtcacagatgtggcaggggaggctccccttctgtgggtttccatggccttgaaggaaataaaaatatttctccctaaaatattgaggattgttaaattaaagacccttaaaacaygggaacactctacctcaccctctacttgcctgatggcaggacataaatccttccaaactggatgtgtgggtgaatgg

SEQ ID NO: 952233 - DNA, 673 bp, Homo sapiens
tacaagtattcaattcaattctgcttctcccttaagaatagatctctgtgaaaacaactaagtattggcattgctagaattgaagacaacatacttaaaaggatacaaatttagaggcaggtygaaaaatacccaaattcctcctatatttgcactcttattccactggcttgcattgagagaccttaactgaacagcccctgtaactcgccagtgaatatgctgtagagatatcattatagatgttgtcctcggtctctcatcatgtacatctcgtgaagatccatgagataaaatttctcatcttccatgtattaagaactgcaattctcacgcctgtaatcccagcactttgggaggccgaggcgggtggatcacgaggtcaggagatcgagaccatcctggctaacgcagtgaaaccctgtctctactgaaaatacaaaaaaattagccgggcgtggtggcgggcgcctgtagtcccagctactcaggaggctgaggcaggagaatggcgtgaacctgggaggtggagtttgcagtgagccgagattgcgccactgcactcactccagcctgggtgacagagcgagaccccgtctcaaaaaaaaaaaaaaagaactgcaattctaagtaaccgctcagtgcacgttctgtagcaagcacgtttcaggta

SEQ ID NO: 952234 - DNA, 688 bp, Homo sapiens
ctctcatgttgaactgtaatccccagtgttgtgggagggtcctggtggaaggtgattagatcatggtggtggtttctaatggtttggcaccatccccctggtgctgtcttgagatagagttctcatgaaatctggttgtttaaaagtgtgtagcactcccccttcactctctttctctctctcctgctctgccatgggaagactggcttcccattcgccttcctcatgattgtaagtttcctgaggcctcccagccgtgcctcttgtacagcctgcagaactgtgggtcaattaaacctcctttctccatacattgcccagtctcaggtagttctttacaacagtgtgagaatggactaatacgccccttctctcttggctcactctgcaggctcctgagggctgggcacctgactcaggcctgacaattaaagcacagcatcccttgttctctgtgatacattcagggatgaacacgtcacccaagttgggccaaggagagttctcctaggacctttgctgggactgtcatttttccctctggcccaaggtttatagaacataagtctggagcttctcatggccacctgctayggctcagggaaagcctgtctgtgagtgaagccaacacaaaggaagaaagagtctagaaaaagagagacagattcatgatgacacgacttgagcc

SEQ ID NO: 952235 - DNA, 535 bp, Homo sapiens
gagtgcagtggtgccatcacagctcactgcaacctygaccttcttgggctcaagtgatcctcccacctcagccccctgaatagctgggactacagccatgtgccaccatgcctggctaatttttgtatattttttagagacagggtctcactgtgttactcagactggtctcaaactccagggctcaaagcaatcctcccaccttggcctcccaatgtgttgggattataggtgtaagccagcgcaccaggctcaactataaagttattgatagaacttcccaaatgatggaaaagacataagattttgaagaaaagaatcgagagaaacaaaaataactggcaatgtaagagttaagctacatgttgccacatcatccatgttaggaaaccaaaaacccccaaatagattaataaaaatgaaaaataggtttaaattttaaaataggggatacgtatcttctaaatgctgtaattaatagaaaatgctttagtacatggtctttaatttttttcttttttagccgagtatatgc

SEQ ID NO: 952236 - DNA, 720 bp, Homo sapiens
acattgtttgttgctaggtaaaacataggcatgttcttcttcccccgcgtgaaaacttggccccaggcacaggttgctaatgcagtcacagcagacgtctttgttgcccttcactgtgattcaaccccaccattcttgagcaagtctttgaagcccatccaatcttaacagaactgcttttgtgggtgagacatctctaagaagttcaattgtgttttggaccaaaatcatttgccattcttctgttcctaacacacgggtctctgtgtgttgatctaacaaattggtagtgttttgagtaatacatcatgaggccaatggcaccttaacgatgtattacattaatatatcatcaaagccatggcattgttatgatatattactttaatacatcattggagtgccacagctttaatgatgtattactcaagaccatagcaacagctagaaagatcaagataagttttgtatttttaaaacttattctcagtaaatataatttttttttaagtttccacaataaaatatgtgttcaaacgaaatacgaggatgcaaggcctctgataagtaagcaacgagatgcttccttggtcatcctcctcccactgtctactacgtacctggctcctaagttcattttaaaccackttatccaaatctcctaaaagtaatattgctactgaatttatgattctataagtatcccagggatctccaatt

SEQ ID NO: 952237 - DNA, 720 bp, Homo sapiens
acattgtttgttgctaggtaaaacataggcatgttcttcttcccccgcgtgaaaacttggccccaggcacaggttgctaatgcagtcacagcagacgtctttgttgcccttcactgtgattcaaccccaccattcttgagcaagtctttgaagcccatccaatcttaacagaactgcttttgtgggtgagacatctctaagaagttcaattgtgttttggaccaaaatcatttgccattcttctgttcctaacacacgggtctctgtgtgttgatctaacaaattggtagtgttttgagtaatacatcatgaggccaatggcaccttaacgatgtattacattaatatatcatcaaagccatggcattgttatgatatattactttaatacatcattggagtgccacagctttaatgatgtattactcaagaccatagcaacagctagaaagatcaagataagttttgtatttttaaaacttattctcagtaaatataatttttttttaagtttccacaataaaatatgtgttcaaacgaaatacgaggatgcaaggcctctgataagtaagcaacgagatgcttccttggtcatcctcctcccactgtctactacgtacctggctcctaagttcattttaaaccactttatccaaatctcctaaaagtaatattgctackgaatttatgattctataagtatcccagggatctccaatt

SEQ ID NO: 952238 - DNA, 614 bp, Homo sapiens
agactggagtagcatctcatgccctagaattttaggggtgctccctgtgctttcaatgagtctcaaacacaccaactctcatcttgaactctctgtttgctcctcaatttytgcagctcctactttttcttcttttcctgggatttcccattcttctctacaaaaatgaccaactcccagttcctgcctgggtggaagtgacaattttattactttttctttcacctcgtgattctacaaagggaacaaatgagccctggtttaaggcttgcagatccattggtgagatggggaggagactcttttatccacaggaaaaacagttgaggggggggttccttcttatactggtctgctatgactgccacattaaaataccacagactgagtggcttaaacagcagaaatttatttctcagagttctggaggttagaagtccaagatcagggagcctcagtgtgtttatttttcctaaagcctctcgccttgactttcagttcaccgtattttcactgtgtcctcacatggctgtttctctgtgcacatccctccccagccccctggcttttcttcttcttctaaggataccagacctattggattaaggccctac

SEQ ID NO: 952239 - DNA, 769 bp, Homo sapiens
agctggcatgaccgcggcagccactgccgtaagcatcatccacaagcaacacagacactccagagtctcagcagtcagactcattctctgcaggcagaaargcagagagttctaaaggatttgaacctgaaggagaactggagtgcctgatgcagtcattagaagactgcaaacaagcattcaatcccctggccctgccttctcctccactcagtaaggctgtctgggacctcaccagctcattcctacctaaaaacctctagtagacaatctctagccatgggtgctcaaccatgcttatcatggcacccctcttaaacatgaatttaagcataatgaccaaggaaaccagacatttaaggaaagaccactgagggactccaagggctagaactgtggttgcacatagaagacattcaataaatatttgctgaatgaatgactggccacgagagaagtaacaaagactcacaatggagggaacagataattccggaaatgaaagatatgttaacatctttaaaaaaataaaaactctagtatccttggtgaaatttaaaactgtaatgtctgataaagcagaaacaggctaccaaaagaaaaagacagtagtgagaggagctcttaaaaattaaaaaaatgcaatcttccacccccccaaaaaagagttgaaagataaaatgaaggagagtgagaaaaatattgaacaaatgacaaggagacaaaatgcattacaaaaggccaaattgaggaggcactaagggcacat

SEQ ID NO: 952240 - DNA, 611 bp, Homo sapiens
atgtatactggtatactattgtggtcttcatttgcatttccttaatggctagtgatactggacatcgtttcargtgctcattagtcatctgaatatccccttaggtgaaatgtctctacatatcttttgcctattttctaactggattatttctttaatattgagtttcttcctataaccttgatctgactcctttgctacatatgtggcttgcaaatattttcacttagttggtagctggtcttcatcctcttagcagggttgtttgaagaaaaaaaaaattttttttttttgagacggagtcttgctgtgtcgcccaggctggagtgcagtggcgcaatctcggctcactgcaagctctgcctcccaggttcatgccattctcctgccttagcctcccgagtagctgggactacaggtgcccaccaccacgcccggctttttgtaattttagtagagatggggtttcaccgtgttagccaggatgttctcgatctcctgacttcgtgatccacccgcctcggcctcctaaagtgctgggtttacaggcttgagccaccgcacctagcctaaaaagttttaattttaataaatttcaattaatatgaaca

SEQ ID NO: 952241 - DNA, 573 bp, Homo sapiens
aggtcttttggagtttgctagaggtccactccagaccctgtttgcctgggtatcagcagcggtggctgtagaacagcgtgtactggtgaaccgcaaatgctgctgcctgattgttcctctgtaagttttgtctcagaggagtacctggctgtgtgagatttcagtctgccccttctgggggatgcctcccagttaggctacttgggggtcagggaccacctgaggaggcagtctgccagttctcagatctcaagctgcatgctgggagaaccactactgtcttcaaagctgtcagacagggacttttaagtctgcagaggttactgctgtctttttgtttgtctgtgccctgcctgcagaggtggagcctacagaggcaggcaggcctccttgagctgtggtgggttccacccagttcgagcttcctggctgctttgtttacctaataaaacaactaacttggcaatggtgggcrcccctcccccagcctcactgctgccttccagtttgatctcagacttctgtgctagcaatcagcgagactccgtggggtaggaccctccgagccaggtg

SEQ ID NO: 952242 - DNA, 573 bp, Homo sapiens
aggtcttttggagtttgctagaggtccactccagaccctgtttgcctgggtatcagcagcggtggctgtagaacagcgtgtactggtgaaccgcaaatgctgctgcctgattgttcctctgtaagttttgtctcagaggagtacctggctgtgtgagatttcagtctgccccttctgggggatgcctcccagttaggctacttgggggtcagggaccacctgaggaggcagtctgccagttctcagatctcaagctgcatgctgggagaaccactactgtcttcaaagctgtcagacagggacttttaagtctgcagaggttactgctgtctttttgtttgtctgtgccctgcctgcagaggtggagcctacagaggcaggcaggcctccttgagctgtggtgggttccacccagttcgagcttcctggctgctttgtttacctaataaaacaactaacttggcaatggtgggcacccctcccccagcctcrctgctgccttccagtttgatctcagacttctgtgctagcaatcagcgagactccgtggggtaggaccctccgagccaggtg

SEQ ID NO: 952243 - DNA, 704 bp, Homo sapiens
acgtacaactcaggctgttgcttcagagggcacaatcctcaagccttggtgacttacatgtggtgttaggcctatgggtgcacagaggtcaagatttgaggtttgaaaacctccacctaaatttcagaggatgkatggaaattcctggatgcccagaaagaagtttgctgtgggagtggaaccctcatggagaacttctgctacagcagtgtgaaagggaaatgtggggtcagagcccccacacacagtcctcactagggcacgacctagtggagctgtgagaagagggcaaatgtcctccagatctcagaatggtagattcattgacagtttgcactctgcttgcaccatgcacttcgaaaagctgcagacactcaatgtcagcccatagaagcaaccaggatgggggatgtaccctgaaaagccacaggggtggagttgtccaaggctgtgggaacccaccacttgcatcagtataaactggatgtgagacatggagtcaaagcagatcatttcaaagctttaacatttgactgccttgctggatttaggacttgcatgggcctgtagccccttcattttggccaatttctcccatttaaagagggtgtatttacccaatgcctgtatctccattgtatctggaagtaactaatttgcttttggttttacaggctcacaggcagaagggacttgccttgtgt

SEQ ID NO: 952244 - DNA, 852 bp, Homo sapiens
aggagaacgaaagaaacacgttttgaaagctttctgagaagaagctcaaaagtaaggtagtgaagacccagagctacatccctacaaaattaaatctgtratgtttagatcatgatttccagtgcaaggcagacaaggagaaaatgccaggagtgttggcatctctctctctctctcacacacacacacacgacacaggatctgatgagtttattcattcgttcaacaaacatttgctgaattacgtaccagatatctatacttatttttgttaacttcaaacctagagattggtagaaatgttccagtcctcctgtcaagacttcaaggaaaaagatgtttgaaatttctatttctgtaaagattaaaacatagctacctgcctaatacctcaggaaaaaatagcacatctaaagctagtggaagaaaactaaaacttgcctcctcctgagaccaagttacatatggcaaaattatagtctatggacttaggccttccccaactttttttttagcttcttttttgaacatgggttttctggacctgctatatacactgtggagaatataaagtttaaaaaaatgtaagaaccttcctttgcattataatattaatagtttattaaggtttttttcttatttcacatctaacaagaattaaaattatttcttcactattttttaaataatttatgagttttatgagaaaaataattgataacaaacattatatttctaaactaacaaaatgactcattgataaaatggcccaacatccaccctcaaaatactgatgacagtaccatttttcccccggctttccccaccacatacttacctgtgcaacttctt

SEQ ID NO: 952245 - DNA, 623 bp, Homo sapiens
ccatgttgcagcaaatgatgtgatttttaaaatttcttcttatagctgcatagtattccgtgcagtttacgtaccacagcttctttatccaatccaaaaatgatgggcttctagggtgattccctgtcwttctctagtaaatagtacagggatgagtatgtgagtgcatgtgtctttttggtagtattatttattctcctttggatgcataccagtaaatggcattgctgggttatatgatggctctgttttaagttctttgagaaatctccatacttcaaattggctgaactaatttacatttccacaaacagtatataagtgttcccttttctctgtaaccttgccagcatctgttatttgttgactttttaataatagctatcctgactggtgtgagatggtatcttactgtggttttgatttgcatttctctgatgattagtgaaggaagctgagaaatttttcatgtgtttgttagtcattcatatgtcttcttttgagaagtggctattcatgtcctttgcccaaattttagtgaggtaataatctcattacaaattcttattttttatttttggtcgggcgtggtggctcacgcctataatcccagcactttggga

SEQ ID NO: 952246 - DNA, 623 bp, Homo sapiens
ccatgttgcagcaaatgatgtgatttttaaaatttcttcttatagctgcatagtattccgtgcagtttacgtaccacagcttctttatccaatccaaaaatgatgggcttctagggtgattccctgtctttctctagtaaatagtacagggatgagtatgtgagtgcatgtgtctttttggtagtattatttattctcctttggatgcataccagtaaatggcattgctgggttatatgatggctctgttttaagttctttgagaaatctccatacttcaaattggctgaactaatttacatttccacaaacagtatataagtgttcccttttctctgtaaccttgccagcatctgttatttgttgactttttaataatagctatcctgactggtgtgagatggtatcttactgtggttttgatttgcatttctctgatgattagtgaaggaagctgagaaatttttcatgtgtttgttagtcattcatatgtcttcttttgagaagtggctattcatgtcctttgcccaaattttagtgaggtaataatctcattacaaattyttattttttatttttggtcgggcgtggtggctcacgcctataatcccagcactttggga

SEQ ID NO: 952247 - DNA, 588 bp, Homo sapiens
catgcaggcaggttcttggggccacaggcctctatgtgtggccaggggctctgggggtgctcaaggccctgtccaaagggctggtggagtcagatgtattatttttgtaatactactaagtgtcatttgcctttttcactcgctatctctcgtgaggcaacgtggattttcttgaggttgtagcatgtgatactgcagcagagtgactgcacatgcagccatgaggatctacctgttttttaagccagacattaaaacagtttgcaaaagtgagaaatgatgtgattcatctcatgagattttaaaaaatagagtgacttttccagcaaaatatgtgctttcagttagcatgtgcagtattcctcccttaaacttggtttttgttttggaggttttagttacctgcagaaatggtccatcactgtctgaaaatagtcaatggaaaattccagaaataaamaatttctaagtgttaagttgtgcactgttctaagtggtgtgatgaaatctttgctgtaccactctgtcttgcccaggatgtgaatcctccctttgtccaatgggtccatgtttgtctctgccacccac

SEQ ID NO: 952248 - DNA, 679 bp, Homo sapiens
gaggagggcactgggaattatggatgaagcaacttactgtgaagtcatgaaaacttttattctagtagaaaaaagccaacagctaatgctggtggtaaaastagagagagatttaggaggtcttaagcgtttatagttcttatttataaaattgttgttgggatttaaaaaatggatgttagatatgacattgactcagatctgtgtaacaaaagaaaaagtggttttgaaactactttagtcaaaatagtacagcagttgtttttgtggaatcataggaaaggtgttaacttgagtaaggacattccccaggaacatgtaattttctatgaaaaatttggttagagaaaagatctgagcctgtataagcatttccgcatttattaacttaggaattagagaagatctcagataaatttcttaacgtctaggacctgctccaacagcctctgaaactagtctttttgctttcattttgattccttatggtccattagtcatactgttgcaagatgggctttatgaaatataaatctatgttctcccttacttaaaatgagtaagttgcctaatctcagcctcgtttgtcatctagaaaatggggataagaggtatatgggattattgggaagaataaattggaaaaatataagtaaaatattttatacattgttaagct

SEQ ID NO: 952249 - DNA, 435 bp, Homo sapiens
tcctgcctcagcctcccagtagctagaactacaggaccacctcacccagctartttttattattattattttttttttcaggagagaggaggttttgttttgttgcccaggctggtcttgaacttctgagctcaagtgatcctcctaccttacctttccaaactgctgagattacaggtgtgagccaccgcgcctggtcccaatagcatttctgaaagcttactctggctgctgtgtggagagtggataaaagggaataaatctcagcaggagataattgtgattgtccgggtgagagacgaatgtggcagggacaaaactggaggcagtgaagatgggaaaacaaagtccagaaatacctcaggactaaagcaccagggtttggtgattgataagatgttggggtcgaggtcaacagagaggggtgaatcccag

SEQ ID NO: 952250 - DNA, 602 bp, Homo sapiens
cagctccaggggaggaccagcttcccactccatcccccttctgacctccccatccacctcgctgagacccgcctccattcagtaaaaccttacacccattcttgaagmccacatgtgatccgatttttctgatacaccaaggcaagaacccagggtacagaaagctctctgtccttgcagtaaggcagggggtctaattgaaccgattaacacaagccacctgcagatggcaaaactaagagagcacaaggtaacacacacccactagggcttcaggagctgtaaacactaaaccctagacaccgccatggggtttgagctccatgacatgcccatctgcacgctctccctatgggtttgagcaggggagcactgaagaagtgagccacacccctatcacttgccctgtgaagaggaaaagggaaaactcctgtttcaaatgcagaaaataaacaagctaaaacgaagacggcaaagaaagcaacctctagttgtcctcattgtttgttatccacaaattatatttcattagcttgctaaaaggcactcctgccagcaccaagacagtttacagatggcatggcaatgcccggaaattacct

SEQ ID NO: 952251 - DNA, 642 bp, Homo sapiens
ttaatatagagaggtcccatgtacccttcactcagttgcctccaaaagtaacatcttgcgtaactatagtgcaatgtcaggactgggaatttgacactgacctacccgtatttcactagtttgacatgcattcattttgcctgtgtgtatttagttatgtgcaatattatcacatggaacaagttggaaacaagggttcatcatgctactctctcatagccacagccaccaccctatcctgatgcccatccctaatccctgataaatgctaattagttctccatctctgtaatgcttttatttcaataattttatataaattgaatcatctaatatgtgaccatttgagattggcttttttccctcgatatcttgagacccatcccagttgtgtatatcaataattcctcctttttttttcctcgttggataatattccatggtatggattttttaaaaccatttgtttaagcatttacccattgtgggatattttgcttggttctaattttttctattacaaataaagctgctatgaccatttgtgtacrgatttttgtgtgagcgtttaaattcttgcttctctgtaataaatgccaagggtgcagtggctgggatatatggagagtgcatttttagttt

SEQ ID NO: 952252 - DNA, 566 bp, Homo sapiens
acacaattcaattcagctctgaatctaactgagtgagcacagactccacaggttaagagcccaatcccataagactgccccygaccccagatgccaatcacaagccccaggttgagaccatgtacttctgacccaccagctatagatcaggggttcccacagccccctccttaggtttggtaattttccaggatggctcacaaaactcagggaaacactttccttatgtttactgctttattttgaaggatatgataaaggacataggtgactagccagacgaagacatgcacagggcatggtccagaaggctcctgggcacaggagcttctgtccccatggatttggggtgcaccagcttcccagcacatgggtgttttcatcaacctggaaactccctgaaccccattgttcagggatttttatggaggcttcatcaaataggcaaaataaaacacccaattattaactcaatcttcagcccctttccccttcccagaggctgggggatatggctgaaaatttcaagcttctaatcatgtgttggtctttctggttaccagacc

SEQ ID NO: 952253 - DNA, 566 bp, Homo sapiens
acacaattcaattcagctctgaatctaactgagtgagcacagactccacaggttaagagcccaatcccataagactgcccctgaccccagatgccaatcacaagccccaggttgagaccaygtacttctgacccaccagctatagatcaggggttcccacagccccctccttaggtttggtaattttccaggatggctcacaaaactcagggaaacactttccttatgtttactgctttattttgaaggatatgataaaggacataggtgactagccagacgaagacatgcacagggcatggtccagaaggctcctgggcacaggagcttctgtccccatggatttggggtgcaccagcttcccagcacatgggtgttttcatcaacctggaaactccctgaaccccattgttcagggatttttatggaggcttcatcaaataggcaaaataaaacacccaattattaactcaatcttcagcccctttccccttcccagaggctgggggatatggctgaaaatttcaagcttctaatcatgtgttggtctttctggttaccagacc

SEQ ID NO: 952254 - DNA, 489 bp, Homo sapiens
gtcattgaaatagaaagacaggaagccaaaccatctgtttgcagacgatatgattttatatctagaaaactccacagtctctgcccaagacctcctagatctcattaagaaaaaaaactttagcaaagtttcaggacacaaaatcaatgtacaaaaatcagtagcattcctataaaccaacatccgagctaaggccaaatcaggaacacaatcccattcacatttgccacaaaaagaataaaatacctgggaatacagctaactagggaggtgaaagatctctacaaggagaactacaaaacactgctcaaagagatcagagatgacacaacaaatggaagaaacttccatgcccatggagaggaagaatcaatatcattaagatggccatactacyagaaacagtttacagattcaatgctattcctacaaaactaccaatgacagtcttcatggaattagaaaagactattttaaaattcatgtgaa

SEQ ID NO: 952255 - DNA, 555 bp, Homo sapiens
taatccagtctactattgatgggtatttaggttgattccatgcccataattctgcaatgggcatatgcgtccgtgtgtctttatgatagaatgatttatattcctttggatatgtacccaaaaatgggatcactgggtcgagtgacaattctgttttatgttctttgagaagtcaccatactgctttccacaatggctgaaccagtttgcactgccaccagcagtgtataagcattcacttttctccgggaacttaccagcatctgttcttttttttttttttttttttttgtagtaattgccattctgactgatattagatggtatctccttgtggttttgatttgcatttctctgatgattagtgatgttaagcattttttaatgcttggttccttggaagtcttcttttgcaaaatgtctcttaatgtcctttgcccactttttaatggggtgtttgtttcttgttcatttaagttccttatagattctggatattaraactttttcagatgaatagtttgcaaatattttcttgcattctgtaggttgtct

SEQ ID NO: 952256 - DNA, 675 bp, Homo sapiens
gactgcaccagttctccaacaagagttcttaaccagactgaactggctggcatgacagaaatagaattcagaacatggataggaaaaaagatcactgagatttaagaggatggcaaaacccaatcccaggaaaatatgaatcacaatgaagcaatacaggagctgaaggatgaaatagccaagataaaaaagaacctaacggttctgacagagctgaataacacaatataagattttcacaatgtagtcacaagtattaacagcagaataaatcaagctgaaggaagactctcacaacctgaagactggttctctgaaatcagacagccaaaaataaagaaaaaagaataaaaaggaatgaacaaaatctctagaagtatggcattatgtaaaggggccaaatctatgaatcactggtatcccagaaagggagggggagaaagcaaacaacttggaaaacatatttcaggatattgtccatgaaaacttccacaaccttgctaaagaggccaacgatcaaattcagaaaatacagagaactcctgcaggatactacacaagaagatcacccccargacacataatcatcagattttccaaggtcaaaatgaaagaaagaatgttaaaggcagctagagagaaagggcaggtcacctacaaagggaacctgatcaa

SEQ ID NO: 952257 - DNA, 720 bp, Homo sapiens
cagctagaataaagcaggcagaacgtggaaggacttgacttgctgagtcttctggccttcatctttctctygtgctggatgcttcctgccctcgaacatcagactccaagttcttcagcttttggactcttggacttacaccagtgatatgctaggggctcttgtaccttcagccacagactgaaggctgcattgttggctttcctatttttgaggttttgggactctgactggcttccttgctccgcagcttgcagatggccaatagtgggacatcactttgtgatcatgtgagtcaattctcctactaaattccccttcatatatatatctatcctattagttctgtccccctagagaaccctaatactgatttctcagacacagcatgactccatgaaatttatgcctacttgctctaaacccaccaattacaactccctgagggaaacctgcttggaaaatgccctggaccccagtaaaagcctcagcccacaggtcacttgtactctttgccctgttccccacccactagttgactgtgcatgtcctagatggctccccacttcctgttggccctgggaggcatgctgccctcttctctctggcatctgtaagtaataaactgctgttatttcttgtgttttgttgagttgcctcccgtgtctcacctgactgatacactcgaccctaacttgtttgtcaggattctcctagaga

SEQ ID NO: 952258 - DNA, 461 bp, Homo sapiens
tttatcatttaaaaatgtgtacaatagtagtaacatgctataaatgtttcttactttttaaaactttttcrttattttcactcaatattattttaaaaatctatccaaagtgttgtctataattgagtccattatttctgactgctgcatattattctaccctatgcataaagcatacttcacccaatttcctgttgctagacctcttccaagtccttgttcccataagctttgttacggtaaaaatcctaataaatatcttcatgtgactctgcaagagtttctctgggttatatacacagaagtagaattgcttggccacaccgcataggcatacctaattttattaagttctaccaaattgccctcatcaggttgccaatgatcatgttcttgaatccaaatgtctatcctctgcactcatcctaagtaacctctcaatggcatttgtcaaagttatt

SEQ ID NO: 952259 - DNA, 563 bp, Homo sapiens
agtgaaataactcagaaacagaaaaccaaataccacatgttctcacttataactgggaggtaaacaatgggtactcatggatataaagatggaaataataggccagtcagsgtggctcacacttgtaatctcagcactttgggagaccaaggtgggtggattacttgaggtcaggagctcgagaccagcctggccaacatggtgaaaccccgtctctactaaaaatacaaaaattagccaggcgtggtggcacatgcctgtaatcatagctaccggggaagctgagggaggaggattgcttgaacccaggagacggaagttacagtgagccgagatcacaccactgtactccagcctgggaaacagaacaagactccatctcaaaaaaaaaaaaaagatggaaacaatagacactggggtctctaaaagcggggaaggggcaagggctgaaaaactatgtcatggatattatgttcgctatttgagtgatgggtccattagaagagcaaaccccatcatcacacaatatactgagatcacaaacttgcacatgtgccccatga

SEQ ID NO: 952260 - DNA, 540 bp, Homo sapiens
tttttgtaggctaatatgatgactggtggctgctggctcctgcacagcctcaggatggggctggttgccaggrgaaacaaccacgtgtttagaaggttggaactttcagcccaaccctcgacctccagacaggggagaggggttgaaggttgagttgatcattggtggccaatgatgtaatcaatcatgcctatgtcatgaagcctccatgaaaaccttaaaggacagggttcaggggccttctggatagcgggacacgttggggttcctggagggtggtgagcccggagagagtgcagaagctcccctccccttcccacatgcctggcctcacgcccgtctcccatctggctgtttatctctatcctctgtaatatcctttgcaataaataggtgaacataaacatttccctgagttatatgagctgttctggcaaattaatcaaactcaaggggggattgtgagaatccctgattgataattggtcagaagcacaaatcacaacctagggcttgtgattagcatctgaagtggggggc

SEQ ID NO: 952261 - DNA, 701 bp, Homo sapiens
ctcaagcctgagcaatggcgggcgccyctcccccagcctcgctgccaccttgcagtttgatctcagactgctgtgctagcaagagcaaggctctgtgggcataggaccctctgagccaggtgtgggatataatcttgtggtgtgctgtttgtgaagcctgttgaaaaagcgcagtattagggtgggagtgacctgattttccaggtgccgtctgtcacccttttttttgactaggaaagggaattccctgaccccttgcccttccggggtgaggatgctgccctgcttcggctcactcacagtgcgctgcaccccctgtgctgcacccactgtccagcactccccagtgagatgaacccggtacctcagttggaaatgcagaaatcacccgtcttctgcgtcactcacactgggagctgtagcctggagctgttcctattcggccatcttggctccacctcccacatctgtgtctttgaagagctctgtaatagctcttctctgtatgtcagatctaactgggaaccacagtcactcaactacaaaatgtaaatacaatgggaataattggattgtgaagtggcagggaccaagtggcagcactcaaccatcataggccaggtgggagtagctactgtaatggacagcagaggcaaagggtgagtcagaatattccaactcctgtactgctctggtattga

SEQ ID NO: 952262 - DNA, 608 bp, Homo sapiens
tttagctgatgtgaagctgagaaaaatgcatttttcttctgagcatattgtttcatcaaaaacattagtaagaaagaagaagaaaattgatatttactacacaactctcaatggatctgctgtgggaacaagtttttgagtacaaaagtatcataatcaaagcaatgcttcagaaacatttaaatggcggttgagagggaaagaattgaggttaagtttcatgctacatgaacagatgacagaatattacagtgcaatttagttatagcctgaatcaggaaaattggtggtagagagaataaaagaaatgaactcaggggtaatgttgatgcgtctcagtgtcatattgtatacgaaagtgaaggtggaagatgagtttggtgcaattttgagatttttgagcctttacaggatgaataacatacatagatgaagggactgttaagagaagtatggtagttagaaggagtgtagagtttggcatgaaagtgatgatgagttaacttaggacaaccaggagaagaggttcaaaggacaaatgaaaataaaaaatctatttctcaaaaaagaacttagaayggtcaataagatttcatttatttcttcat

SEQ ID NO: 952263 - DNA, 574 bp, Homo sapiens
accacatctggttaaattttttgtatttttagtagagctgagttttgctgtgttggccaggctggtctcgaactcctggcctcaagtgatccacccaccttggcctcccaaagtgcttggattacaggtgtgagccaccacacccagcctggatctccattcttgatataggtgttttgatcctaaggagacaatcgttggtgaatttgaaacagattcttcaggaaatatagtgcaagaccaaaattgggtcccaggaaaaatcatgtgatacttcgtaatgcaggtctcttgtagacacaagaaggcacacttgctcgtttccctgggtttggtttttgttttgttttcttccccctatgtctcacatcctctcctgcaaccccaaccctccgtaccgcaggcaagaaaacattgatgtttctgcatctggcagcatgtctctgggagaagaggccggcggaagggagtttgatgtgtgagtgacagatccccaggtaacaccactggggaacacttgatctgacctgtttgaagstgaaaactcaccaggtcacactggaaacagttgctg

SEQ ID NO: 952264 - DNA, 771 bp, Homo sapiens
gaagttgaagccaatgctcatttaccattccaaaaatcctagggcccttaagaattatgctgaatctactctgcctgtgctctmcaaatggaacagcaaagtctagaagaaagcacatctgtttatgggatggtttactgaatatttattttaagcccactgttgagacctactggtcagaagaaaagattcctttcaaaatacgactgctcactgacagtacacgtggtcacccaagagtgctgatggagatgtacagggagattaatgttgttttcatgtctatgaacacaacatccattctgtagcccatggatcaaagagtcatttttcaactcttatgtgagaagtatttcataaggcaatagctaccatatatagtgattcctctgacagctctgggcagagtaaactgaaaccttatgaaaataattcaccattctagatgccattaagaatatttgtgattcatgggaggaggtcaaaatatcaacattaacaggagtttgaaagaagctgattccaatgctcatggataactttgaggcctttaagacttcaatggagaaagtcactgcagacgtggtggaaataggagaactagaattagaagtggagcctgcagatgtgactgaattactacaatcttgtgctaaacttgaagggatgaggagttgcttcttatggatgagcaaagaaagtggtttcttgagatggatctactcctggtgaaatgacagaaaggatttagaatattacacaaacttagtt

SEQ ID NO: 952265 - DNA, 519 bp, Homo sapiens
tgttctacagcagttcaaatataatatatatagtggtgtgtgtgtgtgtgtgtgtgtgtgtgygcgcgtatgtgtgtgtgtttatcctgtttcatattctctgggctttctggatatgtgatttaatgtctttcattaattttagaaaattttcagccattatctcttcaaagatttcttttgtcctattctgtctcttctctggaattccaaagacatgtactgaatgttaaatagtttgatattttgaatagctcttggatgacctattattttttccactactcttgctgtttgcatgttgtatttcagattgtataatttctaattacctaccttcaagttctctaatttttttttcagttgcatcaaatctagtgatgagcccatcaaaggcatgcttcatctctgttacagttttattcatttctaacatttgcaattaattctttcttaaaattttgatctctctgctaattcacctgatcatgcaatttatgtatctttttcactagagtc

SEQ ID NO: 952266 - DNA, 695 bp, Homo sapiens
ccactgtcaaataaagaagctaccactaaatatttgaaacaaacaaacaaaaaagtggaatttattgcttgctaagtgagggaaaactgtacttgtaagatgcagcctctctaaacaaaaggaaaattacttttatgtgaggtttggggaattatggagttcaaagatcgttggacttttggaagtggaagtgtttagggattagttgaactttaactgtagaagcatcaccaatgacattcagaagtgtggttactgctgccaagatatctttgattgcttgggacagttttaaaatctggatttgttactgtggccaaaaaacaatcagatttttccttgaagaataggaaccttttattcttaccaccagaagttagtttacgaagtcagaggctaagtggcagtcctccttaagccatttccactttggggaaccccacagaagagtggacagttgctcaagtcaacaaacaggagctcttggggcatcagtgtcacatggttccaactttgatctggacagttccaaggcagcaagtcatgttgaaagtttcctgagaacattcctttttgatcagaggcaggacttgcttcccactacagtataggatggagtggggctggagcacagggaatgtggggcyccccttgttgtaggcaaactctaggctcacaaagaatggtgactaaga

SEQ ID NO: 952267 - DNA, 592 bp, Homo sapiens
tttagatatgtaaataacatcttttttaatgttgtgcttttgagttaattcattgataatgcgtgatgttaattttaattttctcatttaacagagcaatgttttaatttttttaagtttgttaactttttgctagtaatttcctgttttattacagtgtgatcagcacagaaacagtacaagggacctgaggagatatggggggagcaccagcagtgtctgctgtaaggaaaactgttttgattttatcttcttaaatccttgcttcactgggtgtcatttgttctttcaatgtgtccaattgacaactttgaggcattattttccttttctttttttttgatacgaagtcttgcactgtcacccaggctggagtgcaacggcttgatctcggctcactgcaacctccgcctcccgggttcacgcgattctgctgcctcagcctcccgaatagctgggattacaggcrcacaccaccacacccggctaatttttttgtatttttagagatggggtttcactatgttggtcagactggtctggaactcctgacctcgtgatccgcccgccttgccctcccaaagtgctggga

SEQ ID NO: 952268 - DNA, 559 bp, Homo sapiens
gttcctatttctccacatcctctccagcacctgttgtttcctgactttttaatgatcgcyattctaactggtgtgagatggtatctcattgtggttttgatttgcatttctttgatggactggccctgtttcattcttgcaccatgatagatttgtattccgagaactttacaaggccctttttggttttctctgattttgaggaaaactttctgttagagctacacaaattgctacacaatagagctacaaaatagagctacacaaattttgttagtgccacacactaactacacaaatagtgtggcagggtgtctgctgtcactggacacactcaagcagggtttcttggcagccttgcaatgctgtagaaggagataatttctacgctgggtcagctcctttcatgtcaaggttctgtggtttttttagtaagcggcagaaagagtgggcaggttgaggagggctggcacagaaaggatcatcttgaatgcaggtctggaaatacactgttggcagcagcacaaggatccaagaagtcaaaggtatcggggagaaa

SEQ ID NO: 952269 - DNA, 602 bp, Homo sapiens
taaaattcaaactcttccctctatctcaggatttctcscttgttttcctctagtctaattctatatcacttcctatgtcacccatcagtctccagccacacacacctttgtctcttcctgcaacactccagggtatttttacttgctgggccttttgtttgcaagacccctcaccctaattttcacatggatgactattttttatctttcaggtctcaagccaaatactctcaatttgtaacaaagtactccaaaaattaatggtataaaacaaccatttactatgatcatagattttatgggtcatgaatgcagacatggcccagcagacctgggactggagtgatctgaagcttgttcactcaagtgtctggaggctgatactggctgttggttgggggcctcagttcccctcaatttgggctaccttgcacttcctagtgcagttactacaaggtgagtattaactgagttctaaggatgagtgtcctgagagagaacaagaaagggagagaaagggagacatcatactgccttttctgagctatcatcaaaagttacacaatatcactttggccatattctgttctgtagaggaagtc

SEQ ID NO: 952270 - DNA, 591 bp, Homo sapiens
ataaaattcaaactcttccctctatctcaggatttctcgcttgttttcctctagtctaattctatatcacttcctatgtcacccatcagtctccagccacacacacctttgtctcttcctgcaacactccarggtatttttacttgctgggccttttgtttgcaagacccctcaccctaattttcacatggatgactattttttatctttcaggtctcaagccaaatactctcaatttgtaacaaagtactccaaaaattaatggtataaaacaaccatttactatgatcatagattttatgggtcatgaatgcagacatggcccagcagacctgggactggagtgatctgaagcttgttcactcaagtgtctggaggctgatactggctgttggttgggggcctcagttcccctcaatttgggctaccttgcacttcctagtgcagttactacaaggtgagtattaactgagttctaaggatgagtgtcctgagagagaacaagaaagggagagaaagggagacatcatactgccttttctgagctatcatcaaaagttacacaatatcactttggccatattctgttct

SEQ ID NO: 952271 - DNA, 565 bp, Homo sapiens
tgagatgggatcatgaacacttcattcaaagtaataaatcatcacctgtgagtaaggatggagagaaawtatggaagatttgaaaaggtactataacatccaacagagggaaagagtaaattaactagggaaatatagtgaaatataaactcaaagaacccccttgagtttagttaaagctaaatagttaaagttataccagacagcactcactatgtgtttttcactagtcctgcctagtgacacacatagaaacacaagaaaggcaaatatttggatgtaatcatggttgatattttaccttggtggctagtttatttatttttcattcatatatttaactcctgagtgcatattttcatagtgcctacaaaataatatacatattttaagggtaaattacactgtatttttaattaactggcttttggttttttaagtaatgattcacttcagggatattttgtagtacattgtagctatataatgcattctgaagcatactgagctctcacccttcattcttaaggtttgaaagaacttatattactatcatttttaattt

SEQ ID NO: 952272 - DNA, 514 bp, Homo sapiens
atttctggtttgagaatcacgagctaaataaacatattttctttttaaattacttggtttgtggtattcagttatagcaacagacagtggactaaggcagaaaatcaagacctcaattttgaatataatatgtttgaaataattactagccaaattaagtgttcaagcaggccatctcacatatgagactagagttcggaatcatggctagaatgtaattttggagtcatcagcaattgatggactttaaaactacaaaaggagctgagataatcaagagattatgtaaaactagaaaagaaaagaattccaaagactgtgtccaagataacttaaaggagcttaagaagttgcagctaatatgaatattaaaaagtcaggagaatgtactcttttcctagaagccaagtaatgaaaaggttttaagagaagggagtgattcagtctgtcaaatactggtgaatggwcaattaaaaaatatattgaaaattaattcttgaaaccagccagacct

SEQ ID NO: 952273 - DNA, 665 bp, Homo sapiens
caccacatctggctcatttttttttcttttttaagtagagacrgggacttgctatgttgcccaggctagtctcaaactcctaagcacaagcgatcctcccgcctcggcccctgaaagtgctgggattgcaggcatgagccaccacacccggccaaaagttgcttttgaggagttattgctgtgtggatgtgatataaccctttctgtcatctcttcacaaaactttctgtaaaacataaaaatcacctggaccttcagagatgagtttgtttatttttttattttttaaaaaattgctaatttacagaacatggagatgagtatgttttgaaggcttggaagcatgcaagtgggagaagaaaggagtcagctacattctggctgtgtgcagaggcaggtcactgtggtgggagtgttcctgtttcatggactctgcaaatcgcaatgcttggcatggcctcccgaccctgatggcagagaagcaaacaccagtcggagagctgggtcctcccagccctcttggccctgtggccaattttttcttcaatagcctcataaaatcacattatttgagtgccatggctccaaaacaagcagggatgcccatggaccctgattatccattgtcacccttccctccaaacagccacctctcccctggagac

SEQ ID NO: 952274 - DNA, 651 bp, Homo sapiens
attctggctgtgtgcagaggcaggtcactgtggtgggagtgttcctgtttcatggactctgcaaatcgcaatgcttggcatggcctcccgaccctgatggcagagaagcaaacaccagtcggagagctgggtcctcccagccctcttggccctgtggccaattttttcttcaatagcctcataaaatcacattatttgagtgccatggctccaaaacaagcagggatgcccatggaccctgattatccattgtcacccttccctccaaacagccacctctcccctggagacagccccatactccactcagacctgtgcactttctggtatccttgtcacctgctttttatgtctcattttacaaacaccaaattggaagacagcaggagctgccccataataccagtaaagtgagaagcagagataaactagtcctagacagccgactcatgttgggggcagcccactcacagtggccctgacccaactctgactagaggccacttgctctcaacaccagggtgctcaatggcccgtcctggtactctgctcttctctctccaccttcgctttcctgcartctatgcagcctgtgactccatccatgggctagtgacccccagaccttctcctgggaccacaggcctgtgt

SEQ ID NO: 952275 - DNA, 551 bp, Homo sapiens
gtttacgttttctagtgagacacagttaccaayaattttatctatataggaaaatttttacaaacccaaagttctaatgtttcttttctttgaagtttcgtatttcagtctaggtatgtaatggaattggctgtgatcattctttgatttcactgttatttgtgagtttctgatatgcttttaggaatgaatagagtttaacgcttgctttcttcttcttcctctacctttggacctgtatatgcgatgtctgcagtaatgtgcagtgctatctgacatacggttgctgaaagatacaagcatatatagaattcttcgtttcagtgaatctttaggaacagacaagtaacctgagagataattacggtatgaatgtaagcaagcagtttatcatagaggtacaataagggtgaaaataaatttaaaaatacatgcctcatccaaaacatgaggtagtaaaaatgaaaaatttaagttggcataaagaacactttaaaagttctgattctttctggtgagagcaaggagctcagaaaccatgagaaagtcct

SEQ ID NO: 952276 - DNA, 515 bp, Homo sapiens
gctgccacgcctggctaatttttgtatttttagtattgacggggtttcaccgtatttgccaggcctgtctcgaactcctgaactagtgacctgcccgcctcggcctcccaaagtgctgggattataggtgtgagccaccgcacatggacgggaattacaatttgagattagatttgggtggagccagaaagtcacaccatatcactgcaaaggatccgcagcaaggaagggcataaaatcctaaattttaaaataattgtcattatttcaatttatgaataaatattatatatcatttataaatgcatatgacattatacacaaggttaaatgcaaatatcctctgaagttggcctggctcagatcaaggaagaagccctgcctgtgagagctgcagcctaggctgttatttttgcttcgctcagcccagtgtctgatcaaatattccctcactcagggcatgaaggstggggcctgaaaccttatccaatcaggagccgtggtctagaaactgt

SEQ ID NO: 952277 - DNA, 709 bp, Homo sapiens
gctgcctgacctgccttccagttgcccccagtgaccccaggaatgggcctgcacagagtgctggggccttgcagccggggccccagcaagccatccaaatgagcttaartaattgaaagaagtggcatctgccatacgggaagaatgtggccgcgctgtttgctttaaagaggctgagaccagatctggcttggatctgcagggaatataaatgatgcaattaattccctataatttacaagtcgtcatttgcacggagctctgcgagaaaggatttggaaacagtatattgaatgctgtgggctcatgtgaaagaatcatcattctctccacctatggaaaaccaactcagtgtggagggctcagcctgagtgctgccttgcaaagctttccttgaatgacccgcctgcaccccagtttattttgtctcttcaggttactttacctgcatttagtcctcacttaatttctgctttgaattttggttgtttccacctctttcaaatattgagaactcactgaggggtgaaaccatgtgtaaaacctctggatatcctcctccttcccctccagcaccactgttgtttcttgcccattgtgtataatcaataaatatgtaccatatggcattgcattgatgacaaggccggctacccattctctgccaatgccagccaaggaccatacatataagaaaaagagtcctaga

SEQ ID NO: 952278 - DNA, 574 bp, Homo sapiens
tgaatgggaagttgtttgcctttttagaggaaagtgttatttaaaaaaatacttcaaaactatttgggtctttgtatttaaagtgtatatcttgtagatatcacatagctaggccaagatttttttccattctgaaaatatcttcctaataactgaaatctatatatatttagcacaattgttgataaagttgggcttatgtgtgtcatttgttaattgatttctaatagaatttttattgagataatatagactcacctgcagttgtaagatcattaaggggtaaaagtttagttatgtaagaaaaataagttctagagatctactataaaatatagtccctatggctaacagtactttattgcatacttaaaatttcctaaggggatatatcttatttcaagtatcctttccaccaataataataaaggaggtaggatgaaactttgagaggtgatggatgtgtttatagcattgatggttgtaatggtttcatgagtgtatacttatccccraacatagcaagttgtatatattaaatatgtatagcttttgatatatcaatcatacctca

SEQ ID NO: 952279 - DNA, 603 bp, Homo sapiens
ataatttcttaggtgtaagaaattactttaatctcttaatcctgttatctttgtaagctgaggatgtacatgacctcaggaccctgtgatgattgcattaactgtacaaattgattgtaaaatgtgcgtttgatcaatatgaaatctgattgtaaaacatgagtgtttgaacaatatgaaatcagtgcaccttgacaacgaacagaataacagcaattttagggaacaagggaagacaaccataaggtctgactgcctgcagggttgagcagaatagagccatatttttctccttgcagagagcctataaacagacatgtaagtatgagagatatcactgaattcttttcccagcaagtaatattaataattaacaccctggggaaggaatgcattcctgggacaaggtctataaatggccactctgggagtgtctgtcttatgtggatgagataaagactgaaatatgccctggtctcctgcagtaccctcagattcrctagggtgaggaaaaaccccaccctggtgaaattgagatcagaccagttctctgctcttgaaccctgttttctgttgtttaagatgtttatcaagacaatatgt

SEQ ID NO: 952280 - DNA, 740 bp, Homo sapiens
gtgtctccacccagacctcaagttgaattgtgtctcccagaattcgcatgtgttgtgggaaggacccagggggaggtaattgaatygtgggggccaatctttcccatgctattcttgtaatagtgaataagtctcatgaaatctgataggatttatccaggggtttccgcttttgcttcttcctcattttctcttgccaccaccatgtaaaaagtgactttcacctcctgccattattgtgaggcctccccagccatgtagaactgtaagtccaattagacctctttttcttcccagtcttggctatgtctttatcagcagtgtgaaaatgaactaatacagtaaattggtaccagtagagtggggcgttgctgaaaagatacctgaaaatgtggaagtgactttggaactgggtaacagccagaggttggaacagtttggggggctcggaagaagacaaaaaatgtggaaaagtttggaacctcctagagacttgttgaatggctttgggataaatgttgattagtgatatgaacaataaggtctaggttgaagtggtctcagacggagatgaagaacttgttgggaactggagcaagggttactcttatgttttagcaaagagactggaggcatttgcccctgccctggagatttgtggaactttgaacttgagagagatgatttagggtatctggcagaataaatttcctttttttaattattatactttaagttct

SEQ ID NO: 952281 - DNA, 575 bp, Homo sapiens
attgccgcccttctccccaacccaaagcctcatttgcatcttcctctcrtatcccccaaccttaacccacaagtataggacatctctattccttctctggcaaccgatcatatgcccattaccatcccattaaaacctaatcacccttaccccgctcaatgccaacatcccatcccacagaatgctttaaaaggattaaagcctgttatcacttgcctgctacagcgtggccttttaaagcctataaactccccttacaattcccccattttacctgtcctaaaaccagacaagccttacaggttagttcaggatctgcgccttataaacaaaactgtttttcctatccccctcccttggtgccaaacccatatactctcctatcctcaatacctccctcaacaacccattattctgttctggatctcaaacatgctttctttactatccctttgcacccttcatcccagcctctcttcgctttcacctagactgaccctgacacccatcaggctcagcaaattacctaggctgtactgccgcaagacttcacagacagcccccattacttcagc

SEQ ID NO: 952282 - DNA, 428 bp, Homo sapiens
tctacatgtgtctttataggtaaagtgtgtttttttgtatgcaacacattattgggtcttggtttttaaatttattcagccagtctatgtcttttgaatggagagtttagtacacttacattcaatgttrtaactgataaggacttactcctgccattttgaaatttgttttctggttgttttaagatctttttttcttctttccttcctttctgtcttactgaaggtgattttctccaatggtataatttaatttctcacttttttgtgtgtatgtacctattgtaggttttttgatttgagattaccatgtgtcttgcaaatattatcccataacccattattttaagctgacaagttaacactgtttgcataaacaaactaaaaaacaaccaaaaaaaaacctaatgaaaactctacacctcaac

SEQ ID NO: 952283 - DNA, 610 bp, Homo sapiens
ttgtactttttcttatacttttttccacatacacataagtttttaagcatatctcttaattaattttgctttatcaaatattatatgcatgttattttacaagccaaagaatgctgcaagtcttataacaaaaggtttatgcccctatatcagctactgtaacccttttagctatttattctgctatattgccctgtatttctaaatgatagggaaatattactctctgttaattcatcaagtttatctttggagttcctcatatttaaataatgattttaactctcttacagcttccctgttctttcattcatcttctcagtatagtattatcatatttgggggcaaatccacatctaggaattttattgtttttactactacaatattatttacagttcaaccaaatagcatgctatgattacatttgttttcctacattacttttctattggaattaagactcttttttttttttttcattttaaagcacccatcactgtttataccaaattttaaaaggaactgtaactactacctcataacatagtgmaatatgagtaatttataaattttttccctgggtgacatccttttgtgtacgtctccc

SEQ ID NO: 952284 - DNA, 597 bp, Homo sapiens
taagggtagacaacatggggtctatttayataaaagggtagggttatctactaagagatagcaaaagttactctgtttttagaatccaaagaactgagttcaaatcttaatgctgacacttgctagccacatgaccccaagctaattacttcacttaactgagcaccatttaataaaaggaagtcctggcctcaaagcatcctgggcaccccacgtgatgaggaaggaggggtgatgaccaaattgtggaattaaaatatactctgctattttaccactgaaatatccacggatttgttggtatgctattttcattatttttaagtccaaaattgtaggtattaatatctgtagagaaagatcaacaatttaattattcaaattatgtgaaaagacaaactgatacaaagtctacaagtctaaacatgtccagaccttcatgaattgtaataagcaaccatattatggtcctgcaaagctcctgttgaaagaataattattactgcagttcaaaaaatttctgagaaaacagaatatgaatgtgacaatatggaaatggatacagggacttgtgcatcagagccaccaactacacat

SEQ ID NO: 952285 - DNA, 661 bp, Homo sapiens
gggatcagagtgctaatgggaactgtgaaattcccttccatgaaarcctttagaagtaaaccaggtagccaggtgcggtggctcacgcctgtaatcccagcactttgggaggccgaggcaggcggatcacgaggtcaggagatcgagatcatcctggctaacacggtgaaaccccgtctctactaaaaatacaaaaagttagctgggtgtggtggcaggcacctgtagtcccagctactcaggaggctgaggcaggagaatggcgtgaacctgggaggcggagcttgcagtgagccaagatccggccacagcactccagcctgggcgaaagagcaagactccatcttaaaaaaaaaaaaaaaaagaaagaaataaaccaggtacctcccccccgcaatctggtgacaatgataatgatagcaaaaatcaaggcactaagctaagtactttaattacattctctcatttatcctcccaataaccctacaaggtaggcatgactataattcccattttacagatgaagacaccaagatacagaggccctaacccttccaaagctccagagtttagtaagtatcagaaccaggttgcaaaggcaggacaccaacctgggatcccagggccttagccagataccccactggggactagatggaga

SEQ ID NO: 952286 - DNA, 451 bp, Homo sapiens
  misc_feature 259: n = A,T,C or G
agcccttggtccttaatgaacgttggtagccaggcagtacttgccatgggcctggggactgtgcttgctgtagggagagactcctctacttgtggaaaggggagggaagaatgggaaggacttcrtcttgtggcttgggtgctagcccacctgcagtagagtagagcagcaggtagattcctgaggtttccacctccagaccctggcttccagaagcatctcttgacctgcccaggaatgggagaaactctccaccttngaagggaaggacacaagcctatctggcttcactgcctgtagattgtagagtcctagggcttcaagtgaacataggcagtggcaggccatggttaccacaggcctcgggtgtgacccagtgctttgttgacttcaggtatgatccagtgccatcacagtggaggtagcaacagggttgcttgtgtcacccctc

SEQ ID NO: 952287 - DNA, 605 bp, Homo sapiens
ccttgtcccgttgtgttaaagacatagtaggatttgccatcatgttttttataatattctttgcttatgcccagttaggatttcttgtttttggatcacaagttgatgacttttccacttttcagaattccatgtaagctcttagtataaatgtaattatatcttctatattttcttacaaaaaaaattggaaaggtctaaccttctatgataagtagtaatataagctttaatatatttaaacttagtttgatattttctttttctttttatttttctggagacagggtctcatagctcactgaagcctcaaacttctggactcaagctatcctcagcctcccaagtagctaggactacaggtgtgcaccaccacgcttggttgattacatttttattattttttggtctcaccatgttggccagggtggttttaaacttctgggttcaagtgaacctcctgcctcggcctcccaaaatgctgggattacaggcatgagccaccagcctggctgatattttcactgatggctaaatatctgtcacattcaaattaggatttgayattgaaggagccaaatgggtgacggtgtccatttttaagg

SEQ ID NO: 952288 - DNA, 587 bp, Homo sapiens
gtgccacctacaggcctggagactgccccacccagtccatcacagccaccaccaacaccaatgtgcactgcttgggattcagcaggttgtctcaccattgctactgtcatcacccacaccatgctagccaccaaagagcccagggatctgcccacctgcacggtccattgcagccactactagcatccaagcaagccatgtggaggcccaagaactagtccacttgggacctgctaacactgatctcagagtattctactctggggccaaaaaaacagccatggtcagtctatttttgccaccactggcggctaaagactggcctgccaggcatccaagtccccagaaaacttcaccgcagcctccactaataagtgcatcctaagccactgagaaaaataacttataccactgatgctgtttacagtgaaataaatcatacatacactatactactgcgtgaaaccagaatcaaagccaraaatcgcctacccaaccaaaactatagatgcattttagggaaaaaaatctcctcctctaaaagcaaattcaaaaacattaaaagaagcaactgttaaaaccagtgc

SEQ ID NO: 952289 - DNA, 582 bp, Homo sapiens
tgatacaaatataaatcaaaacaaagaaaaccacttgaaaccatacaattatgtggaaattaaacaacctgcatctgaataacttttgggtaaataataaaattaaggcagaaataaaaargttctttgaaacaaatgagaacaaagtacaacataccagaatctctgcaacacagctaaggcagtgttaaaagaagaatttatagcactaaatgctcacataaaaaagttaaaaagatctcaatttaacaatgtaatatcataaataaaatgagagatgcaagacaaaaccaatccctaactagcagagggcaaaaagtaactaatctgatctgtactgaaggagatttagatgtgaaaaactatacaaaagatcaagaaatccaggagttaaatctttggaaaaaattaataagctaaataaaccacgagccagattcataaagaaagaagattcaaataaagagaattagaaatgacaaaaggaacattaaccctgaccccacaagaatacaaataactgttgaagtctactataaacacttctatgaacacaaactaaaaaatctgaaagaaatagta

SEQ ID NO: 952290 - DNA, 563 bp, Homo sapiens
tttggggggcaggtggtcctggtgggggttggggcttttccccagacttaggtcacacccagagccagaaatcttggcacctgctctaggctaaggatgcatctggcccccagggtgcaggtaactgcccacctttcctggtttctgcctgccagggccaatcttcagacctcaggacttcccagcctatcccatctccctctctggccagccttgaaccctcgtgggtccagcactttttccaggccgtctcctggttgtcctcctgccccgaggcctggctcatgctgctccccctcccactcaccatgacccacaaggaccactccacacccagctcagccccaaccccttggatagtcctttctctttcctcaggtgaccaggtgcatatcttggtgtcaggaccttccctgcacctgggaatgcctactggtcacstcggtcacagagaccaaggcatttacttgatatgggtgcctttggttcattgtctacatggccagggagggagtcaatgttaggcttttcacttgctgcaagggccagttgtcctggcccca

SEQ ID NO: 952291 - DNA, 563 bp, Homo sapiens
tttggggggcaggtggtcctggtgggggttggggcttttccccagacttaggtcacacccagagccagaaatcttggcacctgctctaggctaaggatgcatctggcccccagggtgcaggtaactgcccacctttcctggtttctgcctgccagggccaatcttcagacctcaggacttcccagcctatcccatctccctctctggccagccttgaaccctcgtgggtccagcactttttccaggccgtctcctggttgtcctcctgccccgaggcctggctcatgctgctccccctcccactcaccatgacccacaaggaccactccacacccagctcagccccaaccccttggatagtcctttctctttcctcaggtgaccaggtgcatatcttggtgtcaggaccttccctgcacctgggaatgcctactggtcacctcggtcacagagaccaaggcatttacttgatwtgggtgcctttggttcattgtctacatggccagggagggagtcaatgttaggcttttcacttgctgcaagggccagttgtcctggcccca

SEQ ID NO: 952292 - DNA, 607 bp, Homo sapiens
taatttcagtgaaatatttctttagaaatataaaatctggaactttccatcattatgcctccccaaaataatagmggactttacacacagataacacctgcctctcaagattctctcattaatctctaccttattgtgtttggattaagacacttagggcttgtgaaatgagaataaagtgagtttgagcaatccaaaaccacgtgctgactctggatcctggaagatgactttcttcagaatctttatctgttaactttcctctggacttaaactttgttttcctaaaagagttacatatttgagtactactgctacacggcaatcactactcaaaagaaactaacttgaggtgtccaataatcagctttcatttaaagtctctttcaggctaggcgcggtggctcacgtctgtaatcccagcactttgggatgccgaggagggcggatcacgaggtcaggagattgagaccatcctggctaacatggtgaaaccccgtctctaccaaaaatagaaaaaattagccgggcattgtggcgggcgcctgtagtcccagctactcaggaggctgaggcaggagaatggagtgaacccgggaggtggagg

SEQ ID NO: 952293 - DNA, 625 bp, Homo sapiens; identical to SEQ ID NO: 945396

SEQ ID NO: 952294 - DNA, 462 bp, Homo sapiens
gagaacacaatgaaagacagtgagcaagagacttattttgatggattcttagagatgacaggtctaaacaataaacaatgaagctcggttttagactttggagaatatagtatgatttatgaattcacrggtaaaagcgggaacactatcaccaccctagaagaaaatctataatagtatttgaggagtctcttctaaaggctgtggaagtagatagacacacacaggtgtgacatagccactgaaattatttctagaacaagataaactataaatcaatgattaggcccaacttatcaaataagtaagtgtgctatcttcttagaagaatgagtcaaccttttctttctttttggtttttgtttttgttttttttttgagatggagtctcgccctgtggcccaggctggagtgcagtggcactgtctcggctcactgcaagctccgcctcccgggttcacg

SEQ ID NO: 952295 - DNA, 497 bp, Homo sapiens
atggtagaatgatctgctaaagactcaattatggcagacataattgrgagacaatactttaccaagttgggatattgtcttataggatgtgttttgagccaataatttatatatgtttcattttctctcctggcaagagcacactgtttggaaaccaagtgatggaaatgggaggggctcctttttacaattaataacctgtttgcaagagtttgttgactttgtctgtaaccttgacttctggtctagaagtcctaattcccaagagcagaatgcttacatcaggagacacaatagttccattgaattggaggcatttctactcaatgaggactgagaagaccatgtctggaatcacgaattccctggggcacctcttaatacttgcatgttcagtagaaaaggtcagtgtggaagaggtgggtaagagtgaccacaaaaattcaggacgagtaaggactaaaacccaaaaagaatgaaggtgtgggtcacctcac

SEQ ID NO: 952296 - DNA, 783 bp, Homo sapiens
actctgcagatgcagaactgcagctataaaggacccaactctacattakcaaaaccacattacaattaactttactacagacctcacttggattcagaagtgtttttctgcactcttttttattctttgtgtatatgtgtatacttctaagaaatttatcactggtgtagatacatataaccaataacataatcaagatatagcattatgctgtcatccgaagaaaggacctcatgatatccctttataatcacactcaccccacttctctaagtccctggctactgctgatctgttccctatttctagaattttgtcatgttgaaaaccttttataatgaaattatatattgtacaaccttttgacattgcattatttatttatttatttatttatttatttatttatttttgagacggagtctcactctgtcgcctggaaggagtgcagtggcgcgatcttggctcactgcaacctccacctcccaggttcaagcaattctcctgcctcagcctcccaagtagctggaactacaggcgcgtgccaccatgcccggctcattttttgtatttttagtagagacagggtttcaccgtgttggccaggatggtctcgaactccagacctcatgatctgcccacctcagcctcccaaagtgctgggattacaggcatgagccaccgcacccgtcctgagattgaatttttaaagtttaattcctttgaggtcattgcaaatcattcaacagttcattgcttttttattactaagtactagtccat

SEQ ID NO: 952297 - DNA, 710 bp, Homo sapiens
aaatgtcccaggggatcaagaggagcacagcacaggtcccctgttctcgagggcagggtccctccaaaaacacagacactaagaggaagacacttgcaagaaacagtcccatgaatgagaaagacaacacrtggctcagtgtaaaaacatggtgccgctgtaaaggctaaaagtcatgagaaacagcggatcccttccaccaccacgttctgagcatgctctgtgtgctctgctccccagcagactctggcaacaccaataaaaagaaccccatttgaccgccaccaaagccacacaggagacaaccttgatcttccctccgtatgaagagactgggtgaggagagtgatcacaggatcctttccagtcccaggatcctgcaatcctgtacagaaggaagcactggtcaggccaaggactcgtggaaaacagggaattcgtgggcaacaataaggtgtgtgcacagcccctcaagaagatgtgccagtccttatctaagccacaggaccctgtctcctgtgaatgccatcatctggggctgccttgttggccagtgtcctccggatttggtcattgggaagcaacaacaggggggttggatttggtcactgggaagcaacaacaaggaaaggcgtcggggtttctcttcccaggatccctccctggcttctcctggctaaagtcacatttctctgctcagctccttcctc

SEQ ID NO: 952298 - DNA, 576 bp, Homo sapiens
gcaatggtgtaccagagaagaacaagaaccccttttccaagacccttcatgtacagacaggctgcctgcctactgggkcagactttccctactgtccctagcaatgcaattgtatctctgaaacttcccattagtggatagatctgggactcaagacctgctgtttagattctttcatctgggtattcttccctttgatgttgtattcctcctcttccctaaaaatgggaattcctgagaaccatactatagggattgttattgctctcctgggtctagccacccagtggggctaccagattccaggctggtgttaggaaatgtctacaagggatccagtaatgtgacctgtcttcaagtctcccatctgtagataccagcaccagctctgatggaggtggcaggggagcaatgtggattctgtgagattccttggttgtagataggcttagtgtgttggctttcttgaatgctggttataattgtagtgaacttgtcatgtggatagactcaagacctctggttagccagggtgctgtatgcagaggtgatagctgaggtcacatgactgttttc

SEQ ID NO: 952299 - DNA, 609 bp, Homo sapiens
gcatggactgtgttatttacayttatacgttttcccctgaactttaagttagtacacactgttgatttggtgtctgttacatacatatatactgatgtttccctgtatatttttgttgtttttctaatcttatcacccctactaagctacaagttctgtgaagcctagattcacctttgtataataactcctagcatactatagattcctagcttctagaacttcccatatcggaaggtctcaggaaacctgcatgggataatatgaatgaaaataaaaagtgacctggatacatacatatctctctccctgaaatattgctagagcatacccttcctgggtatttgtacaaaaaagataatgagcattctggctggctcctttgcaacagttataaaggcaaaaggaataaaaaaaggattccagggtcttttcaaaggagctaatacggtagggtgagatttatattagaaatgcactgtttcagtctatctagtcactattacccattttctggccaccagttcccagctcctgaggtgcatgtgaccctgagcaagctaatcagcatgatccattctctagtcaaagtgttcagggctggccata

SEQ ID NO: 952300 - DNA, 371 bp, Homo sapiens
aaaaataaaaaaccttgactattatttcacaccatgtacaaagatttgtttgatgggtcatagacctaaacttagagaaaaaagcttggaaaaaaatctttgtgtccttgggttaggcaaggatttcttaaataggacacaaaaagcaccataaaataatggataaatttaatttcataaaaatcaaaagcttctctcaagtgaatgaaaagaaaaccacagatggggagaaaatatttatgaaacatatctgataaaacatttgtgttcagaatgtctaaagaactcattcaagttaataataagacaatctgatttaaaggaatgggcagcaaaaaaattggagataygtcaccaaagatgatatgtaa

SEQ ID NO: 952301 - DNA, 667 bp, Homo sapiens
tccccttctctccctgtccatggttcctttggcaaaatacattctggaatctacttctctttctttcttttttatcttaagcagttttatggaggtataattaacatatcataaaattcattgtaaattattcaatgaatttgagtaaatttatgagttcaatgattcttggtaaatttgtagagttctcaccacaattaaattttagagcatgtctaccaccccgtaaatgtccctcaggccccataactgctcctaccccctaattctaggcaaccacttatctactttctgtttctgtggatttgtcatttctggacatttctaggactcattcaacattttcaaaaatctggcttcaataacttagcacaatgttttggcattcatccatagtgtaatgtgtgtcagtatttcattcctttttactgatgaacaatattccattgtatggatataccacattttgtttatccattcaccagttgataaacatttggatggtttccaccttttggctattatgaataatgctgctgtgaatatctgcatgcaagtcacttyatggacatatgttttcattctcttgagtaaaaatctgaggagtggaattgctgggtcatatggtaaacttataattaacttaagaaactgccaaactgttttc

SEQ ID NO: 952302 - DNA, 474 bp, Homo sapiens
agctgtaaactacattacagatttcgaaaaccagtggattaaatcaccaatgattgctcaacagggaagcctctccccactctctcagggtactcctatatggkgactaccagcacatggagcaaagtattggatttgcttctgttgactgctgtgtttccaacatcattattttatgaaactgatgatttgtatcaccactatgaaatgctggcataaaactctaaactctgttgagcctacattacatcttattgcatataacagagggattggcactgtgacggaggaccatggcaggaatcaaaactcgtgtgtttcaagatgttcttccagtgactatgtgaaactaacagttccaaagtcttactatcggtaagtgaacttctgttaaatttggagcgcatgtccctatctttaaaattattctgaaaaaaaaaaaaaaaaagaaaagaaatgatgtgattgtgtttt

SEQ ID NO: 952303 - DNA, 721 bp, Homo sapiens
acaaaaatacaaaaattagccaggttggtggcatgtacctgtctgtagtcccagctacttgggaggctaaggtaggaggattgcttgatcccgggaggttgaggctgcagtgagccatgatcacaacaccgcactccagcctgggtgacagaacaagaccttgtgtccaaaaaaagaaaaaaatatatatatatccttgatgaagcaggaaaatagtttttaattttattaaattttgaggctgggcatgttggctcacgcttgcaatcccagcactttgggaggctgaggcaggcggatcacttgagatcaggagttcaagaccagcctggccaacatggtgaaacctcacctctataaaaaatacaaaaaaattagctgggcgtggtggtgcatgcctataatcccagctactctggaagctgaggcatgagaattgcttgaacccgggaggtggaggttgcagtgagccaatattgagccactgcaccccagcttgggtgacagaatgataacttgcctaaaattaattaattaatttatttatttataaattttgatccttaagtacacacctttttaatatttggtgtaatggatggaaagtgaacataaagcccttctgctgcagatgaaagtctgytagtcatcttgagaaaagcatttgtgctgttgtttgtgagctgaactagctcccctttcaggaaacatgaattttgcc

SEQ ID NO: 952304 - DNA, 738 bp, Homo sapiens
caaaagttttgctaaagtgaagtttatagcaataaatgcttatttcaaataaggtttcaaataaacaatatcacagtgtacctcaaggaacctgaaaaggaggaataaatcaagccccaaaattaatagcaagaaagaaataataaagattggaaaagaaccaaacaatatagagactttttaaaaagcacaaagcctaatgaaatgaaagattggtgttttgaaaagacaaacaaaatggacaaactgctagctacacaaccaagaaaagaaaagacacaaaatccaaataaataaaattagaaatgaaaaaggagacattacaatagcgatcacaggaatacaaaagattgtttgagactattatgagcaactgtacactaagaaactggaaaacctagaggaaatgaataaatacctagatgccaacaatctaccaagattaaatcaggaagaaataaaaacctgaacatatcaataaagaggaaaaatttggaatcagtaataaaaattctcccaataaagcaaaatttaggactagatggttttactgacaaattttaacattcaaagaactaggcatactttacaatggctgactagaagcaratatcatgtgctgctctcacagagaggagacaaagtggcaagtaaatagcagatcttcaagagaatcatctaggacaccatactggatttcactgaggaagtgaggggacccacagaggaaaaaaaagg

SEQ ID NO: 952305 - DNA, 665 bp, Homo sapiens
gtttcagaaccagccaagcaaggcctgtaaatcctggcacaacagactgtccagccatgtgaacttggatcagggacttcttcccgagtctcaktcccttcatctgcagggcactgcgtgcaagggtgttgtgcagaccttagggagcgctgatggtaaaatgcctagcacagtgcctggctcagactaagggcttccttctgcctccctctgccctttctttccacacttttcgtgctcaccattcctccatatctgggcatgaaacgccgctgcttccctcagaacctccacttcagggccacccccttcccctgttggctctgtgtgatgtggttgcctctgtattcgttagaatccactttctttcatgctttttctgtcttcacacaactgttgatcctgccaaaatcattcattcatatttttcttcttttctcccttcttacaggccttcccaggcccctgctatctgccagccatctgctgggcagagatgctcatggccggcgcctgcccctacagagcgcgactgcttctctggagaggctgcatgggcaatgacagtgcaggggaggagagctggatggcaggggcagtgctgtgtgtcctcaaaaccctgtgccatctctctcctttctggaatgctgtgctaggcagaataa

SEQ ID NO: 952306 - DNA, 588 bp, Homo sapiens
gattatccctagatagctggaaatcctttcagatctccttgcttagtttcaacaagacatttatacatcagttacttgaccgggggtggtggctcgcacctgtaatmccagcactttgggaggccgaggcaggtggatcacctgaggccaggagtttgagaccagcctggccaagatggtgagaccctgtctctactaaaaaaaaaaaagcaaaaattagcagggtgctgtggtgcatgcctgtagtcccagctactcgggaggctgaggcaggagaatcatttgaaccaggaggcagaggttgcagtgagccgagagcaagccactgcactccagcctgggtgacagagcgagactctgtctcaaaaaaaaaaattataaaaaaagggggccgggtgtggtggttcacgcctataataccagcactttgggaggctgaggcaggtggatcactggaggtcagaagttcaagaccagcctagtcaacatggtgaaaccccgtctctactaaatatacaaaaaaattagccaggtgtggtgaagggtgcctgtaatctcagctacttgggaggctgaggcaggagaatc

SEQ ID NO: 952307 - DNA, 684 bp, Homo sapiens
tcattgtttaggaccatttgcataagtaacgtgtgctgcctgcaggaggaaaaagaggctactctgcgctcctgggctacttctcagagtagattccagcacatcttcctttccagattgacttcaggtcacacatacatatgaacacagatgacacactggagtgaggccccaggcacacatctgatgtacaggcgtccatctgtggagcgagcccacacaacatacagtgacactttacacgggtgtgtatatgtgtaccttaacatgaaatctgtatataagcaccacgtatgtgcatactctatgtaagtgtggttagacacacgcacctggtatttatgtgccatttctataactaggcaggtcagctctggacacgcgcacctgtgtgcactatgtctgcacccacacccgcatagcatgtgtttgcatatgctgtaggagcatctgtctataaacacacattgtaagtcctgtatgtatgttgtgtatgtactcataaatatgcagtctgtttactctaaattccttataaacgcacacagcacacgggcatgggcacctgaatgcctgmgtgtgtgtgcacgtggacactgatgcgcccattcctgtcttttggagtcagttgttgcctgggctagccctgcctcggccccaggttccacctttgtgtttgtaaac

SEQ ID NO: 952308 - DNA, 620 bp, Homo sapiens
gctttgtttaccacctattcaagcctcagtaatggcagatgcccctccccacaccaagctccagcgtcccaagtcaacttccaattatgatgctcataatcaaattatgatggaagcgtgaatctggcaccagctactttggtgtcaagtagccaagtcacgtactaatttatttttaatgtaaagctatacaaccttctttctatacttaaaattttaattaaaatattactaaaaatttcttaatgattttatttcatggtgaaagagactcagtctggaatgtaaagtatgtcttacaagtatttctcattttgcaggacattgtctaggtgtccctctcccatggatgatcattagtgtggtttatctttatgctttgagaaaataagtctgtagtatgttattatattctactatataaagatactcttcaacttatgataagattatgtttcaataaacccatcataagttgatactattctaagttgaagatgctgttttttttaaacaaaatgtagactcttgccatgttgcccaggctggagtgcagtggctattctcacgtgtgctcatagtgcactatagtctcaarctccttgagctcaaacaatcct

SEQ ID NO: 952309 - DNA, 795 bp, Homo sapiens
cagaggatttagaggcagcactattttcccccgtttcatttttctctttccatcttttggaagtcagacatcaaagactaagatatttaaaagcaatcayacatacaggagaaataagaaaaaaaaatcatgcatatccatgaaaaggtgcaggctcagaaaagacctgagaagaccttacatttacacctcaaactgatcgttggcccaaagacagcctatgacaattaaaaaacaaacaaaaacaacaacaaatgctggagaatggggagaattcaatttccagaggtactccattattagcttcaaatgtttagttttctaacaaaacgtcacaagacatacaaagaaacaggaaagtatggtccattcaaaggaaaaaataataaatcaacaaaaattgtctttcaaaaagacctactggtggaattaatagacaaatactttaaaacaaccgtcttaaacatgctcaaagaaggaagacatagagaaagtcaagaaaacaatgttataaagaagatgggtgatttgagcaggcagaaggaaaaaaagatcagtgaacttgaagctagcttaaaggaaattatcacttcttcagagcagaaggaaaaaaagactgaagaaaagcaaacagaacataaagtatgtgtgagacatcatcaagtggaccaacatatacattatggaaacctgagaaagagaaaagggtaggggaatatctgaagatatagtggctggaaactcccccaatctgatgaaagatattaatatcaacatccaagaagctcaatgaac

SEQ ID NO: 952310 - DNA, 542 bp, Homo sapiens
gcagtggggtgatcctagtgcactgcagccttgaactcctgggtttatgtgatcctctcacgtcagcctcccagtagctgggactgcaagggtatgccaccacatctggctacgttgtccaggctgatctcaaactcctgacctcaagtgatcctgcagcctcagtctccaaaatattaggattacaggtgtgagccactgtgttcagttttccacattttaaaaatcaattcatcaattaatggacatttgcgttttttccatatcttactattgtgaataatgctgcagtgaacattggaatgcatataactcttcaatatttcaattattttgggtagatactcagaagtgagattgctgcataatatggtagcctggtactagatagcctggtacagcgtaaatataatgatatcaaaagctgaatgcagaggtaggtctatgttttgtgtgaactgagacatatacaattctattttaattttttgaagagcctycatattggtttccacagtggctgtaccactttacattccacc

SEQ ID NO: 952311 - DNA, 644 bp, Homo sapiens
ttcccacatggcatccaaagcttcaaggcagaggtggcagaggtcacatccattctcattttactttctgaagtgtatcacatggccaagcccaatgcgggtgagttaggaagttacacttcctcctgtgggaggtgagaataagtatgtgtttaaacaaaacaaaacaaaacaaaacaaaacaaaacacatttacccaaaaatcgtggggaaaaaatgaagatgccactaaaaggccaaagtaagaaactaacaatgtagactgtacttaattatctaggaagatttcacaaaaagagaacttaacacgttgaaaactaatgaatcatcttcttagcctccagctctatcaatccataaataatgccaattcatacaaaatcttgtatatctaccacttctccttgattcctacagccacactcctggtctaggctcacagtacctcttgcctggtcctctagaatagtcttaatgcttctacttggcctccctccaggtgatcatcctattgttgccctagtaatttctccattaagaackctgaaaatgtctttcactgactcaaaattcttcagaatccccccattgcttactgtttaagatcaaaaatccttggcattaaagtgcttcatgccttggct

SEQ ID NO: 952312 - DNA, 557 bp, Homo sapiens
gaagcaggcctggcagagttcaccacaagctgaccgaagaccacttaggtcttcagtggatatcagcagtagcctagcagtacttgttgyggactctgggtggtggtggccatggggagtggtttcttatgcttgataaaagagaaaaaagagtaggaaggatgttgtctcatggcctcggtgccagctaagccacaacagaatagagcaccaagtagattcctaaggtttctgactccatgttcttgctaccaaaggcattttgctacccccagcccagagctcactgccctgaaggaaaggacatgagcctggctggattcaccacctactgaagagaacttgggtcttgagtgaacatcagtagtagctaggtagtggtcactgtgggccttatgtgagagccagtcctgtgctggctttgggtctgacttagtgtagtcctagtgatggtggccacaggggtgctagtgttacacccactccagctccaggtagctcagcatgcagagagagagagattccatttatttggcagaatgtaaaaaaatagaaaa

SEQ ID NO: 952313 - DNA, 469 bp, Homo sapiens
atttaacagagacacaaaataaatttacatrtaaaagttttcttaaattattttttaaaaggagagtaaaatgtctttttttatcttcaagtttcataatttaagtctggtatttctaatttgtatttgcccttacaacagccaagtctaaggccatgaccttgaactcatggacatctgatttccagtaggcattttaatcaggcacccgacgagtggcattgggtacaatttgttcacatgaaagagggtttagtcaggaagtaaaggcagaagaaagatgctatgaaggactgttaatctgaaataatctgaataatcaataaagcctcaaaatccaattgtagagtttattcaagtgaaaagctagaaatagtcatccaggagacaaaagctctagtgaaataagatgagtgcttcataggtgaaagttaagttcttatttctacaggcgaaaaacaaatttaac

SEQ ID NO: 952314 - DNA, 469 bp, Homo sapiens
atttaacagagacacaaaataaatttacatgtaaaagttttcttaaattattttttaaaaggagagtaaaatgtctttttttatcttcaagtttcataatttaagtctggtatttctaatttgtatttgcccttacaacagccaagtctaaggccatgaccttgaactcatggacatctgatttccagtaggcattttaatcaggcacccgacgagtggcattgggtacaatttgttcacatgaaagagggtttagtcaggaagtaaaggcagaagaaagatgctatgaaggactgttaatctgaaataatctgaataatcaataaagcctcaaaatccaattktagagtttattcaagtgaaaagctagaaatagtcatccaggagacaaaagctctagtgaaataagatgagtgcttcataggtgaaagttaagttcttatttctacaggcgaaaaacaaatttaac

SEQ ID NO: 952315 - DNA, 441 bp, Homo sapiens
aaaacttatgtccacacaaaaacctgaatctgaatgttgatagtagttttgttcaaatgaccgaaaactggaagcaactgagatatccttcagcagataaatggataaagaaactgagatayatacatataatgcaacattattgtgcaataaatagaaatgagctatcaagtcataatgagctatccaactctattttataaatgaactttatgtattgctatgtgataaaaagccagcctgaaatgctacatctggatgattccaattataagacattctgaaaaaagcataactatagcaatgctaaacaatcagtggcttccaagagttaagatggaggtatggaaggttgaagagctgaaacatagtatgtattaatatttttagataacactgttctgtacatattataattctgcatacacgacacaattcatt

SEQ ID NO: 952316 - DNA, 584 bp, Homo sapiens
ggcagcaactgttttggcacccatcaagtggaaagtttgcttaactttaatgttttgatcacatttgtgtattcagaagcaattgagatttctatggtgttggctattgtttgtgctgttgattgtcagtctttttcaattagggcatgaacaagattaattttttccttacaaattgatgtggatgttctgtcactgcaggcttcatcttcaacattatctggtcctttcttttttttttttcttttttttttgagacagagtcttgctctgtcgcccaggctggagtgcagtggcgcgatctcagctcactgcaagctccacctcccggtgtcacgctattctcctgcctcagcctcccgagtagctgggactacaggcacccgccaccaagcctggctaattttttgtattttagccaggatggtctcgatctcctgacctcatgatctgcctgcctsggcctctcaaagtgctgggattacaggcatgagccacaacgcccggcctatcttgtccctttttaaaatgagttatccatttgtaaactgctgatttctttggggcactgtctccataaattt

SEQ ID NO: 952317 - DNA, 584 bp, Homo sapiens
ggcagcaactgttttggcacccatcaagtggaaagtttgcttaactttaatgttttgatcacatttgtgtattcagaagcaattgagatttctatggtgttggctattgtttgtgctgttgattgtcagtctttttcaattagggcatgaacaagattaattttttccttacaaattgatgtggatgttctgtcactgcaggcttcatcttcaacattatctggtcctttcttttttttttttcttttttttttgagacagagtcttgctctgtcgcccaggctggagtgcagtggcgcgatctcagctcactgcaagctccacctcccggtgtcacgctattctcctgcctcagcctcccgagtagctgggactacaggcacccgccaccaagcctggctaattttttgtattttagccaggatggtctcgatctcctgacctcatgatctgcctgcctgggcctcycaaagtgctgggattacaggcatgagccacaacgcccggcctatcttgtccctttttaaaatgagttatccatttgtaaactgctgatttctttggggcactgtctccataaattt

SEQ ID NO: 952318 - DNA, 511 bp, Homo sapiens
ctcactcataagtgggagctaagctaygaggatgcaaaggcataagaatgatacaatggacttggggacttggggggaaagcatgggaagggggtgagggattaaagactacaaattggattcagtgacaccgtttaagactttcataccatagtagccttgtgagtgaaggttctcccaaaagcagacaccaaaacaggattagacatgcagggggtttactgggggaaacacctgtgagggaaagtggggaggaagccagagaaggctggaaaaggcttaggctataatgcaagtctgacccctatgaaggagagagggagggaagaaaggaaagaagaaagctcttaggctgcagttcagagctaagaccagttgggcaaagttacagatagtccttgagccaaagtcatccatgacaggagtcccatatctcgcagaaacaggcccctcttcgtgtccccagactgcacagtgagccgagaagcagagcatcagtgcaaatggagtg

SEQ ID NO: 952319 - DNA, 658 bp, Homo sapiens
gccactatcatcaccacccaccaccagaattttttcatcttgccaattgaaaccatatacccattaaacaataaatcttcatttccctcccctgtgaattagggttctctggagggacaggactaataggatagatgtatatataaatgggagtttattaaggaatattgacttacacgatcacaaggtgaagtcccacagtaggccatctgcaagctgaggaacaaggaagtcagtccgagtcccaaaagctaaaaagtagggaagccaacagtgccgctttcagtctgtggctgaaggtccgagagccacaggcaaaccactggtataagtccaagagtccaaaagctgaagaacttgtagtccaatgttcgagtgcaggaagcatccagcatgggagaaaggtggaggccaaaagactcagccagtctagtccttctgagaggtgacagcgtgctggcagtcctcagcccccgctcgctctcggggcctcctctgcctgggctcccactttggctgcacttgaggagcccttcagcccaccgctgcattgtgggagcsccgttctgggctggccaaggcagagcttggctccctcagcttgcagggaggcgtggagggagaggcgccacaggaaccggggctgcgcgccgcgttg

SEQ ID NO: 952320 - DNA, 582 bp, Homo sapiens
ggatgctaccgtgacatgactccgaacacctcttcccagcaatccgcgtctctgtttctgcttcagatttcaagsagagagaatcagaatgatggagcttggcaggctactcagcccagaaacttcagtgtgagtgtggccaggagctaagagagtttgttggacatacctcagtcattgcctgtcatcatagccaggatggaccaggagaccccagggagtggggtctgtgtccagaggagcaaagagcagaagctgccagaaaaaaaaaaaataagcgatcactacaactgcactgttctttctctggaaatgtcaaaattgtgactctggaacacattcattgactagatcctcatcggcccttgtcagaacctagacccaagagtcagaccttgttccacaacccgtccctgctccaaatggggacaactcggtgtcatcaaatggacctgcaatgggaaaatcaatgaagcgtttgaaacaggggagccccaggttctaatctatactttgaaatcaccttggctcctgtgcgtacaaggaacagagaaggctcagggacaccctctgggaacagga

SEQ ID NO: 952321 - DNA, 580 bp, Homo sapiens
tctgtccacaaggcctggtgtggatcccggggttgtaggtgctggcttggctctggcatggacctggagactggatcccatgggggccagtttagtgctggggtctacagggttgggcctagaccctgtgtctggctggagcttgtggtcacagggcccagcctggagctggtatccatggaggctctcctggagtgggtgtcttctggtgtcaacctggtaccaggatgggtcatgaggctgggtctgtgggtgctgacctggagtctggtgctgtggggggctggcctggtgctgggaatgatctatagcctgagtctttggggccagcctgacgttggggtgtgcctggagactgagtttaggcaaccaccccagagccaggggtcttaggggctggctggcattgaaccaggtttaaaggctcagtctatgggtgctggcctgaaatctagggcttcagtggctggtttggcagtgggacaggcctggagactaagtctgtggggccagtgtagaacctgggtccagcctgatggtagattgggmctggagcctgagactgtgggagccaacctag

SEQ ID NO: 952322 - DNA, 592 bp, Homo sapiens
  misc_feature 34: n = A,T,C or G
ctgccccgggtgctaagcccctcactgcccgggngctggtgacgccggcctgctgctcccagtgtggggcggccaagccatgcccacccggaactgcactggctygcgagtgccgccgcgcagcctgattcccgcctgcgcctctccctccacacctccccgcaagctgagggagccggcttccacctcggccagcccagaaaggggctcccacagtgcagaggcagcctgaagggtcctcaagcgcagcagaatgggcgcccaggcggaggaggcaccgagagcgagccagaacgagcaagggctgcgagggctgccagcaggctgtcacctctcaatctttggagaaatgcctatgcaagtcctttgcccattttaaaattgggttatttggttggttgtttgctttgttttgttttttagatggggtcgcactctgtcactcaggctggagtgccctggcgcaatcttcgttcactgcaacctttgcctcctgagctcaagtgatccccttatcttggcctcccaagtcgctgggactacaggtgcctgccaccactgcctggctaattttttatagttttggtagaga

SEQ ID NO: 952323 - DNA, 632 bp, Homo sapiens
tttgctcattctgctgggtaagacagctttctcagtggtaccctacctatgagggagcctgatgaatctcagatcttgtggawgctgccttctcaagttcaagagaaatgtgaaaggaagccaagtgaagccagtgggggatggactccccacaatctgtatccctttgtattttatgggcagtttacacagagggctaagtaatgtctctgggagtcactgaccatgaagataagtttaaaaagagaaagaggattttgaaggtaggaaatacctaagggaaagacctgaaagatggaagccttctcagtcttcacagtggaatcctttttgaacacctatgcccaggtcccacagcagatcaattgaatcagaattttctgggcatcaggccaggcaaagatattttttgaaagcttcccaggtgatgcttatgtgcaggcaagactgagcagctcagttaataaagaaggaggccgaggtgggcggatcacctgaggttggaagttcaagaccagcctggccaacatggtgaaaccccatctctactaaaaatacaaaaattagccaggtatggtggtgcatgcctgtaatcccagctactcggggcgggggttgctaaggcaggagaa

SEQ ID NO: 952324 - DNA, 767 bp, Homo sapiens
taggtgctctgtcccagggagatgggagttttgtctataatcccatgactggggctgctgcctttctttcagagatgccctgcccagtgaggaagaatctagasagggagtctggctacatggttttgctgagctacggtgggctccacccagttcaaacttcccagcagctttgcttacactgtgagggaaaaccgcttgctcaagccttagtaatggtggacgcccctccccccaccaagcttgagcacccaagtcgacttcagactgctgtgctggcagtgacaatttcaagccagtggatcttagcttgctggactccatgagtgtgggatccactgagctagaccacttggctccctggcttcagccccctttctaggggaggaaacggttctgtctcactggcactccaggcaccactggagtatgaaaaaaaactcctgcagctagcttggtgtctgcccaaatggctgcccagttttgtgcttgaaacccagggccctcgtggtgtagtcacctgagggaatctcctggtctgcgggttgcgaagatcatgggaaaaacacagtatctgggctggagtgcaccgttcctcagggcacagtctctcacagcttcccttggataggggagggagttccctgacaccttgcgcttcctgggtgaagtgacgccccaccctgcttcgtcttgccctccgaaccagtcccaatctgatgagctgggtacctcagttggaaatgcagaaatcacccagcttctgt

SEQ ID NO: 952325 - DNA, 586 bp, Homo sapiens
taataaattgcatggatgctatagaatttatagtgctccargtaggtcattaaataaatcactgtataatttatataaatgaacctaaatcatgcagcaggaggacttcattagaaaatcaatcctgtgagtggataaacatgaggactggcaggtgcactgttgtttttgaaaagtccctgcatctgtgaccgcatgtgaaggtgctctgtgctggagggcactcacttctcccaaccccaccctccccctgctcagttgtgggtgctcccaggaagctgggttcaggcttgcagtctccaagaagacctgcttccacctccaagttcccgggctcttctagcgggagtccacacagccgcagggactcaggtcacctcaaaggcagccagcctcttaccatttccatggcagaactgaggataaaagataaggcttggggcattctgagtaaggaaatccacagggctcccgccaactagaagcccagtcttggcttgaacacaggccaagaaagaagtccaaacatctttggctggcaggagtgttcaccttgccgtgggcagatgtctgcctgatgctgctg

SEQ ID NO: 952326 - DNA, 558 bp, Homo sapiens
gctcaggctgctactgtgtccggaattggtgggttcttggtctcactgacttcaagaatgaagccacggaccctcccggtgagygttacagctcataacggcagtgtggacccaaagagtgagcagcagcaagatttattgcaaagagcgaaagaacaaagcttccaccatgtggaaggggaccggagagggttgccactgctggctcggcagcctgcttttattctcttatctggccccacccacatcctactgattgatagagtggtctgttttgacagggtgctgattggtgtgtttacaatccctgagttagacacaaaggttctccacgtccccaccagattagctagatacagagtgtccacacaaaggttctccaaggccccaccagagtagctagatacagagtgtccattggtgcattcacaaaccctgagctaggcacagggtgctgattggtgtgtttacaaaccttgagctagatacagagtgctgattggtgtatttacaatcccttagttagacataaaggttctccaagttcccatcagactc

SEQ ID NO: 952327 - DNA, 608 bp, Homo sapiens
aaggctgaataatatttcattgtatatgtatataatatacacacacacatatatactatatatgtatatacacacacacatatatatgtatgctatgttttctttatccattcatctgttgatagacattaggttgtttctatatgttggctattgtgaataatgctgcagtgaatatgggggtacagatgtctcgttggcatgtggattgatatcttgctttggaaatttttgaaaaagctctagactctgatcccaaatactattctgttctattctctctcttttctccttctggaactataattacacttttcatcctgtcttacttgtaccttatgcctgttttctgcatttttaatctttaaaacaatttttttaatttttaaaaattaaataaagatgggggtcctgccatgttgcccaggctggtctcaaattcctgggctcaagcatttctcacaccttggccttttaaagtgcttggattatagacgtaagccaccatgccaagcctggtttttttttttttttttgttawctttttgcctctctgtacttcactgtgaatattttcctctgatgtattttctagttcaataatcttc

SEQ ID NO: 952328 - DNA, 610 bp, Homo sapiens
caaaaacagttctttaaatttattcagtcagacaaaaataaaaaagaataacaaaacctctaagaaatatgagattatgtaaagagaccaattctacaactcagtggcatccctgaaagagagggaaagaaagcaagcaacttggaaaacacacttgaggatataaaccatgcaaattttcctaagcttgctagagaggtcaacattcaaatctaggaaattcagagaacccctgtgagacaccatagaagacaaccatccccaagacaaatagtcatcaggttatccaaggttgacatgaaataaaaaatattaacagcagctagagaaaagaggcaggtcacctacaaagagaatcccatcaggataacagtggacctttcagcagaaaccctacaatccagaggggactatatacagcattcttaaaagaaattccaactaagactttcttatccagccaaactacacttcataagtgaaggagaaawaagatctttttcaaacaagtaaatgctaagggaattcattaccacaaacctgccttacaagaaatccttaagggagtgctaaatatggaaattaaagactgttaccagccatcacaaaa

SEQ ID NO: 952329 - DNA, 544 bp, Homo sapiens
ctaagattaagggtgggtctgcctttcccagcccactgactcaaatgttaatctcctttggcaacaccctcacagatgcactcaggatcaatactttgtatccttcaatccaatcargttgacactcagcattaaccatcacacttcttaattcataaaataccctcacagcactctctctcattacattgtttttttccaataacatttaatttaatgatgttctctccccattataatatcagctccatgagagcagggatttgcctaaatgatgtttatgtaatatcaaggcctagtaggtgcctggcacaaagtatgtcctcaataagtattcattaaatagatgattaatacatgaactgacagctcaataaagaagtagaagaaaaagtagaaccaccgtatcaatgaaagttcaatcgagaggagcattaaagagaattaacagagctgaaaactgaagtaagataaacagtagttagaaataagagaaaagaaaataattaaattcatataaataatttggaaagatgtgaagaat

SEQ ID NO: 952330 - DNA, 620 bp, Homo sapiens
agcaagactccatctcaaaaaaaaaaagtgcaagtcccacccctccactgtccccattcacttccatgktgtgtgcagaagaaagagtaaaggaccccgaccaaggctctgagtaagggctgcagggtgccagttctcataatggtttctctagagttttgcacaaacaagacgaatggggccacagacaggcagcacccaggggtgcattctggctgggccttgtgcccagggcaggtttctccatcgtgttttatttccagaactaagttgagccatggctggtgctgccttccacgtctgactctgccaagaagtgcctggagcccttgttttcggggaggaagtatctctggtgggttttgaagtttctgtgtgatttctcttaacattaaatcaatactggaagtgtcttttgttatttttctgtttatggagccaatgctttaactaatatcagcagataccacatgctgaatggccctgttgtatgccaggcctacgtttcatctcattcaatcctctcaacagttctagggaacccaatctcatgttatcccattttcgagaggaggcacttgaagctaagagaggttaggtcattggcctgaggtaaaaca

SEQ ID NO: 952331 - DNA, 607 bp, Homo sapiens
agagaaggggcttgacttcaaaggcacaacttgatgacataacttcagagaagaatctgactggagctggccggacttcaggggaagattgccttcctgtcstgtaccgttttcagcttcccttccctctgagaataagggtataagggactcccatctcacccttattcctcacagacgtggaaaaaaaaatatgtcctctggatccttccagggcaagtaaccaggcatcacatgagaaatctactcttctaatctcactaagcctttcaataccttcctctacagtataccaagacagttctggcatttaatgtcatttagtgttggccaccttttagtccatgttttagccaatcaagcaaacaaattaattgagttatttctgacctcgaaagctacaacattaaatccagaatctctgcttcgtgggctcatatcaataagtttggcctgattcaactttgtgttctttccaccactattctacacccttgatttccattcccacacctattccctagatttctgcttgggtaaattgcaaaagccatgcagttattttggagtgtagcaaatcttttcatgagtctttttaggacttact

SEQ ID NO: 952332 - DNA, 623 bp, Homo sapiens
gtcagagagaaggggcttgacttcaaaggcacaacttgatgacataacttcagagaagaatctgactggagctggccggacttcaggggaagattgccttcctgtcgtgtaccsttttcagcttcccttccctctgagaataagggtataagggactcccatctcacccttattcctcacagacgtggaaaaaaaaatatgtcctctggatccttccagggcaagtaaccaggcatcacatgagaaatctactcttctaatctcactaagcctttcaataccttcctctacagtataccaagacagttctggcatttaatgtcatttagtgttggccaccttttagtccatgttttagccaatcaagcaaacaaattaattgagttatttctgacctcgaaagctacaacattaaatccagaatctctgcttcgtgggctcatatcaataagtttggcctgattcaactttgtgttctttccaccactattctacacccttgatttccattcccacacctattccctagatttctgcttgggtaaattgcaaaagccatgcagttattttggagtgtagcaaatcttttcatgagtctttttaggacttactgggactgagtc

SEQ ID NO: 952333 - DNA, 608 bp, Homo sapiens
ataggtgctcaaaaaataaacatgtacatgaatatttatggcagtaatattcatacagtcaaaaagtggaaacaatccatatgcttgtcgacttataaatggacacccaattttcagctataacaaagaatgaagtacttatacatggtaaaatattggtgaaatttgaaagcattatgctaagtacacaaaaggacaaatattacttgattttattcacatgaaacatcaggaattggcaaatcaactgggatataaatcagattagtggtcattagggctcagggaagcagaatacggtctaacaactttatgcataatgggtttttagaagggacatgatgaaattatcatggaacattgtgaatatactaaaagcaactgcattgtatactttaaaatggttaagttgtgaattttatattgtgtgctttttaccttaaaaaacaaaaaagagaaaatagccttactctatacataataaactcaagatgtrttacaaatttatatgtgaaatccaaaatactataatatttaaggaatagctaagtagaataacactaaaatttagcataatgaaatatttccttaaaaaagaaaaaacacag

SEQ ID NO: 952334 - DNA, 608 bp, Homo sapiens
ataggtgctcaaaaaataaacatgtacatgaatatttatggcagtaatattcatacagtcaaaaagtggaaacaatccatatgcttgtcgacttataaatggacacccaattttcagctataacaaagaatgaagtacttatacatggtaaaatattggtgaaatttgaaagcattatgctaagtacacaaaaggacaaatattacttgattttattcacatgaaacatcaggaattggcaaatcaactgggatataaatcagattagtggtcattagggctcagggaagcagaatacggtctaacaactttatgcataatgggtttttagaagggacatgatgaaattatcatggaacattgtgaatatactaaaagcaactgcattgtatactttaaaatggttaagttgtgaattttatattgtgtgctttttaccttaaaaaacaaaaaagagaaaatagccttactctatacataataaactcaagatgtattacaaatttatatgtgaaatccaaaatactataatatttaaggaatagctaagtagaataacaytaaaatttagcataatgaaatatttccttaaaaaagaaaaaacacag

SEQ ID NO: 952335 - DNA, 571 bp, Homo sapiens
atgttatttcattgtggttttgatttgcatttctctgattattagtggagcattttttcatatgtttcctggccacttgyatgtcttctttctgagaagtgtctgttcatgtctttggcctactttctgatgaacttgtttttttcttattgatttctttcagttctttataaattctggctattagttccttgtcagatgtgtagtttgcaaagacttgcccccattctgcaggttgtctgtttactctgttggcagtttattttgcttgacaaatggtctttagtttaattaggtctcacttataaatatcttttgttgcaattgctttagaggacttagtcataaattctttgcctatgccaatatctagaagagtacttcctaggttttcttctaggatttttatagtttaaagttttacatttaagtctctaagctgtcttgagtttttatttttttttgtatatagtaatagggctacaatttcattcttctgcatatggttagccaatgctcccaacgccatttattgaatacggagtcctttcctcattgcttatttttgttg

SEQ ID NO: 952336 - DNA, 571 bp, Homo sapiens
atgttatttcattgtggttttgatttgcatttctctgattattagtggagcattttttcatatgtttcctggccacttgcatgtcttctttctgagaagtgtctgttcatgtctttggcctactttctgatgaacttgtttttttcttattgatttctttcagttctttataaattctggctattagttccttgtcagatgtgtagtttgcaaagacttgcccccattctgcaggttgtctgtttactctgttggcagtttattttgcttgacaaatggtctttagtttaattaggtctcacttataaatatcttttgttgcaattgctttagaggacttagtcataaattctttgcctatgccaatatctagaagagtacttcctaggttttcttctaggatttttatagtttaaagttttacatttaagtctctaagctgtcttgagtttttatttttttttgtatatagtaatagggctacaatttcattcttctgcatatggttagccartgctcccaacgccatttattgaatacggagtcctttcctcattgcttatttttgttg

SEQ ID NO: 952337 - DNA, 615 bp, Homo sapiens
tatacattcccctgggatttgccagagaccagcacagcctcctccttggtgaaccctgaaacagaatgaacaggggtgaggacctctggcttttctgacccagttccttggtaagaaactccctaagggaaatctggggaacatcattatggaaaagatgaagaatggaaaaatgtgctgtggtgaaactgaggctggggctgcatgctccgtggtgatttcctgaacaagcaacaagtgccaggtcaacaactcgatcgatcgctgtcatcatctttgtcttcagaaaatcttaaccaagcgcctcctcccagatgatagattaggctttgtatagccgtgccatctagaagttgctgatcaggttggatgactccacagtgaccaaatggaaaggacacaaaagaaaagaatcagaatcagaatgtgggccctggaggcaggtaggagttaagcaaaaaagggccttgggaccaagctgcctggattcatgtccacccrctctgcttactggctatgtaatttggggccagttttttaacttctctcagcctcagtttcctcatctgtaataaggggatgataatagtacctgtttcagagacttgttgcaaa

SEQ ID NO: 952338 - DNA, 571 bp, Homo sapiens
aaaataatcaagatcaaggttaaaatatttaagccttactttctgtgtctctagcttctttaattttttttctcaattatatgaagtaccctactatagctttatagccctaaggtttaatggagtttcatttaattctgtggcctcaaatttttaatgattgtgaaaaatgataatatggatcatgtgatatatataataaaaacattcattattgtgtttgactctgtttaaagtaactaagaacaatactgttctttaagagctcacaatggtaacctgaaatttaagactcattgtgagtggctacacaccattttgcatgaaggctggcctccatcctaattggtcaggcaactgtcttattggtctgtgttcatatatgttgttttgaatatcatccctgaatataagtgtacttcctctaagccagtctcagcaaagtgttgatttatgaacaagcacacaaactgaaactcatcaatctgacattcaaaatgcattaaaaagacatcttaactgcagtctacagtgaygctattaatggtgtgtctttcaaactatctatgca

SEQ ID NO: 952339 - DNA, 609 bp, Homo sapiens
tccctgcaggatcaaaccactctatccatagtgactcgtttcttttaaaatgttatcatggtragagcatttagcttgagatctacccttttaacatattttaagtgtaaaatacaacattgttatctataggcacaatatcgcacagatctctagaatgtattcatcatgcataactgaaatattatatccattgataatagcaactcctatttcgccctaccctgctcccagccccggacaatcacaattccattctttgcttccatgagtgtaactattttagatacttatatgaacagaatcacacagtatctgttctttctgacaggctgatatcacttattataatatccttcaggttcatgcatgttgtcaaatattacaggatttccttttttcttaaggctgaataatattccattgcatgtattccattgcatgtatattgcatatatcatttgttttatccatccactgacgaacattcaggttttttccaaattttggctattgtgaatagtgctgcagtaagcatggcagtgctggtacctctttgtgatctttatttcaattcttttggataaatacccagaaatagaattgctg

SEQ ID NO: 952340 - DNA, 623 bp, Homo sapiens
gtcattgatcctttcagttatcttytttacactcttcctgggttctcagactttctccccaagttcatttgagactaaagggagagatagcctgtctgatactagccctgggttcctgcactattcttttagtttccctacacactacccacaccttataataaggccctttgtaaataaactctccttggcttaagctatttcgagtgtgccatccatttcctgttaagactgactggcaaaccattgttcatcactgtaggtccctaacttatatgtggtcaaggtcactcctttggtttattggagaagggcgttgttatggtttatttaaccagtttattcttcttatagtttcaccattgcccacagggagtttttcttgcatatgctaatagctccattgtttacccagaatgaaggttttttgtttatttataaatagtttcaagtgttgttttattgggattatgagaaggatggaaggtgaaagcagacgataaactgcaaagattcaaatgcctatactaaaatataaatttttttatcctacttaaagaagttttcaagaaagagcactttataatgtttcctcccctccacatactgattagcttcctata

SEQ ID NO: 952341 - DNA, 594 bp, Homo sapiens
aataaatttatgggaggctactgttttggactaatggcctgcactggccccagtaaaccagagcaaatcagaatggagtcacttgtgctaagtgccacataatcaaactaaaccttgaagcaggccagctttccaaaaaaacaggagattcatagcaaccaatcagaaggggacgtgtaccttagccacatgataaggaagtcccttctgatttaaccctgtaaggaaagtaacttcgatgaccaatccttttttcattccgtttctgctttcttcagccctttctgcctataaagatatatagagatatagatatagatatagatacacatatatataattttttgtttcttagacacagagttttgctttgtcacgcaggctgaagtgcaatggcactattatagctcactgcagcattgacttcttgggctcaagtgaagcctcctgcctcagacacccaaagtgctggaactacagacatgagacaccacgccctgccttcattatattttatagaatgagrtgttgcccgattctggaattgcaaataaaagccaattagatctttaacctaactttgttgtaattttg

SEQ ID NO: 952342 - DNA, 598 bp, Homo sapiens
ccaggaggtggttacatacggcagaggtctggattgatcaccttgagaaactgggaggaggtagagaaatggaaaatatgtcaagagttactttttgccaaaaagaagtccaacttrtattcaaaatgaatgccggggcaacatataggaagtcactacaataagacggctgacatgactatagaaatatcagacaaaataggccttaaggtgaaataattgactaggcatggtggctcatacctgtaattccagcactttgggaggctgaggtgggtggatcacttaagcccaggagttcaagaccagcctgagcaacatggtgagaaccctctctacaaaaagtacaaaaattagccaggcacggtagcaggcacctgtagacctagctacttggaatgctgtgtgggagaatcgcttgagcccaggaggcaaatgttgcagtgagccaagattgtgccactgcactccagcctgggtgacagagtgagaccctgtctaaaaaaaaaagatgaaactttttatgagaaataaagggtcattttacaatggtgaaagagtgaattcatcaggaaggtataataattataaacatata

SEQ ID NO: 952343 - DNA, 586 bp, Homo sapiens
aggacagacattgtatcccctgagcaatcattatgcctttttgctcagcagcatgtgctgcttgtgtgttccaacaccgattctcccacaccagccagtgtccgatgattcaaktcaagtctgacaccaaacacctggagttagtgcagccctcacaggttaaagggtaaaatctccaagaagactgccccagttcagataccagtcacaagtggagtcccgcttctactttgctcactgcaaattcataagttcccacaacaactattaggtttgcgaatttgctagaatgactcacagaatggtgagacgtgcttattttccattaccattttattataaaggatatagatgaaaagcaagatggagaggttgtaggcagggtcaaggagggtcccaagcacaggaacttctgtctccacagagttggggtgccttgccctcctggtatatccatgagttcaccaatcaggaagctctctgagcctggtgttcagtttttatccatgctccatgacacaggcaagcttggttaaatcactgcccatgtgattaaatttggtgtctagccccctcccctccctgg

SEQ ID NO: 952344 - DNA, 575 bp, Homo sapiens
cgggctctgaagaccgatgctctagcgccccctgctggcgcctggccttgattccgctgcttcctttcccctgaaatgaaggaaagcaggagggttgtgaggcttcattgatttctccccggcggagcagcgatgcggatggggatgaggggtggtcagaggagaccagagctagcgaacacgttcccttctatgacctggcctgtgctgcgacgcatggtaccagccctgggttggccttgtacctccaggcatttgggggccttccagaggcaggaggacggcttgaaaccaggagttccagatcagcctgggcaacatagcaagaccccatctctaaaaaaaaaaaaaaaaaaaaaaaagaattatctggacatgttggcccacctgtggtcccagctacctaggaggctgaagtgaaaaaatgcatcactgtaaaaaaamatctagagtttaagactgtgaaatgttattagtcctttctcacactgctataaagatattacccaagaggtgggaggatcacttgagcccaggagttcgaggttgctgtgagctatgatggcaccactgca

SEQ ID NO: 952345 - DNA, 575 bp, Homo sapiens
cgggctctgaagaccgatgctctagcgccccctgctggcgcctggccttgattccgctgcttcctttcccctgaaatgaaggaaagcaggagggttgtgaggcttcattgatttctccccggcggagcagcgatgcggatggggatgaggggtggtcagaggagaccagagctagcgaacacgttcccttctatgacctggcctgtgctgcgacgcatggtaccagccctgggttggccttgtacctccaggcatttgggggccttccagaggcaggaggacggcttgaaaccaggagttccagatcagcctgggcaacatagcaagaccccatctctaaaaaaaaaaaaaaaaaaaaaaaagaattatctggacatgttggcccacctgtggtcccagctacctaggaggctgaagtgaaaaaatgcatcactgtaaaaaaaaatctagagtttaagactgtgaaatkttattagtcctttctcacactgctataaagatattacccaagaggtgggaggatcacttgagcccaggagttcgaggttgctgtgagctatgatggcaccactgca

SEQ ID NO: 952346 - DNA, 632 bp, Homo sapiens
taaatcattatttcatactaatgtcttctgttcaaatttgtaattaccaggtatttacttcttatattttatatttacttttcactgaaagtcttggttcttattgacatcatttcttatttgacttatcctacaatatataaataatagtttcaaaataagaatactaacaagttgattggatgaggtttaatatttctttatggtttgttttgtccctaggatatattccattatagatgtacaaccaatgtctttaaaattatttgacataattttctctgtgtgattataccacctccttgatatagactattagagctatatggcattgaacaattaagttcacttttgttttttcttttctaccgaggctacaagtcagttaactaaactcagttgacctaaaattttagcattctttaggtattgctgtgtagtcacagccacatgcaccaaacactctgcttttaggttgattctacccagcactctcttgggccttcagttctacaatgtcggacaacccatactcccagagaagctgccaatctggacttctgcttaacatggatttgttttgtgtrgtaatttgtgccagtccaccatcactgtggctggtctcatgaatc

SEQ ID NO: 952347 - DNA, 545 bp, Homo sapiens
ccagaaggtttttgcaaaagcctcaggatagagttatggctgaaggcagcctaatcctctttgagctatagcaagggtaattaacataggaatgtagaggagtctatttaaatagcttgtttactcatgtggtcctaagactaacctttgaccatccacgggtccatgattgctgtctactctgggggtcagcaatggtaattaccttctagtggtgtttacttgagacttttgtcatttaatgtgtgctgaataaatgctgggagggccaacgagtaggggccgcagttgcaactctttacagcactctcctgggagtctgtaagcggcccagactctcagccggactgacaagcataatatctgtgtcagtgtatgttactcattcatcattgggttagggtctgcaggatggacccccacatcccaaagttctgggattacaggtgtgagccacygcgccaggacactctccccttttttattcacgaaggtacagcctctttgctctcatttgagagcaggctcttctctgccccagggcc

SEQ ID NO: 952348 - DNA, 636 bp, Homo sapiens
aaaatccttggaatcttcaaagggatcagatgtcttttgtgtgctaaggattggttggtggctggcagcctccaggtagcttcaggatggaggatggttaccagaaagaccatggcagggtgagagggcttggactttccctctccctgccccacctccggtgaagcaagaggggttgaaggttgaaggttgggctgatcacccgtggccaatgatttaatcagtcatgcctgtgtaatgaagcctccataaaaactcagaaggacagcgtttggagagcttctgatagctgatcatgtggaggttcctagagggtgatggtcccagggagggcatggaagctcctcgcccttcccacatgtctcaccctatgtatctcttcacctgtattctctgtaatatcctttataattaaccggcaaatgtgtttccctgagccactctagcaaattaactgaacctgaggaggggctctagggaaccttgacttatagctggttggtcagaagcacaagtaaaacaacstggggcttgtgattggcatcagaagtgctgggggcagtcttatgcgactgagccctcaacagatgggatttgacactatatccagatacatagtgtcagaattaaattgga

SEQ ID NO: 952349 - DNA, 636 bp, Homo sapiens
aaaatccttggaatcttcaaagggatcagatgtcttttgtgtgctaaggattggttggtggctggcagcctccaggtagcttcaggatggaggatggttaccagaaagaccatggcagggtgagagggcttggactttccctctccctgccccacctccggtgaagcaagaggggttgaaggttgaaggttgggctgatcacccgtggccaatgatttaatcagtcatgcctgtgtaatgaagcctccataaaaactcagaaggacagcgtttggagagcttctgatagctgatcatgtggaggttcctagagggtgatggtcccagggagggcatggaagctcctcgcccttcccacatgtctcaccctatgtatctcttcacctgtattctctgtaatatcctttataattaaccggcaaatgtgtttccctgagccactctagcaaattaactgaacctgaggaggggctctagggaaccttgacttatagctggttggtcagaagcacaagtaaaacaacgtggggcttgtgattggcatcagaagtgctgggggcagtcttatgsgactgagccctcaacagatgggatttgacactatatccagatacatagtgtcagaattaaattgga

SEQ ID NO: 952350 - DNA, 551 bp, Homo sapiens
atgtttataataggaaaaaactggggaaaagctgactggccattgatagaaaatggatacattgtagcttgtttatacaatggcatggcaaccatatactgcttataatgaatgaaacgkaattctatgtagtaacatggatctatctaatagcacagtaagtcagggactggaacatccactaaaatatcacttagataaagtaactcacagacaacactctgtattgtgcaaagatgcatacatgtaattaaagtgaaaaacagagaaagataaactgactatactatttgtttctgggaagaaagaaattgaatggaactaaaaaggaaaatgagaagtatttcaaacttggcaatgttctcttattattttaaaaaaaggtcaaaaagaaaaacacttcaggccaggcactgtgcctcacgcctgtaatccttgcactttgggaggccaagttgggaggatcatgaggtcaggagttcgagaccagcctgatcaacatggtgaaaccccgtctctactaaaaatacaaaaattagccgggggtggtg

SEQ ID NO: 952351 - DNA, 619 bp, Homo sapiens
gcctttaggactttttatttatctttgttcttatcagttgataattttttgtgtatttatttaacttggggtaaattgactttttaaattattattatactttaagttctggggtacatgtgyagaacgtgcaggtttgttacataggtatacacgtgccatagtggtttgctgcacccatcaactcatcatctatattaggtatttctcctaatgctatccctcccccagccccccaccacctgacaggccctggtgtgtgatgttcccctccctgtgtccatgtgttctcattgatcaactcccacttataagtgagaacatgcggtggtaaatttacttttacctgcccactccttcaccagtgcttctgttgcaatcagtcaagtctcttgagttttgacactttctcctcctcctgcctgtattaagatccaatgtttcggccaggcgcggtggctcacgtctgtaatcccagcactctgggaggccaaggaggatggatcatgaagtcaggagatcgagaccatcctggctaagacggtgaaaccctgtctctactaaaaatacaaaataaaaataaaaataaattagcctggcgtggcgccatgcgcctgta

SEQ ID NO: 952352 - DNA, 659 bp, Homo sapiens
gaattgagaatcttacctgcctgtacagatgctgctagaagaccacatagactacatttcaaattaggcactggaaaaattgtttcagtcatgtttatattttagtttagctatgtatcctacctagctaaaaaataagagtatggttattgtgtccaatgattagacagtgaaaatgctgggaagtggtgataaccagggaatatcatagatttgtagcagtgaatggttttatgttcgtaaatattataggatattataggcctgctgcaaactgttaggcttgaaatatagcccaggaagtatatgtttcttttcctgatacagtatgatgtaacattatcaaggatataatctagtgagaaattaataattgtggcatacaggtgagtcctctatatcatctaagtaggtttctcaaaataagcttgaatttgcgaagtggaatccagacatatacttgggaatctggagagctgggatgaggtttggcagaaatgttgaaaaatatacagtatttcgtttctacaggacttttcaaaatcttgatattttaaaggtacataygatgccaatgttgccgtatagctcagtctagaggaatctcagaaaaatacagttatcatcattggactaccgtccaattctgagatccacca

SEQ ID NO: 952353 - DNA, 680 bp, Homo sapiens
aattatcagaattatcagaggcctgactcttcaggtccccctcctttttttttttttgaggcaaagattcatgctgttgcccagactgaagtgcagtsgtgtgaccttgactcactgcaacctcgacctccccggctcaagtgatcttcccaccttagtttcccaagtagctgggactacaggcacctgccaccatgcctggctaatttttgtattatttgtagagacggggtttctccatgttgcccaggctggtcttgaactcctgggctcaaatgatccacccgcctcggcctcccaaagtgctgtgccattacaggcgtgtgccatcgtgcctggcctccaggtccctttttttttaatactttagagaagtactgtccaatagaaatatgatgtgaaccacaaatgcaaccctcagatgttacttttaaatgttctagtagccatatgtaaaaagtaaaagaggaaactaattttaataatgagctgaatgcaatatacccaaaagattatcatttcaatctgcaatgatataaaaattactaatgagatatcttataaatcttcttgtgttagaaatggacctacgcattctatatttaacacatatctgttttcagtctagctacattttaaggctcagtagctgtatgtagctagctgctgctactacttgg

SEQ ID NO: 952354 - DNA, 577 bp, Homo sapiens
gtatgtggtcttatttctgggttctctattctgttccattggtctatgtgtctgttcttgtaccagtaccatgctgttttggttactggagmcttgtagtgtagtttgaagtcaggtagtgtgatgcctccagctttgttctttttgcttaggattgtcttcactattcaggctctttttttttaggtccatatggattttaaaatagttttcttctaattctgtgaagaatgtcaatggtagtttaatggggatagcattgaatctataaattgctttgggcagtatggccattttcaccatattgattcttcctatccatgaacatggaatgtttttccatttgtttgtgtcctctctgatttctttgagcagtggtttgtagttctccttgaagagatccttcacttcccttgttagctgtattcctaggtattttattttttttgtcaaaagtgcccttaatctttcagagttcatactaaaccgtttctggatgaagtgacataatggttgggatttgctttaagacagtatggaagagggtagaatgagtgatgaaataagcttggctatg

SEQ ID NO: 952355 - DNA, 577 bp, Homo sapiens
gtatgtggtcttatttctgggttctctattctgttccattggtctatgtgtctgttcttgtaccagtaccatgctgttttggttactggagacttgtagtgtagtttgaagtcaggtagtgtgatgcctccagctttgttctttttgcttaggattgtcttcactattcaggctctttttttttaggtccatatggattttaaaatagttttcttctaattctgtgaagaatgtcaatggtagtttaatggggatagcattgaatctataaattgctttgggcagtatggccattttcaccatattgattcttcctatccatgaacatggaatgtttttccatttgtttgtgtcctctctgatttctttgagcagtggtttgtagttctccttgaagagatccttcacttcccttgttagctgtattcctaggtattttattttttttgtcaaaagtgcycttaatctttcagagttcatactaaaccgtttctggatgaagtgacataatggttgggatttgctttaagacagtatggaagagggtagaatgagtgatgaaataagcttggctatg

SEQ ID NO: 952356 - DNA, 574 bp, Homo sapiens
ctggatggggtctggtaaccagaaagaccaacacatgattagaagcttgaaattttcagccatatcccccagcctctgggaaggggaaaggggctgaagattgagttaataattgggtgttttattttgcctatttgatgaagcctccataaaaatccctgaacaatggggttcagggagtttccaggttgatgaaaacacccatgtgctgggaagctggtgcaccccaaatccatggggacagaagctcctgtgcccaggagccttctggaccatgccctgtgcatgtcttcgtctggctagtcacctatgtcctttatcatatccttcaaaataaagcagtaaacataaggaaagtgtttccctgagttttgtgagccatcctggaaaattaccaaacctaaggagggggctgtgggaacccctgatctatagctggtgggtcagaagtacrtggtctcaacctggggcttgtgattggcatctggggtcaggggcagtcttatgggattgggctcttaacctgtggagtctgtgctcactcagttagattcagagctgaattgaattgtgt

SEQ ID NO: 952357 - DNA, 574 bp, Homo sapiens
ctggatggggtctggtaaccagaaagaccaacacatgattagaagcttgaaattttcagccatatcccccagcctctgggaaggggaaaggggctgaagattgagttaataattgggtgttttattttgcctatttgatgaagcctccataaaaatccctgaacaatggggttcagggagtttccaggttgatgaaaacacccatgtgctgggaagctggtgcaccccaaatccatggggacagaagctcctgtgcccaggagccttctggaccatgccctgtgcatgtcttcgtctggctagtcacctatgtcctttatcatatccttcaaaataaagcagtaaacataaggaaagtgtttccctgagttttgtgagccatcctggaaaattaccaaacctaaggagggggctgtgggaacccctgatctatagctggtgggtcagaagtacatggtctcaacctggggcttgtgattggcatctggggtcrggggcagtcttatgggattgggctcttaacctgtggagtctgtgctcactcagttagattcagagctgaattgaattgtgt

SEQ ID NO: 952358 - DNA, 582 bp, Homo sapiens
ttatggggaaggtcggagaaattccaggctccgaggagtccaagacagcattccagctcattcctaattttatattcaggttccttaaaacaaaaacttcactatgagacattcaaaccctttgcatgttacagtctgcaaagtttgaaaagcatttccttccttagtgtctctgagttgccctaaatactttctttcaaccagcaggataggggacagtaggtttttgtgactacttaagtcttggcagcaagaatggggccccagaaggcgctagtgtttctggaacaaccgatatcagggcagatgtcttgtgcttggccccttggtgggccacttgcctggagttatgggacagggatgagcatgttcctgcccctgaggagttcatggtcagtaggggaggctgcatagacaaaactcaacccctggactatggctgtggccctgratggcccagaggcccaagaaaatattgggcaagagtacctcttttcttcctctgtaaagggagtaataggaattcacacactacagtcattgtgacaggatgcatgggtgggggtgtgcaggggacttgaa

SEQ ID NO: 952359 - DNA, 580 bp, Homo sapiens
tggcctaatacagaaaattggtactgagaagtggggcattataaagataactgaaaatatggaaggaactttgaaactgsgtaatggtcagaggttggaagagtttagaggactcagaagaagatagagagatgaaggggagtttgggacttcttagatactggttaaatgactgtgaccaaaatgctggtagtgatatgaacagtgaagtccaggctgaggtggtctcaaatggaaatgaggaagttattgggaactggagcaaagatcatgtgtgttatgcctttgcaaagaacttggctgcattgtgtccatgccttacggatttgtggaagtttgaacttgagagtgatggcctagggcatctggaggaagaaatttctaagcagtaaagtgttcaagatgtggcttggttgtttctaacatcttaagctcatatgcaggagcagagaaatgacttaacttggaatttatgtttaaacaggaagcagagcaaaaccatttagaaaatttgcagcatggccatgtggcagagaaatgaagttttttgggggaggaaaagcaggctgtggagcaacca

SEQ ID NO: 952360 - DNA, 662 bp, Homo sapiens
ctgcaaaggatatgatctcattcctttttaaggctacatattttccatggtgtagatagggtttggctgtggactcatccaaatctcatcttgaattttagctcccatrattctcatgtgttgtgggagggaccctgtgggagctaatcgaatcatgagggtgcgtcttttccatgctgttctcatgaaggtgaataagtctcatgaggtctgatggtttcataaagtgggagttcctctgcacaagctctctctttttgcctgctgctatccatgtaagatgtgacttgttccttcttcccatccaccatgattttgaggcctccccaaccatgtggaactgtaagtccattaaacctctttcctttgtaaattgcccagtcttggatatgtctttaccagcagcatgaaaacagactaatacagtatatatgtaccacattttctttatccagtctagcaaattccgtgtctttgctattgtgaatagtgtgcaatcaatgtgtgtgtgtgtgtgtctgtgtgtgtctttatgatagaatgatttatatgctttggggcatatacccagtaataggattgctgggctgaatggtatttctgtttctaggtctttgaggaatcaccacactgtcttccacaatggctaaactcatttacgt

SEQ ID NO: 952361 - DNA, 662 bp, Homo sapiens
ctgcaaaggatatgatctcattcctttttaaggctacatattttccatggtgtagatagggtttggctgtggactcatccaaatctcatcttgaattttagctcccataattctcatgtgttgtgrgagggaccctgtgggagctaatcgaatcatgagggtgcgtcttttccatgctgttctcatgaaggtgaataagtctcatgaggtctgatggtttcataaagtgggagttcctctgcacaagctctctctttttgcctgctgctatccatgtaagatgtgacttgttccttcttcccatccaccatgattttgaggcctccccaaccatgtggaactgtaagtccattaaacctctttcctttgtaaattgcccagtcttggatatgtctttaccagcagcatgaaaacagactaatacagtatatatgtaccacattttctttatccagtctagcaaattccgtgtctttgctattgtgaatagtgtgcaatcaatgtgtgtgtgtgtgtgtctgtgtgtgtctttatgatagaatgatttatatgctttggggcatatacccagtaataggattgctgggctgaatggtatttctgtttctaggtctttgaggaatcaccacactgtcttccacaatggctaaactcatttacgt

SEQ ID NO: 952362 - DNA, 662 bp, Homo sapiens
ctgcaaaggatatgatctcattcctttttaaggctacatattttccatggtgtagatagggtttggctgtggactcatccaaatctcatcttgaattttagctcccataattctcatgtgttgtgggarggaccctgtgggagctaatcgaatcatgagggtgcgtcttttccatgctgttctcatgaaggtgaataagtctcatgaggtctgatggtttcataaagtgggagttcctctgcacaagctctctctttttgcctgctgctatccatgtaagatgtgacttgttccttcttcccatccaccatgattttgaggcctccccaaccatgtggaactgtaagtccattaaacctctttcctttgtaaattgcccagtcttggatatgtctttaccagcagcatgaaaacagactaatacagtatatatgtaccacattttctttatccagtctagcaaattccgtgtctttgctattgtgaatagtgtgcaatcaatgtgtgtgtgtgtgtgtctgtgtgtgtctttatgatagaatgatttatatgctttggggcatatacccagtaataggattgctgggctgaatggtatttctgtttctaggtctttgaggaatcaccacactgtcttccacaatggctaaactcatttacgt

SEQ ID NO: 952363 - DNA, 618 bp, Homo sapiens
ctttcacaggctggcactgagtgtctgtggcttttccaggtgcacagtgcaagctgtcagtgtatctaccattcttgggtctggaggacggtggccctcttctcatagctccactaggcagtgccccagtggrgactctctttgggggcttttaccccacatttcccttctccattgccctagtagagattctccatgaggactccacccctgtagcagacttctgcctagacatccaggcatttccatacatcctctgaaatctatgaaatctaggtggaggttcccaaacctcaattcttgacttctgttcacctgcaggctcaacaccacgtggaacctgctaagtcttggggcttgcactctctgaagccatggcccaaagtgtaccttggccccttttacccatggctggaggggctgggatgcagggcaccgagtcccaaacctgcacacagcaggggggccctgagccaagcccaggaagccattttttttcctcctaggcctacaggctcatgatgggaggggctgccctgaagacctctgacatgatgaagagacattctccccgttgtcttgatgattaacatttggctccccattacttttgcaaat

SEQ ID NO: 952364 - DNA, 751 bp, Homo sapiens
ctggggaaccacactaaggactccttctgtggtccttggaagcttagtgttcatgtctccttccctagcaggacctagtatgtccaggtgatgcttctgcccaaggaaaggatgagtcactctattacatgcaacgtacctaatgagttaggaaggaagaggctaactccaggtcattacctcttttcttttttgggggagaggaggctgtgttttgagattcagagcattcttatcgtggcattcccagtgtctccactgagccgtacagtcctacaagcacccactcctcccacacacaccacagagcccaagtccatttaaaatatagtgacttgggcccacaaacacatttctgctttcgtgcccaggggcagccttctgttgagctcagaaaattgtgtccagctattctgaaaggaaaaaaaaatttatctgtgactgccctggagttgctgccactctctgcttagcaggcggcatcagggccagtccaagatgagtaaactgcacagccccaagcagatggtgcctggtgccggtgggtttgcagaggacctggccccttcccggggtcctgccatttgcattttttctgcatcttttcccctctcctcccctcctacatgctccagtaggtgaagagagatggttactttgggtttttccaytatctgttttgttttaagacagagatttttaagaaaaccaccctgacattaatttcagaaattcttagtgattcaagcag

SEQ ID NO: 952365 - DNA, 591 bp, Homo sapiens
agctgatacccttttctcaacacttatttatgaggaccaccagcaaatcagtttgcttttcacctgtcaggctcarctatgctccttcacactcttgcctcagagctagtcaattctgctgctgtctgccacattacagttcacagaggtctggataatcttgacatctgatgaaacatcacagtagcccactgcattgataacattgtgctgatgagatctgaggagcaggaagtagcaagttcttttgatgccttagtaacatatatgcaaattagaggggggagataaaaccatttggggtaccaattcagtatcagtcaaggctcactcaggagagagaaaccacacaataattagaatgcagggagtttaatataaataattattaactataacagaggaatggagagatcgggcagtaaaaactaaagagaatgctaaagaacacagtggtagcagatacaaggaacagcctgtacttctggggctgacatagaacgctcgagataatagttccttaaagctgggagatcgtgtgtgattgcagggggaccttctttctgaggacctggcctctctttcagtcaa

SEQ ID NO: 952366 - DNA, 577 bp, Homo sapiens
ctgatacccttttctcaacacttatttatgaggaccaccagcaaatcagtttgcttttcacctgtcaggctcagctatgctccttcacactcttgcctcagagctagtcaattctgctgctgtctgccacrttacagttcacagaggtctggataatcttgacatctgatgaaacatcacagtagcccactgcattgataacattgtgctgatgagatctgaggagcaggaagtagcaagttcttttgatgccttagtaacatatatgcaaattagaggggggagataaaaccatttggggtaccaattcagtatcagtcaaggctcactcaggagagagaaaccacacaataattagaatgcagggagtttaatataaataattattaactataacagaggaatggagagatcgggcagtaaaaactaaagagaatgctaaagaacacagtggtagcagatacaaggaacagcctgtacttctggggctgacatagaacgctcgagataatagttccttaaagctgggagatcgtgtgtgattgcagggggaccttctttctgaggacctggcctc

SEQ ID NO: 952367 - DNA, 453 bp, Homo sapiens
attatcagacccgtcctaactctgacttacaacccaggtcactacaattctaactggacagaggaccagccttagaaacattcttttctgataagcaattgcagactttawaccagtttcagcagcgtatagaggctgtgcacaaatgatctttgtgtcataaagaattccaccctattttaagcaaaaccctgctccaaagtaaacataggatatatgttacatgcatgtttactcactgtgcctgtgttcgactcccctcataaatatgtacagcttttcccccaaaccaactaaatatatttaataccaacttgtgagccataaaacccaaactccttcccttctttgaagacagagtacctttgatatacaatggaaactgtcccttcccagcctgcaaactaatatcaccaataaagctcttttctgctatttacctatcctgctcat

SEQ ID NO: 952368 - DNA, 610 bp, Homo sapiens
caggtaaaacacacaactgtgyctctccagggtggcagcaagagagaagggcatttgcgagggattccataaagctattgacttaagatgttagttacattctgagagcagagacaggcacaatggttaaatgactgccattttgaggaaatattgactctgaccagtggattccgtggcttgtttcacaatgcctggacacaatggcctgttacttgcacgtgtgtgtgcacatgcacgcacatacacaagcaatcagttaataattaaagccttgcttatgtgtccgcattgaaaaatgcttccggctttcatttcatgtcatactgtctcccacttcaccctcaaatgcatgctttgaaggaggattatttctattttgtatgctctggaaattaactgatagatgtgtgcatttctatcccccgcttctccatttgtgtccctccttaccttttattcttgtctgctctctgctcctccctcctgattttcaccaacttgtttctttgctttaaatctctccctcatctgaggctgcttgtcttccctgccccactgccccctccacttccctttctccttcttctgtattcctttctgactcctt

SEQ ID NO: 952369 - DNA, 788 bp, Homo sapiens
cagattgggacgtgagaagacactgaacatcactagtcaccagggaaatgcaagtcaaaaccacaatgaaacactccccatagaatgactcaaattaaaaatactgactatgtcacatattggcaagaatgtgtaggaaatggagctctcatacactgcttgtggggatgtagaatggtacaaccactttggaaaacagactggcagtttcttataggtttaaacatccatgtaccatgtgatccagaaattccactctgtatatttactcaagaaaaattaaaatgtgtgttcacacaaagccttgtttgtaaatgttcatatagccactttatttttaaaaatccaaaaagctataaacaaccagattgtctatcaacaggtgaattaataaacaaattgtagtatggctgcacaatataatattactcagcaatgaaaaagagtgcataactgatacagtccacaaggaggaatctcagaaacagaattctgagcctaagaaaccaggccccaaagactagaagcaatatcatataattccatgtacacgaaactagaaaagtccaatctaatccatagtgacagaaagcagaatgtggttgtctgggccagaggtggagagagagattgaatgcaagggggaaggagggagcttcggggagaggggtgcaggaaatgttctgaattctaattktagtgggagatgcataggtgtttacatttatccgagcttgtcaaagtatgctttccgtggttcattatattaaaattataaaagttgactt

SEQ ID NO: 952370 - DNA, 470 bp, Homo sapiens
cgtggctcccagtgatccctgcctcctgatatttgcaaccttgtgcaatcctttcccattgatgcagggtgaacctagtgacttgcttctaatgaacagggtacgacaaaggtgatgtgcatgtgacttccacgatgaggttacaagaaacatgactcttttgtttagcactgtcttggcagctactctttcttgtcctttctcttgctcagtctgttgaaggcagcttccacattgtaaaatgctctatggagagacccatatcacaaagaatcaaggaaggcttctagccaacaattcaactgagaattgaggtctcagtccagcaactctgctaggcactgtggcctgccagcaaccacatgagagagtctgtgaagtgatctttcccagttgagtcttrtgagagacccagaaccaaaggactcagctaaaccatacccagactttcaacccacagaatgtgagat

SEQ ID NO: 952371 - DNA, 575 bp, Homo sapiens
ccattatctatctccctcaagtgtactcaaaccttaacataattctctygttctctgctggtatccaccagttatccttgaccttcttattccctccaacactttgaccaccagctattggtgattcccaaatctcttctccagtctacaactctctctagggttcaagacccatttatctacctgcctaccagacacggtgatccaagtttcccatagctccctgtatgtaatgtgtctataacccaacttactgttttccccttcaactcattcctcccactgcacctcttttcttaatggaaacactaatcctccaaatttaaaaactattctcctcctacctcactcccaccaatgaaactatcactaagtcctcttgattcagcctcctatataattctcacattcatcccttcctctctacattaacagcacagttaaggtcttcaacatctctcctatggaccatcacaaagatgtagttaatctctatacttccagttctcctcttccccaatccattctctaccttgtccagttttttatttttattttctgagacagggtctcac

SEQ ID NO: 952372 - DNA, 799 bp, Homo sapiens
ccccgccgcctggcaccagcacctggggaggggcctccgctcatytgccttcacagagatgccccaggctgggaaagaaagaccagcaggccggacattctgtgccaccactccctcgtccttagctgcagggatcttgcccttcatccagagactgagacctggaagcgaggcccacctctgcacctgcccccatagctgggccttcgttcctcaaactgtaagctgggcatgaaagtaataccaccttttgtggcagaattgttgggagggaccagtgagatattttgtctgaagcaccttgcaaatggtaaagggctatggggtcactgctgttacaattcttctatcaaaaatctaatcttcagggctttcactgtttcattcacacagaatgaaattgaggctcaagaggttacacgatttgaccaagtcacacaactgcaaacaagtaggtgtcagtttccaggatcgaagccaggaggaagctcaaagagcatccagcccccatgctgtaaaagggattcaaggcccagaaccagaaggtgattagccttgcagcaggacagagggcagacagcaccgaagcccagctctgctcactctgctgggagcacttcccaggccactgtggatctgggccttgtcctcagcttggggtggctgcaggagcatcctgaggaatgaacccatgccagagcactgaagatgcccccaccgcccccgctgcagactcctcacccaggtctcttcatctcaaaggggctgtcatagaggcccagggctgtgacctggagga

SEQ ID NO: 952373 - DNA, 799 bp, Homo sapiens
ccccgccgcctggcaccagcacctggggaggggcctccgctcattkgccttcacagagatgccccaggctgggaaagaaagaccagcaggccggacattctgtgccaccactccctcgtccttagctgcagggatcttgcccttcatccagagactgagacctggaagcgaggcccacctctgcacctgcccccatagctgggccttcgttcctcaaactgtaagctgggcatgaaagtaataccaccttttgtggcagaattgttgggagggaccagtgagatattttgtctgaagcaccttgcaaatggtaaagggctatggggtcactgctgttacaattcttctatcaaaaatctaatcttcagggctttcactgtttcattcacacagaatgaaattgaggctcaagaggttacacgatttgaccaagtcacacaactgcaaacaagtaggtgtcagtttccaggatcgaagccaggaggaagctcaaagagcatccagcccccatgctgtaaaagggattcaaggcccagaaccagaaggtgattagccttgcagcaggacagagggcagacagcaccgaagcccagctctgctcactctgctgggagcacttcccaggccactgtggatctgggccttgtcctcagcttggggtggctgcaggagcatcctgaggaatgaacccatgccagagcactgaagatgcccccaccgcccccgctgcagactcctcacccaggtctcttcatctcaaaggggctgtcatagaggcccagggctgtgacctggagga

SEQ ID NO: 952374 - DNA, 902 bp, Homo sapiens
  misc_feature 789: n = A,T,C or G
gggcatgagcagtcctcctgcctcagcctcccaagtaactgggactataggcatgcactaccacacccagctaattttttattttttgtagagacaaagtcttgctctatcacccaggctgatctcaagctcctggcctaaagcggttctcccagcttagcctcccaaaatgctgagatcacaggcatgaactactgttgcctggccttttttcatcttttttttttttttcctgagatggagtttcactcttgttgcccatgctggagtgcaatggcgccatctcggctcactgcagcctctgcctcccgggttcaagcgattctcctgcctcagcctcatgagtagctgggattacaggcatgtgccaccatgcccggctaatttttgtatttttagtagagacagggttttaccatgttggctaggctggtctcgagctcctgacctcaggtgatccacccgcctcagcctcccaaagtgctgggattataggtgtgagccactgtgcctgtccccttttacacattttaacatatgtgatatgataagtcattttatcttatctaaaaagctgtcatttgaggctattattattattattattattattattattattattattatttttgagtctcagtctgtcacccaggctggagtgcagtggtgtgatcttggcttactgcaaccttcgcctcctaggttcaagcgattcttctgcctcagcctcctgaatagctgggattacaggcacgcaccaccacacctggctaatttttgtatttntagtagagatggggtytcaccatgttggtcaggctagtctcaaactcctgacctcgtgatccacccgcctgggtctcccaaagtgctgggattacaggcgtgcagctgcaccc

SEQ ID NO: 952375 - DNA, 902 bp, Homo sapiens
  misc_feature 789: n = A,T,C or G
gggcatgagcagtcctcctgcctcagcctcccaagtaactgggactataggcatgcactaccacacccagctaattttttattttttgtagagacaaagtcttgctctatcacccaggctgatctcaagctcctggcctaaagcggttctcccagcttagcctcccaaaatgctgagatcacaggcatgaactactgttgcctggccttttttcatcttttttttttttttcctgagatggagtttcactcttgttgcccatgctggagtgcaatggcgccatctcggctcactgcagcctctgcctcccgggttcaagcgattctcctgcctcagcctcatgagtagctgggattacaggcatgtgccaccatgcccggctaatttttgtatttttagtagagacagggttttaccatgttggctaggctggtctcgagctcctgacctcaggtgatccacccgcctcagcctcccaaagtgctgggattataggtgtgagccactgtgcctgtccccttttacacattttaacatatgtgatatgataagtcattttatcttatctaaaaagctgtcatttgaggctattattattattattattattattattattattattattatttttgagtctcagtctgtcacccaggctggagtgcagtggtgtgatcttggcttactgcaaccttcgcctcctaggttcaagcgattcttctgcctcagcctcctgaatagctgggattacaggcacgcaccaccacacctggctaatttttgtatttntagtagagatggggtctcaccatgttggtcaggctrgtctcaaactcctgacctcgtgatccacccgcctgggtctcccaaagtgctgggattacaggcgtgcagctgcaccc

SEQ ID NO: 952376 - DNA, 675 bp, Homo sapiens
atataaaaaagttagccagatgtggtgacacgcgcacataatctgagctacttggatggctgaggtgggaggattgcttgagtccaggaggtctaggctgtagtgagctgtgttcaccccactgcactccagcctgagtgacagagtgagaccctgtctcaaaaaaacaaaaaaacgaaagaaaaagaacttcaagacttacagggaccattaagaatttaattcttggccgggcacgttggctcacgcctataatcccagcactttgggaggccgaggtgggcggatcacaaggtcaggagtttgagaccagcctgaccaacatggtgaaaccccgtctctactaaaaatacaaaaaattagccaggcatggtggcacgcttctgtattcccagctactgaggaggctgaggcaggagaatcgtttgaacctgggaggcagaggttgcaatgagccgagatcacgccactgcactccagcctgggtgacagagcgagactccctctcaaaaaaaaaaaaaagaaattcttgtccattaataatttctgagttgggtgcagtgactcacatctataatccgaacaatttgggaggccgaggcaggwggactgcttgagcccaagggttcaaaaccagcctagacaacatagtcagacccccatctctacaaaaaa

SEQ ID NO: 952377 - DNA, 617 bp, Homo sapiens
ggtgtaagtaagaccaatcctgccaagcgcatgagagctgagtggagcttactgctgcckgctaccctcagtttcccatgcagattctgttgtacagcagaggtagctacactcatccctggaacattaacccagtggccagggaattaccctctgatacccattgaagctgttccttgtgcccacacatggggatccaaagagtaaagttgcctgactcaacccccttccagctttgctattccaccctccctagtagcataacacaacagacagggatgtttgggggctccatggccccacccattgcctgagactccagggtatctcccctgggtaacataaggcgagcccaaattctaccacctcagttagtggtcttttgcaaacaccacctactcctagcggaaggccaactggcacagcccattacaacatctgcaggcacaataacacagtgctcaggaaggagaaaacctttgcacagtttcatctatcatcatttcttgcatcaccctggctcaccaggtctttagtttgtctgtgtgccagtatatcactactgcacctggcatttgagaaagttaacacactaaggctatttataggctaaggaa

SEQ ID NO: 952378 - DNA, 664 bp, Homo sapiens
tagatagacggtggaaccagggcagtcacacagggccccacagttgtgttttaacgctctgtggttgctgccttgaaattcttaataacattatctttgaatatggattttgtgagtgaagtccaatgggacaatggagcatgcgtcaggaccttggagcttcagcttcacatggtcctgcctccctctacctgccctggagaggctctcaggagtctgctcccctactccctgtcattctccaccccagttcatttccccctctcctccctacaatgactgccatcctctgctcctggcgggagcatgggggtaacataaagaggatagagttaggtatctgcattctgacatctcaggatagggcatggtggcagcccctgagccctggtttgacagcaccactgcccatacctctgttgagcagcccatcagaggctgcatctaggtgggctgggtgggaggcgggggcagcctctcccctatcccacctagatcctgagcacatttcagccctgaggtttaaagatgcttggggatcacccatctcatgtggattgaggcagcactctcaatttccatagaccctagccccactgagtkgtatgggttcatggctggcaggagcagaacctggtaactgactcagtaccaagcacgcatg

SEQ ID NO: 952379 - DNA, 603 bp, Homo sapiens
ttgtgaggaatttacactttaattttgaaacaaagacagtgacaggccctccccaaaacaaacatcctccttgcttggagactagatcacctttgtaaaactaacaaatwtgccacaaaataagaaataatggctcagggccagatgcagtggttcatgcctgtaatcccagcactttgggaggccatggcgggcatggcgggagaccattgcttgaggtcaggagttcaagactggccaagatggcaaaaccctgtctctactaaaccaccacgcctacaaaaatttgctgggcatggtggcacacatctgtagtcccagctactcaggaggctgaggcacaaggatcgcttgaacctgggaggcaggggttgcagtgacctgagattgcgccattgcaatccagcctgggcgaaagagcgagactccatctcaaaataaataaataaataaataaacaaaataatggctcagaagtcacgcagtcagaggccataaacttcctaacctcctcaattgctcctatggataacattactactgtaaaacctaagactgatgtttgacatatttttcagaccctgcattctaatggatccactg

SEQ ID NO: 952380 - DNA, 664 bp, Homo sapiens
catagctggtattaatgactaccttcttcactacccgttctgtgttccctttatcttcagcaagcacctcagcaggttgtggtattttcctggtggagtgacccaaaccttcattcctgaagggtctgrgtcacttgtagtccttcctggattgtgctgttgtagtttccggtagaccttaatcacagggcatggtagtatcacatggtaatactaagagacaccccaggctgggcgtggtggctcacgcctgtaatgacaccctaggccgaggcaggtggatcacgaggtcaggagatcgaggccatcctggctaacatggtgaaaccccgtctctactaaaaatacaagaaaattagccaggcgtggtggcggatgcctgtagtcccagctatgtgggaggctgaggcaggagaatggcgtgaacccgggaggcggagcttgcagtgagccgagatagcatcactgtgctccagcctgggtgacggggcgagactccgtctcaagaagaaaaaaaaagagacaccctaatggatctcctctattccatgcatactcttccttacctccgctgtggagtagtagactgatttcatcttgatagtgcgggtcagtcaccccagcccacactgtaactcccttcttagcctgttgatttaaaggt

SEQ ID NO: 952381 - DNA, 645 bp, Homo sapiens
aaaactttaaaaaaatacttaatgatagggctctttcttgctttatggaaccgatatgtgctttcagagttagctcrgtagggcaatttcattttctcttgatgttggatgataaagctggaaattcattcatttaaaaaactttgattccacaatagaatgatttagaaaattaccaagagagatgaggctattgaacaatttatttttcttttgtacttgggaaaattattcccaaactttcctgtctacccaacccattcaggaccataagaccatttccctatgtctgtggcttctatatttctacacctgtacttaccttgaattttgttctttttctggatgtttctaataacttagggagagctagcctgttgtttcaatacttcatcaagacaggtgtcacttctaactctcaaatttcaaatgccgtaataaaccccaaattgggtcttctaaattgatctagaatgagacagacatacctatgttttatgatgacaaaccagaaacttattttacaagtcagataaaatggtagaataatttgaatttatttttaaaatatactgtagcaaaagttcataagttctgtgtcccagcctggacactgaccattgaaaaatagatgcctttctgtgc

SEQ ID NO: 952382 - DNA, 579 bp, Homo sapiens
ctctcaaagtgctgggattacaggcacgagccactgcacttggccgccaaactcttgtattagttttcatggcttgtctggacattctgttaagtattttatattacaaaaagatcatgtatctgcaaataaagatggtataatctcttcccttctaattcgtatacatattatttctttttcttttcttatttagctagtgactacagaacatttttggtgaacattgtaaccgcccaagggcttcaccttgccctctgcctagacagagcaattcatcaagacaggggaattgcaatagagaaagagtattcaagacaggggaatcgcaatacagaaagagtaattcatgcagagctggctgtgtgggagaccagagttttattattactcaaatcagtctccccaaacatttggggagcagagtttttaaggataacttggtgggtcggaggaagccagtgaaccaggagtactgattggtcagagaaatcataggaagtcggagctgtcttcttgkgcttagttgtttcctgggtgggggccacaagatcagatgagccagtttattgatctggc

SEQ ID NO: 952383 - DNA, 646 bp, Homo sapiens
tacggtaaattggtactggtagagtggggtgctgctgtaaagatacccaaaaatgtggaagtaactttggaactgagtaataggcagaagttggaacagttttgagggctcagaagaagagagaaaaatgtgggaaagtttggaacttcctagagacttgttgaatggctttgaccaaaatgccgatagtgatgtggacaataaaatccaggctgaggtggtctcagatgaagatgaggaacttgttgggaactggagtaaaggtcactcttgctatgcaaggagactggtggcactttgcccctgccctaaagatttatggaactttgaacttaagagagatgatttagggtatctggtgaaagaaatttctaagtggcaaagcattcaagaggtgacagatcataaaagtttagaaaatctgcagcctgacaatgcagtagaaaagaaaaacccatattgggggagaaattgaaggtggcagcagaaatttgcataagtaaccaggagccaaatgctaatcaccaagacaayggggaaaatttcttcagggcatgccagacacctttgcagcagtccctcccctcacaggcctggagccctaggaaggaaaaatggtttcctgggccaggcccaggaccccctt

SEQ ID NO: 952384 - DNA, 728 bp, Homo sapiens
cttctttataaattactcagtcttgggtatgtctttattagcagtgtgagaacaaactaatacggtaaattggtactggtagagtggggtgctgctgtaaagatacccaaaaatgtggaagtaactttggaactgagtaataggcagaagttggaacagttttgagggctcagaagaagagagaaaaatgtgggaaagtttggaacttcctagagacttgttgaatggctttgaccaaaatgccgatagtgatgtggacaataaaatccaggctgaggtggtctcagatgaagatgaggaacttgttgggaactggagtaaaggtcactcttgctatgcaaggagactggtggcactttgcccctgccctaaagatttatggaactttgaacttaagagagatgatttagggtatctggtgaaagaaatttctaagtggcaaagcattcaagaggtgacagatcataaaagtttagaaaatctgcagcctgacaatgcagtagaaaagaaaaacccatattgggggagaaattgaaggtggcagcagaaatttgcataagtaaccaggagccaaatgctaatcaccaagacaacggggaaaatttcttcagggcatgccagacacctttgcagcagtccctcccctcacaggcctggagccctaggaaggaaaaatggtttcctgggccaggcccaggrcccccttttctatgcagcctctgaacctg

SEQ ID NO: 952385 - DNA, 728 bp, Homo sapiens
cttctttataaattactcagtcttgggtatgtctttattagcagtgtgagaacaaactaatacggtaaattggtactggtagagtggggtgctgctgtaaagatacccaaaaatgtggaagtaactttggaactgagtaataggcagaagttggaacagttttgagggctcagaagaagagagaaaaatgtgggaaagtttggaacttcctagagacttgttgaatggctttgaccaaaatgccgatagtgatgtggacaataaaatccaggctgaggtggtctcagatgaagatgaggaacttgttgggaactggagtaaaggtcactcttgctatgcaaggagactggtggcactttgcccctgccctaaagatttatggaactttgaacttaagagagatgatttagggtatctggtgaaagaaatttctaagtggcaaagcattcaagaggtgacagatcataaaagtttagaaaatctgcagcctgacaatgcagtagaaaagaaaaacccatattgggggagaaattgaaggtggcagcagaaatttgcataagtaaccaggagccaaatgctaatcaccaagacaacggggaaaatttcttcagggcatgccagacacctttgcagcagtccctcccctcacaggcctggagccctaggaaggaaaaatggtttcctgggccaggcccaggamccccttttctatgcagcctctgaacctg

SEQ ID NO: 952386 - DNA, 770 bp, Homo sapiens
aaagtggccaacctacagctcaggccattgcttcagagggtgcaagcccccagccttggtggcttacacatggtgttgggcctstgggtgcacagaagtcaagaactgaggtttgggaacctccacttagatttcagaggctgtatggaaatacctgggtgtcctggcagacatttgctccaggggtggggccctcatagagaacctctgctagggcagtgtggaagggaaatatgggataggagccctcacacagagtacctactcgggcacttcctaatggagctatgagaagagggccaccatcctccagaccccagaatggtagatccactgacagcttgcaccatgcaccttgaaaagccacagatactcaacaccagcccatgaaagcagccaggaagggtgctctaccctgcaaagccacagaggcagagctgcccaaggctgcaggagcccacctcttacatcagcatgacctgaatgtgagacatggagtcaaaggagatcattttggaactttaaagtttaatgactgcactatagatttcggactttcatggggcctgtatcctctttgttttggccaatttctcccatttggaatgggtgtatttacccaatgcctgtacccccttgtatctaggaagtaactaccttgcttttgatttgccttgtctcaggtgagactttggactgtggacttttgagttaatgcagaaatgagttaagactttgggggtctattgggaaggcatgattggttttga

SEQ ID NO: 952387 - DNA, 618 bp, Homo sapiens
cagtgggaggatagcttgaggccaggaatttgagacaagcctggacgacatagccagaatccatatctacaaaaaaattcctctcatgaactgtgtatttgtatacatcaatcaacctctctttatcccctcaccacctttacactgaagtatatcattctactctctacatccatgagaccaagtttttagcttccacatatgagtgagaacatgaggtatttgtctgatggtgcctggtttatttcacttagcataatgacctccagttccatccatattgcagcaaatgacatgatttaattctttgttatgaccaaacagtattcaaataggtatatataccacattttttttatccattcatctattgatggacacttagcttaattccatatcttgaatattatgaatagtgctgcaataaaaatgggagtgtaggtatccctttgacatatactaatttatttgcctttgaataaatacatagtagagggattgctggattatatggtagttttatttttggtgtkttgtaaatctccatactgtttaccatagtggctgtactaatttacatttccgctgacggtgtataagagttcccttttctccata

SEQ ID NO: 952388 - DNA, 618 bp, Homo sapiens
cagtgggaggatagcttgaggccaggaatttgagacaagcctggacgacatagccagaatccatatctacaaaaaaattcctctcatgaactgtgtatttgtatacatcaatcaacctctctttatcccctcaccacctttacactgaagtatatcattctactctctacatccatgagaccaagtttttagcttccacatatgagtgagaacatgaggtatttgtctgatggtgcctggtttatttcacttagcataatgacctccagttccatccatattgcagcaaatgacatgatttaattctttgttatgaccaaacagtattcaaataggtatatataccacattttttttatccattcatctattgatggacacttagcttaattccatatcttgaatattatgaatagtgctgcaataaaaatgggagtgtaggtatccctttgacatatactaatttatttgcctttgaataaatacatagtagagggattgctggattatatggtagttttatttttggtgttttgtaaatctccatactgtttacyatagtggctgtactaatttacatttccgctgacggtgtataagagttcccttttctccata

SEQ ID NO: 952389 - DNA, 622 bp, Homo sapiens
ttatcttgtagaaaatggaaaggcagggaaggtttttgagcaggaaataagcatagctcaataatatcatccagaragcttgcaagtatacaaacattcgctcttgtgttatgagccatgccgctgtgaaaaaaaaaaatccctttcattatactaatacttagtaaatcactgaagacctacttcagaactccaaggaaaacattttatgaatcaaaagctaaggacaatatgttagcaattaaatgagataacataacagccgaggcagaaccacagttttccccaccacaacttcaagctgctgcagaaagaaatgcttatatcaccttccaagttatcaagccattttgttttgatttttggaaggcagggagaaaggaaatgagaagcgtacggaggtcgagaggattcagagctgtctactctttaatcagaaggaattactgaggagagttagaaaggcgatgtgctcaatacaaaaccgggactgggatgagtatcaagttactgcaactcgcttccgcccagaacaacaaacgaaggtgtgtagttgggaatgagactctcaccagtgctctctgctgaagtttccggtgcatacctcccacggctactttat

SEQ ID NO: 952390 - DNA, 587 bp, Homo sapiens
actacacagaagaattctcagtaacttccttgtgttgtgtgtattcaastcacagagttgaaccatcctttacacagagcagatctgaaacactctttttgtgtaatttgcaattggagatttcagccgctttgagctcaatggtagaaaaggatatatcttcttatgaaaactagacagaatgattctcagaaactcctttgtgatgtgtgcattcaactcacagagtttaacctttcttttcatagagcagttaggaaacactctgtttgtgaagtctgcaagtgtatattcgcacctctttaaagccttcgttggaaacgggatttcttcatattatgctagagagaagatttctcagtaacttctttgtgttgtgtgtatgcaactcacagagttcaaccttcctttagacagagcagatttgagacactctttttgtggaatttgctagtggagatttcaagcgcttcgatgccaatggtagaaaagggaatatcttcgtataaaaacaagaccaaatcattcccagaaactgcgtagtgatgtgtgtgtttaactcactgagtttaacctttcttttcata

SEQ ID NO: 952391 - DNA, 658 bp, Homo sapiens
gagttggggggcactctggggacaaagcacaggacgtagagcttggaggccaagtgcctgccatgcctttacctggctgtggtcttggccaagtcctmagtgggtattgggtacttgtactgtgaaggtacagaagagtacctttagtatgttaccatttctgtagagagaggaaacgtgtgtgtgtgtgtacatattatgataatatacataaaatatgtttgcaagtgttcataaaaactcaggagagagcaacagggtggctgggagatacttcccttctgtaccttctgagtctgggactatttgaatgtattatcctttcaaaaagtgaacaaaagattaattttccccttcctagctgtgcccccacccccagcaagaaaaatgggcttagagaattggatagatctgggtgtttaaatcccagctctgcctaagtgatcttaggcaagcacttaacctcaaatactccatgttttttcatctacacaatagaggtcatcatagtaactgtctcccatggtggttgtgaggattaaatgggattgctagcatggtatctggtgaagcactccataaaagttcaaacagtggtaataataacagtaataacaacagcaatattatctgatctctctgggcctctgttagccag

SEQ ID NO: 952392 - DNA, 612 bp, Homo sapiens
gtatgtctcttttttttttttttaggaatgttcagatcctttgcccacttttaaattagtttatttgtttacctgtttctttagygttgtgaattcctcatgtaatttgaatattatccctttattggctatagagtttgcaaatattttctcccattccttaggttgcctcttcactgttgtttcttttgctgtgtgaaatttttaaattttaaatcaacccacttatctacttatgcttttgagatgatatccaaaaaatacttctgaagaccaatatgataaagcatttcccctgcattttattctagcaatctcatacttttggctcttacatttaagtctttaatccattttagttgatttttatatatagtgagattaaagggtctaatgtcattcttctgcatgtaactatttagttttcccaacaccatttattgaagagactgtcttccccattgtgtgttcttagcactttttccagaattcagttgcctgaaagtgtgtggatttatttctggtctctcttttctgttccattggtctgctgtctgtttttatgtcagttccatgctgttttgattactattgctttgtagtatattttga

SEQ ID NO: 952393 - DNA, 551 bp, Homo sapiens
tcttaggttacaaaatcaatgtacacaaatcaatagcactgctatataccaacaacaaccaagctgagaatcaaatcaagaactcaatcccttttacagcagctacaaaaccaaaaccaaaaaaacctaggaatatacctaaccgaggaagtgaaagatctctacaagaagaactacaaaatactgctgaatgagatcatagatgacacaaaccattggaaacacatcccatgctcacagatttgaagaactaatatagtgaaaacgaccatgctgtccaaagcaatctacagattcaatgcaattcccataaaataccaacaccagttttcagaaaattagaaaaaaaatcctaaaattcataaggaactagaaaagagcctgaatagccaaagaaattataagcaaaagaaacaaatctggagacatcacgttaccagactttaaattatactacaaggctgtagttttcaaaacagcgtggtactgatataaaactaggcatatagaccartggaacagagtagagaacccagaaataaagctaagtc

SEQ ID NO: 952394 - DNA, 619 bp, Homo sapiens
caccgtagatgtatgaatttatctctgggttttctatttttgttccactgattgttgtgtctgttctgatgccagtaccatgcctttttggttaccataactctgcagtgcaatttaaagtcaggtaatgttattcccccagttttgttctttttttttgcttgggatagctttggctatcctgggtctttagtgcttccatataaattttaggatttttaaaatttttgtctagtcgttggtattttgatagggtttgcattaaatctgtaaattactttggatagtatggactttctaacaattttgattctttaaatccatgaatatgaaatatctcttatatttttgtgtcctcttccatttcttgcatcaatgttctatagttttcattgtagaggtctttcacttcttttgttaatccttatatattttatcttagttgtaactattgtaaataagattactttcttgatttcttcttcaggttttttgttttggcatatagaaatgctactgatttttgcatgttgattttatagccttcaactgtaytgaatttgtttatcagttccaatagtttgttggtggaggctttaggtttctccaaatatataat

SEQ ID NO: 952395 - DNA, 437 bp, Homo sapiens
cacatgtatacatatgtaactaasctgcacattgtgcacatgtaccctaaaacttaaagtataataataataataataaagaaatatttacattttttccatttgacataaatacagtaagagacaatgatctttaaaaaaaagaaagaaagaaaaatcagaccgaaagcgtatagagactgttggaattattaagacaataatagtctttacatttctctatgtaagtattcattaactttataatcagaagcactatttatgctattcacattaggagaaaaaagcaaatgaaaaataatatgatttctaaaaataaagctggaagattagaaaaaattcatcagttgtctctatttcataaatgaaactccaggcccaactatgcagagatacaaaaatatcttaaataatagcttcaagcatctatggtgtgt

SEQ ID NO: 952396 - DNA, 478 bp, Homo sapiens
caagttagttactctctaaatgcaatgggtatacaggcattgggtaaatacagccattccaaatgggakaaattggccaaaacaaagggaccacaggctccatgcaagtctgaaatccaatagagcagccattaaaccttaaaatcccaaaatgatctcctttgacttcatatttcacatccaggtcacaataatgcaagaggtgggctcccacagccttgggaagcttcacccctgtggctttgcagggtatagcctctctcctggctactatcactggctggcattgagtgtctgtggcttttccaggtgcatggtgcaagttgtcagtggatctaccagtctggggtctggagaacagtggctgtcttctcatagctccactaggtggtgtgccagtaggaactctgtgtgggggctctgatcccacatttcccttccacactatcctagcagaggttctccatgagggccctgc

SEQ ID NO: 952397 - DNA, 621 bp, Homo sapiens
cagccttgggaagcttcacccctgtggctttgcagggtatagcctctctcctggctactatcactggctggcattgagtgtctgtggcttttccaggtgcatggtgcaagttgtcagtggatctaccagtctggggtctggagaacagtggctgtcttctcatagctccactaggtggtgtgccagtaggaactctgtgtgggggctctgatcccacatttcccttccacactatcctagcagaggttctccatgagggccctgcccctttagcaaacttctgcctgggctccaggtgttcccatatgtcctctgaaatctaggcggaggtttccaaaggtcacttcctaacttctgggcacccgcaggctcaacatcacgtggaagctgccacggcttggggcttgcaccctcttaagccatgctctgagctctatgttgactcttttcagccatggctgaagcagctgggacacagggcaccaagtccctaggctgcacacagcatggggaccctaggcctggcccatgacascatcttttcctcctaggcctccaggcctgtgatgggagggtctgctgtgaagtcctctgacatgccctggagacattttccccatt

SEQ ID NO: 952398 - DNA, 623 bp, Homo sapiens
attctggccgggtgtggtggttcatgcctataatcccagcattttgggaggccagtgcgagcagatcacctgaggtcagcagttcgggaccagcctggctaacatgctcaaacctcctctctactgaaaatacaaaaacttagctgggagtgtgggtgaatgcctatagtcccagctacttgggagactgaggcatgagaatcacttgaacccgggaggcggaggttgcagcgagccgagatcatgccactgcacttcagcctagatgacacagtgagactctatctcaaaaaaaaaaaattaaaaatattaatgaaaatatatacatctattatcattttaaaatataaacttttttcctaataatttgactcgttaatcaaaaggttttttttttttttttttttttttaagagatagggtctctgtcacctaagcgagagtgcagtggtacaaccttggttcactgcagtctcaaactcctgggatcaagcaatcctcgcacgtcagcctcttgagtagctggaactacmggcctgagcactacactcagtttttttttttttttttttttttggtggggggagtagagagggaggtctcactctgccccctaggctagt

SEQ ID NO: 952399 - DNA, 762 bp, Homo sapiens
aatgcagtagaagggggtcataagaaggggattcaggcgacatgggagaaagtttcyttctgagaaagaataggcaagaatgtgattagatgatggagaaaagagagaactaaatgtaaaatataggggatagaggacacctgatgaaatgatcttcctagaaactgtctcctgtgtggcctagatgatgagctagtttgctctgcaatggattttaacatggtgcatgattccaggtacagatgcgtttttccatggatgcctgtgaaagtgaggaatttgctatccgttggcatcagctttaacagagaaaatagtgagcatgtctcactgcacactgggaaactcctagggtgtcttactcctagccacgaaccagccaaccactttttctctagccagggcttctgttgccagtatcactgtgacccaaagaacctttcatttttgtgttacatttttatatatgtagattctttcgtagggtcgtgagatctacccactagtttatttttaaagatatattgaaaagtaggtaaacgagcccttcctatttttacctctctcctaatatgtaggactcttattaatcaaggcagacgttgagtgttcattgattgaaaactccatatttggaggagaataaaacgaaagaataataaatatttatgaagggcttttctggtgttagaaactgttgagtcattttgcaacaagtatttcatctttcattgagaaagcactgtgaagtaactatacatt

SEQ ID NO: 952400 - DNA, 638 bp, Homo sapiens
gttgaacataattattttgttatatactcatgctattgcaggtatcaatatctcatttgattttataactgagtagaatcatattgcatgcatatacacaatttatttatatctttacttgttgagggacattcggactgtgtcagtcttggttcagtagaaataaagcttctatgaacacttgtatattaatatagatatctttgtatgcaaatatatttttttctcttagttaaataactaggaatggactggttgaatcacgatggtatggtaggtacatttacattttagaaaattctgtcaacttcttttccaaagtgtctgtatcattttatatttctaccacaatgcgttaatctcccagctcttccacgtccttgccagtggttatatatttgtttttaaactttagctattctaacaggtatgtagtagttactcattgagcttttaatttgaatttgtctactgacatgcttttgagcatcttttcttgtgcttttaaattttatttttaaatgacaaataataatyatgaatatttattgggtacaatgtgggttttgttttgttctgttttgtttttgagacaggacctcagtgtcacagaggctggcatgcaattgtgagcatca

SEQ ID NO: 952401 - DNA, 523 bp, Homo sapiens
taactcttaaagtaaataaacctctgctggcaagactatgctgaacctccttaggcactctctaattagatgtcctggtcctcccaattcttagayctttaatacctgtttttctccttcttttattccatttagtttttcaattcatacaaaaatatatccaggccaccactaataattctacatgacaaatgtttcttctaaaaactccacaatatcaccccttaccacaaaatcttccttcagcttaatccttcccactctaggttcccacgccacccctaatcctgctcgaagcagccctgagaaacatcacccattatctctccataccacccccaaaaattttcgccgtcccaacactttaccactatttcattttatttttcttattaatataagaagacaggaatgtcaggcctctgagtccaagctaagccatcatatcccctgtgacctgcacgtacacatccagatggccagttcctgccttaactgatgacattccaccacaaaagaagtg

SEQ ID NO: 952402 - DNA, 670 bp, Homo sapiens
ttattcattcctgattttttaaaatttttatttcaaatgtaaggggtacatgtgcaggtttattatctaggtatattgtgtgatgctgaggtttggggtacaaataatcccatcaccagggtactgagcatagtacccaataggtagtttccaatctttgtacttccctttctactctagtaatccccagtttctattattgccatctttatgtccatgagtatccaatattagctcccacttacaagtgaaaatattcagaattttggttttattttcctgcgttaattcacttaaagtgatggcctctaggtgcatccatgttgctgcaaaggatattatttcatacatttttatggctgtatagtattccatgatgtatatgtaccacattttctttattccatacaccattgatgagcacctaggttggattccaatattcacaatattgctattgtaaatactgctgcaataaacatatgagtgcatttgtctttttggtagaacaatttattttcttttgaacatatacccagtaytgagatagctaggttaaatggtagttctgttttaaggtctttgagaaacctccatagtgctttccacagtgactgaactaatttacattcccaccaacagcacataagcattcccttttctctgtagc

SEQ ID NO: 952403 - DNA, 540 bp, Homo sapiens
gaggctgagtcactttccaaggacatccagtgtgtgagtggcatggctgaaccctacttaatataaagcctgaaartggctccgagtaggaaagatcaggttcctcaaaagactattctgggggtctcgcagcgtgggaaggatgctatgcctatttctgtagagccccaccggatctggggcgctcttcactgtggcttttttttttttttttttttgagacagagtttcgctcttgttgcccaggctggagtgcaatggtgcaatcttggctcaccgaaacctccgcctcccaggttcaagcaattcttctgcctcagcctctggaatagctgggattacaggcatgtgcaccaagcccggctaatttttttgtatttttagtagagacgaggtttctccatgttggtcaggctggtcttgaactcccaatctcgggtgatctgcctgcctcggcctcccaaagtgctgggattacagatgtgagccacgcgcccggcttcattccggctttgctgagctaagagggccaacgcttag

SEQ ID NO: 952404 - DNA, 540 bp, Homo sapiens
gaggctgagtcactttccaaggacatccagtgtgtgagtggcatggctgaaccctacttaatataaagcctgaaagtggctccgagwaggaaagatcaggttcctcaaaagactattctgggggtctcgcagcgtgggaaggatgctatgcctatttctgtagagccccaccggatctggggcgctcttcactgtggcttttttttttttttttttttgagacagagtttcgctcttgttgcccaggctggagtgcaatggtgcaatcttggctcaccgaaacctccgcctcccaggttcaagcaattcttctgcctcagcctctggaatagctgggattacaggcatgtgcaccaagcccggctaatttttttgtatttttagtagagacgaggtttctccatgttggtcaggctggtcttgaactcccaatctcgggtgatctgcctgcctcggcctcccaaagtgctgggattacagatgtgagccacgcgcccggcttcattccggctttgctgagctaagagggccaacgcttag

SEQ ID NO: 952405 - DNA, 418 bp, Homo sapiens
ggaaatacatgctaatttcaagctccattagaaatggagttgtggcatacttccacatggagaaamataagtttgatagttataaaaaaaaaactaaagaaaataatgaacatttaaggctctaacagagaaagggcaatgttgacattttatttttgaagtgtggttctttgcacacttggaactttcaataatggataattcagtatagtgctctcacaagtgagcaaacagcatgagacaaggcaagtcacgctggactaattccccacactgttcagtccattcaatccaggcccacaacatgtgggggacagggcagatcaccaagcaatacatgtaatatcttcaaggtctggaagcaggcatactggtacccaggcaagtttcagaaagtgctgctctatgagactcttcc

SEQ ID NO: 952406 - DNA, 418 bp, Homo sapiens
ggaaatacatgctaatttcaagctccattagaaatggagttgtggcatacttccacatggagaaaaataagtttgatagttataaaaaaaaaactaaagaaaataatgaacatttaaggctctaacagagaaagggcaatgttgacattttatttttgaagtgtggttctttgcacacttggaactttcaataatggataattcagtatagtgctctcacaagtgagcaaacagcatgagacaaggcaagtcacgctggactaattccccacactgttcagtccattcaatccaggcccacaacatgtgggggacagggcagatcaccaagcaatacatgtaatatcttcaaggtctggaagcaggmatactggtacccaggcaagtttcagaaagtgctgctctatgagactcttcc

SEQ ID NO: 952407 - DNA, 620 bp, Homo sapiens
tttcctttgctttgagcttggaacctttcccttccacgtgagcttttgcacacacagacacacacatcctacttcctccaaratgttgttctgtcagtaaccctccttgaatgatggacagtagatctaaagggagaatgttgcaggcagaggaagagcaacagccagctcttatccagggtctaagggggcccccgcccaatgccttcctgtcatccaggatacaaagtccaagccctgagcctggaactcaataccttaatccgatttactgtttctatctcatctacttctgtctttcctacgcacctcacgaatcaaccaacatgtattgagggctttactatataccaggcatggaccagccctaggggaacagtagttaataagacagacacagtcacacagtccctgtcctcagagagtctacagcccatcagggatggagaagagagagatggggtagagatcacaggaaggctgcccttctctgaaccagtaagcattcggaggaggagcctagggccacctatcctcctggtttctgtgcctctacccatctattgtatccagcctccaacaatcttcacctcctggtatccacatctggtgtagttcct

SEQ ID NO: 952408 - DNA, 540 bp, Homo sapiens
  misc_feature 504, 505, 506, 507, 508, 509, 510, 511, 512, 513, 514, 515,516, 517, 518, 519, 520, 521, 522, 523, 524, 525, 526, 527,528, 529, 530, 531, 532, 533, 534, 535, 536, 537, 538, 539,540: n = A,T,C or G
ttggaggctttgttagtttctttttactcttttttctctacactcttctcacttcatttcattcatttgatcttcaatcactgataccctttcttccagttgatcgaatcagctactgaagcttgtgcatgcgtcacgtagttctcatgccatggttttcagttccatcaggtcatttaaggacttctctatactagttattctagttaaccatttgtcttatcttttttcaaggttttaatcttctttgcgatgggtttgaacttcctcctttagctcagagaagtttgatcatctgaagcctagttctctcaacttgtcaaagtcattctccatccagctttgttccgttgctggtgaggagatgcgttcctttggaggtggagaggcactctgattttaagaattttcagcttttctgctctgttttttccccatctttgtggttttctgtacctttggtctttgatgatrgtgacgtacaggtggggttttggtgtggannnnnnnnnnnnnnnnnnnnnnnnnnnnnnnnnnnnn

SEQ ID NO: 952409 - DNA, 577 bp, Homo sapiens
atatgaattattaggagctaatattactgttttctaatgaataagatcaatatcagttattaatatcagrcgtcattaatcattaatattaatcatgtattgttatcattagtataactatttaatattaattatcattattatcggtattgatttgaaaaattatattatcagttattaatattgataattattagtgtcaattaataactgagattattaattgcggtaagtcgcattgcgccattccaccccacttcagcagctcgtttacgacccaaaacggggtcacaaatgcccctgagagagcagcggtagactgggatagatgaggatagtcacgtggtggagaggcgtgtttttgggtaccagcccttcacctgcgtcgaccttctcaactggaaaaacaatacaccgccctataccgaaaagccacaagccctaattgatttgctccaaactgttatacagacccacaaccccacctgggctgattggcaccagttgctcatgttcctctttaacagcgaagaaaggcggagagtcctccaagcagcaactgagtggctagaggaac

SEQ ID NO: 952410 - DNA, 658 bp, Homo sapiens
aatatttatacatatatataacattgcatacatatttatataatttaacattgtgtataaaaatatatttccctttggttctgtctctctctggggaacccagactaagacatatgtgtaatttaataatatacagtgtctattcttttaataattcaccattatgaggtgttacaatttcaatcacattcattcatggacatgtgttctcagcaaaaaataaacatttatataaacataactttcagatactagctgaagattcatagtgaacacagcgtgctaacttatcctattctaaattccttctaaaattatttaaatgatagaaaaattagagatatcatgcctcaggatccaggattaataggaagtacaatttacctaaaaataacacagaggaatttcagttggatattttctagatagagttcaaatgaaaattttgaaataacaacaacaacaaacaaagtaaaagcagaaagacaagagaggaatatttggatgcaacaaatggacctgattgctagaggcaagagctagaaagargggtaatgacagaacccttgccttggaatccctttctccagtaagaataagaatattagaaagtaattcatagagaattccagaagcatctccaagtagaaaacacagt

SEQ ID NO: 952411 - DNA, 594 bp, Homo sapiens
gtcgcagtcgtactggctgtgcrtgagatcacccacctaggccaagagttgttaggccagtgcttctacgtctggcatctgtcagcccttgccaaaacagtggtgcggcagcgtgtcacctgccagcagcacaatgctaggcaaggtccaactgtaacacctggcatgcaaacttatggggcagccccctttgaagatctccaagtagacttcaccgagatgcccaaatgtggaggtaacaagtatttgctagttttagtgagtacatactctgggtggatggaggcctatctaacacgaactgagaaagctcgtgaaataaccgatgtgcttctccgagatctcatccctaggtttggactgcccttatgaattggctcagacaacaggccggcatttgtggctgacttggtacagaagacagcaaaggtattggggatcacatggaaactatatactgcttactgaccacagagttccagaaaagtggagcagatgtatcggactacgaaaaatagtttagggaaagtgtgtcaagaaataggattaaagtgggtataaactctccctatggtattgttcaagattagatgt

SEQ ID NO: 952412 - DNA, 606 bp, Homo sapiens
tccatatgaagcacccattggcctagagaatgaactgcacaacccaatacaaaatctgctggcacaagtgcacagcactgagaaataagcttccagacacctctgccatactggcctacacraggcagtgagcccactcacacatctagtatattgctactacaaccagcatctgagaaatacactcactatacaaatgccacatataacaaaggaacctatagagagtctttgccactgaaagcacccagaaccaaagctaaaggaccctacacaacatgcattttagtcacatccttggggtcacggaggggagaaatactatccaaaagaaaataaattcaaaaataaggagagatggcttatttaaatgagaagaaaccagagaaacaattctgacagtatgaaaaacagattgtcacaacaccgtcttaagatcacactaactttcctgcaatgaatcctaaccaaaattaaattttggaaataccagataaagaattcaaaatattaactttaaagaagctcaatgatattaaagagaaagttgaaaaacaacacatataaattagaaaaaaaaacacaatttgggatataaaagaagag

SEQ ID NO: 952413 - DNA, 588 bp, Homo sapiens; identical to SEQ ID NO: 948146

SEQ ID NO: 952414 - DNA, 614 bp, Homo sapiens
cattttggactgattgttatgaaagttattgtttatttcctgaattgtcactagacatagcaatctggctttctgcaagcctgctttataccaggtcagcaccctgggttgtttattgtatataaggggttgctttcctgggcaggttgctgcaagttctggattaaagttctatttttatgttgccaggcaatttccatttgcatattaaatctattaatttattaatatacagtaaaattcactctttttggtggacaatatttttgagttttgataaattcatagaatcctgtatttatggccacaatcaagatatggaacagtttccaccacccacgagaagctcctgcatgctgttcttttggggtcaacatctcccccgactcccaacccctgccaactactgatcttttctccttcctatcattttgccttttctctcagaaaaggtttcgttccatgcacttgcctgcatgccactgttgctagctagattgttagcccaataktgtgaagtgggggagttctgtggttctgatgaaggctcagtctcaggtggcacctgttcctgggtctctgatgctgctttctcagtggtcctggtgcatccc

SEQ ID NO: 952415 - DNA, 614 bp, Homo sapiens
cattttggactgattgttatgaaagttattgtttatttcctgaattgtcactagacatagcaatctggctttctgcaagcctgctttataccaggtcagcaccctgggttgtttattgtatataaggggttgctttcctgggcaggttgctgcaagttctggattaaagttctatttttatgttgccaggcaatttccatttgcatattaaatctattaatttattaatatacagtaaaattcactctttttggtggacaatatttttgagttttgataaattcatagaatcctgtatttatggccacaatcaagatatggaacagtttccaccacccacgagaagctcctgcatgctgttcttttggggtcaacatctcccccgactcccaacccctgccaactactgatcttttctccttcctatcattttgccttttctctcagaaaaggtttcgttccatgcacttgcctgcatgccactgttgctagctagattgttagcccaatagtgtgaagtgggggagttctgtggttctgatgaaggctcagtctcaggtgrcacctgttcctgggtctctgatgctgctttctcagtggtcctggtgcatccc

SEQ ID NO: 952416 - DNA, 602 bp, Homo sapiens
gatatgcattttttgaatttggagaacagagacacttctgtttcaatctgctgggagaagcctacacacaaaaggtgggttagctgggcattaggtgggagagagaaggtatgaaaatttaagtggcttatgagaaagctgctttattcccatcaatggagaagccaatatgcatgtgtcctagaggttggccccagagctcacctgaaattgtcttcacagggatgtcatctaagatgccagtccacaggggccaagaaacccctgcagaagggaagtttaggggaagcccatgggctgagaaggggagtgtcctaaaaacctgttagtgtttagagtgcttcaccaggcattcctcagcagaagaatctctccaaaaaccatgtgagctccctgggagatttacaaaaagaaaaagatgaagaaaaaaacaataatcatattgattacaattgtatcagcatcatgagattaggctcatacttctctctgcctttgggttctgaagtagcctccagcaagtagggaaggaagagcaagaartattaacaaaaccaacctggtgcttttgcctcactgcaggatttttgtccctaaaatga

SEQ ID NO: 952417 - DNA, 741 bp, Homo sapiens
gctgggggttgggaggaggctgaacaggggaaacacggaattgttttagggcagtggaattattctgtatgatayggcagtggtggatacatggtactatgcgtttgacaaaatccacagaaccttacagcacaaataattaaaacttaattatgctattttttttttagacggagtctcattctgtcacccaggctggactgcagtggtgtgatcttggctcacagcaacctccacctccagggttcaagtgattttcctgcctcagcctcctgagtagctgggataacaggtgcccgccacagtgcctggctaatttctgtgtttttagtagagatggggtttcaccatgttggccaggctggtcttgaacgcctgaccgcaagtgatctgcccacctcagcctcccaaagtgctgggattacaggcgtgagccactgtgcctggctgaattatgctaattttaaaagtcatttaggaagtcagggtcccaggatggaacgcagaaggtgacacatgaatccaaacgtatcataaatgtacgaaatgacctctgtgaagggagtgtggggaaaagtgctgatcagccaggtgtggtggctcatgcctgtgatcccagcactttgggaggttgaggccggaggatcgcttgagcccaggagttcaagaccagcttgggcgataaaatgtaacatcgtctcaaattttttttttaaacattaaaaacaaagaaagtgctga

SEQ ID NO: 952418 - DNA, 449 bp, Homo sapiens
taggggtgagacctcaccttgaggacgaatgtgttatccttctctggcatttccaggggcatggtggtgcggacctcaatgatggctgacagtgggatgctgaccttgggcctggcagcctgggggccagaagaaggatagtgagtggccccagcatttcccgacaccctttccatcccctccccgctgccaggtgttagagtggccctcaaatagactgccacagccaccctggtacagaggtatcccaatccccatttcacagagggggaagctgaggaaggcatttctttgaaacaagaaagaaatttttcctggctaggcatggtggctcatgcctgtaatcctagcactttgggagkccgaggcaggaggatggcctgagtccagtagttcaaggacagcctggacagcatagcaagaccttatctttactcgagaccaaaaaa

SEQ ID NO: 952419 - DNA, 584 bp, Homo sapiens
tcatctatttcacttaaactgctgtcatcatctccttgtagcagaccacaagttactaaattagccttctcaaacactggygtaatcagagattattttagagattattttgaggtacattttttattttcatttttctttacttccttcatatgtaacgcagaaccacaactttaaaaaatctacaaaaagccaatgttttataataattctactgataacaaataaaaaaaattttgtaaaattccaattcttccccatctcaattcattaattcaaaaaacacagttatgaattatcaacaacatataaagaaatatatatttcctgcctcaaaaaccaggtaatatgcaattatgatacaatgtgtagtttaagagttgatatatggaaagttatattttagcacaaggaagtcattacagaagaggcaaaatataagaggagctcaccagggaaaaaatagagaaaactactccacttggagaatggaatgacagcacaaagattagtcccatggagtctaggtgtttcctaggaacttgaaaggaaaagtgtaaaacacaaagaaagtaagaatggaa

SEQ ID NO: 952420 - DNA, 563 bp, Homo sapiens
acatctgggttgtttccagtctttgactactaaaagtaaagctagtatggatatttgtgtgagtaaatgttgtcctttctgttaggtaaattttaggaatagaatggctgcrctgaatttgaagtacacgtttagctatttaagaaacagctaaatgctttccaagtaactagatatgctgtttcgcgaaagggctatatatgcaaagcaacccccaaatgcagaaggagcagagaaagcaaacaatgaggcagacaaagccagtttgacagtagagatgcttcattagggaacttagggtcagaagtgtagtcttgggtggctctaaggtagctagatcttcacactgtcaccccaagacccggagcttatatactttagtgaaagggtatgcatgcttcagaagaaataggtaggacaaccaaagttgatgctttaaggaaacaaaagaatgctatatgcaacacagcctataattcacttaagagcaggatttgtgataactatgtgcccttacactgaacagtggataaagtagaaatcttccaggtgttcattcggaa

SEQ ID NO: 952421 - DNA, 604 bp, Homo sapiens
ttggcatcacaggttccagtggaggtcattacctattggggaacctgcccccgatagtcatgtaggttcttttctattttccctaagcatcggcygggttgagaaataaagggacagagtacaaaagagagaaattttaaagctggctgtctgggggagacatcacatgttggtagattccgtgatgccccacaagccgcaaaagcagcaagtttttattagtgattttcaaaaggggagggagtgtacgaatagggtgtgggtcacagagatcatgtacttcacaaggtaatagaatatcacaaggcaaatggaggcagggcgagatcacaggaccacaggaccggggcaaaattaaaattgctaatgaagtttcgggcacacattgtcattgataacatcttatcaggagacagggtttgagagcagacaaccggtctgaccaaaaatttattaggcgggaatttcctcgtcctaataagcctgggagcactaagggagactggggcttatttcatccctacagtctcgatcatagaagatgaccacacccaagggggccattttagaggcccaccctcaggggcacattctctttcttagg

SEQ ID NO: 952422 - DNA, 666 bp, Homo sapiens
agcgaaaacttggggtgtgatggagagaggaagcaagtgtcctttctttttcttccatctttttgtccctgagtctcggcaaccttggcagtcgccacccatggttactgatccggcatgcacccatgaagcagggaaggcctagagaataggaattatttgcccttaactttgcctccatttttcctactgccagcaacccttgggttccctgggcttcatttattccatggagcatggcctccttccatgaggtggggggtttagtcagcaggaattggtcctgcccatttacattgtgcctgttgcctggctttggacccctcagatttggtttttctttctatggcctcagcctcaagcttggagtcaagtttgagactaaaaagtattttagagggttgcatgtatctgtttagattaaacctcaaatgagccctgatgaatttgcagttatcagggggataggaaccctctaatctagaaaaggagaaaagagaaaacagttaaagggtcaaaacggggaggtcctgaggsaagaagcccttgctcactgctaatgggtccttcccccagtttgaactgagctgaactccttggccaggagaagaaaagttccactgatgctgcaggcgggaagcaccagccagccggctgcgcagggtc

SEQ ID NO: 952423 - DNA, 574 bp, Homo sapiens
gaaagatgattttctttccttacaagtaaaagagctttcactcaaatgtttcttggaagctgctacctgtyctagccacgctgagaaaccactgagtgaaaacatggaaaataaatattgacggtgcttacaaacagaaaggaagttgagcattttcacagcttcagaatgagataatagtacagacgaatagtgaaactgggagaaatccagccttttccacgttggtgcaggttccctgaaggcgaagcatttgtagaaggcagtgtctgagcgcacagtgaaacgagcatggttacgcagaccactgttctggccttcctttcattctggatgctgttagaagttgagggactaattagaagaagaatgttctcctcaaacacagctcaatggcatttgttcccttttatcccatctggagcttggggatgctggacccacagtcctgagtcccggggtctgaccgtaatacaagccttttcccacactcatgcccgaaagccaggcagcaccagccaggttcaggaagctcaccaggtttctgaacaggatagagtatctaccagaagcc

SEQ ID NO: 952424 - DNA, 601 bp, Homo sapiens
ctgggattttacttctcctgggggactcctcaaactcatgaaattcagtcccaagaagtcataacactctgttagtatgaaagccctgtgagcaggggattggaagctcagttgtcagagtacaaaggaaatgaaagggaagttgctctttctctctatcacacacattttcagctcttcaatagactgaatgtatccatgcaagcttgaaaaagatgatcaaacaataaaattaaagcttttagtttacagggttttttttccttttctttcctaccaggtgaaggaggtactaggagtaggagattatgtcttcttgcccctttattttgaaaattttacatggaaaaggagatcaagtgaggccacatttaagagtacgtctcttggcctatataatcaactatgcacactggttaaggtaaaacaaattaaactaaattttgaattctataaacccaggctgcaaaacctttcmagttacacaaataactaggaagaatttgtgttcaaataaggaccacaaattcttaatataagtgagatgatgtctataaacagtggctgtagttgtagcttcagtctttaaaggatattgatt

SEQ ID NO: 952425 - DNA, 604 bp, Homo sapiens
gaagctctgaaccttcagacttgtcccaggttcgggcaatggcctawgcctttatattcctgtattgactagtgcagtgggctgaatgttcgtgtctctccaaaaattcatgctgaaatcctaacccccaaatgtgatggagatggggcctttgggaagtgattaggtcctgaggatgaaaccctcatgagtgggattaatgcctttataaaagggaccccagaaatctctcttgctctctttctggcacgtgaggataaaatgagaagatgaccaactgcaacccagagagaacctccaccagaactcaatggtgctggcacctgaccctcaacttccagcctccagagctgtgggaaatgagtttctgttgttcttaggccacccagtccatggcactttgttgtagcagcccaaatggactaagacagccacttaccattgtaggctgcccttgggaaggtggagtgtccttcagtgaggcagctttcttcagggaaaaagaggaatttctggagagagataacagttgagggctctcagccggcaaaagtctcagcagcagaaggaatgaggagaaaaaaatgggcacagtattttgtag

SEQ ID NO: 952426 - DNA, 717 bp, Homo sapiens
tcccccatgctgttctctcatgagatctgatggttttaaagtgttgacagttcctccttcactgtctttcttctatttcctgccaccttgtgaagaaggtgcttgcttcccctttgccttctgccatgattgtatgtttcctgaggcctctctagccatgtcaactgtgagtcaattaaacctctttcctttacaaattacacagtctcagggaagttctttacagcagtgtgaaaatgaactagtacagtaaattggtaccaggagtagggtactgctataaagatgcttgaaaggcggatgaaactttggaaccaggtaatgcacagaggttggaaaagtttggagggctcagaagaagacaggaagatgtgggaaagtttggaacttcctagagacttgttgaatggctttgaccaaaatgttgatagtgagatgaacaatgaagtccaggctgaggtggtctcagatggagatgagtaacttactgggaactggagtaatggtcactcttgctatgctttagcaaagagactggtggcattttgcccctgccctagagatctgtggaactttgaacttgagagagatgatttagggtatctgstggaagaaatttctaagtggcaaagcattcaagaaaaaacagagcataaaagtttggaaaatttgcagtctgactacgaggtagaaaagaaaaaccaattttctagggaa

SEQ ID NO: 952427 - DNA, 597 bp, Homo sapiens
taatctcatgaacattataatatttaaaaaataaatttatcgaagaaaaatatatttcaatatatacaagttaaaaaaaacaaacaaaaaagatgctgaacactgatttttgaatttgattgggtttctgtcttcactttgtctgctggggagctcagggctgccaaagtagagccatccatactaagtgtgaaggactccatggtatatatttccagtatttgccttgttcttggctccatgtattagtcagttttcacactgctgataaaggcatacccaagactgggcaattgacaaaagaaagaggcttaatggacttacagctccacgtggctggggaggccttacaatcatggtagaaggtgaaaggcatgtatcacatggcaagcagacaagagaagagagcttgtgcagggaaactcccctttttaaaaccatcagatcttgtgagacttattcactatcacaagataagcatgggaaaaacctatccccatgattcaattatctcccaccaggtccctcccacaatagaaaggaattatgggmgctacaattcaagatgagatttgggtgaggacacagccaaatcat

SEQ ID NO: 952428 - DNA, 672 bp, Homo sapiens
aaatcatggctgccagcctcaccctgcacacccaggccccatcctaatctcccagcaggaggtgcttggggcaagctggctgccttakacacagtgatgctgggcctgctggcctgagggagcttagctcaggtagcctccccagagagacctggcccttcccaaggagctggatcttgaggccagctttccaaggccaagggttgccatcggctgccgttccctttccaagccatggatgctctggaacattgtaagtttccttcagtgcaatgtggattatagatgtgtgtataactgaaatgatatctcaagtgtctagcatagtgcttggcgtatagtatgaatgaactaaaaacaagctcatttatggaaacatatattaacacatggctcctaacaaatggaagtttctattatctagcaaatatatactgatttgcttagagaggcagtatcacaggatggttaagagcaatagctctagagacaggctgcctggttcaaaccttgcctctgatgctaactagctgtgtgatcctgagcacattacctgtgttcctctcttctctgtgtttccttgtgtatgaaatgggactaaaatagatactgaatctctgttatgtccttgctttttttcttggttcgctctccctttggagaagctagctg

SEQ ID NO: 952429 - DNA, 605 bp, Homo sapiens
cataaaacttattaacatataagctccgaggcaatacagctttctttttcttttcttttcctttctttctttctttctttttctttctttgtttctttctttctttctttttctttmttctttcattattttctttcttcttctttcttttttttttttttgacagggtctcgctgtcttgccctgattggagtgaagtgatataatcatagatcactgcagcctcaaacttctgggctcaagcaatcctcccaccttagcttcccaagtagctggggctacaggtacgtgccactgtgcttgcctaattttcgaatatttttgtagagacggaagtctcaccatgttgcccaggctggtcttgacccctggcctcaagtgatcctcctgcctcagcatcccaaagtgctgggattaaaggaatgagccagcatacctggctacaatatagtgtaaaccaaaaataaaaatttaagcccctcaaccatctgaatggaccccagttcatggcccaggaaattccaaaatttacctggaaaactagttcaagcaatgataagaagggggagttggacatgcttcattattccctcttcccttctaca

SEQ ID NO: 952430 - DNA, 555 bp, Homo sapiens
aagaatggtttaactctgtgtgatgaatggactcatcacaaatcagttaatcagaaagattmtttctagttttttctgaggatttatcctttttcaccatgagcttcaatgcgctcccaagtatcttttcacagattccactaaaactgtctttgaaaattgctcaatcaaaagaatgcttaacctctgtgagacggaactgacattacaaagcagtttctctgaaagtttcttcctagtttttatgtgaagatatttgatttttcgccataggaatcaatgcattcccatatatcccttgacagattctacaaaaacagtgcttccaaactgctcactaaaaggaaagttttaactctgtgagatgagtacatatatcacaaagcagtttctcagaaagcttcttactagtttttatgtggagatatttcctttttcaccacaggcctcaggtgctcccaaatatcccttcacagattctacaaaacagtgtttctatgatgcacaatcaaaagaaaggtttatctctgtgtgatgaatggactaatcacaaag

SEQ ID NO: 952431 - DNA, 507 bp, Homo sapiens
agcaataaagaagcagagaccatctggaaggctatgcaataatccacgtaagatgtgacagtgtggcttagaccaaagtggtgagaagtggttagactatgaatatattgaaagtagagccaaaaggatttgctgacagattagtattagagagggtagtcaacaatgacaataggactttctgcccaagttgctggcgcggtggggggtggggttaagacaagagtgtagaagaagtaagtttcagaggaattcagttttgacatgctaagttttgaaatgtttacagacacctgagagaacatataaagatggcagttagagatgcaagtctggaattcaggagagtttgggacttgtcagcatttaggttagatgatatttaaaaccamaggaataggtacgatcaccatgacagaaaagagatgaacttattcaaggactggccccatggcatcccatattaataggtctcttactgtataagatatcctgtttctatgtaaa

SEQ ID NO: 952432 - DNA, 614 bp, Homo sapiens
  misc_feature 61: n = A,T,C or G
tcttttttctttttttattgtaattttattattattatactttaagttttagggtacgtgntcacaatgtgcaggtttgttacatatgtatgacatgtgccgatgttggtgtgctgcacccgattaacgtcgtcttttagcatgtaggtgtatctcgccaatgctatcccgtccccacccgcctcaacgccgacaacgagtcgcctggtgtgtgatgatgtgaggtagggctctactgctatttttcctaagtaaataattgttccagccccatttgtgggtcagtcccatccagatggtttgcgccttcaggatcctccttagactttcagaaatgtttgcttaatgaaacttttgaagaggtagataggatttgttccctaatttacggccaatttccaggagtggatcgtcttgcagtatagcataagtacagtcatgaaaaccacaaggattttactacagataataactattttgaaactttactactcctcataatttggccctttatctttttcctcctgcttttattggaacatggaagtggcagattgcacggcttcaycaatgccagcatgatcctattcaagcctggcactgtcccggacccc

SEQ ID NO: 952433 - DNA, 814 bp, Homo sapiens
gtgagccatgtctcaataatgtggagggtggaatggatggggttggggagagaaagagaagggagtggacagagggggaagtcgcagcatcacccaggcgagtggacagtaagtctggagacaagtgggagccatgaagatggaaaccagggatggggagggggaagatgacggcagagctgttggtgatatggcagtcgggtgctgggcagggaagggcatggtccctttaaatgatatggaagtgggaaagtgctgggtagaggagggcatggtccctggccccatggaactaggtgaggacaggcatttcctgcccaaatgttgcatttcccaagaccaccctggcctgccatgcccccatcctatgcctataaaaacccaagaccctagcaaggcagacacacaagtggctggacgtcgagaggagcacatccgcggaggaacacacgggtggctggacgtcgagagggacgcactgacaggcaccagcaagccacaggccaccaaccggcagaatgatgtggagtttggctggggcagttggaggacagcccagaccccaagcggcccaactccaggggaaaatcatctcccttctggctcccccatctgctgagagctacttccactcaataaaaccttgcactcattctctaagaccgtatgtgatttgattcttctggtacaccaaggcaagaaccctgggatacagaaagccctctgtccttgygataaggcaggggtctaactgagctgaccaccacaagccacctacagacacctaaactaaaagagcaccctgaaacacatg

SEQ ID NO: 952434 - DNA, 814 bp, Homo sapiens
gtgagccatgtctcaataatgtggagggtggaatggatggggttggggagagaaagagaagggagtggacagagggggaagtcgcagcatcacccaggcgagtggacagtaagtctggagacaagtgggagccatgaagatggaaaccagggatggggagggggaagatgacggcagagctgttggtgatatggcagtcgggtgctgggcagggaagggcatggtccctttaaatgatatggaagtgggaaagtgctgggtagaggagggcatggtccctggccccatggaactaggtgaggacaggcatttcctgcccaaatgttgcatttcccaagaccaccctggcctgccatgcccccatcctatgcctataaaaacccaagaccctagcaaggcagacacacaagtggctggacgtcgagaggagcacatccgcggaggaacacacgggtggctggacgtcgagagggacgcactgacaggcaccagcaagccacaggccaccaaccggcagaatgatgtggagtttggctggggcagttggaggacagcccagaccccaagcggcccaactccaggggaaaatcatctcccttctggctcccccatctgctgagagctacttccactcaataaaaccttgcactcattctctaagaccgtatgtgatttgattcttctggtacaccaaggcaagaaccctgggatacagaaagccctctgtccttgcgataaggcaggggtctaactgagctgaccaccacaagccacctacagacasctaaactaaaagagcaccctgaaacacatg

SEQ ID NO: 952435 - DNA, 606 bp, Homo sapiens
cctatacccgcaggttattcctaggttatattagtaatgcaacaaagagtaatattaaaagctaatgattaataatstttataataatgattgataattgtccatgatcatctctatatctaatttgtattataactattcttattctaactattttctgtattatactgcaacagtttgtgtctttagtctcttgccttggcagctgggtaatccttcgcccacagcatagaataaactctcaaaggtcaaggacaaacagaggatcctaaaagcagcaagagagaaaagcaaataacatataaaggaattccaatttgtctggcaacagacttctcaatggaaaccatacagagcaggaggaagtgggacaaaattttcaaagtgctaaaagaaaaaagctgccatccaagaatactgtatctagcaaagctattcttcaaatatgagggggagataaagtctttcccaggcaagcaaaagctaggagaattcaccaccaccagacctgttttacaagaaatactaaggggagttcttacatctgaaaggaaaaaaaatgccacacatacaaaaaagaatgaaatcatgtcccttgcagcaaca

SEQ ID NO: 952436 - DNA, 615 bp, Homo sapiens
acttaggagcaacccaccagcttcattatgttccttggttctccacatatggtcaaaggtattatgcataggttcaycgaacccctttcctctcacaagcgatgaatcaggagtgtcaaatgcatttattttgcataactctctaaataattcatgccaaggactgtcagtgttgtccatactattagaagtagagtcctcagcattttagagtccaaacatattaagcatgcaactccagaaacctccaaaccgataaaccaatgaaagaactccatccttaatatttggtttctctagaagcaccccacttctggtaccaaagtctgtattagtctgggttctctatagggaaagaactaatggaaaaaaaaaaaaatatatatatatatatatataaaggggagtttattaagtattaactcccctgatcacaagatcccacaataggccatctgcaggctgaggagcaaagagagccagtccaagttccaaaactgaagaacttggagtccgatattcaagggagggaagtatccagcataggagacagatgtaggctgggaggctaggccagtctctccttttcatagtgttcttcctgcttatattcta

SEQ ID NO: 952437 - DNA, 615 bp, Homo sapiens
acttaggagcaacccaccagcttcattatgttccttggttctccacatatggtcaaaggtattatgcataggttcatcgaacccctttcctctcacaagcratgaatcaggagtgtcaaatgcatttattttgcataactctctaaataattcatgccaaggactgtcagtgttgtccatactattagaagtagagtcctcagcattttagagtccaaacatattaagcatgcaactccagaaacctccaaaccgataaaccaatgaaagaactccatccttaatatttggtttctctagaagcaccccacttctggtaccaaagtctgtattagtctgggttctctatagggaaagaactaatggaaaaaaaaaaaaatatatatatatatatatataaaggggagtttattaagtattaactcccctgatcacaagatcccacaataggccatctgcaggctgaggagcaaagagagccagtccaagttccaaaactgaagaacttggagtccgatattcaagggagggaagtatccagcataggagacagatgtaggctgggaggctaggccagtctctccttttcatagtgttcttcctgcttatattcta

SEQ ID NO: 952438 - DNA, 634 bp, Homo sapiens
tcctccacgccaaacctattyttgcagttctaagtctctaagtagccattcatctctcctcccaggcacgtgtcatgctatacacacctgctgtctttcttttttctttttgagacagagtctagctgtgtcatcaggctggagtgcagtggtacgatcttgactcactgtggcctctgccatccggattcaagcgattctcctgcctcagccccctgagtagctgggattacaggtgcgcgccaccacaccaggctaatttttgggggggagttttaatagagacagagtttcaccatgttggccaggctggtcttgaactcctgacctcgggtgatccacccatccaggcctcccaaagtactggaattacaggcatgagccaccacgtcggcccacacctgccttctgaggcattgaagatgcaccattccctgtatgtattagggttgcaggattaaatataagacttcgatttaacttgggtttgaagataaacaattattttaaaatatatattgtaagtatatcctacatatttaataagtcatactaaaaatgatccatcattaatctgaaactcacttttaattggacattttgtattttcatttgctagacctgacaatcctaa

SEQ ID NO: 952439 - DNA, 579 bp, Homo sapiens
ttaagatagcaccttccattaacaaactgctcttgccttttatataaaaaaataaaaattaaaaaaaccaagtagatgaagatgaataacccagtgttacgggctgagtcatgtccccctcaaacttacgtggtggaggcctaaccccaggacctcagaatgtgactatatttggagataggtctttaaagggctaaacaatgtcctaatccaatgggactggtgtccttataagaggcgattaggacacagacacactacggacaaccacgtgaggacacagggagaggacagcatctactaaccaaggagagaggtctcagaagagaccaaccctgctgactgactctgatcttagacttccagcctccagaattgcaagaaaattaatttctatgtaagccacccattttgtgttattttgtgaggcggccctagcaaacttacagtcccaagaatctaagatttttgattgtgtgaaggatcaagccatctggaccaatgttttcctgaatttctgggcagacctttccaggaaggtggkcagcaaatggcccaggtctgttcagttagaggatc

SEQ ID NO: 952440 - DNA, 766 bp, Homo sapiens
gaaatgggcaatgtcagaaaaggcgggggctggtggagtggggtgagtggtgatacccccaagagttaggtccatgtcctagtaacccagcccctgtcagagagagaccgtatttgataaaagggtctttgcagatgtgttttgagatgagctcatcctgggttacccaggtgggccctgaatccaaagaccagtgtccttagaagagacagaagaggagagagcaagactacatgaactacaggaagacaaaggcagagattggagggctgaagccgcaagccaaggaatgcctggagccaccagcatctggaagaggcagaaaggagcctccctttgagcttctggagggagtagggtcctgctgacgccttgattttggacttccaggctccagaactgttagagaataaattgctgtcgttggccgggcgaggtggctcatgcctatagtcccagcactttgggaggccgaggtgggcgcatcacttgagcccaggatttcaagatcagcctgggcaacatggcgagaccctgtctctacaaaaagcacaaaaattagccggatgtggtggcggcttgcctgtagtcccacgctgaggcaggaggatcaattgagcccaggaggtcaaggctgcagtaagccatgattgtgccactgcactccascctggaccacagagtgagaccctgtcaaaaaataataaaaaaataaaaataaatcactgttgttttaagtttcctggtttgtggtcatttttatggc

SEQ ID NO: 952441 - DNA, 471 bp, Homo sapiens
tattgaggcagagacacccatttccaagatggcgcacacacgtggctgctggtgggtgtgttcatcagctcgggctgctgtcacaaaagaccacaggctgtgtggcttcaacaayagacatttattttctcacagttctggaggctgaaaactccaagatcaagggttagcaggtttggttttcccttctggggccacgaatgtgttctggagctagctctcgatgatctggaagtccccaagcacatggtggaggcacttaatgtcactgagctgtacactttcagatggttacgatggagaattttatatcatgtatattttcacacacacacacacacacacacacacacacacacacacacacaatctgcgtcaggggtttggggatcatgtctcagctctgccactaaatgagtttgtctttgagaaagtgactttctctccctggccttggtttctctcctccca

SEQ ID NO: 952442 - DNA, 622 bp, Homo sapiens
tttgtgcgtcatctgtttttataaggataccagtcacttcatttagggcttgcctactccagtgtgacctcatcttaacttggttccatctgcaaaaccctgtttccagataagatcacattcacaggttcagggtggacatggatttggagagcggggatgatattcaccccagtaaactccccaagggcctgcactgggtgaaatacattccctgtttccccacataatcttcacagcagcctgtgaggcaggtgcagtcagttcccactgcatggatgaggaaactgaggctcacagaggctgagcatcaagtgcccaaagctgcacaggctgggggaggaaaatggcttggaactagataaaggtgaatggattaaataccactgaactgtacatgctgcaagggttaattctatgtcatgtgaatattacctggtaaaaagtgttctatcttggtacctttccactgtctaaaatccacgctgctagagggaatctgtggtcttgagatgtgaaacccatcatygagccacttcctgtggtgggagtctttgtgtccgggaggcctcggttatagtgcagatgagcttcctggaaggtggggactgtgtgctgagcg

SEQ ID NO: 952443 - DNA, 648 bp, Homo sapiens
tcccacagcagcgggaaacagccggggcctggccagcawgtggtcctgagcaggggcctggggacggcctcggacccttgggaggtacaggggaaggccaccttgctgttgggtggcagccagggaagggttagtgacagctcatgtcctggaactttctgtggaagctggatctagagtagagagtttgtgagatgaccctggccgcacactggttaccagacaacttcattcccacacatcccgggagtggggtgtcatcctcccaaccaccctcatgctaacttcctgcccatgggaaatgggcctccgagtggctagctggctcccttcattgcctccatttagccttcaccatgatctttgaggtgttactgttcccattgtacagatggggaaactgaggcccagagaagtgaagtcacttgcccaagggcacacagctaggaaatggcaaggctgaggcctgcttggcttcttggccttagctgggaattctgatgcagtttggcttcctgtgctatcactattgaccttgaggttggctaggaatccacctagtcactgcgcagatgcagagccaggctctctgcagcccagggctctgacttggacgagggcaccagaaaaatgggattttccttctgc

SEQ ID NO: 952444 - DNA, 574 bp, Homo sapiens
aagattgagccccagtcatytgcagttgtaatccacacattcactcaccctttattggcttttctctcttccttgccccaattcccactccctaacttgggtatcctgggatcacctcccaattaaattattggctcccaagtctttgtctcaggatctgcttttcaggaaacacaagctaagacatgccccaaatatgtgagaggaaaatccttaactatattcaaaaggaaagaaattccacgtttaatgatgtgttatttaatgggtcaagtggctcccatgttttgaattctggagcttacaggcagcactaaagtgggcaacagatgagtcttcccagacctcacccctttcaccactttcccctcctttgggctccactatacatggtgtataacatccagaatgtcttagagtatgattcctatcctttgtctccccctcttacctgtcaacacctcatatacagaaactgcaatttaatggctttatatcccaagcatatagcacagtatcttacacatagaaggctcttgataacttgctaaataaatgttgggtcaataactgg

SEQ ID NO: 952445 - DNA, 564 bp, Homo sapiens
tcaggaaatgttttacttgtggtgttttaattgtggcaacccatgcataccccaacttcacattcctctttacatatttctctgtacctttagaaagaaaggggtctgtggtctgcatgctcttcctgccttctcccctggaaagtctcccctccggatgtccagcttggtggccactgcctggactgtccaccacttggccacattcccactggacaaggacactcacatttactctccagtccttgactttaaagttgattttttttcttagggttttaattttgctgtggccactgctactaactgttgagctctgcctcatgagtggcaggaattgcatggggacgggtggtttgggtttttctctgaggagaatgtcagtgccggaactctcagaggcacggtttgcaggacactctgagacaggcaccaggaggcarcatccccacttgcacctggaaatgtaatgtaaaatgcagcctctggatgggcagcggcctgcaaccattgtaggtggggatgtcaccacacagtctgcgagggcaatctctttctgctaac

SEQ ID NO: 952446 - DNA, 615 bp, Homo sapiens
ggtgtcctacaaaactaagattgaccaccacactgaattttgtttggttgttgaggctgataattttacatacacactcagacacacacaccaagaaggtatgaaaaatttattgcttgcacaatgaggctttctaggaagggcagggcgggcttcccaagtatctaaaaatgggtaacgcttccaggaaagactgacttggggcttttaatgtgatgaggggctggtgttggtacacttccagctgtcatccaaggagggaggaccctggcttgtgtacccaattgccctgatgggaggcggaagagaaaaaggtagggctgaagcctggacgctatctgcagtcaaacattagagaaatggaatgcaggccaggtgtggtggctcacacctataatcccagcactttgggaggctaaggcaggaagactgctggagaccacgagttcaagacagcctgggaaacttagcaagatcctctctttacaaataayaaatataaaaaaattacctgggcatggtggtgcaaggctgtagtcccacctacttcagaggctgaggcgggggggattgtttgagtccagggggtcaaggctacagggagctatgattgca

SEQ ID NO: 952447 - DNA, 568 bp, Homo sapiens
atctaggaagtaactaacttgcttttgattttacaggctcacaggcagaaggggcttgccttgtctcagataggactttgaactgtggacttttgagttaatgctgaartgagttaagactttgggggattgttggggaggcatgactggttttgaaatgtgaggacacgagatttgggaagggccaggggtggaatgatatggtttggctgtgtccctgcccaaatctcatcttaaattgtagctcccatattttccacatgtggaagggacccggtgggaggtaaatgaatcatgggggtgggtctttctcatgctattcttgtgatagtgaagaagtctcatgagaactgatggttttataaaagggagttcccctacacaagctctcttacttgccaccatgtaagatgtgactttgctccttattcgccttcagccatgattgtgaggccttcccagccatgtggaactgtgagtcaatgaaacctctttcctccataaattatccggtcttgggtatgtcttaattagcagtgtgagaacagactaatacagtacccttcac

SEQ ID NO: 952448 - DNA, 568 bp, Homo sapiens
atctaggaagtaactaacttgcttttgattttacaggctcacaggcagaaggggcttgccttgtctcagataggactttgaactgtggacttttgagttaatgctgaaatgagttaagactttgggggattgttggggaggcatgactggttttgaaatgtgaggacacgagatttgggaagggccaggggtggaatgatatggtttggctgtgtccctgcccaaatctcatcttaaattgtagctcccatattttccacatgtggaagggacccggtgggaggtaaatgaatcatgggggtgggtctttctcatgctattcttgtgatagtgaagaagtctcatgagaactgatggttttataaaagggagttcccctacacaagctctcttacttgccaccatgtaagatgtgactttgctccttattcgccttcagccatgattgtgaggcctycccagccatgtggaactgtgagtcaatgaaacctctttcctccataaattatccggtcttgggtatgtcttaattagcagtgtgagaacagactaatacagtacccttcac

SEQ ID NO: 952449 - DNA, 677 bp, Homo sapiens
tcccaccctgccttctggatctcacttccatgggaataatttcgtttcgtttcagtgacaggttctcgccggtcacccatggctggagtgcagtgatgtgatcatagctcactgcagcctccaactcctggacttaagcgatcctccttccgcagcctccctagtggctagaactacaggtgcatgcccagctaatttttttttaatagagatagggtctcactatgttgtccaggctggtctggaactcctggactcaagcaattctcccaccttggtctcccatatactgggattacagacgtgaaccactgtgcctagcagaattctttctttcctgagctctaattctgtgcttggtgctgtattgcacatttcacgcgacagtcacaatgaacacttactgggtgccaagctgtgtgacatggtgcaagtcacttaacctctctgaacttcagtttactcatgtgtaaaaatgggagaaatgatagtgcccacccatagggcagcggtgaatatcaatgaggcaatatatgtaaatctcttataactaaaccttgtacagaataaatgcccaataagcagtgactggtctttttctgcaccaggtccttaygtgatgaggacggtaagattcatgagtgcttactacgggtgaggatttgccttttgtgtat

SEQ ID NO: 952450 - DNA, 569 bp, Homo sapiens
aaatgctgtttttttctagcctctagttgagggggctcccataccacagatgcacagccctcctgcctgcttgaaccaacacaaactttggtttatatagtgctgaagaattattcagagggcaggtttcagtcaattcggtgaattcataacttcttcaaatagcctgagatgatcagaaaaaaatgtttgctaattcttggcatcctcaaatataatctctctgttaaatgtcagttactttgacatttgacaatcagtactttttgtgatctatattccggtcaaggaccttggctaaacactgtatagaaaacaaggatataggcacaagtttccaggatggggcagtaaggagtacattgcaagatcatgccccagaagtggaggaaaaagagtatttgagagatactgaccctgtgggtttcatgagagaagttttcatgtggcaaytgtagggtgagctgaagggctatgtcataggaggggaagacacaaggtggctggctcattaaatacagggcaaattgctgaatgcaagactcccctttcatcttctgcaaactctc

SEQ ID NO: 952451 - DNA, 585 bp, Homo sapiens
gtggaaaatcatcagttaagrctatttttacatcttttgtggatcttcagttacttcaggccatctggatgtatatgtgcaagtcacaggggatgcgatggcttggcttgagctcagaggcctgacattcctgtcttcttatattaataagaaaaataaaacaaaatagtgttgaagtgttggggtggtgaaaattttggggggatggtatggagagagaatgggcgatgtttctcagggctgcttcaagcgggattagggtcggcgtgggaaactagagtgggagagattaagctgaagggagatcttgtggtaagggatgatattgtggggatgttagaagaaacatttgtcgtatagaatgattggtgatggcctggatacggttttgaatgaaccgagaaactaaacggaagatacaaggtccgaataaaaggagaaaaatgggtattaaaggactaagaattgggaggacccgggacatctgattagagagtgcctaaggagattcagcatagtcctgccagcaaagattatttatttacttcaagagttaagagtggcagtttggggatagcaccagga

SEQ ID NO: 952452 - DNA, 608 bp, Homo sapiens
aacagtaagatcaagttgtttggacagaaaggctgcagaacacggtcccgtctcttgtgtgagaactccaaccatacagccctgcacttyggctgtgtgtaatgaaaagggagtgataagttagggagagctagtgtgggagctgttttttaaggaatggaaaggagagtggggaaaggatttaggatctatggggtcaactaggtttatctagaatagaataatgggttgtggagggaggtattgaggataggagagtatataggtttggcactgtggggtggataggcaaaacaatttggttgataagtcgcagatcctgagctaacctgtaaggcttgtctggtttttggacaggtaaaataggggaattgtaaggagagtttacaggctttaaaaggccatgctgtaataggcaagtgataacaggctttaatccttttaaagtgtgctgtgggatggaatattggcattgagcagtgtaagggtgattaggttttaatgggatggtaaggggtgcatgattggtcgccaaggggggagtagagatgtcctatacttgtggattaaggtggggagatacaaggggagatgcgaaggaggctttg

SEQ ID NO: 952453 - DNA, 618 bp, Homo sapiens
taaggcttgtctggtttttggacaggtaaaataggggaattgtaaggagagtttacaggctttaaaaggccatgctgtaataggcaagtgataacaggctttaatccttttaaagtgtgctgtgggatggaatattggcattgagcagtgtaagggtgattaggttttaatgggatggtaaggggtgcatgattggtcgccaaggggggagtagagatgtcctatacttgtggattaaggtggggagatacaaggggagatgcgaaggaggctttgaactagggaaaagggcagaatgagagtgtggctgtaacctaggaatagtcaggcaagcagataatttagttaaaatgtcttgacctaataagggaactgggcaggtggggataactaaaaaggagtgcataaaagaatgttgtccaagttggcaccagagttgggggagttttaaggggttttgaagcctggccttcaatacccacaacagttatggaggcaagggaaacaggcccttgaaaagaaggtaatgtggagtgggtatcctctgtattgattaagaagggggcrgacttaccttccactgtaagagttgccaaaagcatctgtgatggtccagga

SEQ ID NO: 952454 - DNA, 735 bp, Homo sapiens; identical to SEQ ID NO: 947609

SEQ ID NO: 952455 - DNA, 617 bp, Homo sapiens; identical to SEQ ID NO: 947610

SEQ ID NO: 952456 - DNA, 818 bp, Homo sapiens
tccaggctctgctttgaatttgttcaaggaggctaattggaggctaacattaggtcaaatttccaatcttcagactttctatttttagcaataaaaaccaagttttacaatatctgttttgttcaaactcttctctgaggtgatttaatacctaaatacctagcacatctggaaaactaaaatttcttttcattttttttgagatggagtctcactatgttgtccaggctggagtgcagtggtgccatctcggctcactgcaagctccgcctcccgggttcacgccattctcctgcctcagcctcccgagtagttgggactacaggcacccaccaccacgcccggctaattttttgtatttttagtagagacggggtttcaccctgttagccaggatggtctcaatctcctgacctcgtgatccacctgccttgggctctcaaagtgctaggattacaggtgtgagccaccgcgtccagccaaaaactaaaatttgttaaactaactgattaattgaaacaaaaaaaactagtaatttttaggcaccacctgttaattttttggtttggatgccttagcattgttctaataaactatttgttaggtcttggtacacgtctaagttggaatacaagtaagattacctctataccaaaggtctaaaaaaattaagcagatgggttcttggctattttccaaaacaacacagtggtgtgaacacatcaacaaatgtaacttttaaaaaacttttgagcatatgtggcyaccatgtaaacagcactttgggcaccatctaaagtcatcacattgtgatagtg

SEQ ID NO: 952457 - DNA, 547 bp, Homo sapiens
aagaagctgttggtgccatgcatcttgtacagcctgcagaactgtgagccaaataaacctcttttctttataagttacccactcttagatatgtcttcatagcaacacaagtagactaaggcatcaagttttaccacttaagattaaggtggtgagtaccaaatctttctattaaacaggtatatatttttccctttataattaataaataatctgtagagtgatactgtgagatcaagtgaatatccttttccgcagcacaattcattatccagctttagaatccattgaggatcctgaatcttttatcctattgacgatttttaaatggtgattttcaggttcctccgtttcttctagcacactttgtagattcttagcaaacttctaaaaatgatttcttctcagtagacgttggactttgttgcttgayctcccatattttcctattttccatttctgtatcttttttgtatgggttttaaagatattttattatttacttttgaatgatttgtttttattccaactttatattttcattttc

SEQ ID NO: 952458 - DNA, 548 bp, Homo sapiens
gctgcagaatacacattgttcctatcagcacatggaacatcctccaggaagagaccatacgttaggccataagacaagttataactaatttttaaaaattgaaatcatatcaagtatcttctcagactacactagaataaaactagaaatcaataacaaaaactttgtaaaccacacaaataaatggaaatttaaacaatgtgcttgctcatgaatgcccattgggtcaattaagaaattaaagatcatcaaagactactacaggcaactatatgctaacaaatcagataacctagaggaaacagaaaaattcctggatacatgaaaacctaccaagactgaaccaggaagaaacagagcagaagaacctgagcagaccaataacgagtaatgagattgaagcaatagtaaaatgtctcccaacaaraaaagcccaagactaaagggctttactgctgaatcctaccaaaattacaaataactaacctcagtttttctcaaactattccaaaaaatggaagagaagttaattcttcctaatccattct

SEQ ID NO: 952459 - DNA, 571 bp, Homo sapiens
ttttccctttaacagtatgcaccagtgaatgaaacagatggtactcctgccctagctgagtttatacaaaacttaaccrggcgtggtggcatgcacctgtaatcccaactattcaggaggctgaggcaggagaattgcttgaacccaggaggtgaagtttgcggggaggcggaggttgcagtgagccgagatcgcaccattgcactctaggctgggcgacaagagcaagactccgtctcaaaaaataaaatgaaataaaataaaataaaaataataaaagttctctgatggataaaaccaggggccagtgatagagaataatggggaaatctactgagatgggggaattctgggagagactctctgaggaagaaacctttaacctgaagcctgaaaggagaccagccaggtgaagggtgtgggagagacagagagtgcctgagactgaatggaggcaggagcaggtgagaggagatccaggggaggcaggcctgctgggctgatacagagatggaattttattagaaaacaacctctttcttttagcttattgtgcagaatggcacccaaa

SEQ ID NO: 952460 - DNA, 533 bp, Homo sapiens
aagtaaaaaccgtccttagctcccagtgggatgatgktgttttgtctggaagactgacggatgttatgataataagataatggatactcacttctctcctatctaacccctatttaaaagacattacaccgtaacagtgcttgttacgcaatattatagttgcaaatgttgttatggaagattgtttcaaccaggggaaaagagactggtaataacagtacacttatacaattagtttctgaaactgttgcattgctttggggtttttttttttagcttagaaaagacatttatctttttatttccctttaaagttggctttcaaataaattcaatttcctctttctgtaacttctgaaacagattaaaccagagcatcagtttgcactttgctattgtcgtcactagttttcaccaagagcttcagagaaaagacattactaagtgctgggctgggtattattttctacttatatgtgaccaaataggatgtaacagccaggttctgagagtcgttgtgatactgacccctt

SEQ ID NO: 952461 - DNA, 573 bp, Homo sapiens
attctactttctacctccatgagatcaattttttaagttcccacataygagtgagaacatgcaatatttgtctttctgtgcctggtttatttcacttaacataatgacccccagttccatctatattgctgcaaatgacaggatatccctttttatggctgaataatattccactgtgtgttaagtaccacattttctttatccattcttctgttgatggacacttcagttgattccacatcttggctattgtgatgtttgctgcaatacacacgggagtgcagctatttcttccacatagtgatttcctttcttttggatatatacacacagccgtaggattgctggatcgtatggtagctctattttcagtgttttgaggaaccttcagactgctttccatagtggttgcactaaatatacattcctctcaacagtgtaccactgttatccttcttccgcagccttgccattatctgctattttttgtcattttgataacagacattttaactaaggtgagatagtatctcattgtggttttgacttgcatttccctgataattagtgatg

SEQ ID NO: 952462 - DNA, 839 bp, Homo sapiens
gagactggtgaggggaacccgggggaggaggggctgcggcccggactcctgggtctgagggaggaggggccagggtctcgttctgtctccctctggagagccttatgttccttcctgggcctcctcccactctaccctgtcactcaccccatgtagggaaggacgcagtggtcgtggccaaggtgaacgggaaggagctcccagacaaaccgaccatcaagtggttcaaggggaagtggctggagctgggcagcaagagtggcgcccgcttctccttcaaggagtcccacaactccgccagcaatgtgaggaccccgtgggccagagggctggtggaggggagtggagcttgtgcaggacatgctcctcagaagccctgttgcctgaggcatcaatgtgggcctggagccgggatggagagtgggccctctgaggatggaggttgtgcggggctgctggggagaggttgtgtgaagcagagggaggatgcctggggttgggtggggatgcattagggcttggtcatgtacattcctggcaaggcctgagggggccagggacctgggccccagaagtcctgatgggtcagatatgaggagacagagctggccaccaggtgctgagccacctctcggtctccatgtgcgccccctgtggggtgggggtgaggacgtggagatagagctatgagtggactctgaggaatatggggtggctctagagggtggtcccgtgcacccacacccccggccctgracccaggtgtacaccgtggagctgcacattgggaaggtggtactgggggaccgtgggtattaccgcctcgaggtcaaagccaa

SEQ ID NO: 952463 - DNA, 749 bp, Homo sapiens
gtggctgaggcacaagaatcctttcaacctgggaggtggttgaaatataaatataagatatatatatatgatatattctttatatattaatttatgtrtaacatatattatatattaatatattttgtagagacaaatatatttatttgtacatataatatgtgtgtgtatgtgtgtatatgtgtatatatatatatatatatatatatatattttttttttttttttttttcttttttttgagactgggtctcgctcttttgcccaggctggtctcaaagtcctgggctctagcgatcctcccgccttggcctcacaaagcactggaatcacaggtgtgagtcactgtgcacggccagttgtttttatcttgtaataaaaaagaagggcctccctgtagttgtgctgtggagaatggatcctgggggatgaggctggagatgggaaccaggggggaggctgaaatggacacagggaacggtacaggggcaggagtgcaggctgcaggccccaaggtatttcgaggctgtggagacacaccttggaggaccctgagaggcatggcgcctgtcttaccctgtgaccccacaggcccagcacagcctgtgcctggggggcccccaccatcccacggctccgtgcctgtgctccgcgccttcggggtcaccgatgaggggttctctgtctgctgccacatccacggcttcgctccctacttctacaccccagcgccccctggtgagtgttcc

SEQ ID NO: 952464 - DNA, 617 bp, Homo sapiens
acatgcctgccaataccccaggaggcccacaaaggtttgcaactgcctcaccatggtggtctggggatatgcctgaattttgtctgtgatggcctctggtatggcttttcatcttacacgacaagataactctcaagaattcggcagtcaatccaggccctcattctttggattcattgatagcctaaccacatgctgccaaatgttgtcacaagagggctactgatgcttttaaatctgcaagagaatcagaggttaacataatatcatcaatataatggaataggtggattccctttggacatttccagggagctcaatctatgacagcaagaccatgacatatagtggggctatgcacacagccctgtggcaacactgtgaaagtccactgtggcctcttccatgtgaaggcaaactgtttctgactctctggagcgatgtcaatggaaaataatgcattagccaagtccactgcatagtggtactgtcccaattccatcgtcaagcagtccatgaaatccatgatagatgtggcagagctgccaagccatgtgaaatayccatccccagaatgcactctggtatgggacagacatatgcagtgtataactatg

SEQ ID NO: 952465 - DNA, 620 bp, Homo sapiens
cagttgcctggaattggggcagataaaatctayaaatcataatttacgttgtcaagaaaacctagttcactgttttaataattattttttactaagaagtaaaagccagattgattttgacagtttttataaggacgataatatcagaaacttatcagatgattattatatatatatttcacagaagatatatatatatatacacatagatggatatagataaatgaaaagttctacagttagaaaatcatttgttatctctaataaaggtgtgaagagaagttcaaataactataataaggtaaaaaatatatattacatttttacctggcatcagaattttgttaggtagtaggctgtctttttttaaaaaaaagtaagtatcttgccaacctcccttgaatcggcatactgagatccaaaagatattatttggaaatcaattaaaaaatagaaagatagcctaagaaccataaatttgaggttggagaacctggagaaagaggaatgggaatgggattagattaattaaactatggatgtggcttgaatttaaagtctggagacctggagaacatgatcaggaaagaaattgccactagcagtttggtcaaaagact

SEQ ID NO: 952466 - DNA, 620 bp, Homo sapiens
ccatcattttacagtatttttgctaatatttaatgatcagggaggcaacaatactcaagtgaggagtggcattttctggaactggactgtgcaaggcctctttggctatataccttaatccctgtgytgatctcactctactttttgccatgtctctggtcagttctctttcccagccaccctttcaggaggtttctataccatctccaggtttctccttagccttcactttcagcacatagtttaatttctaccacacaagtaagagagaaagtgggctgggatccacattctctgttttctggttctctacttcctatgtcacgtcaccctttctatcttcatactttttctttccttatggtctcagaaggtctttattcctacctaaagctaatcagtctgctagtattctcatgactattttctcaaggatcacactccatcatcaattatttactccctttcttctatttctaacttcttttcaaatggtttctttccctttgcctataaacacttgaatgtcttccatggtcataaagttttcccttgtctctctcattctctgttgctactgtcatatagctcctcagtcaagctacctgaaagactagtcc

SEQ ID NO: 952467 - DNA, 736 bp, Homo sapiens
gattcaaaggaagcatgaaagagcattagcgaaattcataggaacaaggaacactttttagagagcagaagaaaagcagtagatgttcttgattctatacaatgcaacaaatgttgccrtgtgaggcactgggattggcactgcaggaaatcaaacacaggaaagattgttattaggcatggggcgtggggaatgtggggaggggaagcaagacccgcacaaaccatgtctcactccctcagttctctgcctcaatgttacagtacaagaaaggccatcttgtgcacttgataaaaaatgaccaccgtgctgcctgagtcatggtcccacaggaaacagaaagtacgttccatagggattttgaagagcattcaggaaaaggtggaagcaggaaaagggaactaactagggacactgaggctcccagggaccagcgtcattgagaagccattcccaatcctgggctggaggggtaggagaagggaatggtgtatgtgcatctagttgcaagtggatgatggaagaggctcttctggatagagctgtaatcctcgagggatgcagccctgcctgaactgagggtgggaggaagtaaggaagacgctcctggatctccctcccctctcaccagtggtgtattggaactggcccataccggtttatgaggactgattgtatgcagtgcattctaactccagtgtcaagatggcagtttggaatctctcatggtgggagt

SEQ ID NO: 952468 - DNA, 597 bp, Homo sapiens
agttgtccaaaaaattagaagatcaaattcaacaacgtataaaatgaattacataccatgatgaagtgaaatttatttcagacatacaaggtggttgaacattcaaaaatcagttaatctaaactattacaggaacacaccaaaaaacaggaaaaactgataattcttatctatagatgcagaaaaatatctgaaagatttcaacattcgttaataataagaacacctagcaaactagaaatagatatatactaatacaatgttcttcaacttgtatttgtccattctcacatcactatgaagaactacccaagacagggcaatttataaaggaaagagttttaattgattcacagttctgcaggctgtacaggaagtgtggctggggaggcctcaggaaacttacaatcatatcagaaggtgaagtgaaaaaaggcacatcttatgtggctggagaaggaggaagcaagtgaagggggaagtgctacacacttttaaacaacmagatcttgtgagaactcactcactatcatgacagcagcaaatggaatatctgcccccatgatccaatcacctcacactggatgtctcctccaa

SEQ ID NO: 952469 - DNA, 688 bp, Homo sapiens
attccgagttttccacccctctgaattcatgctgatactgtttgaatattaggcctctttatgaataatattgggtctctgcagaagctgttttccgcaacctgcacttgttgatgctcttcaacaaatttggaaggacaggaattggaaatcatgtggctaagatcatatggtcaaggaccttgggcatcttcttcattggtgtggattcagcagttcacaaagtgcctggctaaaagtagaggttcagtaatattcctgaggaagcatgaacaaggagatggtgaagtaatacagaaaaaggggggaagccaatacagggtgcgtttctgagcaattgagacaattttactgggggttctgggaggccatatcacacacatctcaaaactatctctctcccccagcagggaggaagctagggcatttatacttcatctcccatccacctggcctgtccctcaagggtcaagaaatgaccattgggtggagagtcagtaagatcctggaggcacatactggcatggttggtgccaggggacaagggtagggcaccaacagggtctgctayagaggaagagagaagcagagcaaagggcaagaacaaaggagaagctagagatgagctgagtgtgtgtgtatgtgtgtttgctcatgtgtgttcgtgtgtgtagagtagtgagatcca

SEQ ID NO: 952470 - DNA, 497 bp, Homo sapiens
cactgtgttctcccaggcaaagccgggcttttcctgtctgcaaayatcttgtatcaaaccctggagctatttattccttaagatctcagatttttcttttccagtactaaactctttggtctatgctcgtgtagttactgttggtcaggtcccccgtctgctttgcctcctgtctgtggctagtgacaggccggggtctgggagccaaggaccacagctcagcccgaagtgggggagctgtggggctgagagcagggagtgggtacctgccccagccaccagcctccctccacagacagcatcattaattcttcatcctcccgacaaccctgataacagccacggtcttcatccccatctcccagatgaggacagtgaggttcagagaggcagcgccatgcctaggacagcgcagcctctatgttgctgagccaggacaggcccaggaagcctgactgtccatccagggctcaatgagatgacatttctgttgtcag

SEQ ID NO: 952471 - DNA, 416 bp, Homo sapiens
atttaaacacgggtttcttaatttataagtatatgtggattttctattaactatctgttactgatttctaccttaacttcattgttgtcagagaatgtattctatatgatttcaatacttaaaaaatatgagatttgccttatgacctggtatatcagcaacttttgtaaatattccatgtgtgcttgaaaagcatgagtttctgcagttgttgggtatggtgttctaaatatgtctgtgatggcaatgaaaacgcgccactcagctcttctgctaaatatgcrtagagtggtcatgaacgtgtgcaactcagctctcctgctatggggtgcacagttgactggcagccctaaccactattcctttggatcccacaatgcatttgtgctgagaccactcttcctctgagctgcttc

SEQ ID NO: 952472 - DNA, 511 bp, Homo sapiens
cagggagacggttaggcctccggatggctgtgggcgggcctgactgatgtcaggccttccacaagaggtggtggagcagcgtcttctctaactcccccagggaaagggagtctccctttcccggtctgctaagtaacagttatcttcccaggcactggcaccactgctagaccaaggtctgctaagtaacgggtgccttcccaggcactggcattaccactagaccagggagccctctagtggccctgtccgggcatgacagagggttcacactcctgccttctggtcacttctcaccatgtcccttcagctcctatctctgtatggcctggtttttcctaggttataattgtagaacaaagattattataatattggaatagagttatgctataaactaatgattagtaatatatataatcatakctataatctatttctagtataactattcttattctatgtattttctttattatactggaacagcttgtgccctcggtctcttgcc

SEQ ID NO: 952473 - DNA, 511 bp, Homo sapiens
cagggagacggttaggcctccggatggctgtgggcgggcctgactgatgtcaggccttccacaagaggtggtggagcagcgtcttctctaactcccccagggaaagggagtctccctttcccggtctgctaagtaacagttatcttcccaggcactggcaccactgctagaccaaggtctgctaagtaacgggtgccttcccaggcactggcattaccactagaccagggagccctctagtggccctgtccgggcatgacagagggttcacactcctgccttctggtcacttctcaccatgtcccttcagctcctatctctgtatggcctggtttttcctaggttataattgtagaacaaagattattataatattggaatagagttatgctataaactaatgattagtaatatatataatcatagctataatctatttctagtatmactattcttattctatgtattttctttattatactggaacagcttgtgccctcggtctcttgcc

SEQ ID NO: 952474 - DNA, 639 bp, Homo sapiens
ctgccagcccccggattcccacacatgcagacaygtacacacgtgcacgtacacacatgcatgctcgctaagcggaaggaagttgtagattgcttccttcatgtcactttctttttagatattgtacagccagtttctcagaataaaagtttggtttgtaagttctgatccactgcagtccttcctgcatcagataccacagaaaggctggcccattgccccctcctggtcttgggactgaggactcttcctgcccagattcagagtccgaaggccaggaggctggaaaagaaacgactgtcctcccgtgggacaaactgccaccttggccgtcgtgtcctcgtttggggagcctcagatccgaatgacataggcgtcgctgtggcttaggtgtcgcacccacttgtgggggttggcattgccgcatgcgctgaaggccagcctgaggaatcggacctggaggccagagcacgtgtgccggggaagctcgaaggagagactggcagggccagccccagaggagaggccgaggtggagagcccatggctgggaggtcctgggggccctgggacgtccatctgtgaggggcagaggcagggagaggaaggagggcaagaagctgaccacgctgggggaacc

SEQ ID NO: 952475 - DNA, 639 bp, Homo sapiens
ctgccagcccccggattcccacacatgcagacatgtacacacgtgcacgtacacacatgcatgcwcgctaagcggaaggaagttgtagattgcttccttcatgtcactttctttttagatattgtacagccagtttctcagaataaaagtttggtttgtaagttctgatccactgcagtccttcctgcatcagataccacagaaaggctggcccattgccccctcctggtcttgggactgaggactcttcctgcccagattcagagtccgaaggccaggaggctggaaaagaaacgactgtcctcccgtgggacaaactgccaccttggccgtcgtgtcctcgtttggggagcctcagatccgaatgacataggcgtcgctgtggcttaggtgtcgcacccacttgtgggggttggcattgccgcatgcgctgaaggccagcctgaggaatcggacctggaggccagagcacgtgtgccggggaagctcgaaggagagactggcagggccagccccagaggagaggccgaggtggagagcccatggctgggaggtcctgggggccctgggacgtccatctgtgaggggcagaggcagggagaggaaggagggcaagaagctgaccacgctgggggaacc

SEQ ID NO: 952476 - DNA, 571 bp, Homo sapiens
tccttaaagccttaacagaaatgactgcattttggtttggttttgtttgtygggacatagtgcatgagcttagtccaaaacaatggcctcccagaatcttgtttaaaaaattccccctttttggtcaggttctcacttaggtgagagtgtaaccaaaacttagggccttagcgacactcttagttatgatcattttggatttctggtcttagcacattatttatagggttacggtgtcctccttgttgcacatttctttcaattcttatcattccagttgaagagagaccatatgacattctagagatggctacaagaaagcatgtaaaatctttgagagaatacagcatgccagggagactattattataattttgggaggataataccaagagttcagagtatgctccttactcagggtccccataaaccaagccacctaaaattaaatagattcaagaatgagctagatgaagagtctactcacttgactaagtggtcttttcattaatcccctaaaactgaatttttaaaatctgcatttaatctatttctccataggccacaagtg

SEQ ID NO: 952477 - DNA, 729 bp, Homo sapiens
cccctctgtaccaaatgctgaatcakaaaagacacctagctttctgataatcagattttcctagagcctgaacagggtgaaaagttattgaatgcagaatatttttactagaacacgcaagagtgtcttttagaccttacgatcaaaatgtccaaaaggataaatctgaatattaattacaaaacttgtactacttcaaactttttattatattctacacctctactgttttcttatggttatcacaagtgctaacaaaatattagcattcatatcggtaaaatcaattggcaagtccattatcgacatttatttcaaatgcgtatgtctgaagtatgtgttactcatcccttaaattaacatcttccactttgatgggacaattggacagaccaggccaacacttttttcaccagtaattagtaactctattttcacatttctggagagagaattacactcaaccaacatttctacatcctgaatctgctaatctcagcaataagaccttcctttaaaagacatgcagtgtcttgaccaaagagtaatgatagaaaactaattcacaaacttggtggtttttctagcaaatgagagcagtttcatatttagtaaagtctatatttttgttgacagtacacaccaaaatacatacgcattaaaatgcatacaagggtgtatatatttctatttcctaaaaggaaattcagagatacaaaaacgtaatta

SEQ ID NO: 952478 - DNA, 619 bp, Homo sapiens
ataaacaacttcagcaaagtttcaagaaataaaatcaatgtacaaaactcactagaattcccatacaccaacaacagtcaagccgagagccaaatcaggaaggcaatcccrctcacagtgccacaaaaagaataaaatacctaggaatacagataaccagggagattaaaggtctctacagtgacaactacaaaacactgtacaaacaaacagagataatgcaaacaaatggaaaaacattccatgatcatgaatagtaagaataaatattattaaaatgccatactgcccccggagcaatttacagattcaatactatcctatcaaactaccagtgacattcttcacataactagaaaattctatttcaaaatttatatggaaccaaaaaagagccaaaatagccaaggcaaacctaagcaaaaagaaaaaagcaacctaacaaaaagaacaatttgctaccaaatttcaaactatactacggggctacagtcaccaaaatagcatgatattgtacaaaacctgacatatataccaatgaaagagaatagatagtaaacagacaacctacagaataggagaacatttttgcaaactatatctgacaaagatctaatat

SEQ ID NO: 952479 - DNA, 619 bp, Homo sapiens
ataaacaacttcagcaaagtttcaagaaataaaatcaatgtacaaaactcactagaattcccatacaccaacaacagtcaagccgagagccaaatcaggaaggcaatcccaytcacagtgccacaaaaagaataaaatacctaggaatacagataaccagggagattaaaggtctctacagtgacaactacaaaacactgtacaaacaaacagagataatgcaaacaaatggaaaaacattccatgatcatgaatagtaagaataaatattattaaaatgccatactgcccccggagcaatttacagattcaatactatcctatcaaactaccagtgacattcttcacataactagaaaattctatttcaaaatttatatggaaccaaaaaagagccaaaatagccaaggcaaacctaagcaaaaagaaaaaagcaacctaacaaaaagaacaatttgctaccaaatttcaaactatactacggggctacagtcaccaaaatagcatgatattgtacaaaacctgacatatataccaatgaaagagaatagatagtaaacagacaacctacagaataggagaacatttttgcaaactatatctgacaaagatctaatat

SEQ ID NO: 952480 - DNA, 605 bp, Homo sapiens
tgaatgtcttcctttgagaagtgtctgtttaggtcctttgcccactttttaatggagttgttttgttcctgtaaatttaagtttcttgtagtcgctgaatatcagacctttgtcagatcgatatattgcaaaatttttctcccattctttaggttgtctattcactctgatgatagtttcctttgctgtgcagaagctctgtagtttaattagatcccacttgtcaatttttgattttgtctcaattgcttttggcattttcatcatgaaatctttgcctgtgcctatgtcctgaatggtattgcctagattttctaggatttttatagttttgggttttcatgtaaatctttaatccatcttgagttaatttttgtataaggtgtaaggaaggggcccagtttcaattttctgcgtatggctagccagttctcccagcaccatttattaaatagggaatcatttcccccattgcttgtttttgtcagttttgctgaagatcagttagttgtaggtatgcagtcttattyctgacttctctgttacgtttcatttgtctatgagtctgtttttgtaccagtaccatgctgttttggttattgtag

SEQ ID NO: 952481 - DNA, 742 bp, Homo sapiens
ctcatctctcagttctgagtgtggagtcctctcccctgctccagaccyaacactccaatctccagcctgagactctaatgccagtggcagttgctgctgctaggttgctaaattcttcccagcttgatatgaggctggattgagaatgatttcctcctatcagtttccagatctgagaacatgcatagggaacctcctagtgccttcacttctcacagtctctcacagcctttacttctcacagcctctcctcatgttagctttaggtattgggagagacaatgtgctttcctgtggcctgggttgcactgttccccagtggaagggtgaatcacagagggacactctcttcctctttcctctttggaactttactcacagttctcagccatatcctgttgtgcaggctgtctgaccaacttctcttccccgtgatgtaaagtgtcctttactttttggttgaattcccatgatccttcatgaataaagtttcacagtgtgaatcactacactaccaggtgggtgaagcatgctggagaaccttctaatctgccatcttggaagaaaaacaatattgagtaaggaaattgaataattgattaaaaacctctcaacaaagaaaagcacaggacctgatggtttaattggtgaatgatagtaaacatttaaagagttaacaccaatccttcttaaactctttcaaaaaatggaaaaagagggaaccattttcaactcattttgt

SEQ ID NO: 952482 - DNA, 576 bp, Homo sapiens
gtactatgttgagtagaagtgatgaaagtgggcatcctggtcttgctccagttctcaggaagaatgctttcaacttttttctgtttactataatgttgcctgtgggtttatcrtagatgacttttattaccttaaggtgtgtcccttctatgccgattttgctgagggtttaatcctaaaggaatgctggattttgtcaaatgctttttctgtgtctattgagatgatcaagtgatttttaattctatttatgtagtatatcacatttattgacttgcagatgtcaaaccatccctgcatccctggtatgaaacccacttgatcatagtggattatcttttgtatatgctgttggattctgttagctggtattttgttgaggatttttgcatctgtgttcatcagggatattggtctttagttttcttttctattttttttttttgttatgtcctttcctgtgttttagcattagggtgatactggcttcatagaataattgttggaggattccctctctatcttgtgggatagtatcaataggattggtaccaattcttctttgaatgtctgaca

SEQ ID NO: 952483 - DNA, 610 bp, Homo sapiens
aatgcttttcctttcctcaaaacccagtgccataatgttggtttctagcacattgggcagtgagccttttttgcttggtaacacctagagtagtcacgctcttagggacagaaagtagaagggtagttgccagggggtgggaagaatgaagaatagcaagttgttaaatgggtatagcacttcagttttgcaagatgaaaagagttctggagatggatagtggtggtagcacaacaatgttaatgcacttaatactactgaatttttttacttaaaatatttaagatggtattacggactgaattgtgtcccccctcccaagttcatatattgaaattctaacccctattaccttagaatgtgactgtatttggagttaagaactttgaagaggtaattaagtttaaataagatcataaaggtggaacttataagaaggaggaagagacagcagggatgtgcacatagataaaaggctatgtggggaaataacaaaaagatgtctgctttcaacaacgcagggaggcctcaggagaaactagacccactgtcaccttragctttcacttccagccttcagaacttgagaaaataaattgctgctattgaa

SEQ ID NO: 952484 - DNA, 596 bp, Homo sapiens
  misc_feature 409, 453: n = A,T,C or G
atttttgtatcattggtagagacagggtttcgccatgttgcccaggctggtctcaaactcctgggctcaagcgttcctcctgcctcagcytctcaaagtgcagggattacagggattacaggcatgtgccactgcacccagcctttttctcattaagcttttacctcctagttttagcttccattgaggagtcttgcctgaaagaagcatgtactgtggtgtgtttttctaattctgtattccttctgcatttgactgaaaggagcttccctctttccttgacttatttattatttgcctttagagacaggtccttgccctgttgcccagcctggagtaagcaatccttctgccttagcctcctgagtagctaggatactactactaaagtgcatgtccttctttgtantatcagtaaagaagattgatggattcttattttactcagtggantgcggttctttaccatgattattttgatactcatggtgtcccaagtttggccagtgggagacatgtcagactggtcccgtgtccttttgacttgcttttgtcattctttgagcatgtccatatttcctggcacagcactatgt

SEQ ID NO: 952485 - DNA, 635 bp, Homo sapiens
tagcacgcgctcatagtcctagctactcaggaggatcacttgagcccaggaattttaggctrcagtgagctatgattgcaccacggcacaccagcttgggcaacaaagcaagacccccacctttaagaaaaaaaaattgtggctgggcgaggtggctcacacctgtaatcccagcactttgggaggcagaggcgggcagatcacaaggtcaggagatcgagaccatcctggctaacacagtgtaaccccgtctctactaaaaatacaaaaaattagcctggcgtggtggcgggtgcctgtagtcccagctactcaggagactgaggcagaagaatggcgtgaacccgggaggcggagcttgcagtgagccgagattgcgccactgcactccagcctgggtgacagagcgagactccgtctcaaaaaacgaaaaaaaattgttcaaattacatgaacatgtatgacaaacttccactattgatacagtcctgtctgctaaaaatatcttttctattttctggcaaagcttccgaccttaagagtttagtagtcttataacattacagatgggaagaaagtcagtgtcattagaatatagtgtgctttgtttatttcaattttctacaggcaatgaa

SEQ ID NO: 952486 - DNA, 733 bp, Homo sapiens
  misc_feature 623: n = A,T,C or G
ccagctaatttttgtatttttagtagagacagggttttaycatcttggccaggctcgtcttcaacttctgacctcaagtgatccaccttccttggcctcccaaagtgctgggattacaggtgtgagccaccatgcccggcctgaaacctccagtttttaaatggtgataacaaatttgggggaaaaaatttaactgtattaaccaaacgcaattcatttgtatacctatgggttgtctttgatagaatctgaccagagcctgattgaagaatgtgatatcctggatctgaagcattttttgtgcagaacaggtgatagtttgagttgaagttgaaatttcctttaaaatggccatttgtgtaggtcacaaaaagtcacacggggctttagaagcaaaccgtaccagtgtttctcaaactccagtgtgcacataaatccactgggggatcttcctaaaatgcagagcctgagtcataggtctgggctgggccttgggattctgcattgctgacatgctcccaggtgatgctgctggtgctggtgcatggaccacgctttgggtagcaaagcattagaccatgttcatcactggtggttttgcaaactccattaagacccacccncacattgtcgttcctttttctgaatccaagttttgtttttgtttttgttttctgagacagagtctcgctctgtggtccaggctggagtgcagtggtgtgatcgtggctca

SEQ ID NO: 952487 - DNA, 692 bp, Homo sapiens
gagagaaactgtggggctttctggaaagatgcaccattcgttataaaatgcaggattataaaaaacatgcagaggtttaaaatgagagagagagagagagcgagagagagacagcaagagagagagaaggmgagagagtgcagtccaaattaaaagtcacaagggtagactttctgaattatgggttgtttatttgagatcaagctgtttctcatgtggccaactcaatgcggcttgctctagggtgagtagtggctgagagttaattacttaatgatggttaatgattctcctgggtgatactgggaggtatatgcaaattaatactaattgctacaactcagcagcagctaccctttgcggagcttttgaggtgcattgggcactgggtggatgcttgatgcgtgttctcattttatcctcacgagaactgacagaggaaggcatcaacaaacctaccacttttcttgcagacaaggaaactaaagttcagagacgttgttcggcttgattaaagtcgcatttaataagtggaagagctgtgtcaggccatgggtgcctctgactttaaatctcttgctgttaactgtactcttcctgtactaaaatcacttaattcctaagaaaactttgagcaaggcctcttgggtgatctcaacttccaagtgaattacttagggttagaggagagt

SEQ ID NO: 952488 - DNA, 601 bp, Homo sapiens
gggaggcagaggttgcagtaaaccgagactgcgccmttgcactccagcctgggcaacatgagcgaaactttgtctcaggaaaaaaaaaaagaaaaaagaaaaggaaactaagccacaaacacacgcattagcctaggcctacacagggtcaggattatcaatattgctgtctttcacctctacatcttgtcccctgtaaggtcttcagaggcagtaacaagtaacacacatggagctgtcatctcccatgataacaatgccttcttctggcatatctcctgaaggatctacctagggctgtttcacaattcactttctttttataaatagaaggaatacactctaaaattacaatagaaaataaagtgtagtacttatataaaccagtaccatagtcatttgatcgttatcaagtacagtactgtgtactgtatataattgtgttatacttttatatgcagtataaaatgcagtaggtttattgacaccagcatcattacagacctgtgagtaacatagtgtgctatgatatcatgatggctaagatatattaggcaataggaatttttcagcttcactctaatcttatgggaccactgtc

SEQ ID NO: 952489 - DNA, 568 bp, Homo sapiens
ataactcagaaacagaaagtgaattattgmgtgttcttatttacattaagctaaacaatgtgcacacatgtacatagagagcagaataatgggcattggagaccaggaagggtgggagggtgggaggagggctagggatgagaaattactgggtacaatgtgcattattcagtgatggctacattaaaagcacagacttcattgatatatatgcaatacacccatgtaacaaaatgatacttctaccccctaaatccattaaaattttttaaaaatttttaaaataaaggatgagtagaagtttgccaggtggagaagagcagagcattctaggcaggacaagcaaaggtactgagatgaagaagtgcatggctgtgcagcagaatatctggtattgctagagcatcaagaggttaaagacatgagaggccgggcgcagtggctcacgcctgtaatcccagcactttgggaggccgaggtgggcggatcacaaggtcaagagatggagaccatcttgggcaacatggtgaaaccccacctctactaaaaatacaaaaattagctaggc

SEQ ID NO: 952490 - DNA, 472 bp, Homo sapiens
tttggggatgcagaagtcttatgtacaaaatatctatttatatccccacatcttacccgtttctgattgtttttttcttcttaaactttgaatgaaacctatatgtgaagctttgaatagcactttaaacaaagcccagcaacccctctccacctataccatcatctatgactatttcaataactcctataccagacggaagttttggtagttttagaatggcaaataacgttaaaaatcattatgaataaatattaatttacctaaacacaggtttagttttttgtttgaagaaaatactttttctttgatgagttctctatttagtaattggcctgtgttaaaaaagaattattttcaaaggtttttaggtttctatttcccctgggagtttatcttttagtgaaacrgagaaatacctagggaagagtttttttttttttttttttttttttttttccggaacagaacc

SEQ ID NO: 952491 - DNA, 485 bp, Homo sapiens
ccatgttcccacatggagtccctggtcacagtcacctgcttgcttcttaaggatgtgtccccaaagccgcacatttcccactgggctgagactcacagcacctcagctcaccccacctgggtctcgctggtcaccttcccaccatggggtttgccagatgctttctggacactgtcctccctccctggcacaagccctcaggttcctcctctcctctgcagtggctcctgcggaatgaggtgcccccgtgtgctgtggccgccatccagcccaccagcgctaaggggccaacacattttctcatcttgtgctcaaattcctgttcaatcatgtgtgctccttcccaggtgaacgggacagatcactggctgtgagcacagcccgtctcccccrgctctcacagattcctctgtcatccctgaagttccctacaggtctgaactctgcttcactgacctcaaatccatccacacacttgtcatttc

SEQ ID NO: 952492 - DNA, 684 bp, Homo sapiens
catggctggggagtcctcaggaaacttacaattatgatagaaggcgaaggggaagctggagcaggaggaagagaaaaaggcgggaggtgctacacacttttaaacaaccagatctcatgagaactcactcactatcaccagaaggggaaaatctgccccatgatccaatcacctcccatcaggtccctctccaaaaattgagaattacgatttgacacgagatttgggtggagacacagagacaaaccatatcattccacccctggcacctcccaaatctcatgtccttctcacatttccaaacacaatcatgacttcctaacagccccccaaagtcttaactcattccagcattaactcaaaagtccaagtccaaagcctcatctgagacagacaagtcccttccacctatgagcacgtgaaataaaaaacaagttagttacttcctagaaacaatgggggtaaaggcattgggtaactgcttccattccaaatgggagaaattggtcaaaacaaagaggctatgggccccatgcaagttcaaaaaccaacagggcagtcattaaatcttaaaacttcaaaatactctcctttgactcmatttcttgcttccaggctgcagtggtgcaaggggcgggggtgccaaaggacttgtgcaactccatccctgaggctttggagggt

SEQ ID NO: 952493 - DNA, 608 bp, Homo sapiens
tttacttctgtattcttctaagaggtttatggtttccccttataaatctagttcttycatctatttggagttaattcctgtgaatgatgtgagataggggtctagcttcattcttttgtttgtggacatccagttgtcccagcttcatttatttgtattaaggcttttaatcttctcatccacttccctccctccccactccagcccttggcaaccacgaatccgctttctgtctccatggatttttccattttggacattttatataaatgaaatcccacaatatgtgctcttttgtgactggcttctttcacttggcatgatgtttttgaggttcgttcaggttgttgcatgggtccgtactttattccttttcatggctgaataatattccattatgtggatagtctattatacattttgtttatccacttaactgttgatgggcatttgggttgtctccactttttggctattgtgagtggtggtgctgtgaacatttgtgtacaagttttggtgtgaacatctctttcaattttcttgggtacctaggagtgagattgctgggtcatatggtaaactctatggttaactgtttgagaactgcc

SEQ ID NO: 952494 - DNA, 604 bp, Homo sapiens
aaatgattccgcttagtgagagtagcatktgaaaagctgaaataggccaaaacctaggcctcttgcccaaaacagtcaagttgtggatgcaaaggaaaagatcctgaagaaaattaaaagtgctattttggtgaactcatgaatgataataaagtgaaacagccttactgctgatatggagaaagttttagtggtctggataagagatcaaaccagccacaacatttccttaagacaaagcctaatccagagcaaggccctaactctctttaattctttgaagcctgagagaggtgaggaagctgcagaagacaaatttgaagctagcacaggttggttcatgaggtttacggaaagaagccatctccatgacataaaagtacaaggtgaagcagtaagtgctaatatagatggaagctgcaacacgttttccagatcttgctaagttaattgatgaaggtagctacactaagcaacagattttctatgtaaatgaaacaaccttctattaaaagaagatgccatctaggactttcataggtagagaggagaagtcaatgtctagcagcaagtcttcaaaggacagactgactttcttgttagg

SEQ ID NO: 952495 - DNA, 783 bp, Homo sapiens
cggaacttagttcccacaagccttgccacctcaggctaaagtgctttggcgctctaaataaaattgacrgatggactaggtccataaagactgaaatttttaggcaagtcctagtactgaactgggcccacagctagtagactgtagggatggcacacaacctactgagacaccagcagaggtggcaaaaggaatgctggcgtcacccctctcctaaccacaggctgcacagctcacagctccaaaagataccatttccttctgcctgaggagaggagagggaagagtggggaggactttgccttgcatcttggataccagctcagccaacagcagaatagagcactggtcagagtcgtgaggccccctttcgaagccctagctcccagatgacatttctacacaccccttggaccagaagggaaaccactgccttgaagggaagaacccaattctggcagcattcatcacctactaactgaagagtcgttgggcccgaataaccagcagtgatacccaagtactacgttgagggcctttggtaaaaccttgagttgtgctagcttcaagtgagacttagcacattttcaactgttgtggcttcagggtgagacttcttttgcttgagaaaagcagagggaaaagtaaagggcactttgacttgcatcttaggtaccagcccaaccataccagggtagcgtaccaagtagggacttgggtaccctgattccaggacttggttttggacagcatttctggacctgccctgggccagagggaagc

SEQ ID NO: 952496 - DNA, 475 bp, Homo sapiens
tggcaactaggaatatacttcagacctcttgctcctggcaacagtgatagctttccagcacatgctggcattacctacaatgacttctaggaggaaaaaagagagaggtgttctctttaaaagtgacagaggtattcagtctcaaaatcaagacatctaaaattaaaatcatcaattttccccaatactagcattccttcagtactctctctccttctatcactgctctcttagacacctgggtttttggagttatcctttactcctccttccttctggccttctgtgtacattctccactcctttaaaactaggtctcctcagccaggtccagtggctcacacctgtaatcccagcattttgggaggttgagatgggcggatcacttgaggttaggagtttgcgaccagcctgaccaayatggtgaaacctcgtctctactaaaaatacgaaaaaattacttgggtgtaatggt

SEQ ID NO: 952497 - DNA, 475 bp, Homo sapiens
tggcaactaggaatatacttcagacctcttgctcctggcaacagtgatagctttccagcacatgctggcattacctacaatgacttctaggaggaaaaaagagagaggtgttctctttaaaagtgacagaggtattcagtctcaaaatcaagacatctaaaattaaaatcatcaattttccccaatactagcattccttcagtactctctctccttctatcactgctctcttagacacctgggtttttggagttatcctttactcctccttccttctggccttctgtgtacattctccactcctttaaaactaggtctcctcagccaggtccagtggctcacacctgtaatcccagcattttgggaggttgagatgggcggatcacttgaggttaggagtttgcgaccagcctgaccaacatggtgaaacctcgtctctactaaaaatacraaaaaattacttgggtgtaatggt

SEQ ID NO: 952498 - DNA, 586 bp, Homo sapiens
caccactaaagaattttttaatgtaaccaaacaccacctgttccccaaaaacctattataacaacaacaaaaaaattttaactgccacaaagattatatttgcttcaatataaattaggaagtttttccgyatttttttattttcagaaattacttttataaaagagacttaatgatgtagataagatagaaagttccgttcctggaagtttgttattattcagcttttaattcagcatattaaaggtaatgacagaaaccacaattacttttgcactaaccttatataaaccatctgtgcattagtggaggaatattttaagtacctttcataataattattactctgttcaagttttcaatttcagggggacgattttggtattttgcatttttcaagaaatgtagatatttcctttaggctattatacttattaacttatatttttataaaataatttttaagtattgaagtattttatatttataagtagttatcccttttatattctttcttctctttatttgaatatttttacttttttaggtttttttgtagaattttatctgtcattctagcttttta

SEQ ID NO: 952499 - DNA, 486 bp, Homo sapiens
ccatttttatatgttcttttgagaaatgtctgtttatgttatttgcccacttttcgatagtattgtttgtttttttcttgctgagttgtttgagttccttgtagattctgaatacaagttctttgtcagatgcctagtttgcaaacattttctccctttccatgggttgtttgtttactctgataattatcttttactgtacaggagctttttaaatttaaccaggtttcatttatttattttcatttttgttccatttgcttttggagtcttagtcatgaattccttgcctcggccaatgtccaaaagagtttttccaaggttatcttccagaattttttatggttttaggtcttaggtttaagtcttggatcatyttgagttaatttttgcttaagggatccagtttcattcttctacatgtggctagccagttttgctagcatcatttattaaatggggtgtccttccccagtttacattttt

SEQ ID NO: 952500 - DNA, 597 bp, Homo sapiens
gagaaacagtgtaaaccagcaatgtaaacaagagcrgggtatgtatgagtagttcagaacagtgaataggagtatgactagaaagaagatagtagggatgacaagttttttgaggcacagtctaagttagtctggtgtctggaatgagactgaggcctaataaaaaggagcgtctatacaggagctcaaatgggctgtaccctgtagcattctgaggacaggtctgacttctgagaagggaaagtggtaaaagtattgtccagtcctttttaagttggtggctgaacttggtgaggtgtgtttttaaaagaccactagtctgttctacttttcctgaagactgaggactgtaagggatataaaggtttcactgaatactaagagcctgaaaaactgcttggctgatttgactaataaaggctggtctgttatcagactgtatagaggtgagaaggctaaactgaggaattatgtctgacagaagggaagaaatgactgcagtggccttctcagaccctttaggaaaggactctacttatccagtgaaagtgtctacctagactaagaggtattttagttatctgactcggggcatgt

SEQ ID NO: 952501 - DNA, 575 bp, Homo sapiens
atattgaatagggaaaaagtgaaagcctttcctctaagatctggaacaagacaataatgtcccctttcaccactgttattcaacacggtactgaaagtcctcactagagcatttggataagagaaagatatttaggccatgctgaatggaaaggaagaagtcaaatgatcctgtttgcagatgatatgaacttatattcgggaaaacctaactactccacctgaaaactattataactgataaacaattcagtaaagttgcagaacacaaagtcaacatacaaaaatcagtatcatttctatatgctaaaagaaaataatctgaaaaaaatcaagaaagtaatctcatttacaatagctacaaataaagttaaataaccttgcatttaacttaatcaaataagtgaacaatctctataataaaaactataatgatggaagaaatggaacaggacaaaaaaaaaggaaagatattctatgtcratgggctagaagaatcaatattgctaaaatattcatactacccaaagcaggttacgagtcaagacaatccctagcaaaataacaatgacattc

SEQ ID NO: 952502 - DNA, 575 bp, Homo sapiens
atattgaatagggaaaaagtgaaagcctttcctctaagatctggaacaagacaataatgtcccctttcaccactgttattcaacacggtactgaaagtcctcactagagcatttggataagagaaagatatttaggccatgctgaatggaaaggaagaagtcaaatgatcctgtttgcagatgatatgaacttatattcgggaaaacctaactactccacctgaaaactattataactgataaacaattcagtaaagttgcagaacacaaagtcaacatacaaaaatcagtatcatttctatatgctaaaagaaaataatctgaaaaaaatcaagaaagtaatctcatttacaatagctacaaataaagttaaataaccttgcatttaacttaatcaaataagtgaacaatctctataataaaaactataatgatggaagaaatggaacaggacaaaaaaaaaggaaagatattctatgtcaatgggctagaagaatcaatattgctaaaatattcatactacycaaagcaggttacgagtcaagacaatccctagcaaaataacaatgacattc

SEQ ID NO: 952503 - DNA, 623 bp, Homo sapiens
cacaacttactcaggactttctgctttatcctttactttctctttcttaagtacccagtcattttactttaggacacaaatgtacaacatgaggttctttgtcatatacaagtatactctctttttttaaaccttccttaccgaaaatacatcattatagtcataactttcttcacatctctctctctcctccttgctgctttatttctagtctgtgccttttaaaacgacctttaaataatttctgaattagacaaaattattatttttttgaaaaagaacacatctttatgccattcttaaagctttttctcatccaaaacacatatttagaaatgactcacacatttaatgaatatctatttaatttaacataatataacatatcttcaaagtttcatattacatgacgagttcatttatagatatttatactatttacattctcctaatttatttatttttagcagtttacctagattgtttatgagaactaagaggttaggcaaagttagtcaccatttcaagttacttccctattaacaatttttatagcatgtgaatatcagatgttcayctaagtaagaaccttaaagttaaaaatatgggtatcttgctgctac

SEQ ID NO: 952504 - DNA, 739 bp, Homo sapiens
gtttttgtcctctctgagcctcaatctcctcaactgtaaaatgggcatactatcacctgcttcctagggttgttgtgggggtggcaatgaatattggcaaactttgactgggycccctgatagtcactgtgttctctccaatgatgtgccctctactggagacacgtgatggtccctgtattccacatagagaaaaaaccgatgctcagagaggtgatgtcactcaccaagatggtattgtcaatggcagaagctaaacttgaacctggcctgccaggccctgaagactgtgctctcaacactgtaattcctcctgtcagcccagagatggccacacagccaacccttgattaacaggtacttctactgtgatcttggtgaaaaatattaacttttggtacttcctctgatgtgccccgggcaagatctcacttgcatggggaggaaaggagaacaagatagcaggtttccagttttcaacggggtgtggtggctcatgcctgtaatctcaggactttgggaggctgaagtgggaggatcacttgagctaaggaatttgagaccagcctgggcaacatagtgaagctctgtctctaccaaaaatttttaaaattagctgggggtgttggcccacatctgtagtcccagctacagtctgaaatgggaggatcacttgagcctgggagtttgaggctgcagtgagctatgattgcaccactgcactccagcctgggtgacg

SEQ ID NO: 952505 - DNA, 554 bp, Homo sapiens
gcatgaaagatttgaagtgaggagagaaggtggcaatagtcatctagaagggtgagtgagtgaaagggttatcgaaatgtagaattcttgggtggaactaaaggtctcctaggatatagtagtcatagaattgaaagtgaaaatagtgtgataacaagaactggcagagatcttaacttgagatctgtattagtctgttctcacactgctaccaagaatgacctgagactgggtaatttatggagaaaagaggtttaatagactcaaagtttcacatggctggggaggcctcagaaaacttacaatcatgacagaaggcaaaggggaagcaaggcatgtcttcacatggctgaagaaggaggaagagagcaaagggggaagtgctgcacacttttaaataaacagatcttgtgagaactcactcactatcaygagaacagcaagggaaaaatccccccccatgatccaatcacctcccaccagatccctcccccaacactcggaactacaattcaacattagacttgagtgagacttgagtgggaacacaaacc

SEQ ID NO: 952506 - DNA, 584 bp, Homo sapiens
cctccctgggacagagcttccagagggagggttaggctgccatctttgctgtttcatagccttcactggtgataactccaggtactggaaagtctgaggcaactacgaactggaatggaaccccagaatactacatcagccctgtggaaaagtggccagactgttacatgtgcccattcccatatatcctcacctggcagttctaggcctctagacacccctaaccagagctattggggcagtagcaactcagtgactccctggacagagcctcaaggggcaactgaaagtctctctgctactgccttttcagtgaaactgtccttgctgccctcaaactaataaaggagtaaagaccctaagtgccttatgaacaccttcaacaagttgctgctcacccaaggagaggaggccagtctgtctcccatgcaaccacgcaagcccaactgcttgtagccaaacagggaatccctggcttsagtccacagcacagaccctccatcctggcctgagtgcactgagcaattgctgacctgcatctctctggggtagagcccccaggagacaagcaaagtggtggggca

SEQ ID NO: 952507 - DNA, 722 bp, Homo sapiens
ttggcagaaagggcagaaagggctacgcctcccaccgggcaccacagagctttgtaagtggagaagagtttggacctcagacagataatgtggtttttagaggcacctmctatactgtgtttgctaaggacttttgaatgtgtgaacattttccccagcagtagaagaagcctggagggttactggaaggcagggagaggtgcccatgactgtgtgaaggagagctgtgactacttccatgacattttggataccaagtagcttgatggcgtagaactaacactggattctagtactagctgtagaaggttcggggagtccagggccactgaggcaggtgactttggacaagtcaccttcttaggcctttgtttcttaatatttatctcatgaggctgggtgtggtggctcacacctgtaatctcagcactttgggaaactgagacgggaggatcacttgaggccaggagtttgagaccagcctggccaacatggcaaaaccctgtctctactaaaaatacaaaaagtagccaggtgtgttggtgtgcacctctaatcccagctactcgggaggctgaggcacgtgaatctctttaacagggaggtggaggttgcagtgagacaaagcaagactccatatatttttttatacacacacacacacacacacacacacacacacacacacaccttatgaatggaaatctaaggaacggcacagg

SEQ ID NO: 952508 - DNA, 578 bp, Homo sapiens
tgcactcaaacttgggtgacagagtgagactctatctcaaaaaacaaaaacaaacaaasaaaattcattcctgaatgcaagaaagtgctcaaagactacaggagtcaagtaaagaacacaggaaccagcttgaaaaggcacccactagctagatctgaataatttgtgcatctaaaaatataatactgatcatcaagtattaaatataatacatttaacttaaaaatccatgaatccatattaagggggagtggaaggatgtgagggaagttcttgcaaaatgctatctattaaatgaaaaagggattacagaattagaacataatccctttgcaatcttcactgtaattaattcaggcaagaatcacctatgaatgcctagaagtacctgggaaaatattattggggaataggatattcacatgatctcacacagtatcatcccagagactatttactaatcacaaaaggacacaggtacttgtatatgggaaagctacagtagttaacacttaaccaaacaatcccattccacaatcaccagtagcagacatcctgtgccttctgatgggaagtag

SEQ ID NO: 952509 - DNA, 574 bp, Homo sapiens
tatgtttttaattttttttaaagttggacttcacgtttctctggtgcctccttgattagcttaatagtcgaccatctgaattctttttctggcaattcagagatttcatcttggtttggatccgttgctgataagctgatgtgatcttttgggggtaatcaagaactttgtttggtcatattactagaatgtttttctgggtccatctcatttgggtagactaggtcagatccagaactcaagggctgctgttcagattcttttgtcccatgggatgctcccttgatgtggtggtctcccctttcccctagaaatagggcttcctgagagccaaactgcagcaactgtttttgctctctgggtctagccacccagtggagctaccaggtggtactggggagtgtctgcaaagaacgctgtgatgtgatctgtcttcaggtctttcagccatggataccagcacctgctctggtggaggtagcaggggagtgaagaagactctgtgagtcttggttgtatttctgtttagtgcaccagttttgtgttkgttggcctccagacagaaggtggtgct

SEQ ID NO: 952510 - DNA, 593 bp, Homo sapiens
aagattgagccccagtcatytgcagttgtaatccacacattcactcaccctttattggcttttctctcttccttgccccaattcccactccctaacttgggtatcctgggatcacctcccaattaaattattggctcccaagtctttgtctcaggatctgcttttcaggaaacacaagctaagacatgccccaaatatgtgagaggaaaatccttaactatattcaaaaggaaagaaattccacgtttaatgatgtgttatttaatgggtcaagtggctcccatgttttgaattctggagcttacaggcagcactaaagtgggcaacagatgagtcttcccagacctcacccctttcaccactttcccctcctttgggctccactatacatggtgtataacatccagaatgtcttagagtatgattcctatcctttgtctccccctcttacctgtcaacacctcatatacagaaactgcaatttaatggctttatatcccaagcatatagcacagtatcttacacatagaaggctcttgataacttgctaaataaatgttgggtcaataactgggtcctaggactggctctgc

SEQ ID NO: 952511 - DNA, 638 bp, Homo sapiens
tgaggcccccattccaggccctaactcccagatgacatttctagacacaccctaggacagaagggaatccactaccttgaagggaaagacccagtgctggcaggattcaccacctgatgattaaagagaccttgggcccctgaataatcagcagtggtagccaggcagtacttgtcgtggactttagatgggacccagttccatgttggcttcaggggtgacccagcacattcctaggtgtggtggctatggggagagactccttctgcttcaggtaagaagataaaagagtaaagggaactttgtcctgcagcttgggtaccagctcagccacagtcgggtaaagcaccaagtggactcctgagatctctggttccaggccttggctcctcgatggcatttctggacctgccctgggccagatgggagcccactgccctgaagagagagacccaggcctggcagcattcaccacaagctgacaagctgattgaagagcccttggrccttgagtgaacatcagcagtagccaggcagtacttgctatgggcctgaagcagtggtagccataaggacagactcttttgcttgaggaaacaggagagaaaagtgggaaggactttgtcttgtgtcttgag

SEQ ID NO: 952512 - DNA, 596 bp, Homo sapiens
ccccaggaagattcctaaggttcccgactctaggtcctggcttccagatggcatctctggacccacccagggacaggggggagacttgatgccctgaagggaagaacacaagctggctggcttcactgcytgctgattatagagctcttgggcattgaatgaacataggcactaaccaggcagtggtcactacaggccttggacgagacccagtgctgtgctggcattgagtataaccccacacagtcccagtggtggtggccacagggttgcttgtgtcacccctcccccagctccaggcagctcagcaaagagacagactccagttgtttgagggaaagtaagtggagagaacaagaccctttacctggcaatccagaaaattctcctggatctcacccaagaccagcaaagcagtacctctacgagtccccaaaagccacagcattattgggtttgggatagcccctaatgcagatatggttacagtgaccaaagacttagatcacaacacccaggtccctttgaatacttggaaagccttcccaagaatggcaaatacaaacaagcccagatggtgaagactacaataaata

SEQ ID NO: 952513 - DNA, 626 bp, Homo sapiens
aacccatgtgcaggcttcctaagctccctccctcctgtaagggtcaaagtttactatccctctgcagcaaaaatatagtaacrcatgtgtttgatgtttctgcccaggaaggaccattggagataagtgcccaaggtctttactgggagctggtcatgtaggtattctctgcctaacatgtggtgatcatattgtttgtatacagtctcggcatagtaattatcagttaggaaatagtagggacgttcctgaaacccatgttctcagatgccagccaggggccagtcttgcaagcagggctttctatggatggtagttttggtcctgatgctcttttctatctagactacttcagataaaatagaatatttattgacttcttttaagttactgtgctaggtactatgggtatattagagcattagcgatatatatttcctgccaacacagtgtttacttgctggaggacaaaaaaagaacagggtagtaagtaagcaggaaaaaattcagatcctgctaagtgttattacagaaaaattagatgagagaatgggttagtctgctcagtctgccataacaaaataccatattctggggagcttaaacaacagaaatttatttctcag

SEQ ID NO: 952514 - DNA, 576 bp, Homo sapiens
tcctcctgccttggcctcctaagatattgggatcacaggtgtgagccaccgcgcctggccctgcccacrttatttaacctgcagcccttaccttccggacttgctatatattaatatttcgcttgcttatctgtttattacccggctccccatctagagtgtgagcaccacaagggcagagatttttattttatttcccatctaaggcacagttggtgctccaaaaaatagctgttgcccaggtcaatgaataacagctcccatttaccaggcgcctgggatgtgctgagccctttacatacctgcgacccctggtcctcatagaaaccctgcaaagtggttactatcattcccattctagagataataaaacggaggctctgagaggtgaaggcaacacagggaatcagcgatgaatttggagccgaagcctgggtctccctggctccaaaccctccaggccatgacgcttccacttagcaaacagtaacactgtatacaccaggtgacccacaccaagatcttcccaaaagcaggctccgtaggcagcaagcacttctccacattttgcctaaa

SEQ ID NO: 952515 - DNA, 610 bp, Homo sapiens
tcccgcgcaggggccgcaggcggagctgcctgctagtccagtgctargtgccggcactcttcagcccttgggccgcccatgggacctggggcctcggagcagggggcgaggtccgtcgggaaggctcgtgcggtgcaaggggtgggcatgagggcttgggcatggcaggctgcaggtcctgagccctgccctgcagggagatggctgaggcctgacgagaattcaagcgcggcgcgggtgggcctgcagtgctgggggacccggcgcaccctccgcagatgctggcccaggtgctaagcccctcactgcctggggccggcggtgcctgccggctgctagctgctcagagtgcggggctgcccagccctcgctcactcggaactcgcactggcccgtgattgctgcgtgcagccctggttcccacccgagcctctccctccacacctccccacaagcagagggagctggctgcagccttggccagcccagagaaggtctcccacagtgcagaggcgggctgaagtgttcctcaagtgctgccagagcggacgctgaggcctgaggaggtgctgagagcgagcgagggctgctagcatgttgtcacctctca

SEQ ID NO: 952516 - DNA, 464 bp, Homo sapiens
cctctttttcttcacagtctcaggtatgtctttatcagcagcctgaaaatggactaatacagtaaattgstaccaatagagtggggtgcttctgaaaagatacccaaaaatgtggaagtgactttggaactgggtagcaggcagaggttggaacagtttggagggctcagagacatgaaaatgtgggagagtttagaaattcctgggaacttgttaaatggctttgacaaaaatactgataatgatatggacaatgaaattcaggctgaggtggtctcagatggagataaggaacttgttgggaactggaacaaaggtgattcttgttatgttttagcaaagagactggtgacattttgcccctgacctaaagatttgtgcaactttgaacttaagagaggtgatttaaggtatctggtgaaagaaatttttaatcagcaaagcattcaagaggtgacttgggt

SEQ ID NO: 952517 - DNA, 528 bp, Homo sapiens
gattgcttgagcccaaaagttccagaccagcctgggcagcatggcaaaaccctgtctctaccaraaacacaaaaattagtggggcgtggtggcacacgcctctaatctcagctacttgggaggctgaggcacgagaattgcttgaacccagaggcagaaattgcagggagctgggattgcgccactacattctgatctgggtgacacagcaagactctgtctcaaaaaaaaaaaagaaaaaaaaaagattagcattgacttcacttttactttagtcatttttttctgttaaattcaagtaaaatacaaccacccaagtaaaaaaaaaaaatcttgttgaattagctcaatggaagaaggagatgatgaagataagaacggtaaatagaaatgactcaatctgaacagagacacatgggctgaaaaaaatagagtctcaggaagccttgaaataacaaaagttctagcgttcatttcactggagtcatacaaggagaaaagacatcataagaagctgaaaaaagaatt

SEQ ID NO: 952518 - DNA, 586 bp, Homo sapiens
gtcaggtggaaacaggggcctggagttcaaagagagtagtgagttgacacagattttgggactcgcagcaagtgcaggagtcctgtgcttgtgagctcgtgagctcacccatgagagtccagaacagaaacacgctgtggacagagactgaggaacatgctgaggaagctggtgggaagggcgggatgagtccagcaatgagacaggaagggcctgatgaaactgtggggaggggccgggaaggtgagctgatgtccaaaacaagagaaaggagagcttcaatgacaaggaaaggatcccctgtcctcagcatcctagagaagtcaaatcagaggaggactaaagagcctctgtgcggtgaatatttttatttttatcattttacaaatagaaaaactggggctcagtgaatgaagtatgatacttcattccatacaaatatcaagcccagtgcaaacctcagtgcgccttgccctctcacagttctgttatctaaagagatcatgatctcatcattttcctgatggtaagaatctcgtggaaggraagaagaagaaagaaggaggaacaggaggaggaggaggga

SEQ ID NO: 952519 - DNA, 505 bp, Homo sapiens
gtgaccagggactcaaatgtagtcattgtcagaaggtctcaaaagatggaaatattctgctctcattctaaagaaacaaccaggtttacatatatgtaagtggttggcaggcactgtctgacctctgctctgaaggggccacttctcagctcttctccactggggagagaggggaaggggattggactcacttttttttaaaacctcggataacaagacatgggattgtgaaggagtaggtgatttttttaaaaactgcaattttttttttaaggagagggctgcaaacctgtccatggggctgattttttttagttttgtttttggttttttttggtcataaacactccaagaactgagcacctgccaggctctcctgttgccttgccatgtgcccctatccctcccmtgtggcaagagaggaccacactaagaaccctggggatggtccagcagacggtcagacatccaggggaacaaacctccctgtttccattctgtgatg

SEQ ID NO: 952520 - DNA, 607 bp, Homo sapiens
aagagaagctttattgagcagtagaagagctcagagacctgctgtgggtagctcctttctgcagctaggatgttccaacgagtgttcagccttcagcagagaggaggaggctctgggttgggtggctcctctctgctggcagcccatgccatcctctctgcagctcttagcagagtagagaccctggagtgggaagcttctctctgctgctggtcattccatcatctgctcatctctagctgagcccaggacttttatgggccccagaggggatgaagtcacaccaattggtccatgggcagccatgggtgggcccagagaaagcaccacaagttcccactccattccgtgggactggcagcccagcccccagccttcaggccctccctgtcctaaaggtagggtctcactggggaccttcccccttccacccaggaatctgcctgcctcctgctgccattcatggtgcccaggttcagccccaactttgctccaagatgagagcaggcactgatagcagggagaatccaggcagagggagcaggcatttctgagcctatgaaggcaggggggscttcccgggcccccaagagtgcaggatgcgtga

SEQ ID NO: 952521 - DNA, 474 bp, Homo sapiens
gaaaaactttcctgtataagtacctacagtgttggttgcgtagggtgctttgtcttttattctggtggggcataacaatgtagtctttctgtaaactttttggttgtaatcagaatcaatggtgtccstgagaccctcagtggcctgggctgtagttggtagtggagactgtgtgaggctttgcttgagactaggtatgccagacaagctggtcatcaaggaccagtggtagtaggagtggagtggacaggcccttgggcttctaaatggcacatttgtgagggtaatagtggtggtaagggcactcatggtagcagtttctagtgggccagtccttgggcctttaagtagcttactgaggtgctagcagttgcagcagtaggctggatgggaaggtgggttctctggctcctagatatatgtgtggcattggcagtttagttgcagctgctggccaactctcaagcccccatg

SEQ ID NO: 952522 - DNA, 587 bp, Homo sapiens
gtaaaactactggaagagaatatagggacaaaactcaataacatttgtttgggtgataattttttggatatgaactcaaaagcataggaaacaaaatcaaaaagagatacatgggattttgttaaattaaaaagcttctgcacagccaaggaaaacatcaatataagcagacaacctacagaatgggaaaaaaatatctgtaaatcatgtatgtgctaaaggggattaatatccaaaatatacaagaaactcaaataattcaacagtaagacaacaacccaattaaacattggtcaaaaaatctgaatagatatttcttaaaatttacaaatggtcaacagcaatctgaaaaaaaaatgctcaatataactaataatcagagaaatgcaaatcaaatccacaatgagttagcactatactaatgttagaatggttattatcaaaaagacaaaagayaacaagtgttagtgagacatggagaaaagggaacactgaacccagttggtgagagtgtaaattagtatagccattatgaaaaacagaattgaggttcctccaaaaatcaaaaacagaactaccacatgatc

SEQ ID NO: 952523 - DNA, 607 bp, Homo sapiens
attgaaatcctagctccatcacttgctgactatgtgacattaacatccctaagtgtcaatttcctctttttaaagtggaaataatcatagcacagtctcttatgattgkgggaggttcaaagttagcacaggacctactcttcagtaggcgctcaataaatgctattctatcatatctcaatgaccaacctgtgctcagcacaataggagttctgtaaccgcttgttgggtgaatgatagactgagcaaatgaataagtaacaatggaatgcctgtattccatcattttcttccagtcccaagccactagcaaagttccactcaccaactctggtgctcacacagtatggttgtcagctcacagatcctggtcgtctgttcacaccttaaaagcagtacagggaacattgagcaggaggtgtcttattccacagggcactgctaaagcagcactgatacaatctgcactttttcagcctgagatctatggggagactccttggcttaaacacggaatatggacacaggaggggaaaatgagtctccagattgaactctttacaatgtcatacaccacagatgtaggaaatctgctgatcccaatgaa

SEQ ID NO: 952524 - DNA, 705 bp, Homo sapiens
ccagtgttggagatgaggcgtactgctaggtgtttgggtcatgaggaaagaaactccttcatgaatggcttggtgccctcctctaagtaagcagtgagttcttgctctgagttcacgtgaaatctggctgtttagaagactgtggcacctcccccctctgtctttctcccactctcaccatgtgatggtcctgttccccctttgccttccattgtgattgaaagcttcctgagaccctcgacagaagcagataccagcgccatgcttcctgcacagcctgcagaaacatgaaccaaaatgaaccacttttcttttaaaattatccagtctcaggctttcttgtatagcaatgcaaaaatggcctaacacatgtgcaatatttgggacatatttatatgaaaaaaattagttatcgcttatctgaaatttaaacttatctgtgtgtccggtgttttcatttgctgaatgtggtaatattggtccaaactgttttaggatatttagcggcattcctggacctttatccattagatgccagtcccacatcctagttgtgacaactaaaaatgtccccagatactgccaaagsttccctgggaggcaaaatctcccttggctggaactactgccttagaaagtgttagaagtgcaaagcatgaggctccaccccaaacctactgaatcagaaactcagtagggagggat

SEQ ID NO: 952525 - DNA, 568 bp, Homo sapiens
aacagaaaacttcagccaatatttttgatgaatatcaatagaaaaattctcaacaaaatactggtaaaacaaacccagcagcacatcaaaaagcttatccaccatgatcaactaggctttatcactaaaatgtaaagttggttcaacatatgcaaatcaataaatgtgattcatcacataaacagaacaaaagacaaaaaccacatgattatctcaatagatgcagaaaaggcttttgataaaactccacaaacacatcttcatgttaaaaactctcagcaaattaagtattgggagaacataccccaaaaataaaaagaggcatcaatgataaacccatagccgacatcatacttaatgggaaaaagctgaaagcattccccttgaaaactggcacaagacaaggataccctctctcaccactcctattcaacatagtattggaagtcctggccagaacratcagacaagagaaacaaataaaggacatctaaataggaagtcaaattatccctgtttgcagacaacatgattctataactagaaaacctcagtctcagctcaaaag

SEQ ID NO: 952526 - DNA, 745 bp, Homo sapiens
gatggcggatacctgtaatcccagctacccaggaggctgcggcagaagaatcgcttgaaaccaggaggcagaggttgcagtgagctgagatcgtaccactgcactccaatctgggcaacaacagcaaaactccatctaaaaaaaaaaaaaattacagctctcggtagtgtttgaagaagcactttgcacctcctcattgacaatgccccaggaagggcttatgctcattctgttgtgaggggaagcccttgctggggctcccccccctggctgggaagtggtaaagctgtgaatagatcccatgtctgcctggcctggccacaaagctagtgctcctcccactctccaataccacctgccaccctcactgtcaccagcccagaagcacyccctgcacacaccatatccccagtgagcacacatgcatgtcacagacaggaaaatcacactcatgtagtacctgcacgacacaggctaagggctttttggtgtttcctgtgtgccaggccctgttgtaagttccgtgtaggcatgagctagatgcaaggccgcaacaatcctaggatgtaggttcctttcaatattcttatcctcattttacaaatgaggaaactgaggctcagagaggttaagtaatttgcccaaggtcacacagctaggaagttgcagagctgagatttgaacgcaggctttaaccactgtgctatggcccattctctaatattgattgcatgctactcattca

SEQ ID NO: 952527 - DNA, 659 bp, Homo sapiens
ctatgagatacagataaggcggtgtgtccaggggaatggatcagcctcaaacaaacatgtcagtgggagagggagggaggragagagagagagagagagagagagagagagagagagagagagagagagacagaggcacatagctgcagacatcacataaatgatagtgaataaaataaatggtcaaatactaagaatagtttttgcaaataattttgccaacagtttttcagaaaataattgcctaaacaagacttactgataaaaaggaaaggaaaattttagtaacctgtttaatataaattgactaaagaaaaccaaaataaagatgttcttaaatatccacgtcctcagaatatgtagtaatcacagattatttcaaatagttttattcaaattttgacttagcaaaatacaaatgaaaaacaaaatgtaattgttggaacctattttcacagtgtccagactgatgtaaaaataagttccacaaaagatcatttccattatttttcaaattgatccactgaactgaaaaataaagaattatacccaacacattttatgacacattataatcttgacagaagagaattgcatgataaaggaaaactaaaggcaaatctcactctaaaagaaaagtaaaagtttataaataatat

SEQ ID NO: 952528 - DNA, 607 bp, Homo sapiens
gaaaaagagaagctgagagtatccacctagacaacagcaaagctggattatctttgtatcattcttaagaataataaaaagaactacaacccataaaaaaagataaagggggttgtggaagccaaggttcttgtcatgtttatgtcacctccagataacaggcttcagagagaatagatggcgaaggtctcttatcagatcttaaaaagggatggagattctctatagaatgcaagaatttcccccacaagagacagctttgcagggccatttcaaaatatgtcagagaaatatatttaggggcaaaatactttgatctttttttcagggcctgctatctgctgtgacagactgccacaattactacttgagaccctcattacagcagttactactgttactacttgagaccgacattacgagactgaacgaagggggacgaatgaatgcagaaattaagacttaaaagaaactgttttaaagaaaggggccaggggacgaagaagagggctccttgcttctagtgagcaaaggcagcagccatgagcttctacagcccttcgtatttattgggtagcragagcagggagaaggaggtaactattgg

SEQ ID NO: 952529 - DNA, 664 bp, Homo sapiens
tcagctgtgcctgaattccaaagagaggaagttataatgaggcatgtccaaccacccattcccatcacggcctgaactagtgtttcaggtttactttagaatgcccttggcccagaggagggatccattcagttggttgggggccatagaattttacttttggtttccaaatcagaatgaatattgctagactagaaataactcaaaggttgttggagaattttaaaatgtatttatttatttatgacatctagtttgtgctcttgattaattgctcttgattaacctccctcgtctttaaattaaatcaaaattagcaaatatttattgcggtctaggagaaatctcatttaaggcacaaagcactgtgtaaagcagtagaatgttttctttactaataaaggacagaaattgaagaccaggaattaaccagcccatgtatttcctgatatatacctgatttagtacaggtgtatttggggaaatggggtggttggttagggctggaagaaagtgaggaagagtactcaattaagtagttctcwtgatattattttatattgaaaaaatctttaagaggttaaacaaataattaaggtaattaacgaagcagtgagggacacactgggttggaggcgggaggttattattctggacatacctt

SEQ ID NO: 952530 - DNA, 623 bp, Homo sapiens
gcactccagcctgggcaacagagcaagattctgtctcaaaacaaacaaacaaaaaaattaaaaaataaaataataaaaaaataaaaaacaatagttccatggagctgaattagaatcagcacccaattkatggcatgattagtttctagacaactcattttcagtacaataaatcgatctcaaatgatataatacacaaatcaatcaacaaaaatgtaacatacctatatacacttttagtaatatttttattcatctaaaaataaaattggccaggctcactggctcacgcctgtaatcccaacacttttggaggccaaggtgggaggatcacttgagcccaagagttcaagaccagcctgggcaacatggtgaaatcccatctctgcaaaagtataaaaattagccgagcatggcagcacacgcctatattcccagctacttgagaggctgaggtgggagaatcacctgagcccggaggtcgaggctgtcatgggttgtgatcacaacactgcactccagcctgggtgacagagttaaaatgtgtctcaaaaaaaaattaattaattaattaaatttaatccatgtaaaaaataaatggtaaatcttcatttgggtggatt

SEQ ID NO: 952531 - DNA, 837 bp, Homo sapiens
atggtgattatcaggtactgaggaaaggggactatggggttatagttgttttaagaagtttcagttctgagggacaaaaaagttctagagatttatattgcaacagtataaacgtaaacactactgaactgtacatgtaaaaatggttaagatggtaactgttatgatatgtgctttttacacaacacaaaaattaaaaatataaaatcactaacacattttactttttgaatatttggtatcactacaagcactttacatgaattgattcatttaaatgttacaaatctatgagaacattatgctattatcagttttacagaagagaaaacggaatttcagaaagcttaagtaatttctcttgtaactggcaaaggtggagtattagtgtattctcacatcgttataaagaactgcctgagactgggtgatttataaagaaaagaggtttaattgactcacagttctgcatagctgggaagacctcaggaaacttacaatcatggtaaaaggggaagcaagcacattttcacaaggcagcaggagagagagaagggaacaagagcagggaaaactgcattataaaaccaccagattttgtaagaactcactcactaacatgagaacaacatgcaggaaactgcccccatgatccaatcacctcctacctttgacacatggggattacaattcaagatgagatttgggtggggacaacaaagtctaaccatatcaggcagaatgtgaatgggctcgtttatttcttgaatccrtgtctcaaaatgctaacctatactaccttctctttgcctatttggaaccagtttcaagactagt

SEQ ID NO: 952532 - DNA, 606 bp, Homo sapiens
gaaaacacttaagtctttaaactctacttcctgagatttmtttattttcatattttcactatggcttaatttctccttaacttatttactttaggctgcctcatttctccttattgatttgatatggagataaaagcctatagagctaacacttagtggaggcaaaaaaaaaattgaaaaaataagaaagtatataaggtttttgtttttttgtttttactcagatttgaagacttgaataaaagaatgatacgaaaggcaaataaatttccataaatcttcccaggttggtgatccaagaaatcagtaggaatttatactctttcactagcacactgataagtgtttataccaaaatttattgtgaatattgtccagcaagaataacagaaagaaagcactaaaggagttgggaaatattataagacccatgtactgttatgtcttttaattttccacctcattaacatcttagatggggatatgctgaatatgcagaagttgtactcctttattattaaatacttcactgcaagctatgtttttacattggcctcagggtgtgtgtgtgtgtgtgtgtgtgtgtgtgtgtgtaaatgttttaca

SEQ ID NO: 952533 - DNA, 650 bp, Homo sapiens
cccccaggcttgctttggtatcagcagccccaagtcaaacaccaaagatgttaaactttaaaaaaagaaaaagcacgtgttaaaaaaaaaaaaaaagaaacaaaagctgacatttatggtttcagggtttttatttccaacagaggtggatttctgccacggcccagcaacccccagagagctcagcatgccacacctccaaatcaccagcctctgcaaagacaggttcataaggcaatgaggaaaataaatgtccttccattggctttgccctttttggtgtattttggccaatctcttcatgctttcatttcaaggtactaacctgccaagacccataagccagggggtataatagtcactcttgtttcccagcgtgggacgaagccatcacatggacaaactagaaagctgtatttacagccccactgacttcctgggagagagttgtgaattcaatgtcacagtctcatttctaatcttgtttccaatttttcttgacatgtttatattctcatttcctgatgtgtgccaaacagcttcagagacccttcctgctctgggcccagtyttcatggtgtttgtcatggtgaactttaattatttgcttgaccccattaatgtttcttcactagaccgtctgctcccag

SEQ ID NO: 952534 - DNA, 573 bp, Homo sapiens
gtaaatcaatgagaaaatagtagtcttcaacaagtggtactggaaaaatggtatatctctctgcaaaaagtaaactctaaatattgcttcacacaatatacaacaattacctgatagggatgacagacctaaggttaagagcaaaaatttaaaaacctctggaagaaaacatataagaaatatttccaaaactttgaattaggaaagattttttagctagaatatgaaaagcacataccagaaaatttgataaattggaccacattcaaatgaaaagcattttctcttcgaagacaccattaagaaaatggataagcaagccatacactgtgtgggaatatttgcaaaatatttgacatacatacacacacacacagagatacacatatttaccatatatatatgtggtcttgtgtccagcatatataaagtcttacaacttaagaaaacaatctaatttttaaaaatggactagcaatttagayataactgcatagtgagatacctccacacacactgcagactgactaaaattagaaaggctgacaataccaagtgttggcaaggatatgg

SEQ ID NO: 952535 - DNA, 539 bp, Homo sapiens
atttcttcaggtatcttcttacatcatcttgcttctttactcagcataaagcctcrtagtagattctcaggtcccaggggtgcacatgcctgtgtttttaccttacttccccaggggccctccagagggtgcccatccacggagtgcggcgcctgctcgacttggccttctggcactggggattcctctcccaagtcttgctagctcgtggcatgtgcaatgggatctctttcctgagtgcgcatttctttcctcacatttgggggcattcagtgtggggaggatttacaaagaaacttgaggtgaggggcctctgcactcaacctcctgggacctggggctgcacccactggcattgattagaagagagcttgtgactgaggaaaacctggcttagggatttatctgcagggactgtccccagtaggtctatgagagcccaccacagcagcagccctctggatggggatttgggtcttggttttgccagcactcccagtggacagtcatgcctggacttgtcttctccaccttccact

SEQ ID NO: 952536 - DNA, 539 bp, Homo sapiens
atttcttcaggtatcttcttacatcatcttgcttctttactcagcataaagcctcgtagtagattctcaggtcccaggggtgcacatgcctgtgtttttaccttacttccccaggggccctccagagggtgcccatccacggagtgcggcgcctgctcgacttggccttctggcactggggattcctctcccaagtcttgctagctcgtggcatgtgcaatgggatctctttcctgagtgcgcatttctttcctcacatttgggggcattcagtgtggggaggatttacaaagaaacttgaggtgaggggcctctgcactcaacctcctgggacctggggctgcacccactggcattgattagaagagagcttgtgactgaggaaaacctggcttagggatttatctgcagggactgtccccagtaggtctatgagagcccaccacagcagcagccctctggatggggatttgggtcttggttttgcyagcactcccagtggacagtcatgcctggacttgtcttctccaccttccact

SEQ ID NO: 952537 - DNA, 730 bp, Homo sapiens
ggcagggaaaatttttaaatgtcatggtctgacctcaaggatcccttgactctttagctctatgccataatctaagctgcaggcatcctggaccatctcaccttcccaaggtcacayactggtctcctgtgttgatgcgcgtaatgctaaccatttctggagaccagaaaatggaaaggatcctatatgtcttggtaagaaatgttgcttgacaggacagaagataagttagcctagaatacagtgctgattgcttcaaagtccctagatgttcttaggtctagagcagaggttggcaaactatggcctgaaggccaaatccacccccttagctggttttgtaaatagtctttttttgtttgtttgtttgttttgagacatagtctcactctgttgcccaggctggagtgccgtggcgtgatctcagctcactgcaaccttcacttcctgggttcaagtgattctcctgcctcagcctcccgagtagctgacatttcagacatgcactgccatgcccagccaattttttgtatttttagtagagacggagtttcaccatgttggccaggctggtctcaaactcctgacttcaggtgatccacccaccttggactcccaaagtgcagggattacaggcatgagccactgcacctggcctgtaaataaagtcttattggaacacagccatgaccatttgcttatgtattgtttatggctgctttcctgcaac

SEQ ID NO: 952538 - DNA, 639 bp, Homo sapiens
cagttgacctttgaacagaactgcaagggtccacttgtacagggatgtataagttgttctatgtrtgtatatatgtatacctatgtgtccggaattggtgggttcttggtctcactgacttcaagaatgaagccacggaccctcgcggtgagtgttacagttcttaaagacatcgtgtccggagtttgttccttctgatgttcagatgtgttcggagtttattccttctggtggggtccgtggtctcgctggctcaggagtgaagctgcggaccttcgcggtgagtgttacggctcttaaggcggcacgtctggagttgtttgttcctcccagtgggttcgtggtctcgctggcttcaggagtgaggctgaagaccttcgcggtgagtgttacagctcataaaggcaatgtggacccaaagagtgagcaacagcaagatttattgcaaacagcaaaagaaggaagcttccacagtgtggaagaggagctgagcgggcttgccactgctggctggggcagcctgcttttattctcttatctggccccacccacatcgtgctgattggttcattttacagagagccaagtggtctgttttgacagggtgctgataggtgcgtttacaatccctgagctaga

SEQ ID NO: 952539 - DNA, 808 bp, Homo sapiens
aaccccccagctgcagtggaggaagcagaggccaagtccctgcggaagctgcccaggacccgctgagtggcgayctcagggtcagacaccctacatgcacccaggactgagggtatgtgtgcttctcctgtgctgcctgggaaagaaacaggaaagaccacgggcgtccacccccagggaaaagggtgaagaaagtgcggggccctggctgggtctctctgggtgtgcaaggagaagccaaggcgtcacaggaacccaggaggtggggaggatgcagagcaggacctattattcctatcattaagtatcgattcttctttatgagaaaacaacaaatatctggtgcctgaatatgaatatgagttttaaaagatccagaggagtacccaagaaattgttcatgattattagggaaagggaaacattttatcttagacatttggtatggcttgaagtgtatttttttcggagggtggcatgtattatttttattaaacggtagtagctgaagtggttacctctagaaacagagatttgttttgtgggagggttaggtggttaagagacatattagcactgcctgtaatacttcaagtttttctaacaaaatgatatattcttggacaatttaaaaaatctttaaactctaataaataaacaaaaacaaagcaactcctggctgcagcctgtggccttttctcccctgcacaccctgcctgggagctcaggtcttaggaaggcaagcccctgcctgcagcttgccttcctaaaaggcctcactgacttctcagcatctgtgtgctgtggc

SEQ ID NO: 952540 - DNA, 427 bp, Homo sapiens
tagggcaagaggtacagagagagcagagagagcctgctccaagggagagcctygggacacagggagtctcattcctccctcccagcacgggctacgcccatgccactgaggcctgagccacagggcactgcctagccctgcttgggccggggctcaccagcccttacagacagcaggccccacctccaagacactaccccatggcaggggaaagccttggggtccccataaaatgcaggcatcgccagacagagaataggtcttcccaggatgggaagatttacttagggaggggccaccctggataccctgccctccagtaggagccaggttccggaagatcccatgaggggccagtgtggacccctccccttcaaccatccaggcctgcaggtctggggctaatggtggggaaagggggctccag

SEQ ID NO: 952541 - DNA, 624 bp, Homo sapiens
gatctcaaactcctgggctcaagcaaccttcccgccttggcctcccaaagtgctagaattacaggcatgagccactgtgcctgacctcattttgttcaatgaaaatattataccttatacatcattagaagaatgtacaccaaaataaacagttgttgtcttcttggataagggaaatggtaaatatgtgaatttttggactctgctgtagtttccagcctgttcaaacaaacaaacaaaatccatgtatttctttgcaatgagttaaaaaagcaaaatgaaattaaacaatgataacaacaaaaacaggaagactcctgcggacgaagagttgtgtctcctccttctcctttctcaagctcaatctggctgcttccaatcagcccgtggtttgtgcccatcttacaatctctctgtgcctcagtgtctccgtctgtaaagctgatttctcgtatttgtattttgattcttccctcttctgattcaattcagcaaacatcaattatgyctttgaaatgcagaagacatactctagggctcagagctctagagatgaaagagatcaatgctcagccctgtccacaacctggagaagggctgccatacgcacaggagagctgtgag

SEQ ID NO: 952542 - DNA, 624 bp, Homo sapiens
catagttcctgacttctagttctatagcaattcctgcttttctcattcattcatttattcattcrcttacttatgcttttacccaatcaacatctacttaaaatctatatatactgtgcactgaggggacacacaggtgaatgtgatatcatccttaccatcaaggagcttctagacttgtatttgaatgatggacaattcaaatgatggacaagtattagaatgttgctagcacactctgacaaggactttaatggagttgggaatatattgtgttgaatcataaatgagattgagactaatgacctaagcaagttaggggaaccatctcagaaacagaatgtttgatttggtactagggattagtaggaaattatctgagcattctggatagagagaagaaacttgcaagttcccagaatcatgagaggtggtatgtgcaaggctgtaaattataatctggaaaagaatgaatggagataggttggtgaaggtgggttgaagaggatctatgagggaacaggtaggtagcttcctgagccacagttcatgctgcacaccaagccatctatggccatccttgcctgtttataatgataaagcttcatgaagcaattatatttc

SEQ ID NO: 952543 - DNA, 561 bp, Homo sapiens
cccaatgcgtgtacccccattgtatctgggaagtaactaacttgctttttattttacaggcttatagggggaagggacttkccttgtctcacatgagatgttggactgtggacttctgagttaatgctgaaatgagttaagactttgggggactggtgggaaggcatacttggttttgaaatgtgaggatatgagatttgggaggggccaggagtggaataacatggtttggctgtgtccccactcaaatctcatcttgaattttagctcccacaattccaatgtgttgtgggagggacctggtgggaggtaattgaatcatggggtcagtcttccccatgctggtctcatgatagtgaataagtctcatgagatctggtggctttataaggaggagttttcctccacaagctctctctctctttgcctgatgccatccatgtaagacatgacttgctcctctttgcctcctgccatgattgtgaggcctccccagccacgtggaactgagtccattaaacctctttcttttgtatattccccatctcaggtatgtcttca

SEQ ID NO: 952544 - DNA, 608 bp, Homo sapiens
ttcaggagatggctgcttgaagtaggtagtattaaagcccaatgttgagagatggatggaaaagtgaaaggtagaaggaaaggaaaaaagggcagttaattaagagtgacattttgcaagaatagagcagtgaaaacacaagatatatttggggaacagtgaggagtacgagttagcctgagtatacaggagttagagcctaagcctactttctgcacacctctaaggcaggtgtcctggggccaaaaggtgttcagacttcgttactgttgtagtcttttctgaaaacaaatctttagcaacaatgggtataagaattaacacaatattgaaatgcttttttcaatcctttttcccgtaatttaactcttagctaccaaagcttgtattttcatctgcaagtatagtaagaactatacagaacatctatctctatccattagcatcttttgagttcttgttctgtgtaaattatggtaggaagaaaaaaggacttacataaatatgcaaaaacattcactgtkgtgcaagtccctatcgtgttccaattctggaggtggggggaggaggcagagacaggggaaatattaataagataaagctcactc

SEQ ID NO: 952545 - DNA, 687 bp, Homo sapiens
atgggttgaagggctgccagtttcgcagaaaggagaacttatagtgctttttccgggcctgcccatggaccaattggcatgcatctcctcccctctgaagcccataaaaaccctggactcagccagacttggagagacaatggaatgacctgcctgcagataggagctagccactccgggtctcttctctgctgaaagatgcagattatgggatgacctgcatgcagtaggagctacccactctaggttctcctctccactgacagatggacagtcatcaggatgacctgcctgcagaaaggagctacccactttgggtctcctgaaaactgttctgccactcgatgaaactcctctccatcttgctcaccctccagttgtccacatacctcattcttcatggatgcaggacaagagctcaggatccaccaaatggtggactaaaagagctgtaacacaaacagggctgaaacatgccccctccccgcctgccatgttgcagggaacaagaagaagagacaagctgtggcctttcgggaagcccagacctagggggtcccygagccaggactatgacaccctctttggggtatttgtggttcctcggtgtcttccaagcttccagttgccaccaccacatttccctcacccagatgtgggtgcccacagcagaagccacgcacagta

SEQ ID NO: 952546 - DNA, 467 bp, Homo sapiens
aaggggaaaagagttcttattcactgggagaaaacagagacagcaaagcccagaagcttctctttggtcagcctctcaattgtaytcccccctctttgctgtcctcccaagggctagacatccaacactcctaccgaggttctcatgacattgacagtttagctggaaacccaagacccactcctactttcctgtgggatttctcactgccttcccatgaactgtccatcctgcagcccatgagggcgtgtcagacccagagagaataagagaaggccatgcagcagatgccaggcaacatgtctgctcccagtggcccccagtggctaggcttggccagccaggctgtgaaatcagagacagcccagccctccagagcacagagactcccggccactctgacttcattatcatgcaactagggcaccggggccttgccaggggctgctgcaagcaagtttgcttag

SEQ ID NO: 952547 - DNA, 643 bp, Homo sapiens
tcatggattagaagatttaatattcttcataatactccccacatcaatcyacggattcaatgtgatccctatcaaaattccagctagctcctttgcagaaatttgcaagctgaccctaaaattcatgtggaaattcaagggacccagaatatcccaagaaatctagaaaagaacaaattcagaggattcatacttaccaatttcaaaagttactataaagctatagtaatcaagacgtggtactagcatgaggatagacatatcgaacagtggactaagattgagagtcagaaattaaactctcatattcatggttaactcattttcagcaaggatgccaaaaccaatgggggaaagaatcgtcttttcaataaactgtgctgagacaactagatagttacacacagaaaaatgaggttgaactcctacctcacactttatacaaaaattcactcaaaatgaatcatagacctaaatgtaagagctaaaactaactctaggaagaaaatacaggagcaaatctttatgatcttgagctaaacaaagtcttcttagatatgccactaagacaagtgacaaaagaaaaaaaaatcgatattttgcgcttcaaaggatgtcatatcatatatcaaagaaagtaaag

SEQ ID NO: 952548 - DNA, 649 bp, Homo sapiens
  misc_feature 1, 2, 3, 4, 5, 6, 7, 8, 9, 10, 11, 12, 13, 14, 15: n = A,T,C or G
nnnnnnnnnnnnnnnaaaggcttatgtgtcaaggcttaaaagcaacaaaacaccaggacacttgtaggagcgagatggcacrtgcttgctaattgcactgggctggctgggtaaacaggacccatcacccgtagccagcacgcctggtgttgatgcttaactggaccctcgcttatctaaagaatggtctttcctcactatgcctcatcatctttgcaatcctgtgctggatagccgtttatttaacttggcttgttttgaggtccctttcacacttgagtatttacttcagtaaatggactttatcaacctaattatcattcaaaaaaggccattagaattgtttttctttttctcttcttatgtaaatcattctcttttttagatccgttataaagaagagtttaaaaagtccaaggataagtgtacatttgtgactgacagtcctatgctaaaccatgtaaaaaatatcggtgcttttatttctgaggtaaggtatcaaaagcttgcaaactggcttgcatttatctttttcttattatatagatgaaagtctgtgcattaaagagatgaagaataatattttcaaaagcactactgaatgttagtaatagctacataattatctaatgtgatgcgctgtcattta

SEQ ID NO: 952549 - DNA, 675 bp, Homo sapiens
agttacgtccccgtaagtgaacttctccccccttactctgcattgtgggaaaccgcccagagagagattccatggggagactgcactatggaaaagacgatttctgtaagatctggtaaatctgtagtaatgcatttattctggtattggaagagtggcgatttgtttactcagttctttatcttttccagagtataggagttatcacagcaatcagaggggagaaattaaaagattagtgcagcactgaaaacctccagtgcggatgggctattaggaatctaaagagttcaacaagcctaaatctaagtcagcttcgtaactgctgtctctgcttcattgtagggctggattttttttttcttttcctgagcacagtttttcatcattttctcaggtgggctatggactagccagtcacttgagtagagagcccttatttcaggcagcttcaaatgcctcatcatttctcaatgagttccagctccaggagatttcagtgctggaagaattgcaataagctatgaaactttatcccttctcaagactcttccgagtcactggggwactctggcttccacgggtaatggtaatcgctccactcacttagagaaggaaggtaccacctcgggggtcacatgacaataccaaagaggttaaatcaacttccagctg

SEQ ID NO: 952550 - DNA, 675 bp, Homo sapiens
ggtgtctgaatatcatgcagaatcatctgtgaaccaggccctagttttctctttccctgtcaattgatcatagggaacccccmcaatgaggccactggtgcaggctggggttggggagagaagacaggttggcaggaaaggagaccatggacatttgaaccacttcctcatgtaacttacttgttccttcaggacctactcgaacctgatcacgtatataccacttccatttgatgatggaatgctgctgtgcatgacccactttatggctagataggtgagaaagctcccagttcatgataggcaattcaggttgcatggtgactggatgacccatagcatagtcaaacgttcagtttccaccaaagctgagtagaaggccaagagctgtctctcaaaaggggagtagttataggcagaagatggcagggccctgttccaaaatcctagaggtcaaaatcctgtgggggcctgcaaaaggctccaaacagcatccatatctatcacctgacacctcaaacaccattggatctgctgggtcatatggcccaagtggcagagcagcttcaacagcagcctggatctgttgcagagccttctcctattctggaccccactcaaaactgggaaccttttgggtcacttaataaatggactggagtaacacacacaaat

SEQ ID NO: 952551 - DNA, 774 bp, Homo sapiens
aggaagagtttcttttgaacagtaaaaaatttataaaattgaattcagtgggaaatgtatgtatttctcacattgaattagatattaaattgacatttaaaattaatacaaatgtcatttactttacgtgccatcttaataaatgtttaattattttaaaagtaaactactgctgtctcagtgttaattccaggagatttaattgtattgttcgtttcctttcactcttttttctctaatcttgtcttctcactttatttcattaatttgatcttcaatcactgatatcgtttcttccacttgattgaattggctattgaagcttgtgcatgcatcacgaagttctcgggccgtggttttcagctccatcaggtcatttaaggtcttctctacactgtttattctagttagctattcatctaaccttttttcaaggtttttagcttccttgcgatgggttagaacacgctcctttagcttggagaagtttgttattatggaccttctgaagcctacttctgtcaactcgtcaaactcattctccatccaattttgttcccttgttggcaaggagctgcgatcctttggaagagaagaggcactctgtttttggaattttcagcttttctgctctggtttctccscatctttgtggttttatctacctttgttctttgatgttggtgacctacagatggggttttggtgtcgatgtcctttttgttgatgttgatgctattcctttccatttgttagttttccttctaagagtca

SEQ ID NO: 952552 - DNA, 557 bp, Homo sapiens
gctgctgctgctaagggaaccccactttgagaactactaggggagataaacatcagcctctgccacacaacttcacaggtgccagatgaagtcaagwgttattagtggcttatttacaggcataggtaaggattagtgtttatctcatatgcagatatattttcatactggcctcacctacagttgtaggcaagggttagtagtggcctctcattcagagtcagattatgcactgaatcaaagcaagttatcatcattttaaatagtatttattatgtgattcatcatgtcaaacctataggaaaactataaaataacactttctttgagtagcaaaaattaactcctgaagccaaaatattggccagtccaagaagaaagtaaaagcttagaacaataatgagttcagaaattgaatcagtaacaaaacaacaacaacaaaaacctacctaccaaccaaaaaaacatacctggaccagatagattcacaactgaattctatcaggtgtataaagaagaactggtaccaattctactgaaactatttcaaaaatttt

SEQ ID NO: 952553 - DNA, 584 bp, Homo sapiens
tccttttaaatataaatttcaaatttaagtcatttctttgctcccacatctgagcataggtttttaggagcagccaggtcacaacttgaaagctttgctgcttaaaaatatcttctaccagataccctaaatcatcactttgaagttcaatactttcatatatcactaagtcatgaacaaaatgcagccaagctctttgctaaggcatcacatgtgtgacctgtgctccagtttccaataagatttctcatttcaatctgagacctcagcaatccagacttcactgtccatatcactatcagcattttggtcacaaccattttaccagtttccaagaaatatcaaactttctctcatcatcttgtcttcctctgagccctccaaactcttctaacctctgcccattacgcagttccaaagtcacatccacattttcaggtaactttatagtaatgcctcacttctcagtactgattttatgtatcaggttgttcttacactgctctaaaaaaaatacctgacactgggtaatttatttaaaaaraggcttaattggctcatgcttctgcaggctatataggaag

SEQ ID NO: 952554 - DNA, 635 bp, Homo sapiens
ctgcacaaatccacagacgcttacagggtgacaccagaaaggaaacctccaggcaacctacctgtcccggrgctcacagggagtgtggccctcccagacacccagcctgactccccagacacagccatcatccaaaaatggcaccacagaggcagccatcaattattttgtttctagtcttgctcaagttttttgcacttattccctttttgtcctaataaataatttccatcaaaaggaatcccgcgaacatggctatttggcagagaacaatcatatgtcaaactttcctacatctacaagaagaatggatctgttgaaacccatttaagtctcaaatgatgtatacagaatatagagaatattctttgccacagatgagaatatccctctcgttctgaaaatctggctgagcagggccggtgctggagcaaggtccgtgctggagcaaggtatgggggagtcctctttcccatgaccacttgcatgggtgtcttcatgagacccactgggcatggtggtggggagagggctcatggggctgagctcctgggggtgagctgtaacccttctttggggactttttatctcagactgaagggctcagtctcggtgaccagggcagattctgccac

SEQ ID NO: 952555 - DNA, 600 bp, Homo sapiens
ggtgggcggtaggactatgtcatggcaagtgctggatagcatcacaatttttgccttcccaggcctttctcagggcatgtcagtgaacaactgaatatgagcatcctgaaacaaggaatgcatctgctatatgctgaattgtaatgcttcccgaacactcaaatttacattttgaagttctaaccctcaaatttgaccatatttggagataggtcttcacagggttaatgaggccattagggagggccctaatccaatatggactggtgtccttgtaagaaaaggaaatttgatgcagacacacatagagggaagatatggaaagacataagaagaagatagccatctagaagctgaggagggaggcctccgtcagatcctttccccatgaccctccttcctcagaaggaaccacccctgctggcaccttccgcttggacttccagcctctagaaatgtgaggaaataaatttttgttgtttaagccatccagtctgtggcactttgttatgggagcattagcaaactaacatggcaccttcttgcctttgtaacrtcaggccttatttcaggcacagcctgggatatagaaagttttta

SEQ ID NO: 952556 - DNA, 600 bp, Homo sapiens
aattaaattagtgtttaattgaacaatgaaagatttgcgaatcaggcagcccccagaatcacagcagtttcagagagactccagggatacctygtggtcagaacaaatttatagacaaaaaaaaagggaagtgatgtacagaaatcagaagtgaggtaccaaaacaattggattggttacagctctgcagttgccttatttgaacacaactggaacactcagcagtgtgtgcgtggttgaattacggctgctgggattggccaagactcagtgactgttacaggtgcatactcctaagttaggttttcaatcttgtctacctattaagctaggttgcagttcatccataaggactcaaatatagaagtatggagtgcttctcaggccatatctagtttgctttaacattctctaagctataaatagctcaaaagaaagaaagatttccttgattcttcgtcatttggagtagcagccttccaaacagaatgttgtccattcacctgggaactgccatccacaaatcaagcagctctttgtcagtcaagtgagacctgtttatcaggcactgtggaatccagtggctcctcacacagttcc

SEQ ID NO: 952557 - DNA, 581 bp, Homo sapiens
atttagtgctataaatttccctctaaaaactgctttagctgtatcccagagattctgctatgttgtctctgttctcattggtttgaaagaacttgatttctgccttgatttcattatttacccagtagtcattcaggagcaggttgttcagtttccatgtaattgtgtggttttgagtgagtttcttaatcctgagttctaatttgattgcattgtgatctgagagactgtttgttactatttctgttcttttgcatttactgaggagtgttttacttccagttatgtggtcaattttagaataagtgtgatgtggtgctgagaagaatgtatattctgttgatttggggtggagagttctgtagatgtctattaggtccacttggtacagagctgcgttcaattcctgaatattcttgttaattttctgtctcattgatctgtctaatattgacagtggggtattaaaatctcccactattattatgtgggagtctaaatctctctgtagatctctaagaacwtgttttatgaatctgggtgctcctgtattgggtgcagatatatttaggatagttagc

SEQ ID NO: 952558 - DNA, 650 bp, Homo sapiens
atttgtgggagctaagctatgaggatgcaaaggcatgagaatgatacaatggactttgggaacttgggcgggaagagtaggaggtgggagagggataaaagactacaaatatggtgcagtgtawactgttcgggtaatgggtgcaccaaaatctcaaaaatcaccactaaggaacttactcatgtaaccaaaaaccacctgtaccccactaacgtaatggaaaaaaaaaagaaaaacatgttaggattactaaggattgaattagttttcactttgggaaacattaaacattttataaagttacaatatgttgttatatgtgaaaagattaataaaaatttataaattgtgtctttggtttaccctaattggctataaagttcccgcctgtgggtctctgcttttagagttataaaaaggtgcatgcaaattctggtggtgaagcctcagcctcattctttggctgcagagtatgctttcttttgttctgtttttgtcttattttataaagtaatgtggggacttaaaaaaaaattaatacaacaaaacgtttggttttttgttggttattaactcacacaccttccaacccttcactatctgccttttggacaaacaccatgtacataatccacccagtctctggtatt

SEQ ID NO: 952559 - DNA, 560 bp, Homo sapiens
accatacctaacgtttatattatataaggcaattatcaattcttcttaaaaacctattttctaggacatattcataatttttaaaaatgacackctatatagaacaatactatttatgtttcataaatcatataaagtgtgtgtatttaataaaatgtgcactagtttgcagaggaatataaccttaggagtaatgttgccagatttctctagagattctgtgaacatggagacaggaaattcatgggacaagaacaacattaaattaaattttacacagttaagatttcacaggtaatgcactaatgaaattttgtaaaatatattttgacagttcattgtatttggttgcaaatatcctccaaagtacaaattgttggtagtttttaagaagtcattaatgattacccacacaatataattgttttctaaatattgtatgttctgttttccattttgtttatttgaagaactttacttttgtttgtttgtttgtttgtcttttgagatgcaatctctgctcactgcaactcccacgtcccgggttcaataattctctt

SEQ ID NO: 952560 - DNA, 585 bp, Homo sapiens
ctttacctactcaagcctcggcaatggcggatgcccctcccccagcctcactgccgccttgcagtttgatctcagactgctgtgctagcaataagtgaggctccgtgggcataggaccctccaagccaggcgggagatataatctcctggtgtgccgtttgctaagactgttggaaaaagtgcagtatcagggtgggagtgacccgattttccaggtgccatctgtcacccctttctttgactaggaaagggaattccctgaccccttgcgcttcccgggtgaggcgatgcctcgccctgcttcggcgcacactcagtgcagtgcacccactgtctgacactccccagtgagatgaacccagtacctcagttggaaatgcagaaatcacccgtcttctgtgtcactcacgctgggagctgtagactggagctgttcctattcggccatcttggytccacccttttcttttcaattaaaaaaaattattatatatttatgagatacaatgtgatgtttgatatatgtatacagtatggaaagattcaattgagccaattaacatagccatccactcaccaatttag

SEQ ID NO: 952561 - DNA, 606 bp, Homo sapiens
ttttactgctaaatatgatgttagctgtagttttttttaatagatgcactttatcacattgaggatgtttccttttattcctagtttcctgagggttttttataaaaatcatgaatgggtgttaaattttgtcaaatgcttttttttttgggcatatattgagaaaattgtaagtttttttttcccttttttctcttagtgtgttgaattactctaaccactttttgagtcatgaaccaatcttacattcctgagataaatctcatttggtcatattgtattatccttttaatagattgctagatttgatttgcaaatattttattaaagatttttgcattaactttcatgaagggtattgatgtattttttcttgtatgcacatatgctggccttaaaaatgggttgaaaatatcctcatctcaggacacaagggcataagaatgatacgagggatcttggggactcgggagaaagggtgggagcgggtgagggataaagactacacatgggtacagtgtacactgcttgggtgatgagtgcatcaaaatctcagaaaccaccactaatgaatttattcttctaaygcaccaccacccattcccc

SEQ ID NO: 952562 - DNA, 622 bp, Homo sapiens
ccaaccaatcagctctctgtaaaatggaccaatcagcaggatgtgggtggggccagataagggaataaaagcaggctgccccagccagtagtggcaacctgctggggtccccttccacrctgtggcagctttgttctttggctctttgcaataaatcttgctgctgctcactctttaggtccacactccctttatgagctgtaacactcaccacaaaggtctgcagcttcactcctgaagccagcgagaccacgagcccaccaggaggaagaaactctgaacgcatccgaacatcagaaggaacaaactgcggacacgccctctttaagaactgagacactcaccgtgagggtccgcagcttcattcttgaagtcagtgagaccaagaacccaccaattccggacaactagcttcagacttagctgcatctaggttcaaataatgtcatcagggtcctctgtatgtctctctctttatccctcagctccactttgctttattatcagacaagctttatccaggtggacacaagacggcagttcacggtctcaagcctgtgtactacacacagccctcaataccagcttaggagaaagtgtctttcccacaacctctgagaaa

SEQ ID NO: 952563 - DNA, 575 bp, Homo sapiens
ctaaaaggagccaagatacaacgtaggctgtgacttcagagggtgcaagccccaagccttagcagctttcacatagtgttgagcctgtgggtacaaagaagtcaaaaattgaggtttgggaaccactgcctagatttcagaagatgtatggaaatgcctagatgtccaggcagcagtttgctgcaggggcagggcactcatggagaacctctactagggcagtgcggaagggaaatgtggggtcggagcccccacatagagtccctactgtggcacccacctagtggagctgtgagaagagggccaccatcctccagaccccagaatggtggattcactgacagcttgtactgtgtgcctggaaaagctgcaaatactcaatgccaaccagtgaaaggagcccctcctttcacctcctggttttattccaggaggggtgttataccctacaaagccacaggagtggagctgtggcctttattctcccaaggccatgggagcccacctcttacatsagcatgacctgcatgtgagacatggactcaaaggagatcattttggagctttgggatttt

SEQ ID NO: 952564 - DNA, 624 bp, Homo sapiens
aaaagagggacgataacctctggtgagacaataggcaacgtgaagtctagaggcacgtattaaagaagttaacacctggcctgtggacctttaatgaaaattaggtcccatgctattgggaatagaaaatcatcccatgaaaccctctgcctttatagactctgagacccatggcacctcctcaaggtgagaaggaagaatggtaggggcagagttaccaatatagcagccatcaaaagtccccattaactctataatgagttgacttttaattttgacgtaatgatacatagcagcatggttaccctctggatcagcatgtcatgaacacctgtttgggaaagctgaacttgccaagcattgatttttttttttaagtcagccaatacagttccacatctagaaatctaccccgtagataaacttgcatttgtgagaaatgacacagtcatgtctgcaagagctaactattgggagctgcccagaaatccatccataggaactggtrcaaagatatatgcatgctcacacaattacataatacacagatatttaaaagatcaaagttgttcttcatgtcctgatgtgaaataattgccaagatactaagtaaagaaagaaaga

SEQ ID NO: 952565 - DNA, 583 bp, Homo sapiens
cccctgaggaaattaagatccctaatctgaaaccatccactagcatgtggaaccctttagaccaccttcctccaccagcgtccgctcccaccactgccacctctaacctccctccccttcaagcaaatgctgctgcccctagtccttccccaactcactctgctctccccctcataaccctgactcttggagtcatctccagcctgaatatcctcctttaggaaggcttcaacatgagatagaaaaatgtaagaaggatattcaaaacttccctttcccctctaccaccagaggatcgaccaccaacttttttccttaagggaagtgcctctaggaggaggggacattggctttgtgaatgccgatttaaccagctcagaagttagaaacctgaaaagggagcttagaccactcttagatgatccctatggtatgtcagatcaaatccatcaatttctgggaccccagttacatacttgggttgagttaatgtccatcttaagcatccacttttcgggagaggaaaaawgcatgatctgtagggctgctatgatggtttgggaatgtgaacaccccctatccc

SEQ ID NO: 952566 - DNA, 640 bp, Homo sapiens
gcccaagatcctcaatgggataacartaatgcagcccatcgaggagatataagggatctcagagatatgataattaaagggattcaggaatcagttcctctaactcaaaatattaccaaagcttttaacatacaacagggaaaggatgaaggacctatggaattcttagaaagtctcaaggagcaaatgaggaaatatgctggattagacttagaagacccccttggacaagggatgttaaagttccattttgttacaaatagttggacattacaaaaaaattacaaaagatagaaaattggaaagaccatcccatagaagagcttttaagaaaagcccaaaaagcatatgtacagagggatgaggaaaagcaaaggcaaaaagcaagaattatgttttctgccatgccacagagaactctccaggagagagcctagggaaatggagcttgtaaatcttctaagtgtctggctgttagaccctacatgggaaacaaagggatcaaaccagagggtcaaggaatgagaagggaaaaagggcaaaataggcgtttcaaatatgggaaaataggtcacttcaaacgagaatgccttgaatgggaaaaggaaagtaaggtcactcatggcctttgaagaagaat

SEQ ID NO: 952567 - DNA, 477 bp, Homo sapiens
ggtccatagatttcctgggacttgcttcctgttggcactcttcctgggtggcctgtaagctttgtttcatcttctacatcaggagctactcctccctattctccctaacacgtattttccaaaaacgtgttaacatctgtggtccattgtttttgcttctccttgtatattgcctcctcaggagggtgactaaaacctgttatttgacactgacttttctttattgatttgaatgctatattatttagaaatagcatacttcagtgcaagttgtggctatgaaggcattctctactgcataataaaaccaccataaaatgttctttgacctttcaaatattagagtttacttttaagggcaataattaaagtatgtcatactgaaaagctctaatgtgtctaaatttcctaatcaaaggtttttatgtattgaaargaaataataaagaaaataatacttcccagtgttgcttatgt

SEQ ID NO: 952568 - DNA, 507 bp, Homo sapiens
ttacattctccctgcgggctctcagcacggaggyggccagccttagagttgaaataaaatgcagctataacggagtccagccatcaactctgtgctgcaccctctccccatgtgcactcagaaacggagcccttaggaggttctggccagatgggggcatgcagagcctgcctctgccacctaccagccctgagccaaggcaggaaacacagcttctctgcctccatctccttaaataccaagtagggacaaggaaagctctctccagcttactgaactgtgtctcacattcctgacacacaagtccataaatgccagttgtttttctccatctctccccttttctaatttttccacctctcaccactcatttgggaaaaatccctgatgccagcaatgctcctggcccactgtacccctcagcaggggccatggctcccttctcaaggaacccccacacagtggcacccagctctagccccaggtgtgcgtggccagggtccacca

SEQ ID NO: 952569 - DNA, 645 bp, Homo sapiens
aactttattctttttgaaacaaggtstcactctgttccccaaactgtagtgcagtggctcaatcacggctcactgaaatcttgacctcctgggttcaagcgatattttcacctcagcttcaggagtagctgggactacaggtgtgcctaccatgccccgctgtattatgtatctagaatccttttctttctctccttttccttcgtcttttataaataccaatatatttttcctcctaaacctcactagtaaactcctgacacaggacctgctactacttctttgtacctgttaaatccattctccacatatatgcaacttaccgttagtaacaaaaattagctaatgtcactttcttgcttaaaacggccacacataagcaggaagtatttcttagtttttctacatggaggtgtgatatgagtatataaaagatattgcttgtgtaaagtggaaaagagtaccatctcaagcaagtttgattaagatcagcagaatatactttcagccgggcgcggtggctcacgccggtaatcccagcactctgggagtccgagacaggcggatcacgaggtcaggagatcgagaccatcctggctaacacggtgaaaccccgtctctactaaaaatacaaaaaattagcca

SEQ ID NO: 952570 - DNA, 574 bp, Homo sapiens
ctgtattgattgactagacaacattattgtgtgtataactcttaactgaaagaatattattttcttaccattttttttacttttctaagtatgtgtgacccactattttaaccatcttatacttcatgtgtttaagttttttattgtgaagtataacatgcataagaaaagttatacaaaacagctgtctgaataatcaattagtattaaacacttataaccacctatgaagacaagaatggcaacattgtaagtccactaacaaccccctgcataaccagtcttattgatagttgttcccttccattccaggatatacccaatatcctgatatttaaccagtattatgatttgtatggtaattacttaattgcttttaattacatttttacttatataagtagagtctttaagtatgtgttcttgtatgtcttatcagattatttttcttctatgttaaacgtttcctcttgtactttcttttrtgtaagactactgctggaagtctgcttttattttataaaaacatattttcaaactttccttgaagaaaaacatactgaaaataaaattt

SEQ ID NO: 952571 - DNA, 807 bp, Homo sapiens
ttaccgggagactaggtcctgctcacagtctagcagacgttttatttatttatttttatttatttattttttggagccggagtctcactctgtagcccaggctgaagtgcactggtgcaatcctggctcactgcaatccctgcctcccgggttcaagcgattcccttgtctcagcttcccaagtaactgggattacaagctcctgccaccatgcccgactaatttttgtatttttcggagggacagggtttcaccatgttgcccaggcttgtcttgtactcctgatctcaggtgatccacccacctcggcctcccgaagtgctgggattacaggtgtgagtcaccatgcctggcctaacagacattttattgatgtcttcctttagctttctcaacttggcttcagagtcccctattatttgaagcaaaagagaaaaaaaatgtgaaataaatttaagacatcagtgttttttgcacattctcagtgcataacaacccctcctgcagctaaagaaataaagaattatgactcattctctcaagtggttttggctcttaagcttctaaaaaatatatctttaaatacattatttcatccaatctcacaagcacatttagggcattgttattgtcctgttttacagataagtatactgaggctcagagagttaagtgtctttccagtgtagagcccagggcsccctcaaatcctagctaggactctttccatgttgccacactaggcatagacaggtgtcatcactataataacatggaggctacaaagagtaaagagctatgcaggtg

SEQ ID NO: 952572 - DNA, 787 bp, Homo sapiens
gctatgggcttatacatgacctttattgcacagaggaacattccttctatacctaatttgttgagactttttatcatggaatgatgttgaattttggcaaatgcttcttctgcatctattgagaagatcatatgccttttgttcttcattcttttaatatgatgagtaacatttattgatttgcatatattcaaccaacttcacattccagggataaaacccacgtaattgtggtgaatgattcttttaatgtacaattgcatatggtttgctcttatttttatttatttatttatttatttttgagatggagtctcactctgtcacccaggctggagtgcagtggtgtgatctcggctcactgcaacctctgcctcccggtttcaaatgattctcctcccttcagccttctgaatagctgggattgcaggcgtgcaccaccacgccagactaatatttgtatttttactagagatggggtttcaccagttggtcaggctggtctcaaactcctgactttgtgatccatcctccttggcctcccaaagtgctggtattacaaacgtgagccacagtgcctggccgggttgctagtattttattgagaatttttgcatctatcttcatcaagatattgacctctagttttccttctttttagtttatttgctagctttgttatcaggataatgcttgcctcataaaattrgttttgaaatattctctcctctttagtttcatggaaaagtttgagaaagattggtattggttctttaaatgcttggta

SEQ ID NO: 952573 - DNA, 586 bp, Homo sapiens
cttgtattgggacctatctctttctttagatggaataatatttcctttatatatcagggtacttctctattgggtacatacatatttaaaattgttacattatcttrctttattgacccctttgccattatatggtgcccttctttgtctcttcttacagtttttgtcttgaaatctgttttgtctgatatagtatagtgactcctgctccttggtttccattggcatggaatatctttttctgtctctttattttcagcctatgtgtgtctttataggtgaaatgtgtttcatataggcaacagatcaatgggccttgttgtttcattcagccagtctatgtcttttgatgggagagtttagtccatttacagtcaatgttgttgttgacaagcaaggtcttactcttgccattttgttatttgttttctggttttctcttccttctttatgttgttcctgtcttcctctagtgaagatatttttctctagtggtatgtttagtttcttgctttttattttttgtatatccattttatgctttttggtttgaggttactatgaggcttgcaaatactatcttata

SEQ ID NO: 952574 - DNA, 588 bp, Homo sapiens
aaaaagaaatgagtttggtgaacaggcggccaattcctcatacaacctcaatgtctatcatttatattgcaaaattaatggttaaataaataataggtcaatatgcagcttttaaaaaagagacaaagttttgtgtactgatatagaataaattctaaaatgctttaaatatgaaaaattagtgccgaagagttttatagcaagttaggatatgttctccccccgccacaaaccagaaaaaaccctaaaaaaaagattcacaagcatcctatgtataggatacctctggaagaattcacaagaaacttgcatcagtgattgccttttcacttattaaggattaagtatttgttcttctgacccatggacacagagaggggaacaaagcacactggagcctgtcagtggggggcggagaaggagaggaggagagcattaggacaagtagctaatgcatgtggggcttaaaacctagatgatgtgctggtataaagacacatgcacacgtatgtttattgtggcactattcacaatargaaagacttggaaccaacctaaatgtccaacaacgatagactggattaagaa

SEQ ID NO: 952575 - DNA, 642 bp, Homo sapiens
aaaataataaagctgaaggrcttccattacttgccttcaagacttattatagaattacctataattctacaattaccaagtcagtattgtattggtggtgtgattaacaataaggccagtgaaacggaatggagagtctaaaaaatagacccacacatacatggatgactaatttttcacaagcgcacaaaggcaatgcaatgggaaaaggggtcatttcaaaaaatggtgctataacaactggatagctatttgcaaaaaaaattaataataataaactttgatccacaccttgagttaggcaatgattctcagatatgatacaacagaaacatttatttaaaaatcataggctcggtgcaatatctcatgcctgtcatcctagctctttgggaggccaaggcaagcagatggactgagcccaggtgttctagaccagcctgagcaacatggcaaaaccctgtctctacaaaaaagagaaaaatgagccaggcatggtgccacatgcctgcagtcccagctacttgggaagctgaggtgggaggatcgcttgagccaggagccggaggtttcagtgagctgaaattgcgccactgcgctccagcctgagcaagaggagtgaaaccctgtctcaaaaaaaag

SEQ ID NO: 952576 - DNA, 561 bp, Homo sapiens
atgataagaacatttagaaagcaggggttggagggataaagcataaacacaatgcttcattcaataataatgcatattgcaacatattggagttacagaataaaataatgggaataatgatgaacaaagaaaagttcaatgataactaagaaactgcaaatgaaaataatgtacaatgagagtcttaccaggtttccaatgttgagaagagtgttagtttgtttactcattggataatgctccaaggtcagaaaacatacgtttaaaattatgcatatgataaggaaaagatcagtaaatggtgccattataatcctatggacaaactctttcaattctcaccaacagggagaacaattccagatcacgaaagttttggcaaacttataccagtataatgggcatatcttcttggatttttcaagttctgaaatgaaagaatacraaagttaaacattctggccgggtgcagtggctcatgcctgtaatcccagcactttgggaagccgaggtgggtgaatcacttaagttcaggagttcgagaccagcctggtcaatata

SEQ ID NO: 952577 - DNA, 577 bp, Homo sapiens
aaatatttcccctatgtagttttctaattttctccttctttttcttcatggagaaacttctgaaagaataaattttatgtgtttttctacatctaaaactcctattcactgacacctcaactctctaatatggcttcttctcttgttccttagctgaaattactactttttcgttcaccaaggacctttgtattactaaaccaagataaacttatgagttcttatctcacttaaacccattgcaggacatgaccttgtggaacactttctcttttattatgttctctctatcatagtcttccaggacagtaccgtcttctttttattttttcctacttctttaggtactccagcttttttctttctctacccttttctttggtactggtattctccagtttcatcttcaactcttacttcactcaatcctgtaaaattttatgtgtatgtatgaataagttaatatctataaattcaattaccacttatccttatgtttctaaatctctatcgctaaatcaaatttttcttaggttctgctttaccacatatagartatttatctgaatatccaaca

SEQ ID NO: 952578 - DNA, 567 bp, Homo sapiens
ccaaatagactctttggtagcagtgactctccaaaactgccgaggtctagacctcctcaatgctgagaaaggagaactctgcaccttcttaggggaagagtgctgtttttacactaaccagtcagggatagtatragatactgcctgacgtttacaggaaaaggcttctgaaatcagacaacgcctttcaagctcttataccaacctctggagttgggcaacatggcttctccccttgctaggtcctgtggcagccatcttgctattacttgccttcgggccctgtatttttaacctccttgtcaaatttgtttcctctaggatcaaggccatcaagctacagatggtcttacaaatggaaccccaaatgagctcaactaacaacttctactgaggacacctggactgacccactggccctttcactggcctaaagagttcccttctggaggacactacaactgcagggccccgtcttcacccctatccagcaggaagtagctagatcagtcattgcccaattcccaacagcagttggggtgtcctgtttagaggggggattgagag

SEQ ID NO: 952579 - DNA, 684 bp, Homo sapiens
gtctgtgacatataccaaggctttccttgtatttttttttgagagatggagtctcgctgtgtcacgcaggctggagtgcaatggctcaatttcagttcactgcaacctccacctcctgggttcaagtgattctcctgtctcagcctcccgagtagctgggactactggcacacaccaccacacccagttaattgtttttgtattttagtagagacgggcgtttcactcgttttgcccaggctggtctcaaactcctgagcttaggcaatctgctcacctcagcctcccaaaatgctaggattacaggcatgagccactgtgccctgccagctttccttgttttttagtaaccataagagttttgaagagtacttgtcatatattttgaataatatctcttaatttgggtttgcctgatgctttcttaagattagactggagttaaggaatttggagaacaacaaaataaatatgaagtaactttttcttcacatcatgtgaaggggtaccttatatcaaaatggcgtatcactagaaacattattgtttacttgttaaggcaattgactactggaagctctttcagcttgactctgtgtcctgtcgacatgctccaatctaaaatgtaatttgtactttactgacttttkctttactttttgatgttataacttaactgattta

SEQ ID NO: 952580 - DNA, 725 bp, Homo sapiens
aggttattgttttttatggttgcatagtattccatggtgcatatgtaccatattttctttatccaattcactgtgcatgggcacccaggttgattctgtatctttggtaytgtgtatagtgctgcagtgaacatacaaatgcatgtgtctttttgatagaacaatttattatccttatggtatacaaccagtaatgagaatgctgggtcaagtattagttctgctttaagttctttgagaaatgtctgaactgctttccccagtggctgaactaatttgcattcacaccaacagtgtataagccttcccttttctatgcaactctgtcattctcacaggagagatagtctatctcattgtggttttgatttgcatttctcagattattagtatgttgagcattttttgatatgtttgttgtcacatgtgtgttttctgttgagaagtgtctgtttgtgtctttgcctattatttaattggattatttgttttttttcttgttcattttcttaacttccttgtagattctgaatattaggcttttgtccaatgcagtttatgaatattttctcccatactgtaggctgtctgtttactctttgaataatttcttttgctgtgcagaagctctttagattgtttaggttccacttgtcaatttttgtttttgttgcaattgcttttggggacttagccataaattatttgccaaagctgaggatgag

SEQ ID NO: 952581 - DNA, 587 bp, Homo sapiens
gtctagcctaagttcatggcaatgaagataaaggaatatgtacattctggaaatgtttaggaggtcgaattagcaagacttggtgactaatgggaagtaaagtcaaagaagtggaagatgatagccagatgtctgattgggtgagaggaatgaatgcttcacaaaacaggaagtggaggagtggagcaggttgggagttaggaaagaaggttgaactccattatgattatgctgggtttttaatgcctaagaaacatcaaaaggaaagatctctcaggcaacccagcatggagtcaaatgtttatgagagttctggattgaagaaaactagaaactattttgacaaagcatggagatggtaactgaggccattggagtgagtgaggtcacccagaagagtgggtagagctggaagagaaagaagcctaagaaagaacatttaaggatgggcagaagaaagggaaaaggaaacaaagaatargcaaccagatagaaagaaaaccaacccaatgtgttaccaagaaaatgaagtattttgggcagggcacggtggctcatgtctgtaatctcagcactttgggaagcca

SEQ ID NO: 952582 - DNA, 582 bp, Homo sapiens
tttcctgactttttaatgatcgccattctaactggcgttagatggtatctcattgtggttttgatttgcatttctctaatgaccattgatgatgagcttgttttcmtatgtttgttggctgcataaatgtcttctcttgacgagtgtctattcatatccttcgcccactttttgatgggattttttttcttgtaaatttgtttaagttctttgtagattgtggatattagccctttatcagatggatagattgcaaaaattttctcccattcctttggttgcctgttcactctgaagatagtttctttgctgtacagaagccctttagtttaattagatcccatttgtctattttggcttttgttgccattgcttttggtgttttagtcatgaagtcttcacccattcctgtgttctgaatggtattgcctaggtttttttctagggtttttatggttttaggttttacatttaagtctttactccatcgtgagtttatttttgtataaggtttaaggaagggatccagtttcagttttctgcacatggctagccagttttcccaacatcattcattaaata

SEQ ID NO: 952583 - DNA, 525 bp, Homo sapiens
caggtgtgggtcccaccaggattaggcccttcccttcaaggcagcaagtttctttctggcccagtgtatgtctagaaatatgtctgggaaccagtatctggaatggagatctcacatttctgtctggtgccctatcctacagtggctgagctggtatccaaaatgaaagacaaagtcctctttactcttcccactcctctcttcaagcagaaggaagaaatctctttggagccatgaagtttgcagcctggggttgaaggaagagtggtgcaagcactcccttagccaccaaggctattgtctcagtaggtcacgtaccttccaagttcactggttctaagcccagctcaccagtatgactcacctaggagttgcagtcttgtggcctagaatgtctttcaagtttatttagggccccaagtactttagtccacaatggcaagtttgctagaactcaagttccaaccmctgggatgggtgattcaccttctgctaaggccacttgtatgttccctctgtagcagg

SEQ ID NO: 952584 - DNA, 612 bp, Homo sapiens
agctggtacctggtgggtgcccctctgggacaagcttacagaggaaggaatatgcagcaatttttgctgttctgcagccaacactgcgtaatacccaggcaaacagggtctggagtgaacctccagcaactccagcagacctgaagcagaggggcctgaccgtaaaaggaaaactaacaaacaggaaggaatagcatcaacatcaaaaggatgtccactcagaaaccccatccaaggtagataaatcaaagaccaaggtagataaatccacaagataaggaaaaatcagtacaaaaggctgaaaattccaaaaaccagaatgcctcttctcctccaaggatcacactcctctccagcaagggaacgaaactggacggagaataagtttaacaaattgacagaagtaggcttcacaaggtgggtaataacaattcctccaagctaaaggagcatgttctaacccatgcaggaagataagaatcttgaaaaawgttagatgaattgctaagtagaataaccagtttagagaagaacataaatgacctgacggagctgaaaaacagcacaagaacttcgtgaagcatacacaagtatcatagctgaatcaaccag

SEQ ID NO: 952585 - DNA, 603 bp, Homo sapiens
aggataaagctccaaaagtgagccctgggccctgaacaaaatctggaggcattattaaacctagcaacctcrgtgttctataatagggaccaagaggaacaggcccaaaaggaaaagcgagatcagagaaaggctgcagccttagtcattgccctcagacaaaccaaccttggtggttcagagaggacagaaaatggagcaggtcaatcaccaggaaagacttgttatcactgtggtttacaaggatattttaaaaaagattgtccaatgagaaacaagctgccccctcgtccatgtccactgtgcctaggcaatcactggaaggcacactgccccagagggcaaagtttctctgggccagaagcccccaaccagatgatccaacaacaggactgagggtccccagggcaagcaccagctcatgtaatcaccctcactgagccccaggtacatttaaccattgaggaccaggaaattgacttcctcctggacactggcgcagcgttctcagtgttaatctcctgtcctggacgactgccttcaaggtctgttaccatccaaggaatcctgggaaagcctgtaaccaggtatttctcccacctc

SEQ ID NO: 952586 - DNA, 603 bp, Homo sapiens
aggataaagctccaaaagtgagccctgggccctgaacaaaatctggaggcattattaaacctagcaacctcagtgttctataatagggaccaagaggaacaggcccaaaaggaaaagcgagatcagagaaaggctgcagccttagtcattgccctcagacaaaccaaccttggtggttcagagaggacagaaaatggagcaggtcaatcaccaggaaagacttgttatcactgtggtttacaaggatattttaaaaaagattgtccaatgagaaacaagctgccccctcgtccatgtccactgtgcctaggcaatcactggaaggcacactgccccagagggcaaagtttctctgggccagaagcccccaaccagatgatccaacaacaggactgagggtccccagggcaagcaccagctcatgtaatcaccctcactgagccccaggtacatttaaccattgaggaccaggaaattgacttcctcctggacactggcrcagcgttctcagtgttaatctcctgtcctggacgactgccttcaaggtctgttaccatccaaggaatcctgggaaagcctgtaaccaggtatttctcccacctc

SEQ ID NO: 952587 - DNA, 603 bp, Homo sapiens
aggataaagctccaaaagtgagccctgggccctgaacaaaatctggaggcattattaaacctagcaacctcagtgttctataatagggaccaagaggaacaggcccaaaaggaaaagcgagatcagagaaaggctgcagccttagtcattgccctcagacaaaccaaccttggtggttcagagaggacagaaaatggagcaggtcaatcaccaggaaagacttgttatcactgtggtttacaaggatattttaaaaaagattgtccaatgagaaacaagctgccccctcgtccatgtccactgtgcctaggcaatcactggaaggcacactgccccagagggcaaagtttctctgggccagaagcccccaaccagatgatccaacaacaggactgagggtccccagggcaagcaccagctcatgtaatcaccctcactgagccccaggtacatttaaccattgaggaccaggaaattgacttcctcctggacactggcgcagcgttctcagtgttaatctcctgtcctggacgactgccttcaaggtcygttaccatccaaggaatcctgggaaagcctgtaaccaggtatttctcccacctc

SEQ ID NO: 952588 - DNA, 525 bp, Homo sapiens
cctgctacagagggaacatacaaagtggccttagcagaaggtgaatcacccatcccagkggttggaacttgagttctagcaaacttgccattgtggactaaagtacttggggccctaaataaacttgaaagacattctaggccacaaagactgcaactcctaggtgagtcatactggtgagctgggcttagaaccagtgaacttggaaggtacgtgacctactgagacaatagccttggtggctaagggagtgcttgcaccactcttccttcaaccccaggctgcaaaacttatggctccaaaagagatttcttccttctgcttgaagagaggagtgggaagagtaaagaggactttgtctttcattttggataccagctcagccactgtaggatagggcaccagacagaaatgtgagatctccattccagatactggttcccagacaatatttctagacatacactgggccagaaagaaacttgctgccttgaagggaagggcctaatcctggtgggacccaac

SEQ ID NO: 952589 - DNA, 581 bp, Homo sapiens
gctaacacaacatccgtactgcagcccatggatcaaaaactaattttgacttccaagtcttatcatttacaaaatacattttgtaaggctgtagctgccatagatagtgattcctctggtagatctggacacagtacactggaaaccttctggaaaggtcaccattctagatgtcatgaggaacatttgtgattcatgggaggaggtcaaaatagcataaacaggagttctgaagaagttgattccagtctcgtggatgacttcgaagggttcagcacttcagtggaagaagtaactacaatatggtggaaacggcaagagaactagagctacacagtggagcctgaagatgggactgaattactgcagtctcgtgattaaactcctcagggatgaagcgttgcttctcatgaatgagcaagaaagtggttttttgagatggaatctacacttggtgaagatgctgtgaacttggttgaagtgacaccaaggatttccmatgtgccacaacttagttgataaagcagcagcaggggttgagaagcttgactctaatttcgaaagaagttctgctgtggata

SEQ ID NO: 952590 - DNA, 656 bp, Homo sapiens
aagggattttttttttccagtagtcccatcagctcccaagtttcccctttttggagaggaagaagctccccatgccccmctattctgtatatgcctaattctgtcagccatagttgtcagcaaagagtgcaaagcagattattccaaagagaacagcagttgacatcctgtagtgccaaacctgttcttagccaaaagggactttaccgagagccctcatttttaaatgtacttcagtgcattgttgttcattcggaacattccactgtaagttatctttagcaagattttgccatctataagactttgctgcctcccaggcctaatgtacaacccagaagaagctcagttttccagaaattaaggatcccatttttacctaaaatattggctttactctcagggtctcttgattaactcagccaatgactttttttctacttaagcatgcaagaaaaatgaaacaaagggggtagagcaaaaaattccctgtgaattttcgaaagccaaattctacaacccctgcaatatcactgcttactaccagttcctttccaaaccagtcagatgtaagtggcctctaactggatccaagccagttaattcccagatgaattccattcctggacccagtccagtttctgtctcaactccaa

SEQ ID NO: 952591 - DNA, 678 bp, Homo sapiens
acctgggcttggaaccgtgatagagacaggatgagtggggttgccaagatagggcagtgggatggaaaaacatgaggccgggtgcagtgggtcacacctgtaatcccagtactttgggaggccgaggcgagtggatcacctgaggtcaggagtttgagaccagcctggccaacatggcaaaaccctatctctaccaaaaataccaaaaataccaaaaattagctgggtgtggtggcgggcacctgtattcccagctactcaggaggctgaggcaggagaattgcttgaacctgggaggcggaggttgcagtgagccaagccaagatcgcaccactgcactctggcctgggtgaaagagtgagacgtgagactccgtctcaaaaaaaaaaaaaaggaaagaaagaaagaaaaaggaacaggggcagggggggcacctcagggccagggggccatggaattagccaccagttgggacccggacataggtaagaagggccccaggaaatggagacatgggcctgctggaagcccaaggatgagaacaggacccagggaagacctggtgccgccgctggttatcccacacctgcctcccaccctcaggggaatgaggagtggttcctggtgggccgagtgctggaccgygtctgcttcctggccatgctctcgctcttcatc

SEQ ID NO: 952592 - DNA, 565 bp, Homo sapiens
  misc_feature 504: n = A,T,C or G
ctcaaccacagggacccctctctctgcagggctggcccctggcaaggcccgggacaggaaggcctacacggtcctcctatacggaaacggtccaggctatgtgctcaaggacggcgcccggccggatgttacsgagagcgagagcggtgagtgccgtggggtggccctgagggggaccagggtgccaaggatggggggctggcgggaaggggtcacctcttgtctgcctggaactgaaacttcctactgaaactgaaccctccaaccagggagccccgagtatcggcagcagtcagcagtgcccctggacggagagacccacgcaggcgaggacgtggcggtgtttcgcgcgcggcccgcaggcgcacctggttcacggcgtgcagagcagaccttcatagcgcacgtcatgccttcgccgcctgcctggagccctacaccgcctgcgacctcgccccgcgccggcaccaccgacgccgcgcacccggggccgtccgtggtccncccgttgcttcctctgctggcagggaccttgctgctgctggggacggccactgctccctga

SEQ ID NO: 952593 - DNA, 597 bp, Homo sapiens
cagtgggaagccaaggacagaggaaagtgaggtcagggtctctacctacccacccactgctccctgccagtggaggctgcaggtgggtggtcctcttccagcagccacagcttctgcccagccaccctgtcttccagcttcaactctccctcctggttcctgaaactgctcctcctcaggtttaggggtagtcacaactccctgggagcttcacctttccttattgcactcctttgactctgccaggcccttataaaatgtcccttcatcaaactcacttctcttgccccacttgagtatgccatctgtttcctgtgggactgagactggtattgccactttttcagaaattgattcttagactctgtacatgtattattttgataaaataagaagcaaagctaacaaaacagtaaagtcagttattactatagaattttatgttgctataggattttataaaagattatacatccccactgtactgaggctgccctttctgaattgccttcctctcccccatcccactcaaatgctgcttccttccattgctcacctaggacctaaaarcacccaaatgagaatgtcttttctctg

SEQ ID NO: 952594 - DNA, 606 bp, Homo sapiens
ccacccaaccaaatactgcgtttttccaatagtcttagcaaatggcacaccaaaagattatatcccactcctggcttggcaggtcccacacccacagaaccttgctcactgctagcgtggcaatctgagatggacctgcaagcagcagctggcagggggaggggtgtccgccactgctgacgcttgagtagataaacaaagtgctcaggaagctagaattaggtggagcccaccgcagctcagcaaggcccgctgcctctgtagactccacctctaggggcagggtatagctgaacaaaaagcaatagaaacttctgcagacttaaacgtccccttctgacaggcctgaagagagcagtagttctcccagcatggtgtttgagattggagaacggacagactgcctcctcaagtgggtccctggccgccatgtagcctaactgggagacatctcccagcaggggcagaatgacacctcatacaggcaggtgcccatctgggatgaagtttccagagraaggatcaggcagcaatatttgctgttctgcagcctccactggtgatacccaggcaaacggcgtctggagaggacctccagcaacctcc

SEQ ID NO: 952595 - DNA, 770 bp, Homo sapiens
taatagccacatggtcataacagtggaaaattcaaatactgatttaacaaatgttaccatatagagtaatgaattggggatgtgtggagaaatgtgagtgtgtgtgtgtgtgtgttgtgaatgactaaagttgaattctgattgtacaagtaaataaaatatatctctaactgaaaaatcaagctgcctgacacatcaaaggcactcaataaatatttgccaataaataatgctctaagtctctattccacatcttcatttgtacatttacatagcactggaatagaaagactggaggccgggcacggtcgtcacgcctgtaatcccagcactttgggaggccaaggcgggtggatcacaacgtcaggagatcaagaccatcctggctaacacggtgaaaccctgcctctactaaaaatacaaaaaactagctgggcatggtggcactcgcttgtagttccagctactcgggaggctgaggcaggagaatcgcttgaacccgggaggtggaggttgcagtgagctgacatcacaccactgcaatccagcctgggcgacagagcgagagtccatctcaaaaaaaaaaaagaaaagaaaaaagaaagacagactggaaaaatagcttttatcaatctctgataygctacatatgtcatggagaaatgcagaatggcatgatatgaaattccatttttgaatgaataaaatatacatgtgtatgtatatatacttattaacacttaggattatatacacacaataaaacgtct

SEQ ID NO: 952596 - DNA, 475 bp, Homo sapiens
acaataattctccagcaatagatctcaaccagaaagaaattctggttaagaatttattatttatcttcaagataaataattcaaaatattgacttaaaataagatcggtgagatacaaagtaattcagaaaaaatacaggtaaatcaagaaaacaattcagaatatgaatgagaaatttagcaaagacatagatattttttaaaaagaatcaaatggaaattctggaactaaagaattcattaaaaaaacaaaacacatgaaaacttcaatgatagactagattaagcagaagaaaggacctcagaacttgaagacagggtttttggaaatcacctatctagaaaaaaatcaagaaaaaagacaaaagaatgagcaaaatcttcatgacatttaggataacrtaagcaaaagaatatctgaattattggtatccatgagagcaaagagaaaatgaaagtattataaaagttattt

SEQ ID NO: 952597 - DNA, 618 bp, Homo sapiens
ctggttgttaatcttaactttagccaagacaaaattccaattcagctacttatctagggatggrtctcaggctgaagactgctctctaccatctgaggtgcagaaaaaactcaaactctcttccttgttgaaagtgagctcaaagtccagaaaggaattacctgtttgaaatcatcatggaagcagaaaaacttgccttccctgttggaagaaagtaaaactccaaaaaataaaaggagttaaactttagatctcaaccaaattttgggagatcagggattctccagagggagagcttccaggcctcagcaaattttcctattggtttgagccataaagaagctcaagctggtaccacacacccataggaactttgtcaaagctcagagatacctccactcagaatccctttgttgttaccaattctgaatgcaaaatatctgagacaggtcttagttaatttagaaagtttattttgccaaggttaaggatgcacccatgacacaccctcaaggagtcctgagacatgtgcccaaggttgttgggggtatggtttgcttatatacattttagggagacataagacatccatcagtatgtgtaagatgtacattggct

SEQ ID NO: 952598 - DNA, 648 bp, Homo sapiens
cttgagcgcactgagcgtgcacattggaggatctttgcacttgctgttcctcctctctggracaccctgaccacagtctgcacgatgggctccctcactgcattgaggtctcagcagaagtatctccttctccagcttccgtaaataaaagaccatcccttgccactcatcatcttcctactacccctccacacacaccctctacccctaccttccttccatagccttcccacagcctctatctacctaacagactattcctttcctcatgtgtttatcatgcaacaactgaatgtaagctctaggagggcagcagcttcacctggcttgctttctgctgtagccttaattgtagaaaactggctatatgttaaagcaatcattttagcttaaaaatgcatatattggataaagcttgcttaaaaagagatatactggctttcctgaaaaaactttatatttagaatatgaacataagctaaagaagattgagaggctaatgttgtataccattatctctaaatgtagtatatttcaactagtaaaacttattttgttttatattaaaatgattcagctttcataagtgcatcattttaggcagacggaagccatggccagggccatcttttgctgtctgatgtcccc

SEQ ID NO: 952599 - DNA, 596 bp, Homo sapiens
tttttgataggagggttctcagttaatttactatattgccataaatggaagtcagccctctaaattctatgattctgtgactattaacttcttttctcccattgagttaatttggatatttatcttatttcatcttgattcattgggtgttctgactccatggtgtgttggaaatatcctcagttctcttggaggaatattaataagaaattgcataagtgaaccaaaaaaacctaaaagctaatggctgtaactttgatatttacatgttggggctgaccctagcatggagatattcaattgtcctccctctaatatttcagcctatgccatgatacagaccattaaggtcacttgtgttgctttactcggcaagtataacttgtgatatacttgtaatattgtgaaagattaaacttaaatggcaatattaaatgtcagcaaaagttaaatcagtggtgtactaaagagactccagttctatctaatgcctaacatagggaaggtctgactgccctttggactggatatgatcttgggtttcttagacattggaggctgaggtaccttatctactrcctcacagttctggaggc

SEQ ID NO: 952600 - DNA, 751 bp, Homo sapiens
tcaggcttaccccagctcttagtctagtttccaagtacatttcatggcaggaatctccctctccataaattagcgcacaacatctttggacgggcctgaatactacagaggtttccctgctggtagaatgmaaagtttgcaaatctgctgattcatcaagccgacacaaagggttactgctactatacatcaaatcgtaacattttcttggaggcttatttttaacaaaaacatatccatttggctacaaggatgaccttttctgcctccttacccctccatgctggaagtcttcatttcctgatgcctgctgctaatataggacacatgttgaaatgtttatgctaattaggctttgattggaatctcagaaacaagttaaaatgacaagttttattgcattgatgaattaattaatgaaatgaaatcattgttatgctgtttgaaaccagtcctctgatttttgcaggaggcaggtggattttctactctaaaaatctagtcgttttatcagaaaggagtgcaggatttacgtgttgttctcaggtgggagtactgtgggaataaagaaggatcatccttttgatgaacaagtgagtagcgatggtggatgatgagaacaggcattcattcatgtgaatgtgcaaacaaatggaaaggagatattaatagaacaggtgatggagaagaatcagtggtaggtgtctgtggcactgataaattgcagtctccccacatgaaccatcttcag

SEQ ID NO: 952601 - DNA, 579 bp, Homo sapiens
cagagttgagtacttgcatagagacagaccatatgttccataagacttaagtatttactatgtggacattaaacaaaagtttgctaatcactgctctaaaccattwtaaatggtaatataaaccaaatagcctacaccaaaaaacaacaatcattatgaaacactaagaaaacaaaaccactaattattaagcaacagaccttcacagccaactcttcacttggccatctcttttttttttttttttttttggggagacagagtctaactgtgtcacccaggctagagtgcagtggcatgatctcggctcactgcaacctctgcttcctgggttcaagctattctcctgtcccagcctcccagtgcctgtagcctcccatgcctgtagctgggattacaggcatatgccaccaggcctggctaatttttgtatttttagtaaagacaggatttcactgtgttggtcaggctggtctccaactcctgacctcaggcgaccccccctgcctcggcctcccaaagtgctgggatgacaggcatgagccactgcacccagcccacttggccatctttcaatag

SEQ ID NO: 952602 - DNA, 652 bp, Homo sapiens
tgctttctgtcacagtaatatrgccactctagaatttcatattaagggaattatacatgtgctgttgtttttaattattgtatttagcttaatttttatatttatccatgttgtagcatttattaatactttgttctttttattttattggtcaatagtattcctgtgggatgtgtgagtgtgtgtgtgcaccaatttgtttatttattcaccatttgatgaatgttgttatccctaatttgagatgaatatgaacaatgctgctaagactaatcattaaaacacctatgaacagtcatatgcttttttgcctttggtagttgctaagagtagaatacctgggtggtattttatatgtatttaactttacaatactaccataatgttttccaaaatggctgtattttatattctcactagtagtgctgacttcataaaatgaggaagtattccctctattttttgtgagagattttgtagaattgatattgtttccttcttaaatgtttgatagatttgccagtgaaaccatctgaaattagaactttcttctttgggagggtttttaatgacacatttaattactgatataggttataaatatctatagatagatttatataatacataatacctataaccttatgcgtgt

SEQ ID NO: 952603 - DNA, 662 bp, Homo sapiens
taggtggtatcacattgtggttttgatttgcatttcctgatagttagttatgttgaacatttttctgtatgcttgttagccactagtatatcttcttttgagaattgtctgttcatgtccttagtccactttttgatgggattttttttcttcctgatttgtttgagttatttgtagattctggatgttagccctttttcagatctacggattttgaaggttttctcccactctttgcattgtctattaactcagttgattatttcttttgctgtgcagaagttttttagtttaattaagccccatctatttatctttgtctttcttgcatttgcttttgcgttcttggtcttgaaatctttgcctgagcctatatctagaaggtttttcctgtgttatcttttagaattttttggtttcagatctttgaattatcttgagttgatttttgtataaggtgagagatgaggatccagtttcattcttgtacatgtggcttcccaattatcccaacacattggttgaataagttgtactctcagttaacccaaccctttgcttcaccaggcggtctttctctacctgccctggttgccaaagacaaaggacataatctcttgggagctgtatagcrccacctaccgtctgatcctctctataca

SEQ ID NO: 952604 - DNA, 583 bp, Homo sapiens
ggtctatcacatatggcttttattatgataarttatgttccttctatacccagattttttagagtttttatcatgaagttatgttgaattttatcaaatgcttttcagcatcaattgaaatgatgttatggttttcttccttcattctgttgataggatgtatcacagtgattaatttgcatatgaaccatacttgcatccctgggataaatcccactttgtcatgatgaataatctttataatgaattgtcaaatttgctttgctagtattttattgaggttttgcatcaatatgcatctgagatattggcctgtagttttcttttttaatctgcaataatgtgtgctttggtattagggtaatactggactcagagaatgcattggaaatattccctcctcttctatttttcagattagtttcagtatgattggtattagttcttctttaaatgtttggtagaattcagcagtgaagccatcaagtttcaggcttttcttaactgggagaattttgttatggctttgatctcgttaattgttattggtctgttcaggttttgtatttcttcctggttcaat

SEQ ID NO: 952605 - DNA, 660 bp, Homo sapiens
aacccttgaatgaaggggaggccaagtccctttgaggaacccccactacactacccacaattatactgttaatctttctcccatctttccccaaggagacctccgcccttttaccagggtaactrtgcattggggaaagggaaataatcagacctttcagggactactgaacactacttctgaggtgacattgattccaggggacccaaaatgtcactgtggccctcaagttagaggaggggcttgtgaatgtcaggtaattaatggagttgtagctcaagtctgacctacagtgggtccagtgggtccctggactcatcctgtggtcatttctccagtgccagaatgcataattggcatggatatacttagtagttagcagaatccccacataggctccctgaccagtacggtgagggctattattgtggcaaaggccaaatggaagctattagagctgcctctacctagaaaaatagtaaatcaaaaccaatatctcatccctggagggattgctgagatcagtgccaccatcaaggacttaaaggacgcaaaggtggtgattcccaccacatcttaattcagctctcccatttggcctgtgcagaagacagatggaccttggagaatgacaatggattatcataagcttaaccaagt

SEQ ID NO: 952606 - DNA, 581 bp, Homo sapiens
cctcccaccacaatatctgagactgtttccctatagcctcaccaatatagtgygttattaaacttgtgattttgttaatctgatgggtaaacaatagtatcgcaatgaagtttaaattttgttttctcttatttgagggaggctgaatatcttttcgtttccaagagccatttgtattttattttttatgaacaatcctttactcatttgttttcttctggatgttgctaccacactggttgatctcagtctcttggctgggtcttcctcttttatagatctctaaatgctggaatgtcccagtgctctgtctccagcttttttttttctttatttttctcctaattatcaaatgagtttctcctattctatataagtttctcctcttctatataagaggtgatgctttccaaacttacaactccaattctggcctcttgcccagacttttgtcaactgcctgctcaacatcgcctagttttctaataggcatctcaaatttaatatgtctcaagtataactcttgattaacccccttccactccaagtactttccatttcactaaggagatctgccattc

SEQ ID NO: 952607 - DNA, 608 bp, Homo sapiens
tttggtctaaagaagtttaaattcaatgtttccttgttgattttctgtstagatgatccgtctaatgctgagagtggggtccccaactattattgttttgcagtctatctctccctttagatgaaatagtatttgctttatatatctgagtgctctggtgttgggtacatacatgtttattattgttgtatcctcttgccagatggacccctttatcattatataataaccttctttatctctttttacactttttgacttaaagtttgttttatctgatttaagtatagctactcttgcttgcttttggtttctgttgacatggaatgtctttttccatccctccactttcagtatgcagttgacccttgaataacgggtttgaacccacatgggttcacttacatgcaatatttttttcagtaaaagttacactgattgtaaccctcctgtctcttcttccaccttctctaccacttatggctctgtcacctctgaggcaacaaaaccaatctctcctcttcttcctcctgttaagactactcaatgtgaagacaaggataaagatgtttatgatgattcacttctacttaatggacagtaaatat

SEQ ID NO: 952608 - DNA, 589 bp, Homo sapiens
agctattgttttgggttctcttttcaccatcatcttaagaattctctccatcctcttaagtgttgaatatttgttttgtgaaccccaaatatctgggtttatttaggaagtttattttgccaaagttaaggatgcatgcccgtgacacaaccttaggaggtgctgacgacatttgtccaaggtggtctgagcacagctttgtttcacacattttagggagacatgagacatccatccatatatgtaagatgaacattggtttggtccggaaaggcaggaaaactggaagcaaaggttggacaacttgaagtgggaagggggcttccaggtcacaggtagataagagacaaatggttgcattcttttgagtttctgatgagcctctccaaaggaggcaatcagatatgcatttatctcagtgagcagaggggtgattttgaatagaatgggtggcagatttgctgaagcagtttccagcttgacttttccctttagcttagtgatttgggggcacaagatttattttcctttcacagtttttagaatcccagtcctccttttkcttttgactccttcattttactggaga

SEQ ID NO: 952609 - DNA, 608 bp, Homo sapiens
tgaaagtttctattgtagtgaaasgctttttttttttttttttttttttttttttttttttgagatggagtctcactccgttgcccaggctggagtgcggtggcgtgatctcggctcactgcaacttccgcctcccaggttcaagcaattctcctgcctcagcctcctcaggagctgggactacaggcacgcaccaccacgcctgaataattttttgtaattttagtagagacagggtttcaccgtgttagccaggatggtctagatctcctgacctcgtgatctgcccacctcggcctcccagagtgctgggattacaggggtgagccactgcacctggctcttttttttttttttttttagtataaaatttccctttacctcatgcaatttcaagttatcaatcagtacatttatatgattgattgaatttggtgtgtgctaaaaatttgctgctcaaggaaatcaactttttatttctcctattaggcgtctgttcatcgtgtgtggttcaaggaggaaattcgtggctgcagagatttgaaaaccacagacgaggggaatatattcaacccagttttgacctgtttctgcttctgtatattgtg

SEQ ID NO: 952610 - DNA, 738 bp, Homo sapiens
atgaatgcatagagagcaagttctgtagactgggaagtgcagaaatgggtgagcccctagggtgggtgctgtaagggtcggaggaggasccccccatcccacccggtgtgtggtgtgggaagactttctggagcggagacgtgagagctgagtcctgcgggatgggccggacctcactggggaagaaggaagggaaaggcctactgggacgaaggaacagcatgagctaaggaacagaagtttgaaatatcatggaacctgtggggcattatcaggcatgggcagagatgacattggcacccaggccttctgtttcctgatcttgtgttctagtcagaacagaatttatcccagctttctggaagaagttgctcctgttattttacttacaatactctcttccatttatttatttatttatgagacggagtctcgctctgtcacccaggctggagtgcggtggcgccatctcggctcactgcaagctccacctcccaggttcatgccattctcctgcttcagcctcctgagtagctgggactacaggcgcctgccactatgcccggctaatttttcgtattttttagtagagacagggtttcaccgtgttagccaggatggtctccatctcctgacctcgtgatctgtctgccttggcctcccaaagtgtggggattacaggcgtacaggcgtgagccaccacgcccgtcctatttatttattttttcttgagacaga

SEQ ID NO: 952611 - DNA, 555 bp, Homo sapiens
gtacctgtggactttcatttttggcctttaattttattggaacacacacaggcaggaaccacgttgtaggcaagaacacgtaagtgcttagctgtagggaggccaaaattkttctagactgaaatgtgtagtaaaagaacatattactcaaatatattttataacttttacatttgcctttgtttttcaaatataaggacattacaaaaactgcagatagaatcagatagtaaaaattattatagcccagaagtcagaatggcagtcttctatgcctaggtctttatgaccttagctaaagtcatttaacatctccagattagttcctttatttaaaaaaaagcaatgtggaggttaaactagatgaggtccactgttttgaagtgtgttggcattttaagattttgagataaaaacatctttaaaatggtgactctctgctgtcatgtttaaaaggaaaattatttatgtggaataagcataaatatgctatgatgtgaaacatgcccaaggtcctaatttttccggtgtttaattattgaaaccaatcactta

SEQ ID NO: 952612 - DNA, 570 bp, Homo sapiens
gtgtccatgtgttctcattgttaactcccacttatgagtgagaacatgtggtgtttggttttctcatcttgtgatagtttgctgagaatgatgttaaccttttcatatactataaggttattttttaaatattccagtcttcttatcctatttaatatcctcaaattctttcattttcttttataaacatgttatttttctagctgtttcaatatttattttgccatacatggttccaactcctcaatcattgggaggggaatggggaacaatttgtgattgtctatctccaccttagaaaagtggttcctaaagtgtggttcccaaatcagcagcatcagtatcaccagggaacacgttagaaatgtaaattatcaggccccagcccagatgaaatcagatgaatcagaaattgtgtgaatggagcacattcatgtggtttwacacaccttacaggtgattctgatgcacactaaaatttgagaattattgccttagaataatcatacaaaggtaaacccaaccaaactttagagattatgcataattatacatattaagcattttatc

SEQ ID NO: 952613 - DNA, 575 bp, Homo sapiens
tacaactataggatgttactcaaggcttgaactggcacggtttatgagacagcacttgaagttctgaagaatgacagaggaagaagaacctgargccaatgacagcttccgaggggaaatcatgtttcagcttagtcttgaagaatgcacagtaaactctgcatccctggtggacaagacagttgaggacatttcatgtggaagaaaaggaaggaaagagattgtgaaaaaaagagatcattacagcaactcttgatatttaatatgtcaagtcctctttctttgttcttagttccattgggtaattttctatatatatgttgatatcaatttgttttaatcagataattgaccgaggaaacatatatatatatatatatattttttttttttcgagacagagtcttactctgtcacccaggctggagtgcagtggcgcgatctcagctcactgcaagctccgcctcccgggttcacgccattctcctgcctcagcctcccgagtagctggaactacgggggccaccacaacgtctggctaatttttttgtatttttagtagagacggggtttca

SEQ ID NO: 952614 - DNA, 617 bp, Homo sapiens
cgaggcaggtggatcacctgaggtcagtttgagaccagcctggccaacatggtgaaaccccgtctctactaaaaatgcaaacaaattatccgggcgtggtggcgggtggctgtaaccccagctactcaggaggcttaggcaggagaatcgcttgaacccgagaggcggaggttgcagggagctgagaacgcgccattgtactctagcctgggtgacaagagtggaactctgtctcaaaaaaaaaaaaaaaaaaaaaaaaaagaaaagaaaagaaaagaaaaaagaaaaattgctatgttgaagttcaccatgtttaaaaaaaaaaaaagatgcaggggtttacattgaaaaaaaaaaaaaaaaaaaaaaaaggcatgaacttctgatacctgctccaaggtggatgaaccttaaaatacaatgcaaagtaaaaggtgccagacacaaaaggccacatattatatgattccatttatatgaaatgttcaggataggaaagttcataaagacggaaagtatttagtggttgccagcggctgsagagaaaggaaatgaggtgtgattgttaaggagaatggagcatctgtgtgggaggatgaaaatgttctggaattaga

SEQ ID NO: 952615 - DNA, 784 bp, Homo sapiens
tgtttaaagccaactgagtatcaccttgtgaatagatataaatgaagttgagacactgaagattcagcactggagcactcaacacgttaagggttaggaagatgagcaggaatcaacaaagagtgmgaaggaattgctaatgggagaaagagggtagcaaacagtggagtcctaagagaccagtgaaaaatcgtttcaagggaaaagcaacctggctcaaattacacagggaagtcaagtaagaagacaaaggagaatcgaccattgggtttactgccatggtattcatcagtaagcttagaaacaataagtctggtagattgaaagtggcttgatcagactttgttcaaggattgcgaggggaagtagaaaccattagtagagattaagcaattgctataaagaggagcataaggccgggtgtggtggctcacacctataatcgcagcactttgggaagccaagatggatggatcacttgaggtcaggagttcgagcccggcctggccaacatggcaaaaccccatctctacttaaaatacgacgaaaatatagcagcctgttgtggtgccatcatgctgtcatcccaccttctcaggaggctgaggcaggagaattgcttgaatcagggaggtagaggttgcagtgagctgagatcgtgctactgcactccagcctgggcaaaagagtaagactctatcacaaaaaaaaaaaaggaaggtggagatggaagtgggttcaagcaagttttaatttgtttttaagtgggaagtatacatttttg

SEQ ID NO: 952616 - DNA, 600 bp, Homo sapiens
gatcagctaataaagacccaggagtcataggaggctctcattggccaaagataatatattttggatactgataaggataataactacaattaattgaaacactacaaataggttttagtctgtgcatttatatttattctaaaaagtataggttaaaaactcactggtcacctttgaagtgtactaaggaatcaacttattattttgaaaatttgctaatttaggataagaattaattatttgcttgctttcctataccccagagtaactaaatagttggtaaattttctctttataggtatattccagctaataagtgatgaaaagtgttagaatatgaatatcagcattttgtaactgccaatgaattaatgggtctatataatgatcgtcaatagctgataatgtcagggacagtcctcacgactctctggtgagaatatgcacagtgccaatgaagtagtgtttccaaaaacatctagctttaatctgttcaagcctttagatacacctgcacatttagatgaaatataagaatcagaggaaaatattaaatgctatcattacaaaaaartacaagaaaaaagagaggacaaacct

SEQ ID NO: 952617 - DNA, 607 bp, Homo sapiens
ggggtgaggcctgtgactgctggctttcccccacttccctagtgacctgtatgactcagcagaggcagccataatcccacagggaacataacttcttcggcctgagaaccacacccccatcctccacagcagcaacaggaagacccacccaaaaagaggctgagctcagacatgcctatccctgccccacctggtggtctttctctacaggccctcatagctgaagacaaaggacataatctcttgggagctctatggccctgcccaccacctgagaaacacaaatacttaaccaggtgtccctagagcaagtttgcatcctccctatacagctgcagctgatgcactcttgatagcaccacctcctggctggaggccaaaccaacacaaaactagcacactaaacaatagtacaacaaaggaccctcccagagtccacttcactcctctgctacctccagtggagcaggtgctggtatccacggctgacagagctgaagacagatcacatcacaggactctgcrgacactccccagtaccagctcagagactggtagctctgctgggtggccagacccagaaaagtgaaacaattgctgcagttcg

SEQ ID NO: 952618 - DNA, 619 bp, Homo sapiens
acaactttacctatttccaaactgaattccttttatttcccttgtattattgcactagttagaacytccagtacaataagatgagagtgaacgtctttgtcttattcctgatgttagagagaaggcatttagtccttcaccattaaatattatgattgctgtacgttttcatggatagcagtaaatttttttatctcaaatatggtagttttcatctctacgagttttattttggtcttttatatctcccatgtctctacttaacattcaatatttccttttgctttttgaacatgtggaacactgtcatacctcttttaatgtctctacctactaattctatcatttttgttatttgtaattcagtttcattagactgattttattcttaatggtgagttgtattttctctgcctgcctaggatcttttgattggatgccagacatgaattctaccttaattgatactagatatttttctcatcctataagtattcttaaaaattgctcttaacatggttgcattacgtgggaagagtctgatccttttaggtcttatttgtaagtcttgtttgtgaggacaagacctgcatttaatctggggttaatattttcccac

SEQ ID NO: 952619 - DNA, 566 bp, Homo sapiens
ccatctcggcctcccaaactgctgggattgcagatgggagccaccawacccaacttacttgactgtgattttgaagaaaagagggggctagaaatattcctttgtaatatatctttacaaaggcctttgtctaggtgctcccaggaaggcctgttttcttttcttttctttttttttccttttcagaaaggatctctccctgtcacccaggctggagtgccgtggtgcgatcatggctcactgcagcctcaacttcctgggctcaagtgatccacccgcctcagcctccagagtagcggggacaacacaggcatacacccccacccccacctaatttttaaagtcttttggtagagacagagtttcaccatgttggccaggctggtctcaaactcctgggcttaagcgatcctcctgcctaagccttctaaagtgttgggattacaggcatgagccaccatgcctggattcaaaaagacctgtttctaccacttcagttttgtggatgagtctgttgtaaattgaagcagatgagtgcagacaggtctagctgtgtgacttttatg

SEQ ID NO: 952620 - DNA, 567 bp, Homo sapiens
cccatctcggcctcccaaactgctgggattgcagatgggagccaccatacccarcttacttgactgtgattttgaagaaaagagggggctagaaatattcctttgtaatatatctttacaaaggcctttgtctaggtgctcccaggaaggcctgttttcttttcttttctttttttttccttttcagaaaggatctctccctgtcacccaggctggagtgccgtggtgcgatcatggctcactgcagcctcaacttcctgggctcaagtgatccacccgcctcagcctccagagtagcggggacaacacaggcatacacccccacccccacctaatttttaaagtcttttggtagagacagagtttcaccatgttggccaggctggtctcaaactcctgggcttaagcgatcctcctgcctaagccttctaaagtgttgggattacaggcatgagccaccatgcctggattcaaaaagacctgtttctaccacttcagttttgtggatgagtctgttgtaaattgaagcagatgagtgcagacaggtctagctgtgtgacttttatg

SEQ ID NO: 952621 - DNA, 470 bp, Homo sapiens
attcctttgtaatatatctttacaaaggcctttgtctaggtgctcccaggaaggcctgttttcttttcttttctttttttttccttttcagaaaggatctctccctgtcacccaggctggagtgccgtggtgcgatcatggctcactgcagcctcaacttcctgggctcaagtgatccacccgcctcagcctccagagtagcggggacaacacaggcatacacccccacccccacctaatttttaaagtcttttggtagagacagagtttcaccatgttggccaggctggtctcaaactcctgggcttaagcgatcctcctgcctaagccttctaaagtgttgggattacaggcatgagccaccatgcctggattcaaaaagacctgtttctaccacttcagytttgtggatgagtctgttgtaaattgaagcagatgagtgcagacaggtctagctgtgtgacttttat

SEQ ID NO: 952622 - DNA, 588 bp, Homo sapiens
ccatttggtagacagaataatgacctcaaatatgtccatgtcctaatcccatgtggcagacagaataatggccccaaagatgtacacatcctaatccccatgtggcagacagaataatggccccaaagatgtccacgtcctaatgcccatgtgatagacagaataatggccccaaagatgtacacatcctaatccccacgtggcagacagaataatggccccaaagatgtccacgtcctaatccccatgtggtagacagaataatggccccaaagatgtccacatcctaatccccatgtgggagacagaataatggtcccaaagatacccatgtcctaatcctcatgtgatacagagtataatggtcccaaagatgtccatgtccgaatactaggtagcagacagaataatggccccaaggatgtctacatcctaatccccatgtggttgacagagtaagcacccccttcaccccctcaaaaaaaaatccacatcctaattccagaaatctgtaaaaacctgtcawagctaaaaacatttgcagatgtgattagttcagaatcatgagatgaatgacgcttgattatc

SEQ ID NO: 952623 - DNA, 600 bp, Homo sapiens
aaaatctctttaatttcgtaaaaaagtgaatgtgaactcttccctctccttttgctgctagctgcaatggagatgtgagggctggagaccatgccaccatattgaaccatgagtagaaagtcagatactaaaagagtggagcaacaacattccaaatgcctgacatcttgattctgtacaataacctggaccccttgttctggcctcctatcatgtcagagagaaacaaacttccatcttatttaagtcatgattatttgcttatttccatacatttgtttatgcagttatacgatatttattccatctatctattatctatctatcatctatcctatctatctaaccatctacccatcatctatcctatctttctatccctctctctatcatctatctatctatctatctatctatctatctatctatctatctatcatccatcttattctatgtgactatctatcatccatcttattctatctatctatctatytatctatcatctatctatcatctctcctatctaatctatttatctatgtatctatccatcttatctatctacctatcatttatctatcctgtgtatcaatgtat

SEQ ID NO: 952624 - DNA, 742 bp, Homo sapiens
atggccttttaaagtcacaattacaatgycagctaggtgacaatactttgaagggctggggaaaagttctccagcaggatgtgtataccctgaatccgcatccaatgtatgacactatttctcctgtggatttctccttgaggattcatggatccaggaattaaggggtggaagtggaagtagcaccactcaccatcacctccactcatcatcatccctagtgacctactagcaaaatttttgcttcctgttcctgcaacgttatgtcttgctggcctggaggtgttagttccagaaagaggaatgctgccaccaggagacacaacaatgattccattaagctggaagttaagattgccacctggccactttaggctccacctacctctaagtcaacaggttaagaagggagttacagtgttggctgggttgattgagccatactaccaagatgacatcagtctactactcaacaatgaaggtaaagaagaatatgaatggaatacaggagatccattagggtgtctcttagtattaccatgccctatgattaaggtcaatgggaaactacaacaacccaattcaggcaggaatacaaatagcccagacccttcatgaatgaaggtttgggtcactctaccaggtaaaaaaccatgacctgttgaggtgcttgctgagggcaaggggaatacagaatgaatagtagaagaaggtagtcgtcaagaccagctacgaccacatg

SEQ ID NO: 952625 - DNA, 564 bp, Homo sapiens
ctctttgtgtttcattttggatattttctactatgatatttttgagttcattaatattttttgttatgtttaatrtgctattaatcccttccataaactttttaatctctgataatgtgattttctttagagatggagtcttgctatgttgcccaggctggcctcaaacttatgggctcaagcaatcttcccacctcagcctcctgagtacctgagattataggcactttgccaccatgcctggcttctataaattttgttgagctttgtaccgtgacagagttacataacttggaaacagtttgattcttttgggtcttactctcgaaatatttttagatgagagcagaaccatgctcagtctagggctaattatttcgtgctaccttagtaagtctttttgtgtgctttaccagtgttccatgattcttggggttttgtggtctgactgggagggacagatatatcctcagttctgtataaacattactcactgttacctctaatcttctcaggtgatacttcccctagcctcaggaagtttctgcaaacacatttgctgac

SEQ ID NO: 952626 - DNA, 636 bp, Homo sapiens
ggcctttgggcaggcttgaaaaatttaaagttaataatgctagattcagttgcatctgtggggttccatattctctatttccccctttyggcttttgcactgctattttagggaaagattcattctttccgctatggcttgtccttgagaattgtatgggataccagtaatgtgtttaatattccatatagagaaaaatgtagctagagcttggctagtataacctggggcattatctgttttaatagaagctggaatgcccatcacagcaaaacactgcaaaaggtgacatttaacacagcagaagactcttctgattggcatgtagcccagacaaagtgagaaaaggtgtctacacatacatgtacataagctagtctcccaaacgaggtaacatgtgtgacatccatttgccaaagagagttaggttccaatcctcaaggattaactcctcctgtaaaagatgaggaatgtaccgtttggcaagttgggcatcactggataatagctttagcctctttccaggtaatgttgtatctgcatttgagaccagaggcattaacatgggttaaattgtgaaaatgtctagcattagatattgcattagcaactaggcgatcagccatttgattccct

SEQ ID NO: 952627 - DNA, 362 bp, Homo sapiens
aatgaccacagaatgagtctggggaccccctggacccactgtaagtcggacctgagctaaaactctattaattacctaacctccataagcacctactttaactggagggccacaatgacattttaggtaccctggaatcaacatcagctcagagccagcatccagtagtccccaaaatgtctgatcattttcctttccccattgttcagttaccctggtaaaaaaggctggaggtttccttggggaaggaagggaaaaagattaacagsataaattgtcagtagtttagtggggtccttcttcaaggggacccagtctccccttcactcaaggcattctgggtctgtacactggctcaagtc

SEQ ID NO: 952628 - DNA, 466 bp, Homo sapiens
agcaagaatgaaaacagtgagcgaatcctgtaccggcaaccaagatatccatgttctctcattgrgactgactaggcagtagtgcaaccaagagagagtgaggaaaagcagggtggagcgacggttcatctgggagctacatgagcgagggagccctcactcccagctatgggaagtggtgactgattgtgctaccctgcccgggaaaccgtgctttttccatggatctgtgcaacccatggatcaggagttcccctggtgagtcaatgccaccaaggccttgggtctgaagcacagagatgtgtagattctcagtggccactcggctggagactacttaaggccaccaagttcttgggcgaaggggtagctgtcatcatcacagatgtctgctgcctaaggcaactaagctcccagtgggaggtaatggcagccatcactgcagctctagtctgctgttttgatt

SEQ ID NO: 952629 - DNA, 525 bp, Homo sapiens
agaaaatatttgtagctactagtctatttcactatcactaccataaaatgcacacaaatctgttataaaaattaaaatttatcaaaattacacacacaaacacaaaacatacatggtaccattcagtccagagaaatgtaaacaaacatgaagatggaatattaaataataactgcataaaattaactgtagtaatgctgtactactctaataatttcagagccatcccctgttgctattgcaggggaaccaagcgttgctaagatccacttaaaatgccctgtgaagataatcatctccatgtgagcctctcatctcttcagtaaattgcttatcccaataaaaagcaatctctcatggctcttgcatattttttcattgtgttcgatgcaacatggtaaatcttgaatarcctatacaaagtaccactagttaagctggaagtgttcacaagaaggagagaaaagtcatggcattacgagaaaaagttgaattgcttgggatgtaccatagacagaggtctgc

SEQ ID NO: 952630 - DNA, 640 bp, Homo sapiens
atgttccgtgaatcatattcagaatatcaatgtaagttttctgacatttttgcttttagtttggtaaaacaacataaaatttagaatcctaaccattttcaagtgtacaattcagtgacaccaaacacactcacaatgctgcacaatcaccaccaccatccatctccagaacactttcacatcccaaacaaaagcccccaccaaggaatgataactcccctttcccctttcccttggcccctgcaacctccattctgcttctgtctctaggaattcacccaatctaggtgctgatagaaggcaaaccatacaaaacagacgcttttgtgcataacttattttacccagcacaatgttctcaaaattcatcagtattgtagcatgtatcagaacatcactacttttaaaaggaaaaagtattcattgcatgcatacaccacactgcatctatccatccaactgtctgctgaaggaaacctgggcagcctccatcctttggctactgtgaacaatgctgctatgaacaygagtgtacacatgtttgtgtgaatgcttgttttcaattctttccactgtacacctagaagtgaaaccactggatttcatagcaattctatgtttaagtttttgagaaaacacc

SEQ ID NO: 952631 - DNA, 578 bp, Homo sapiens
tatcacacattcaaagaattggtaccaatcctattgacactattccacaagatagagaaagagggaatcctccctaaatcaytctatgaagccagtatcaccctaatagtaaaaccaggcaaggacataacaaaaaaagaaaactacagaccaatattcctgatgaacatagatgcaaaaatcctgaaaaaaaaaaaaactaacaaaccaaattcaacaacatgtcaaaaagataatccaccacgatcaagtgggtttcataccagggaagcaggaatggtttaacatatgtaagtcagtaaatgtgatatgccacataaacagaattaaaaacaaaaatcacacgattatctcgatagacacagaaaaagcatttgacaaaatccagcatccttttatgattaaaacccccagcaaaattggcctagaagggacatagcttagttgtctaaaaattgcttgccttttcatatttttgacctatttgtatttcttccttttctttttttctatatctgtcacatatatatttacaatacaggtttttatttgtctcttactgatattttaaaatgcca

SEQ ID NO: 952632 - DNA, 610 bp, Homo sapiens
aggtgtacaacagggttcgttttctaaagtgttgcactggagctttgcattagccatctgtattaggcaggtcgagatatcataacaaaacaccacaaactgggtggtggcrggcaacagaaatgtattttctcacagttctggagactggaagtccaagatcaaggtaccctcagggttggtttctgatgacgcttcccttccagctcgcagccatctgcctgcttgctgtgtcctcatctggcctttcctctgtgcatgtgtggaaagaaagagactggggtaggcagggagggaagatagctagtatttcttactctttttataagtattccaatcttatgacattaggctgccactcttataaactcatttactcataattatccccttaagggccttatctccaaatatagtcacattgtgggttatggtttcaacatatgaatgggtgtagggcacaattcagttcataacaccatccaaatgaagctgtagtataggcagttagatatgtgaatctgaagtttggcatagaggtgctggccaggaatataattcagagagtcttcagaatacggttcatatttggacccattagactagatac

SEQ ID NO: 952633 - DNA, 554 bp, Homo sapiens
ggaacttgagttctggcaaatgtcgctatggtaggctaaagtgctctgggatcctataaaaacttgtaaggcagtataractgcaaagactgcaactcctaggtgggtcctagtgctgaactgggctcagaaccagggaacttggagggcatatgacatactgagacatcatctggggtggccaagggagtgcttacatcacccccgcaaccttaggctgcacagctcatggctccaaaacagactgcttccttctgcttgaggattgaagagagtaaagagaactctgtcttacatcttggataccacctcagtcacagtaagataggccatcagtcaaagccgtgaggccccctttccaggccctagttccaaaatgacaattctagacacaccctaggccagaaggaaacctgaggccttgaaggaaattacccagtcctggcaggattcatcacttgctaactaaagagcccttggaccctgaataactaggagaaatacccaggtagtatcttgtggcccttcagtgagactctgagactggctacctt

SEQ ID NO: 952634 - DNA, 589 bp, Homo sapiens
cgggtggggacttggagaacttttatgtctagctggaggattgtaaatgcaccaatcagcactttgtgtctagctcaatgtttgtmaacacaccaatcagtgctctgtgtctagctaatctagtggggacttggagaacatttgtgtctagctaaaggattgtaaacagaccaatcagctctctgtaaaatggaccaatcagcaggatatgggtgggatcagataaggcaataaaagtaggctacccgagccagcagcggcaaccccgtggggtccctttccacactgtggaagttttgtcttttggctctttgcaataaatcttgttgctgctcactctttgggtctgcactgcccttaagatctgtaacgctcactgtgaaggtcaacagcttcactcctgaggctagcgagaccacgaatccactgggaggaatgaacaactccagacgggaggaacagacaactccagacacgccttcttaagagctgtaacactcaccacaaaggtctgcagcttctctcctgaagccagtgagaccacgaacccaccagaaggaagaaactccaaacacgtccaaacatcaga

SEQ ID NO: 952635 - DNA, 614 bp, Homo sapiens
tgctgagctgtaatgggccctgcccagttcaaacttcccagcagctttgttcaggctgtgaggggaaaaccgcctactcaagcctcggtaatgtctgacgcccctccctccaccaagctggagctctcamgtggacttcagactgctgtgctggcaaggagaatttcaagccagtggatcttaacttgctgggttccatgggggtgggatctgctgagcattggcttcctggtttcaccccctttccaggggagtgaactgtctgtcttgctggcattccaggtgccactggggtatgaaaaaaaaaagctcctgaagttagttcagtgtctgcccaaatggccacccagttttgtgcttgaaacccagggccctggtggcataggcaccaaagggaatctcctagtctgcaagttacaaagaccgtgggaaaagcgtagtatctgggctgggatgcaccattcctcacggcacagtccctccagggttcccttggctaggggagggagttccccaaccccttgcacttcccgggtgaggcgacgccccaatctgcttcagcttgccctccgtaggctgcaccggctgtctaaccagtcccagtgagatgagcc

SEQ ID NO: 952636 - DNA, 615 bp, Homo sapiens
ttcctagagtggctataccattatacattcccaccaacaatatatgagatccaatttttccacatcctcgccagaatttggtgtgatttactttttaattttagccatttctatgtaatatctcatttactcacacattatttagatgtgtattagttttcaaatgttgaaaaatttgcctatctttttgaactgatttctaatgtgacttaagagcatactatggatatttatctgagagcatgctatggatgatttcaattatttttacattttttgactgggtgtggtggctcacgcctgtaatcccagcactttgggaagctgaggtgagcagatctcttgagcacaggtgttcaagaccagactgggcaatgtggcaaaactctgtctctacaaaagtacaaaaaaaaattactcgagcatagtggcctgcacctgtagtcctagctcctcaggaggctgaagtgggaggatcacttgagcctggcakgttgaggctgcagtgagccatgatcatgccactgcacaccctcctgggtgacaggttgggaccctgtctcaaaaaaaataaattattgaagatatgatctacattattaaatattgtgtggg

SEQ ID NO: 952637 - DNA, 581 bp, Homo sapiens
atgcgaagggtacttgctgtaaaacctgcatgctttttataaaagggaatggtttttcctgtccagccttcccctcctggactccctggacataagttccctgaataaagcttatgtcacgcygctgtctttgggtcttttcttcagtcctctagaggcagtgctctcctagcttgcaagcttgggaatccagcacaacaggtggccacagcaggggaaatgttaggacttcccttttccttctctttctttttccttggctagtttttgttgaagaaactgggattttgtttccttttcactgtttggattttgctgattgtatccccatggtattttaccatgccccttgagttttcatcttggtagttcagatttttttttttttttttttgagacagagtctgtcgcccaggcaggagcagtggcacaatctctgctcacggcaaactccgccttccaggttcaagccattgtcctggctcagcctcccaagtacctgggactacaggtgtgcgccactacacccggctaatttttttgtattttaagtagagacggggtttcaccatggtggccag

SEQ ID NO: 952638 - DNA, 581 bp, Homo sapiens
atgcgaagggtacttgctgtaaaacctgcatgctttttataaaagggaatggtttttcctgtccagccttcccctcctggactccctggacataagttccctgaataaagcttatgtcacgccgctgtctttgggtcttttcttcagtcctctagaggcagtgctctcctagcttgcaagcttgggaatccagcacaacaggtggccacagcaggggaaatgttaggacttcccttttccttctctttctttttccttggctagtttttgttgaagaaactgggattttgtttccttttcactgtttggattttgctgattgtatccccatggtattttaccatgccccttgagttttcatcttggtagttcagatttttttttttttttttttgagacagagtctgtcgcccaggcaggagcagtggcacaatctctgctcacggcaaactccgccttccaggttcaagccattgtmctggctcagcctcccaagtacctgggactacaggtgtgcgccactacacccggctaatttttttgtattttaagtagagacggggtttcaccatggtggccag

SEQ ID NO: 952639 - DNA, 770 bp, Homo sapiens
aaaaacttattctattttttttttttttaagatggagtctcgcttcgtcatcctggctggagtgcagtggcacagtctcggctccctgcagcctccgcctcccaggttcaagtgattctcctgtctcagcctcctgagtagctgggaccacaggcatgcaccatcacacccagcttatttttgtgtttttagtagagacaggattttaccaggttggtcgggctggtctcaaactcctgaccacaggtgatccacccatcttggcctcccaaagtgctgggatgacaggcatgagccaccgcacccggccctaataacttattcttgactgcatgtccctcttatgttgttccccagtgtagggctgacatccattgagcacagaaggctggggcctatgatacttcagggcctaaaaaagttttaattttgtctaaaatcagaagaaaaaaatggatataataataatgaacccagccttgattatattaatatttgtctttataccaacatagtcacgacataacatttttaacatagcttatggaggaaggcacctacaaaggcacaagggtcaaggctctgcaaaagtcaccatgcagccctgccggcgtgtattagttattttttgctgagtaacaaaagttatcctaaaatttagtagctttacacaacacacatttattatttcctsctgtttttgagggtcgggagtctgggagtggcttagctcgattgttcaggctcaggtttgtcctaaggtaaggttg

SEQ ID NO: 952640 - DNA, 600 bp, Homo sapiens
caatcaatacaggtccctaagcttgrctgtgcttttgcttcttaggcgcctttttcccttttccaaaataccccactcaggtgtgctcaactcacccgagatctaggccctgggacttccgtcttcatcagaggcccatcataatcaaattcaacgtcgactttggctgcagcttgactaatgtgtctggatcctgcagtaaacaaagacaatgagaaatccctggtgacagcagagatcatgaggattctgccctgacagatgcccaatgtccctaacagaggtagtgccaggaccttagcctcatcccagccagaccaccccagaacactgtgtctggacagaccaactgggccaccacaaggacactgtagattttaaaaaagggaaaacccagtgtcagcaaagttgtaggcaaataggcatgctcctgttttactggcatgagtacaagctgatgccagctttctttgtatttatttattcatttttttttgagacagagtcttgctctattgcccaggctggagtgcattggccccaacaaggctcactgcacccctgacctccaaaggctcagttgatccttctgcctcagcc

SEQ ID NO: 952641 - DNA, 600 bp, Homo sapiens
caatcaatacaggtccctaagcttgactgtgcttttgcttcttaggcgcctttttcccttttccaaaataccccactcaggtgtgctcaactcaccygagatctaggccctgggacttccgtcttcatcagaggcccatcataatcaaattcaacgtcgactttggctgcagcttgactaatgtgtctggatcctgcagtaaacaaagacaatgagaaatccctggtgacagcagagatcatgaggattctgccctgacagatgcccaatgtccctaacagaggtagtgccaggaccttagcctcatcccagccagaccaccccagaacactgtgtctggacagaccaactgggccaccacaaggacactgtagattttaaaaaagggaaaacccagtgtcagcaaagttgtaggcaaataggcatgctcctgttttactggcatgagtacaagctgatgccagctttctttgtatttatttattcatttttttttgagacagagtcttgctctattgcccaggctggagtgcattggccccaacaaggctcactgcacccctgacctccaaaggctcagttgatccttctgcctcagcc

SEQ ID NO: 952642 - DNA, 684 bp, Homo sapiens
tatggaattgtttgtctctcttttggatggtaagtgacattctgtagatcacgtattcatagagtacttagccttcgaatgtgagttacatagatttacttacacaacaggaggatatttagtaaacctatccacagtatcagttcattggagttctatcagtccacaagcctctcacagcacatctcaagttttaagccagatggcttcagcctatagagactggtcactgacccagaaagggagggcctgtgcgccatcttggcttgggtttgccttgctcttgttgactcccggccgaggctcagagggccagtatgttctccaccaggcctgaagtcaggagaccctgccaacagcatccatttactcatgaagaaatcagacacctggagcttaggtatctacttgctcaaaatgctccttatcagagaaaaataacagcaatgtaaaactctcatagcatggaagaaggtgacatgtagctttttttgtcatatgatcttgggatacccaaagactctacaaaaccaaaaccaagtgtttcaggaaagcaagagaagctttttttattttttttgagacaargtctcactctatcatccaggctggagtgtaatggcatgatcatagctcactgcaacccccgcttccaaggttcaagcgatcttcccacctcagccc

SEQ ID NO: 952643 - DNA, 583 bp, Homo sapiens
gcagtggatcccgcaccagggccgcaggtggagctgcctgccagtcccrcgctgtgtgcccgcactcctcagcccttgggtggttgatgggactgggcaccgtggagtagggggtggtgcttgtcggggaggcttgggctgtgcaggagcccacggcggggtggggggctcaggcatggcaggctgcaggtcccgagccctgccccacggggaggcagctaaggcccagcgagaagttgagcacagcatctgctggcccaggtgctaagcccctcactgcccgagtgtggggcccgccgagcccacgcccacctggaactcatgctggcccgcaagcgccatgcgcagccctggttcccgcctgcatctctccctccatacctccctgcaagctgagggagctggctccggccttgtccagcccagaaagaggctcccacagtgcagtggcaggctgaagggctcctcaagcacggccagagtgggcaccaaggctgaggaggcactgagagcgagcgagggctgtgagggctgccagcaggctgtcacctctcaatcccccctctaaacaggacaccccaac

SEQ ID NO: 952644 - DNA, 748 bp, Homo sapiens
tcactagcacattcactggcagtcttctctcacagtccctttgcgagctcaagtcacttggcatcacccacagctctacatacttcctattccaagtttagcataggttcctcctgggtgaatccaggtgctgggtcctggccctcccaacagccttcctctctgagctactcattcatgcatgtgaccagtattttcctaagctctcactatgtgccaggcccagtgttgccagcaccttctgttttactctctgtcattgatagctctggcccccaccattttctagtgagggagtgtggcacagatggcaaagcacacacttgggagtcagagttatctgggtttcagtcccggatctgtcatctgtttgtttgtttatttgtttatttatatatttatttaagaccaagtctcactctgtcacccaggctagagtgccgtggcgtgatctcggctcactgtaacctccacctcccaggttcaagcgattctggtgcctcagcctcctgagtagctgagattacaggtgcctgccaccacgcccggctaatttttgtatttttttagtagtgacagggtttcaccatgttggccaggctggtctcaaactcctgaactcaagtcatctgcckgccttggcctcccaaagtgctgggattacaggcatgagccgctgagcctggccatgttgtctatttaattatgaaaacttagacaagttgcttcactggaagcttcggtttcc

SEQ ID NO: 952645 - DNA, 787 bp, Homo sapiens
tccagtagtgtactctaagatggcagagcctaccccatggccaggctgtacggtgtggcctgtgcgtcctgggctccagggctccaaatgtgcacagcaggtgacagcactgaacgctgcaggcaactgcagcacaatactgtatgtctgtatgtctcaacacatctaaacacagagaaggtgccgtgaaaacacaggatcagtgactttaaagtggcgtacctgatatggcacttagcacgaacggagcttgcgggagtggaagttgctctgggtgagtcggtgagagagggtgagtgagtgtgaaggcctgggacgttactgtgcaccactggagactatttttttgagacagggtctcgctctgtcgcctaggctggagtgtagtggcaccatctcggctcactgcaacctctatttcccaggttcaagcgattcttctgcctcagcctcctgagtagctgggactacaggcgtgcaccatcaaaccctgctaatttttgtatttttagtagagatggggttttgccatgttggccaagctggtctcgaactcctgacttcttgtgatccaactgcctcggcctcccaaaatgctgggattataggtgtgagccacccttcctggcctactgaagactttataaacactgtatacttaagctatactctgtttattaaaaatattttttcttcaataataaagtaaccttagcttactgttactttrtaaactttaaaaaaatttttactttttggtaatacttagcttaaaacacaaacacgt

SEQ ID NO: 952646 - DNA, 595 bp, Homo sapiens
tctttcttagctgtaactctgagcacctgctacttgctgtcatgtcttattggccaattgcgtcccatgttgaacatcacccttgtatagggctgtgaagagatttagaatttaccctatttgcaaactaacaggttagcttgccacagtttcatgaactctaacaggcaacacgagactcctgggtcagagacaaatgacaaagcattatcccttacaaagcattatcccttaccaatgtcgtggccagataatcaccattttgtcattttcctaagctttgattcctataatgccacataacaaatagagtggattatagaaaggaaccctgagtttagaaaatcccaaactcttcaatacactttaagaagagaatatttgcccccagagagcagcattgtctttattacaccaaacagcaaacaaacctgccctctactatagagagagacattatttctgtcttcaaggctatgagctatacaaacatccttagaaagatcgttcagaacaataagttgtttagtgcctctgcactcatgtatcccaacacrttcttattttccacagtatattcccaaggttgtcatgt

SEQ ID NO: 952647 - DNA, 658 bp, Homo sapiens
taagtttcctgaggcctccccagccatgtgggactgtgagtcaattaaacctcttttcttcataaatgacccagtctcatgtagttctttatataagtgtgaaaatgaactaatacagaaaattgataccagtagtttggggcactgctataaagatacctgaaaatgtggaagcaactttggaactgggtaacagacagacattgaaacagtttggaaggctcagaagaagacaggaagatgtcaaatgtttagaattttctagagacttgttgaattgttttgaccaagatgctgatagtgacatgaacaataaagtcaaggctgaggtggtctcagatggagatgaggaacttattgggaactggagtaaaggtcactcttgctatgctttagcaaatagactggtggcattttgcccttgccctggagatctgtggaactttgaacttgagagagatgatttagggtatccggcagaagaaatttctaagcagcaaagcattcaagaggtgacctcactttttatgaaagcgtacagtcacatgtattcacaaagagatgatacaaaatgggaacttatgtttaaaagggaagcagaatataaaagtttggaaaatttgcagtctgacratgtggtagaaaacaaaaacccatt

SEQ ID NO: 952648 - DNA, 620 bp, Homo sapiens
gactacaggtatgtgtcaccatgcccagctaatttttaatttgttgcagaggcagggtctcgctatgttgaccaggctggttttgaactcctaactttaagaaatcctcctgcctcagcctcccaaagtattaggattactggtgtgataacttttcatattattcctttgtaattcttttttgtttctataaagtctatagttacatccactttttaagttttatgttagtaatctgaaatttttttggtcaatctagctaaaagttcgtcaaatttttggtcttttcaaataaccaattttttatgtgctttttttccctattgttctatttcttatttaggaatgtgttgtttaattttcacacatatctaaacttccaaaatttcattgtgttattgatttataatattattctagagtgtctgaagaatatattttgtatgaagtcagtccttgtaagtttattgacgtttattttatgtcctcacatatggtctatcctgtagcayttccaatgctcatttaagaagaatttattcagctattgttgggtggagtgctctatagatacctgttatgtctagttggtttatagtgtttttcaaatcttccatttc

SEQ ID NO: 952649 - DNA, 565 bp, Homo sapiens
aagggacagagtacaaaagagagaaattttaaagctgggmgtctgggggagacatcacatgtcggtaggttctgtgatgccccttgagccgtaaaaccagcaagtttttattagtgattttcaaaagaggagggagtgtatgaatagggtgtgggtcatagagatctcatgctttacaaggtaatagaatatcacaaggcaaatggaggcagggcgagatcacaggaccacaggaccagggcgaaattaaaattgctaatgaagttttgggcatgcattgtcattgataacatcttatcaggagacagggtttgagagcagacaaccggtcagaccaaaatttattaggcgggaatctcctcatcctaataagcctgggagtgctatgggagactggggcttatttcttccctacagttttgaccatagaagatggccgcacccaagggggccattttagaggcctaccctcagggacacattctctttctcagggatgttccttgctgagaaaaagaattcagtgatatttctcccatttgcttttgaaagaagagaaatatgg

SEQ ID NO: 952650 - DNA, 596 bp, Homo sapiens
tgttgtaattgttccaatgaaccaacatgttttttaacaatttatatacgggacaatagactttattaacttctatattyaatgaaaagtcagatcactggttagagttcactatttctcttgactgtgctttggaaaattatattaattgcagaattaaatgaaatagaaaatttccttattctactactgatggtattttctccctgtgcctcagtttctttataaaatggagataaaatatttgatttgtcaccttattgttctatttattaaggtaatgctagtggatataactgataaatcccacattctcaatggcctgacaaaataaaatctggcacttgttcaacataagtattcctatctgagtatatcctctgtaattagtggtttaggagccatgttgcttccatattctggttacatcatcttcacatgtggcctccaaatttactgaggaaggggaatgacgctgtgggaaaagaagaactgatacacacagctacagcctgtaaacgacacacatcacacctcatgcacaagcacaatgcacatcccattcctagatataagggagcagggaaatgtcgtcc

SEQ ID NO: 952651 - DNA, 542 bp, Homo sapiens
aatttccatctgcaactttaattcctctctgttatgtgtactcagtgctctggctaccataacaaaatactgcaggctggtggcttaagcaacggacactgattttctcacaattccggaggctggaagtccaagatcaatgtgccagcaggatctgtttctgatgaggcctctccttggtttgtagatatctgcattcttgctgtgtcctcacatggtgtttactctgtgcacatgtagagagaacgtgagctctgatgcctcttcctcctcttataaggacaccagtcctattagattaggacactgatatggtttggctgtgtccacacccaaatctcatttttcattcccacctgttgtgggagggacctggtaggaggtaactgaattatgtgggcaagtctttcttgtgctattcttgtgatagtgaataagtctaatgagatctgacacgctctctttgcctgccgccatccatgtaagatgtracttgctcctccttgccttcctccatgattgtgaggcctccccagccatgt

SEQ ID NO: 952652 - DNA, 470 bp, Homo sapiens
gacagacaatacctggaaaatggggacactcccaccctaacactgcacttttccaatggtcttagcaaacggcacaccaggagattatatcccrtgcctggtttggagggtcccatgcccacagagcctcgctcactgctagcacagcagtctgagatcgaactgcaaggcagcagcgaggctgggggagcaagctcaaactgggtggagcctagcgcagctcaaggaggcctgcctgcctgcctctatagactccacctctgggggcagggcatagctgaacaaaaggcagcagaaacttctgcagatttaaacatccctgtctgacagctttgaagagagtagtggttcccccagcatggagtttgagatctgagaatagacagactgcctcctcaagtgggtccctgatccctgagtagcctaactgggaggcacctcccagtaggggctgactgacatctcatatg

SEQ ID NO: 952653 - DNA, 612 bp, Homo sapiens
gatcaatactgtaaaaatgaccgcgctttattagaagtgtgagattggacaaatgcagtaaattggtactgggtgttggggtgctgctgtaaagatacccaaaaatgtggacgcaactttggaactgggtaatcagcagaggtggaaacagtttggagggctcaaaagaagacagaaagatgtgggagagtttggaacgtcctggagacttgttgaatggctttgaccacaatgctgatagtgatgtgtacaatgaagttcaggctgaggtgatctcagatggagatgaggaacttgttgggaactggaataaaagtgactcttgctatgttttagcaaagacactggtgacattttacccctgccctaaagatctgaggaactttgaacttcagagagatgatttagggtacctggtggaagaaatttctaagcagcaaagcattcaagatgcaacctgcatgctgtttaaagcatttggttttatgtattcacaaagatatggtttggaattggaacrtatgttgaaaagggcagcagagcataaaagttccaaaaatttgcagcctgaggatgcaatagaaaagaaaaacccattttctgaggagaaat

SEQ ID NO: 952654 - DNA, 613 bp, Homo sapiens
gctactagggaggctgaggcgagagaatcacttgaactgggaggcagaagttgcagtgagccaagatcgtatcattgcactccagcctgggccacagagcgagactctgtctcaaaaagaaaaaaaaaaaactagaaagatctcaaatctaacatcacaattaatagaactagaaaaccaagggcaaacaaaccccaaagctagcagaagacaagaaataaccaagatcacagtagaaatgaagtagatagggatatgaaaaacccttaaaaaatcagctaatccaggagcttgttttttgaaaaaaattaataaaatagactgttagctaaactcataaaggagaaaagagagaagaataaaatagacacaataaaaaatcataaaggggatatcatcattgaccccacagaaatacaaacagccgtcagagaatactataaacacatctatgcaaataaactagaaaatctggaagaaataaataaattcctggacacatacaacctctgaagactgaatctgaaakaatttgaatccctaaatagaccaataaaaggttatgaaattgaggcaataataaatagcctaccaaccaaaaaaagcctaggac

SEQ ID NO: 952655 - DNA, 613 bp, Homo sapiens
gctactagggaggctgaggcgagagaatcacttgaactgggaggcagaagttgcagtgagccaagatcgtatcattgcactccagcctgggccacagagcgagactctgtctcaaaaagaaaaaaaaaaaactagaaagatctcaaatctaacatcacaattaatagaactagaaaaccaagggcaaacaaaccccaaagctagcagaagacaagaaataaccaagatcacagtagaaatgaagtagatagggatatgaaaaacccttaaaaaatcagctaatccaggagcttgttttttgaaaaaaattaataaaatagactgttagctaaactcataaaggagaaaagagagaagaataaaatagacacaataaaaaatcataaaggggatatcatcattgaccccacagaaatacaaacagccgtcagagaatactataaacacatctatgcaaataaactagaaaatctggaagaaataaataaattcctggacacatacaacctctgaagactgaatctgaaagaatttgaatccctaaatagaccaataamaggttatgaaattgaggcaataataaatagcctaccaaccaaaaaaagcctaggac

SEQ ID NO: 952656 - DNA, 574 bp, Homo sapiens
atagcagacataaactaggaaacaaaggtttactttgatgtgacagagatactatcaagaactctgaagggtctgagagtttaccctatttgcaaactcacaagttagtctaccatatttcacagatcctggcaaaagacacaagattcccagattagagacagaggagtttattattcatcatacagcaagcagcatgaatatcctgtttaagtcagttctctttctccccaagactcacaggtatgacataaaggatcccatgcagatgctgcatgtggcatccctagcacttatggaacccatatcttttataatgggctacaagaagatctgccctttgcctcgaagggagattatttttattatgttggacagtaagtaaatctgccctgtaatccagagacagagattgttttccaagactagtcacttgttaaacatccttgaaaagatattttggaacagaagagtagttagtgttctgagacacttgtagagaawcaggttttgaattcaaacctgcctctggcattcactgtctgtatgatttttacctttctctatcagagtt

SEQ ID NO: 952657 - DNA, 625 bp, Homo sapiens
ttgctcactctgtcacccaggctggagtgcactggcaccgtatcagctcactgcaacctctgtctcctgggttcaagcaattctcctgcctcagcctcccaagtagctgggactacaggtgccctccaccgtgcccggggtttcaccatgttggccagactggtctcaaactcctgacctcaggttatccgcccgcctcagcctcccaaagtgctgggatttcaggtgtgagccaccgcgcctggccccagatctggtttattctgaggcctctctccttagcttatagatagccaacttctctgtgtcctctcacgatctttcctctgtgtctgtgtgttaatctcttcttattaggacactgtaagaccaaattagaacccaccctaatgaactcatttaatcttagttccccctttaaagaccctatctccaaatacagtcatcttttgcagtactacgggttaagacttcaacgtaggagtttggtggggagcacagttcagctcatgamaccttcattcctaccacatctcatctttcactttactgcgaagattcagacctttaaaccctgttgtcaaatcttcattgccttcttgcatggcttaggactcttgtcttt

SEQ ID NO: 952658 - DNA, 660 bp, Homo sapiens
gccgctttctaggacatccctgaaggacagccgtgaaggraattcttcccagtgggcagaacttctagaagtgcacctggttgtgcactttgccttgaaggagaaatggacagatgtgcaattatattctgattcatgggctgtagccaatggtttggctggatggtcagggacttgaaagaagcataattggaaaattggtgacaatgaaatttggggaagaagtatgtggatggatctctctgagtagtcaaaaactgaaaatatttgtatcccatgttagtgctcaccagtgggtgaccacagtggaggaggagttgaataatcaactggatagaatgactcattctgtgtacaccactcagcctctttcctcagccacccctgtcatcgcccaatgggcacatgaacaaagcggatatggtggcaggaatggaggttgtgcatggactcagcaacatggacttccagtcaccaaggctgacctggctacggcaactgcagagtgccaaatatgacagcagcagagaccaacactgagggctcgatatagcaccattccttggggtgatcagcgagctacctagtggcaggctgattatattggacctcttatatcatggaaagggcagaggtttgtcctcactggaatagacactt

SEQ ID NO: 952659 - DNA, 797 bp, Homo sapiens; identical to SEQ ID NO: 947814

SEQ ID NO: 952660 - DNA, 803 bp, Homo sapiens
ctactacaacaaagtgaataaagatcataataacctccagaaagatattctcaaaaaaattaaagctataatgtcctagaaaagctaatacacactgagtgacatgaaacttgaaagaacaacatacatcagaattagagaaactcagaaattagaacagaactcacagaagaattaaacgttttattttttattcttttttggaattaaacattttaaaaagcatttgagaaataaagattgacctataaggaacacaagaacacataaatataactaataaaaacttaaaagaaaataaggtaaaaaggagggaaatttataaacttaaaaataaatgaagaaagaaattaaaaagatttaagggaaagtgacaaatgttgaagatagacaaaaaaggttcaatatgcagataatagaagtctccagagaagcaatctaaagcaatccaaaacagaacaaatatttaagactttaattgaagaaaattttcctgaaattaacaaaatatatgtatttgaaaccacattttgaaagaaatacacactgtttactttcaaactagaatgaccaacaaacattctaataaaattactggatttgaaagaaaaagataaagttatttgggcatctaggcaaagtgagaaggtgccgtctacaaaccagaaagagggctctcaacagatactgaatctgttggagccttgatcttggacttcccagcccccagaactataagaaataatgtttcttgtttataagccacttattttgtgttttttttttkttgttgttgttgttgt

SEQ ID NO: 952661 - DNA, 574 bp, Homo sapiens
cttctaggctcaagcagttctcccaccttggcctcccaaagtgctgggattaccagcacacccagccattgttttgttctttacattaaaacaaaacaaaaaagtctctgagcttaattatatctaaattcatccacattgttgatttataatttctttgatgacaccctatgcaattcaattggttaggaacatctctagtactataagtggattgctgtgaccattttaattttactttggacgttagagtgtaaagcaccagcatccgacagtacagataaatctacatgctcttctactccttcactcttcccatagtcaccttagtcagataggcatatggttttggtatgtgtgttttaaataatctccgaaaagagattttgtaaaatttctgaatgcctttctcagactttgggggaggagtaatgggactgaaaggtacatgtacaaggtctaaagaaatrccacaaaccctctttcttttccttctccagcctttaatgattttaaatgtgcctgtgtcacttttttttcagatcttactacaacatgttataaaaccattaaa

SEQ ID NO: 952662 - DNA, 602 bp, Homo sapiens
aatagaatgtggtggaaattctgactttttctaaacgaatatgagagtattctaaatgtaaccaaagayagaaatcagtgagtagattaccataataccaaaagtacttcaaaaaggaggagattgcaaggtggtggcaggagatggcatggggaggatgctaaggggcttggttgggttagagttgataaaggcagagtcaaatggactggagaggtttttgtctcttcttaggttgatgtttctccctttgccctgcattgcaggttgtttcttcctctgcctcacttagttttggataagtccagtattttccttttttcatcctcagtgttactcttctttcacttctcctgcctttattcttttcaccctagcttcttttgttctctaaggcccagtcaagatgaagcttcccgcagccagcttctgtagcacttactttaaacctctctcataacatatggtttcctgtgaactccatcaaggcataaaaggttttaactctatatttcccaaactggtttgtgtagcaagtcttcaatacatgtgtgttcaatggaagaaaggaggaagaataggaaaaagaaaagaaagctttt

SEQ ID NO: 952663 - DNA, 605 bp, Homo sapiens
ttccaccttttccacttctgcccctgccacccctgagacagcaagaacaacttcttctcctttagtctttattgtaagagtaatgtatgtaatggatatagcatacaaaatatgtgttaatccactgctatccataaggcttccaaaacagtaggttatcagtagttaagatttggaaaagtcaaaagttgaatgtggattttcaactgcatgggttttttcagaattcctaacccccacattattcaagggtcaactgtagatggttatgtataaaaactttagagatatgtgcatacacataggttagtgtatatacatagacttcatctgaaagggtctagaagcaatggcaccccagtaacgatgtgcacaactagttcccagatctcgatttataacagtattctctaattaaagaaacctaggctcctaggagaaatgactgattaggggactggggtagaaatatataagatgagcctggagtaccttctggtgccagaaagtgaaaaagttctaaaataaacataacactcacataagagccaactgtaagactctcagtaattaaatctgcaaamatttcaacaataaggtagata

SEQ ID NO: 952664 - DNA, 550 bp, Homo sapiens
cataccacaggattgcttattgcaacacggcaaatctaggcccttcagtgttgtgggaatgaaattcagaatgtttgcctcactgtggtcaggaactatggctggatgaataacagcccccaaatgtgtccctatcctgatccccggacttgtaaatgttatcatatctagcaaaaaggacatgaagatgtgattaagttaaggatgctgagatacggagagtatcctggatcatctaggtgggcctgatctaatcacaaggtcctcttgagagcggaacaggaggacttcgagtcagaggaggtgataatggaagcagagatgggagtgttacactcggaggatggaggaaagggtcgcaagccaaggaatataagcagctgccagatgctgaaaaaggcaagaaagcggtttctcccragagtctccagaaggaaccaggtctgctcacactgtaactatagcccagtgaaactgatttcatggtcctgacctccagaactctaacagaataaatttgtgttgttttaagccacgaagtttgtggtaa

SEQ ID NO: 952665 - DNA, 456 bp, Homo sapiens
  misc_feature 205: n = A,T,C or G
gaggcacctagtcaaaagtcactggcctgttgctacataagtgtctaccactctcagatgtttatagatcaagaacttggactccttggaagaccaatttatttttgtttgtttgtttgkttggttggttggttggttttagctagctctttagcttccataggaagcccaatgggcaaacagtttggtttggcctaatacctantgtttatgaaataccatgcaaaggtaaaggcactgtacacacgtatgtatgtgtaagttagtgagacatttgttaattgctggttctaattatagtattactgccatcccgtttttatgtccttctactactcttaaacgtctgttgcctctccttgtttttgtcttttcacctgaaaagaggtctaaaagagagcaagaaaggcttagttgaacgtttgcaatgttatctaaaaaataagctattactgt

SEQ ID NO: 952666 - DNA, 502 bp, Homo sapiens
taaggtttttaatgtgggtcaacgtattttattacacatgtgatatgatcttcaagtgaaagaggggaagatggaaatagctggtttgagtgtctattatatgctgtgttatgctaagtaagcattttatacataaaccatttcatctggtctcttcaaaacccttatgagaaagttgacaccattccaatattagaggaagaacactggaatttgagcaggttaaaatcacttgaccatgccactgcgctgggaattggcaagcaggactccaacccatacttgcttgactctgaaataaccaatatagcaagatgtttaatctttacccacataaaatacatccaagaatactgacatagcatctgggaatgatggctcaggcctataatcccagcactttgggaggctgaggcgggcagatcatctgaggctaggagcttgagaccmccatggccaacatggtgaaaccatgtctccacaaaaattacaaaaaaaaaaa

SEQ ID NO: 952667 - DNA, 439 bp, Homo sapiens
aaatgccactgaatcatatgctttaaaattgttaatttgatgttagctgaatttcgccttaattagaaacaaaaagatggaggtccctcctcgcctattgccacatgaagttagagaaaaagatgacaatgggcctagcactagagatatttgggagcagccctggtctcagtgtctgtttgattcttctcaacgtcctacatgaatataaagggttgaggatacaggccacagtataattcttttgctgtttgttgaatgttggcattaactgcaccctcatgcctcatttctcccccagatataatttattataaatttggaaattcctcgatgttgaatgatgaaacaacaatctctcagttgctgctcttctccgggagaaagagtaggtcaagtaggactttatyccatgtcaggtatgggcttgggtttcctg

SEQ ID NO: 952668 - DNA, 635 bp, Homo sapiens
tcactcaagattccaacattttytacttcaccaaccaggccttcctgcagtcagaaccagacgtaaaggggctgtcttctcggtgatccactttatcttagaagcagaagcagaatcagtcagtcagacgccgagatgatcccaccttccaccgagttcacagggcctccatggtgggctgagatccgctctgcaaagggcagattcttctctgagcggtactctctacatttccatgcctacccccaaatcagcagcgtcagggagaggcttctgcactgcatctccgagggctctcctcagcagcctctgggggacggcagcccccctggccttgggagcaaagctgactcgggagaagtcggtcactagggcccagccagggaggctgtgcgcccactccccttcttcccgctgctttaatgtgctttcccgcaagaaacacagatgacggtttcttgcttctttcagttccttccagatgacacccaggaagaacgaaagagttcctatgtggtttatgagtagacagaaaaaaaaaatatctagtcttcgaagaatcaagttcttgtcaagttacaatttctgaaacatggttacagttcgaaactttttggaagaccatcttctggtta

SEQ ID NO: 952669 - DNA, 663 bp, Homo sapiens
taatctctgtcctgtggaaaacagttagagaatacctcttcctctgtgatggaaaggacctacccctttcctgaagaggccacactgacactgtggagacacttctcggccattcatcccyagcataagcagagacagtcaaatttgcccaactttaggggcagaaatgaaagcattttatgttatacagctaaatattgtttgaacataacatttaacagggaataaatgggtgtaggaaaccttcaaaggggctttgctccttggtcacgctgtctatctcattatttagaaatatttgatatgatctggtcagagatgggagtaacaaactataagagctagagagagcctagaagcaggagatttaatatttcatttcgacacttgcagaaacagagcaacagattcaatttttttttccctccttgacatttagggaaacagaggaggaagaccctgcccagaattgcttagccttgagttaattaactagttaaataattttataatagaatgcaagttttcagtctctgtacacatagtcctcttccttttgcttgtgtctgacatcatatttcaaaattcttcagctccagcttaccttgaaatgatggaacatctgaggaaacgttatctgtgtttgggctttgaatttcactg

SEQ ID NO: 952670 - DNA, 591 bp, Homo sapiens
tcaagtgccattcaaaacttcatgtatcagtaataactttaaatgtaaatggattaaattatccacttaatatgtataaagtrgctgaatggataaagaaaaaatatccaattatatgctgcctacaagaaatatactttatctgccaagacacatataaacttaaagtaaagaaatggaaaaaaaatattacacaaaatgaaaaccaaaagcaagcaggagtagctatacttatatcagataaaacaaactttgagtcaaaaacagtaaacaaacaaacaaaaccaaagaaagtcactatacagtgataaagggagcaatccagcaaaatgaaataacaattctgaaaacatatgcactcagcactggagcacccagatttgaaaagcaaatattactagatctaaagagagaaaaacattccaataaaacaatagtgggggagttcaacaccctactctcagcatgagatagatcatctagatggaaaaatcaacaaagaagcagtggatttaatctgcgctttaaaccaaatggacctaacagatatttacagaacattttatccaacaactacagaatatacattct

SEQ ID NO: 952671 - DNA, 632 bp, Homo sapiens
ccctaattaagaggtgctatcaattacttcctcttatttcattatcaccaaatttcccattggtcttgagagcacacttaggcttgaactttcccacactgtttcatataaggctagtcactttggggagggctttgaagctctctattcacgtagaccgcatttctttcctgggcaaaacctttgagccactagtctgggccttgggcaaaggtggtatcctctggtcttctcagcttatcttttcaagcataaaacttctgccctatgagcaagatggggtaagggcaatcagggattcaatattttatggtactgaggtctatgcctggggtagagcttctgtcctgtcattggggaatggtcagaagggagcctctgacctcttggtaacacttcccaggaatttggtctcttcaacttggagttggaggggatgagaaatgctggcaacctggaagggggagaggaattaagtgagttgtggttcaagtgccacagactctcattgtttctaccaagtttcagtagattttcttgaataaataygtcttcatttgctatatgcccttacgacaatttctggagactttacatggttgtttttaaaatagctttcataaattatgctc

SEQ ID NO: 952672 - DNA, 500 bp, Homo sapiens
gagctttttgtctataactatagggttttctagatataaaatcatgtcatctgcaaacaggaattgtttgactttctctcttcttgtttgaatgctcttcatttctttcttttgcctgattgctctttgccagggcttccaatactctgttaaataggagtggtgggtgagcatacttgtgccagttttcaaggggaatgcttccagcttttgcccattcagtatgatgttggctgtgggtttgtcatagatgacttttattattttgagctatattccttcattacctagtatgttgagagcttttaacatgaaaggatgttgaactgagatgatcatgtggtttctatctttagttctgtttatgatgaatcacatttattgatttgcatatgtcrgacctaccttgcatcccagggataaagcctacttgattgtggtggaatagctttttgatgtgttgctggatttgatttgcacgtatttttttgagatttttg

SEQ ID NO: 952673 - DNA, 638 bp, Homo sapiens
ctgtgacttaaccctagttatcagcctaaaatctaggagacaaaatgkggtcatttcctgaaatgagtgcctgatgccttgtgaggaagaatcctttgaagaatcttcctgcatgaggtcaaagttagcctttaatagggaggactgggccatttttataagttctgtctcagggtgtcctcagagccacagttcacaaggacacccatccagacacctttttaccatgttttcccaaacagggccttgtctttagcattgcaaacattatcttagctgagcattatcttgaaagcaagataatgataattattgctttcaatagtctttgaaccttctcagttttaattatgagatttggagtttgttcattagttgggtctgctctcctgttctgaaaaacataagggcttctttgtaagtgactaaacaggccctctagttctcacacttagttttcaacctttttaactgcctttagtgtctcttgacccctctgtagttagttaatgcaacttattaataaccagccaattctactttccttgtatatattgttactcttattatcttttaaatgcctgagttgtcccactggcaaaggtatacctccatcagaatatttatcttgtcctaaa

SEQ ID NO: 952674 - DNA, 612 bp, Homo sapiens
cagcaattgtgaagctacatggtgcaaggagataaatgtgaaatgtgagccaaggttctgtgtggatgtgccattgagtgatctcaaagaaagcagataatcacagcagagtcctgacgcatcagcratatctaagtccacgatcttcaggacaatgctagtccttgccagggctgcacaaaatacaagcaatgcaatgatgcagatctggggacacagaaacagggcctggtgcagagggccagggtgtccataaagtgcagcctcacagggcagaaaggtgaggtgggagtggcaggaaaagagagagaagtgcgtctggaggagaaaacagaaagtatgcatcatgtatacaaaatgggaagaagtttctacaaactggctgttatggactaaatatttgtatccccctaaaatttatatgttgaaatcctaccctccaggatgatggtattaggtggtgtggcttttgggaggtgattagatgctgagggtagaaccctcatcaatgggattagtgcccttataaaaaaggtcctagagaactgccttacctcttctgccatgttctcacacagaaaaaagccaccatctatgaaccaggagtagggt

SEQ ID NO: 952675 - DNA, 657 bp, Homo sapiens
gagatcctggaactagaggttggagaggaggctgggaaggggccactgttcagctaaaaatagcagcatcagcaactaaagagcagccagagatcagaacctggggcagccccaggcacrcattcccagcagagaagtctgagcttagctaaatttttccctgctccttaggaaggggtagtgggtactgcctgatcttctgtgtcatctgtgcatctgtgcctgcccacagtgggcagctagcatctccccttccaggtatgcacaccacttccttgtcattgtcaccatcatcctcgtcctcctcctcttcctcattgtcctccttctcctcttcctcgtcctcctcctcttcctcatcatcctcctcctcctattcctcatcctcctcctcttcctcgtcttccttctcctcctcttcctcatcctcctcctcttcctcatcctcctcctcttcctcatcctcttcctcttcctcatcctcctcctcttcctccttctggttgccatttctcatcctccccttccctcttgtctctctgcagcattaccacagcagcatccatttactagactttcataaacgagtcactttttacagtgttcttgggcctctgtcgtctggaagtctgtagtttgagatggcaccctggactg

SEQ ID NO: 952676 - DNA, 447 bp, Homo sapiens
catgtgaatagctaacaggcatatgaagagcgctcaacaccactaatcatcagagaaatgcaaattaaaaccatggtgagatatcaccttacacctgtgagratcagtattgtaataaagacaagagaagtgttggtgaggatgtagagaaaagagaaccctgcacactgctggtgggaatataaatttgtagagccattatgggagagagtatggcaactcccccaaaagtcaatacaatctaataatcctatttctgtatagttaactttagcctaaagctgcttccttgtaagttcagcctaaaggttgatccatacatagtgaactgtaatctaactggatgtgtaaacagactgtaacctactcttataacaagtagccaagtctcagccaatcagaagacatactactcacaggtggccaactgttcggtgttcaaataag

SEQ ID NO: 952677 - DNA, 790 bp, Homo sapiens
agcaaaatgaatgagggattgtgctgaatcctttccactggcccccctaagccttttacccttctcgattcagctctgtgccccaggaggatggcctctttggacagctttactctgactccgttgacctctgactgtggttaagtttgaccaatggggagctgcagcaggaaaatggaatatggcacctggctgcttctcagccagagcactggagatggtgatatttctttctggaggctatagctcctattaatgattcttgttgacaccctagctccctccttaggctcccatagctagtccctctacttgctccttcagggcagtgcttgcagctcccactgttgctagccctgggtgctgtatcaccccttgttggttttctgtattcctttccacacctctataaatagtccttctttgaaattctcttttcctacatgtttggatatgccatttctttactgccaggactataattgatttaggggttgagtaagtaactcagatctggtcacatggagtagaaatgcatggacaaggatcatttgtagcatgctcgattatcatcagatcctgagctcttaatataaggattgagagcttcaactctgtaaaataacagtatcactgatgataataatagaaccaaacttctatggtactgctaccatgtaccagacactrtgctaacaatttgccatgtattaactcattttagccttacaacatcttataagacaagtactatttttttttttttttttttttttttgagacagagtct

SEQ ID NO: 952678 - DNA, 614 bp, Homo sapiens
atatgacccagaatttcctctgttggatatgtacccaaaggaaatgaaatgagtatcatatagatatcagtgctcccatattcattgcagcattattcataatagtcgagatatgaaaacaamataagtgtctatcgacgggtgaatggataaagaaaatgtggtacagatacatagtagatattaataagccttaaaaatgaaggaattacatcatttgcaacaacatggatgaacctagagaacatcacgctacattaaataagccagaaacacaaagaaaaataatgtatgatctcacttatttgtggaatgtttttaaagtcaaatacataaaaacagaatagaacagtggttaccagggatggggtgaggggggtaaactacatggagagatgtaggtcaaagagttcaaaattgcagttatgtaggatgattaaatatagaaagctaatgtgtaagataaagactatagtcaataatattgtatcatatactagaaatttgctagaagagtagagtttaggtgttaccaccaaagaaagataactatgtgaggtgacggcagtgtttatttgcttgactgtagtaatcatttctttactatgtatgtg

SEQ ID NO: 952679 - DNA, 628 bp, Homo sapiens
tagtgcagatcttgcattctcagaaaccacagttccctrtattgacctccttttactgaaacagagatgcacagctctgctttctagctcagtagaggattcttggaataaaacttttaactcattccaagaaaaagtcttaggagtgcagcacttcaaagtcaggtaaggttcaggcaatttatcagagacacatagtagattagtattttgactttcaaaatttcagagccaagttgtgtgctatagagaagcattgtggcataacatagagatgggatggtcttaacttctccatacaaacaagcttggagtaaggtaaaggagaaattgcatttgtgtcttaacactcaaaacacactatgcttattttacttctgtgaagaataaaaatcattccataatattctccttatttcctcatttagaaaagaaaatgaaaattgaatactaggttgattaataaatactcaaaacttcttcttttacaattttagttaattgaaatcaggtaaatgtctgattttgcctatgtcacccagtatttctagttgtttttcaaatcatacatcttcttgcttcccagtcttacttcctaacttgaggggaaattgtaagaagacaccct

SEQ ID NO: 952680 - DNA, 582 bp, Homo sapiens
acacttaggagatcatagtttctaaatggaaatacatataaatatgtctgaaattttttcttttttcttttttttttttgagatrgactctcgttctgtcacctaggctggagtgcagtggtgcaatctcagctcactgcaacctccgcctcccagattcaagtgattatcctgcctcagcctccagagtagctgggattacaggcacccgccacgacacccagctaacttttatatatatattttctatttttagtaaagacagggtttcaccatgttggccaggctggtctccaactcctgacctcagatgatccacccgcctcggcctccccaagtgctgggattaaaggtgtgagccactgtgcctggcctggaatttttttctaaaatttacatttctgagttaagaatacttaaaatattataaaaacagaagcaaaattcattatgtgtttcattaattacctttattaaaaacaatgcaattatattacaataggacaaaaaatgtttaagcaaacgaaaagaaaaccatgacatacccaaactcaggaggaggcaacaaaggcagtgctaaag

SEQ ID NO: 952681 - DNA, 566 bp, Homo sapiens
aagtgttcacactttaatttacaaatactttattgttaacaagtgctaacagtcatctgagccttcagaaagctgcaatctttttttgtgtgcgtgacagggttttactctrtggctcaggctagagtaattgcagtctcaacctcatgctcaatcaaacccccacctcagactcctgactagctggaactacagatacatgccaccatgaccagctaatttttgtattttttttttttgtagagatggggttttgccatgttgccttgacttcctgggctcaagcaatctacccaccttggcctcccaaggtgttgggatgacaggtgtgagccactgcacctggccaagtttcagtcttcttgctgatggagggtcttgccttaatgtaaggtggtggttgctgagcgttggggtggctgtggcaatttcttaaaataagacaccattgaagtttgctgtgtcaattgactctccctttcacaaaagaattatctgtagcatacgatgttgtttgatagctttttacccacagtagaactttcaaattggattcaatcctgtca

SEQ ID NO: 952682 - DNA, 646 bp, Homo sapiens
catgctggtgttgagtgtctgtggattttcaaggtacacagtgcaagctgttggtggatctaacattctggggtctgaaggatggtggccctcttatcacagcccamtaggcagtgccccagtagggactctgtgtgggagctccaaccccatgttttccttcttcactgccctagcagagattctccataagggccccacccctgcagcaaacttctgcctgggcatccaggcatttccatacatcctctgaaatctagacagaggttcccaaaccccatttcttgacttctgtgcacttgcaggctcaacaccatgtggaagctaccaaggcttgggtcttgcatcatctgaagccatggtcttagctctatattggcccctttcagccatggctagagggtctgggatgcagggcaccaagtccctaggctgcacacagcatggggaccctgggcccggcccatgaaaccatttttagctcataggcctccaggcctgtgatgggaggggctgccttgaagacttctgacatgccctgaaaacactgtcaccattgtcttggggattaacatttggctccttgttacttatgcaaatttctggagccagcttgaatttattctcagaaaataggtttttcttt

SEQ ID NO: 952683 - DNA, 646 bp, Homo sapiens
catgctggtgttgagtgtctgtggattttcaaggtacacagtgcaagctgttggtggatctaacattctggggtctgaaggatggtggccctcttatcacagcccaataggcagtgccccagtagggactctgtgtgggagctccaaccccatgttttccttcttcactgccctagcagagattctccataagggccccacccctgcagcaaacttctgcctgggcatccaggcatttccatacatcctctgaaatctagacagaggttcccaaaccccatttcttgacttctgtgcacttgcaggctcaacaccatgtggaagctaccaaggcttgggtcttgcatcatctgaagccatggtcttagctctatattggcccctttcagccatggctagagggtctgggatgcagggcaccaagtccctaggctgcacacagcatggggaccctgggcccggcccatgaaaccatttttagctcataggcctccaggcctgtgatgggaggggctgccttgaagacttctgacatgccctgaaaacaytgtcaccattgtcttggggattaacatttggctccttgttacttatgcaaatttctggagccagcttgaatttattctcagaaaataggtttttcttt

SEQ ID NO: 952684 - DNA, 643 bp, Homo sapiens
tgactggctcagagagaaactaggattaaatggttatactacaggggatgcaaacttcagctttcatacatttacagagatttttgtcaatttttcctgggcatttgggtatggaaaaattattaagttgatcaaggagatctgagagtcaaagccaagattcagagtaaaaatgggatccttaatttcttaagaactgagtaatctaccttccagctatgcctacatttacacatgaaaagtattaggccccagaagcagcaaatggttatagaaatggcaaaatcttactaaagatagtttaaaattagagtggaacattccaagtgaacaacattgcactttaagaagtgcatttgaaagtgagggccccctaattagtctcatccacggaggagtctttttttatttattttttaaacaagaaaagacttttgcttaaggcaaataaaaagctcaagcaactaattgagaagaaaaatggaaactgctaacattttcacttagttactatgatggttaatactgagtatcaacttgattggattgatcctgggtatgtctgtgagggtgttgccaaagaaaattaacatttgagttagtgagctgggaaargcagacccatccttaatctgcgtgggca

SEQ ID NO: 952685 - DNA, 682 bp, Homo sapiens
taactgaattggatctagttagaggtcttaggtgtctgactggctcagagagaaactaggattaaatggttatactacaggggatgcaaacttcagctttcatacatttacagagatttttgtcaatttttcctgggcatttgggtatggaaaaattattaagttgatcaaggagatctgagagtcaaagccaagattcagagtaaaaatgggatccttaatttcttaagaactgagtaatctaccttccagctatgcctacatttacacatgaaaagtattaggccccagaagcagcaaatggttatagaaatggcaaaatcttactaaagatagtttaaaattagagtggaacattccaagtgaacaacattgcactttaagaagtgcatttgaaagtgagggccccctaattagtctcatccacggaggagtctttttttatttattttttaaacaagaaaagacttttgcttaaggcaaataaaaagctcaagcaactaattgagaagaaaaatggaaactgctaacattttcacttagttactatgatggttaatactgagtatcaacttgattggattgatcctgggtatgtctgtgagggtgttgccaaagaaaattaacatttgagttagtgagctgggaaaggcagacccayccttaatctgcgtgggcacca

SEQ ID NO: 952686 - DNA, 444 bp, Homo sapiens
agtgtaatcttgatgttccaacctcatcttggtatttggtaactattttaccaatcacctgctgagctttttcactttgaaacacttgaaatatttttaaagttattagaattggtactctaaaaatcatagaaacaaatggtacccaatgatagagtaatggagaatataactcacccactgccattctggaaagaataaactcattgcctttaccccaaaattggttctcctgctcgattttttttttttttttaggtggagtctttctctgtcacctgcccaggctggagtgcagtggcctgatctcggctcactgcaaccctgccttccgggttcaagcgattctcctgcctcagcctcyggagtagctgggattacaggcatgcaccaccacacccagctaatttttagtaggcacagggtttcaccatgttggccaca

SEQ ID NO: 952687 - DNA, 573 bp, Homo sapiens
aataatagccattctgacatgtgagatagtatctcattgtggttttgacttgcatttctctgatgattagtgatgtgggtcatttttcatgtttcttggctacttgtatgccttcttttgagaaatatctgtttatgtcctttgcccactttgtaatgaggttatttggtttttgcttaactatttaagtttcggatagattctggatattagatctttgtcagatgcatagtttgcagatatttccttccattctttagtttgtctgtctactccgttgataatctcttttgctgtgcagaaactctttagtttaataaggtttcacttgtcaatttctatttttgttgcaattgatttttaggagttagtcataaattcttacccaaggctgatgtccacaatggtgttttcattatggtagattttctagaaaatcctatattttcttttagggttcttagagtttgagttcttacatttaaatttttaatccatcttgacttaatttktttgtatagtgaaaagcagagctttagtttcattcttctagcatatagctagccagctatt

SEQ ID NO: 952688 - DNA, 554 bp, Homo sapiens
atatatctgttttggtaccagtaccatgctgttttggttactgtacctttgtagtatagtttgaagtcaggtagtgttatgcctccagctttgtttttttttkgttttttttttttgttttttttttttgtttttttttttttgcttaggattgtcttggctatacaggctctttttttggttccatatcaagtttaaagtagtttttttctaattctatgaagaaagtcaatgggatcttgatgggaatagcattgaatctataaattactttgggcagtatggccattttcatgatattgactcttcctattcatgaggatggaatgtttttccatttgtttgtgtcctctcttatttccttgagcagtggtttgtagttctccttagagaggtccttcacatccctcgtaagttgcattcctaggtgttttactatctttgtagcaattgtgaatgggtgttcacatgattttgctctctgtttgtctattattggtgtataggaatgcttgtgatttttgcaaattgattttgtatcctgagacttcact

SEQ ID NO: 952689 - DNA, 727 bp, Homo sapiens
acccagttcatgaccacaaagcaactcaccagcagctggatggcctgggtagcttatttctctggagagacttagacagtgactcctgatacagagatgctgagactgcattttgtgcctggaggagagaattaccacgtgtgattgagagcatcagtgttcctccagaagagacatttctaaatgctgctagtgtgaaaaccgagcttatgttcacgtagcccctgggggaagaaaaacagtaatatttaacagtacattttaagaactaataaaattatttttaaaatcaaagcaattttaaagcttttacttcattagactccctggcaagaaagtcctgggaagacagaaagtttgtaggatgtcagagggaagtttgggaaaagtagaggaatgtacggcccactcagcctgggtcaccttcgctactgacctcatcttgtctcgactgggtactcctttcaggaagctggtgtctggaaaacttctcaattttagtatcaattattattcagaggttgaaaggcaagcctccacctaaagtgccagtcctggggccttggtgagaccctctgctggggagaaactccacttcacctgggggttcttatttatacaaaatggggamatgagggggcagccaagcagcagaaaaccaaatcataagcaagaaccaaactcttggggagtttgattctttctgctacatagtgcacaagttctg

SEQ ID NO: 952690 - DNA, 814 bp, Homo sapiens
ggtatgagcaaccttgcctggctasggcctatattttttgctattaaaataagcgaaagttaagtttgaggacaggtgaaatcaaaatgcacatgctttctagaacagaaagtccttaatgaggataactttgcttgaataagcccaattacaattcgaatgctacggcttattgtgttggctgtacagtcaccatggtttctgtatcctgagatcatggtcattttctgtactatctattctgcctcaatttccccataagagattttagggcaataatcatattggaggttgaggggttaggccattatttctggagctgtttcctgctgagtgggtgttacttctgcctagcctgggccttaaagtttcttcctgtgtgatctaacagggtgtaaaccatgtcgttcatggaaccagtgggaagatgttggcaaccaaaggttgaaagccttgcaaaaccatcatgcaaacatggagttgccgtaagcaagagagcaagaaatcagttaacattttaaacaaaattggaacaaaactaaaagctgaaaatataataatgacgggtactattaaagagagcaaggcagacaatggacattgctttcatgttcccatggaagttcctagagattcaattttgtctgcctgggtgatgatattattaatattttcttcgactaaaccagactgattgatctcaaaaacagcattcttcttttagatataaacatgttcctctttacccggctgggagaagatcccaggctctttggttttgtcggactacagtggccatggagtccagatgttg

SEQ ID NO: 952691 - DNA, 746 bp, Homo sapiens
acctgagaagcatagggccaatcgggtgaggayaacccgcctgatttgggcaaaggtaaggtgcctacatagggtaataccctcctcaatgctcagcccagacctgtcctccaggtccacctctgtactcactctctgtggcaaagagtcggcatagcataagaactcagcaatgctttggacactgggaagtccacaccgctctgtccctccctccaggtctatgcaccccggatcccggtatatgctgagattatggttctgaagcccaccgacaaataggctgagagcagttaacggactacagctcccagcatattaggtggggcatgtacaactttgccccttcttccagggctatgccttaccccggagactggcgcatgctgggattgtagtcctgtagccatttgaccaaagggctgggagtgtttatgagaatacaactcccagcaatcctagggaggagcacacagccccgcctcttcccccagtgatacgcattgtccctgagacaggtgcatgctaagattgtagtcctgaagctctgcgaccaaagggctgggagtgtttatgagcatatatctcccagcaagcctaggaagacgcacacagccccgcctctttttccactgacgcggactgtccctgaccccagtgcatactggactggtagtcctgcatccctgtgatgaaagttctgggagtctctatgaaactacctctcccaggaagcagaaggaggg

SEQ ID NO: 952692 - DNA, 589 bp, Homo sapiens
caaaagaaaggatattactgtgtcaaaaagatatttgcattcccatgttcattacagaactatttataatagcttatatatggaatcaattcaaatgtacagcaacagataaatggataaggaaaatgtactatatatacacagcgaaatactattcagccataagaaagcataaaattctgtcagttaaaaagagcatggatgaaccttgagcataccatgttaagtaaaataagccacacagagaaacacaaatactttatgatcttattatctcactcatttgaggaacctgaaaaaaagggttgatagaagcaaagagtacaacaggggttaccagagattgaagcaggaggatgggaaaagtctgcttcacaggtattgtgttatgattagataggggaaataagtttttgttttttattacacagtagaataataataattaatgaaaagttatctcatattacaaaatagctaaaagagaccagttttggtggcatattctygcaatccatacattttgggagattgaggtaggagaatcacttgatgtcagaagttcaagatgagcctggacaacatagtg

SEQ ID NO: 952693 - DNA, 601 bp, Homo sapiens
agtgatcgcaaacagccaaataatattgggaaaaaaatataaagatagaggcatcatactttctaatttcaaaacatactataaaggtatagtaatcaaaactgtttggtactgacakaaagacaaatgaatgatgaaacagatgagagtgttcggacataagacctcatgggtttagtaaacttatttttaaaaactgttccaagaattcacaataaggaaagaacagtctcttcaacaaacagtattgagaataataaaaatttacaaggaaaaaataacaaagttacaccttaccttgcaccaataaaaacataaactcaaggccgggtgtggtggctcacacctgtaatcccagcactttgggaggctgaggcaagtgaatcacaaggtcaggagatcaagaacatcctagccaacatggggaaaccacgtctctactaaaaatacaaacaaaaattagttggtggtggtgcacacgcctatagttccagccactcaggaggctgaggcaggagaatctctggaacccgggaggcaagagtttcagtgagcggagatcacaccactgtgcttcagcctggtgacagagaaagactcc

SEQ ID NO: 952694 - DNA, 582 bp, Homo sapiens
ttaacagtaggatgggtaaataagagctataatttggaataattatgtagcaatggtggttaggagcaatagasactcaaagtattacataaatattttttttcttattctcccacacaagcgttttgcctttcctcttaaactgagaacggagtggtttgctatgatgtttttaaattctcacagacaagcattattctttgctgccttttagtaaaggttagttttaaccaaattaaagaagattgaatggattttcttgatcataatggttgagtgcaatatctcataccttctattagttttcagtataactgaaataacagagtgtcaatactccatggaggggtgctccgcttgctaaggctccctcctctgggctaggccttctacaccatggctgtcctgctgtggctggagctggaatttggattgacctctgtgtgtcttcctagcacacaataggtgtccaattagcatgggcagaatcaagctcctccctctcaccatttatttctccatttgtcccttgttgggaatggagagtcctgccactgagttcagcccagggttgaagttcaa

SEQ ID NO: 952695 - DNA, 571 bp, Homo sapiens
agtggtgcgatctgggctcactgcaacctccgcttcctgggttcaagcaattctcctgcctcaaccatccaagtagctgccattacaggtgcccgaaaccatgcccggctaatttttgtatttttagtaraaacggggtttttgccatgttagccaggctggtctcgaactcctgacctcaagtgatccgcccacctcggcctcccaaagttctgggattacaggtgtgagccattgcgtctggcaagaacattctttaatgaaactgaaacttaagtttttttttttttttttttttttttaacatgtccatgaagaatgcaatgacactattacagtttggtgtcactgccttgattcagtataaaatgacgtatttttatttgttgatattattatgtttctaggctttacttatttcttattgggggaatggctgatgttgtcaaacctttactaaaaatactgttttgaaagccaatgtgaatgcaattttttctttgccttagtagaataaaaaaactttagagttgaacagtttcacaattttgtcaggatgttagaaaattaa

SEQ ID NO: 952696 - DNA, 592 bp, Homo sapiens
tgctgttaatttgatggacttccctttgtaagtgacttgccctttctctcaagctacctttaaatttttttctttcattttgaccttggagaatctgatatttgtgtgtctyggaggataatcttcttgtaaattatcttactggggttctctgaattacttgaatatgagtgttggcctctctagataggttggggaagttctcatggatgatatcctgaaatatgcgttccattctccccatctcattcaaggacaacaatcagttgtggattcagtctctttacataatcctatatttttctgaggtttgcttcattccttttcatttttttctatgtttgtctgcctctcttatttcagaaagccagttttcaaactctgagattctttcttccactatgtctgttctgttaatacttgtgattgcattatgaaagtcttctggggtgatttttcagctatgtcaggttggttacattcttttctatactggctatttcatctgtcaactcctgcattgttttattgtgattttcagcttccatgaattgggtttcaaggtacttccttagctcaatgattttcattt

SEQ ID NO: 952697 - DNA, 614 bp, Homo sapiens
caagccacaaaccttttatgagatggaatgttcaggaagacctagggtgaagaggagacagaagtaagaacagtgaagaatgtacagcctctggtacacagagttatgacaaacatttaacatggtccaacacctaaccagactgacataaattgtcatcacaataaagccttcttttcctcagttcctagtattcaatgcaacaaaaatttacaaggtatgacaaaaggtaacggaaacatagtctgaagagaaaaaaaactcatcggaacaagactcgaatatgtaacacatgttggagtaatcagacagatagtatcaaataactatgatgaatgcattaaggactctaagagaaaatgtggacaacaaacagaaatagatgcgtcgtataagcagaaagaaggaaataaataagcagaagaaaatgctagaaatcaaaaacactatagcagaaatgaacaatttctggactggtcttgccagcagagttcatatgaccaaggaaaaaatcattgagcttgmaaataagtcaagaaatatcaaaaattaatgtggaaaaagaacaatattaaaacaaaaacaacaaagaaccccagtacattcaggaattg

SEQ ID NO: 952698 - DNA, 638 bp, Homo sapiens
gggtacactcattcctcagcaggtccactcaggtgttacgggcgctgacacggaactagcaacaagcagagaaattcartgctggctgttcggtgaagctgagaaggaatgaatgggttctcacagcttgacctcctttcccatgtttatttatatctctttccaaatgtaatgaccttttgaaatatgtttatatgtgaggtctaagtttcctttcccctgtggatcctctagaaatttctggaaaattctgaagcttggggttagggcatgaattaaattccaaagacgtttctggaaagttctgcatcttggggatttgaattggattccaagaaaacttctgaaaatgtctgtgagtccagggtctgaatcttgtgcatgcacacattttgttttgtttcttaatctggtaattttgatgtgctagggaacttgacatgagtttctctgcccctggatggtgagcatttcgcgtcttctttgcttttaaattttgaattcattctctttcccatcacacacacacacacccacacccacacacagacacagacacacacacacacacacacacagcacagcacacccaacacttctcatgtgttggaaaaccttccctcctcctctctgattct

SEQ ID NO: 952699 - DNA, 605 bp, Homo sapiens
ttttcctttcctcaaaacccagtgccataatgttggtttctagcacattgggcagtgagccttttttgcttggtaacacctagagtagtcacgctcttagggacagatagtagaagggtagttgccagggggtgggaagaatgaagaatagcaagttgtttaatgggtatagcacttcagttttgcaagatgaaaagagttctggagatggatagtggtggtagcacaacaatgttaatgcacttaatactactgaatttttttacttaaaatatttaagatggtattacggactgaattgtgtccccctcccaagttcatatattgatattctaacccctattaccttagaatgtgactgtatttggagttaagaactttgaagaggtaattaagattaaataagatcataaaggtggaacttataagaaggaggtagagacagcagggatgtgcacatagataaaaggctatgtggggaaataacaaaaagatgtctgctttcaacaacgcagggaggcctcaggagaaacttagaccccactgtcaccttragctttcacttccagccttcagaacttgagaaaataaattgctgctattga

SEQ ID NO: 952700 - DNA, 721 bp, Homo sapiens
taagagaattctcctgcctgactgcctttcaattagggcattgacttatttctggatcttgagcctgctggcctttagatacactacaccaccagcactccctccatttggtgtccagcctgccaactcacccctcaaatcttgggactagtcagcctccataatcacatgaaccgatttcttataataaatctctttatgtacatgcactgtacatgtacttcaattttttgcctcaaaataaactcatactaatttgttacagcatgtctgaacaggatgtactttgagacactaagaaacataagacatcagtttgaaaatagcccttattagagcaacatgaattctactaaaattaaagcaagaacaaatgtcaaatttatgataaatcttgggtgaaagcacagtgaaatcattgatgctctacgaaaagtttggacgattcaccaaagaaatcagcagtttacaaatggataactcattttaagaagagatgagagcatgctgaagatgaagcccacagcagcagaccatccacaccaatttgcaaggaaaaaattaatcttgtttgtgtcctaattgaagaggacagatgattaatagcagaaacaaaagccaacaccatagacatctcaattgtttcagcttatacaattctgactgaaaaatmaaaactgagcaaactttccacttgacatttgctacaactgttggaccc

SEQ ID NO: 952701 - DNA, 635 bp, Homo sapiens
acaagagcagagctttcaatagaaattttaaacacgtgggatccagatcctgaagcatttctttkaagaattgtaacaaaagattaaaacatggctttacaagtatgatcctgaagacaaagcacaatcaaagcaatggccaccaagaggtggaagtggtccagtcaaagcagaagtgaataggtcaagagcaaaggtcatggaaacagtattttgggatgctcatgcattttgtttgtagactttctggagggcaaaagaattataacatctgcttattacaaacatgttttgagaaagttagccacagctttagcagaaaaacaccaagggagaatttaccagagagtccttctccaccatgaaaatgttccttcttattcgtctcatcaaataagggcaattttgtaagagtttctatagagaatcatgaggcatctaccttacaatcctgaactggctccttccgactcctttttgtttgttaatcttaaaaaaaattttaaagctcacccacttttcttcagttaataaagtaaaagagactgcattgacacggttaaattcccaggactctcatttctgtaaggatgaactaaatagctggtatcatcacttacaagtgtcttaaactg

SEQ ID NO: 952702 - DNA, 633 bp, Homo sapiens
catgccactgcactccagcctgggtgacagagtgagaccctgtctctaaaaataacaacaaaaaacccaaaaaggagcagaggatgtggctgcccccaccacaggagtgtctaacctagttgagctgatgaaacaagaatacaggccaatgcagtcctaagtaatggggccgactccaggagatgggacttcatagaagagatgggacttgagccgagctcttaagaaaggtaggatgtggatggaaaatctataggtttttgagcaggagagtgttaagaaaaacatttgaacagtggcacatggcaagaaatgggtaaggcggaattgggggcaggcagaaggatatcagttggaacaggcctggggtgatgacagttgcatctacactagtggtggcatggttatagaaggaagggatccaagagagatctctacagaataacgaggtctggcaacatcctgaatagagagaggaaggagagagtctggggggctgccagatctttggcttctagggcctggagggttggttgtgtgtctctatcagaaatgaagyctgggaaaggtgtcccgtgagggtggggtgggcaatgatgagtcagttatggacgcgtctcaaggacagtgaaa

SEQ ID NO: 952703 - DNA, 440 bp, Homo sapiens
gaaaattagaagcaatcagaagagaatttccagaagctttccctaccacagtctccacctttctgcatctatgyccatatactttatcttacctccttgtacataatcttacctaaggcaaaccttgtacttgtgcattagaccctatccttctgcctcctgaaagtcattgctcagcaattcttccccttcttgtgtagcatcaagtttaccctctccgtctgtccattatcatactatttatcccatctaaaagaaaatgaaaaatgacacactataacttctccagttaatacacatttctgtgctgcccctctttgaagcaaactgtcctcggtgttagcattccagtgatctgttctcagtgcccaaaagttgcctacattccttcaatcaaatgatctattctcagtcttcatcttacttggcccatcagtagt

SEQ ID NO: 952704 - DNA, 735 bp, Homo sapiens
agatcaacgcagaaggtgggtgatttctgcatttccaactgaggtactcggttcatctcactgagaatggttggacagtgggtgcagcccayggagggtgagccgaagcagagtgggacatcacctcaccctggaagtgcaaggcgtcagagaattttctccccaacccaagtgaaaccatgagggactgagcctgaggaactctggcacagaaactgtgcttgtcctatgattttcacaacccacaaaccaggagattccctccggtgcctaccccaccagggccctgggtttcaagcacaaaactgggtagccatttgggcagacaccgaactagctgtaggagttttttccataccccagtggcgcctggaatgccagcaagacagaaccattcactcccctggaaaggggtgctgaagccagggagccaagtggtctgtctcagcaggtcccacccccatggagccaacacactaagatccactggcttgaaattctcactgccagcacagcagcagtctgagatccaaatgggatgctctagcttggtgggaggagggacgtccgccattgctgaggcttgagtaggtggttttacactcacagtgtaaacaaagccactgggaagtttgaactaggtgtagcccactgctgctcagcaaggctgctctggccagactgccagatttctcctctctgggcagggcatctctgaaaaaaaggcagcagcct

SEQ ID NO: 952705 - DNA, 735 bp, Homo sapiens
agatcaacgcagaaggtgggtgatttctgcatttccaactgaggtactcggttcatctcactgagaatggttggacagtgggtgcagcccacggagggtgagcygaagcagagtgggacatcacctcaccctggaagtgcaaggcgtcagagaattttctccccaacccaagtgaaaccatgagggactgagcctgaggaactctggcacagaaactgtgcttgtcctatgattttcacaacccacaaaccaggagattccctccggtgcctaccccaccagggccctgggtttcaagcacaaaactgggtagccatttgggcagacaccgaactagctgtaggagttttttccataccccagtggcgcctggaatgccagcaagacagaaccattcactcccctggaaaggggtgctgaagccagggagccaagtggtctgtctcagcaggtcccacccccatggagccaacacactaagatccactggcttgaaattctcactgccagcacagcagcagtctgagatccaaatgggatgctctagcttggtgggaggagggacgtccgccattgctgaggcttgagtaggtggttttacactcacagtgtaaacaaagccactgggaagtttgaactaggtgtagcccactgctgctcagcaaggctgctctggccagactgccagatttctcctctctgggcagggcatctctgaaaaaaaggcagcagcct

SEQ ID NO: 952706 - DNA, 647 bp, Homo sapiens; identical to SEQ ID NO: 950077

SEQ ID NO: 952707 - DNA, 738 bp, Homo sapiens
ggtcaggattacaactgggggcaaggacattaagtttttggtggatactggtgccgaacattcagtagtgaccactccggtcgcccctttatccaagaaaaccattgatataatgggagcaacaggagtttccactaagcaggctttctgtctactgcggacctgcttggtggggggacatgaaatagttcagttcttgtacatgcctgactatcctttgcccttgctgggaagagacttgcttagcaagatgatagccatcatcccctttacaaaacagggctctttacagctaaagttaccgggaacaggaattatggcccttatagtccctcgggaagaagaatggagactttttctaactaagccaggccaagagataaaaccagctctagctaagtgatggccccgagtatgggtggaggataatcctccgggactggcagtcaaccaagccaccgtactcatagaagttaagcctggggcccaactaattagacaaaagcagtatccagtttccagggaagctctcgaaggaatccaggttcatctcaggcgcttgaaagcctttggaattatagctccttgccagtctctatggaacacccccctcctccctgtccctaagccagggaccaaggactatcgatccrtacaggacttgcgcttggtcaaccaagctacagtgaatgtgcacccgacagttcctaacccttacacattgttaggattgctgct

SEQ ID NO: 952708 - DNA, 595 bp, Homo sapiens
gcatatcgtgcagaaccatctgtgaagcakgtcctagttttctctttctctgtcaactgatcttagggaacttcccataaggccactggtgcaggcttggggagagaaggcagggtggccggagtacagaccatgggcatttgagccacttcctcatgtaacttccttgtgccttcaggacctgttcaagcctgatcacatatataccacttctatttaatgatggaatgctgctgcacacaacccactttatggctagatgggtcagaaagcacccagttcatgataggcagtacaggtggcatggtgccttgatgacccgtaggcaaacattcagtttccaccaaagcccagtaacaggtctagagctgtctctcaaaaggagaatagttatctgcagaagatggcatggccttgctctaaaatcctagaggactctgctctgatccacctatgggggcctgccaaaggctccagtaagcctccctatctgccactgacacctcaagcaccatgggatctgctggatgatatggcccaagtggcagagcagcttgcacagcagcctagatctgttgcggagccttctccgcct

SEQ ID NO: 952709 - DNA, 802 bp, Homo sapiens
cctgcatatcgtgcagaaccatctgtgaagcatgtcctagttttctctttctctgtcaactgatcttagggaacttcccataargccactggtgcaggcttggggagagaaggcagggtggccggagtacagaccatgggcatttgagccacttcctcatgtaacttccttgtgccttcaggacctgttcaagcctgatcacatatataccacttctatttaatgatggaatgctgctgcacacaacccactttatggctagatgggtcagaaagcacccagttcatgataggcagtacaggtggcatggtgccttgatgacccgtaggcaaacattcagtttccaccaaagcccagtaacaggtctagagctgtctctcaaaaggagaatagttatctgcagaagatggcatggccttgctctaaaatcctagaggactctgctctgatccacctatgggggcctgccaaaggctccagtaagcctccctatctgccactgacacctcaagcaccatgggatctgctggatgatatggcccaagtggcagagcagcttgcacagcagcctagatctgttgcggagccttctccgcctggattccactccaaactggcagcctttcgggtcacttgataaatggcccagagtaacaaagccaaatgacgaatgtgttgcctccaaaatacaaatagacccactgggcgttgtgcctctttcttgcttgtaggaggggccaaatgcagcaacttatctttcaccttaggaggaatatctcaacaggccccacaccactggacc

SEQ ID NO: 952710 - DNA, 632 bp, Homo sapiens
  misc_feature 1, 2, 3, 4, 5, 6, 7, 8, 9, 10, 11, 12, 13, 14, 15, 16, 17: n = A,T,C or G
nnnnnnnnnnnnnnnnnatgactattgctggagacaagctatggactaaaaagtcctagcagcccattcttaggggagccccacactttcataagttttacgtccaggagccccacccagatctcagagtgaaaattagagaaaatctcctcttgtttccagcaaggggagaggagcaatcattttgaaatatgttcagggtgatctcttccccttaacaaaggcctgcccccaaaggaacctcttctactggggcataactgggggttttatcagatcctgatgggcctgtgggaagggatgtcccaacaccagctccctgtggctgtctatgtggggtaagggaatagctccagcctcctctagccttcttgtttctccaaacgggaaagggaaagttgagaagcacccctgaatgtcacacctcagcagcacagactctcaatgactgacatccagtcacaggataatagaaagtttcccttccccccaacatattaccaccatatcartagggctcctgcacaccatcgtttatcacagcttcatttctaattgccagaaacaggaagatgcccttcagtaggcggacggataaacaaaccatggcacatctattcgcactaaaaaga

SEQ ID NO: 952711 - DNA, 467 bp, Homo sapiens
gcttgagagttggccagcagctgcaactaaactgccaatgccacacatatatctaggagccagagaacccaccttcccatccagcctactgctgcaactgctagcacctcagtaagctacttaaaggcccaaggactggcccactagaaactgctaccatgagtgcccttaccaccactattaccctcacaaatgtgccatttagaagcccaagggcctgtccactccactcctactaccactggtccttgatgaccagcttgtctggcatacctagtctcaagcaaagcctcacacagtctccactaccaactacagcccaggccactgagggtctcasggacaccattgattctgattacaaccaaaaagtttacagaaagactacattgttatgccccaccagaataaaagacaaagcaccctacgcaaccaacactgtaggtacttatacaggaaagtttttc

SEQ ID NO: 952712 - DNA, 604 bp, Homo sapiens
taaggtgtgaaatgaagacaaacttatttatgtctttctgaaaagttatattataaaaaytcatctcctttcagaaattcacttatcctaaacacctattttaaaactaaagcaaaaaatatatataataggtctcataatcatgagactggaactaaggtactgaaattgcaccaacctgtctttataaactattttcctcaactcttctctttttgttctttatgagttctatgtgattatgtagataaaccatatattcatcccatttctctttttctttggctcattagagccaggagtacaatttaggaagaacttgatagatgtagctaaagccccatccatgcatttatcccaattccacagtctaattcaattctattttatttaaaagatattgctaaacttccactgtatggcaacattctaaatactgaaggtggtagaagaataaatacatacagttcactctggtataatacttcttttaaaaatgcacattagtctcaacactactgatatattatgaaacagtttgagcgtaatacaaattttgcattggcttatgcatgatttcatctgtgagaaacactagctgaat

SEQ ID NO: 952713 - DNA, 542 bp, Homo sapiens
ggtatgtctttattagcagcatgaaaatggatgaatacagcaaattggtaccagtagagtgaggcattgctgaaaagataccccaaaatgtggaagccaatttggaactgagttacaggcagaggttggaacagtttggagggctgataggaaaaatgtgggaaagtttggaacttcgtagagacttgttgaatggctttgacaaaaatgctgatagtgatacgaataataaggtccaggctgaggtggtctcagatggagatgaggaacttcttgggaactggagccaaggtgactcttgttatattttagcaaagaggctggcatcattttgcccctgccctagagatttgtgaaactttgaacttgagagagatgatttagggtatctggtggaagacatttctaagcagcaaagccttcragaagtgacttagatgctgttaaagcactcagttttgtaaatagagaagagcatacaatttcagaaaatttccaactggacaatgccatagaaaagaaagtcccaatttctgaggaga

SEQ ID NO: 952714 - DNA, 542 bp, Homo sapiens
ggtatgtctttattagcagcatgaaaatggatgaatacagcaaattggtaccagtagagtgaggcattgctgaaaagataccccaaaatgtggaagccaatttggaactgagttacaggcagaggttggaacagtttggagggctgataggaaaaatgtgggaaagtttggaacttcgtagagacttgttgaatggctttgacaaaaatgctgatagtgatacgaataataaggtccaggctgaggtggtctcagatggagatgaggaacttcttgggaactggagccaaggtgactcttgttatattttagcaaagaggctggcatcattttgcccctgccctagagatttgtgaaactttgaacttgagagagatgatttagggtatctggtggaagacatttctaagcagcaaagccttcgagaagtgacttagatgctgttaaagcactcagttttgtaaatagagaagagcatacaatttcagaaaatttccaactggacaatgcsatagaaaagaaagtcccaatttctgaggaga

SEQ ID NO: 952715 - DNA, 479 bp, Homo sapiens
gtttaatgcaactgctaacaattgtactttttgtctacttgtttttrtctttttttcacttttttgccctgtatgtattgttgtaaacttttttttaatgttttttgagatagagtctcactgtgttgcccaggttggtgtgcagtggcacgatcttggctcactgcaacctctgcctcctgagttcaagtgactctcctgcctcagcctcccgagtagctgggattacaggcacatgttaccatgcccagctaatttttgtatttttagtagagacaggtttcaccaggctggtctcgaacttctgaccccaagtgatccaccggcttggctgggaaaaaggtgctgggattacaggtgtgagccactgcgcctggccttttattgttgtaaactttaaaggctgtgtttaaaagttgaccataggggtttgaggtcccattactgcttttcatagctttctcctaatgttaggggca

SEQ ID NO: 952716 - DNA, 627 bp, Homo sapiens
attttttattgcatctgtttgattcttctctctattgcaattcttttttttttttctttttgagactgagtctcgctctgtcccccaggctggagtgcagtggcgtgatctcggctcactgcaagctccgcctcccaggttcatgccattctcctgcctcagcctcctgagtagttgggactacaggtgcccaccaccgtgcctggctaattttttgtatttttagtagagacagggtttcattgtgttagccaggatggtctcaatctcctgatctcgtgatccgcccgcctcggcctcccaaagctctatttcaaattttatacattgtgggtgggaataaaaaatggtatagccagtctggaaaagtttggcaatttcttataaagctaacgtgtttgtcttataacccagaaaccccacttcctagagaagtgaaaacttatgcttacataaaaacctttatataaatgttctgttgataattctgtgattatctgatgttctattcataattgctccaagcaaatgtccttcaacaggtgactgaacaggttaatgcatraagaagttgtggtatatccatacaatgaaatactactcagcagtagaaaggaatgaactgtt

SEQ ID NO: 952717 - DNA, 557 bp, Homo sapiens
gtagaatagagtacaaggtagattcctaaggtctccaactccaggccctggctcccagatggcatctctggacacaccrcagggtcagggggatctctctgccctgaaaggaaggtcacaagcctggctggctttactacctgctgattgtagagccctagagctttgaacaaacaaaggcaatagccaggcagtgtttactgcaggccttggatgagacccagtgctgtgctgacttcaggtctgacccaaaacaatcacagtgatggtggccacagggttgattgtggcacccctcaactctatttgtttggaagaaaggaaggaaaacaatgggtctctgcctggtaattcagaaaatttttccagattttacccaagataaccaaggtgatacctctacaagtttgaaagagccacagcattactgagtttggagtgtcccctaatgcagacgtggctgcagtcaccaaaaagtactctgtgcttgtttgtttatgcaattagtgttaagttgtcatcagtttaaaataatgggttataacttattagttgca

SEQ ID NO: 952718 - DNA, 605 bp, Homo sapiens
tggaaaatcctaaggaacccataagaaacatgttaagcaaaattgaaggatacaagatcaatgtgcaaaactcttagctgccatggtggcacagttctgtagtcccagctactcaagaggctcaggcaggaggattgcttgagcccaggatttcaaggctgcagtgggccacaatcgcaccaccactttccagcctggggaacagagcaagactctgactcttaaaaaatcaaaaaggccaggtgcagtggctcataccttaaatcccaatgttttgggaggctgaggctggaggattacttgaagctaggagttcaagaccagcctgggcaaaataacaagaccgtatctttaaaaaaaaaaaaaattctattgtatttctttctgtacactagcagtggacaatcaaaataaaattaaggacagttccatttacaaatagcatcaaaaagagtaatatacttagaaataaattacctgtacactgaaaactacaaagcatcatcgaaagaaattaaagaagacctaagtaaatgaaaagacatcatgttcayggattggaatatggcagtactcttcaaatcgatgtacagagtcggcaaaat

SEQ ID NO: 952719 - DNA, 611 bp, Homo sapiens
cattaggttagacccttttggtccagtcctatttctacatggctgtccatactttgttgaacctaagcataaaaatggtcaacttcccctgtatctttgggtcttcattytaaaggctcctgggtacacattaataaatttgtatgttttttttttctattagtctgccccttgtcagtgatttttttcagtaaagcttcagagggcaaagggaaaatattttcttagccctttgttacagtttggctgtgttcccacccaaactttatcttgaattgtaacttccacaatccccacatgtcacaggagggacctggtgggaagtaattgaattatgggggcaggtttttcccatgctgttctcatgatagtgaataagtctcatgagagctgatggttttataaagggcagttcccctgtacatgctctcttgcctgccaccatgtaagatgagcctttgctcctccttcaccttctgccatgattgtaagggaccatatggaaccatgagtccattaaacctctttttctttataaattacccagtcttggatatttcttcatggcagtatgaaaatgcactaatacatctttcactaggttggacata

SEQ ID NO: 952720 - DNA, 756 bp, Homo sapiens
ggtttgattcctagtccagtatgcccaccgccacatttactacctcattcccaaatatgtagtttctgatacttctgctctccagcttcccaaggccaaacaacagctmcttttcctgagtcctggatagaataagaaaaggtataacaagacaggggacccttgagggggaagaggaattagtttgaagtgctggcaaatgtagtatttctaatcagatgctagtaaattccatatgtatggcgaggctttcattacttagatttggggagcctctcagcgttttagcaatttgcaatcaggttgaatggatccattgtaaatacttaggaatacttaggaatccacgtcctggccctggcatgcttttcctcggccaggtgcactggcggtcaccttgcctttcattgtgccacgtgcataaaaatacaatgtttgctgtagggaaagataacaggagtgaaaatgtcctctgccctttgtttgaagtataggaccttcagaatgaggctgggctggttccttcagcaagcttgtgctcaaaggctgctatttctaccagcctgaggtaaacggtaataaagtacttgtttatcctacaagtgcattccttgcattgcagatttgatttcctttgatttcttgtcaccacctggaaaccttactttgtttcaggttggtacagttagaaaggtactgaatcttctgattcagacaagggcccagtagtggcaagaagagaggtacgtgtttgtg

SEQ ID NO: 952721 - DNA, 614 bp, Homo sapiens
tggacttggactttcgggtttatgccagaatgagttaagtctttggaggactgttgaaaaggcataaatgtgttttgaaatgtgaggacacgagacttgggaggggcmaggggtggaatgatatggtttggctgtgtccccacccaaaatctcatcttgaattataacccctataatccccataatctccacagctcaagggcaggtccaggtggaggtaattagatcatggaagcagtttcccccatgctgtcctcatgatagtgagtctcatgagatctgatggtttcctaagcatctggcatttcccctgcttgcactcactgtgtcctgctgccctgtgaaggtgcctgattcccctttcccttctgccatgattgtaagtttccttaggcctccccagccatttggaactgtgagtcaattaaacctctttcctttataaattacccagtttcaggtatttctccatagcagtgtgagaatggactaatacagtaaatataaaccaattcttttaagtgaatataaagtaaatataaaccaatacttataagggcactaattccattatgggggccccacacttatcatcatttcatctaactttaata

SEQ ID NO: 952722 - DNA, 545 bp, Homo sapiens
ttatcagagactaggattgcaacccctgcctttttttgttttccatttgcttggtagatcttcacccatccctttattttgagcctatgtgtgtctctgcaygtgagatgggtctcctgaattcagcccactgatgggtcttgaatctttatccaatttgccagtctgtgtgttttaattggaacatttagcccatttacatttaaggttaatatttttatgtgtgaatttgattcattatgatgttagctggttattttgcttgttagttgatgcagtttcttcctagcatcgatggtctttacaatttggcatgtttttgcagtggctggtaccggttgttcctttccatgtttagtgcttccttcagtagctcttgtagggcaggcctggtggtgacaaaatctctcagcatttgcttgtctgtaaaggattttatttctccttcacttatgaagcttactttggctagatatgaaattctaggttgaaaattctttctttaagcatgttgaatatcggcccccactcttctggcttgtgga

SEQ ID NO: 952723 - DNA, 624 bp, Homo sapiens
ttttaaatttttttaatttttarttttgtggatatattataattgtacatatttatgcagtacatgtgatattttgatacaacctattgtctgtttagttccagatattcatagtgctggagtagggctgagaagcaaatttgtgattataaaggtcattttgaagggtcatcctgaagggaactctggttttaaaatattgaatgataaatgtaactgaagagttcattagatataagattagaaaggacaaggaaaatttatgtctgaaggaagaaaataagaaatgtcaagcccattcatactttcaagtgttggctatattaaagtttgaaatggtgatgtgattatgagaaccagctaaaataagctcaagaaatattttatgtgaatttctgtaccttctttaaaatattttgttgttatagaaagttttaagcagttaataaagaagtcaatagttcagtgaacccccattttactcatcgcctagatttaaaaattacaactcacagccaattcttttttttaagcctatattcccagctcttaattctttcatttgtttcttaaatattttaatatgtacttctaaaaggtatggactcttcttatcataaattc

SEQ ID NO: 952724 - DNA, 624 bp, Homo sapiens
ttttaaatttttttaatttttaattttgtggatatattataattgtacatatttatgcagtacatgtgatattttgatacaacctattgtmtgtttagttccagatattcatagtgctggagtagggctgagaagcaaatttgtgattataaaggtcattttgaagggtcatcctgaagggaactctggttttaaaatattgaatgataaatgtaactgaagagttcattagatataagattagaaaggacaaggaaaatttatgtctgaaggaagaaaataagaaatgtcaagcccattcatactttcaagtgttggctatattaaagtttgaaatggtgatgtgattatgagaaccagctaaaataagctcaagaaatattttatgtgaatttctgtaccttctttaaaatattttgttgttatagaaagttttaagcagttaataaagaagtcaatagttcagtgaacccccattttactcatcgcctagatttaaaaattacaactcacagccaattcttttttttaagcctatattcccagctcttaattctttcatttgtttcttaaatattttaatatgtacttctaaaaggtatggactcttcttatcataaattc

SEQ ID NO: 952725 - DNA, 545 bp, Homo sapiens
gcaagtccaaaatccaagggggcagtcaaattttaaagctccaaaatgatctcattcaactccaggtctcacatccaggtcatgctgatgcaagaggtgggtttccatggtcttgggcagctacgyccctgtggctttgcagggtacagcctccctcctggctgctttcatgggctaacattgagcatctgcagcttttccaggtgcaaagtgcaagctgttggtagatctaccattttggggtctggaggacgatggccctcttcccacagctccactaggcagtgccccaataaggactctgtgtggaggatcataccccacatttcccttctgcactgtcctagcagaggttccccaggagcatcccgcccctgcagcaaacttttgcctgggcatccaggcattatcatacatcttctgaaatctaggtggatgttcccaaacctcaattcttgatgtctgtccatctgcaggctcaagaccatatggaagatgccaaggcttggggcttccactctctgaagccatagcccaagctctac

SEQ ID NO: 952726 - DNA, 728 bp, Homo sapiens
aaaatgaaactagacccttatctctcaatatattcaaaaatcaaatccaaatggattaaagactttctaatacctcaaatcatgaaattactagaagaaaccactgtggaaatgcttaaagcgttggtctgagtaaagatttttttgtgtacgacatcaaaagtacaagcaacaaaagcaaaaatagataaatggggttatatcagctagaaagcttttgtacagcaaagaaaacaatcaacagagtgaagagacaacctacagtatgagagaaaatatctgtaaactatccatgggacaaaggattaataactagaatacagaagaaactcaaacaagttaatagcagaaaataatccaatttgaaaatggacaaattatctgataagtcatttctcaaaaaagacatacaaatggccaaacaggcatataaaaaacaaaaaggtcaacatgattaatcctctgggaatacaaatcaaaactgcaacaagatatcatccatctcaccccagttaaaatagctattatcaaaaagaaaacaatcacagatgctggcaaggatgtagagaaagggcatgcttgtatactactagtaagaatgtaaattagtatagcaactatgaaaaacagtatggaggttcctcaraaaagtaaaaatagatctaccaaatgacccagcaatccaagtgctgggtatatattcaaaagaaaagaaatcagtatattga

SEQ ID NO: 952727 - DNA, 635 bp, Homo sapiens
cattaaaaaagattcaaataactaaaatcagaaatgaaattattgactttactacagacctcacggaaatagaaaggattataggagaatactatgaccaatttatgccaaaaaattagatgacrtggattaaatgaatgatttcctacaaatatacaaactaccaaatggacccaagaagtaataaaaagtttgaacatattaataacaaaaagattgattcagtaatttttaaaaatctgacagtgaaaaggactggaccagatggcttcactggtgaattctatcagtcatttaaagaattaacaccaatgcttctcaaacttgtccaaaaaatagaggagtgaacacttcccaacttattcagaggctagcattctatgaggctagctttgataccaaagccagataaacacaggaaaacagtagaccaatatcccttatgagtatacatgcaaaaattctcaacaaaattctagcaaactgaatgcagcagcatattaagaggattatgcatcatggtaattatattttagctggtagcatctaccagcttttgtctcttatttctgttgctgttataaatccttgcaaaacttaaggcccgcagtgataaacctattattccctttttt

SEQ ID NO: 952728 - DNA, 557 bp, Homo sapiens
gacatggatgaagctggaaaccatcattctcagcaaactatcgcaaggacaaaaaamcctaacaccacgtgttctcactcataggtgggaattgaaaaatgagaacacatggaaacaggaaggggaacatcacacacttgggcctgttgtggggtagggggaagggggagggatagcattaggagatgtacctaatgttaaatgacgagttaatgggtgcagcacaccgacatggcacatgtatatatatgtaacaaacctgcatgttgtgcacatgtaccctaaaacttaaagtataatttaaaaaaaacctgtgatctctatgtttagcaatttctgtctctgtcatagataataagagagagaggtccaccccagctttatcaaattttgtcactttacaaaatacatcatggttttatatatatgatttaattaagtgagcaattagaagttggtatgtgctcagcatggatagtaactagttagtgacttgttacattaagaagatttaactattacttaaaatagtagctgggcgtggtggcttgtgccta

SEQ ID NO: 952729 - DNA, 565 bp, Homo sapiens
tttaactttttttaaaaagttgccaaactattttctagggtggttatactattttacattccaaccagcagtatatcagggttcaaacactgtaaaagtcagttyttaaagttttagcctttctagtgatagtacaatgatatctcatagttttaatatgtatttttctaatggttaatgatgttgagtatcttttcatgtagttatttggcatccgcatgtctttttattttgcaaaagttcctcttcaaatcttatgcccacttttttaatggatcattttatcttatcactattaaagttgtaaatgttcaacatccctgatatgagtttacctatgtaagaaaccttcatatgtaccccaaagctaaaaaaaagctagaaaaagttgcaaatttttttatatattatgtatttaagttctcagttggatatatgatttgcagaaaacattaaagtctttaattttggtgaagtgcagatttttatgtcatatttttaaaatctttgccaaatccaaggtctctaggatttcatcttatgttttcttctaaaattttaatat

SEQ ID NO: 952730 - DNA, 576 bp, Homo sapiens
tattactgtaaaaagtcacttttaggcygggtgtggtggctcacacctgtaatcccagcaatccgggaggccaaggcgggcggatcacgaggtcatgagatcgagaccatcctggccaacatagtgaaaccctgtctctactaaaaatacaaaaaattagctgggcatggtggcgggcacctgtatcccagctactcaggaagctgaggcaggagaatggcgtgaacctgggaggcagagcttgcagtgagccgagatcgctccactgcactctagcctgggcgacagagtgagactccatctcaaaaaaaaaaaaaaaaaaagtcacttttagatataaaattctttaattcccaatggtaaaaaatatacataagacataggtcaatatgcaattttgggtatgaagaaaaaatattgtaaacaaatatactattaaatactaatctgaaacataattgaagcaaaaggcaaatttttaactacatatagattaaaactgtaaaaacagtgagttacatttaattcccaagaccacagtagcctgtggaaggaaataaagatgtgaatactaat

SEQ ID NO: 952731 - DNA, 576 bp, Homo sapiens
tattactgtaaaaagtcacttttaggctgggtgtggtggctcacacctgtaatcccagcaatccgggaggccaaggcgggcggatcacgaggtcatgagatcgagaccatcctggccaacatagtgaaacccygtctctactaaaaatacaaaaaattagctgggcatggtggcgggcacctgtatcccagctactcaggaagctgaggcaggagaatggcgtgaacctgggaggcagagcttgcagtgagccgagatcgctccactgcactctagcctgggcgacagagtgagactccatctcaaaaaaaaaaaaaaaaaaagtcacttttagatataaaattctttaattcccaatggtaaaaaatatacataagacataggtcaatatgcaattttgggtatgaagaaaaaatattgtaaacaaatatactattaaatactaatctgaaacataattgaagcaaaaggcaaatttttaactacatatagattaaaactgtaaaaacagtgagttacatttaattcccaagaccacagtagcctgtggaaggaaataaagatgtgaatactaat

SEQ ID NO: 952732 - DNA, 573 bp, Homo sapiens
  misc_feature 196: n = A,T,C or G
acagctcctccatttacatttgctagcccwcgcttgcagccagaaagccttttagaatgttgcaacaaacaaaaccaaaagcccacaggccatctcaggcagaggaaaccacagacagacacactgtcttccacaggctcccaactctagttgaccctgtttatgtcttagtattttaagtctgtgaccttagcanaggttcaacatgcagtgccaactgagcaggcagaaacagaagtacagttcttgccacaggatttggaggcacaagaattcaatttgaattctgtgtccaccatgtacacatcatgtaactgtacctgcccctgagtcttggttttttcttttttttttttttctctaattgttttggtatctatctatcttaaggtaaacatggttttgaagtaatgtcacttttttatttattttttattattatactttaagttttagggtacatgtgcacaatgtgcaggttagttacatatgtctacatgtgccatgctggtgtgctgcacccattaactcatcatttagcattaggtatatctcctaatgctatccctcccc

SEQ ID NO: 952733 - DNA, 690 bp, Homo sapiens
catgagcagccaggcaccatggacaaaatgttgatggcagcaggaggcagacaggttcctgggtagaaaggggtgggtacctggtgagcaccaccttcaagccagagatggcctaaagcctgggggcagggctgctagttctgggtggaatccacggcccagagagaaaacgtatggtgctttttccaggcctgccatggcgctccatggctgcccatggaccagtcagcacacaccacctcccttctgagcccataaaaaccctggacccagccagactaacacagacatcaggactaccagcttcaggaaggatctatccactatggtctcctcaacttgttgagccgacctgcctgtggaaaggagctacctactatgggtctcctccctgctgagagttggacacttatcagggcaacctgcctatggaaaggagctacccactttgggccccctgagagctattctgtagctcaatgaagctcctctccaccttgctcacccctccagttgtccacatacctcattctccatggacacaggacaagaactcaggacatgctgaatggtaggacagaaagagcttaacccaaacatggctgaaacacatcctccactccccacgtggcgggggatgagaaggagagaagagcttcagccctttkggagcccagacatcaggctccc

SEQ ID NO: 952734 - DNA, 477 bp, Homo sapiens
ggaagctgaggcaggggaatctcttgaaccagggaggtggaggttgcagtgaactgagatcatgccactgcactccagcctggcgacagagtgagactccatctcaaaacaaaaacaaaaaacaaacaaaaaacmaattaaaccaaaagttagtaataataaggatataatagatatctcagtataaatcaatgaaatagaaaacaaaaaaattgatgagccataaaaatgaaaagctgctttttgagatcaataaaaatgataaacctcgagatggattgatagacaaaataagagagaagacaaattatccatatcaggagtgggagaagggacatcactagagatcctacagatattaacaggataagaggaatattatgaataaattaataccaataaattctacaacttagattaagtggacaattttatttcaagacataaatttccaagctcactaaaaaaagacagctt

SEQ ID NO: 952735 - DNA, 727 bp, Homo sapiens
aggatgattgtctttgtatgttgggtccttatctttcaattcatgttttttggaaaaggaaacttgggctcttatttggctgtcggtgtccaaggcttgcaaaatgtgtgggtgggtgcagtgggaggcgaagtgacaacagagggacgacctcactcctcatgaccacatctgacctggccctctgtgaatgcattttagagagttagtgtccattggtaatatctttgtctcggaagccagacaccagggctgggtgtttgtttgtttgtctgtttgtttgttttgttttgagacagggtctcactttattgtccaggctggagtgcagtggcgtgatcttggctcactgcagcctcaatctcccaggctcaagcaatcctcccacctcagcctcccaagtagctgggaccacaggcgcatgccaccacgactggctaattttgtttactttttatagacacgaggtctcgctatgttgccaaggttggtctggaactcccgagctcaagcgttctttttacctcagtctcccaaagtcctgggaccacaagcataagccaccacccttgcctagggctgagtcttattccttctataatcacaccaagtgggagtctctgagcccatatctgataagcwagtttgagtgaaaaagcccagaatcatctggacagcatagacatccctccagcatggcttaaagtgtacacatgacacagggtca

SEQ ID NO: 952736 - DNA, 605 bp, Homo sapiens
attgtaagcccagctactcagaaggctgaggcaggagaatcctttgaatccgggaggtggacgttgcagtgagctgagattgcgccatcgtactccagcctgggtgacaaggtgagacttmatctcagaaaaaaaaaaaaaaagaaagaaatatttgaggctgggtaatttataaagaaaagaggtttaattggctcttattaaaggttctgcaagctgtaaaatcatggcatcatcatctgcatggcttctggtgaaggccttaggaagcttccggttatggtggaaggtgacaggggagctagcatgtcacatggcgagagtgagagcaagagagaaaaaagagggaggtcccagattcttttaaacaaccaaatttcacgatgacgaattgagcaagaactcacttaccaccacggggacggtgctaaaccattcatgagggatctgcccccatgacccaaacgcttcccaccagtccccatgttcagtatttgggaatcacatttcaatatgagatttggaggggacaaatatccaagccgtatcattccacctctggccccctaaatctcatgtttttctcacctttcaaaatacaatca

SEQ ID NO: 952737 - DNA, 590 bp, Homo sapiens
  misc_feature 569, 570, 571, 572, 573, 574, 575, 576, 577, 578, 579, 580,581, 582, 583, 584, 585, 586, 587, 588, 589, 590: n = A,T,C or G
atccacactacagcaaaactttgggacttgaattctaggctcataatctcacaactgagaagggtccctccacacctttgtaactgtacacctacttgaacccttaaggtaaagctaaccaggaaagtttctccctagaagaagatggcatccttggcatcttcttccaaaataacagatcaagacgtctctactatcatgagactcttacctttgaatatttttttcccttggttataactttatgaacaatagaattgaaaagggggtctgttatgtgcacttatgggatatacttttatttgtgaaggattttgcagctagtcttgtacatggtgagaaacagaaaattggttcactcctcttaacccacatcacaggttaaagagagcattgccagaaagccttcactcttctgaaaggcatcatgtattaggttctttttccatgatttgaaataaaagagacaatkattagaaatgtattcttcatgacagtccctccagcagattctaccataaaggctatggtacacaacaggctttaaattattttgtgaaagttatgannnnnnnnnnnnnnnnnnnnnn

SEQ ID NO: 952738 - DNA, 544 bp, Homo sapiens
tagtaactttacaatggcctctaagtgttcaagtgaaagaaaaaataccatgtccctccctttaaatcaaaagctagaaattattcagcttaatgaaaagggcatgctgcaaacagagattggctgaaagctagattcttgcatcaaaccatcagatatgttgtcaatggaaaagaaaactacttgaaagaaattaaatggtaactttggctggtccaagtgtgctggtgtctataactaattgatcacgactagttacaaatgtctttgttctttttgcactgtcactgtttcaattaactagcttaaaaaaagaaaagtgctataccagtgaacacgcaaatgataagatggtaaaacagccttattgctgatctggagaaagttttagtggtctggatagaaaatcaaaccagacattacagttccttaagccaaagcataatccagagcaacgawctaaccctcttcaattcagtgaaggctgacagaggtgaggaagttgcaaaagaaaagttggaagctagcagaggttaggtcataa

SEQ ID NO: 952739 - DNA, 628 bp, Homo sapiens
gcgcttcaacaaaataaaaaaaaaattaagcaaagtggaaaggctccctattcaataaatattgctgcagtaactgaccaaccatatgcagaagaaagaggctggatcccttttttatcrccatatacaaaaattagcttaagatggattaaagacttaaatataagacctcaaactatgaaaatcctagaagaaaacctagaacacaccattctggaaattggccttggaaaacaaatcatgaataagttgctcaaaagcaattgttctaaagcatttacaagaaaaacaaaaattgacctgtgggacctaattaaactgaagagcttttgcatagcaaaaagtacagagtatacaacctatagaatgggagaaaatatttgcaaacgatgtatccaaaaaaggtatgatatccagatctataaggaacttaaagaaatcaataagtaaaaacaaaccctattaaaaagtgaacaaatgacatggacagacacttctcaacagtagacatacaaatggccaacaaacgtggaaaattctcaacatcactcgtcatcagagaatgcaaataaaaaccacaataaaacaccatcttttgtcagtcagaatggttattattaaaaagtca

SEQ ID NO: 952740 - DNA, 595 bp, Homo sapiens
ctataagcatagcacagagggtcattccaatatttttccagctgagagttacatagcagtcaggtaccatatatggattaaaataaaaataattattaagaaaaagacatatgctaagtgataatatggtaatgaaaagccagtaggcttattgttggaagtgccaacattattcctcactgggacaaaaactaacaactcttctcacaggcaagtgcatgtaatcaatatttgatgaagatcacaatacagcagaagaaaatacatggaatagatgattatttgaatttaacatctctttgcaggaagatgaaataaggacttggtgaacagagttgtcatggtgcagcagaatgattgtaaaccagttgttctctttaatattgattggatggcagaaacaattgcttaaaaattacaaaccttaaaacattaaagaaaccagattattacgcttacaagtccctcctcataacacatacacacacacacacacacatcttccacacacatyttccacacacatgccacattttgaagtggctctgaatatattttaggttggttggaagttgaatataaattcatatttcag

SEQ ID NO: 952741 - DNA, 578 bp, Homo sapiens
acatctcccatgggattagccaccactcayatccccccttaagccataggaatcagtcaccaaaggccttgaaaccattcaggtaggcaccaaggtctattccttgtcctgattcctcttgtagaaaggtgggcaaccaagatccttgggttctgtctctctgttgaccacagtcacttccaggaccaagccaaagctttcagatatatttgtcatccagaacccctaccctgtttggctctgtcagccccaaatctagcccaattctctctgcccagtctctctctgccaaacccttttactatgccctctagaactcctgatcagtggtcagtaaattccttggtattcccaatgtcttgttttgaattttctctctattgcttaatctcccttttttttctttcttctcccaactttcaactgatacccgttttttcttctttcttctcccatctttcaactgatattgcctaatctaaaataacattttaaggccaggtgtggtggctcatgcctgtaattctagagctttgggaggccaaggtgggaggaacgcttgaggctaggttttcaag

SEQ ID NO: 952742 - DNA, 578 bp, Homo sapiens
acatctcccatgggattagccaccactcacatccccccttaagccataggaatcagtcaccaaaggccttgaaaccattcaggtmggcaccaaggtctattccttgtcctgattcctcttgtagaaaggtgggcaaccaagatccttgggttctgtctctctgttgaccacagtcacttccaggaccaagccaaagctttcagatatatttgtcatccagaacccctaccctgtttggctctgtcagccccaaatctagcccaattctctctgcccagtctctctctgccaaacccttttactatgccctctagaactcctgatcagtggtcagtaaattccttggtattcccaatgtcttgttttgaattttctctctattgcttaatctcccttttttttctttcttctcccaactttcaactgatacccgttttttcttctttcttctcccatctttcaactgatattgcctaatctaaaataacattttaaggccaggtgtggtggctcatgcctgtaattctagagctttgggaggccaaggtgggaggaacgcttgaggctaggttttcaag

SEQ ID NO: 952743 - DNA, 578 bp, Homo sapiens
acatctcccatgggattagccaccactcacatccccccttaagccataggaatcagtcaccaaaggccttgaaaccattcaggtargcaccaaggtctattccttgtcctgattcctcttgtagaaaggtgggcaaccaagatccttgggttctgtctctctgttgaccacagtcacttccaggaccaagccaaagctttcagatatatttgtcatccagaacccctaccctgtttggctctgtcagccccaaatctagcccaattctctctgcccagtctctctctgccaaacccttttactatgccctctagaactcctgatcagtggtcagtaaattccttggtattcccaatgtcttgttttgaattttctctctattgcttaatctcccttttttttctttcttctcccaactttcaactgatacccgttttttcttctttcttctcccatctttcaactgatattgcctaatctaaaataacattttaaggccaggtgtggtggctcatgcctgtaattctagagctttgggaggccaaggtgggaggaacgcttgaggctaggttttcaag

SEQ ID NO: 952744 - DNA, 597 bp, Homo sapiens
cacacacacacaggcacacacaggcacacacgtgcacacatgcacacacatgcccacacacacacgcacacagaatggtgcgatgacttatgctccagcttttaaccaagcaggccgtgcaaaggcccaattcaccttaaatcaccctgccgcctaacaatggtgcatcagtgattacaacccaaggggccctgaagggaggaggcaggtggatcagcaggaagtctgtggtaggaggtctgttcagtttccaccgtttccatttgcagctcaagaactcatgataagtcccgctgattacagatgcgttgtggttatgaatgttaaagttgctttgggcttgaattcaaggctccccacgaccaattcctaagactggcaatgtcagggaacatagagaagtgcccgagtcagtctaccttctgcagagaaagtctaaaccgattgtttctgccattgtcacaactgcacacagacattgaacaaccctgaagttggagctgggtgtcagatggccagttcaccctctgcggtgagcagaaggccagaaacagcgaggytcccaaaggtcgtggatccttcttaggatctgcagct

SEQ ID NO: 952745 - DNA, 792 bp, Homo sapiens
tgagttatggtgtagggactccgtccttgatattctcatagagatgccctcgtcctcctggatttcagggtggaaggaatgggaatggtaggtcaagtctgagacattgaggtctgacgctgtcttcctgttcagatggtagcttgttttggggacctttcagcggagtgtctgtccttagtgcctcatgggctgccatgcactgggttttaactgcaaactgttttagaataatctggtcttaatgtctgggagttctaatatgtgcatcccaatgaggttcttagacctcagggccagatctcacactgactctctttgaccatgctgcattccacaggcaatgtggaatgttgcttacctcaaggaacataaaccttacattgtggaatagaggtatttgcaaatatcttctcctctcccattgccagggtggctcagtgtctgctaaaattgaatccatatgggtacaccgagcagaaggggagggcggaatgggtgggaaagtacattgcagtatttgtttgtgatgacattcatttaaccagagctaacctcggagttataaaccagggcattatttcctaaacagtatcatgtattcatttgtggcagtatagaagatttaatttatacatgtatttatgcatagacatatgaaagagatcatarctctggattcaatgtgataaaaagcagattcattctagagtcccatatacagtggattgtgaagaacaatcctttttattatataacatttactttcctctaggacatctgttagttcag

SEQ ID NO: 952746 - DNA, 575 bp, Homo sapiens
tatgctgctgttctcccttctccttccccttttgatggcttcggcggtgtgagactgccacctctttggatttttgtactgcgtgcaataactccataatttccttgtggtatttaatgggggttccctagaggttaggaactccctttctttccatattgcagcatgggcatgtaggaatagataagcatacttgctatctgtatacacacatttattctttttccctttctcagttttaaggctcaggtaagtgccactagttctgctaactgggtgctgctccctaggagaagaggcttactttcaagtacggttgcatcattaactatggcataacctgcccttcatatcccattttccacaaatgaactttcatcagtatataggttaagttcaggattagctaaggggacttctaagagatcatctcaggtggcataaatctggactataatttgtcrgcagtcatgctcgattggttccccatcctctgggagaaaaatggcagggctgagggccacacatgtacatatttgaagcaccggttgctcaaggagtagcatctgctatct

SEQ ID NO: 952747 - DNA, 579 bp, Homo sapiens
cagggtgttggagtttgctggaggtccacatcagaccctgtttgcytgggtatcaccagtcgaggctcagttggaaatgcagaaatcacccgtcttctgtgtcagtcacactgggagatgcagactggagctgttcctattcagccatcttggaacggctctcaaattagtttatttttttttctaattctgtgaagaatgtcattggtagtttgataggaatagcactggatctgtaaattgctttgggcagtaaagtcattttaatgatattgattctacctatccatgagctttgaatgtttttccatttgtttgtgtcatctctgatttctttgagcagtgttttgtaattcctgttgtagagatcttttacctctctgttagctgtattcccaggtgttttattctttttgtggcttttgtgaatgggattgtgttgcttatttggctctcagcttggatgtcgttggtgtatggaaatattactgatttgtatactttagttttgtatcgtgaaactttgctgaaattgtttctcagatctaggagcttttgggcagactattgggtttccag

SEQ ID NO: 952748 - DNA, 611 bp, Homo sapiens
atctttattgaaatacttttcccttttggctttcatttattttcacccgctacatgattttatttagtactgtggctctaaatataatgcatgytgataaattttgaatttctatcttcagcttcaacttatcctctgagatccatactgctacttcaatctccacttagatgtattatagccatgtaaaatgcaataatgcaaaattaaactcttgattccatcacaactcttcccttaaattaggttcccatcccagtgattgccatcttattaaatgacatcaccattcacccagttgctcaggtccaaatccatcagcaaaccccactaagtctattgtaaaaatactacttgaatttgactacatctcattaccttcattcctgtcatcctaatcccttgtactatatcaataatatctatcacataaactgaaaaaaataatatatatatatatatagctttctaactgttgtccatgaatttgttatctccctctcccctatatattctccacatagtagcccaactatccatttaaattttaagttagatcacattgctgtcttgaccaaaaccctaaatggtttcccagcaatcttaaaaca

SEQ ID NO: 952749 - DNA, 630 bp, Homo sapiens
gagttctgtagaggtctattaggtctgcttggtgcagagctgagttcaattcctgtatatccttgttaactttctgtcttgttgatctgtctaatgttgacagtggggtgttaaagtctcccattattattgtgtgggagtctaagcctctttgtaggtctctaaggacttgctttatgaatctgggtgctcctgtattgggtggatatatgtttaggatagttagctcttcttgttgaattgatccctttaccattatgtaatggccttctttgtctcttttgatctttgttggtttaaagtctgttttatcagagactaggattgcaacccctgcctttttttgttttccatttgcttggtagattttcctccatccctctattttgagcctatgtgtgtctctgcacgtgagatgggtctcctgaatacagcacactgatgggtcttgactcttcatccaatttgtcagtctgtttcttttcattggagcatttagcccatttacattcaagggtgatattgttatgtgtgaatttggtcctgtcrttatgatgttagctggttattttgcttgttagttgatgcagttgcttcctagcattgatggtctttacagtttggcatgtt

SEQ ID NO: 952750 - DNA, 770 bp, Homo sapiens
ctggaggtccactccagaccctgtttgcytgggtatcaccagtcgaggctcagttggaaatgcagaaatcacccgtcttctgtgtcagtcacactgggagatgcagactggagctgttcctattcagccatcttggaacggctctcaaattagtttatttttttttctaattctgtgaagaatgtcattggtagtttgataggaatagcactggatctgtaaattgctttgggcagtaaagtcattttaatgatattgattctacctatccatgagctttgaatgtttttccatttgtttgtgtcatctctgatttctttgagcagtgttttgtaattcctgttgtagagatcttttacctctctgttagctgtattcccaggtgttttattctttttgtggcttttgtgaatgggattgtgttgcttatttggctctcagcttggatgtcgttggtgtatggaaatattactgatttgtatactttagttttgtatcgtgaaactttgctgaaattgtttctcagatctaggagcttttgggcagactattgggtttccaggtatagaatcatattttctacaaacagagatagtttgacttcatgtcttctatttggatgtgttttatttctttctcttgcctgatggctctggctaggacttccggttctatattgaacaggaatggtgagagagggcatccttgtcttgttccagttttccagcttttgcccattcagtatgatgttggctgtggatttatcatag

SEQ ID NO: 952751 - DNA, 723 bp, Homo sapiens
cactctactaggatcacagaggcttcctgtgggctgtcttgtgaaaagcaaagtgggtactgagtttcctccttggctcactgcagtataacacaggactctctgatagaactttctgtgatgctgggaacgtttcattctgcactgcccaatatggtagcttctagtcacatgtggctcttgagtatttgaaatgtggttaatgcaactgctagtgtactgaagttattattttgtttaagttaaacagccacacatggctaatgaccagaaggaagagtctcaagtcaaggtgaccctgagaatgcaaatgccttgagatttgctgaagtcttggggcaggcttgagacttaaattgaaaatgggactggggtgctgaggtgaaggcgtgcgcttaaactgattttacctagatcaggaggtcaagaaaaccacaagctaatagggttacaaaagtagttgaggaaaagagaatagaggcttcttgtgcaggcaaattggagtttctacaagtggtgagggtttttatttgttttgcagaatataagctaacaaatgtctgtttatgtccatgcacagacatctcatgcagmattcataacagcaacagttgtaatcgcacatggtaggtgcttaataaatgtctgagttattggatgactgagtaaacagtaccttccatcatccactgacatcatctcagttgactcttgcaacatccc

SEQ ID NO: 952752 - DNA, 443 bp, Homo sapiens
aaccactgctctcttcaaagctgtcagacatggacatttaagtctgcagaggttactgctgtctttttgtttgtctgtgccctgcccccagaggtggagcctacagaggcaggcaggcctccttgagctgtggtgggctccacccagttcaagcttccaggctgctttgtttacctaagcaagtctgggcaatggcaggcacccctcccccagccttgctgccaccttgcagtttgatctcggactgctgtgctagcaatcagcgagactccgtgggtgtaggaccctccgagccaggtgcaggatataatctcctggtgtgccattttttaagcccttcagaaaagcgcagtattagggtgggagtgacccrattttccaggtgccatctgtcacccctttctttgactaggaaagggaactccctgaccccttgcacttcc

SEQ ID NO: 952753 - DNA, 742 bp, Homo sapiens
ggatttgaattcacccgcttggaccccagtttctgggtggtccccctcattgcactgcctctcctctgcattaagaaggtccaggaccaggcatggtggctcrtgcctgtaatcccagcactttgggaggccgaggcgggcggattgtgatgtcaggagatccagaccatcccggctaacacggtgaaaccccatctctactaaaaatacaaaaacaaaaacaaaaacaaacaaaccaaaaaaagaaggtccaggcggggcgtggtgccgagtgcctgtagtctcagctactcaggaggctgaagcaagaggatgccttgagcccaggagttctgggctgtagtgcactatgcagatcaggtgtctgcactgagttcagcttcagcgtggtgacctcccgggagtggggaaccaccagattgcctgaggaggggtgagccagcccaggccggacacacaatgggtcacaatttccatgctacccatgctaatcagcagtgggatcgggcctgtaaatagccactgcgcaccagcctgggcaacataacgagaacccacctctaaaaaaaaaataaaaaataaaaaaagaagaagaaaggccaggatgacagctaagagaagtcttctcccttagcagtggagggaggtatgaggcccactgcctcacctggagcttctgaggctcagcagtgccatggtcctcacatctctagagtggttttccattttccaagcactttca

SEQ ID NO: 952754 - DNA, 484 bp, Homo sapiens
ggctcactgcaacctccgcctcccttttttttttttttaaattatactttaagttctgggatacatgagcttttgtttgttttatttatttatttatttattttttttttgagacagagtctcactctgttgcccaggctggaatgcagtggtgcaatctcggctcactgcaacctcctgcctcccaggttcaagtgattctcctgcctcagcctcccgagtagctgggattacaggcgcctgccaccgcgcccggctaatttttgtatttttagcagagacggggttttgccatcttggccaggctggtcttgaactcctgacctcatgatccacccacctcggcctcccaaagtgctgagaacaggcatgagaggcatgagccaccatgacyggccctgtttttcgtttttgtcttgttttttgagatggagtctcgctctgtcgcccagactggaatgcagtggctcgaactcaactcact

SEQ ID NO: 952755 - DNA, 788 bp, Homo sapiens
aaattctcatcatcagcaaatgaaatacttttcagaattggccatattgtttctgttaggacaataaacaagtctcaaaaaaattttaaaaatatcaaaattatrtcaagtaccctataataccataatggaataaacctagaaatcaataacaagagaaacatttgaaagcatacactacatggaaattaaacagcacatttctgaataatcaatgggtaaagaggaaattaagaataaaatttaaatctttcttaaatgaaaatgaaaacacaaaataccaaaacctatgggatgagcaaaagcagaattaagaggcaagtttatatcagtaaacccctatatgaaaaaacaagaaagatttcccagcctcaaataaaccaattaacactgcaactcaaggaactaaaaaaggaagaacaaaccaaaccaaaaattagtagaagacaaaaataataaatatcagagcagaaataaatgaaattaacactaaaataataacacaagagatcaatgaaataaaaagttgcttttctgaaatgataagccaaatgaacaaaccattagctagactaagaaaaaatgggagaataaccaaataaataaaatcagaaatgaaaaacatacacaatgacagtagcagtagtagtaacattacaatgtttactaaaaaaatacaaaggatcattaaagattgctatgaacaagtatacaccaataaatttgaaaacctggataaagtcctagacaaatacaacccaccaagattgaaccaagaataaatagaa

SEQ ID NO: 952756 - DNA, 677 bp, Homo sapiens
cagatttagagggccacctatgagtttaggtgatccctcttagcagtttggaaaatatttcaaagagctagagtcttagccctgaatatatatataaatatatatatatatataaataaatatatatatatataaatatatatatatataaatatatataaaaatatatatataaataaatatatatatggtttatttatttattgcaggtagaagtgcctttggagggcagagttgccatacactgaggaggagtacatagctgggaaaggtccaccctgggcagtaagtcaaagccttaagatagacaactcttggtctcaactccctaatgggaaatctacatagcagtggatgtgcaaacattttgtatagtgtagaattatataactgcaatgaattgaacgtttgtgtcctccccaaatttatatgttggaacctaaccctcaatgtgatgatatttaagggtagagcctctggaaggtgattagagttagataagatcatcagggcaagaccctcacaataggatgaatgcccttacaaaaagaggaagagacatgggatctctctttctctctgtgtatatgcaccaaggtaaggccatgtgcatatacattgtaaggatgcaatgggaagatggctgtctgtaamccaggaagagggcccttaccaag

SEQ ID NO: 952757 - DNA, 557 bp, Homo sapiens
atggtaccctgatttccattctgcatttgttttctgtgaataccttcctagaactttgttgggagggataggggtaattaactgggcaagatgaggtcattctctggttcctgaccaaaatattgttataatagcacctgatactctcatcttaacttgtaaagtaacctcattgagaaataaaaacaaagggcaggaaatactctgtacaaagaggggaaagcccaccacctgagagagaaaggagtcctggaacatgggacagtgaactaggagaaactttggggcagatgaatgtgtgtgaggatgtgggtgtggggttgatggcagcagaggatgaacttttgaaatcagtgaatcatcttgtgaaaacatatggctgttaatatataactatcttgtttacaactctatagtgcctccccmttgcttgctctgaggatgaggtccaaactttttagcaagaaacctcaggctgggtccatggctcatgcctgtagtcccaacactttgggacgccacggtgggtggatcatctgaggtcaggagttaaagac

SEQ ID NO: 952758 - DNA, 710 bp, Homo sapiens
cctgagtctagtagggacttggagaacctttatgtctagctaagggttgtaaatacaccaatcagcacactctatctagctcaaggtttgtaaacacrccaatcagcaccttgtgtctagctcagggtttgtggatgcaccaatcggcactctgtatctagctaatctggtggggacttggaaaatctttatgtctagccgagggattgtaaatacattaatcggcactctgtatctagctcaaggtttgtaaatgcaccaatcagcactctgtgtctagctcagggtttgtaactacaccaatcagcactctgtatctggctaatctagtggggagggggagaacttttgtgtctagctcagggattgtaaacacacctatcagcaccctgtcaaaacggaccaatcagctctctgtaaaacagaccaattggctctctgtaaaatggaccaatcagcaggatgtgggtggggccagataagagaataaaagcaggctgcccctgccagcagtggcaacctgcttgggtccccttctacactgtgaaggctttgttttttcactctttgcaataaatcttgttgctgctcactctttgggtccacactgcctttaggagctgtaacactcatcatgaaggtttacagcttcacttctgaagccagcaagaccatgaacccaccagaaggaaaaaactccgaacacaccc

SEQ ID NO: 952759 - DNA, 607 bp, Homo sapiens
atagcgagagagaaatagaaagagagtgtatgtctgtgtttgtgtgtgtctgtgtgtgtattttatacatatatatatattcagagaaacagaaccaatagcgagagagagacagaaagggaaagtgtgtgtgtgtgtgtgtgtgtgtgtgtgtgtataaagaaagtggggtctggtgtgcaattttagggaatttgggtaagtccccaatctgcagagtaggccggcaggctggagacccagggaagagatgacactgcagagttcggaggcagtctattggcagaattctgtcttctgtggggaggtcagtctttgttttttttaaggccttctactgggtaaatgagacccatccatattatggagggcaatttgctttactcagcacttactcatttaaacgttaatctcatttaaaaaatattttcgaggaaacatccaaatgtttaaccaaatttctgggtactgtgtcccagacaagcagayacataaaattacccatcgccttttttgtttgacattttagtaactctcctttggggtcccacctcccttttggtgggcttacagcccaaaccagtcattctcaactccaaaggacatt

SEQ ID NO: 952760 - DNA, 401 bp, Homo sapiens
gcagagctgccttcatgaataagagaaagagcaaggaaaagcaactcaatgtttaaaattacaaatggtgatcaggacttggaagcacgtgaataacatgtcatggaaaagaatatagaagagctgggatmattcttttaaatagaaaaggtctttgaagaggtgacttttcacttgggatagagccagcttagaaacagtcaaagtcaatgggataagaatcaggaaaaaaaaaaaaaaaggatgagtttagcaaggttggcaggagccagacttccagggctttatatgaaggtggttgggattaactctaagtacagtggggtttttaactgggaagggaaagcatcctatgtacattgtgagatgggttctttggccgctgttgggaacatcaagag

SEQ ID NO: 952761 - DNA, 401 bp, Homo sapiens
gcagagctgccttcatgaataagagaaagagcaaggaaaagcaactcaatgtttaaaattacaaatggtgatcaggacttggaagcacgtgaataacatgtcatggaaaagaatatagaagagctgggataattcttttaaatagaaaaggtctttgaagaggtgacttttcacttgggatagagccagcttagaaacagtcaaagtcaatgggataagaatcaggaaaaaaaaaaaaaaaggatgagtttagcaaggttggcaggagccagacttycagggctttatatgaaggtggttgggattaactctaagtacagtggggtttttaactgggaagggaaagcatcctatgtacattgtgagatgggttctttggccgctgttgggaacatcaagag

SEQ ID NO: 952762 - DNA, 401 bp, Homo sapiens
gcagagctgccttcatgaataagagaaagagcaaggaaaagcaactcaatgtttaaaattacaaatggtgatcaggacttggaagcacgtgaataacatgtcatggaaaagaatatagaagagctgggataattcttttaaatagaaaaggtctttgaagaggtgacttttcacttgggatagagccagcttagaaacagtcaaagtcaatgggataagaatcaggaaaaaaaaaaaaaaaggatgagtttagcaaggttggcaggagccagacttccagggctttatatgaaggtggttgggattaactctaagtacagtggggtttttaactgggaagggaaagcatcctatgtrcattgtgagatgggttctttggccgctgttgggaacatcaagag

SEQ ID NO: 952763 - DNA, 551 bp, Homo sapiens
tgaagcagttactttggataggagtccagctgcttccccttcaatagttttggttawtaaagtcactttctttctaccagagcttgctcttgttaattgaactctgcaaatggcgagcacctggacctgcattctgctacaataatatggaggagacttccgttagataaaaattataggagaccattgttttggactaagctcctgcacaaggccccaacggaactgattaaaaatcaaaatggagtcacgcatgttaaagtttcgtgtcaccaaacctaaactaagtttttgtctgacctttctagaaatcaggagaaggaaaaatagccaattgcccaaacaggcccgtttaaatctttaatttttctattgttctgtcttcttgtacgtggttttcaagaaaaagtaactttgaaaagtaatgaatgcactctgtacacactctgttcttggtttctgttttctgcaccgttactgtgtcttacaaggccagcctcctctgcttggctcactggaacactaattctgttttatggaacgaactattg

SEQ ID NO: 952764 - DNA, 550 bp, Homo sapiens
ttgacagaagtaggcttcagaaggtgggaaataaactcctctgagctaaatgagcatgttctaacccaatgcaaggaagctaagaacattgaaaaaaggttacaggaattgctaactagaataaccagtttagagaagaacataaatgacctgatggagctgaaaaacagcacgagaactttgcgaagcataaacaagtatcaatagccgaggcgatcaagtggaaaaaggatatcagagattgaagatcaacttaatgaaataaagtgtgaagacgaagttagagaaaaagaatgaaaaggaatgagcaaacctccaagaaacatggcactgatcctacagaaatacaaactactgtcagagaatactataaacacctctatgcaaataaactggaaaatctagaagaaatggataaattcctggacacataaaccctcccaagactaaaccaagaagaagtcgaatccctgaatagataaataacaagttctgaaattgaggyggtaattaatcacctaccaaccaaaaaaaggcccaggaccagaca

SEQ ID NO: 952765 - DNA, 550 bp, Homo sapiens
ttgacagaagtaggcttcagaaggtgggaaataaactcctctgagctaaatgagcatgttctaacccaatgcaaggaagctaagaacattgaaaaaaggttacaggaattgctaactagaataaccagtttagagaagaacataaatgacctgatggagctgaaaaacagcacgagaactttgcgaagcataaacaagtatcaatagccgaggcgatcaagtggaaaaaggatatcagagattgaagatcaacttaatgaaataaagtgtgaagacgaagttagagaaaaagaatgaaaaggaatgagcaaacctccaagaaacatggcactgatcctacagaaatacaaactactgtcagagaatactataaacacctctatgcaaataaactggaaaatctagaagaaatggataaattcctggacacataaaccctcccaagactaaaccaagaagaagtcgaatccctgaatagataaataacaagttctgaaattgaggtggtaattaatcrcctaccaaccaaaaaaaggcccaggaccagaca

SEQ ID NO: 952766 - DNA, 646 bp, Homo sapiens
cagggtggtggttattgaaaggtagggtgacacagcaatttttaaaaataagacaacaataaagtttccctcattgacrgactcttcctttcatgaaagatttctctacagcacctgacactgtttgatagcattttatccacagtagaacttcttttaaaattggagtcactcttctcaaactctgccactgttttatcaactaagttaatgtaatatcctaaatcatttgttgtcatttaaacaatgttcatagcatgttcaccaggcatagatttcatctcaacaaaccactgtctttgctcatccataaaaagcaactcctcatccattgaagttttatcatgagatagcagcaattcagtcacatcttcaggctccacttacaattttagttctcttgctatttccacctcatcttcagtgacttcctccacagaagccttgaacccctcaaggtcatccatgagggctggaatcaacttcttccaaactgctgttaatgtggatattttgaccttttttcatgaatcatgaatcttcttaatggagtctagaatagtgaatcctttccagaagggtttcaatttacttttcccagatccctcagaggaatcactacccatggcagctatatccttatgaa

SEQ ID NO: 952767 - DNA, 646 bp, Homo sapiens
cagggtggtggttattgaaaggtagggtgacacagcaatttttaaaaataagacaacaataaagtttccctcattgacagactcttcctttcatgaaagatttctctacagcacstgacactgtttgatagcattttatccacagtagaacttcttttaaaattggagtcactcttctcaaactctgccactgttttatcaactaagttaatgtaatatcctaaatcatttgttgtcatttaaacaatgttcatagcatgttcaccaggcatagatttcatctcaacaaaccactgtctttgctcatccataaaaagcaactcctcatccattgaagttttatcatgagatagcagcaattcagtcacatcttcaggctccacttacaattttagttctcttgctatttccacctcatcttcagtgacttcctccacagaagccttgaacccctcaaggtcatccatgagggctggaatcaacttcttccaaactgctgttaatgtggatattttgaccttttttcatgaatcatgaatcttcttaatggagtctagaatagtgaatcctttccagaagggtttcaatttacttttcccagatccctcagaggaatcactacccatggcagctatatccttatgaa

SEQ ID NO: 952768 - DNA, 586 bp, Homo sapiens
ggtatatgtgtaggtttgttatatcggtaaactgagtgtcatggggtttgtcatctgggtaatatgcgtagtattgataggtattttttctgatcctctccctcctgccagcctccatcctcaagtaggccccagtgtgtgttgttcccctcctagtatccatatattctcattgtctagctcccagttgtaagtgagaacatgcagtatttggttttctgttcttgtgttgcttcacttaggataatgtcctccagctccatccatgttgctgcaaaggacatgattgtgccctttttatggctgcatagtatttcatggtgtatatgtaccacattttctttatccagtttactgttgatgggcatttaggttgattccatgggagaacctgtctgtacaaaataagaaaaaattagccaggtatggtggtgtatgcatataatcccagctactcaggaggctgtgaggatcacttgagcccaggagtttgagattgtagtgagccaygatcacaccattgcattttagcctggggatggagtgagaccctgtctcaaaaaaaaaaaaattttttttttataaa

SEQ ID NO: 952769 - DNA, 427 bp, Homo sapiens
tagctgggattagaggcacgtgccactgcacccaggtaagttttgtatttttagtagagatagggtttccatgttggccaggctggtctcatactcctgacttcaggtgatccgctcgccttggtctcccaaagtgctgggattacaggtgtaagccactgtgcctggctcccacccattttcaaatcagtcaaaaggcaaagatatcttattgtttgtgcagtagaaaattaaagtatatatgctaacatggtaatagtacaaaaggaatgattaggacagggaaggaaacctgactagagattgtgaaaaagataatgaaactcaattcraggatgtaaaaatattaataaacatttttaaaaaggcagagttaaaatatattatttacatattagaactaaaggaaggtaagaaaagttgcaga

SEQ ID NO: 952770 - DNA, 578 bp, Homo sapiens
tggaaaagtgtctgttcaaatcttttgcccaytgccatgtcatcatattactgaattgtaagattctgtatacattctggaatatgtcttttatcagatatgtattttgaaaatggctttctttcaatcaatagcttgcctttcattaagtgtaatttgaaaaagagcaaaagtttttacttttagtgaagtccaaattatcagttttctttttatttaaggtttatccttttttatgcactaagaaatatttgctaccctaagatcaaaagatgttcttctgttttttccctagaactttaatagttttagcttttacatttaagtctatgacctatttttagttaacatctgagtattttgtgatataaaggacacagtttctctctctctctccgtatggatatcaattgttttagcatcatttgttgaaagaactaacttctcttcattgaattaccttgaaacatttgccaaaaatgagtttatgtacacttgtggatctatttctgatatctctatttttttcgtccacatgtttattctcatgccaatcacatactgtctcaattaccagc

SEQ ID NO: 952771 - DNA, 602 bp, Homo sapiens
ccatctaatcagctgccagtgtgcccaaaataaagcaggcaggagaagatggaagagcagacttgctgagtgtttcggccttcatctttctcccatgctggatgcttcctgccctcaaacgtcagactccaagctcttaatcttttggactcttggacttgcaccagtggtttgccaggggtcttgggctttgcgtacagaccgaagctgcactgttggcttttctacttttgagattttgggactcgaactggcttccttgctcctcagcttgcagacggcctattgtggaacttaactttgtgactgtgtgagtcaatactccttaatcaactccccgtcatatatgcatctatcctgttagttctctccctctagaggacactgactaatgcagatttcatctttaagagtgaaaaggtgtagaattaggtccacactaaagtgtgaggtctttgcctgagagcacatcaccagagaggacattaaagagaagctaggaagcctgaatcttaacayatataatgatagaaaccttatgtttctatcaagtttataaatttcaaattgtatttgcatattttctattttatctaatttta

SEQ ID NO: 952772 - DNA, 558 bp, Homo sapiens
taggagcaaaatgatcatacctttttgccatgtatcacaagggtcatggttaacacttctataacataagacagattataagagaaaaaatatttttaacagttttacctgacatggtagtctttagaaatgaagattaaaagacccaaggaaaactgtattttatgcttagttcaatgaagaatgggcatcatatagaaatataattgcacaaaaaagggtattatcttggttgggtgtgatggttcacatcagtaatcccagtgctttgggaggcccaggaggaaggactgcttgaggccaggagtttgaggacaactgggcaacataggaagaccctgtctctaccaaaaaaaaaaaaaaatggggaagaggtataatctaatggtaataaattgaggaggataactcaacaagacctatctgttcagattattcttggcttctcctgaagcattccttcctctggatataggasaggacacctgtctctggaggatcttcagaggagaagggacaaagtcagggagtgacatttctagattttacaacttagtt

SEQ ID NO: 952773 - DNA, 547 bp, Homo sapiens
agactaaccaggaagaaaagagaggactcaaataaaatcagtaagaaaaatggacacatcagaacaaataactcagaaatacaaaagataggcagagattattatgaacaaattcacactaacatactggaaaacattgaggaaatagataaatttctggacacataaatcttaccaacattgaatcaagatgaatagaaaacctgaacagaccaataatgagtaataagatttaatcagtaataaaaaaatcttccaataaagaaaagctcatgatcagatggcttcactgtcaagtactaccaaacatatacagaggaactaacatcaattctcaaactctatcaaaaaattgaagaggaggaaattcttcctaactcattctacgaggccagcattatcctgataccaaaaccagaaaagatgcaacraaaaagaaaactgtaggctagtatttctgaaaaatatagacacaaaagtcctcaataaaatactagcaaacagaacccaacagcatatcaaaaagataacataccatggtcaagtg

SEQ ID NO: 952774 - DNA, 497 bp, Homo sapiens
atcttagctattgtaaacaatgctgcaacaaacataggagtgcaggtacctcttcaatatactcatttaaatctttaattcatcttaatttttgtatatggtgaaaggtaggagtccagtttcattcttctgcatgtgactattcagctttcccaacaccatttattgaatagggagtcctttctcaattggttatttttgtggactttctggctttatttctgagttctctgttctgttcacttggtgtatatatttgtttttgtaccagtaccatgttgttttaattactgtagccttatagtgtagtttgaagtttggtagtgtgatgattccagctttgtcttttttacttagaattgctttggctatttgggctctttttttattccatacaaatttcagaatttttttttctwtttctataaaaatgacattggtagcttgataggaatagtgttgaacctgtagtttactttggaaagtatgaccatttt

SEQ ID NO: 952775 - DNA, 627 bp, Homo sapiens
tttgatttttgttttttgtagagamggggtctcagtatgttgcccagcctgatctcaaactcctggcctcaggtgatcctcccaagtcagcctccccaaagtgctgggattacaggcatgtgccaccatgctggccaatttttaaaaattttctgtagagacagggtcttgctatgttgcccaggctggtcttgaactcttgacctcaagtgatcctgcctcaggctcccaaagtgatgggattacaggcatgaactaccacacctggccttaaacttaagcaaatttttttttttttttggagacagtttcactctgtcgcccaggctggagtaaagtggcgtgatctctgctcactgcaacctccgccccccgggtttaagctattctcctgcctcagcctcccgagtagctgggatataggcgcctgccaccacgcctgactaatttttgtatttttagtagagacggggttttgccatgttggccaggctggtctcgaactcctgacctcaggcagtccgctcccccgcacccctaccttggcctcccaaagtgttaggactacaggtgtgagccaccatgcctggccaaatttaagcaaatgtttgaaaacacatacccaca

SEQ ID NO: 952776 - DNA, 643 bp, Homo sapiens
cttctcctggcctggatcaccagatcaatttttcacccagtccctgtgtttctgattgcctagtctcggcaggcctgggccttctagagctactgttttgggggcacaaagaagtttgatggttaaggamtcaggccatgggtgcagatagacccagtctcaggcctcaggtttgccatggtctgggactatgggcaaattactttatcatttagagcctcagtctcttcatctggaaaatgggatgaatgagagcccagggaacatggtgtgtggatccacatggggaaagagcttttctgtctgtgtaactgaaggactggagagtcctgcatggaggatgtgaggaggaagcccagtgggggctcagcactgagagggagatgagatgctgcttgaaattctcagggagagggcttccacctcttccctgcagatccttctctctcgcagcctaggagagcatgaattgggtcctgtgtctttctctccagattcacagctcggaggaaggtctcctatacacacaaagcctggcatgcaccttcggtgatatgtgctgctggtgggtggggccctggcacgcaatcgtccgcatcttccaccccacctacatcaagcctgtgctctttgctccaggtag

SEQ ID NO: 952777 - DNA, 602 bp, Homo sapiens
agactccttagtcagagacaaaggattttgttacttatggcacagcaaacagcctaaacattagtaagttcacttcagttrctctttccttaagtccccaaaagatgatacagtgagtgctgatgagtagtttgcatgcagtggtgctgtgtcatagatgaggaactctgagcctgggaaatttatagcaacagtaaacagtaagccagcttgctctttgtcgtacagggagtcattaactcatcccttaaggttgattgctgcaagcctaactctgaaaagtggtcctggtagggaggtcatggctttacactattggcatacccagcaggtcatgtaggggtacaagagactcatagtggactgtctttcaacactatccactccatggtcttatgtcatgttagctgctggaaatttttcttatgagtattccactccatcagtcattctgattaatttgactagagaggtagagagtaaacgcatagaatttgtcttacacaagatttaattaaggctactgtcagtagaactctaagcatgaagaggagaccaacctgcaatagcaacctcaatcatgcctcataggatcctagatt

SEQ ID NO: 952778 - DNA, 602 bp, Homo sapiens
agactccttagtcagagacaaaggattttgttacttatggcacagcaaacagcctaaacattagtaagttcacttcagttgctctttccttaagtccccaaaagatgatacagtgagtgctgatgagtagtttgcatgcagtggtgctgtgtcatagatgaggaactctgagcctgggaaatttatagcaacagtaaacagtaagccagcttgctctttgtcgtacagggagtcattaactcatcccttaaggttgattgctgcaagcctaactctgaaaagtggtcctggtagggaggtcatggctttacactattggcatacccagcaggtcatgtaggggtacaagagactcatagtggactgtctttcaacactatccactccatggtcttatgtcatgttagctgctggaaatttttcttatgagtattccactccatcagtcattctgattaatttgactagagaggtagagagtaaacgcatagaatttgtcttacacaagatttaattaaggctactgtcagtagaactctaagcatgaagaggrgaccaacctgcaatagcaacctcaatcatgcctcataggatcctagatt

SEQ ID NO: 952779 - DNA, 586 bp, Homo sapiens
gtgcctgggggtgggtctatagacggcccccttgggtgtggccatcttctatagtcaaaactgtaggggtgaaataaatcccagtctcccatagcactcccaggcttattaggaagaggaaattcccacctaataaattttggtcagactggctgctctcaaaaccctgtctcctgataagatgttatcaatgacaatggtgcccgaaacttcattagcaattttaatttcgccccagtcctgtggtcctgtgatctcgccctgcctccatttgccttgtgatattctattaccttgtgaagtacatgatctctgtgacccacacctattcatacactccctccccttttgaaaatcagtaataaaaacttgctggttttgcggcttgtggggcatcacggaacctaccgacatgtgatttctcccccggactcccagctttaaaatttctctyttttgtactctgtccctttatttctcaagccagccaaaacttagggaaaatagaaaagaacctatgtgactatcggggcaggttccccaatacggcaacaccttctctcttctggcatgtccagtcccccgg

SEQ ID NO: 952780 - DNA, 555 bp, Homo sapiens
attgcgatatctaatttctctggtgattaatgatgttgagcagattttcatataacttcagccatttgtatgtcttctctggagaaatatctactcaaatcctttgccaatgttttaatcaagttattaaaacattgatagttataggagttccctatatattttgaagattagccccttatcagacatatagtttgcaaatatttctttcactctacatgttggctttttttcctattgattattttctttgatgggcagaatcttttaaattttataaagtcctgcttatctacgtttggttttgttgccattgcctgtggtgtcacatacaagaattggctgttgcttagaccacatgtcatggagagtttcccatatatttttccaatagttttacagttttgggttttacgtttttaattaatattgagttgatttatrtgtattatgttagctagaagtccaatttcattctcttgcaagtggatattcagtttccacagcacaatttgttgaagaactactctttccccattatgtatccttgatgcc

SEQ ID NO: 952781 - DNA, 555 bp, Homo sapiens
attgcgatatctaatttctctggtgattaatgatgttgagcagattttcatataacttcagccatttgtatgtcttctctggagaaatatctactcaaatcctttgccaatgttttaatcaagttattaaaacattgatagttataggagttccctatatattttgaagattagccccttatcagacatatagtttgcaaatatttctttcactctacatgttggctttttttcctattgattattttctttgatgggcagaatcttttaaattttataaagtcctgcttatctacgtttggttttgttgccattgcctgtggtgtcacatacaagaattggctgttgcttagaccacatgtcatggagagtttcccatatatttttccaatagttttacagttttgggttttacgtttttaattaatattgagttgatttatatgtattatgttagctagaagtccaatttcattctyttgcaagtggatattcagtttccacagcacaatttgttgaagaactactctttccccattatgtatccttgatgcc

SEQ ID NO: 952782 - DNA, 694 bp, Homo sapiens
gaggccaggaattcaagactagcatggccaacatggcaaaaccctgtctcgactaaaaatgaaaaattagccaggtgtggtggcacacacctgtaatcccagctactcaggaggctgaggcacgagaatcactggaacctggggggcagaggttgcagtaagccaagattacaccactgcattccagcctgggcaacagagtgagactctgtctcaaataaataaataaataaatttcaattctggcgtgtgtgtgtgtgtgtgtgtatgaatacacttgacagaagttgtctaaggcctgtacactaaaagatataaaaaaattctgagatacatttaagatctaaataaatggaaagagttattgtgtttgcagattagaagactcattaaaattctctccaaattgacctacagattcaatgtcattcaaatcaaaatcccaacagaaattttcatagaaattgacaagtgggtctaagatttatatgaaaatgccaagggactacaacaaaaaaattctttttaaaaaacacaaattgaggaacttacactactgatatgaatacttttatagttacaataatcaagagactatgatattgatataaaratagacaagtagaacattggaacacaataaaggatccaataataggccagcatgtacatagttgattttcaacaaaaatac

SEQ ID NO: 952783 - DNA, 549 bp, Homo sapiens
cttaggcccagagcaaaacttagaaaccctactgaacttggcaacctcagttttttataatagagatcaggaagagcaggggaatgggacaaatgggataaaaaaaaaaaaaaaaggtgactgctttagtcrtggccctcaggcaaatggactttggaggctccagaaaagggaaaagctgagcaaattgaatgcctaacagggcttgcttctagtgtggtctacaaggacactttaaaaaagattgtccaagtagaaacaagctgcccccttgtccatgccccttatgtcaagggaatcactggaaggcccactgccccaggagatgaaggtcctctgagtcagaagccactaaccagataatccagcagcaggactgaggatgcccagggcaagcgccagcccatgccatcaccctcacagagccttgggtatgcttgaccattgagggccaggaggttcactgtctcttggacactggtatggccttctcagtcttactctcctgtcctggacaactgtccttcagatctgtcactatccgagggg

SEQ ID NO: 952784 - DNA, 447 bp, Homo sapiens
ttctctcataaatatttgatttyctctttctactttgaagattctatttgtcttttaacatttttgctatgatgtgtctgagtgtggatctctttgcattcattttacttagagttcactgagcttcttagatgagtagattaatgcttttttgaatctgggaattctcagccattgtttcttcaaatttttttgttccttttcttcctttcctttttctggtactctcactatgcgtatattggtgtgcttaatgatgtaccacgtttctctgagtccctgtttatttttctttattcttttttctgtctgtttttcagattgcataatctctgtagatgtatctttaagttcactgattccttgttcagggagcctgaacctactgtttgaccctccagtcaatttttttatttggttattgcactttcccaactctagaatttc

SEQ ID NO: 952785 - DNA, 559 bp, Homo sapiens
  misc_feature 472, 518, 544, 555: n = A,T,C or G
tcacagagaacctctactagggcagtatggagggggaaatgtggggttggagctcccacacagatccccgctggggcattgcctagtggagctatgagaagarggctaccgttctctagactccagaaaggtagatccatccacagattgcaccgtgcacctgaaaaagccacaggcactcaatggcagcccatgagagcagccgcaggtgctgaatcctgcaaagccacctgagtggggctgaccaagaccttggtagcccacccctcacaccagtgtaccctggatgtgggacattaggtcaaagagatttttttggagctttaaaatttaatgacttccctgctatgtttcaaacatgcatggggcctataaaccctttgtcctggccaatttctcccttttgaaatggaaatatttacctaatgtctatacccccattgtatcttggaagtaactaacttattttatnttttacaggctcataggtggaagggacttaacttgtctcagatganactttggacatttgagttaatactanaatgagttaanactt

SEQ ID NO: 952786 - DNA, 586 bp, Homo sapiens
  misc_feature 475, 521, 547, 558: n = A,T,C or G
tgctcacagagaacctctactagggcagtatggagggggaaatgtggggttggagctcccacacagatccccgctggggcattgcctagtggagctatgagaagaaggctaccrttctctagactccagaaaggtagatccatccacagattgcaccgtgcacctgaaaaagccacaggcactcaatggcagcccatgagagcagccgcaggtgctgaatcctgcaaagccacctgagtggggctgaccaagaccttggtagcccacccctcacaccagtgtaccctggatgtgggacattaggtcaaagagatttttttggagctttaaaatttaatgacttccctgctatgtttcaaacatgcatggggcctataaaccctttgtcctggccaatttctcccttttgaaatggaaatatttacctaatgtctatacccccattgtatcttggaagtaactaacttattttatnttttacaggctcataggtggaagggacttaacttgtctcagatganactttggacatttgagttaatactanaatgagttaanacttttgggcactgctgggaaggcatgg

SEQ ID NO: 952787 - DNA, 563 bp, Homo sapiens; identical to SEQ ID NO: 950508

SEQ ID NO: 952788 - DNA, 621 bp, Homo sapiens
tctccagagccttacgtgactggttccatctcctcattttggtcttgattcaaatgtcacccacttgagaggtcttccctgattccttagtccaagagttggcaaactacaatccatggggcaaactcwgcccatcacctgtttttatacagcccatgagccaaaagtggtttttacatttattattttggacttttttttagagacaaggtctcgctctgtcacccaggctggagtccagtggctccatcacggctcactgcagtctcaaactcctaggttcaagggatcctccccccctcagcctccagggtagctgggactacaggcatgtaccaggacaccggctattttttaaaaaattttttaagaaatggggtcttgctatgttgcccaggctggtcttgaacttttggcttcaagtaatcctcctgcctgggcctcccaaagtgctgggattacaagcatgagccactgcaccctgcctgctttttaccttttttaatagctgaaaggaaaatcaaaagaagaatcctatttggtgacacatgaaaattatgcaaatttcagcatccattagtaaagctttactgggacacaggcatgctcattcatctattg

SEQ ID NO: 952789 - DNA, 567 bp, Homo sapiens
aaatataaaaattagctgggcgtagtggcaggcacctgtaatctcagctcgtcaggaggctgaagccgggaatcacttgaacctgggaggcggaggttgcagtgagctgagattgcgccactgcactccagcctgggaggcagagcaagactgtctcaaaaaagaaaaaaaaaaagacaaaatgagcaaagcagcccatgtgtgatgcagtttgggaattggggggactggaggcaacgggagggccagccagttgttgccatggtttgatgcccactcaggtacccatatcgcctcctttttttaagtgatgctagaaatctgggtttttgtgggaaatcttcttactttaataatctgagttagcggttgttattttaaacagactgacccagggtctgccagttttcaacctgtttgagatgaacccttctcctaaccacgttctcctcctaggattggtcatctctgtgggtggcttctcactgctctgcatcctctgtggtttgrgcttcgtatcactcgccatgtcggggatgatgatagcatcttatgtagtggtctcca

SEQ ID NO: 952790 - DNA, 551 bp, Homo sapiens
taactcattttatgaagccagcatcatcctgataccaaaactgggaagagacacaacaaaaacagaaaacttcaggccaatattcctgatgaatattgatgyaaaaatcctcaataaaaacactggcaaactgaatccagcagcacatcaaaaaacttatccaccaagatcaagtttgcttcattcctggaatgcaaagctggttcaacatatgcaaatcaataaatgtaatccatcacataaacagaaccaaagacaaaaaccacatgattatctcaatagatgcagaaaaggcctttgataaaattcaacatcccttcatgttaaaaactctcaataaactaagtattgatggaacatatgtcaaaataataagagctatttatgacaaacccacagccaatatcatattcaatgggcaaaagctggacacattccctttgaaaaccagcacaggacaaggatgccctctcttaccactctgattcaacatagtcttggaagttgtggccagggcaatcaggcaagagaaagaaataagggtattcaaa

SEQ ID NO: 952791 - DNA, 621 bp, Homo sapiens
aaacattcagttttttgagctgggtgtggtggtacatggctgtagtcccagctacttgggaggctgagccaggagaatcacttgagcccaggagttcaaatgcagccagggcaacatagtgagaccctgtctctagaaacaaaacaaaaagttcatcttttgcaagccttcaaccactccccgctatttcctctttagattacctggcatcttacttcacagagaaaatagatgccaccaggtgggaatttcctcaatttccagcccctaagcctacaagcatgtgtacccatctccttcagtccacttataacagaagaaatttccttccttctgtctaatccaatcctgggacatattccctggatcccagtcctcaagaactcactcattgaatcatctttgcactcttgtattttctcttctttctaccagatttttccaaacagcatttaaacatgctcaagtctctcctgtcttacagaaacaaccactctccttaatttcacacacacttttagctactacccaagctctctcttcccctttcacaaacttctcaaaaaagttatatacagtcatcttctctactacctcaaytccagttcctcagtcctgtac

SEQ ID NO: 952792 - DNA, 348 bp, Homo sapiens
tgtgtgtgtgtgtggcttggggaatctgcccagtgcaggtctaggaggaggctccaggaggctggctggctggctcagagtctgtccccggctatccactagcccagagcagttctccctatagcccagtaagaaattacaccttcaccttccagactggcacccaggctctcccagaaagtgagaagggaactcacaggtgacttcaccccatggtggggagaacagcctgtgctggggccaaggcagaaggaggatgagccccgaggctcctggagagtctgagccgggtgaggaaggggaggaggtggtccctgatctcagggcrgggaggagacagtgaggagc

SEQ ID NO: 952793 - DNA, 806 bp, Homo sapiens
ttctgacatgcagtgtgaccttaggccagtcccatcttctctaaagcttcattttcccactaaccttaaagaagttcaagtcaaagagcacagcgatgagtcccacagatcatgcttgagatggtgacagtgttaaaatactgactccaaaatacagcctggcagtttatcttctcgagtttcctgtttctatgacactgtacggtgagatggccaaatgcagaccccagagccagaatgccaagctctgccaccagctcctcacacaaccctgcacaaatcactttaactctctgtgcctcagtctcctcatctgtaaaatgagggtaataggccgggtgcggtggctcacgcctgtaatcccagcacttttggaggctgtgatgggcggatcacgaggtcaagagattgagatcatcctggccaacatggtgaagtctcatctctataaaaatacaaaaattagctgggcgtggtggcatgtgcctgtagtcccagctacctgggaggctgaggcaggagaatcacttgaacctgggaggcggaggttgcagcagtgagacgaaatcgcgccactgcactccagcctggcgacagagtgagactccgtctcaaaaaaaaaaaaaaaagatggtaataactggacctagcacataaggttgttgtgaggattaaatcaggtaaatatgatgaagccatctgaaccagtgttagcacaatgtaaatattcagtaaatggtagctatgataataaamgtaatacattagttttcaataagcacattataaacagagatgtggctaag

SEQ ID NO: 952794 - DNA, 737 bp, Homo sapiens
gctgggtccaggaacacaccccaagctctggcctcgggaggagtgtgctgagcttgttgcggagcaaagacagaagcccagtgaacaaaagatggcgaggagacaccagtgcagggaggctaagggtgcmgaggccgagtggggctgtgctcaaaagagaggcggtgctggagggacagggagaggtggcctgggtgttgggaggtgggggtgaggtgggggctgagggcaggggggtcagggtgagggataggaaaggccgcaggagaggagaggatgaagagctgtgctggaggcgctgtgggcagcatcgtcctgctcttgggcactttgtgttttgtgacacatcctttctatgctgaactgagaacccagggacctcactctccccacacgtgtctgtccagctccagaggatgaagcagagaccacccaagcagtgcccaccacaacccctgagccccccaacaagcctcgcctcggggagctgaccgtgacagatgccacccctgactccctcagcctgtcctggatggtccccgagggccagtttgaccacttcctggtccagtacaggaatggggatgggcagcccaaggtggtgcgggtgccggggcacgaggacggggtcaccatctcaggcctggagccagaccacaagtacaagatgaacctgtacggcttccacggtggccagcgcgtgggccccatctctgtcattggggtgacaggtgagt

SEQ ID NO: 952795 - DNA, 715 bp, Homo sapiens
tttacttttctataatgccggagtttagaatgctgttgttctgcttgaaatgcaatgtcaggttattgttgacattgctttaaagttgaaaatgtaaaggtaaacagagaaatacactttcccttttcgtgctggaaagaacagaatgatagctgttttggggggggtgccagtttttctgcaggatggttttctccttgcgttactagggtttcagttccttcaagatgccacatgaaacctttatttgaaatgtaggcagacatgtgagagaaatgttcattttcatatatttctttttctttttaaatgaacaagtaattaccgaaaccaaacaaaggcatgactggaagtcattgcagcatttgggcaaacatcctcctgcagtctcagcttggaagcagatcagtttctgctctctgctgaggaattctttgttgctgggtgggacagatctctactcatcttccttttggaacacgatgtggcttttgtgacatacaaaacctttgcctggtctcactcccttggataccttggaggagggctgaggactatttctcctcattcattagaaattttcaaatgggttttaagatggggatggagctatgtgatttgtaagggatataaaatacatggatayttttttgaaatctccttgctcattttcttttcttttcttttttttgagatggagtctcactctgtcgcc

SEQ ID NO: 952796 - DNA, 446 bp, Homo sapiens
tttggtctcgagtaaagataaggtcttgctatgctgtccaggctgtccttgaactactggactcaggccatcctcctgcctcggmctcccaaagtgctaggattacaggcatgagccaccatgcctagccaggaaaaatttctttcttgtttcaaagaaatgccttcctcagcttccccctctgtgaaatggggattgggatacctctgtaccagggtggctgtggcagtctatttgagggccactctaacacctggcagcggggaggggatggaaagggtgtcgggaaatgctggggccactcactatccttcttctggcccccaggcctccaggcccaaggtcagcatcccactgtcagccatcattgaggtccgcaccaccatgcccctggaaatgccagagaaggataacacattcgtcctcaaggtgaggtctcaccccta

SEQ ID NO: 952797 - DNA, 465 bp, Homo sapiens
tggttgtgtgcacctgtaatcccagttacttgggaggctgaggcagaagaatcgcatgaacccaggaggaggagtttgcagtgagctgagatcgagccactgcactccagcctgggtgacagagcaagactccgtctcaaaaaaaaaaaaaaaaaaaagggtggggaaggcaaaaaaggcattcattactagagatccctgacaggttccccacacacccatgatgctgggtgggaccacatgtctccctgtcagcagaggctgggaatagtaggcaagacccctccaaaaaaagagcaaggaagccatgtttgtcatgtccagggcacttgaaagtagctagcacactgcatggtatgcagacactgcccagtcaatgccggttgttattattgctgctataattaatccaagggggagggttsctgggaggatgctgtctggggatgctggttgaatagaggg

SEQ ID NO: 952798 - DNA, 703 bp, Homo sapiens
tttgaacccaaactgtggggccctggccgaggccggtggcyaacctctctaaacaactagacggggtttctaaaggattgtccccctgtttgagggccttggcagcaactgccctgccagtacaagaagcaaataagctgactcttggtcaaaacctggacataaagtcctcccgtgctgtggtgactttaatgaatactaaaggacatcattggctaacgaatgccagactcaccaagtaccaaactgctctgcgaaaatccccgtataaccattgaagtttgcaacaccctacaccccgccaccttgctcccggtatcagagagccctgtcgaacctgattgtgtagaagtgttggactcaattgactctagcagacctgacctccgggaccaggcttgggcatcagtagactgggaactatacgtggatgggagcagcttcttcaacccccaaggagagagaggtgcagggtatgcagtgggaaccctggacactgttgttgaaaccagatcgttgccccaggccacttcagcccagaaagctgaactcattgctttcattcgggccttagaactcagtgagggtgagactgtcaacatttacactgattctcggtatgtctttttaacccttcaagtgcatggagcatgatagaaagaaaaggtcctattgaactctgggggaaaggacagaaaatatc

SEQ ID NO: 952799 - DNA, 703 bp, Homo sapiens
tttgaacccaaactgtggggccctggccgaggccggtggctwacctctctaaacaactagacggggtttctaaaggattgtccccctgtttgagggccttggcagcaactgccctgccagtacaagaagcaaataagctgactcttggtcaaaacctggacataaagtcctcccgtgctgtggtgactttaatgaatactaaaggacatcattggctaacgaatgccagactcaccaagtaccaaactgctctgcgaaaatccccgtataaccattgaagtttgcaacaccctacaccccgccaccttgctcccggtatcagagagccctgtcgaacctgattgtgtagaagtgttggactcaattgactctagcagacctgacctccgggaccaggcttgggcatcagtagactgggaactatacgtggatgggagcagcttcttcaacccccaaggagagagaggtgcagggtatgcagtgggaaccctggacactgttgttgaaaccagatcgttgccccaggccacttcagcccagaaagctgaactcattgctttcattcgggccttagaactcagtgagggtgagactgtcaacatttacactgattctcggtatgtctttttaacccttcaagtgcatggagcatgatagaaagaaaaggtcctattgaactctgggggaaaggacagaaaatatc

SEQ ID NO: 952800 - DNA, 555 bp, Homo sapiens
tttttacctgctgggatggctagttttctgtgtcaacttgactgggccatgggatgtccagatatgtaattaaacagtatttctgggtgtttctgtgagggtgtcttcagaagagatttgcatttgaattggtgaactaagtaaagcagagggccctgtctagtaggggtaggcatcatccagtctgttgaggacttgaatagaacaaaaggcaggggaaggttggaattgccccctctctgcttgagctgagacatctatcctgcccttggcactcctggttctcaggggttcagacctggattcctggtctccaccttgcccatggcagactgtgggacttctcagcctcctatctaattaataaatttttttttacacacacacacacacacacacacacacacacacacacacacacacaccctatgtatccttctgtttytctgcagaaccatatttaatacacctgcttttatgacgattacctatcgattctgtattctgccaaaactgaaaacagttcatttttccatctcttctcagagaggcttg

SEQ ID NO: 952801 - DNA, 628 bp, Homo sapiens
aattgatcttgtatcctgcaatcttgctcaaattgttagttttaatagtttttagtggattcctcagtgttttctatatacaagatcatttcatttgycaataaatagttttacttcttccttttcaatctgaatgtcttttatttcttttcttgcccaattacctggataattttttttcttttttacaattttgactagaagtggtaagagcagacatccttactgtgttcttgatcttgaggggaaaatattcagtctttcactattaaatattatgttagctgtggggttttgtagatttcctttatcagattgagaaagttcctttctattcctcacttgctgagtagtcttatcataaaagggcattggcttttgtcaaatgttttgtccacatctattgaaaagatctcaaaaatcgtattctttattgtattaatacgtgttgtaagcattgatttttcagatgctaaacaaccttgcattcctaggataagtgctatttggtcatgatgtacaattcttttgtgtattgctgaattgggtttctagtattttaaatctacttttataaggcatattatgaaattcatccactacagattctgtctgtaattttcttgtg

SEQ ID NO: 952802 - DNA, 565 bp, Homo sapiens
ggtagcgctttattctctcacagttctggaaggtagaagtcagaagtcaaggtatcagttagagacatgcttcatattcacttacccacaaactagtggatgacacattttggccatttggaagatctttattataggagtatgtagattttccatagagtgctgttgtgtgacttgaattttagttgtggccctgcctctgactttgtcagtgatttatcctggttccaggaaataagaatagcctttttctcatgatagtctttggtagtttttaaaacatttgtttaactcaacagatgcaccatgtgcctgactctgctctataccagtgaagaatttacactgtaatggggggaggtaactataaagatgataaacataacatcttaattggagtgagtatgaagatggttgttatcttttcctaaaagaaacaacaacaacaaaacaaaaaaggaagtcaaggtatcaagagggagatgctacctctgaracactggagagaatccttcattgcctcctcctcgcttctggtggtggccgtcaattcgtggtgtttcct

SEQ ID NO: 952803 - DNA, 475 bp, Homo sapiens
ttgttgttttgtttatcaagctgttgattctctttgaggctgaggaggttcccatgagtttgtaacttgacctgaccccagygtgttaattcctgcaatccagaccctgggaaatgctccctcattaaacaagaccctgctaactcctaagggccctacacagcagcacagcgtattttagataagttaacccttgctttgccatggatccgagagcacagcttctcatctgccgaaggtgcaggctgggtgctcaaagccttgcctggtcagccctgggaaacgcgtggtgatggaatccaagccatggagccccacgcctggctcagccacccatgagtagcatgggggaagttattacagctctccggctctgtgccactgtttcagcatctgtaaaatgaagattgctgtttcataaggatattgggaagatcacatgagataatgcctgggaagggctttctaggttcct

SEQ ID NO: 952804 - DNA, 465 bp, Homo sapiens
tgagaatgtaaaatctttcattggaaataaatctagttctttctataatacttagccctttttgaatggacaaattaataattataatacttttacgagtaacaacaagaacaacwacaaaaagattaattgatcttattgtctcattactgtggtgactgatctttacagatggcctctcaatgaaccaggcctcttgatgttcacacctctttccttatagtatatattatatactatatactataatatatagtatatattgtgtgctatatactataatatatagtatatattgtgtgctatatactataatatatagtatatattgtgtgctatatactataatatatagtatatattgtatgctataaactataatatatagtatatattgtatgctataaactataatatatagtatatattgtatgctataaactataatatatagtatatattgta

SEQ ID NO: 952805 - DNA, 465 bp, Homo sapiens
tgagaatgtaaaatctttcattggaaataaatctagttctttctataatacttagccctttttgaatggacaaattaataattataatacttttacgagtaacaacaagaacaacaacaaaaagattaattgatcttattgtctcattactgtggtgactgatctttacagatggcctctcaatgaaccaggcctcttgatgttcacacctctttccttatagtatatattatatactatatactataatatatagtatatattgtgtgctatatactataatatatagtatatattgtgtgctatatactataatatatagtatatattgtgtgctatatactataatatatagtatatattgtatgctataaactataatatatagtatatattgtatgctatawactataatatatagtatatattgtatgctataaactataatatatagtatatattgta

SEQ ID NO: 952806 - DNA, 706 bp, Homo sapiens
ggctgaaaattccaaaaaccacaatgcctcttctcctccaaagggtcacaagggatcaaaactggatagagaatgagtttgacaaattgacagaagtaggcttcagaaggtgggtaataacaaattcctctgagctaaaggagcatgttctaacccaatgcaaggaagttaagaacattgataaaaagttacaggaactgctgactagaataaccagtttagagaagaacatatgtgacctggtggagctgaaaaaacacagcacaagaacttcatgaagcatacacaagtatcaatagccaaagtgatcaagtagaagaaaggatatcagagattgaagatcaacttaatgaaatgaagcatggagacaagattagagaaagaagaatgaaaaggaatgaacaaagcctccaaaaaaatgggactatgtgaaaagatcaaacctacgtttgattggtgtacctgaaaatgagagggagaatgagaccaagttggaaaacactcttcaggatattatccaggagaacttccacagcctagcaagacaggccaacattcaaactcaggaaatacagttaatgccacaaagatactcctggaggagagcaaccccaagacacataatcatcagattyaccaaggttgaaatgaaggaaaaaatgttaagggcagccagagggaaaggttgggttacccacaaagggaa

SEQ ID NO: 952807 - DNA, 622 bp, Homo sapiens
tcccaagacatagcatcatttcctctactccctcttttcacatgtttactttatcttatgtaaaatgtagatttactgaggctaatcagagcctcaaaagaatggaaccatctgcctcastgtctaccctctcttcctttttttttttttctctcctgcttgctctttcttttttaaataaagaatttcccaaaaccccctttggaaaaagcataggttacagatgctcttgtgagttgcatttttttcccagacatgttctcaaccttggctaaatgatcgctaacccacagagatctgcctcagtcactttttggtttgcagtcccaagtcagttgattttagttaatcaaaaaggggttaagactattttcagtgggcctcacttaatctggtgattgtccttaaaagatgggctggggcctccctgaggtacagaattgtccttgctggcttgatgtagtaagcagtctgctgaggaagcccacatgggaagggatggaggtgacttctagaagctgaaggcaactccagccaacatccagcaaaaatgtggggctgtcagttatatggttatgaggaaaataattctgcaaacaatctggatgagcttgggatcaga

SEQ ID NO: 952808 - DNA, 702 bp, Homo sapiens
agttgtcccttgtcccctgtggatctggcagcatgaggatgctctctttctttctagtgttgccaaagccagattcatgaataaagctcttacgaatatttggtggccacataggcaagtctactggggagatgggaaagaaagggaggagtgtatggcaccctaagaaatttggagatgacctgggccctgacagcttcagaagcctccttattccctaacccttaggggtcttcaaaagtggtgagccccccgcccagtccaaccatatctcaccaaattaaatatcaaaccaagttctttttttttttttttttttttttgagacagagtcttgctctgtcacccaggctgcagtaccgtggcacgatctcggctcactgcaagctccgcctcccgggttcacgccattctcctgccttagcctcctgagtagctgggactacaggcacccaccaccacgcctggctaattttttgtatttttagtagagatggggtttcactgtgttagccaggatggtctctatctcctgacctcgtgatctgcctgcctcggcctcccaaagtgctgggattacaggcgtgagccamcgtgcccagcctcaaaccaagttcttagagtgaatacagatttacccacttaaatgctagaggcatacattcagaaaaaaatattattagactgcagtttggaccccaa

SEQ ID NO: 952809 - DNA, 567 bp, Homo sapiens
gccatggtgagcctctgtggcttctgagaagtcacccagatgactcaaagttaaatcacctgctttgcagcagagccagggggcggtgggggcatcactctttgacaacaggaagggctgttaaacaaaggctggtggccaggagttcccctacttcccaagagttcgaggaaataacttccttgcagtgtcagggattcagggagaggaaacagactcccttctagcgtgtgatgtcaacacaggagtgacaatgggcttcccacctccaatgtccctaaagcgggtgctcatccactgcgaccctgtctcagggtggggaaatggacaggtggcttcgtgcagccctgcacccttccaagcatcttgtcagctccattcctgtctggaatattccaagaggaccttataagattgagaatgagggtctccttataaatgtaaacctcactcaggctgcagcagaaacctacggggaggccaaataaactggggrctctgtggattgtatgtccccccggcttgtcgaggtgaggaacagtttcactcctgggctgtgccacccgg

SEQ ID NO: 952810 - DNA, 567 bp, Homo sapiens
gccatggtgagcctctgtggcttctgagaagtcacccagatgactcaaagttaaatcacctgctttgcagcagagccagggggcggtgggggcatcactctttgacaacaggaagggctgttaaacaaaggctggtggccaggagttcccctacttcccaagagttcgaggaaataacttccttgcagtgtcagggattcagggagaggaaacagactcccttctagcgtgtgatgtcaacacaggagtgacaatgggcttcccacctccaatgtccctaaagcgggtgctcatccactgcgaccctgtctcagggtggggaaatggacaggtggcttcgtgcagccctgcacccttccaagcatcttgtcagctccattcctgtctggaatattccaagaggaccttataagattgagaatgagggtctccttataaatgtaaacctcactcaggctgcagcagaaacctacggggaggccaaataaactgggggctctgtggattgtatgtcccccyggcttgtcgaggtgaggaacagtttcactcctgggctgtgccacccgg

SEQ ID NO: 952811 - DNA, 774 bp, Homo sapiens
aatttctcaaaatgttaaacatagagtttccatgtgacccggaaattgtattcctatatatatatatgcaagakaaatgaaaacatatgtttacaaaaaacttaaacacaagtgtttacagcagttttattataatagccaaaaaagtggaggcaacccaaatgtgcatcaactgatgattggataaataaaatctgttgtatccatacagtggaatattatttagcaataaaaaggaatgaagtactgatacatattacaacatggatgaaccttgaaaaaacatgctaaatcaaagaagccactcctgaagaccacatgttgtgtgctttcatttatacaaaatgtccagaataggccgatctctagagacagaaagtagattagtggatgtcagggcctggggctggggctggcatagggagtgggtgtgactaatggatgtggattcctttggggctgatgaaaatgttctaaaattgattgtggcgatggttgcacaacctcgtgaatatattaaaaagcattgaattgtacgctttaaatggtagggttgaatagtatgtaaattataactcagtaaaactgtaaaaatataggatgacttgttaaattaaatttcagataaccagtgctaattttttattttttgcaatatatttcagatacatttcttgcaatatttgggatgtacttatactaaaaaattagtcattgtttatctgtaattcagctttaactgggtgtcctgtattttatcaggcaacctcatgc

SEQ ID NO: 952812 - DNA, 611 bp, Homo sapiens
ggcgcctgtagtcccaactacttgggaggctgaggcaggagaatcgcttgaacctgggaggcggagcttgcagtgagccgagatcgygccattgcactccagcctgggtgacagagcgagactctgtctcaaaaaaaaaaaaaagaatctgacaggagggcggtcaggatgccaaggattgggtacccaatttcacaccacttctgaatggcaagttttaatgtagacacactgcaataaattcagtttgacaaaccactgtagattatctaccaggtgcaagatggaacctttttttaaactagtggtaacatttgctggttgaccatttctatttgatcacaagagtttagccaggtcctagagagagaagagatttctaagactcagaactataaaggtgacattgtagtggcagtgggtcaaggcttgcaaggggcagactcatctccgtaactgtgcaaagcactgccataaaaggacagcgccagaggtgagggtggtaaaggggaatcgatgaaaggtcaggcattgccccagaaagacgtttgtttcttagccctgcagggccctgaaatgttcattaatgatacaaagtattttcaactcac

SEQ ID NO: 952813 - DNA, 784 bp, Homo sapiens
atgtgctctgcccacctcactgacatgccattttccgtctttctccctctcctgaagcatccctttttttgagacacaacaatactgaaattaaatcaataaataaccctacagtggtctttaagtattcatgtgaaagaaatggtctcatatctcttactttaaatcaaaatctagaaatgattaaacttagtgatgaaggcatatcaaaagctaagacaggctgaaagctaggccttttgtgcatttagccgagttgtaaatgcataggaaaagttcttgaaggaaatgaaaagtgctacttcagcgaacaaatgataagaaagtgaaactaccttactggtggtgtggagaaaatttgagtagatagaagatctggagagatgattaaactagccacaacattgccttaagcgaaagcctaaatcaaactaagtccttagctctcttcaattccagggaggcttagaggggtgggaaagctgcagaagaaacactggaagctagcagaggttggctactgagatttaaagaaagaagcaatctttataacatacaaatgcatggtgaagcagcaagtgttgatggagaaactgcagcaggttatctagaagctccagctaatgtcaatgatgaaggtggctgccctaaacaatatattttcaawgtacagaagatatccttctattaaaagaaaatgccatccaggattttcatagctagagaggagaagtcaatgcctagcctcaatgcttcaaaaaacaagctgattcttgttaagggt

SEQ ID NO: 952814 - DNA, 611 bp, Homo sapiens
agtgagttgaaaatactttgtatcattaatgaacatttcagggccctgcagggctaagaaacaaacgtctttctggggcaatgcctgacctttcatcgattcccctttaccaccctcacctctggcgctgtccttttatggcagtgctttgcacagttacggagatgagtctgccccttgcaagccttgacccactgccactacaatgtcacctttatagttctgagtcttagaaatctcttctctctctaggacctggctaaactcttgtgatcaaatagaaatggtcaaccagcaaatgttaccactagtttaaaaaaaggttccatcttgcacctggtagataatctacagtggtttgtcaaactgaatttattgcagtgtgtctacattaaaacttgccattcagaagtggtgtgaaattgggtacccaatccttggcatcctgaccgccctcctgtcagattcttttttttttttttgagacagagtctcgctctgtcacccaggctggagtgcartggcgggatctcggctcactgcaagctccgcctcccaggttcaagcgattctcctgcctcagcctcccaagtagttgggactacaggcgc

SEQ ID NO: 952815 - DNA, 634 bp, Homo sapiens
tttttggaagaaaaaaggattccatatcccattttatgactaatctattgcgtacagagaaggaaggagctggattgatggctccactacagatgtgagatctatttctggcacagtagctaattagctgtggtccccagcaaccccgagccatttctggacttcagtaccctcatcactaaaacaaggacttgaaatagaagccagtgtttcttgaatatattgggttcaaaacgccttctgttggaagcactgcattttcaccattaaataatgaatctacacacactatatttcatctaatttccaggatttgatgaattccctagatcacgggcatggacggaccctcatccgtggattttaggccaacagcctgtagtctagatcagccttaaagtcagagtcagttctaaaagttctaccaagttatagaaaatactatcataactttttttaaaaaattcatccttttaggttcatttaaaaatttaatatttaatataaaatgcactattctactttatatgcaaggaatctaatttttcttatgcctgtgtwtgccctttagcttatcttatgtttagatttttgaaataatatttcaaattaaaaccactcgatttatacgcac

SEQ ID NO: 952816 - DNA, 615 bp, Homo sapiens
acatagcatcatttcctctactccctcttttcacatgtttactttatcttatgtaaaatgtagatttactgaggctaatcagagcctcaaaagaatggaaccatctgcctcastgtctaccctctcttcctttttttttttttctctcctgcttgctctttcttttttaaataaagaatttcccaaaaccccctttggaaaaagcataggttacagatgctcttgtgagttgcatttttttcccagacatgttctcaaccttggctaaatgatcgctaacccacagagatctgcctcagtcactttttggtttgcagtcccaagtcagttgattttagttaatcaaaaaggggttaagactattttcagtgggcctcacttaatctggtgattgtccttaaaagatgggctggggcctccctgaggtacagaattgtccttgctggcttgatgtagtaagcagtctgctgaggaagcccacatgggaagggatggaggtgacttctagaagctgaaggcaactccagccaacatccagcaaaaatgtggggctgtcagttatatggttatgaggaaaataattctgcaaacaatctggatgagcttgggatcaga

SEQ ID NO: 952817 - DNA, 543 bp, Homo sapiens
tatattaaaaataactctttttcctttttttaaaactacatgttagagttgtgagaaaaaaattacttaataataagtcatcatgtgggttttcttttagatgcataacctggaaagacttcaaaatgacatggctacagcaaaactttttacacttgtatctacttatttatgtaagcacagtttctcaggatgtaaaatatgcatattaaaaagaaagaatggaatttatgctgaaccttgtctcattctagcagctagtaatattcatcaaggtaaaattatcctaatttgaaattaaaaaaaatagatccacccatctccttaagggtgcaattccaataaaaatttagcttttgtttctaataactgcatacattttatgtactatacttcttttatgtaccatactycttttatgtaccaatgtattgtttcattgaaaactggagaaagaaactttaacactcagagctttaggatcacaaaatgtcgttttataattcaattaatatggatattattgttacagaaaagtatgat

SEQ ID NO: 952818 - DNA, 464 bp, Homo sapiens
tgagaatgtaaaatctttcattggaaataaatctagttctttctataatacttagccctttttgaatggacaaattaataattataatacttttacgagtaacaacaagaacaacwacaaaaagattaattgatcttattgtctcattactgtggtgactgatctttacagatggcctctcaatgaaccaggcctcttgatgttcacacctctttccttatagtatatattatatactatatactataatatatagtatatattgtgtgctatatactataatatatagtatatattgtgtgctatatactataatatatagtatatattgtatgctatatactataatatatagtatatattgtatgctataaactataatatatagtatatattgtatgctataaactataatatatagtatatattgtatgctataaactataatatatagtatatattgt

SEQ ID NO: 952819 - DNA, 464 bp, Homo sapiens
tgagaatgtaaaatctttcattggaaataaatctagttctttctataatacttagccctttttgaatggacaaattaataattataatacttttacgagtaacaacaagaacaacaacaaaaagattaattgatcttattgtctcattactgtggtgactgatctttacagatggcctctcaatgaaccaggcctcttgatgttcacacctctttccttatagtatatattatatactatatactataatatatagtatatattgtgtgctatatactataatatatagtatatattgtgtgctatatactataatatatagtatatattgtrtgctatatactataatatatagtatatattgtatgctataaactataatatatagtatatattgtatgctataaactataatatatagtatatattgtatgctataaactataatatatagtatatattgt

SEQ ID NO: 952820 - DNA, 464 bp, Homo sapiens
tgagaatgtaaaatctttcattggaaataaatctagttctttctataatacttagccctttttgaatggacaaattaataattataatacttttacgagtaacaacaagaacaacaacaaaaagattaattgatcttattgtctcattactgtggtgactgatctttacagatggcctctcaatgaaccaggcctcttgatgttcacacctctttccttatagtatatattatatactatatactataatatatagtatatattgtgtgctatatactataatatatagtatatattgtgtgctatatactataatatatagtatatattgtatgctatatactataatatatagtatatattgtatgctataaactataatatatagtatatattgtatgctatawactataatatatagtatatattgtatgctataaactataatatatagtatatattgt

SEQ ID NO: 952821 - DNA, 578 bp, Homo sapiens
tccagattgagggtgggtctgcctctcccagttcactgacttaaatgttaatctcctttggcaacaccctcacagacacacccagaaataatactttgcatccttcaatccaatcaagttgacactcaatatcaaccatcgtaagtccaacccttgtcaacttgaacccatacagatctcctgaaatcatacaaaatcttcaaataaagacaataataggtcataattatgcctaatataatacaactatccttcatacaactggaagcacaccaatccctaacccaaatgctattacataaggttaacatgttttcaacaaaaggaggaaatactcatgacaattacacttctcatttcctgcaacttgtcacatggttgtagctgatattgatgattacattcttctaatacctatcctgtattccctttgccttcagcaagcacctcagcaggttgtggttttttacctggtggagtgacccaaacattcattcctgaagggtctgggmcatttgcagtcctgtctggtttgggctgtcgtagtttcccattgatcttaatcacagggcatggta

SEQ ID NO: 952822 - DNA, 452 bp, Homo sapiens
aactggcagtcttttggatcacttgataaatgcgctggagtaacataaccaaatgaggaatgtgttgcttcaaaaatccaaataggcccgctaggtgtcgtgcctctttcttgcttttaggaggaaccaaatgcagcaacttatccttcaacttagaaggaatatcttgagagaacccacaccacaatacccctagaagttttactgaggtagaaggtccctgaattttagttggatttatttcccatcctctggtaagcaaatgtctcagcaataagtccagtgtgtttgctacttctcactcactggatccagtcagcataatgtcatccatgtaatggaccaatgtgatattttayggaaggaaaaagtgctcaagatctctctgaacaagattatgacacaaagccagagtgttgatatacccctgaggtaggacagtaaaagtatat

SEQ ID NO: 952823 - DNA, 619 bp, Homo sapiens
ctaagttgaaaccagtgctcctttaccattccaaaaatcctaggtccgttaagaattatgccaaatctactctyccttgtgcacaaatggatgacagcacatctgtttagagcatcgttgggtgaatattttaagcccactattgatatccactactcagaagaacagattcctttaaaaatattaatgctcattgacattgcacctggtcactcaagagccctgatggagacgtacaaggagattaacaatgttttcatgcctgctaacacaacacctattctgcagcccatggattaaggagtaatcttgacattcaagtattgttatttaagaaatacattttgtaaggctatagctgctacataccatggttcctctgatggacctgaacaaagtaaattgaaatgaccttctggaaaggatttaccattctagatgctattaaaaacattcatggttcatggtaaaaggtcaaaatatccacattaattgaagtttagaagaagctgactctaaccctcatggattactttgaaagattcaagacttcagcagaggaagtaactgcagagacgtctggtgaacaacaaaagaactagaattaaaagtggaactt

SEQ ID NO: 952824 - DNA, 619 bp, Homo sapiens
ctaagttgaaaccagtgctcctttaccattccaaaaatcctaggtccgttaagaattatgccaaatctactctcccttgtgcacaaatggatgacagcacatctgtttagagcatcgttgrgtgaatattttaagcccactattgatatccactactcagaagaacagattcctttaaaaatattaatgctcattgacattgcacctggtcactcaagagccctgatggagacgtacaaggagattaacaatgttttcatgcctgctaacacaacacctattctgcagcccatggattaaggagtaatcttgacattcaagtattgttatttaagaaatacattttgtaaggctatagctgctacataccatggttcctctgatggacctgaacaaagtaaattgaaatgaccttctggaaaggatttaccattctagatgctattaaaaacattcatggttcatggtaaaaggtcaaaatatccacattaattgaagtttagaagaagctgactctaaccctcatggattactttgaaagattcaagacttcagcagaggaagtaactgcagagacgtctggtgaacaacaaaagaactagaattaaaagtggaactt

SEQ ID NO: 952825 - DNA, 633 bp, Homo sapiens
tgtggaggtgaatgtcaacgcaaagaggtcaatgacattgaaaaaagaatgtattatttacatttcccaagagaaggaggtacaccgtgacacacggggccccaagggaagcatccagggcaggagtcacgggcaggagtcacgggcaggagtcacaaacaggagggaagggacaacctatgccagaacctttattggggtttctcgggggaaagcaaggcagcacagagcatacactttagggctgggtagtctgaataagcctttcaggctttggggtatagggatagtctctagctgtctagtactcatccttaggatgatttagagcagtggaaatactggcttggtgtgtgtgagttagcaaaggaggtggatgggcatatgggctcaggattttttgatttgtatatgaaaggtctaaacccttagctatctctatgaattggttagccctgcaatgggcagtctctcccgagctgtcaagatttttttttttttttttttttttgagatggagtttcactctgtctcccaggctggagtgcagtggtgcgatctcggatcactgaaagctctgcctmccaggttcaatgaattatccttcctcagcctccagagtagttgggatta

SEQ ID NO: 952826 - DNA, 533 bp, Homo sapiens
ctcttttttctctaaacttctcttcttgctttatttcattaatttgatcttcaatcactaatactctttcttccacttgatcaaatcggctactgaagcttgtgcatgcrtcacgtagttcttgtgtcacggttttcagctccatcaggtcatttaaagtcttctctacactgtttattctagttagccatttgtctaatcttttttcaaggtttttagcttccttgcaatgggttcaaacaccctcctttagctcagagaagtttgttattaccgactttctgaagcctacttctgtcaactcgtcaaagtcattctctgtccagctttgttctgttgctggcgaggagctgcaatcctttggaggagaagaggagctctggtttttagaattttcagcttttctcctctggtttctccccatctttgtggttttatctacctctggtctttgatgatggtgacctacagatggggttttggtgtggatgtcctttttgttgatgttgatgctattcctttctgttgttagt

SEQ ID NO: 952827 - DNA, 595 bp, Homo sapiens
attcctctcatttctcagtcattagcccctcactcgctctccgggaggataacggggtgtgtgcagctcctccccttctttcctgaggaaacctcagtggcttccgtgcccttgccagggtgagtgttctcctgagtccttcctctgctcctacagaatagagaaggggcttctgttgccatcagcttagtaagcctggtgcgatggatgcccctgacagggaaagccatttaggggaagacctgggactacagcccggaggtcctgggttcttttgtggttttccccgtgctcgcctctctcagatgaagcctgctgcctgttagcgtgagtgtgaggagactcgctcagaccagttcactgcccgcacccactgcatcaggcagcggggaaccctcgctccagcgaagtccttgagcctcgtcatgttgggcgcgtgagggatgggctggagttccagagcagggagctgtcacagctcgtaaggggagcctcgagagtggtcgtgcaggagggctccccagtgggcctcgtggggaccctgtcagaccctctggrtgtctcggtgacctgaggtcatcccagaatccccctg

SEQ ID NO: 952828 - DNA, 670 bp, Homo sapiens
tagcaaaaatcttgaatacaatacactttattaactatartcctcatgttataaattagatcttttatcttagcttattttcccaagtattctgaccttttcagctagcagaggatgagagggacaaggtggtggtggcattcggcatctcaaccaagagcaaggtaaaggcattgaggtgttggaggagtgagggatggcctggggactcgccacggggctttgaacataaatggtttaaaatgttaatgtgaactgagtgaactgatacctcccctgctgggacatgtccttacagaaactcatggagccagaagctgggaccaataggaccgctgttgctgagttcattctactgggcctagtgcaaacagaagagatgcagccagttgtctttgtgctcctcctctttgcctatctggtcacaattgggggcaacctcagcatcctggcagccgtcttggtggagcccaaactccacgcccccatgtacttcttcctggggaacctatcagtgctggatgtcggatgtatcactgtcactgttcctgcaatgttgggtcgtctcttgtcccacaagtccacaatttcctatgacgcctgcctctcccagctcttcttcttccaccttctggctgggatggactgcttcctgctgaccgccatggcc

SEQ ID NO: 952829 - DNA, 670 bp, Homo sapiens
tagcaaaaatcttgaatacaatacactttattaactataatyctcatgttataaattagatcttttatcttagcttattttcccaagtattctgaccttttcagctagcagaggatgagagggacaaggtggtggtggcattcggcatctcaaccaagagcaaggtaaaggcattgaggtgttggaggagtgagggatggcctggggactcgccacggggctttgaacataaatggtttaaaatgttaatgtgaactgagtgaactgatacctcccctgctgggacatgtccttacagaaactcatggagccagaagctgggaccaataggaccgctgttgctgagttcattctactgggcctagtgcaaacagaagagatgcagccagttgtctttgtgctcctcctctttgcctatctggtcacaattgggggcaacctcagcatcctggcagccgtcttggtggagcccaaactccacgcccccatgtacttcttcctggggaacctatcagtgctggatgtcggatgtatcactgtcactgttcctgcaatgttgggtcgtctcttgtcccacaagtccacaatttcctatgacgcctgcctctcccagctcttcttcttccaccttctggctgggatggactgcttcctgctgaccgccatggcc

SEQ ID NO: 952830 - DNA, 602 bp, Homo sapiens
gcagatacatgttgctgctccccatgaaactggttatgtgttatrggtgaataactactagaagaaaaacttatttgttagggcattgtctacttaagaatctgagaaatggaaaaatagagacatgaaatagctcatgcgccaatcagaattttaatttattttattttgtaaagaagataccacaaaatagtgttatatatccaggcacagattagtgaaacctagactgtaacctagggtaactcattgttgagtttaaaattcctgccatctatatagcaatgagttttaaagtaacacttccccagatcagttaattttgacataaatgaaaaactggagaatggggactacttgagactggctcggctcaacaggtagaaggttcattccaagggtgaacaagtgtagttacatatgtttgctgttttgtctattaaagtataaagtagaaaagtcatgggtttgatataaaaaaagcctgggtttattatgcccaaacttctgcaaaaaaatggtgttaaaaataatacctgcatgtatgtttgttatgagaaatcatggattaattacaggtgatgtgcttagaagagtacctg

SEQ ID NO: 952831 - DNA, 554 bp, Homo sapiens
catccttattcaaatacacatgtcaagatttcatatatatttgagtaacagtatggcataaaattgtgaacttgaccttgtttaatcgacctcctactctcttctcaacactttattttactggctcttcttcwttctgcctttttgatactttatcttctccatttctctgtcctttaatgaaccattttcctcttctttataattttaaggcttgctagaggtataattcttagctctccgctcttttcttcactctcattgtccttttccttcttcttcccatcatttttctattttgccttcctgcctctctcctgccatcttctatttcttttataagttacttctcagcagtttcactgtttctatactttaactattgtggccaggagcagtggctcatgcctgcaatcccagcactttgggaggcccaggcgggtggatcactaagtcaggagttcgagaccatcctggccaacatggtgaaacttccgtctctactaaaaatacaaaaattagctgggcgtggtagtgcgaacctgtcagccaag

SEQ ID NO: 952832 - DNA, 561 bp, Homo sapiens
tgttggataggaatggtgagagagggcatccttgtcttgtgccagttttcaaagggaatacttccagcttttgcccattcagtatgatattggctgtgggtttgtcataaatagctcttattattttgagataggttccatcaatacctagtttattgagagtttttagcatgaagagatgttgaattgtatcaaaggccttttctgcatctgttgagataatcatgtggtttttgtcattggttctgtttatatgatggattatgtttattgatttgtgtatgttgaaccatccttgcatgccagggatgaaaccgatttgatagtggtgggtaagctttttgatgtgctgccggattcactttgccagtattttattgaggatttttgcattgatgttcatcagggatattggcccaaaattttctttttttgttgtatctctgacaggttttggtatcaggatgatgttggcctcataaaatgcrttaggaaggaggccctctttttctattttttggaatagtttcagaaggaatggtactagctcctctttctacc

SEQ ID NO: 952833 - DNA, 910 bp, Homo sapiens
cagtttgacatggtctagctcttactatttgtcaagctcccattatgtatgaggcacaaagctaggtactgggggtggggcagggagcaaaaccagcctaggctcctgctctcaaggagctcatggtttgccrtgaaagatagtcaataatttaaaaaaaaaatctagccgggcgcggtggctcatgcctgtaatcccagcactttgggaggccaaggctggcagatcacgaggtcaggagatcgaaaacatcctggctaacacggtgaaaccccgtctctactaaaaatacaaaaaattagccaggcgtggtggcgggtgcctgtagtcccagctacttgagaggctgaggcaggagaatggcgtgaacccgggaggtggagcttgcagtgagccaagatcacgccactgcactccagcctgggtgacagagtgagactccgtctcaaaaaaaaaaaaatctacacaaagaattccaactgtggcaacagccacagagtggagatccccggtgtacagagtgtccatgaattgacgaatgtcacggtgggtggtggtcagaaaaggtctctctgaggaagtgcctccagaactgaaatctgaagggtgaggagttagccagactaaagggggtagaggtgaagagtgaggactcagaggaagagaaatctaggcagagggtgcaaaggcctcccacaaacaattatggaaggcagggaccctgtctggctgcagggcctggcctgtggggcctggggtctctcctctccctgctgggaggtagctgattttgcccatgacagcaaccccatagtgctctaggcctttctgcttctcctgaaacctttgtgttaaagaggctgctgtgccttgactcctccctgggaagggattagcagaccatgattta

SEQ ID NO: 952834 - DNA, 378 bp, Homo sapiens
ggaagaaggagagagttagtattgtggccttcccactacttacccttagttctagaggtggcaatgtctgcctgccttcaggcaacagcacttatccctttgagatgaaacagaggcccagcaatctgaaggttgggaagctgcttagaaattagtgcacaaatggtggatctaccaaaggcgctcccgaggtcaggccccctcctttgatgtagcttaagtaaaaccctccttgtaccctccttccattttgtaccatgagttatccagaagtccaagttccaaatcagatcctaatcaagggtaayggttcccttatctccactgggaaaatgctttcaaaatacaaatttctaggccctactcccagagttctga

SEQ ID NO: 952835 - DNA, 590 bp, Homo sapiens
tgttagggactacaggtcccgctactctgccatggcttggcaagtgagggatgctgtatcttagactgaactccttgaagagagaggwccggtccatgatgacggtgatgccagtaagcaacccataataagtccccgccacatgcctgtcctctccacttgcccaataggcacgctctgcagcctcacggtgccccatggcaatgctgccatcaccccacttagcaagtgatgaaacagagctctagagaagtgcagcaaagaagccaagttcaccgggtgcagtagcccatgcctataatcccagcactttgggaggctgaaacaggaggatcacttgagcccaggaggtcgagacaagcctgggcaagatagcaagacccccgtctctactaaaaaccaaaaaaacacattagctgaacatggcagtgcatgcttgaagtcccagctacttgggaggctgaagtggggtgattacttgagctcaggaggcagaggctacagccagccgagattgcatcactgcacttcagcctggacgacaaagtgagaccctgtctcaaaaataaaaaagaaaagaaaagcagcca

SEQ ID NO: 952836 - DNA, 590 bp, Homo sapiens
tgttagggactacaggtcccgctactctgccatggcttggcaagtgagggatgctgtatcttagactgaactccttgaagagagaggaccggtccatgatgacggtgatgccagtaagcaacccataataagtccccgccacatgcctgtcctctccacttgcccaataggcacgctctgcagcctcacggtgccccatggcaatgctgccatcaccccacttagcaagtgatgaaacagagctctagagaagtgcagcaaagaagccaagttcaccgggtgcagtagcccatgcctataatcccagcactttgggaggctgaaacaggaggatcacttgagcccaggaggtcgagacaagcctgggcaagatagcaagacccccgtctctactaaaaaccaaaaaaacacattagctgaacatggcagtgcatgcttgaagtcccagctacttgggaggctgaagtggggtgattacttgagctcaggaggcagaggctacagccagccgagattgcatcmctgcacttcagcctggacgacaaagtgagaccctgtctcaaaaataaaaaagaaaagaaaagcagcca

SEQ ID NO: 952837 - DNA, 636 bp, Homo sapiens
caggttgccccacccctgggctgcgtgggccgcctgtgcacgtgccatggcacatggaggtgggcactgaggtgctgtgtctgccgcagacccgtgcctgtatattccacgctttgcgcacctgctggaattcggggagaagaaccacgaggtgtccatgactgccctgaggctcctacagaggatgaagcgggactggatgcacacaggccggcgcccctcgggcctctgcggagcaggtacagcgggccctgcctgcctgggggatgctggtctgggtcctggcctcacactttcctgactcctgagtgctggtgggctgggccgtatgtttgcagagcactgagagctgcctccagcctcccggggctgactctggcctggcccaccggggtcctcagccctccaggacctcctggctgccccgttggcctctgcgtgtcctggcataaggggcagaactctcagggcagagcggccttgaccccaggttgcctacttctggggtgcggctgcatgggcatccctgcccgtggtctcgtggggccyggcttctgacgcggacagtggtgtggcctctctctcctgagatgctaggttgttgctcctgagggtgccacagggctgtcaggctgt

SEQ ID NO: 952838 - DNA, 609 bp, Homo sapiens
atgggagaaattggccaaaacaaaggggctacaggccccatacaagcacaaaatcaaatagggcagtcattatgccttagagttccaaagtgatttcctttgactccatgtctcacatacaggtcatgctgatgcaagaagtgggctcccactgccttgggaatcttcacccctgtggctttgcaggatacagtcccccttctggctgctttcacgggctggcactgagtgtctgtggcttttccatgtgcactgtgtaagctgtcagtggatctaccattctggagtccggaggacagtggccctcttctcacagctccactaggcagtaccttagtggggactctgtgtgagggttctgaccccacatttcccatccacactgccctagcagaggttttccatgagagctccacccctacagcaaacttctgcctggacatccaggcatttccatacatcctctgaaatctagggggaggttcccaaacctcgattgttgatttctgagtacccaccggctcaacgctctgtggaaaccaccaagrtttgggacttgcaccctctgaagcaatggcccaagctgtaccttggccccttttaaccatg

SEQ ID NO: 952839 - DNA, 575 bp, Homo sapiens
tgcactatctgctggggactttgccaagatattaaactctatgacttggaagagtcttcccaaactggtaaattcccctctatttaatcttaaattctgcaccctatctttttatagcaccctcagaatccaaacccatgtgacctttgccaactgctgtcagcgggtgttcgttaggtcctacagtttatttgatgcatagcccctttcttcctttacaaggaccaatttgtcccatcagaatatgttgtgacttaaccctagttattggcctaacatccaggagaggagttgagggaagatctacatggaggacatgttgtccttctaggaagaagtttcttatcatcttcaagcaataggacagtaggtacttctgcaggatcagaagattcaggggaacatacagattcaaaactttttcatgcatcagctaagatgtatcagaatctcattctttcataaccaggattctggaatggcataaaagatgttcctagttgggagcttatttttggagtttgactactcctacaattaagyaattaaccatgtccgcagctttctctgccata

SEQ ID NO: 952840 - DNA, 502 bp, Homo sapiens
ttccccttgggttctgtgctgtcattctgkcatgctttaatcctctcttgtggatgaaatttttcactcaaagaagactctaagacctttcacaatataactcttagactaactaccacttagccaacttctctccttctgatgctaacttcaatctgctgcattgttctcacttcctgcctcatcatcactgcctcttctctttgtccagttcctcctggaatctcacccagattcttgcacaaatctagctaaagacatctctttttctgtctcttccttccctaacctattataatattaataactactctttttgagctcttactacttaccaggaagataagaacatggcatactcatactctaatctccataacaatactacatgtattcccaattattctgatgtacagatgaggaagctgagtgaggctgagaaaggtaaagttctatgtccaaggctacccagtaaatcaacaggttagggttcaaacccagg

SEQ ID NO: 952841 - DNA, 560 bp, Homo sapiens
tgttggtcaggccggtctcgaaatcctgacctcgtgatctgcctgcctcggcctcccaaagtgctgggaatacaggtgtgagccaccgcgccctaccagaaagcaatttaaatcagtgacatagttctagagtagggtgacttgagaacacaggagaaaagcaccaagcccagtctttaggggttaaaggagacttctggggaggaagtaacagcaaggctgagacctaagagttaataggagttattaataataaggtgatggcagagagcgaagacattctacacagagataatagttggaaaaaaaaacacttgaaataagagaaaatgtggcattaatatttgattcattaatcaaatcttccttgtagttcaagcttgttctgactcatgcatgcaatgtctttgaggcctcaagcctcttcttcacatttttttctcaaggaattcaacaatgacaattcttatttcccgtgccacatccaccttctctgagctctaggmtgggttttatcccccatccttggtgtagtctaaactacttcttcaagaatttag

SEQ ID NO: 952842 - DNA, 574 bp, Homo sapiens
ggctttatttctgggttctctattcttttccttttggtttatatgcctatttttataccagaaccacaatattttggtaactgtagccttgcagtatagtttgcagtgaggtaatgtcagrcctccaggtttgttctttttgcttagtcttgctttggctatgccaggtcttttttggtttgatatgaattttaggatttttttttctagttcagtgaagaatgatgatggttctttgatggcaattgcattcaatctgtagatggcttctggcaatatagcaattttcattatattgatttttcctatccatgagcatgggatgtttccacttgtttgtgttgtcaattatttatttcagcagtgttttgtagttttccttgtagagatctttcacctccctggttagctggattcctaggtattttattctttttgtggcaactgtaaatgggattgcctttatgatttggctcttggtttggctgttattggtgtataggaatgctagtgatttttttttcattgagtttgtatcctgtaactttactaggagctttttggattagttttt

SEQ ID NO: 952843 - DNA, 638 bp, Homo sapiens
tcacgcctgtaatcccagcacgctgggaggccgaggctggcagatcacctgaggtcgcacgtttgagaccagcctgaccaacatggagaaatcccgtctttactaaaaatacaaaattagctgggtgtggtggcgcatgcctgtaatcccagctactcaggaggctgaggcaggagaatttctcaaacctgggaggtgaaggttgcagtgagttgagattgtgtcactgcactccagcttgagcaacaagagtgaaactccatctcaaataaaaaaaaaaaagaattgattgaataaatgtacagaaagtacatggaacagtgttagaacaaatgaaggaaaaacaaactaaagtacttggaacattattagaacaaacaaaaaagtggtaataactataatttatctgcattttctggcgtaatatctttgagtcctcatcataactttaaaaaatactatttaaaaaaagctttgtttgttgagggatgattaatatacgacaaactgcacttttttttgtttgtttgtttttgagatgaagtttttccgttgttgcccaggctgsagtgcagtggcaagatctcagctcactgcaacttctgcctcctgggttcaagcggttctactgcctcagc

SEQ ID NO: 952844 - DNA, 582 bp, Homo sapiens
cccatccaatatgatttttaaaatttcagctactgtattttttagttctamaattcccatttgctttccctttatatattctatttatttgctgaaacgttctagtctttgttgagactctatttctttattcgtttccagccaatttgtagttgtccttgaagcatctctatgagagcgacgttaaaatcactggaacattgtcatctctatcacctttatgttagcatccattacttctcttttttattctgtcttggattgtcccggttcttggtatgatgtgtgatttgcaattgaaaacgggacatttctgtattgtgttatgagactaccttgttttaaaacttctgggttagctagctctctctgacacccctctggtaaggaataatggggtcattgtctttttatggtcaggtggtgggagaagtccaagttccctacccagtcttctttgacttccaagcaggggggtgattctcgttactcctggggttggagcaggagttttggctccccactagatctacattgataatttcctacactgggctaggaagaaaagctgcctatttgggt

SEQ ID NO: 952845 - DNA, 582 bp, Homo sapiens
cccatccaatatgatttttaaaatttcagctactgtattttttagttctaaaattcccatttgctttccctttatatattctatttatttgctgaaaygttctagtctttgttgagactctatttctttattcgtttccagccaatttgtagttgtccttgaagcatctctatgagagcgacgttaaaatcactggaacattgtcatctctatcacctttatgttagcatccattacttctcttttttattctgtcttggattgtcccggttcttggtatgatgtgtgatttgcaattgaaaacgggacatttctgtattgtgttatgagactaccttgttttaaaacttctgggttagctagctctctctgacacccctctggtaaggaataatggggtcattgtctttttatggtcaggtggtgggagaagtccaagttccctacccagtcttctttgacttccaagcaggggggtgattctcgttactcctggggttggagcaggagttttggctccccactagatctacattgataatttcctacactgggctaggaagaaaagctgcctatttgggt

SEQ ID NO: 952846 - DNA, 618 bp, Homo sapiens
tcctaggaccagcaggtgactggaggttacartgcttttaccattgcaataatggagatttttaatatactaatatacagccattgtcttttcattttagcaacaccaatggcaggaaaaaagtaacataaatctgagttatggacatgtgatctttttctaatctcatttttctcttctcagccagcagttgggttcatcataactcttttgttctccgtttgtgccttgaaaatagtcctatcattgatttattaggccacatattatttgtttatttttctgtctcctcaaatagactcttagcttattaagcactgaggctctgtcctttgatactttgaaagcacagtaactagcccagtgcccaacgcatactaaatgctggataaatatctgttgaattaataactaagggaagtaaattatattaattttctgcatactccattaactgaagacataaccaaacaatcacagaaaaactttaataaaaactacaacaaagagatattttttttgccatcccttcattaaaattgttcgtcatggtggattctgctacaccagaaaacaaaaatgaaacaaggggacaggaccattgttccttcagaggta

SEQ ID NO: 952847 - DNA, 618 bp, Homo sapiens
tcctaggaccagcaggtgactggaggttacagtgcttttaccattgcaataatggagatttttaatatactaatatacagccattgtcttttcattttagcaacaccaatggcaggaaaaaagtaacataaatctgagttatggacatgtgatctttttctaatctcatttttctcttctcagccagcagttgggttcatcataactcttttgttctccgtttgtgccttgaaaatagtcctatcattgatttattaggccacatattatttgtttatttttctgtctcctcaaatagactcttagcttattaagcactgaggctctgtcctttgatactttgaaagcacagtaactagcccagtgcccaacgcatactaaatgctggataaatatctgttgaattaataactaagggaagtaaattatattaattttctgcatactccattaactgaagacataaccaaacaatcacagaaaaactttaataaaaactacaacaaagagatattttttttgccatcccttcattaaaattgttygtcatggtggattctgctacaccagaaaacaaaaatgaaacaaggggacaggaccattgttccttcagaggta

SEQ ID NO: 952848 - DNA, 618 bp, Homo sapiens
tcctaggaccagcaggtgactggaggttacagtgcttttaccattgcaataatggagatttttaatatactaatatacagccattgtcttttcattttagcaacaccaatggcaggaaaaaagtaacataaatctgagttatggacatgtgatctttttctaatctcatttttctcttctcagccagcagttgggttcatcataactcttttgttctccgtttgtgccttgaaaatagtcctatcattgatttattaggccacatattatttgtttatttttctgtctcctcaaatagactcttagcttattaagcactgaggctctgtcctttgatactttgaaagcacagtaactagcccagtgcccaacgcatactaaatgctggataaatatctgttgaattaataactaagggaagtaaattatattaattttctgcatactccattaactgaagacataaccaaacaatcacagaaaaactttaataaaaactacaacaaagagatattttttttgccatcccttcattaaaattgttcgtcatggtgsattctgctacaccagaaaacaaaaatgaaacaaggggacaggaccattgttccttcagaggta

SEQ ID NO: 952849 - DNA, 580 bp, Homo sapiens
gcatataataaaatgtattgttattcttaataaatactcgttaaaaaggaataaataggcacttaccttgcaatagataatgttgaaacatacctgtttcagtctaaaaaacagtattgttcttaactgagaaatgaaacacaccttcccacggaggcagaaagagaacaaaggtatccgctatggtcactacagatttgttctggcagaactattcaacacaatgagacaagagaaagaaattgatgacacagtaactaaaaagaaagagtgtactgattattaattttgtttggaaaacctaggaataaatttagtatgaaagtgcaaggtcaatatgaagaaagcagtaattttattaataaataaaaatgaagaattgaaaaaatgaaaacctatgtaatgtgctctgacaagaagttttaatatcggtaagatttcaacttttacctggaattagacaacgtgaaaaasaaagtaatgaggagagtcgggaagagtactataagaaaaatataaaaccataaaagctaattcattgtgatactcctaaatagtatgatagacaaattgaactgaa

SEQ ID NO: 952850 - DNA, 580 bp, Homo sapiens
gcatataataaaatgtattgttattcttaataaatactcgttaaaaaggaataaataggcacttaccttgcaatagataatgttgaaacatacctgtttcagtctaaaaaacagtattgttcttaactgagaaatgaaacacaccttcccacggaggcagaaagagaacaaaggtatccgctatggtcactacagatttgttctggcagaactattcaacacaatgagacaagagaaagaaattgatgacacagtaactaaaaagaaagagtgtactgattattaattttgtttggaaaacctaggaataaatttagtatgaaagtgcaaggtcaatatgaagaaagcagtaattttattaataaataaaaatgaagaattgaaaaaatgaaaacctatgtaatgtgctctgacaagaagttttaatatcggtaagatttcaacttttacctggaattagacaacgtgaaaaagaaagtaatgaggagagtcgggaagagtactataagaaaaatataaaaccataaaagctaattcattgtgatactcmtaaatagtatgatagacaaattgaactgaa

SEQ ID NO: 952851 - DNA, 596 bp, Homo sapiens
agccaacaaacattaaaaaatgctccacatcactaatcataagagaaatgcaaattaaaaccacagtgagwcaccatctcacaccagccagaatggctattattaaaaagccagaaaaaaatagatattggttgagtgtgcagagaaaagggaatacttacacactgctggtgggaatataaattaatacaatgtctgcaaaacaatattgagatttctcaaagaactaaaattaaaactattagacccagcctccccactactgggtatctacccaaaggaaaagaaataattatatctaaaacaacttctaaattaattaaatattaaatagttttaagaaaacagaactagagaaaattagaaaaactcactggaaaatgtttcataatctcagaattaaagatattttaaatatgacacaaaactcaggagtataaaagaaaagattgataaactaataaaaaattaaaattttgcatagcaaaatctactatagtcaaaaacagggtaaatggaaaattgagagagacctttgcaacttatatcacaaaggactcatttatgttgaactgtacctaataagagtaatgcaa

SEQ ID NO: 952852 - DNA, 601 bp, Homo sapiens
agtgagataaatgatgaaggtggttacactaaacaacagattttcaatagagacaaaacagccttaaattggaagaagattccatctagaaatttcayagctagagagaggtcaatatctggcttcaaagcttcaaaggaaagactgactctcttggtaaaggctgatgaagctggaacttgaggttgaagccaatgctcatataccattccaaaaatcctaaacccttaaaaatgacgataaatctactctgcctttgctacataaatggaacaacaaagcctggaggaaagcacatctgtttacaccatgatttgctgaatattttaagcccgctgttgggacctactggacaaaaacaaaaattcctttcaaaatattacaggccatgtacctgtacactaagagctctgctgcagttgtacaaggagattaatgttgtttttatgcctgctaacacaacatccattctgcagctcatggatcaaagagtaattttgacttcatatcttattggaaaaacacattttctaaggctttagctgtcatcaaaagtgattcctctgattggatctgggcagagtcaactgaaaagcttctg

SEQ ID NO: 952853 - DNA, 585 bp, Homo sapiens
aaatgtgagtcaattaagcctctttataaattacccagtctcaggaagttctttatagcaacaygagaataaactaatacagtactcaaaaaattgcggttaaaaatcccagaaggctaatcatagatattgacacactaatttaaaagtttatatggagtccattccaagatggccgaataggaacagcaccaatctgcagctcccagcatgactgatgcagaagacgggtgatttctgcatttccaactgaggtacctggttcatctcactgggactggtcaaaaagtgggtgcagcccacagagggtgggccaaagcaggatgggtcatcacctcacctgggaagtgcaaggggtcaggggatttccctttcctagccaagggaagttgtgacaggctgcactgggaaaattggggcactgccaccttaacactgtgcttttccaacattcttagtaaacagcacaccaggagattatatcctgcacgtggctcagtgggtcccacgcccatggaggcttgctcacttctagtccaagactgaactgtgaggcagcaagcttggctgggagagaggcatcca

SEQ ID NO: 952854 - DNA, 721 bp, Homo sapiens
agtaggatgtgtgtgacccatgagagatggactggcctcctttccttgggtcaactgcaacttattggagatgtggataaaccacttaggttttctgcctcttcattagtgcaagggtggcaagggcagtagcagagaggctttcagttgcccctgaaggctctgtccagggagttggtgagtttgctgctggctcaatagctctggcagggggcggctggaggcctaggcctggaggacctgcgtggtgaggagatataagaacaaccacccacctaacaatctggctaattttccacagggttgctgcagtatgttgggggcccattccagtctctagtcacctcaaatttttcagtacctggcaatatcaacagtgaggcctacaaaacagcaaagatggcagcctgcccctccttctgggagcttcatcccagggacattcatccctgttgctggcttaaacacacctgtaggagggggctggagacgccagttaggagatctctcctagtaaggaggaacgggattggggacctgcttcaaaaaacagtctggccatgttttagtggagcatctgtgctgtgctgggggtccacttcaacccccagtcaccttgcacactccaaagcctgaagactggaacggctaagtcgcccaaacagcaacaaygatggcctgcccctccctctgggagctctatcccagggaggttacaaat

SEQ ID NO: 952855 - DNA, 640 bp, Homo sapiens
gaggttgaggcaggagaattgctttaacttgggaggtggagattgcactgagctgagatcacgccactgcactccagactgggcaacagagtgagacttcgtctccaaaaaagaaagagagaaagaaagaaagaaagagagagagagaaagaaagaaagaaagagagagagagaaagaaagaaagaaagaaggaaggaaggaaggaaggaaggaaggaaagaaagaaagaaagaaagaaagaaagaaagaaagaaagaaagaaagaaagaaagagaaaagcaaagcaaagcaaagaaaagaaaagaaaagaaaagaaaagagaagaggtgcaggccacaaaatttgaggaaggcagagaagggggtggtcattttgtactggatgatcagaataagtcctgacaaaggagatggggtttgtctaggccctgaaaaatagggagagatgagatttaaatatcaggaaagaatgaagaaagggagttcccagcaatgagagcaggatgaastaaggtagagagagggtttgaaagttcaaaatgtattggaaactctgaggagacagaagtagagagtccctaaaacagcaaggaaaggtaagtttgcaaggacaggatgagaccagattttggcaggttct

SEQ ID NO: 952856 - DNA, 601 bp, Homo sapiens
attgaaatcctagctccatcacttgctgactatgtgacattaacatccctaagtgtcaatttcctctttttaaagtggaaataatcatagcacagtctcttatgattgkgggaggttcaaagttagcacaggacctactcttcagtaggcgctcaataaatgctattctatcatatctcaatgaccaacctgtgctcagcacaataggagttctgtaaccgcttgttgggtgaatgaaagactgagcaaatgaataaataacaatggaatgcctgtattccatcattttcttccagtcccaagccactagcaaagttccactcaccaactctggtgctcacacagtatggttgtcagctcacagatcctggtcgtctgttcacaccttaaaagcagtacagggaacattgagcaggaggtgtcttattccacagggcactgctaaagcagcactgatacaatctgcactttttcagcctgagatctatggggagactccttggcttaaacacggaatatggacacaggaggggaaaatgagtctccagattgaactctttacaatgtcatacaccacagatgtaggaaatctgctgatccc

SEQ ID NO: 952857 - DNA, 560 bp, Homo sapiens
agacatgtcagcccatcacacttctgaatttacatgtgattcctctatgcagacaactttgcmtcccctgaggaaagatagtggtttttcttaagagaaaatgacatttgtaataggaattttaagattttattacttcttctttcatctcctcaaaggaatgaagaaatgttggtgggcagatcttcctttcccatgcagtattttccaattaataatacttctttacctcaagaatattttctctttcagaagatggtaagtttaatatgcattttatttagtatataatatgatacaaactatgaagaacataaaggctatttgtaacatatggtgcccaaatctaaactgggatgaaggcacaagatgtcccagcactgtcctccagtggtgtcctggcctaacaccatcatcctaaatttcagttctaatgccttagcaaatggccagggtgtcaacagaaaagggatggacggcagtgacgacatactgcagtccaagtgaaatttgagtagagagttctaatgtaaatgactattttaaaagacgtttgcagt

SEQ ID NO: 952858 - DNA, 589 bp, Homo sapiens
atcacaatgctgatagtgatatggacaatgaagtgcaggctgaggtggtctcaggyggagatgaggaacttgttggaaactggagtaaaggtcactcttcttgtgctgtagcaaagagactggtgacgttttgtccatgtcctctatagatagagatctgtggaattttgaacttgagagagatgacttatagtatctggtggaagaaatttctaagcagtaaagcattctaagaggtgacttgggtgctcttaaaagcattcagttttatgcattcacaaagatatggtttggaattgtttaaaagggaagcagagcataacagtttggaacatttgcagcctgaggatgagacagaaaagaaaaacccatttctgaagagaaattcaagtcaactgcacaaatttgcataagtaatgagccaaatgttaatcaccatgacaatgggaaaatgtctgcaaggatgtcagaggtctttatggcagcccctcccatcaaaggcccagaggcctaggaggaaaaaatggtttcatgggccaggtccagggccttgctgctttgtgcagtttcaggacttggtgccctgcat

SEQ ID NO: 952859 - DNA, 613 bp, Homo sapiens
ttgtgttggccttgcctgtatgactggaacaactggggttcctcttcttccaggtttaattcatgaaatcctgccgtaccttcaataccaaggtaagaaatcacttgtttaaaaagttttttatgccggcygtggtggcccatgcctgtaatcccagcactctgggaggccaaggcaggtggatcacctgaggtcaggaggtcgagaccagcttggccaacatggtgaaaccgtgtctctagtaaaaatacaaaaaaattagccaggcagctaagctactcgggaggctgaggcaggagaattgcttaaaccgaggagacagaggttgcagtgagccaagatcgcaccattgcactccagcctgggcaacaagagcgaaattccatctcaaaaaaaaataataaataagttttttaaattattttttaaactgttgtgggtacatagtatatatatttttggggtacatgagatattttgatacagatatgcaatatgaaatcagcacattatggagaatggggtatccatcccctcaagcatttattctttgagttacaaacaatccaattacattctttattttaaaatatgcaagtaagttatcattgat

SEQ ID NO: 952860 - DNA, 632 bp, Homo sapiens
caacctcaacaaaatattagctaactgaatccagcagtacatcaaaaagataattcaaaatcatctagtgggttatgtccaagggatgcagaggtggtttaatatatgcaagttaaaaaatgtgatacatcacatcatcagaattaaaaacaaaaaccatatgatcatctcaatggatgcagaagtgactgacaaattttagctctcctttatgaaaaaaaaaaactctcgacaaactagacatagaaagaacctatcttaaaataataaaatccatatatgacaaacccacagtcaacatcatactgaatgggaaaagttgaaagcattttctctgagaaattctggtctctgagaccagaaaagacaaaaatacccacttttaccatttctattcaacatagttctggaagtactaaaaagagcaattaaacaagaaaaaaatatggggcatccaaattgaaaaagagaaagtcaaactactgccatttatagacgatatgagtgtagtacatctagaaaattctaaagactcctccaaaagattcttagatttgaaaaacaaatttaataaagtctcaggttacacartcaacgtacacaaattagtaacactgctatatatcaacaac

SEQ ID NO: 952861 - DNA, 603 bp, Homo sapiens
ttgacaggcttgatgggttttccactgcggatcaagtctgagacctaggaacaagcaagaaggtgggaggagtaaggggagtggggaagagaaggggaaataagggtcagaaatcctgtggacctagacccaggcccagtaggactaggaatgaaagggagctctgatgtggaggtggttgcacatttggatctcatcacctccttgccacgagccacaagcttgtcaggaagcccagcctgggcagctgtgtgggaggcatggctggccttcgcaacaccttcgcaaacctgatagaagaagacaagatcgttgccatcctcacaggtctccatggtcttaaaagagaataaaagacagtgtatcatcaatcacctccttcctgtcctgaaacccttggccaatcctgtggggagggagaaaagggaagggatgtggtctctgtgctgagggagcccttgttctgatagaggagccaatccccacctctgggaaatgcccagcctgggggtccccgaggagctagattggtctcctcaccaaatactgcaccaggggcccttgtggcagcagytgtagctgaacaaggctcagaaagttggt

SEQ ID NO: 952862 - DNA, 624 bp, Homo sapiens
acaaagttaacaaacacaaaagaagcagagaagattttttttttagacagggtctcactctgttgcctaggctggactgcagtggcacaatcatagctgactccaaccttgaccttccaggctcaggcaatcctccctcctcgctctccccagtagctgggactacaggcatgcaacaccatgtccggctgaaaaagtgatttataataaacaaaactaacctggtacttaccatattttataaattctaagatagtcttttttttttttttttttagatggagtctcgctctgttgcccaggccggattgcagtggtgcgatctcagctcgctgcaagctccgcctccagggttcaagcgattctcgtgcctcagcctcccgagtagctgggattacaggcatgcgccaccacacccagctaatttttgtatttttagtagagacgggggtttcaccctgttggccaggatggtctcgatctcctgacctcatgatccacccgcctcagcctcccaaagtgctgggattacagatatgagccaccgcgyccggccctaagatagtgtttttataaaaccctttcccatctcttggacgcatctaggaattgatgtcatccgcc

SEQ ID NO: 952863 - DNA, 587 bp, Homo sapiens
gagtgagacactgtctcaaaaaagaaaagaaaagaaaaaaaaaaaaaaaaaaactctttcacggtgcaaaagcaaaagttttaattctgatatagtccaatatatcaccaatatatcatttgtttcctgttatggattgtgtttatgtgaaatctaagaactctttccctagccagagattccaaagatttttctctaatgccttctccttctaaaagaagggttctttattctgttccgttgatctatgtttctgtcactccatggatagccacatagtaactatgcaatacttcttgaaactgggtagactgattgctcccactttattatttctttttcaaaattgttttagctactctagttcctttgtttctgtataaattttagaataatgtcatctatatatgaaaaaaatcatactgagatttttgataggaactgctttaaacctgtatatcaatttgggaagwatcggtatctttactacgctgtgactttcaaatcatgaacacaacatttttctccatttatttacatttttaaaatttatttcatcaacattatatagttttcaacaaacaagt

SEQ ID NO: 952864 - DNA, 572 bp, Homo sapiens
acaccatcccagcaagtcctagctgaccctcttaatactgtgacctctctgtygtataataaaggttgaaaatcatccttcctttgaataagaatatattataactatattattttttgttacagccttctcaaaaatgtatttcaagccacacataggccattgtcatggcatcttttatttaacagacaatagctattttccatgactcagtccagaatattctttaacatctacatctaggatattatcataattataataagagacggcactacatggatgaagctggaagccatcattctcaggaaactaacacaggaacagaaaaccagacagcgtatgttctcactcataagtgggaattgaacaatgagaacacatggacacagggaggggaacatcacacatcggggcctgttgggggtttggggggcaaggggagggatagcattaggactaatgcatgcggggcttaaaacctagatgacaggttgatgggtgcagcaaaccaccatggcacatgtatacctatgtaacaaacctgcacgttctgcacatgtaacccagaa

SEQ ID NO: 952865 - DNA, 601 bp, Homo sapiens
ccaacggtttacttaaagcaacagactcactttgtgcattttaaagaaaatatgttaaatacttgagtttgcrtaattatattttgtctttcaatgcttctttcatgcagaaaaatagtgttccatataaaaggtagctggttcatttcactacccagtctcacaagtgcttttccttgagacaaccatgatatgtcagtacacagcagcagttctttctgcatacttcccatttcagcacacagaatgctaaaaaaaaaaaaaaaaaaaaactcaacaatcaaaatgcaattaaattaataatttttacttttcaacaaggatattcttagaaaaagttgactttttattttttttaaccatagtgcatggcagtgaaaaatgaaaggccaaaagtacagttcagtgccactgtcttgattcatgctatggtgccagtagttttaaaaaacattacatttggaggagccaagatgtccgaagaggaacagctccggtctacagctcccagagtgagcgacacagaagatgggtgatttctgcatttccatctgaggtacccggttcatctcactagggagtgccagacagtgggcgcagg

SEQ ID NO: 952866 - DNA, 586 bp, Homo sapiens
tccatgttagtcaggctggtctcgaactcccaacctcaggtgatccgcctgccttggcctcccaaagtgctgggattaaaggcgtgagccacygcaccaggactgaagtgtgttttgttagaataagagaaagaaagacgtgggataggggcagaaaaaatgttgggaaaacggaaagaacagcaggaacagagaccctgtagtggaaaaaacttagtatatgtgaggaactaaaaggcagccagggtggctggatactgagacaaggttggtgtgagatgggcagaggctcctccaagcaggactgtccaggctgttgcaggaaagaggtcttctgtctactagtaatagaaatgatccaatttactccattaaagaaacaaaactggatatattcaacacattttctctgtatctaacatttcagtagaagtgatataaagattgctaccacatattctgcttgcttcacctacatcttactgtatgatatgggtaacgaataaaacacattccccctatctccattctgtatgtatataccattattttatttcatcatggtatctgaaaagcaattataaat

SEQ ID NO: 952867 - DNA, 575 bp, Homo sapiens
aaagagaaagaacaggaaggcacagtcttgtgatgcattttccccmcaacccacgcccatggcgatggtagggaagagcataggctttggcccaggagggttggcttcgagtcctggcactgccattcctagctgtgaaggtattcccaggaaggtatttcacctctgccagccacggcttccaccttgcaggcacgggcattaccaggcccatttctcggggttgctgggaaagttagatgagataatataggccaagtctcttggagagttcctggcacattgtagggacatgaagaaaagaagacgtattgtttctttcttctccaggccagcccaaaggacgagcaggaaacctgagcagcatggagggcaggggatggtaatcaagaaccactggactttccttaggtagcaaattacgcccggtgaccctcggagccacttcacctggaaaggcaggtttcaggttttcatttccttagctggggtcaggctacctggaaggtgctgggtccctgcagagtagatgctgctggcactctgcccagaggcctcttctggctgggccacca

SEQ ID NO: 952868 - DNA, 523 bp, Homo sapiens
attttctcatctgcagtgataccatctgtgttaatagtaaatgttaactatggttatgagaaagcagatcatttacacatagtgcttgctatggtgyatgtagttagtgcttagtaagtgctagcttttataattaaggtgaaaggcatagactggagatgagagagaaattgacagcaggcacataacttaataagctactgacacattccagatgagaacagacaaaatcatgaactaggacagtggcaatggcaactgaaaagaggacagttacacaagatatttcagaagcataagtgccttcatgattcattagatgtgggaggcagagacatgactctgagtgttcacgcctggctcactggggcaatggttgttcttctaccagatatagaacaatcaggaaggaattatagtttgaagaagaaatcatggatccagaatctgttctagcatattgacaatgaattaaaaatattcttcaaatcttatcgacccaccacaggggaaatatttttct

SEQ ID NO: 952869 - DNA, 447 bp, Homo sapiens
gagggaaatctccagctgaactttatagcaatttgaactgtttgagaagtctcctggtcagaactcrgggaaagacatgaatctggtgtccagacttcacaggcggggaaacaaagaaagccatatatgcttttgctgctggtaggcaagtagtctggggtaagttctcagccctgcttgcccactgcctggaaacagactcggtgctatttcagggggtatggtgggagtaagactggtgccttgggttgagtgggaactgggtgaggcctgtgactaccgactttccccacttccctgacaacctaaatgacacagtagaaacagtcataatcctcctacgtacccagttccattgacctggggatctcatccctatcccccacagcagctgcagcgaaacccacccaaggagtcagctcagacacgcctagccctgccaccacc

SEQ ID NO: 952870 - DNA, 596 bp, Homo sapiens
ggagtcagctcagacacgcctagccctgccaccacccaatggtccttccctacccaccctggtaactgaagacaaagggcawatactctcgggagttctagggctctgcccaccacttgttcctccacacactactgatgctctctggaaagcaccacctcctggtaggaggccaaccagcacaaaaatagcgcattaaaccaccaaagctaagagccctcacagagtccatttcacccacctgccaccttcaccagaaaaggtgctgatatctatggctgagagaaccacagagagttcacattacaggactctgggcagacaacccccagtaccaccccggagcctggtagaattgcagagtggctagatccagaagagagataacaatcgttacagctcggctctcaggaagccacatccataggaaaaggggtagagtactacattaagggaacaccctgtgggacaaaagaatctgaacaacagctttcagccctagaccttccctctgacagaacctacccaaatgagaaggaacgagaaaaccagctctggtaatatgacaaaacagggttctttaacgcccccaataa

SEQ ID NO: 952871 - DNA, 589 bp, Homo sapiens
ctgttctcatgctgctaataaagacatatccaagactgggtagttataaaggaaagaggtttaattgactcacagttctacatagctgsggaggcctcaggaaacttacaatcctggtggaagggaaagcaaacacatccttcatgtggcagcagcaaggagaagtgcagagcaaaaagggaaaagccatcagatctcctgagaactcactatcatgagaacaggacggggagaaccaccccccatgaatcaattatctctacctggcccctgccacaacacatggggattatgggaactataattcaagatgagattagggtggacacagcaaaaccatatcactagccttcataggcttattaggacaaataaaaaatctgaaagtttagctttattcattttgtcagaactataatttggctccaactgtcttcatataagctaataaatttctaatactatattttactcattactaatttttttaatgaaaactgtcatttcttcacctgtatgtttttacaatttttaaattatatagaaagatagatgatagatagatagatagacagatagataatagatg

SEQ ID NO: 952872 - DNA, 617 bp, Homo sapiens
aaactcaatgtttcagggatttcacttctagataaaaacccaactgcagctcatatctatattcaccaaaagatattacagaaatatttatctcaacatattgtctattattcataacaggcaaaaatctggaaacaatcccattttcatcaccaatgaagaaacaaatgaattgagctatattcatacaaagaaatactacacagtgaagaaaattcatagtctagtgctataaattatagtgaactaatatcaccaacataatattagaaaaaaagacaaaaagaacagttcaatttaccatgaagtctgagatgaagcaatcttataaagctagaggagattatatagtggtagactttatggaagaaaggcttataaatagtaactgggaggaaacatgatggaggcccctgggattctgctaatagcttttcttgacctggaggggagttacaagtatgttagtttataaagctatacatttatattttatgcacttaaaacgtttcttatatgcacaaaaatttaaaagaatgcrtagcatggtgttgttaccaagagaaatcagggtgtatctatctgttgtgagcagggtagaagctcttctaaacaat

SEQ ID NO: 952873 - DNA, 691 bp, Homo sapiens
tctgccgtctctgttactccacatctcatcagcatttgatattgtaagttttttgaattttagccagtttagtagctatagagtagtatctcgttattgttttaatttaaaattatttaacgayatataatgctgatcatcttttcatatctttatcttccacttctgtgtcttcttaggtgaggtgatcttccagatcttttgttcttttttaacattggatcatttgttttcacattgttgagctttaaggctgctttatatatttggatacaagtctttttccaatatgtgtttcacaaagattttctctccatctttggcttgtcttttaacgttctcaattgttcaattgtgtcttttgctgagcagaaggcttttttttattattattattttactttaagttctgggatacaagtgcagaacatgcaggtttgttacataggtgtacatgtaccatggtggtttgctgtacctatcaacctgtcatctaggttttaagccccacatgcattagctatttatcctaatgctctccctcccttggcccccaaccccctggctggcctcagtatgtgttgttctcctccctgtgtccatgtgttatcattgttctgggacacagctaaagcagtgttaagagggaaatttatagcactaaatgcccacatcagaaagccagaaagat

SEQ ID NO: 952874 - DNA, 563 bp, Homo sapiens
tgtctttaggagagagagtacttggatccactggagagtatgctctgagggaagctgtggcacttgcagaggggagtgggctggaaccaaatggagcccttttccggacacgcacaatgctattcccagtgaggtaatctaggaactctacagggcactgcggtccttagctgaggtgctcaaggactccggaaggaagtcatgttccccatttacaacccgttccctagtgcgggaagccagccacggagaaaggaagaactgacggcagggggtggggcaaaaagacagccatgatgggtccgtcctgatgaccccagcatcagacgtggaggtcactttgctctgtgatggctggtccctgtgatgtggcattgatagcacccaatgtacaaatttcccgttgggcagcatcctgggattcccaaaggcatgggatcactgggtgctagacggctgggtttaggacagggcctgaaygtaagcagaggcaattcacgtgctcctggaatatcagaacagaaaggagctcttgagaggctggcactctcatcttcccagtg

SEQ ID NO: 952875 - DNA, 630 bp, Homo sapiens
gaattctgctaatgatacactgaaaataaatatacgccagactccgtggctcacgcctgtaatcccagcactttgggaggccgaggtgggtggatcacctgaggtcaggagttygagaccagcctaaccaacaatggagaaaccccgtctctactaaaaatacaaaattagccaggcgtggtggcgcatcccagctactcgggaggctgaggcaggagagtcgcttgaacccaggaggtggaggttgtggtaagctgagatcatgccattgtgctccagcctgggcaacaagagcgaaactccatctcaaaagaaaaaaaaaaaagaataaatatagtaaagcgtgtgaactttgaagccaggctacttggacatgatccagtttgatccagccattcactagctgggtgacttttgacaagtgacataacatctctgaggctctacttcctctctgtaaaatggagaaaatacagcatctatataaaggggttataatgaggattaagtaagttactacaaacaaagagtaaagccttgcccatagttagtctttatcaaagattagctattatttgtctcctttcagtcatcaaaactcaaagcctcttttttgtcacccgcacatat

SEQ ID NO: 952876 - DNA, 492 bp, Homo sapiens
gttagtattgaagagcttggaagcagtggcatttccaatgaccccatttgttcagttttcatgaagactaatgaggtaagaaggggttagttatttttggattttttccccataattagagattactgtcttgtgtttttcagggttttggttttggttgcaagtaacagaaacccaacgctaattaataaacgggaaagtgtgtcagtggaaatgtaagtaagaagagatttcatttactggccaattcaaaagatgacaagctttaggcgtggctcagtccagtggctcatgatgtcttcaggactcagtgtttctctgttgtcatctcttagttctattattttttctgtgttggttcattatgaggtttcctttagagggtggcagagaaagccactagttgcttcaagtctttattytaccagctccacaagtccgacggaaagagaaaactgctttcccaaagggtgtaagaggatgaaaggcatg

SEQ ID NO: 952877 - DNA, 624 bp, Homo sapiens
gtcaatgttcatacaggatattggtttctatttttatttttctgcaatgtctttgcctacagacaatttgatatcctggcaatgctggctttacaacatgaattaggatgtgttttccttctttatgtttttggaaaacttaaaaaaggttagttttcccaactctattagtgcttctttaaatatctgctagaattcatcagtgaagctatgaggtccagggctcttgtttgttgggaaatttttggtttctgattcaatctcctcactagtaaataggtcttttcagattttctatttctttgtaatttagtttttgttggcttcatgtttctaggaatttattcatttaatctagattatccaatttgttggcatatgataattcatagtattttaaataattttttcatctggagtaatgaacaatatctccactgtaatttcttattttagtaattcatctttctttttttcttagtccatatagctctagggttgtcaattttattattctttttgaagaagtaatatcgggggaacccrcccccaatatttcaatgtaggttctatttttcctaagtgtcagccagtctgagaaataaagagaaatagtacaaagag

SEQ ID NO: 952878 - DNA, 695 bp, Homo sapiens
aataagtgcaataaatacttgtttgctttaacatttccctgtgtcttcaatctcctgaagtcttacatgcttgacattgtattttcctctgtaagtaacctgctatttctctccgatcattttaaaatattttttccttgtctttcacaattttacatttcactgttcctgtgtgtgtactataatacctttaaatcttaagtcatttttttaaatctgaggaattctcattgattacttatttaagtacactctcctttttaatgactatattctcttcttataaggctactattagatgtgttttgacatttattcttctatcctccctattaattaacttttctttcatttacttcttctctatccattaccgattactttcatgaattctttagacgcatttcctcagctcagtaattgctttttcaactctatcagttttaatatccaatctattccaccaaataatttatttgagcagttaatgttttcatatccaatctatccaatagtttttctttttatttatttatttatttattcatttattcgtttgagatagagtcttgctctgtcacccaggctggagtgcagtggcacsatcttggctcactgaacctctgcctcccgagtccaagcaattctcctgcctcagcctcttgagtagctggaaccacaggcatgtgacacta

SEQ ID NO: 952879 - DNA, 646 bp, Homo sapiens
atttacattcccaccagcagtgtgtaagcattctcttgtctccgcagycttgcaagcatctgttatttttttttttactttttattaatagccagtctgactgatgcaagatggtatctcattgtggttttgatctacatttcactgatgattagtgatgtggagcattgtttcatatatttgttggccacttgtatacctcattttaagaagtgtctgtttatgtcctttgcccactttttaatagggttatttattttttgtttgttgaattaaattctttacatattctggatattagacctttgtaggatgcatagtctatgaatattttctcccattctgtaggttgtctgtttattctgttgatagtttattttgctgtgcagaagttctttagtttcattatgtctcacttgtcaatttttgtttttgtggcaattgcttttgaaaacttagtcataaactctttgccaaggcttatgtccacaagagtatttccttgattttcttctaccacgtttatagttttaggtcttacatctaagtctttaatctatcttaagttaatttttgtatatgatgataggcagtggtccagtttcattcttctgcatatggctagctagttatcccagcaccattg

SEQ ID NO: 952880 - DNA, 642 bp, Homo sapiens
gggacacagggcacaaagtccctaggctgcacacagcaggggcaccctgggcccggcccatgaaacctttttttcttccaagcccctgggcctgtgatgataagggctgtctcaaaagtctctgacatgccctggagacatttctcccactgtcctggtgattaacatttggcttcttgtaacttatgcaaatgtctgcaactagattgaatttctcctcagaaaatgggtttttcttttctatctcattgtcaggctgcaaattttctgaacttttatgctctgcttctcttttaaaactgaatacttttaacagcacccaagtcacctcttggatgttttgctgcttagaaatttcttccgccagataccctaaatcatttctctcaagtttaaagttccacaaaactctagggcaggggcaaaatgccaccagtctctttgctaaaacatagcaagagtcacctttattccagtttccaataagttccaaaactgtactcctccataataayaaatctcagttaatggttacttcattcttctggctgcttaagccaaaaaccttggagttatcctttactcaggtttttctcaaaccaaatattcaatcttctaacatattatgtcaactctggttca

SEQ ID NO: 952881 - DNA, 591 bp, Homo sapiens
ttcagctgaaacagcccagaagaagaatcawatgaaataataaattattgttgtttgaaaactactaaccgttagagtggtttctgactcatcagaaactaacatatattatgttcttcatggcaataaggtgaaagaaaagatgcataatttctttaagccaaaattcgaaagcaacttaattcattgaaagatttactttgttccccttcctgtgtccatgtgttctcattgttcaattcccacctatgagtgagaatatgcggtgtttggttttttgttcttgcgatagtttactgagaatgatgatttccaatttcatccatgtccctacaaaggacatgaactcatcattttttatggctgcatagtattccatggaaaagaacgttaaaaaaaaagaaagatttactttgattaaagtaaatgttacacaaatgagatacttataattcttctgtattcatttatcaaatattaaatattttaaagaagattttattttattttattttaagttccaggatacatgtgcagaatgtgcaggtttgttacacaggtaaacatgtgccatggtagtttgctgcacct

SEQ ID NO: 952882 - DNA, 598 bp, Homo sapiens
tgatgggattaggtgcccttttaaaagggcttgctggaggaaatttgtctcctcttgcctttccgscctctgccagttgcggacacagcattcctcccctctagaggatgcatccctcaccagataccaaatgctggtgccttgatcttgggcttcccgttgccagaactgtgagaaataaacctgggctctttataaattacccagtctcagctattctgttatagcagcattgacagactaagacatttcctgacactctgttgatttgctttgatcaattaccgagagaggaatgttaaaaatcttaactgtaattgtggatttgtcattttttccattagttctgccacgtttttgcttcatgtattttgaagctttgttaataggtgcgtacacaataagatcattgtttttctttgatgagttggccctttgattcttatatgcaatgttcctctttgtccctggtaatgtttattctcttgaagtctactttatctgatattttagaatgtagcctgcttttcttatatttagcatttgcatgatataactagcccagtgtaccatcttcatacatttaaactgtgtcttt

SEQ ID NO: 952883 - DNA, 598 bp, Homo sapiens
tgatgggattaggtgcccttttaaaagggcttgctggaggaaatttgtctcctcttgcctttccgccctytgccagttgcggacacagcattcctcccctctagaggatgcatccctcaccagataccaaatgctggtgccttgatcttgggcttcccgttgccagaactgtgagaaataaacctgggctctttataaattacccagtctcagctattctgttatagcagcattgacagactaagacatttcctgacactctgttgatttgctttgatcaattaccgagagaggaatgttaaaaatcttaactgtaattgtggatttgtcattttttccattagttctgccacgtttttgcttcatgtattttgaagctttgttaataggtgcgtacacaataagatcattgtttttctttgatgagttggccctttgattcttatatgcaatgttcctctttgtccctggtaatgtttattctcttgaagtctactttatctgatattttagaatgtagcctgcttttcttatatttagcatttgcatgatataactagcccagtgtaccatcttcatacatttaaactgtgtcttt

SEQ ID NO: 952884 - DNA, 724 bp, Homo sapiens
tctgctgataggcagtaggatgtgtgtgacccatgagagatggactggcctcctttccttgggtcaactgcaacttattggagatgtggataaaccacttaggttttctgcctcttcattagtgcaagggtggcaagggcagtagcagagaggctttcagttgcccctgaaggctctgtccagggagttggtgagtttgctgctggctcaatagctctggcagggggcggctggaggcctaggcctggaggacctgcgtggtgaggagatataagaacaaccacccacctaacaatctggctaattttgctgcagtatgttgggggcccattccagtctctagtcacctcaaatttttcagtacctggcaatatcaacagtgaggcctacaaaacagcaaagatggcagcctgcccctccttctgggagcttcatcccagggacattcatccctgttgctggcttaaacacacctgtaggagggggctggagacgccagttaggagatctctcctagtaaggaggaacgggattggggacctgcttcaaaaaacagtctggccatgttttagtggagcatctgtgctgtgctgggggtccacttcaacccccagtcaccttgcacactccaaagcctgaagactggaacggctaagtcgcccaaacagcaacaaygatggcctgcccctccctctgggagctctatcccagggaggttacaaat

SEQ ID NO: 952885 - DNA, 620 bp, Homo sapiens
ctggggaatggtgtcatatcaggggctcagtgttggtctctgttgctggcagactgggcactcagagatagccttggccaggtcagccttggtgagtagaagtccacgttgctgagcccatgcataacctctattcttgtcaccatggctactttgctcatgaaacaattgggtgatgacaggtgtggctggagaaagaggcctactagtatccacagaacaggttatcttgtccactttattaaaatccttttttgctaaccctttggtgagcattcacatggggcacaaatatcttcaccctttttgcccattcagtgtctatccacatacttcatctccaaatttctttgtcaccaattttccagttatattgaactccctgaccatccagccaaaccactggccacggcctatgaattggcatataattgaatatctggctatttttccttctaagcaaagtcaacagggggactgctcaaagttgtgtccaccaggaggatttcccttcaccactgtccttcaaggtagcccagaggtgagatgtagtgctgcagctatccactttagggtggtacctgcatatcatacagaacmctctgtaaaccaggcctaag

SEQ ID NO: 952886 - DNA, 611 bp, Homo sapiens
gatcacagggaagtccccatgaagccaccgatgcaggctggaagagagaaggcaggtagcagaagtggggactayggaaatttggcctacttcttcatgtaacttccttgtgccttcagggcctctcaggcccaatcatgtgtataccacttccatctgatgacagagtgttgctgtgcatatccaactttgtgcgttggtggctcagataacatccagttcatgatgggaagctcaggttgcacggtaacttggtgactcattaagtatcagtctctactaaggcccagtagcaggccaagagctgtttctcaaaaagagactagttatttgttggtaatggcacggctttgctctaaaatcctaaaccaagattcacctatagggacctgccagaagcttcaaacagcatccctatctgccactgccactgaaacaccactggatctgctggatcatatgacccaagtggcagagcagcttgcacagcagcctggacctgttgcagactcttttcttgttctgggccctactcaaaactagcagctttttgagtcaattggtaaacaggctggtataacataatgaaattggaaaatgttgcctccaaa

SEQ ID NO: 952887 - DNA, 593 bp, Homo sapiens
agggtttatcccaatccagctcctgggatggaactatgaggcaktttgaagccaatcatctccacattcaaatctcctttggccacagcaaaaggttgagagataggcacataacccaagttgatccagataacactcattctggggcctcttctagagtaactgaatagaaagggcctctttccttgggaaggtgttcagaaataagatacagatatgcaaacatcttgttaccatgaagggaagactgcctaggaatagagccaccagagagaagttcagagataagaaaaagatgtctatagcattcttagagttcctggaagtagctgtgctgaagccatcaattttttttttttttttttttttttgagacagggctttgttctgttccacaggctggagtgcagtggcacgatcatggctcaaggcagcctcaacctcccagggtcaagtgatcctcgcatctcagcctcccaagtagctggcacgacaggtgcgcacaaccatgtccagctatttttttaatttttattttttgtagagacgagttctcactatattgtacaagctggtcttgaactcctgggctc

SEQ ID NO: 952888 - DNA, 636 bp, Homo sapiens
gaaggttctatggcagaattcttccttgccccttcctggtttctggtggttgctggcaatccctggtgtctttggcttgtggctgcctccctccaatstgtgcctgtgtcttcacacagccttcttccctgtgtgcatctttgtttatttacatgaccttgttataaggacatcagtcattggatttagagcccaccctaatccagtatgacatcatcttaacttggtgacatctgcaaagaccctatttctagaccacattctgaggttccctgtagacatgaacatcatgtctgtgtgtggtgggggacactattcacctgagtaccattggcaagtgaggtcaggttttcagaaagtgagccagtattttcaagacttgccttagaagggatgaacctctagtgagagctggtggagtggtcatgccaactggaaaagtcacacttccaaaatggccccacaaaggcagctcaggggaaaggaaaaaataaaatgacacagagaagaaagtggtttcaaacgtaggtgtccttgattgaatgttctggcttcttactacctaaaggatctgaggagctgtctcaggattgcttgtgacattaaaaccttttctcccatttcactttgtctcat

SEQ ID NO: 952889 - DNA, 630 bp, Homo sapiens
ggagggagaggatgagggagcatctgcaggtcaaggtgagggaaagggaagaagaacgtctgctggtgtgtgcgtgtgtgtgtgttcgtgtgtgtgtgtgtgcacgtgtgtgtgtgtgtgtgttaggcattgtcacataggaggaagaggaggaaagaaaacaatggaaagaatgcctgaaattgactggaaaagcgaggaggctatgtagtttgcagcttagcttaggcaaatccctcactatgataaaagttctcatctttatgaatgagaaaatggaggcgctgggattgtgttttatccaagagcccttgactggtgaatacaaaatttgtattttgttccaaggtttgtgtcttcctaccatctatgttgctgtaaaaacggaaatgattttgctgaaaatgcttaaaactcaaaggctttactgtaaggtagcttagtactgacccaagaatagacccagttcagaggagcaggagcagctccaaaaaccgagtcactgaatgtcagccactgtttcctttgattgatrtttttatatggtacatttgataaaagctggataaatgaggatactgccatacaggtagctggtttagttattttctaagtggcttttaggaggtg

SEQ ID NO: 952890 - DNA, 616 bp, Homo sapiens
tctcagcagcaaggaagccctgaaatgggtagctcttctttacaggcacattatggtgatgtctcccagagtctggctgagtccagggttctcatgggcctcagaggggaggaagtgtgtgctgattggtccatgggcagccatggctgggcccaggaaaaacatcaccagttccccctccggtcagcaggactggaggcctggcttccaggcttcaggccttccccagcctgaaggtagggcttcaccggggacccactactttctaccccagagcctgtctcttatggctttctatggtgcccaatttgtttgtgccaaggagtgcctgcaggccagtgtggagctgccctcagcaccccctcggcctccctcctgtgctggtcagtgcccaaagtctggagagggctgaggcagcagggggctggcatgtcagcactgcctagagtgcgcacacacacggccaggctgtgatagcacctgggyttggccccaaccttgctctgagattggagtgggcgctgggagtgtggagaagccaggcagaaggagcagacccctctgagcctgtggggggacgggggtcttcctgggaccctgagagtgcagatatgcc

SEQ ID NO: 952891 - DNA, 606 bp, Homo sapiens
ggctgggacacagggcatcaagtccctagactgcactcagcacagggggcctgtcccactaaaccattttctcttaggcctctgggcctgtgatgggaagggctgcygtgaagacctctgacatgctctggagacgttttccccattgtcttggagattaacattcggctcctagtaacttttgcaaatttctgcagccagcctgaatttctcctcagaaaatgggtttttcttttctatcacattgtcaggctgcaaattttctgaacttttatgctctgcttcacttgtaaaactaagtgcctttaacagcacccaagttaactcttgaatgctttgctgcttaggaattttttttaccagataccctaaatcatctctctcaagttcaaagttccacaaatctctagggcaggggcaaaatgctgccagtctctttgctacaacataacaagagtcacctttgctccagttcccaacaagttcttcatctccatctgagaccacctcagcctagaccttattgtccatatcgctatcaggattttggtcaaagccattcaacaagtctctaggaagttccaaactttcccacattttcctgtc

SEQ ID NO: 952892 - DNA, 701 bp, Homo sapiens
gcattcctgtagtaccagctacacaggaggctgagaagggaggatcacttgagcccaagagtttgaggctgcactgagctgtgactgtgccactgcactccagcctgattgacagagcaagaccctgtctcaaatatatgtggaggaccagtgcctttaaattgctcatccaagtgccagcaaatgctcttctgcacaggggagggatgagaccaaaggaaaacctggcactggcattgcccggagtatgtgaggagaaggacctcgccaggccatgtgtgaagagcattggcagagcccctgccatggctaagtcctggtgtcccctgcaaagcagggccttgatgctccagtttcctgtccctttcctttcctctgcaaacggtcagggctctgacccgcagcgcccggccccaccccggggctgtcttgtgcagaaagcaaagcagagtgtgcctctcctcaccccacagtaccgaggagagcaggcaggcaggaggaggaggaggcaggagctcagagatccttaggagcccccgacgaggtgcccccagtctccaccaagacggccgaagctctgagcctttgatgcagacctcaggaygtctgcagcttcttcagtgccaattaccagaaaataattcagcgtgctcaccccctgcctctcagcggctgctctttggagacattttaagtctgac

SEQ ID NO: 952893 - DNA, 597 bp, Homo sapiens
ttagctcctccctcgctacccactattggctttcttccctaaaggctaaaaagaaaccagcgctttgcagagactggctccacttctgatatcaaccaaacacctgatggtaccccttctttttgtggttataataaaacaaccaaccagccttccttccttataagacagcactgaccatgaaggatgcatggcaagagtgtttgggtcctcttcttaaacttttgataacagtgggtcaaagactccacccttggataatgctaacactgccagtttttgaacttgggatccgtggagagaggcatgaaactcaactgcgcatgcacgtttctcctttcataaatattcataactcctcctatagcttaatgagtatgtatatttggtcaccccattcagcataaattcttgtcttattcttttcacacttgaagtgactgtgttcagattccggctggccctgtgcttcccagcctgtttgccaccctgcaggctgcaaacccttgatgggaaataaagctttcctttccaaacgtatgaayctcatcattctttagttgacactgtgtaaccttgggaaagttacttaaccta

SEQ ID NO: 952894 - DNA, 556 bp, Homo sapiens
atgaaagacattgagttgcytagctaagccagcttcaaatttctgaccacagaaattggatgataataaatgtttgttctcataaaccactacatttgagataatttgcagcaatatgtaactaacacaggcagagacaggtcacacttaagggaataaacaataaataataaatttgtgaaaaattaagaatattgtagactttattaataattaattcaagaaaacacaatataaaagttcagaaggtgaggaatatctggaaagtctagaagtgcatgatttcacaaggagacaattatatgttattaaggaacacaaacaggtgtagaggatatatattttctttaaagaaatagggtgtgaacattttgagaaatgtttatgcacaatagaagataatattctatgtttacagatagtaaatgcatttgcggatctccaaaatttttcatggattcctaaaaaagtgggtcatatcaccttcaggaaataaagatttggccagtcataaaaatctttactgtgttaaccaaaacgtatctgagacaagtct

SEQ ID NO: 952895 - DNA, 636 bp, Homo sapiens
atgtatgtgtatttgaaaagtcattttatcagttgatatagtttggatatttgtcccctgaaaatctcttgttgaaatgtgagcccccatggccgggcgcggtggttyacacctgtaatcccagcactttgagaggcccaggcgggcagatcacaaggtcaggagatggagacaaacctggctaacatggtgaaaccctgtctctactaaaaatacaagaaaattagccgggagtggtggcgggcacctgtagtcccagctactcaggaggctgaggcaggagaatggcgtgaacccaggaggcggagcttgcagtgggccaagatcgtgccactgcactccagcctgggcgacagagcaaaactccgtatcaaaaaataaaaaataaaaaaaaaagaaatgtgagcccccagtgttggagtgggtcctagtgggaggtgtttgcgtcacaggggccgatccttcgtgaatggctggacgtcctccctgtagttatgagtgacttctcacactactattagttccctgaacagtcagtttttcctctccacaatctccacactcttgctccctctgttgccatgtgacatgccagttccccttgacttctgccatgagtaaaatcttcttgagtgc

SEQ ID NO: 952896 - DNA, 605 bp, Homo sapiens
tgtgctggtgggcgtgttttagcaggatgggctaacttcatggcrcagcagcaggcaggagggaagtctcagtaggctgggaggggacaggatctgattaacatacagattgctttggctttagaaaggagcatggatagtttatctactatgtcagaagagaagatgaagtatatgatcacagaggcagagaggctgggatatatggtggaggatatggaagttctcttctgaatacttttgttagtgaaataggcaagatcatcagctaaaagtgaaaatgagaaagggagtatcgaagattggaggagagaagaaaaagggtgatagagttgttttagagactgaaaggatagactgactagggaagtgtagtgggactctaggcggcattacagacctacttcaagtttgtggtcatgaatttaaagtgagaccagtcatcatggagctgcctcaactccttgcttgccggtgccaaggaagtggaaaggtggatttaaacagcatagggatgtgaaggtaggagaaagaggtgagggaattgaggtggttgaagtggtaggaaagggagtgggtgttatgatgggatcaaagccaggtaa

SEQ ID NO: 952897 - DNA, 457 bp, Homo sapiens
cgcccccccaaccttcttttcctcctgctccagccatgttaagacatgcctgcttccacttcgccttctgccatgattgtaagtgtcctgaggcctcctcggaagctgagcagatgcaggtgctrtgcttcctgcagagcctacagaaccctaagccacctaaacctcattcctttataaattacccaatctcacgtatttctttatagcaatgcgagaacgaactaatacaaagaggttgtagagaccaaggttttatcatgcagatgaagcctctaggtagcaggtttcagagagaacagattgtaaatgtttcttatcagaattaaggtctgtgtggatgttaaatgctggtgggcttttcctgaattccaaaagggagaagggcataatgaggtaatgaggcatgtctgaccccaatccccttttgggtcatggcttgaaccagtctttgggt

SEQ ID NO: 952898 - DNA, 457 bp, Homo sapiens
cgcccccccaaccttcttttcctcctgctccagccatgttaagacatgcctgcttccacttcgccttctgccatgattgtaagtgtcctgaggcctcctcggaagctgagcagatgcaggtgctgtgcttcctgcagagcctacagaaccctaagccacctaaacctcattcctttataaattacccaatctcacgtatttctttatagcaatgcgagaacgaactaatacaaagaggttgtagagaccaaggttttatcatgcagatgaagcctctaggtagcaggtttcagagagaacagattgtaaatgtttcttatcagamttaaggtctgtgtggatgttaaatgctggtgggcttttcctgaattccaaaagggagaagggcataatgaggtaatgaggcatgtctgaccccaatccccttttgggtcatggcttgaaccagtctttgggt

SEQ ID NO: 952899 - DNA, 457 bp, Homo sapiens
cgcccccccaaccttcttttcctcctgctccagccatgttaagacatgcctgcttccacttcgccttctgccatgattgtaagtgtcctgaggcctcctcggaagctgagcagatgcaggtgctgtgcttcctgcagagcctacagaaccctaagccacctaaacctcattcctttataaattacccaatctcacgtatttctttatagcaatgcgagaacgaactaatacaaagaggttgtagagaccaaggttttatcatgcagatgaagcctctaggtagcaggtttcagagagaacagattgtaaatgtttcttatcagaattaaggtctgtgtggatgttaaatgctggtgggcttttcctgaattccaaaagggagaagggcataatgaggtaatgaggcatgtctgaccccaatccccttttgsgtcatggcttgaaccagtctttgggt

SEQ ID NO: 952900 - DNA, 457 bp, Homo sapiens
cgcccccccaaccttcttttcctcctgctccagccatgttaagacatgcctgcttccacttcgccttctgccatgattgtaagtgtcctgaggcctcctcggaagctgagcagatgcaggtgctrtgcttcctgcagagcctacagaaccctaagccacctaaacctcattcctttataaattacccaatctcacgtatttctttatagcaatgcgagaacgaactaatacaaagaggttgtagagaccaaggttttatcatgcagatgaagcctctaggtagcaggtttcagagagaacagattgtaaatgtttcttatcagacttaaggtctgtgtggatgttaaatgctggtgggcttttcctgaattccaaaagggagaagggcataatgaggtaatgaggcatgtctgaccccaatccccttttgcgtcatggcttgaaccagtctttgggt

SEQ ID NO: 952901 - DNA, 546 bp, Homo sapiens
gtggctacctttctgattcttttccatggactcatctttaccttcactggaagaaacatctcatactaaattgtatacttaaaaataacattagaaactgtacatctaaaagcatcttaygaatggaaagaatatgttttccttaaaatgacttcatagaaggatttaggttattagtaaattaagtctttttattattagaaaatgaaaatatatactgtggaagcattacggtgagtgctgcagtatccatactcagacatctaggttttaatataggttacaccggttactagcctctctgcctcaatttcctcatttgcaatataaggataagaatagcacctcccatttaagattctttatttatttattttttttgagatggagtcttgctctgtcaccaaacctggcatgcaatgggacaatcttggctcactgcaacctccacctcccggggtcaagcgattctcctgcctcagcctcccgagtagctgaaactacaggcatatgccaccatgcctggctaactttttgtattttttt

SEQ ID NO: 952902 - DNA, 600 bp, Homo sapiens
ctcaaactcttatgaaagctgagagtggtgatcatgtaccagctaagagaaagagcccctggctcagtctctttcaaaatggctgctgtttgaatcatgtcaaaaaccccaatgtcctgtcatagcccccataattccaatttggttttgaatgcaactatttttatctggcgacttgaacacagttgttgttccgccctgaagtgacataatgagttctttgagcaggtcaaacaagtaagcaagttttgcaacccattctgtgtcactgaaatgttctgccaattgtaactgtttttctaaaagaaatctctagagcacctctcaagactcaaaaactctgaccagtgatctacatttagaaaggcatctcactactatgtataagagaagatgtttgtgctctgtgtccatctcacagagctgtgcaaacagacatgagttaaggacatgtactttaatgtggttgacaactgaaaagcactgttaagttcaggtgaattgttttggctagccagcatttctctatggatgacacagtgcatagactcgcattcaraagtgaccgctttgacctgagtattgaaatcagaaagctgt

SEQ ID NO: 952903 - DNA, 643 bp, Homo sapiens
gaggttgaggcaggagaattgctttaacttgggaggtggagattgcactgagctgagatcacgccactgcactccagactgggcaacagagtgagacttcgtctccaaaaaagaaagagagaaagaaagaaagaaagagagagagagaaagaaagaaagaaagagagagagagaaagaaagaaagaaagaaggaaggaaggaaggaaggaaggaaggaaggaaggaaagaaagaaagaaagaaagaaagaaagaaagaaagaaagaaagaaagaaagaaagaaagagaaaagcaaagcaaagcaaagaaaagaaaagaaaagaaaagagaagaggtgcaggccacaaaatttgaggaaggcagagaagggggtggtcattttgtactggatgatcagaataagtcctgacaaaggagatggggtttgtctaggccctgaaaaatagggagagatgagatttaaatatcaggaaagaatgaagaaagggagttcccagcaatgagagcaggatgaastaaggtagagagagggtttgaaagttcaaaatgtattggaaactctgaggagacagaagtagagagtccctaaaacagcaaggaaaggtaagtttgcaaggacaggatgagaccagattttggcagg

SEQ ID NO: 952904 - DNA, 719 bp, Homo sapiens
taggatgtgtgtgacccatgagagatggactggcctcctttccttgggtcaactgcaacttattggagatgtggataaaccacttaggttttctgcctcttcattagtgcaagggtggcaagggcagtagcagagaggctttcagttgcccctgaaggctctgtccagggagttggtgagtttgctgctggctcaatagctctggcagggggcggctggaggcctaggcctggaggacctgcgtggtgaggagatataagaacaaccacccacctaacaatctggctaattttccacagggttgctgcagtatgttgggggcccattccagtctctagtcacctcaaatttttcagtacctggcaatatcaacagtgaggcctacaaaacagcaaagatggcagcctgcccctccttctgggagcttcatcccagggacattcatccctgttgctggcttaaacacacctgtaggagggggctggagacgccagttaggagatctctcctagtaaggaggaacgggattggggacctgcttcaaaaaacagtctggccatgttttagtggagcatctgtgctgtgctgggggtccacttcaacccccagtcaccttgcacactccaaagcctgaagactggaacggctaagtcgcccaaacagcaacaaygatggcctgcccctccctctgggagctctatcccagggaggttacaaat

SEQ ID NO: 952905 - DNA, 562 bp, Homo sapiens
ctggcagccctgcagcccttgctcgctctcggtgcctcctcggcctcggcgcccattctggccgcgcttgaggagcccttcagcccaccgctgcaccgtgggagcccttctctgggctggcctagtccggagccggctccctcggcttgcggggaggtgtggagtgagaggcactggcgggaaccagggctgcgcgcggcgcttgcgggccagcgcaagttccgggtgggcgtgggctcggcgggccgcacttggagcgggcggccggccccgccggccggggcagtgaggggcttagcacctgggccagcagccgccgtgcttgatttctcaacaggccttagctgcctccccgcggggcagggctcgggacctgcagcccgccatgcctgagcctccgccgcgccgccgccgtgggctcctgcgcggcccaagcctccccgacgagcgccaccccctgttccacggcgcccagtcccgtcgaccgcccaagagctgaggagtgycggcggatggcacgggagtggcaggcagctccacctgcggccctgcgcgggatcca

SEQ ID NO: 952906 - DNA, 562 bp, Homo sapiens
ctggcagccctgcagcccttgctcgctctcggtgcctcctcggcctcggcgcccattctggccgcgcttgaggagcccttcagcccaccgctgcaccgtgggagcccttctctgggctggcctagtccggagccggctccctcggcttgcggggaggtgtggagtgagaggcactggcgggaaccagggctgcgcgcggcgcttgcgggccagcgcaagttccgggtgggcgtgggctcggcgggccgcacttggagcgggcggccggccccgccggccggggcagtgaggggcttagcacctgggccagcagccgccgtgcttgatttctcaacaggccttagctgcctccccgcggggcagggctcgggacctgcagcccgccatgcctgagcctccgccgcgccgccgccgtgggctcctgcgcggcccaagcctccccgacgagcgccaccccctgttccacggcgcccagtcccgtcgaccgcccaagagctgaggagtgtsggcggatggcacgggagtggcaggcagctccacctgcggccctgcgcgggatcca

SEQ ID NO: 952907 - DNA, 743 bp, Homo sapiens
acctcctaataaagaaaaaaagcagaaactatgtgaggtagtggtgtgttaatttagcttgattgttataataatttcacaatatatactacgccaaattatatattgtatacactttaactgtatacaacttgaattttctaatcatgcctcaataaaacttggaaaatataaaaaatcggggatagggagtgagtttagatgactttttaaaagagtgttgctgtaaaggcagcaaatgagattgtagctgggagaagacgtgggtttaagagaaaggtttcaaaaatgagatgtatcacagaatgctgatgaggattctccagtaaaaagaaataagtagtgattcacaagagagtagaatttctatagtgttatccttaaaaggacagagaagttgacacacagttcacaagtggaggggtaagagcaaggacagtttatccatagtcactaaaaagaaagcataatatgtatgcacgatactggtgggcaaggagatgtgggaagcacatagacattctcttctgatggcctagattttcttaatgaaatagaaagcaagggcatcaattgagagggaggataggaaggaggtgaggcaatttcagtaaagagaaggtgagaaatggtcttcttggagagygggaaaatagatggaaaggacatgtggtaggattgttgaacagcaccaaagatcagcttgaatttggagaagccaacttggtgacgtagttttggtc

SEQ ID NO: 952908 - DNA, 770 bp, Homo sapiens
atcttaagcattcacacctcctaataaagaaaaaaagcagaaactatgtgaggtagtggtgtgttaatttagcttgattgttataataatttcacaatatatactacgccaaattatatattgtatacactttaactgtatacaacttgaattttctaatcatgcctcaataaaacttggaaaatataaaaaatcggggatagggagtgagtttagatgactttttaaaagagtgttgctgtaaaggcagcaaatgagattgtagctgggagaagacgtgggtttaagagaaaggtttcaaaaatgagatgtatcacagaatgctgatgaggattctccagtaaaaagaaataagtagtgattcacaagagagtagaatttctatagtgttatccttaaaaggacagagaagttgacacacagttcacaagtggaggggtaagagcaaggacagtttatccatagtcactaaaaagaaagcataatatgtatgcacgatactggtgggcaaggagatgtgggaagcacatagacattctcttctgatggcctagattttcttaatgaaatagaaagcaagggcatcaattgagagggaggataggaaggaggtgaggcaatttcagtaaagagaaggtgagaaatggtcttcttggagagcgggaaaatagatggaaaggacatgtggtaggattgttgaacagcaccaaagatcagcttgaatttggagaagccaacttggtkacgtagttttggtccagttacattca

SEQ ID NO: 952909 - DNA, 770 bp, Homo sapiens
atcttaagcattcacacctcctaataaagaaaaaaagcagaaactatgtgaggtagtggtgtgttaatttagcttgattgttataataatttcacaatatatactacgccaaattatatattgtatacactttaactgtatacaacttgaattttctaatcatgcctcaataaaacttggaaaatataaaaaatcggggatagggagtgagtttagatgactttttaaaagagtgttgctgtaaaggcagcaaatgagattgtagctgggagaagacgtgggtttaagagaaaggtttcaaaaatgagatgtatcacagaatgctgatgaggattctccagtaaaaagaaataagtagtgattcacaagagagtagaatttctatagtgttatccttaaaaggacagagaagttgacacacagttcacaagtggaggggtaagagcaaggacagtttatccatagtcactaaaaagaaagcataatatgtatgcacgatactggtgggcaaggagatgtgggaagcacatagacattctcttctgatggcctagattttcttaatgaaatagaaagcaagggcatcaattgagagggaggataggaaggaggtgaggcaatttcagtaaagagaaggtgagaaatggtcttcttggagagcgggaaaatagatggaaaggacatgtggtaggattgttgaacagcaccaaagatcagcttgaatttggagaagccaacttggtgacgtakttttggtccagttacattca

SEQ ID NO: 952910 - DNA, 565 bp, Homo sapiens
ctgccaccacacccagctaattttttgtatttttagtaaagatggggtttcaccatgttaggcaggatggtctcaaactcctgaccttgtgatccgcccgtctcrgcctcccaaagtgctgggattacaggcatgagccactgcgcctgaccccagaaatttgattttaatggctgcataatatttcatcacagggacgtgatataattcaccctttccccaactctgaacaatttcaagtgtttctgtaccataacaaacactgctgcacacttccttgtgtgggaatcattgtttgtgtttattattgccacaggtagcctgactgatctatttcttcagcttggagtaaaaatgtcacctttcctttgttattcataatttctgcctaaccataccctgccattactaccagggggtccagcacctccctgtgggtgtcaaaaagcaccccaggagttcactcagaggagtcagtcaggtggagagagggagagactggggagctagaagcatccactggcacgatcctgtgagttacggcacacagtgcagtccctgccct

SEQ ID NO: 952911 - DNA, 469 bp, Homo sapiens
aacagttttggcaatcattgagtggaaagtttgcttaacttcaatttttcagtcagaattgtgcaagctgagccaattgagatgtttatgctattggctattgtttctgctgttaatttcagtcccctttatttggggcacaaacaagatgaattttttcctcaaaaaatgacatgaattgtctgcccctgcaggcttcatcttcaatattgtctcgtcccgttttaaaattagttttccatttataaaccactgaatcctttgagacattgcccccataaacttttcttaatgtatcaatcattttaccattcttttatacaggatctaccataaattygatgtttgctcttgcttcaactttagcagaattcctgttgctctgataggggctcttttcaaactaatgtcttatccttctctttgtgcttcaagctagatgcaactagatcctgttcaaatatgttgt

SEQ ID NO: 952912 - DNA, 469 bp, Homo sapiens
aacagttttggcaatcattgagtggaaagtttgcttaacttcaatttttcagtcagaattgtgcaagctgagccaattgagatgtttatgctattggctattgtttctgctgttaatttcagtcccctttatttggggcacaaacaagatgaattttttcctcaaaaaatgacatgaattgtctgcccctgcaggcttcatcttcaatattgtctcgtcccgttttaaaattagttttccatttataaaccactgaatcctttgagacattgcccccataaacttttcttaatgtatcaatcattttaccattcttttatacaggatctaccataaattcgatgtttgctcttgcttcaactttagcagaattcctgttgctctgataggggctcttttcaarctaatgtcttatccttctctttgtgcttcaagctagatgcaactagatcctgttcaaatatgttgt

SEQ ID NO: 952913 - DNA, 581 bp, Homo sapiens
aagaacctacattgaaatattggggttgggttcccccgataccctagtaccgtttattaaatasgaagttcattccccactgctcatttttgtcaacttttttgaaaatcagatacgtagttataggtgtatggcttatttctgggctctctagtctgttccattgatctatgtgtctgcttttgtaccatgaggtccatgttgtaccaacaggtccacgttgtaccaacaggaccaagctgttttagttactacagccctgtagtatagtttgaagtcgaggaacgtgatgcctcctgctttgttgattttgtttaggattgccttggatattcaagttcttttctggttccatataaattttaaaatagtttttttctagttctgtaaataatatcattggtagttggataggaatagtattgattttgtaaattgctttggacagtatgaccattttaaccatattaatttcttcctatccatgagcatgaaatgtttttccatttgtttgtttcatctctgattttttaagcaatgtctggtaattctcattgtactgatctttcaactccctggtt

SEQ ID NO: 952914 - DNA, 435 bp, Homo sapiens
aattgttgctagatccagtgagaaaaactatccggtatggtacctttgcctgctattattcttctctatttatctttattagtattctagagttattaagaatagattataattgaaatacgagaagtcctgggaaaacttcatgggcagccacctaaccactttttttatattctaccgaaactggctttaaggaagaacgatcagagtacatactttaattacaagcagaagaacagagtaactttaactttatgatattcagtatttttttattctaatctttatgtgaccctgaaaatttgaattcaggctgggtgtggtggctcatgcctgtaatcccagcactttaggaagcccaggtgggtggatcccctgaggtcaggaattcaagrccaacctggtcaacatggcgaaaccctgtctcaattaaaa

SEQ ID NO: 952915 - DNA, 723 bp, Homo sapiens
ttcagctgataaacaacttcagcaaagtttcaggatatatcaatgtacaaaaatcactagcattcccgccaggtgtagtgtctcatgcctgtaatyccagcactttgggaggctgaggtgggtggattgcttgagcccaggagcccaagaccaccctgaaaaatatggtgatactttgtctctacaaaaaataaaaaattaggtgggtgtggtggcacgcacctgtgttaccagctactggggtggctgaggtgggaggattgcttgaacttgggaggcagaggctgtagtgagccatgatcttgccactgtactccagcctgggaaacagagcaagatcttgtctcaaaaacaaaaaaaattttactagcattcctatacaccaaaaacagccaagctgagagcagagtcaaaaatacaattcaattcacaatactcacaaaaataataaaattcttaggaacagctaaccagggagttgaaagatcagtacaatgagaattaccagacattgcttaaaaaatcagagatgaaacaaatgggaaaacatttcatgctcatggataggaagaaattaatatggttaaaatggtcatactgtccaaagcaatttacaaaatcaatactattcctatccaactaccaatgatattttttacagaactagaaaaaactattttaaaatttatatggaagcagaaaagaacttaaatatccaaggca

SEQ ID NO: 952916 - DNA, 610 bp, Homo sapiens
ctgagaaacagcatcgggtccttggatgggttttctagggaaaatgcatgaccaatggcctaagcgtggctggacctagggtaggaaaagaatggaaggtagctgaggatggagctttgggaccctgtgtagcactgtggttaagatctcaggcatggttagcaacaaatggcatggggatcctcaacacctgtcgggtatctactatatgccagtctaggaatttcaacaatgaacaaatagacccattccttctcttcatggacttacaactttgtggggcagatggtgtggagcaaatgatcacagaatcctcaactcacattgggtacatgttatgtagggaagtaaagggtgcaaagatttggattagagaggctgggccagggagggcttctctgaggaggtgagccttcagccagggctctgaggctgagcaggagtcaaccaggcagagggacagtatgtgtcagcacagaggtccgaggaggctcaagtatttgaggaaagtggaagaaggccaccgaggtggcagtggtgcaacatgargctgggaagatgggagggtgagagggtgggctgggccaaacagggccttgtagatgagggt

SEQ ID NO: 952917 - DNA, 591 bp, Homo sapiens
ctggttgacaattgattgagtttgtctaaagacttgggatcaatagaaaggaatgcttgggttgtgatgagaagtygcagaaaccaaaaagttttatcatgcaaatgatgaagcttttagctagcaggcttcagaaagaacaggctgtaaaatgtttcttatcagacttaaagtctgtgttgatgttcatgccagagaggtataatgaggcgtgtccaacccccacttcccttcatggcctgaaccagtctttcaggttaaattttaagagccctggccgaggaggaagtccatttagatggttgagggggccttagaattttatttttggtatacacttttatccccacaattccaataaaatgacacttgaaaatatcaacaataatatgattcatggtcccagtcaagttaacattttccatcttactgttacttcaaccttttaagcagcatatgtatatctgaccaagctcctcttgaaacactctcctatttcagcttctgtgaggccactttcacctgttttttctcctacctctctacacactttattgacttgtcctgttatggttgttattcctcgataag

SEQ ID NO: 952918 - DNA, 663 bp, Homo sapiens
ctgactgaacaatggttaggctgctgaagatccagttgtgacatgagttgggagacaactcctaaattttgtagggttttgttttgttgcattatacttggccagattatttgtgtaaagtgcagcaaaaataattattttttacataggtgttttaaattagctttgatggaactttgttccatagaaggatcctcaaacaatacttttttaaagctgagcccagccatggatttgtattatcaaatacctgtgagttgggtaaactcctctcctcttgaggtcgcaagataacttagggctcctgggcctaagttatatatatatattatatatgtacactttatatatataatatatatagtatatgtataaagtatataaagagttctggggtacatgtgcagaacatgcaggtttgttacataggtatacatgtgccatggtgctttgctgcacccatcaacccttcatctccattaggtatttctcctaatgctctcccttccccagctccccacctcccaacaggccccagcgtgtgatgcccccctcccatrtccatgtgttctcattgttcaactcccacttatgagtgagaacatgttgtgtttggttttttgtttttgtgttagtttgctgagaatgatggtttccagcttc

SEQ ID NO: 952919 - DNA, 481 bp, Homo sapiens
tccatgtgcagggagcatggcaaaccccaactccatgaggacagagcttccgcacttccaaactttgctttgtgtacccccttatctggctgttcatgtgttttctttaccatgtcctttataatgaactggggtcttagtcctttcaggttgctataaaaaaataccatagactgggtaacttttaaacaacataaatttgttgcatataattctggagcctggaaagtccaagatcaaggcactggaagattccatgtctggtgagggctcgtctctcagagatagtaccttctagccatgtcctcacatggcagaatagagaaacaggctccctacagactcttttataagggcacttgtgccattcatgagggcagagccttgattattggggaaatctgtccccagtatttcagtgtaggttctttctgtytttcataagtgtcggccggctgagaaataaagacagacagtacaa

SEQ ID NO: 952920 - DNA, 632 bp, Homo sapiens
cttcaggcagggcccatgctatggcctggrgccccctttgacctcatctgctccacttgcctcttgcttgctgctggtcttttcttccctgaacccaccgtcctgttcctgcctctcgcccttggaagtgtctggtcctgctgctcttctccctgttaagcatgtgacaaggaatcgtatgcttcaggtcacaggttgaaagcccccttctcgggaagacctgccttgtcttgtccacccaatataagtgtctacttggtcactagccactgtcactggtcgtgattatcttaccatctgccattttctcatttatttgtttgttttcagttaatagaacattgcttcaggagagcaaggaatttgtctgcagttgccccttatttcctcatgcctagcacagtgtccagtgtttatgggggccccatattgaatgtggaattttgttttttttttgagacagggtttcactctgttgcccaggctggagtgcagtggcatgaccacatctcacttcttccttgacctcttgggctcaagtgatcctcccacctcagcctcctgagtagctgggactgcaggcatatgccaccatggctggctaatttttttattttttgtagagacatggg

SEQ ID NO: 952921 - DNA, 622 bp, Homo sapiens
cagagttccacggggatgatgtgcccaagactgtcctggggagacgcccccccgccgccccggcaccccaccttcttcactctgtgaggagcaccgacctctgagttcattccacctcctacaggcaaagatttacaaaatggccaataaacataagaaaaggtgctcaacgtcatgaatcatcagagcaatacaaattaaaaccacagtgagtgcactacacgcccaccgaaacgggaatgtttttaaaatgaccataccgagtttggcgaggtttacacgcgggcgggcttgtaaactctctcagctactgtggggaaatgtttggctgtaccttccgacgctaaatatatgcccctcttgcaacccactcctgtggctcgatccagggagaaatgagggctgacagccgccaacagatatcccaagaatgtttacagcagccttatttgtaaatcagaaacaacccacagatccatccacagaagaacgggtaaatgaattaaggctcgtccgcgcaacggaacaccacacggcaatgaaaacggcaatcctccgtgggtacacgcaayaagcctggatgccacagacgtgacattgaatgaaagatcaccagacgcaa

SEQ ID NO: 952922 - DNA, 688 bp, Homo sapiens
gcaagctggggtttcccaggaatctctctgacaaagtgacaagaagtgttctacccagaccatgtaaatgctacttcatgaaacccacacgatgggctcgctcaataaattgatatgtaaacccatccccaagggaagaacagatgacaagggaaaccacaaagagaggcaaaatgagaactctgtggggctctctccccacaccgagacccctgccacaaaatggaattcagaggcctgttttttacatctgaacaaagccaatgctgaatcccagcaaagggtctgaagaatagccctggccagtttatgactgccagtgatagtgctgtaaaaatagctttcaagacacaactcagggtggggggctgtgagccagaaacagaaaatggaaactgagcccttttgtgccccagaagtataaacaaagggctttctaagccaccagcccaccttgacctccatactggaagaggtggggcatgatgtactatctctagaacttacaggagtactcaagaaagcacaaagtgggctgggcgcggtggctcaagcctgtaatcccagcactttgggaggccgaggcgggcggatcacgaggtcaggagatcgagaccatcctggctagtacgctgaaatccagtctctattaaatatacaaaaaarttagctaggtgtggtggcgggc

SEQ ID NO: 952923 - DNA, 688 bp, Homo sapiens
gcaagctggggtttcccaggaatctctctgacaaagtgacaagaagtgttctacccagaccatgtaaatgctacttcatgaaacccacacgatgggctcrctcaataaattgatatgtaaacccatccccaagggaagaacagatgacaagggaaaccacaaagagaggcaaaatgagaactctgtggggctctctccccacaccgagacccctgccacaaaatggaattcagaggcctgttttttacatctgaacaaagccaatgctgaatcccagcaaagggtctgaagaatagccctggccagtttatgactgccagtgatagtgctgtaaaaatagctttcaagacacaactcagggtggggggctgtgagccagaaacagaaaatggaaactgagcccttttgtgccccagaagtataaacaaagggctttctaagccaccagcccaccttgacctccatactggaagaggtggggcatgatgtactatctctagaacttacaggagtactcaagaaagcacaaagtgggctgggcgcggtggctcaagcctgtaatcccagcactttgggaggccgaggcgggcggatcacgaggtcaggagatcgagaccatcctggctagtacgctgaaatccagtctctattaaatatacaaaaaagttagctaggtgtggtggcgggc

SEQ ID NO: 952924 - DNA, 581 bp, Homo sapiens
ccagtactatgctgaataggagtggtgagagtgagcatccttatcttgttccagttctcaaggggaatggttctagttttttggctattcagtgtgttgttagctgtgggtttatcatagacagctcttgttattttgaagggtgttcctttgatacctagtttcttgcgggtttttatcatgaagggatgttggattttattgaaagctttttctgtgtctgtggagatgatcatatggtttttgtttctaattctgtttatgtggtgaatcagatttattgatttgtgtgtgttgaaccaatcttgcctcccaggaataaagcctaattaatcatgatgagttaacttttcgatgtgctgttggattcagtttgctagtattttgttgagaatttttgcacgtatgttcatcggggatattggcctgcagttttattttttttgttgttgwtgtgtctttattaggttttggtatcagagtgatactaactttgtagaatgagttagggagaagtccctcctcctagatttttgggaacactttcagtagaattggtactagctctcctttgcacatct

SEQ ID NO: 952925 - DNA, 569 bp, Homo sapiens
gtgatttccaaggttatcctgagtctcaatatccagcaggcagattggaaaagagggaacatggagtatctgtcttagtctgctcaggctgccrtaacaaaataccgtagacgactgggtgacttaaacaacaggaatttattttctcccagttctggaggctggaagtctgagatcaaggcatcagcagggtcaggctctggggagggctctctccttgggttgcagatggctgccttcttgctgtgtcctcacttggcctttccttggtgtgtgcatgtggaatgagaaacacttctcttcctcttcttgtaaggccacctatcctattggctcccggcgctattcttttgacctcatttaactttacctcctaaaagccctatctccaaacatggtcacaccgggattaggccttcaacatgtgaattctggggtgcattcagtttatagcaggccacctgggaaggttttatgagtcaggcttggaagcagtataaacgctttggcccatattccactgacggtacctcagtcccattgcacccaactgcaagggggctgagaag

SEQ ID NO: 952926 - DNA, 449 bp, Homo sapiens
catgaaaatgtatgtatgtacaaggttttcatcacaataccatttaaattgtaaaaaaataggcataagaaaaatttctatcaataagagattgaataaattttagtacagccttataatggaacagtaaagtgcatttaaaatggtaatgtaaagttacatttactgacatcaaaagattctaaaatatttattgagtgaaaaagcaggttaaaaagtataaatacactaatatatatataaaattatatgtatgtgtttgcgtatatatatatatatataacttgttcaacagcactgactctagagtcaagcaaatttgagtatgaccattagcttcactatttactagctgtctggcttygggcaatttgttaacttctttgtgtattgctgtgcacatttgtataatggggattatagtgcctacctcatgaaattttaatgag

SEQ ID NO: 952927 - DNA, 589 bp, Homo sapiens
gagatggcttgagaggcaagtgtcagaaattaagcaagtaaacaacagaacactgtgagccrttggtttgtaacatgacagctgcctgtctgtgcctcttactgtgtctgtgctctagatttcaacattctaccagataatgaacattttgcagaagcaaatgtcagaactcttctatgcaagcaaagacaggaaatttggtgaaatgataactaatggatgaaaaagtattgaaaacctataattacctgtgataagcaatatgttatgctttcttttctctgttctaaatctgccactgcagtttttcttgtctaatgcagtatttcaggcaggcattgcttttcaattatatatctcaagctgaagttcctgctgacggggagaacgaaagcacattttggttattatgtttttccttcccttcctcatagactccaagtgcctatatgctaatagaaacccaaatgacaggaagtccaaatggaaatgttattagaaagctatgggtatgtagttaatgaaatatgtatgattgcaataatgcaggacatgtgtaatattgatgggaactcaactgatctcaata

SEQ ID NO: 952928 - DNA, 660 bp, Homo sapiens
ttgataaaggtgtgctgaagtctccaactataataatggcattgtttatttctccttgcatttctactagtttttgtctctgtattttgacactctcttgttaggcacatacacattaaggattgttatgtcttcctggaggatagagctcttctcattaagtaatgcctttgacaattttccttctgaagtcagctttgtctgaaattaatatagctaccccagctttcttttgatttgtgttagtatagtttctatttttattaaccttttttttgtttttttttctttggcttctttcgatattttctttgtctttgatgttttgcagtttgaacatgatatgcctaggtacagattttggggagtatttatcctgtttgctcttctctgtgctccttgtgtctctggtggttgtcattctatggatctgtcaatatctgtcattcattttttaaaattttcagtaattattacttcaaatattttttctgttcctttttccctttcttctcctcctcatattcccattgcatgtattttacatctttggcaattgtttcacagttcttggggtgtgctgttccatttatttaattcttttttttctctttgcrtatttgtatgagtagtagtttctactgacctttcttcaagctc

SEQ ID NO: 952929 - DNA, 548 bp, Homo sapiens
gaatccacctggtccttgactttttttggttggtaggctcttamttattgtgtcaatttcagaacctgttattgatctattcagggattcaacttcttcctggtttagtcttgggagggtgtatgtgcccaggaatttatccatttcttctagcttttctagtttatttgcgtagaggtgattatactattctctgatggtagtttgtatctctgtgggatcagtggtgatatcctctttatcattttttattgcgtctatttgattcttctcccttttcttctttattagtctttttagtggtctatcagttttgttgatcttttcaaaaaaccagctcctggattcattgattctttgaagggtgttttgtgtctctatttccttcagttctgctctgatcttagttatttcttgccttctgctagcttttgaatgtattagctcttgcttctctagttcttctaattgtgatgttagggtgtcaattttagatctttgctgctttctcttgtgggcatttagtgctataaatttccctctacaca

SEQ ID NO: 952930 - DNA, 575 bp, Homo sapiens
ttgctttccttctaccttccaccatgattataaatttcctgaggcctccccaatcatgcagaactgtgactcaattaaacaacttttctttattagttacccagtctcagatagttctttatagcagtgtgaaaatggcctaatacagaaagttggtactgggagtagggcactcttataaagatacctgaaaatgtggaagcaactttagaactgggtaatgggaagaggttgaagcagtttggagggctcacaagaagacaggaagatgtgagaacgtttggaacttcatagagacttgttgatggttttgaacaaaatgctgacagcgatatggacaacgaaatccaggctgaggtggtctcaatggagatgaggaacttactgggaactggaattaaggccactgatatggtttggctctgtgtccccactcaaatcttaccatgaattgtaatccccacgatcccccacgtgtcaasggcaggaccaggtgaagataattggataatgggtgtggcttttcccatgttgttcttgtgataatgactgagtctcaggagatctgatggttt

SEQ ID NO: 952931 - DNA, 608 bp, Homo sapiens
gggttgatggatgaatgaaggacaccaataacagagaaagaaactgaagaggagatgcaagtttggggctagtaacgaggtagaataatggattttattttagacacatggttataggtctgtggtcctcaaaagtgctgattaccaaatatttctgcattttctcctgccaggcacatgtggtcctcaaaagtgctgattagcaaatatatctgctttttctcctgccaggcacatggtagactgcacttgcccacacgctttaaagggaggcatggccacacaacatgcttagtcaatgaaatatgaaattacgtcacttctaaacaaaaactttaagagataatacaacttctgctactttcccaccacatacatggaagtatgcatggagatgaatcctgagtacccacagtgaacacagatccctgaagacctcaagtggacgtggaatgtgattggcaaaagtacatatccrttgtgttaagaaactgaaatggggttgttactgaagaatgatatctggtctgtattaacagagccagggaacctatgggtcatactgataaagatatccaataggatctggattagaggtcaggagaggg

SEQ ID NO: 952932 - DNA, 731 bp, Homo sapiens
ccaaggagaaattgataaactgaataaacctgtatcaattttagwcattgaatcaatcagtaacttttccaaaaaaaaaaaaagcaccaggcttagatggttttactggtaaatcctaccaaattcttttttttttttttggagatggagtcttgccatgttgctcaggctggagtgcagtggcacagtgttggctcactgcagcctccaccacctgggttcaagttattctcctgcctctgcctcctgagtagctgggactacaggcatatgccaccacacctggctaatttttgtatttttttttttttgagacggagtctcgctctgtcgcccaggctggagtgcagtggcgcgatctcggctcactgcaagctccacctcctgggttcacgccattctcctgcttcagcctccccagcagctgggactacaggcgcatgccgccacgtctggctaatttttttttgtatttttagtagagacggggtttcactgtattagccaggatggtcttgatctcctgaccttgtgatccgcccgcctcagcctcccaaagtgctgggattacaggcatgagccaccgcgcccagcctaatttttttatttttggtagagacagggtttcaccatgttggccagtctggtctcgaactcctgacctcacgtgatctgcctgcctcagcctcccaaagtgctgggattaaaggcatgagccaccgtgcccagca

SEQ ID NO: 952933 - DNA, 430 bp, Homo sapiens
aatcagaggcacaagactctttgaccattatgcagtgagtggtataaaagagaaagtggaatccacttctgcatataaacccaaaagaattgaaagcagggtctcaaagaggcattcrtacacccatattgatagcagcattattcacaatagctaaatggggaaacaacgcaagggtccatccagcgatgcatggataaacaaaatgtcatctatccatacagtggaatactcttcagccttaaaacagaaggaaattatgacacatgctacaacatggatgaaccttgaagatattatgctaaatgaaatcagccagtcacaaaaagacaaatactgtgtgattctatttcaatgaagtgcccagaataggcaaattcatagacaggaaatagaatggtagttgccaaaggctacagggaaaggggag

SEQ ID NO: 952934 - DNA, 460 bp, Homo sapiens
gatatacccccataaaataaatacactgagtggctgttgggtttgtcttcaggtggaagggtctgatcctctgagcttccagatagggttcttgaatgatccacaccacatctgcttcagtgttgtccaagaagctggcacaaaagtacagactctcaggccccaccctggacatttcaagttagggtctctggggctggggccaggaatctgcattttgaaccagtccttccttctcccacttgcctgcccagaagattctagcagctcccaaagcttgagaaccactgctctgtacctctgcatcctctggagattttccaaaactcgtgtrtcttcttaaatcagttgtttttataatgactatgacacataaagccatgtgatataacaaaggctgagctggatgcagaaagggccttctgactacagcaggctttggaatgtggatttaatgagc

SEQ ID NO: 952935 - DNA, 460 bp, Homo sapiens
gatatacccccataaaataaatacactgagtggctgttgggtttgtcttcaggtggaagggtctgatcctctgagcttccagatagggttcttgaatgatccacaccacatctgcttcagtgttgtccaagaagctggcacaaaagtacagactctcaggccccaccctggacatttcaagttagggtctctggggctggggccaggaatctgcattttgaaccagtccttccttctcccacttgcctgcccagaagattctagcagctcccaaagcttgagaaccactgctctgtacctctgcatcctctggagattttccaaaactcgtgtgtcttcttaaatcagttgtttttataatgactatgacacatraagccatgtgatataacaaaggctgagctggatgcagaaagggccttctgactacagcaggctttggaatgtggatttaatgagc

SEQ ID NO: 952936 - DNA, 800 bp, Homo sapiens
ttacaggtgcccaccaccacgcctggctaacttttgtattttagtagagagagggtttcaccatgttggtcaggcmggtcttgaactcctgacctcgtgatctgcccgcctcggtctcccaatgtgctaggattacaggcgtgagccactgcgcccggccgctctctgacttttgataaattaatctgagaacttgattgcaagttttagggcagtgaaaggacaagaaagaaacagctttgataaaactcctagcagactgcctggcaagagggaaggaaactggccataatcctgctacggagggagccctttcccaaggaaacaaaggttgtggctacacattctctctctgcaggaaggggcagcctggtgtgtctatcgcatctgtttatctgggcctcaatttcctcatatggaaaacagagacagtgaattagatgttcctaatattctttggagcatcaacttgtccatgatttgggaatactggcatttttaaaacattcaacttagttattaagaaagagttaactttaaagcaagtccggctgaggcctgtctctaacagtttagattcctctccttcaggtcaccacaaatctgccatctgtccctgcagtccctccctgccatgcactgccctcctggagagctgggtggccctgggacctaccctcccaagtgccttcatggggcctcatcccgaagccgccatcaatcaggttatctgacatccttctgcctctccctgcccttgggcaaaacaccctggagtgctcttgggtcttgatgggtga

SEQ ID NO: 952937 - DNA, 662 bp, Homo sapiens
gactgatgttgagtgcctgtggcttttctcggtacagggtgcaagctgccagtggatcttctggggcctagaggacagtggccctcttcttacagctccactaggcagtgcsccagtggggactctgtggggggggctccaaccccacattttccctctgcgctgccttagcagaggttctccatgagggctctgcccctgcagcaggcttctgcctggacacccaggcttttccatacatactctaaagtctaggcctcaactcttgtactctgaacacccacagccttactacaatatggaagccaccaaggcgtacagtttgcaccctctgaagcagcagcctgagctgcacctgggcccctttgagccatggctagagctagagtgactgagatgcggggagcagtgtcccaaggctgcacagggcagcggggccctaggcctggcccatgaaaccattcttccttcctaggcctctgggcctgtgatgggaggagctgctgtgaaggtctctgaagtggcttccaggtcttttccccattgtcttggctattagcacttagctcctttttacttatgcaaatttctgcagcctacttgaattcctcccctgaaaatgggcttttcttttctaccaaatggccaggctgcaaagtttc

SEQ ID NO: 952938 - DNA, 682 bp, Homo sapiens
tcctcaaacaacatgggtttgggctacagagtccacttattcatggatttttttctgcctctgccacccytgagacagcaaaaccaatccctcctctccctcctcctcctcagccaactcaacctgaagacaatgagggtaaagatctttatgatgatccacttccatttaatgaatagtaaacatattttctctatgattttctttttttttttttttaatggagtctcaaataggtacacttgtggagtacattgtggaggtaggagacaggtacacaggctggaaggcaatggcgccatctcggctcactacaacctctacctcctgggttcaagcgattctcctgcctcagcctcctgagtagctgggattacaggaatgtaccaccatatctggctaatttttgtattttcagtaaagacagagtttcaccatattggtcaggctggtctcaaactcctgatctcaggtaatccacccgccttggcctcccagagtgctgggattaaaggcatgagccaccgttcccggcctctatcattttcttaatgacattttttctctagctaactttattgtaagaataccatatatgatacatataacatacaaaatatgtgttgatcaattgttcctattatccacaaaatttctggtcaatagtagactattagtagtt

SEQ ID NO: 952939 - DNA, 698 bp, Homo sapiens
cttgcactgtgtttggaaaaggaagctggcttgttcaggggtccccagcaggatggggggcgggggcagggaccatggcagagcgagagttctaggagagaagctggtccacccacaggctccctggcctgggtgctgtaccaggcagggtgctgggcattgtgctgctcacttcccacccctgggttgcaactgggggctgtgtggccttcccagtcctgttgtgggtgctgtgattgtgcccaccttacagatgggaaaactgatgctcagaggcttgagcaacctaggccaggacctgtccttagaggcagaagcaggactcagaggaagagcaccctgaccacaaagccccaggtgacttacactgcagggatggcgctctccggggtgtgcagggtggcagaggtgcctctgcagagagatccctgcctgggaccctttcctggggctcttctggtgctgggagtgtgagcaccacgaaagccccactacagtcatgccacccagagggcgctctggcctcttggtcacccgtgtccttctggcaatgaccaatacacttttttgccagggtccagaaagactcagccactggagtctgtrtttcctgagtcgcctctcactggtaagtcctgagccccgttccttcccagcacccactcttggagcagctctccagggctgtgctgtggctg

SEQ ID NO: 952940 - DNA, 565 bp, Homo sapiens
caatgccagatgggtctgggcgcaggaggcaggtgaagcccagggaatggccagagctttctaagccaggatggggcaacggcacccaagcagcagagggtgagcgctgtggctcatgcccataatcctagcactttgggaggattgcttgaacccaggagttcgagaccagcctgggcaacatagggagacaccgtctttgtgagaaatttaaaaattagctgggggtggtggtgtgcaccgatagtcccagctactggggggctgaggtgggaggattgcttgagcgttgagcccagttgccatctggacacgtccacttggaccacttccacttaggacaggttcaaagcacctccatggacctagtcccccagcctgtaggtcattattcacgatgacccccaaactagctgggaacccgaggcacctgcaattcttcacccttctctacaccccacattcaactagttaccgaagcytacccatgccaccttggagatgccacaagcttccatcccaactggcaggtcagggatatgaaccgccatctccctggccttcc

SEQ ID NO: 952941 - DNA, 605 bp, Homo sapiens
tggggggattggagggtccatggccaaaaccaggttttttgttctcctgcctttagtggcattggggcaggcaacaacagattaccgttcatctccaatacctggtcagaggaggtcatccttggcgagtatctaactggatgggggtggcgaccctgtgtggccttacattcaaggtttggagcagcaggatcaaccttgaactccagccctgcaaagacagggaagtaacatgcatgcattacctatttttcaggagtgcattacattgctcaattataccagcagcttgtaggttatatggaacctggaacctcccctttatgtccatccattgtgcccactgttgaacctactgtccagtaaaatgtgtttccctaccactttcaatggtcagagacaaccatatagggcacacaagtgtggcaaggcccgaatggtatgttgttggtctgccatcctacaagggtaggcaaacaacagacttgtggttgtttttayagccatcagcacatgtgtatgccccagtgaccttggcagacgcccaatgtagtctatttgccatctagtcaagggcatccgccctaccgtcacttattgtgtaa

SEQ ID NO: 952942 - DNA, 585 bp, Homo sapiens
ttaggagaattcatttttggtgtggaaaaactcacatatttgatgctaaagtactgtgagtaaaaagagccaaatatataatatacagagatgctatatccatattacatgtgygtatatgtatatagattgagattcaaaactataatactatactataaaatcaagtatgagaaattattaaatatgtatgtagataatattatactatgatactttgtagtatgtttcatatgagaggtgggactccaaaacttacagtaccttggattaacaaaaattccgaaagtcttgctagcaatctaattctaggccctaaaacctaacaattacaagggaagtatccctcccctctagatttgcaaacccaaccaaactatcaaccaaggcataaggatattatgaaaacatttttaggtgagacagaactcagacattttaagttaattttaagtttctgttagcatttgaatgctgataactaattacatttttcatctttctccaaagttagtagccagttaagaaatatatacaaaaagctgaatgatcaatttaaaagtgatctatgtcgttgacagtact

SEQ ID NO: 952943 - DNA, 585 bp, Homo sapiens
aggaatcgtacacttctttgattaagctaattcctaggtatttaattgcatttgtgggtattctaattgagattactttttaaaatttctyttttggattcttcagtgttgacatatagaaatgctattaattttgtatgttgattttataccctgcaactttactaaatttgtcagtctaataggtttttgatggggtctttaggattctccaaatataaaattatatcatctgcaaacaaggataatttgacttctctcagcctctcccagtggccaccacagccactggtcaactgggagttctgccaggccacccctgatgttcacttaaaccccaagtacccttcagtaagcttgtgttgaatgcttccaggcctgggccttacccttcatggcagtgggctcccctctggccgagggtaggtccagaaaggctttctaagagcctaggcctcgacttgagttcccaagagcctgcttggtgctctgcacccctgtgtctgagttggtgtttaacacacaacacaaagtcccctttacttttctctctgcttttctcaaacagaagtcttttgccataga

SEQ ID NO: 952944 - DNA, 585 bp, Homo sapiens
aggaatcgtacacttctttgattaagctaattcctaggtatttaattgcatttgtgggtattctaattgagattactttttaaaatttctcttttggattcttcagtgttgacatatagaaatgctattaattttgtatgttgattttataccctgcaactttactaaatttgtcagtctaataggtttttgatggggtctttaggattctccaaatataaaattatatcatctgcaaacaaggataatttgacttctctcagcctctcccagtggccaccacagccactggtcaactgggagttctgccaggccacccctgatgttcacttaaaccccaagtacccttcagtaagcttgtgttgaatgcttccaggcctgggccttacccttcatggcagtgggctcccctctggccgagggtaggtccagaaaggctttctaagagcctaggcctcgacttgagttcccaagagcctgcttggtgctctgcacccctgtgtctgagttggtgtttaacacacaacacaaagtyccctttacttttctctctgcttttctcaaacagaagtcttttgccataga

SEQ ID NO: 952945 - DNA, 583 bp, Homo sapiens
gtcccactcggccatgctggcatgccccaactggcctgtgttatagcttgtaycatgtttggtggttcctgagttcttgtaccatgcccaagaagaatgaggatactctgcacattgaaggatgagaagggcagaaaagaatattattgagtgctgaaaataactctcagtagaggggggatgtggggttggtcttcctacccaaggtgggtaagttcctccatatggctgggtccggggccttttatggactcagaatggggagtgaatgctgattggtttgtgagaatccaaaaaaggttaaaggaagacaccactcaaaggtgggcatgacagcatagaaaaaccaattaggaaagggtaggtaaatgtaaaataggtgaagggtggggaccaatcagaggaaagcgtgccaaacaggaagacaagttctcaatctgatccaaagatttaacctgtagcttggctttcaggctttaaactgtcttttgcttggaggtggggtttcactggggacccaccccatctgcctgggcattggctgcctcctgctgctgtcatgcccaatttctaaagaagtaca

SEQ ID NO: 952946 - DNA, 579 bp, Homo sapiens
aaaaaaataaataaataaaaataaaaaataaataaatatagacacaaaaaccctcaacaaaatactaacaaaccaaatccagtggctataaaaaacaattacataccatgaccaaatgaaatttatcccagggatgcaagattggattaacatacaaaagtcaatcaatgcactacaccacaccaatagaataaaagacaaaatccacatgatcatctcaacagacacaaaaaaagcatttgaaaataccaacatcctttcatgataaaaaatcacttaacaaactagtaatagaaaggaatttcctcaacctgataaaaagtatctaaaaaaaatccacagctagcatcaatacatcctgtaacaacatacagagcaaggctgaaggtttttatcctaatgtcaggaataagactagaatgtctactcttaccacttctattcaacattgcactggctattctagccaggrcaattaggcctagaaaagaaatttttaaaaagtatccagattggaaagaaaaaataaaactatccctatttgcagatgacataatcttgtaaatagaaaattctaag

SEQ ID NO: 952947 - DNA, 548 bp, Homo sapiens
ggcatgtctgggtgaactargattatccagcattaacccttgggtaatgagatactaacaataagatctcgccttccggataacctttgtttgctgaagttcttttgtatttaaattcttccctggggtagtgaagtggagatgtgggaccagggtgaggcagaacaagggagagaagctggtatgactggataggatgagcccagtgagcttcagctttcctccatctcaagtgtccaccaagagcttttagcatcagtgactgcccaggctacctctgctcctgtgactggtcattccagagagttctatcttcctgacctttctatttcaggacttgaagctgccctgcaggctctcaggggaaacctcagccccctagtctttggcaccttgcccatttctgcttgccctgtaacctggcttcataacccttattgttttctcttatgtttgcatataactccttaggtttcaaagcacttccatgtgttgccctttttttgtttgtttttgagtcgaagtctcactctgtcacccacactgga

SEQ ID NO: 952948 - DNA, 636 bp, Homo sapiens
ctacagttaactgagactcagttgcttgttacaagaatgtagtctcaaggtaggtttatatatatatatatatatatatatatatatatatatatatatatakgtttatatacatatataatgtatatatataaaacatacatataacatatattatgctttatttatatatattaggttatagtttgcttcatttagagacagcattaggccaaagtttaatttaacaattcccctcttttatcagcctttgaattttgagaaattgaccataacctaggtccaatttttttcaccatcataatggacttgtttggtctcagtataaaattcacaattcacaatgtcgaatttgttggattattctttatgttttcctgatatttttgtttttctaactataatgagattagttgatgtacaacggatggctccatatgagcatttgagactcttaagggaccaggcatggaggcttatgcctgtaattccaacactttggaaggccaaggtaggtggattgcttgagcccaggagttcaagaccatcctgggtaacatggcaaaaccccttctctacaaaaatatacaaaaattagctgggcatggtggtgcacacctatagtcccagctactc

SEQ ID NO: 952949 - DNA, 880 bp, Homo sapiens
cagtctaggttaggtcctgctgctcaccgcacagaaagctaatcgctgagacaatggatatcgccaaggaagaagacttcaattaagtgctacagccaaggagatggaagatcagtctcaaatccacctctctggaccagtaaaattaggggttatatagcagggaagaaatgtaatcctgtgtgggaaaacaggaattggggagggataagtaagaggaattggtcaatggaaagcaggtggtcagttaggcaatcatgatgggggtgaggggtctgacatctcactgtccaaatgaagtgatttggtgagtttcaactccttgctactatctgggaggtctgatggttggtttccagagaaaggaactcagacaaaacaagtataattttctcaagttttaaaactgggtggatccatttctatgtttagtccaggaaaccataaacgtcagctctatgggacaactgggtcagtttcacactaacattgacccagagcaacttccagtactgcaaactccattcatggtaagtgtcctatataagcacacaaatttttatcttttataccatatttttactgtaccttttctatgtttagatatgcttatatacacaattcttccccattatgttacaattgcctagagaattcaggacggtaacatgctatacagcttggtagcctaggagcaataggctatcccatatagcctagatacatagtaggctatacaactaggtttctgtaagtacactgatgtttacttaygtttgtacaataacgaaatcacctaatgatgcactcctcagaaagtgtcgcttttgttgaaagacatatgattgtactttagagacaatggcagctctggccagct

SEQ ID NO: 952950 - DNA, 532 bp, Homo sapiens
ctcaaattacaggctcaagggatcctcatcctcctgagtagctagggaccaaagacagccaccaccatgcttgaccaaattcttgttgttttctttgtagacatagagtctcactatcttgtctaggctggtctcaaacttctggcctcaagctatccttccactttggtctctcaaagtactgggattataggcatgagccaccatgccaggcccattcataagttttaaaaagtattcactaagttagtaattgatgagacaaacaaatcataaagaaaaatatttattaaacatatgaaaaagtgctcaacatcactagttgttaggaaaattcaagtgaaaaccacagtgagctaccactacacattcgctaaaatggctaaaattaaaaagactagccataccaaatgttagtgaggatgtagaggaattggaactctwataatgttgtgatgggaatgttgtgatatagccactatggaaaacagtttggcagttctatataaagttaacacacacttaccatatt

SEQ ID NO: 952951 - DNA, 664 bp, Homo sapiens
tcgatggcctcaactttgctgggctacaggtgtgttcctggtggcctttagatgacatcattgacaagattatgaccaagataattttgatgcatcctagtttcagcttaaaatttgggaaaacattcatttaaaaataacccataccaaggttttcacaaaatacaatcaaaatcagggcatattagtaggtagctcatatgtgtacctgctcggtatgtgctgttgtcattgatgtctggaatgaagtaatgaattagaaagtcttcaaacaccaaagaatgatttaatgaactatatttacatagtgtatataacacatataacataattactttttcctaaagataagaaattataattgtgcattttagaaagatttggtcaaaagaggaggaggtatgaggattttatcatgattctcaatttcacaagcatttctgtaaattaggagcctactgtactaactagaaatggtgaatgggttttcaacttcaattccatccatcacgtcccatctaaatgctctgaggtggtaacaacaaactgtgtcctagatcttcttcaagctgaagtgctttgggatgaccgcatattccaacaataccccctggaggccagttggccagggccagkggacacttgtcctcacagaagcaggtct

SEQ ID NO: 952952 - DNA, 570 bp, Homo sapiens
tgccattgatagctattacattatatctatccttcagttattacaaatgatgccactctaaacattcctgaatgtgtatcctggtacacataagcatgcattttctatgcaaaaatgagtggaattgaaaccatctttgcaaaaattatgacagtgagaaaaatctaacatagctgactatcttgcttctaacttcacaaactgtccttgttcattcctgggcataggccaagctaactatggaggaattcatagtttaattttaaaacaaagatgataatagctgcttcccaaaagtaacccctccctgctaagggactgaaactacctttgtaaaactaacaaattaggcataaggttaaaagtatggttcaggaataatgtagctggaagtcacaagattgtagcctcctcagttgctcctatagataacatcactactgtaaagcctaagattggtgcttgatgtattttttagaccctgtattttgatggaccagctgatgtcacctggacaggtaacccattaaaaaacaaacaaacaaacaracaaacaaacaaaaagccgcc

SEQ ID NO: 952953 - DNA, 539 bp, Homo sapiens
gaaggacattttacttctgtgggcttcctccccacagtctgtatcttcagtctaattatgtgaaaaccatcagacaaatccggattgaaagatgttctataaaaaaactgaccaatattcctcaaaattgtcaagttcatcaaaaacaagaactgtcacagctaaaaggtgcctaaggagacatataactaaatgtaatatggtattctggatcataaaaaggacattaggcaaaagctgagaaaatatgtataaagtatggactttagttaatgtatcaatattagtttattaattctgacaatgtatcataataatgtaagatattaataataggagaaactgagtgttgggaatatgggactgatacaggggctaaaaataaattatttaggcagatagtgaaggttaagagagtcctcagcagagcttcccttttaacgaaaagcagccccaaaatcatttcttttctaacaaagaggagcctgaaaaattaggctacaaayggggtacataagcaagctggaagcttacacgag

SEQ ID NO: 952954 - DNA, 646 bp, Homo sapiens
tgggagggccccagtgatgggcgagtgacagccaatactgtcattcaccctcctgctttcaagkggggagataaagggagaaatgggaaataatgtcggttcattcaatgagcactgagcactcttcctgtcctggatcaggctaggccctgggccaggatcgccacgtctaatgggagacagggacagggagggaaatccttgggaagaaggcagaggagaaaagggagacagcgctaggaggccgccgcagccatcaccacttcgtttatatgcctggaatcacgccccaacgtggagaggcttgctttaactctgaaggctgcaactttgtaaaaaatactcctgaaggaaggaagggcaggcgtgagaactttggacgcagacttgctttctgtgcgccctctgctggtgaccagcagcacaacacagtccctgccgttctccaggcaggaagaggaacgaggtgattaaactgcgaaggcccaggtcctgtgctgggcagtttcttgcaacagccccgacactgctggatgttgtgattcccgtccacaggatgaaagacgttccgtgtgttgcccctgggtggaaggcagagccgaggccagacatggggggttactctcccctgaaaggcccattgtga

SEQ ID NO: 952955 - DNA, 655 bp, Homo sapiens
agtggaagcttcctgaggcctcaccagaagcagatgctggtgccacgcttctttgtaccagcctgaagaactatgagccaaataaccatcttttcttttctttyctttcctttcctttccttttcttttctcttcttttcttttcttttccagacggagttttgctcctgttgcccaggctggagtgcaatggcgcgatttcggctcaccgcaaactctgccttccgggttcaaatgattctcctgcctcagcctcccaagtagctgggattacaggcatgtgccaccatgcctggctaattttgtatgtttagtagagacagtttctccatgttggtcagactggtctcgaactcctgacctcaggtgatctgcctgcctcagtctcccaaagtgctgggattacaagtgtgagccactgtgcctggctaccaccttttctttataaattacctatcctcgggtatttctttctagcaatgcagcaaattaagacaggtaccagccccaccatccatctccaggactgtcttgggcaggacctgtgtcacctccgctggcctctgtaatcagcatctgcacggtgggccttggattgatgtcactctctccctttagattcccctcttggaaggaaaggcaccaagggcctgcc

SEQ ID NO: 952956 - DNA, 640 bp, Homo sapiens
tgtataggacatctataccctttgactcagcagaaccactcatggctattaaggacagatgcctccagaatatgagtacaaggatatgaatacagcactgtttataacagagaaaatatagaaatctgctacgtgcctcttagggagatggtcattaaaggagctctgaataaccatacaatggaatgatatgtgtagctggtaagaagaatgaatatttttccacatcaatgcatataaatattgttgagtaaattgttgagttaagggggaagtagagtacagaacagtgtatgtccaatatgtccagtctatttattttaaaattttttttctttttgagacggagtctcgctctgtcgcccaggctggagtgcagtggcgtgatcttggctcactgcaagctccgcctcctgggttcaagcaattctcctgcctcagcctcctgagtagctgggactacaggggcacgctgccacgcccagctaaatttttttttttattttattagaggtgggatttcaccgtgttaccgaggctgctctcgaactcctgaactaaggcaatccaccctccttggcctcccaaagtgctcggattacaggtgtgagccactgcgccyggccttaaacgattttta

SEQ ID NO: 952957 - DNA, 584 bp, Homo sapiens
tcttttttcttctcttttctttcttttttgacacagactctcgctttctcgcccaggctagagtgcagtgacatgaccttggctcactgcaacttccaccaccagggttcaagtagctgaaccctgygttagccttccaagtagctgggattacaggcatgagccaccacgcccggctaatttttgtatttttagcagaactggggttttgccatattggccaggctggactcgaactcctgacctcaggtgatctgccagcatcggactcccaaggtactgagattacaaccatgagccaccgtgcccaggctattattattaattttagagacagggtctggctttcttgttgcccaggctgggttgcagtggctgtatcctcgttcactgtaacctcaaaatactgggttcaagagatcctcccacctcagcttcccgaggtactgggattacaaatgtgagccaccatacctggcctaatgacagaataaggaggcatcaggtacagtagcaagcatctgtagccccagctactgagtctgaggtgagaggattgctggagcccaggaattcgaggctgt

SEQ ID NO: 952958 - DNA, 525 bp, Homo sapiens
cccagagtctggcttccatggagtattggctgccctccaggactctattattggggaattttcttgccatctgacattaaaaataggtcacaggcattactaacaaaacttgtctagaagctggattatatccagttgaccttcagacaacatggaaaaaggttgctcaagtgatagtgaggcaaggcgtagatttgagctgggtgcctcctgcttaaagcaaactaagaatataaaattcatatttttattttattttattttattttattttttagatggagtctcgctctgttgcccaggctggggggcagtggcactcctggcctcaagtaatcctcccaccttggcctcccaaagtactgggattacaagggtgagccactgcacccagcccccatccatttcctttaaatagcagagtcyctggtttaaatagcaaatatttgatttccttgatttacataaacttgtacttgatttacatgaactttcctagaacttctcataggtattgctaggtaa

SEQ ID NO: 952959 - DNA, 638 bp, Homo sapiens
ggttaataaatgaaatatttttcttagagttctgctgagtcagtgacttttgactatttgaatgagtccattctttaactgaagtttaatctctacatattatagacctgaatgctgataggttaatggacatttttttctcaaaaagtgtcttttggacttcaatttgatggttgtgatacgagaaaggggtcctgatctagaccccaaaagggggttcttggatcttgcataagaaagaattcaggggtccggcacagtggctcacgcctgtaatcccaacactttgggaggctgaggccggcggatcacttgaggtcaggagtttgagaccagcctggcgaacatggggaaaccctgtctctactaaaaatacaaaagttagccagccatggtggtgggtgcctgtaatcccagctactagggaggctgaggcaggaaaaccacttgaacctaggaggcggatgttgcagtgagctgagattgcgccaccgcactccagcttgggcgacagagtgagactcatctcaaaaaaaaaaagaaagaattcaggacaagtccacagagtaaagtgaaaaggagtttattagagaaktaaatcaacaaaagaatggctactccataggcagagcagcccc

SEQ ID NO: 952960 - DNA, 638 bp, Homo sapiens
ggttaataaatgaaatatttttcttagagttctgctgagtcagtgacttttgactatttgaatgagtccattctttaactgaagtttaatctctacatattatagacctgaatgctgataggttaatggacatttttttctcaaaaagtgtcttttggacttcaatttgatggttgtgatacgagaaaggggtcctgatctagaccccaaaagggggttcttggatcttgcataagaaagaattcaggggtccggcacagtggctcacgcctgtaatcccaacactttgggaggctgaggccggcggatcacttgaggtcaggagtttgagaccagcctggcgaacatggggaaaccctgtctctactaaaaatacaaaagttagccagccatggtggtgggtgcctgtaatcccagctactagggaggctgaggcaggaaaaccacttgaacctaggaggcggatgttgcagtgagctgagattgcgccaccgcactccagcttgggcgacagagtgagactcatctcaaaaaaaaaaagaaagaattcaggacaagtccacagagtaaagtgaaaaggagtttattagagaagtaaatmaacaaaagaatggctactccataggcagagcagcccc

SEQ ID NO: 952961 - DNA, 582 bp, Homo sapiens
tcaggcagtgtgtgctgaagtagtgaggatgaagtgtgtgtgcagggctacagcctgttgygaagattaaatgagttaattattgtgaaacccttggaagagtccctggcacaaagcaagcactccttaaagagcttgattaaaactgaggctagattgctgttctttgggatgacttatcttaggatggattttagttttgtttttcacttttttctttgagatgatgaactgttattaggaccttggtaccatactggtggccaaatgcactacaggttttcttgaagatgatggtgtaaatgtaaagagggtttactgatggagctgtctcaatcagagggcatatcatcatgtcatggcctttgtgacaaatatctacctgttaggaaagccgacacatgaccagcacctcactcaatactggagatcacaacctatgttatgctgtagtaacaagcctggaatcttaggggcttaacaagaattagcaccagcctaagctattctctccacccaacctgtactgtgaactcattgaagacaggggccaggctggataaaatggacacaccactgtat

SEQ ID NO: 952962 - DNA, 582 bp, Homo sapiens
tcaggcagtgtgtgctgaagtagtgaggatgaagtgtgtgtgcagggctacagcctgttgcgaagattaaatgagttaattattgtgaaacccttrgaagagtccctggcacaaagcaagcactccttaaagagcttgattaaaactgaggctagattgctgttctttgggatgacttatcttaggatggattttagttttgtttttcacttttttctttgagatgatgaactgttattaggaccttggtaccatactggtggccaaatgcactacaggttttcttgaagatgatggtgtaaatgtaaagagggtttactgatggagctgtctcaatcagagggcatatcatcatgtcatggcctttgtgacaaatatctacctgttaggaaagccgacacatgaccagcacctcactcaatactggagatcacaacctatgttatgctgtagtaacaagcctggaatcttaggggcttaacaagaattagcaccagcctaagctattctctccacccaacctgtactgtgaactcattgaagacaggggccaggctggataaaatggacacaccactgtat

SEQ ID NO: 952963 - DNA, 606 bp, Homo sapiens
ggtgacagcgtgctggcagtcctcacagccctcgctcgctctcggcgcctcctctgcctgggctcccactttggtagcacctgagaagctcttcagcccaccaccgcactgtgggagcccctttctgggcaggccaaggccggagccggctccctcagcttgcagggaggtgtgaagggaaaggcgcgagcgggaacgggggctgcgcgcggcgattgcgggcccgctggagttccgggtgggcgtgggcttggcgggccccgcactctgaggagccagccggcaacccgggccagcggctgcggagggtgtactgggtcccccagcagtgccggcccaccggcgctgcgctcggtttctcaccgcttagatttctcaccgggccttagctgccctccggcggggcagggctcgggacctgcaggtcgccatgcctgagcctcccacccgctccgtgggctcctgtgcggcccgagcctcccccacgagcgccatcccctactccacagcgcccagtccaatcgaccacccaagggctgaggagtgtaagtgcayggcgcgggagtggcaggcagctccacctgcagcccctgtgcggcatctact

SEQ ID NO: 952964 - DNA, 623 bp, Homo sapiens
cctattttattattggagtctaatttagagtctttcaacggtacttctattcttccaatcagataarttttatcctcttccctggccctataagagatacacagctcattctcaaaattatctgctgcttacaggacagcctgcttttcagtggtagtcagggtttgattcaaagacattcttccaagggagttcaaatatttggggtaagttctggaaagcctctgtatacctgtcagggccatctgaaaacttgccaaaattttccttaagtcccgtagagaaaagaggacctggcccttaataaggttgtattcaccaggcatttgttgtagggacagttgaaactgggaacggcctaaagcaaggatttctaggcttaggcaagcttaagacagaacctggatagggaggagcaaagggggttgattgccctgctagaggtacctctggtgtttgcttccctaattccttggaattgcccttgcagtctctcctgagatggctgcgaggagggttgaatcaatcctacaacactggcaaaggtctagttctggataaccctgcaaggcaaaggcccatacatatggaaccttggaccatttgcccttgcatttacagaa

SEQ ID NO: 952965 - DNA, 622 bp, Homo sapiens
ttcagggctcaagggctctttagtcagtatgtgatgcttcatgccagaactggattttttccmttcgagacagtggtttctcttctggcccagagtgtttctagaaatgttatctgtgagctaggtcctggaaagggaaccccacgaccctgactggtgccctatccttctgtggctgagctggtgtctaagatgcaagacgaagtcatttttactcttcctttttctctcctcaagtagaattaaggagtcttttttgaagctgtgagctgtgcagcctggagttggtggaaggttggcaaaagcactttctcagcttccctgctcgtgactcagtaggtcgcatgccccacaagtccactaaccctgagaccagtacagtacttgcactcacctaggagttgcagttcttgtgggctagatggcctttgaagtttatttgtggctccagaggactttagcctgtggtggcaaacttggtggaactcaagttctgactgctgggattggtgattcccctctggctaggactgttttaaatattccctccatgggtgcaagtcagctaagttcaaccaagttttgctttctgctataacacagcagcactgagttcaatgca

SEQ ID NO: 952966 - DNA, 532 bp, Homo sapiens
aatgttattgaccaaaaaccatttgagacaaagtaatcttgcctgctatcactacctctaagcaacaggaaataagaatagaaaaatgaaagttatgcgtattggaaagtaaacaacccaaaacttattgtgaaagaatgattgtcttgatataaatttaaaaataatattcaggaccgggcgcagtggcacacacctgtaatcccagcactttgcgaggccgaggtgggcggattgcctgaggttaggagttctagaccagcctggccaacatggtgaaaccccatctctactaaaaatatatgaaaacaacaacagcagcaacaacaaaaacaaaaaaccggggtagtggcatgcacctgtaatcccagctactcaggaggctgaggcaggggagttgcttaaactggtgaggtggaggttgcagtgagcagagatcayaccactgcattccagcctgagtgacagcgagactctgtctcaaaataataataataataataataataatagtaataataataatcatgca

SEQ ID NO: 952967 - DNA, 606 bp, Homo sapiens
acctcctctgttttcttctttgtacttcctgtyagtcaggcagaggaccattccttcccatgattcagactgtatcccgcctcatctccctgaactttttgaggacagctataggcaggtacaagccctgattggactcattacctcaatcattcttttaattcgatatctatattgaattacctactttatgccaagagctgacctaggacctgaaggaacaattgaatggaatagttgagttccctgctcaataatcttaaatgtacttgcatgtatttgaatattaggcatctctatgaccttccttacgtgcagacagtttaatttgaatagaggagggcatttttccctctcatatcaattctagatacctttatggcaacaagaaaagaaaaaaccatcctgaaatgtttcttagaaatatatagtccaatattcctaattcaatagatatttattgggtgtgtattataaccatacacccttatctttatctttcagatgaataaaagaatcctaagggaggtagtatggcctaaatgtttgtgtcctcccaaaatttcagtgtctaagccctaacccctggtggggttatatttgaag

SEQ ID NO: 952968 - DNA, 625 bp, Homo sapiens
ccgactgagccctgggaggtagccctggcatatagctccctgacatgatttgtcttccrttttggggtgtcatatatgaagggaggtgactgttgtgatggtgctggcaggactgctgtccctgatgtggggtgggctgagttaggcctgaaatatgggcctccaggctgagtcctgccctctccaccacatccagggctgactgacacctctagtcagcccattctggccccttccccacatgccaggacaatgtagtccttgtcaccaatctgggcagtcagagttgggtcagtgggggacatgggattatgggcaagggtaactgacatctgctcagcctcaacgtacccgtctcaaatgcggccaggcggtggggtaagcaggaatgaggcaggggtggggttgccctgaggaggatgatcccaacgagggcgtgagcaggggacccaagttggaactaccacattgctttattgtacattagagcctctggctagggagcaggctggggactaggtaccccattctagcggggcacagcacaaagctcgtagggggatggggtcaccagaaagctgacgacacgagagtggctgggccggggctgtccggcggccacgga

SEQ ID NO: 952969 - DNA, 625 bp, Homo sapiens
ccgactgagccctgggaggtagccctggcatatagctccctgacatgatttgtcttccattttggggtgtcatatatgaagggaggtgactgttgtgatggtgctggcaggactgctgtccctgatgtggggtgggctgagttaggcctgaaatatgggcctccaggctgagtcctgccctctccaccacatccagggctgactgacacctctagtcagcccattctggccccttccccacatgccaggacaatgtagtccttgtcaccaatctgggcagtcagagttgggtcagtgggggacatgggattatgggcaagggtaactgacatctgctcagcctcaacgtacccgtctcaaatgcggccaggcggtggggtaagcaggaatgaggcaggggtggggttgccctgaggaggatgatcccaacgagggcgtgagcaggggacccaagttggaactaccacattgctttattgtacattagagcctctggctagggagcaggctggggactaggtaccccattctagcggggcacagcacaaagctcgtagggggatgggstcaccagaaagctgacgacacgagagtggctgggccggggctgtccggcggccacgga

SEQ ID NO: 952970 - DNA, 611 bp, Homo sapiens
tctcttgagcatcaaaatcattgtagaagaatctccaaactgtttttcaaaatgtctgtactaacttacatkcctgacatcaatgggttcccttttctccacaagggttcccttttctttgcatcttcaccaacacttgttatcattggtgtttttgataataaccattctaacagttggaggtgatacttcattatgattttaatttaaatttccctgataattagtgatactgagcttctttcatatatctattggccatttatatctcttcttttgagaaatgtctgttcagatcctttgccaattttttttcttttttcaacttttattttagaatcagggagccatgtgcaggtttgttacaaaggtatattgcatgatgctgaggtttggagtgcaaatgaatccatcacctaggtagtgaccacaattccaaacaggtagtttttttcagcccttttccccctcccaaccccactgttgtattccccagcatctattgttaccatttttttgaccatgtgtatccaatattcagcttccatttataagtgacaacatgtggtatttggtttttggttactacattaattcacttaggttattga

SEQ ID NO: 952971 - DNA, 571 bp, Homo sapiens
ggttagaaatacattagccaaaatggaaaacttcataattcatgaggcattgggtagaatactcaatggtcctgcctctatggtcaggaataaataggctgagactaaatgctgttctgggcccacttaacaaatcttaaaaggcctgaaaggaacacactgtttccagtaacttaactgcatcccagaataaggttcaagaattttttttttttgaggcggagtttctctctgttgcgcagcctggagtgcagtggcgtgatctcggctcactgcaagctctacctcccaggttcacgccattctgctgcctcagcctcccgagtatctgggaccgcaggtgcccgccaccacacccggctaatttttttgtatttttagtagagacggggtttcactgtgttagccagaatgatctcgatctgctgacctcgtgatccacccgccttggcctcccaaagtgctgggattacgggtgtgagccacygcgcctggccaagaatattttatatgaatataaaaatattcagaacccaataaggtaaaattcagtgtgtggcatccaatcaaa

SEQ ID NO: 952972 - DNA, 439 bp, Homo sapiens
ttgtttcaaaaaaagaaaaaaaaaatcagaagctatacatgttactaggtaagaattaggtgataaagaaacgaagcctgcagttatggaattcatttttgttgagtttgcttgggaaagaaaagataaactgaatggtggccataaagattcatattgtggagtaaatctatttggaaatataggttatgtatttctatttaaaagtactgggaatggagcccgtagatccaaaataaaaaattgtaaggactgaaaagtacggtgataattatgagatcatggtcctaaaggaagtagaaagagatgtaattcagagtccagttcgagaggtggatttcataraaaggtaggaaggacatctcctcaaaaaggggcataacatagaatatatattgcaacaattagtgacataacaaagcataagaaagtccagaaa

SEQ ID NO: 952973 - DNA, 439 bp, Homo sapiens
ttgtttcaaaaaaagaaaaaaaaaatcagaagctatacatgttactaggtaagaattaggtgataaagaaacgaagcctgcagttatggaattcatttttgttgagtttgcttgggaaagaaaagataaactgaatggtggccataaagattcatattgtggagtaaatctatttggaaatataggttatgtatttctatttaaaagtactgggaatggagcccgtagatccaaaataaaaaattgtaaggactgaaaagtacggtgataattatgagatcatggtcctaaaggaagtagaaagagatgtaattcagagtccagttcgagaggtggatttcatagaaaggtaggaaggacatctcctcaaaaaggggcataacatagaatatatattgcaacaattagtgacawaacaaagcataagaaagtccagaaa

SEQ ID NO: 952974 - DNA, 584 bp, Homo sapiens
actttggggggattacaaacaaagctgctgcagacattcacatgtgggtttttgtgkgaacctaagttttttgtgtttttttttttttttttcctgggatgaatgctcaggagtgcatgccaggttgcacagaccttgcatgtttagttttataagaaactgtcagactgttttctagagtgattgcaccattttacattctcaccaacaatgtatgagggatccagtttctccacatccttgccagcatttgtggttgtcactcttttagccattcaatagtcatgtaatgatatctcattgtggttgtaatttgtattttcctaatggctaatgattttaaattacctcttcatatgcttatttgccacctgtatattttcctcttcagttaaatatctcttcatgtcttttctcatttcttcaaatttaaaaattcttatttatttattttttattttttttactgtggagttttgagagttctttctatattctacatactagtcctttgtcagataggcagtttgcaagtattttctcccagtctgtagcttgacttttcatcctcttaacagggtctt

SEQ ID NO: 952975 - DNA, 546 bp, Homo sapiens
agtgcctgcacgcatagttccccgggaattttctgaatttgaattctcatgrtatttcaagtggctcagttgtctctttcttttcttttcttttcttttcttttctttttttttttttgagtcagagtcttgctctgtcacccaggctggagtgcagtggctggagtgcagtggcgcgatctcagatcactgcaagctccgcctcccgggttcacgccattctcctgcctctgcctccccagtagctgggactacaggcacccgccaccacgcccggctacttttttgtatttttagtagagacgaggttttaccgtggtcttcatctgacctcgtgatccgcccgcctcggtctcccaaagtgttgggattacaggcgtgagccaccgcgcccggccagttgtctctttcttttgcctactgccacacacgtaccaccaaatcctgcactccaagctgcttctacaccctggactcccaacctccagttagacaatccacatcttcccacacctgcctcaggctccatcaggctactgtgcctcc

SEQ ID NO: 952976 - DNA, 773 bp, Homo sapiens
tcacagatgtgccctgtctggagaactgtccttagctgagggagctgactggctggaactaccactgggggcaaccgcaactgatgackggttgacacagggtgcaaaagacccatctcactgcctgaggtgggacagccatgtggtgccacacacgaggctccagagctctccttgggtgcactgagcccacgccctggccttgcttcttgcccgccctccactgcttccctgactccccttctcctgagcctatgtcctccacagtcccaaacatccccacacgtccccatctcagactcagcttctagggagcccgacctatatggaatcttctggaacagccatcctcacacacctgccatcctgtagattacattccctgtgtgaaggcctgattccaaaaaggccctatcaccaggctcccagcaaggcagggccagtgtcttggcacctggcaacccaagctactgccacgaactcatcccaattcttcccaggtctgctccaggtcgtcatgaagtccgttctctctacctaatttccacatctctccctgctcaggtttgattaacagaaggttataaacaaattccagaaagaagcaaaaccagggtctccccggggtagacacagtctattgacagccagcaaattgttttgcaaccaatatttttatatttttattttgtgtagataaataggactgaactaattagtgctcctttgctttcctttttcaggccttgtactacagtgggagtctcttggcc

SEQ ID NO: 952977 - DNA, 592 bp, Homo sapiens
ctgataaacaacttcaacaaagtttcaggataaaaaaatcagtgtacaaaaatcactaacattcctatacaccaacaacagccaagccaagagccaaatcrgaaaggcaatcccattcataattgccacaaaaagaataaaatacctaggaatacagctaaccaggaggtgaaggatctgtacaatcagatttacaaacactgctcaaagaaatcagagaaaacacaaacaaatggaaaaacatttcatgctcatggataggaagaatcaatatcattaaaaaggccatactgcccaaaggaatttacagattcaatgctgttcctatgaaactaccaatgtcgttcttcacagaaatagaaaaaaaaactattttaaaattcatatggaaccaaaaaagagcctgactagcccaggcaatcctaagcaaaaagaacaaagctggaggcatcacattatccaacttcaaaccatactacaaggctacagtaatcaaaacagcatggtgctggtacaaaaacaggcacatagaccaacggaacagaataggggcccagaagtaaggccacacacccatgaccatctgatcttc

SEQ ID NO: 952978 - DNA, 589 bp, Homo sapiens
atgctgttcctatgaaactaccaatgtcgttcttcacagaaatagaaaaaaaaactattttaaaattcatatggaaccaaaaaagagcctgactagcccaggcaatcctaagcaaaaagaacaaagctggaggcatcacattatccaacttcaaaccatactacaaggctacagtaatcaaaacagcatggtgctggtacaaaaacaggcacatagaccaacggaacagaataggggcccagaagtaaggccacacacccatgaccatctgatcttccacaaagctgataaaaacaagcaatggggaaaaggttccctattcaataaatggtgctaggataactggctagccatatgcagaagattaagctggaccccttccttacactatatacaaaaatcaactcaaaaccccaaattataaaaaccctggaagacaacctaggcaataccatcctggacrtaaaagtgggcaaagatttcatgacaaagacatcaaaacaattgcaataaaagcaaaaattgaaacacgggatctaattaaacttaagagcttctgcacagcaacaaaacacaaaaaaactatcaa

SEQ ID NO: 952979 - DNA, 569 bp, Homo sapiens
catggaaaaattttacatttagacccttacctcacaccttacatagaaatgaatttgacataaaacatagacctaaacataaaaactaaagataagagaaaaatattgaatatatatcttcakaatttggaagtagatcaagatttcttaagacactcacataaaagcagtaaccatgattaccatgaaagaaaaaaccataaacaatactaatttggacttatcaacataaaagttttctgcttttcaaatgatatcattaaagaacctagcgcctattatatcaagtgtataatgtattatacacttgaaaatttttttaaaaagaaaatgtaaaccacaaatttggaaaaatagccataacacatatatctgacaaaggacttgtacccagaatatgtaaagaatccctacaagttaatcatgaaaagaaaaactcaataaaactgggcaaaatatttcaacatacactgcacattagaagagatacaaaacacgtgaaaaactgctcaacattattagtcaggtatctgcatcatgggtaaaattaaaaagatggataataccaa

SEQ ID NO: 952980 - DNA, 543 bp, Homo sapiens
gtaaaacttccaccccccagaatgtattcaggtatsggagagatatacatagtgcataagcaggaagccaagcggccgatgccaaggtgcagagatacaggtttcactttcactcaccggcctccatggccatctatgcagccttgcctggaaacttatccagatgcagggaccagtggattgccaagtctgcatatggcctctggtcatccagtatccccccaagccaggcacctgggccatttccctaatcaaacagaaaaggctttacacctccacctggctgtagcaagtagtatttgagctgcagcacccgggtgggacggggttgcacagcaatgtccttctcccccttggacatttctggaattgctgctctgaaaacaactatctccacaaagttaagagtacttcattgggcttcttatcaattttctcttggtcaaccccaaccaaaatgaaatctatccacatctgtgagcgtgatggacccaggcctgcattcacagcagcctctaattccttttccaagctctgtagcca

SEQ ID NO: 952981 - DNA, 462 bp, Homo sapiens
ggctggagacaagtacagttgtcctggcaagagatgactgtggctcaaatcagtgatagaagtggtttaaagagcaaaaaagcctgtttaaaaaacaaaaaagtggtcagattctgtaaatggtctgagtgtacagccagcaggccacactgttgacggattggatgtgtgagagtgggaggaggcaaggatgcctcatggcattcgacctgagcatctggagaggtggagttgccattaagtgactgtgggaggagcaggttcagggaggaaaatcatttcagtgtggacgtgaagtctgagatccaggtagcatccaagtggagatgtgaggaaagcagttggacgtaacactgtagagtttgtggraggaaataggagagagatgagatcgtcaagatgaggtccaaggtttgacctctggttttctctaggtgtgtagaagtttagaggatgagcaga

SEQ ID NO: 952982 - DNA, 733 bp, Homo sapiens
gcggaaatacctgctgtgtgcttcctggagattttccccactgtctgttttatgacctggtgaattaggctgcagtcttgtcttgatccagaagtggtgccccttggatcagaaggaatgtctgaaacacattgatttgtggctggaatagtaagctaagctctaggaacatcctgccagaggcttgtccttaggaaatagtctcacaaatttttttgctggtgaagagatgacatgctgcaattgacctgttgaaggccagaaaaccgaggtgacaaagcaaacctctcagtttctaatgcttccttcaggctatgctttctaggggtgataccctctatatcctgagagaccttagctgcacaagacattaaaacttggtcctcaaaatgagtgataccagcctctggaacataattgcgaccaaaatgtgtcctggggtcaccagcctccttctacccttccctctaaaatccaaataaaaacattaagccctactgcactggcctgccctgttgagtgcttttgcagattgcctggggttatttatgtcctcctgcctcctccagctctaaattctggcttcaagaccctcctccatcacccctctgtcaacactccctgggttgttaacatgtccacaataytgatcgccttacctccctcttttcccagggtctcctaaacagtacaatgcctttcaaaagaaataatggagaggaaactattaaaa

SEQ ID NO: 952983 - DNA, 473 bp, Homo sapiens
gtgaggattaacagaaagccccaagacagcmcttggcaggtagctagagctgcataaatattgatccttagtggtaaaattagtattcatgtggcaggattgcagtacatgcttatcagaggacagagctcagaaaactagtttgtctttggcagtaatcttctcttgaacaatgtaagaatcatcttttattttgaagacagcaagaaccctgcagcttcgctttggcagtaccatgtttttcagagcctgctcgatttgtacactgagtgcggctacctctgcagatgtgctgtaatgcagcaggctcactgcagtgattccttaagtgttagacgaagcacattgcaacctgccatatctgggaacaccagtggtatcctgctaagagtctggttgctgagattggacagagataagcagcaaaatgctttatgaaaataagtgctgaatatataaccttttggtaaatc

SEQ ID NO: 952984 - DNA, 473 bp, Homo sapiens
gtgaggattaacagaaagccccaagacagcacttggcaggtagmtagagctgcataaatattgatccttagtggtaaaattagtattcatgtggcaggattgcagtacatgcttatcagaggacagagctcagaaaactagtttgtctttggcagtaatcttctcttgaacaatgtaagaatcatcttttattttgaagacagcaagaaccctgcagcttcgctttggcagtaccatgtttttcagagcctgctcgatttgtacactgagtgcggctacctctgcagatgtgctgtaatgcagcaggctcactgcagtgattccttaagtgttagacgaagcacattgcaacctgccatatctgggaacaccagtggtatcctgctaagagtctggttgctgagattggacagagataagcagcaaaatgctttatgaaaataagtgctgaatatataaccttttggtaaatc

SEQ ID NO: 952985 - DNA, 471 bp, Homo sapiens
tatgatttacaatgctttaatcatctgggaatgcagccyagtaggtttcagccccattttacccagctcctattcaagatggagttgctcccgctcaaacgccttggcagattcgaccactcaatatttcaggagtggaccaataaaaggctatgaaaatagcaaataatctcctagaatccattcttgaaatattccctcaaaaaaagtccactgctctgtcattccatcttgtaaacaaacaaacaaaaaagaataaaccggtctctgactataaggcaagattagaagtactatttgtaaaacattctggtctcatgctgagtccaggcatagaaaatgccttgtctgccctattcattatgggttctgctctaaactcagtaatatagtttgaaaaacacaggctgggctaggaagctgcctattcagctaaattagtctcaaaatatgccttttcagcgtaagtac

SEQ ID NO: 952986 - DNA, 471 bp, Homo sapiens
tatgatttacaatgctttaatcatctgggaatgcagcctagtaggtttcagccccattttacccagctcctattcaagatggagttgctccsgctcaaacgccttggcagattcgaccactcaatatttcaggagtggaccaataaaaggctatgaaaatagcaaataatctcctagaatccattcttgaaatattccctcaaaaaaagtccactgctctgtcattccatcttgtaaacaaacaaacaaaaaagaataaaccggtctctgactataaggcaagattagaagtactatttgtaaaacattctggtctcatgctgagtccaggcatagaaaatgccttgtctgccctattcattatgggttctgctctaaactcagtaatatagtttgaaaaacacaggctgggctaggaagctgcctattcagctaaattagtctcaaaatatgccttttcagcgtaagtac

SEQ ID NO: 952987 - DNA, 562 bp, Homo sapiens
caggaaggagaagataaagaaatatcacaaatgaccacccactattggaagtgctgcctgtatcayagaatatattctatatagtttgtggatgtaaggtttggctgggaagttgtgagcttgtatgtaacaactgagagtcaagattggaagagtggttgcttagcaggcttcaatatagtttctctaatttaataaaattgtgttgtggatctactatgggcttggtactatgccaagagctagtagatacaatggtaatgctgacatagttttgcctgccacctaacctgaggctctgcaagagtgggaggggatgcattaagaggctcaaacttcatgaagaaggttttaggagaagcaacttaaaaaaaaaaagtttattttagtttcaagggtacgtgtgaatgtttgttacataggtaaacttgtgtcatggaggtttattgtacagtttatttcatcaccaaagtattaagcccagtgtccaatagttagcttttctgctcctctccttccttccacccttcaccctcaagtagaccccagtgtctattgttcc

SEQ ID NO: 952988 - DNA, 495 bp, Homo sapiens
ttttcattatgtttgcttttttcctttttctttttctttcttttttttttttttttttttttttttgaggcggagtctcgctctatcacccaggctggagtgcagtggcgcgttctctgctcactgcaagctccgcctcccgggttcacgccattctcctgcctcagcctcccgagtagctgggactacaggcaagtgccaccacaccgggctaacttctttttgtatttttagtagagacggcgtttcaccgtgttagccaggatggtctcgatctcctgacttcgtgatccgcccgcctcggcctccaaagtgctgggattacaggcatcacctaccgcgtctggccgcttttttccttctttatcaaaatagycctgcagcgtggctctgtatcatcttcttcatccgtttctgcaaataaaattagtttgccgtatgtcccacataaataagtcaatgcaattatttaattatgaattgtaattcttcctt

SEQ ID NO: 952989 - DNA, 657 bp, Homo sapiens
ctgtttatattctctgtaaagttttaattataaaaaaagatttgtcaggttggtcttaagctgtagccaatttggtgtgctctgcatgactttctgtaaggtcagtagcaaactttgctgcaggcctccatcttgttttacatcctcgggagagtgacctgtaaccatgtagcaatgttttgtttagcctccaccgttttatagtaacagccaggttcaaacctgacttagggaatgagtacttttggactgatatctgtgtgacttttgctacttgctgattctcttcccctccatgaacaacttctagtttttttcttaaatcttcctttctctgggttacctttaaaggttctaaattttgtaagaactgcttagcccctttgaaaatacctcatacacttgtggttaaagcataaccttaattgaggcgtgttggtttcacctgtgtagtgaccttcagtagcgtttgaaagccagaaatattggctgcttgttgtggctgaagttgggtaataagggagttaaaaggattttcttagagagtgctcagcttaatttaaagtgaatatccaacttatagatatattgaaaaagcctttatgtttttcttttcttggatcctgttttgctggaraaaaagtgttttgttttttt

SEQ ID NO: 952990 - DNA, 560 bp, Homo sapiens
ttacttctgccattttgctatctgctttctagttgttttgtaattttctcttttttcttttcttcctgcctttctttagcgaatgtacttttctctggtgataygatttattttttttctttttatttttttgtattcattgtatgttatttggtttgaggttattatgaggcttgccaatatcgtcttataatccattattttaagctgataatgacttaaaactgtttgaatgaggagcaaacaaggaataataaaactacatcttaactttgccctgtcatttttaaatctttttttaaatttaaatcttattgtattctatatgtcttgataagttgttgcagttgattacttattgctcattaacatgtttttatttcttatcgaagtgttgggaaaaaagctgagggttgggaagaaagctgaggcagggcttgcatgactgacataatgtcctctggaatgtgtctagacttgctggctccttgcttctagccctcctaggctcctattcccattatctcaagtagcagaacatgttccatataaatgctaaa

SEQ ID NO: 952991 - DNA, 664 bp, Homo sapiens
cgggccactgggtctgcaaacatgacaaagaaaaaagtctcccaaaagaagcagagaggccgaccttcatcccarccccgcaggaacatcgtgggctgcagaatttctcatggatggaaggaaggagatgagcccatcacgcagtggaaaggaaccgttctggatcaggtgcctataaatccctctctttatctggtgaaatatgatggaattgactgtgtctatggactggaacttcacagagatgaaagggttttgtctcttaaaattctttctgacagggtggcatcatctcacattagtgatgccaaccttgcaaataccataattggcaaagcagtggaacacatgtttgagggagagcatggttctaaggatgaatggagggggatggtcttagctcaagcacctatcatgaaagcctggttttatattacctatgagaaagatcctgtcttgtacatgtaccagcttctagatgattataaggaaggtgacctccgcatcatgccagaatccagtgagtctcctccaacagagagggagccaggaggagttgtagatggcctaataggtaagcatgtggaatataccaaagaagatggctccaaaaggatcggcatggtcattcaccaagtggaaaccaaaccctctgtgtatttca

SEQ ID NO: 952992 - DNA, 664 bp, Homo sapiens
cgggccactgggtctgcaaacatgacaaagaaaaaagtctcccaaaagaagcagagaggccgaccttcatcccagcccygcaggaacatcgtgggctgcagaatttctcatggatggaaggaaggagatgagcccatcacgcagtggaaaggaaccgttctggatcaggtgcctataaatccctctctttatctggtgaaatatgatggaattgactgtgtctatggactggaacttcacagagatgaaagggttttgtctcttaaaattctttctgacagggtggcatcatctcacattagtgatgccaaccttgcaaataccataattggcaaagcagtggaacacatgtttgagggagagcatggttctaaggatgaatggagggggatggtcttagctcaagcacctatcatgaaagcctggttttatattacctatgagaaagatcctgtcttgtacatgtaccagcttctagatgattataaggaaggtgacctccgcatcatgccagaatccagtgagtctcctccaacagagagggagccaggaggagttgtagatggcctaataggtaagcatgtggaatataccaaagaagatggctccaaaaggatcggcatggtcattcaccaagtggaaaccaaaccctctgtgtatttca

SEQ ID NO: 952993 - DNA, 591 bp, Homo sapiens
ggaaatcatttttacctcctaggcctccaggcctgtgttgagaggggctgttgcaaaggcctctgacatgccctggagacattttccccattgtctaagtcattagcactggctactcattacttatgcaaatgcaaatgtctgcagcaggcttgaatttctccccagaagatgggtttttcttttccactgcatcatcaggctgtaaattttccagacttttatgctctgcttccccttgaatgctttggcatttagaaattttttccaccagtacccgaaattatctctcccaagttgaaagttccacagatctctaggacaagggcaaaatgccaccagtctctgctagcaagagtgacctttactccagtttccaacaagttcttcatcttcatctgggaccaccttggcctggacttcattgtccatatcactatcagcattttggtcaaagccattcaacaagtctctaggaagttcttacccttcccacatcttcctgtcttctgagcccttcaaktttctagaaagttccaaactttcccatattttcctgtcttcttctgggccctccaaactgttccaacc

SEQ ID NO: 952994 - DNA, 608 bp, Homo sapiens
tgaaatctttgccgggtcctatgtccagaatggcatttcctaggttgtcttccaggtttttatagttttagattttacatttaggtctttaatccatgttgagttgatttttgtgtatggtataaggaacaggtcctgtttcaatcttctgcatattgctagccagctatcccagcaccatttattgaatagggagtccttcccccatttcttgtttttgtttactttttcaaagaccagatgattatgggtgtgtggcattatttctgggctatctattctgttccattggtctatgtctctgtttctgtacccataccgtgctgttttgttcataaaagccttatagtatattttgaagtctggtaacataatgcctccagctttgttctttttgcatttcacttaggatatcttcggttcatccatgttttaacatatattagtacttcattgctttttatggctgaataatattccagtgaatgggcatattgtaatatattgtgcttattcactgttccagtggtggacatttagaytgttttcacctttggactattgtgaatattactgctatgagcattcgtgtacaagcttttgtttga

SEQ ID NO: 952995 - DNA, 671 bp, Homo sapiens
tcaaggtcatctcacaacctcaaaccagccacctacatcctcaagcaggaccagcagcctggacccttcaactggtggcctcaacacccccatcagggctcacctccccaagatatcracccacctggcgtgcacaaaccgaggactggcacaccagtgcacccacatctacagcctcacagccacctgcaatgctgtagccacggcccaaggctcctggggtagggaggcttcaaactccacggtcagaacccactgtgcagcctcgagcaacatggctggagagagcctcctgcgtgccgtgcggcctgcactgctaagcccttgacgtggatcagctcattaaatccttggaacaacgccctgtggcagtcaaatactggtattatccccctgctgagtcccagtcagaaaccaagaaagtgagatgcagtaggaggcacagcctcacttgctgctggagggagtcaggtgagacttccccacacagggagtaggcggaacagcagcgtgggaagggggctggcactggagccagccggacccggttcaaatccaggctgtgccgcttcctggctctgtgaccttgagcaagtcctttcactaatctgagtctcagagtctgtatttgcaaatgagggcttggcgtatggtgctttggtgaggattag

SEQ ID NO: 952996 - DNA, 711 bp, Homo sapiens
tgtataactacaggcaacatcgtggacgaatcccataaacataatgttgagtgaaggaagccagacagaaaagaggacaggattccatttacgcagaggacaaaaccaggttaaaatctgcaagatcaggatastccttccttgtgggaggaattgtagaaagtgggctcacaggggttcatgggggctggctgtgttctgtgtctttatttggtttctggctatatggtgtgctcactgtgtatacacttatttcatatatataatatttcaactaaaactgtacccctgcttctctgccatgggctgatgtgcgctccccaaaaatccatatgttgaagtcctaacccccagtatctcaggatgtgatcatatttggagataaggtctttaaaggggtgactgaagactgggtaagctgggcgcggtggcttacgccggtaatcccagccctttgggaggtcgaggcgggcagatcaccagaggtcaggagttctagacaagcctggcccacatggcaaaaccccatctctactaaaaatacaaaaattagctgggcatggtggtgcatgcctgtaatcccaactccttaggaggctgaggcaggagaatcgcatgaacctgggaggcagaggttccagtgagccgagattgcgccactacactccagcctgggtgacagagcaagactctgtctcaaaaaaaaaaaaa

SEQ ID NO: 952997 - DNA, 600 bp, Homo sapiens
gttcgagaccagcctggccaacatggtgaaatcctgtctctactaaaaatacaaaaattagccaarcgtggtggcacacacctgtaagcccagctactctggaagctgagaaaggagaattgcttgaatccaggaggttgcagtgagccgagattgtgccactgtactccagcctgggtgacagagtgaaactctgcctcaaaaaaggagaaaaaagaggcctggcgtggtggcccacacctgtaatcccagcactttgggaggttgaggtgggtggcttacctgaggtcaggagctcgagaccagcctggccaacacagagaaaccccgtctctactaaaaatacaaaaattagctgggcgtggtggtgcgcacctgtaatcccagctactcgggaggctgaggcaggagaatcacttgaacctgggaggcagaggctgcagtgagccgagatcgggccattgcactccagcctgggcaatagagtgagactgcatctcaaaaaaaagaaaagaaaaagaaaaaagaaaaaagatgcatggttaagtgggtggatgggtgaggaggtggagggaggggtgggtgcatggatggtggatc

SEQ ID NO: 952998 - DNA, 548 bp, Homo sapiens
ctcaccatgttggccagtctcaaactcctgacctcatgacctcaccatgctggtctcaaactcctgttcactgaggcagtgatctgcctgactcggcctcccaaagtgctgggattacagatgtgagccatcacactggctgagaccccatctctttaaaaaaaaacaaacacatggctgggcgcggtggctcatgcctgtaatcccagcactttgggaggccaaggcgggcggatcacaacgtcaggagattgagaccatcctggctaacacggtgaaaccccacctttactaaaaatacaaaaaattagacgagcatggtggcaggcgcctgtagtcccagctactcgggaggctgaggcaggagaatggcgtgaaccagggaggcagagcttgcgatgaaccgagattgtgccactgcactccagcctaggggatagagcgagactccgtctcaaaaaaraaacaaaaaaagaaacacaaaaaacatacaaacaacaagaaaaagaaattctagaaatgacaacaaaatctcaagaagcaagccg

SEQ ID NO: 952999 - DNA, 824 bp, Homo sapiens
acggatgggtgagcataaggcagggagaagccttcctccaggcttgatatgaaggcaggtgcccaacaccacgctggtgcacaagaggcctcaagggaaggggtagcctctgggaggcagggtgggaggaggcgtgcatactccccaggcaggccctgggctgtggagcgcagacatgactggacaagaagcagctgagggtcccagctcattgcccagtttctgagacgctctgcagccacgcagcctcctggggagaggcagggacgcaccttggcaaggagcccagcagccctggctgcgctgtcggggcctcgtgtctggccctgatcctcctcgggagccagggggatagaaataaaaccgcagcgcatccaggagcctcatttctaccaaaactttctagcacctctcatgtgcttcctctcctgtgccctcagccagagctgtgaataaacagtaaaggccccaaaggctgaaggcggagcagaggaatgaggaggctctgtgggtgtcccaggggcagcttcagtggcacagccttcgagctaggccttggcagctgaatttgcaggtgaggtccctggggaccacacgtctcagccactggcttttgcccagacctccgtccattccccgtttatccgtgcatctatgcctcacagtatactgaacacctgccctgccctgggccctggcctcacggaggctgtagaagtgaaagagcctagcctccctgggaagcctaggggcacggcaacctcagcagagtgaagcaataatagagcagttccgggaagcttscaagcgcctgacactgctcc

SEQ ID NO: 953000 - DNA, 609 bp, Homo sapiens
taaaagcaaagattttaataaagcctggcaggagagtgctgtcctgtgtatagtggagctggggcaaaataaaacctcattgctcctgatctgtttgtatttaaatgggcaacattttgcttatcttgggatttttgcataacatctgatatttttaatattgcatagaaaatcatgcatcctaataaccggggttttggtgacccctctaatttcgtgctggaggcccccgcctccccagccccacctggtccaggcgctccctccctgttcaccacacatcacctcacactctgtttccttttctaggctaagaatcttctctgtggcttttacggccgccatgcggagctgcgcttcttggacctggttccttctttgcagttggacccggcccagatctacagggtcacttggttcatctcctggagcccctgcttctcctggggctgtgccggggaagtgcgtgcgttccttcaggagaacacacacgtgagactgcgyatcttcgctgcccgcatctatgattacgaccccctatataaggaggcactgcaaatgctgcgggatgctggggcccaagtctccatcatgacctacgatggtaag

SEQ ID NO: 953001 - DNA, 593 bp, Homo sapiens
acctcacaggagaggaacctaaatgcagaccccaccctcactcacagagccccgcccaccctcacttacagagccccgggcgctgattggaagggacaggcccagcagtaagaggacagccagcagccagtctccctgttggaaaggaaccacaaacgtgcagtcaggggccctcgggagccgccctctgtccaccccttcctgattccacccccctagagagggagcccaggggaggccatggctgagacccaggacaggcccagtcgggggaaggagcccagggagggggcaggtgtctaggctgggcccaaagagagggctggggagaggagcagcccaggaggcagagcccagccacagaggggaggggagctgagtcccggggacaggaggctccagaggcagagacggagcccagggctagggcggcaggtgtcagggctgtggcttcagcttggcgtctgtcctgggccttctgcgctggttcccaactctgggatgtgtkacttatatgcctgattacagcggcggctcccacctcacgatttctggaaagtcctcagaagccgcatataagaccaagaacgggc

SEQ ID NO: 953002 - DNA, 593 bp, Homo sapiens
acctcacaggagaggaacctaaatgcagaccccaccctcactcacagagccccgcccaccctcacttacagagccccgggcgctgattggaagggacaggcccagcagtaagaggacagccagcagccagtctccctgttggaaaggaaccacaaacgtgcagtcaggggccctcgggagccgccctctgtccaccccttcctgattccacccccctagagagggagcccaggggaggccatggctgagacccaggacaggcccagtcgggggaaggagcccagggagggggcaggtgtctaggctgggcccaaagagagggctggggagaggagcagcccaggaggcagagcccagccacagaggggaggggagctgagtcccggggacaggaggctccagaggcagagacggagcccagggctagggcggcaggtgtcagggctgtggcttcagcttggcgtctgtcctgggccttctgcgctggttcccaactctgggatgtgtgacttatrtgcctgattacagcggcggctcccacctcacgatttctggaaagtcctcagaagccgcatataagaccaagaacgggc

SEQ ID NO: 953003 - DNA, 593 bp, Homo sapiens
acctcacaggagaggaacctaaatgcagaccccaccctcactcacagagccccgcccaccctcacttacagagccccgggcgctgattggaagggacaggcccagcagtaagaggacagccagcagccagtctccctgttggaaaggaaccacaaacgtgcagtcaggggccctcgggagccgccctctgtccaccccttcctgattccacccccctagagagggagcccaggggaggccatggctgagacccaggacaggcccagtcgggggaaggagcccagggagggggcaggtgtctaggctgggcccaaagagagggctggggagaggagcagcccaggaggcagagcccagccacagaggggaggggagctgagtcccggggacaggaggctccagaggcagagacggagcccagggctagggcggcaggtgtcagggctgtggcttcagcttggcgtctgtcctgggccttctgcgctggttcccaactctgggatgtgtgacttatatgcctgattacagcggcggctcccacctcacgatttctggaaagtcctcagaagccrcatataagaccaagaacgggc

SEQ ID NO: 953004 - DNA, 593 bp, Homo sapiens
acctcacaggagaggaacctaaatgcagaccccaccctcactcacagagccccgcccaccctcacttacagagccccgggcgctgattggaagggacaggcccagcagtaagaggacagccagcagccagtctccctgttggaaaggaaccacaaacgtgcagtcaggggccctcgggagccgccctctgtccaccccttcctgattccacccccctagagagggagcccaggggaggccatggctgagacccaggacaggcccagtcgggggaaggagcccagggagggggcaggtgtctaggctgggcccaaagagagggctggggagaggagcagcccaggaggcagagcccagccacagaggggaggggagctgagtcccggggacaggaggctccagaggcagagacggagcccagggctagggcggcaggtgtcagggctgtggcttcagcttggcgtctgtcctgggccttctgcgctggttcccaactctgggatgtgtgacttatatgcctgattacagcggcggctcccacctcacgatttctggaaagtcctcagaagccgcrtataagaccaagaacgggc

SEQ ID NO: 953005 - DNA, 764 bp, Homo sapiens
tcacagtttaatttctcagcttccccacattcggcaccgtagtccttattccatactcataagtggcttcttgtcttaaacaaaccaaaccaaaacgctaaaaatgtccctggacctgcatagcttcttgtgagtgtctttcagaacctcagggctccagcagggtgtggagcaggaaatgatcatggccaccaccaccgtaatcatagcagttaacgtattgaacacatgctgtgaactgggcactctgctagtcactttatactggttaactcctttcatccccgcaacagccccaggaggcaggtgatagggtttggctctgtgtccccacccagatctcatcttgaattgtactcctataattcccatgtgttgtgagagggacctggtgggagataatttgaatcacgggggcggttttccccatgctgttcttttggtagtgattaagtctcacgagatctgatggttttatcaggtgtttctgcttttgcctcttcctcatttttctcttgctgctgccatgtaagaagtgccttttgcctcctgccatgactctgaggcctccctagccatatggaactgtaaatccaattaaacctctttttcttcccagtcttaggtatgtctttatcagcagcatgaaaatggactcgtacascaggcattattacttttatacccattttgcagatgaggaaactgaggcacagaagcaaagtaacttcaaggctacctagctagcatgtcatagaactagg

SEQ ID NO: 953006 - DNA, 764 bp, Homo sapiens
tcacagtttaatttctcagcttccccacattcggcaccgtagtccttattccatactcataagtggcttcttgtcttaaacaaaccaaaccaaaacgctaaaaatgtccctggacctgcatagcttcttgtgagtgtctttcagaacctcagggctccagcagggtgtggagcaggaaatgatcatggccaccaccaccgtaatcatagcagttaacgtattgaacacatgctgtgaactgggcactctgctagtcactttatactggttaactcctttcatccccgcaacagccccaggaggcaggtgatagggtttggctctgtgtccccacccagatctcatcttgaattgtactcctataattcccatgtgttgtgagagggacctggtgggagataatttgaatcacgggggcggttttccccatgctgttcttttggtagtgattaagtctcacgagatctgatggttttatcaggtgtttctgcttttgcctcttcctcatttttctcttgctgctgccatgtaagaagtgccttttgcctcctgccatgactctgaggcctccctagccatatggaactgtaaatccaattaaacctctttttcttcccagtcttaggtatgtctttatcagcagcatgaaaatggactcgtacaccaggcattattacttttatacccattttgcagatgaggaaactgaggcacagaagcaaagtaacttcamggctacctagctagcatgtcatagaactagg

SEQ ID NO: 953007 - DNA, 753 bp, Homo sapiens
gactgggcaccgcagagcagggggcgtcgcctgtcggggaagcttgggccgtgagggagcccacagtgctggggagcatgccttgggcatggtgggctgcaggtccygagccctgccctgtggggaggtggctgaggcctggcaagaatttgagtgtggtgtggatgggccggcagtgctgtgggacccagtgcaccctccacaggtgctggcctgggtgctaagcccctcactgccactctgagtgtcggacccactgagcccacgcccacccagaacgcatgctggcctgtgagcaccgcgagcagctctggttcccgcccgcgcctctccctccacacctccccgcaagcagagggagtcagttccagcctcggccagcccagagaggggctcacacagtgcagcagtgggctgaagggttcctcaagcgtggtcagagtgggcgccaaggccaaggaggtgccgagagtgagcgagggctgccagcacgctgtcatctctcaatgtgaccgttttttaaattaaactttttattttgagattattgtagcttctcatgcagctgtgaggaataatacagaggaatcctaggtactctggccagttccctcaagggtaggaccttgcagctacagtaatggatcagagccaggatactgacattgatacagcaagaagggaatgcttccctcccaaacatccctcatgttgccctttcacaggaacactcacttcccactgtcccaaacc

SEQ ID NO: 953008 - DNA, 795 bp, Homo sapiens
cttcggtaagttacttaacctctctgtgcttttgtgtccttgtctataaaacagggataataatcatcccgcagaacaatatctgaaaactaactgagttaacctatgtaaagtgcttgaagaacatgtctrggcccttcctaagcactcaaagtacccatcactgtggccatcgtcatcagtatcgcctccttgccttctgcgagtttcttattgctgctgtaactaactaccattcacatggtgacttacaacaacccaaagtttttctctcacagatctggaggcccaggtctcggcagggctgagttccttttgcaggctccaggggagaaccgtttccttgccttctccggcttctacaggctgcctggactccttggcttgtggccccttcctctgtcttcaaagccagcagcatagcgtctgcaaactctcatctgatctctccttctgccacatttcctctctgactttgactctctcccctcctattttttctttttttgagacgaagtctcactctgtcacccaggctggagtgcactggagcaatctcagctcactgcaacttccacttcccgattcaggtgatcctcctgcctcagcctcctgagtagctgggattacaggcactcaccaccatgcccgattaatttttgtatttttagtagagacggggttttaccatgttggtcaggctggtctcggactcctgacctcaggtgatccacccaggcctcccaaagtgctgggattacaggtgtgagccactgcgcccagccaccttctatt

SEQ ID NO: 953009 - DNA, 666 bp, Homo sapiens
gtggcaggcgtcgctgtgtgcacagcacactcctgaggactccacaggctctcgccctcctgcccacgmggggacccgggtgaggtgggggtccatccaccctgggcagcacacttgcggatatctgagcctccaccaggcaccccacaggccgcctcccctgcgccagggcccaggtgctgcccacaccattccaatccccctgggcacaggcaaaatggtgccttttaagattttccagagatgatgcacagagcgtggggtgtagggcgctggctttgaaggccggtgggcctgggcctgtccctcggggagatcatcagcctcccaagcctcagtttccccatctgtgcctctcgtggtggcaggtggcagtgagggggccctgcccgtgctgcttctcactgcggctgctccaggcatgcaggcagcagcccattccctggcccgaggtgtccaggtcgcccaccgcactgacctgtccagcttgtccagggagaagcgctgagttgagaaccgcaagtaactctccttgtagaaccagatggtcagggggttccagtccgtgacgaggaaccactgtctgatgtcgaacttggtgtcacagatgagcagcggcgtctcgatgtacttctggaccacccacttgttgtccctggaaagagg

SEQ ID NO: 953010 - DNA, 675 bp, Homo sapiens
gccctcaattggttttgaaattcaaggtggtgctgcattgtcataatatcttctggttttagatttttttggagatagcttttctgatggttttacaccttgtctttgatttattttagtatttctacttctagtcaaagttaaaaccaggaaatacagagatgtgctgtgggggtgatggttaagctttgtttgaaacttgttgctcaacattcagttgttcgtttaataaatttaactatgtgccatacctttctcctaagcactggggaatcccttagggaacaaaagcagaaatccacacccttatggagttaactcctccttctcgggggagaaagatccacaaatacatactgtccacaagggggtaaatctcaaggagggtagaagagctgcgaagagaggcagggagtgctcgtgcacatggtggctttaaacagggtgttttaagaaggtgccattcataaggacaattgagcaaagtcctctgggagaggaggggccgagcccctgtggatttatctgggggaagagtacccaggtgaagtgttgagcagggcaaagaccctraggctggaacctcagggttgaggcacagcaaggaggccagggggctgcagggcagggagtacagtgggagttggggtgagggtggagagtggccaggccctt

SEQ ID NO: 953011 - DNA, 675 bp, Homo sapiens
gccctcaattggttttgaaattcaaggtggtgctgcattgtcataatatcttctggttttagatttttttggagatagcttttctgatggttttacaccttgtctttgatttattttagtatttctacttctagtcaaagttaaaaccaggaaatacagagatgtgctgtgggggtgatggttaagctttgtttgaaacttgttgctcaacattcagttgttcgtttaataaatttaactatgtgccatacctttctcctaagcactggggaatcccttagggaacaaaagcagaaatccacacccttatggagttaactcctccttctcgggggagaaagatccacaaatacatactgtccacaagggggtaaatctcaaggagggtagaagagctgcgaagagaggcagggagtgctcgtgcacatggtggctttaaacagggtgttttaagaaggtgccattcataaggacaattgagcaaagtcctctgggagaggaggggccgagcccctgtggatttatctgggggaagagtacccaggtgaagtgttgagcagggcaaagaccctaagsctggaacctcagggttgaggcacagcaaggaggccagggggctgcagggcagggagtacagtgggagttggggtgagggtggagagtggccaggccctt

SEQ ID NO: 953012 - DNA, 675 bp, Homo sapiens
gccctcaattggttttgaaattcaaggtggtgctgcattgtcataatatcttctggttttagatttttttggagatagcttttctgatggttttacaccttgtctttgatttattttagtatttctacttctagtcaaagttaaaaccaggaaatacagagatgtgctgtgggggtgatggttaagctttgtttgaaacttgttgctcaacattcagttgttcgtttaataaatttaactatgtgccatacctttctcctaagcactggggaatcccttagggaacaaaagcagaaatccacacccttatggagttaactcctccttctcgggggagaaagatccacaaatacatactgtccacaagggggtaaatctcaaggagggtagaagagctgcgaagagaggcagggagtgctcgtgcacatggtggctttaaacagggtgttttaagaaggtgccattcataaggacaattgagcaaagtcctctgggagaggaggggccgagcccctgtggatttatctgggggaagagtacccaggtgaagtgttgagcagggcaaagaccctaaggctggarcctcagggttgaggcacagcaaggaggccagggggctgcagggcagggagtacagtgggagttggggtgagggtggagagtggccaggccctt

SEQ ID NO: 953013 - DNA, 675 bp, Homo sapiens
gccctcaattggttttgaaattcaaggtggtgctgcattgtcataatatcttctggttttagatttttttggagatagcttttctgatggttttacaccttgtctttgatttattttagtatttctacttctagtcaaagttaaaaccaggaaatacagagatgtgctgtgggggtgatggttaagctttgtttgaaacttgttgctcaacattcagttgttcgtttaataaatttaactatgtgccatacctttctcctaagcactggggaatcccttagggaacaaaagcagaaatccacacccttatggagttaactcctccttctcgggggagaaagatccacaaatacatactgtccacaagggggtaaatctcaaggagggtagaagagctgcgaagagaggcagggagtgctcgtgcacatggtggctttaaacagggtgttttaagaaggtgccattcataaggacaattgagcaaagtcctctgggagaggaggggccgagcccctgtggatttatctgggggaagagtacccaggtgaagtgttgagcagggcaaagaccctaaggctggaacctcagrgttgaggcacagcaaggaggccagggggctgcagggcagggagtacagtgggagttggggtgagggtggagagtggccaggccctt

SEQ ID NO: 953014 - DNA, 644 bp, Homo sapiens
tagtagggctgcaggaagagggatgacaacaggtagccaaaggactggaactgcctggctcagggatccccaaggctggcctgtggccagttggcagcacaggttagtgattatgtccagagagcttagatgcaaactctgtgatacaaattctagcatttcctggcatcaaaacatcaggcaagttattcattcaccctgtacttctgtttcctcatctgtaaaatggggaccacccttacctcatgggagcactgagagaattaaatgagataatacatgaaacgtgcttagcacaggttgtgacgtatcataagagtttaaaattactggttcaggtccctaaactcatccaatccacaagttttacgctcatgaaaactgaggcccagagaggtggtaagacctcctgggaggcagtgacctgctgccactggagtccttgaatattcacagaccatgacgggccctaagaaggtccttgtggtggtttcactggggtggaaggatcctgctctccaatcctcaccttccyatcccgtttccgttagtcttcacttctggccccttaatatttcatccatccctactagatctgcatccctggtgccttcctgtcatttcccttgtttctttcccaccac

SEQ ID NO: 953015 - DNA, 659 bp, Homo sapiens
aggcaaattcatagacaggaaatagaatggtagttgccaagggctacagagaaaggggagatgggacttattgtttacttggtacagagtttcagttttgcaagacgaagacttctggagatggatggtggttatggttatacaataacacgagtaaacgaatgccactgaattgtacacttaaaaatggttgaggtggtgcattttacattatgtgtttttttacaattaaaaaggaaaaaggaaggtgggagagctctaaaattagaaggtaacagtttgattaagtgttaccagtttgaataactgattagtggcatgaatgtaccacttccgttttgaacgtggctcagatctcctgtgttcctatcccagctttaccactttcttgctgagtgaccttgagcaagttgcttgacctctctgatactctttcctcacctgtaaaatacagataataatagtacctatgtcacagggttgttgtgaaaatgaaatgacatgatccatgaagaatgcttagcacagagcctggcatatttacttttcatttagcaaatatttattaagctcctactatgtgccagtaartgctgaagatgcaacagtgaacaaaatggacaaaagtctctgcccctgtggagtctatatgtccatgt

SEQ ID NO: 953016 - DNA, 667 bp, Homo sapiens
acaagagcaaaactccgtctcaaaaaaaaaaaaaaaaaaactaaacatataattaccgggtgacccagcaattgcattcctgggcactcgtcttaaagaaataaaacatcygcacaaaaacctgtacacaagtgttcatagcagcttgacttgtcatagccaaaactggaaacagccctgatgtccttcatccaccaatggttaaacaggaacatccaggccaggcgcggtggctcacggctgtaatcccagcacttggggaggccaaggcaggcagatcacctgaggtcaggagttcgagaccagcctggccaacatggataaaccctgtctctactaaaaacacaaaattagctgggcgtggtggcgcatgcctgtaatcccagctacttgggaggctgaggcaggagaatcacttgaacccaggaggcagaggttgcagtgagccaagatcatgccattgcaatccagcctgggcaacaagagggaaattccatctcaaaaaaagaaagaaagaaagaaacaggaacatccaggccgtgggaccgtactctgcagtaaaaaggaactattaatccactcagcaagctggaggaatccagggaattaggctgagtgaataaaagcaatcccaaaaagtatgatgcagcacaagtccgtgtataca

SEQ ID NO: 953017 - DNA, 704 bp, Homo sapiens
tctcctgcggaatttcaggaaggaagcagcttgcccagagaaaaggtgtgaacagacagacagcaacaccttgtttttttcagaagcttcaacaaaaggattttggcgccagttggcccagatttggaggggaggaagaaaagagtgggttgcctgcagtcagaaagagactgaaaggagaaggggaaaaaagtagaaaacacagaattatgacttggggaatagacagagtttgcggggatgtttctgggtgggtggtgggcatggcattgatcaaacttataacactgatgaatagaaacatataaatgactacataaaggaatacatttagagtgcctggcatatgacaaaaaaaaatgctcaatgtgatttagtacgtattcattgggcaggcactaagtaagtgtttattgaactaaagaaatgaaagtggtacatactttttaagggaggagaacagaatcgttcaagaaaaatgtttctcagccctgaactttcatcacatgggtggtgcttggttagaagcgaagaccgaattacatgtatcagtaactttgtaatttacttaaatttattgttttaatcatgatgttarctgagatcattgtagagtttatgtttgtcctaagatgtacttcttttttaaaaaattttaggttcactaggtatatgggcttgttacacaggtgttacatgcacaa

SEQ ID NO: 953018 - DNA, 563 bp, Homo sapiens
tagaaggttcttgcccatgaagaattccatttcctgtttctggtgaattctaggcaatgaggaaggagatgcccagaggaatccatttcttgccacctcccttgatttagtaagcaattatcaatctgctatcctcaggctgcccacaggcctgagaaggagaagatgcctggctctagactggaattattgtcggtgttgttgttttcttccagttggtaaattccctgggcttgtttctgaacagagcaagatgaatgctgaaagcgagatgagagccctgatgagccatttcccttcagaatccatctcaagacaaagaggaggcctctaaggaagaagggacccggggtgtgctggaaactgaagatcacttccacaaactgttcccaaaaggaattaccatgcagccattggcccattcaaaaaataaaaataaaaaggtkatgaagattaagccaataagtctgagaggaagataaaaatcacaggggatgtgtgcaatggctcacacctttaatcctaagactttgggaggtcaaggtaggtggatggcttgagcc

SEQ ID NO: 953019 - DNA, 633 bp, Homo sapiens
aatgtgtgatcttgggcaagttatttaacctctctgactctgtttcctcatctgtaaaacagagataataagagtacctatatcacagggttgttgtgataattaagttagcatacacacaraaacacaaatacccagacacagacacacagtttccaacttaagatggttcaacttagatttttttgactttatgatgatgcgaaagccatatgcattcagtagaaacagtactttttttttttttttgacaaagtcttactctgtcacccaggctggagtgcagtggcgtgatctcagctcactgcaacctccgcctcccgggttcaagagattctcctgcctcagcctcccaagtagctgggattacaggcacatgccaccatgcccagctaatttttttgtgtttttagtaaatacagggtttcatcatgttggccaggctggcatcgaactggtgatccacccgcctcagcgtcccaaagtgctgggattaccaccgtgcctggccagaaaccatactttgagtacccatgcagccagccattctgcttttcaatgtcagtacagtgttcaataaattccatgaaatattcaacattttattataaaataggctttgtgttagatgag

SEQ ID NO: 953020 - DNA, 500 bp, Homo sapiens
tcaaagaaattaaagaaaacacaaagaaaaaaatgcagaattctaccagataaatttaacagagactgaaataatttaaaagaattaagcagaagttctggagctaaaaattgcaattgacattctgaagaaagcaccagagtcctttaatagcagaattaatcaagcagaagaattagtgagcttgaagaaagcctatctgaaaatacaaagtcagagaagataaaagaaaaagagaatttaaaaaatgaagcattactacaggatctagaaaatagcctcaaaagggcaagtctaacagttattggtcgtaaagagaaggtagagaaagagatggaggtaaaaagtttattcaaaaggattataacaaagaacttcccaacctagagaaacatatcaatatacaagtacaaaaakgttatagaacaacaagcagatttaacacaaagaagactacctccaggcacttaagaatcaaactcccggatggccgaatagga

SEQ ID NO: 953021 - DNA, 615 bp, Homo sapiens
ttgacaaataaaatattgtttgtcaatttttcccaaattgatacccagatacaatacaatcccaatcacaagtcccaaaggctttttcatggaaactgacaaatttccatgaaactcttaacatttayacagcaaatgtataaatagaatagcaaaaacaatctcatcagagaagagcaaagttcttcagctctcaccataccgaaattcaagtcttactacagtggctaaaattataaagaaaaacgtcagtgctgctaggatgcaggacaacagggactctcctgcgatgcctgtcagagtcaagagtggcacaactcccctggaaaaccatgtggagcttcttaaacacacacctccctcagcaattccactcctaggtatttttgccaaaagaaatttctgtgtttgtccacagaaagacccacgcaagaatgttcatagccactttagtcataagaaccagaaacggaatcagcccaggtacccactgagagcaaagtggataaacatgctgggtatgttcacacaatggaacactgctcaccatcccacgacaacacagacgaatccaaacgtcaccatgctcagcaaatgaaaacagacacgaacaag

SEQ ID NO: 953022 - DNA, 578 bp, Homo sapiens
acctgaaagctgttctttcatggttcattagacttygaccttgaactggcagcacctctttgacattgagggtgaagctgacaaaatggaaatggaaactcaccaaggtttcctatggaagtgctgtaatagagagcctgggactcccagcttcatcatttattaagatagctgttatgggctgggcgcagtggctcacgcctataatcccagcactttaggaggccaaggcgggtggatcatgaggtcaggagatcgagaccatcctggctaacacagtgaaatcccgtctctactaaaaatacaaaaaattagccgggcacagtggcgggcgcctgtagtcccagctacttgggaggctgaggcaggagaatggtgtgaacccgggaggcggagcttgcagtgagctgagattgcgccactgcactccagcctgggcaacagagcaaggctccatctcaaaaaaaaaaaaaaaaaaaaaaagatagctgttatgtattgaatgcttgctatgtgtgaggcaagaggttaattacataaccactgtcttacttcatcctaataaccctctgaaatta

SEQ ID NO: 953023 - DNA, 578 bp, Homo sapiens
acctgaaagctgttctttcatggttcattagacttcgaccttgaactggcagcacctctttgacattgagggtgaagctgacaaaatggaaatggaaactcaccaaggtttcctatggaagtgctgtaatagagagcctgggactcccagcttcatcatttattaagatagctgttatgggctgggcgcagtggctcacgcctataatcccagcactttaggaggccaaggcgggtggatcatgaggtcaggagatcgagaccatcctggctaacacagtgaaatcccgtctctactaaaaatacaaaaaattagccgggcacagtggcgggcgcctgtagtcccagctacttgggaggctgaggcaggagaatggtgtgaacccgggaggcggagcttgcagtgagctgagattgcgccactgcactccagcctgggcaacagagcaaggctccatctcaaaaaaaaaaaaaaaaaaaaaaagatagctgttatgtattgaatkcttgctatgtgtgaggcaagaggttaattacataaccactgtcttacttcatcctaataaccctctgaaatta

SEQ ID NO: 953024 - DNA, 658 bp, Homo sapiens
aaaaaaacaaaacactttttytccagcaaaacaggatccaagaaaagaaaaacataaaggctttttcaatatatctataagttggatattcactttaaattaagctgagcactctctaagaaaatccttttaactcccttattacccaacttcagccacaacaagcagccaatatttctggctttcaaacgctactgaaggtcactacacaggtgaaaccaacacgcctcaattaaggttatgctttaaccacaagtgtatgaggtattttcaaaggggctaagcagttcttacaaaatttagaacctttaaaggtaacccagagaaaggaagatttaagaaaaaaactagaagttgttcatggaggggaagagaatcagcaagtagcaaaagtcacacagatatcagtccaaaagtactcattccctaagtcaggtttgaacctggctgttactataaaacggtggaggctaaacaaaacattgctacatggttacaggtcactctcccgaggatgtaaaacaagatggaggcctgcagcaaagtttgctactgaccttacagaaagtcatgcagagcacaccaaattggctacagcttaagaccaacctgacaaatctttttttataattaaaactttacagagaatataaacagt

SEQ ID NO: 953025 - DNA, 623 bp, Homo sapiens
cactggccagaacttccaatattatgttgaataggagtggtgaataggagtccttgtcttctgccagttttcaaggggaatgcttacagcttttgcccattcagcatgatactggctctgggtttgctataaatggctcttattattttgaagtatgttccttcaatacctagtttattgagagtttttaacatgaaggggtgttgaattgtattgaaggccttttctgtatctatcgatataatcatgtgttttttgtctttcgttctgtttttgtgatgaattacgtttattgatttgtgtatgttgaaccagcattgcatcctggaggtaaagccaacatgatcatggtggaaaagctttttgatgtgttgctggatttggtttgccagtattttattgagaatttttgcattgatgttcattggggatattggcctgcagttatttgtttgtttgtttgttttttgtttttcatttcattgcatctctgctaggttttcatatcaggataattctggcctcataaaatgagttagggaggagtccttcctttttagttgtttgaaatagtttcagaagaaarggtatcagctcatctttctaccactggtataattcag

SEQ ID NO: 953026 - DNA, 632 bp, Homo sapiens
cgatgaagggatccagaagaggggtgctgtttttacagttaaatgcaaagacttttataagaaactgatgagggctgggtgtcttatttgcataaggcacaaagttctggtagttccatcccattcttttaatrcgcatgtgggccctaagcttgagttactccatattgctttattccgcttactgcacatgttcaggggatggaattttccattgcaggtgtgtttgggcaagtcacctgtgcagcctttcttatctgtgtggctatgggcatgtcttaggcaagcccgactgtgcaagttcccttatctgtgcctgcaggctgttcttttgcttgaaagaattcaacagatgacctaccctaactgcctgtctgacccgtttcttcctttctcctctctcattacattgtgttgattactgtaattttttaggaagttttaaaattgggtactatgatgcatccaactttttcttttcaaaattgctttggctattttagtttctttgcttttccatataaatctttttagactcagatgtctatatgtacaaaatatcttgtttttcattggcattatgttaaatctatttgtattggttcaattttgggagaactggcatcataact

SEQ ID NO: 953027 - DNA, 590 bp, Homo sapiens
ggcagatctcatgtcaagtatttttaccacaatgaacaaaacagagctatagtatattattatattggcataactctaggaaagtaatttagcaatatttatctattgtcatgaaaaagttcaaaattgttgactccacaatcccacttttgaggcacccacttttgaatcccacttttgaaggaccaacttaacaaaatgttgtaagatgtggaacaagtcttatacctaaagacatccattaaagtaacatgtgtaactgtaaaaaagcaaaagcagtaatagtcaatgggggactattccttccatggatttgtatctaaccagtgaaaataaatgtatttaaagtaagtcagtaccatggataatttctcatataatatttaataacaattatttgattattaatatgcacattgatgctgagagggaatacatgaaaattgctaaagctgcaktagggtgaagaaattatggatgatgtttctttttgtttttgccaaaatttctgtaatgctatgttatatttggatcattaaaataaatacatttacttattatacacatgaagcactgtttataaaaagatg

SEQ ID NO: 953028 - DNA, 590 bp, Homo sapiens
ggcagatctcatgtcaagtatttttaccacaatgaacaaaacagagctatagtatattattatattggcataactctaggaaagtaatttagcaatatttatctattgtcatgaaaaagttcaaaattgttgactccacaatcccacttttgaggcacccacttttgaatcccacttttgaaggaccaacttaacaaaatgttgtaagatgtggaacaagtcttatacctaaagacatccattaaagtaacatgtgtaactgtaaaaaagcaaaagcagtaatagtcaatgggggactattccttccatggatttgtatctaaccagtgaaaataaatgtatttaaagtaagtcagtaccatggataatttctcatataatatttaataacaattatttgattattaatatgcacattgatgctgagagggaatacatgaaaattgctaaagctgcattagggtgaagaaattatggatgatgtttctttttgtttttgccaaaatttctgtaatgctatgttatatttggatcattaaaataaatacatttacttattatacacatkaagcactgtttataaaaagatg

SEQ ID NO: 953029 - DNA, 550 bp, Homo sapiens
caaactgcagtacacattaagcaatccagctttttctaatgtcatgactttcctctgcttctggggagcacttctagsattagtaatggcacttcctgtgggtcccatggtgttattcaaggtttaaactattgcattaaacatgatgaaaaatgtgcaagaaccaggagagatcactttttattgcgtctgcactttgctggccgacaaacctctcacacggagatgattggcatcacatggcgttttaagtggatgcttgcaacacttgagctcactgcagtagcaacaggagggaactacagaattattacggtagtacagcaggtacaacagttagttttatgcagatttaatactgcatctttacctgtgtttacatgtctctcatcatgaatggtgccatgtatggtctatgtgtgtgcaaaagttttggcaaattttaactttttataatagatgtatgtatatttcatggtagtaaatgacaaaatagtgtctacatatattttatacactcctaacacacctaactttttctttttttgat

SEQ ID NO: 953030 - DNA, 612 bp, Homo sapiens
cacctcctgtgggaaaatagaggtgagactgagaatttcagaactcatttctgaacttaaactccacatcctggatagcagctcctcccctccctgcttcttgtccctgtctctgacatttctccaccctgttttccccttggatcctgcccactttcacagttttttttttttttttttttttttttgagaccaagtctccttctgtcacccaggctggagtgcagtggtgtgatgtcacctcactgcaacctctgcttccccggttcaaaggattctcctgcctcaaccttgcaagtagctgggattacaggagcccagcaccatgcccagctaattttagtatttttagtagagttggggtttaccatgttggacaggctggcctccaactcttgacctcagcctcccaatgtgctgggaatacattgtgagccaccgtgcccggcccagttctcacttttcatgctggctttcagtgccattaggggagaggttcctgttacctccatggacctggcatggtcagcagtgctttccctgaggagctggtgaatggccaaggcctctcagcttcctcaccaccaccatcsccccttgggcctcctcact

SEQ ID NO: 953031 - DNA, 612 bp, Homo sapiens
cacctcctgtgggaaaatagaggtgagactgagaatttcagaactcatttctgaacttaaactccacatcctggatagcagctcctcccctccctgcttcttgtccctgtctctgacatttctccaccctgttttccccttggatcctgcccactttcacagttttttttttttttttttttttttttgagaccaagtctccttctgtcacccaggctggagtgcagtggtgtgatgtcacctcactgcaacctctgcttccccggttcaaaggattctcctgcctcaaccttgcaagtagctgggattacaggagcccagcaccatgcccagctaattttagtatttttagtagagttggggtttaccatgttggacaggctggcctccaactcttgacctcagcctcccaatgtgctgggaatacattgtgagccaccgtgcccggcccagttctcacttttcatgctggctttcagtgccattaggggagaggttcctgttacctccatggacctggcatggtcagcagtgctttccctgaggagctggtgaatggccaaggcctctcagcttcctcaccaccaccatcgycccttgggcctcctcact

SEQ ID NO: 953032 - DNA, 586 bp, Homo sapiens
tacacctttcttctatatatttatgacaaattatttaatgttaacaaaaataaaattaggcctctgggtaatcaaagaatggaaactgatgtttgccattttaactagaaatagaatgtattgggatgatggaatcagcttatggaatcaacaagaaagctggagaactgggctggagaccagggcacagaggcaagccatggatcagttttgaggcatcatggctactgaacataccctatcactgtggctgaactcctttatcttcacagtaaaatccatctatgattttgctgactgtgaacttgagttagcccttcaggggttcatctaccagtgagagcgttacaggttgagcctcggccatgggtctgtgccttggctgggaaggggtagggacgcatctcttgtgactccaagagtagggagcagttctttctggtgactcttatctgaacttgtctaagaatctgtgtaaaaaaaaattcccactggacatttgttaaamatggcaagacagattttattcaagctattgcagcaggggagaaagatgtcaggacttagctgagctcaattctaaata

SEQ ID NO: 953033 - DNA, 544 bp, Homo sapiens
ggctcaagtgatccacccacctaagcctcccaaagtgctgggattacaggcatgagccaccgtgcccrggcatatttttgaaaaatgttatttttgaaaagtgacagtaccaagtgttggccaggatgcagagcaactggaattctgatatgttgtacaaaattgtacaaacaccttgagaaacagttcagcagtttctcagtgagttaattaaccaatacacatttattgtacaaccagaaaacccatttaaaggtgtttatcaaaaagaggtagaaataaatagatgtttacacataaaccaatgtgtgaatgttcacagcaacttttttcattgccaaaaatcgggaagcaacccaaatgtccctcagatggtaagtggataggtagacaaattatggcatatccatacaatggaataatattttgcaacaacaaaaaatcaaacgtgcatgcggtaactcaggtgaatatcaaaaaaagcacagtgctaagtaaggaaattagactcaaatgcacaatataattatgtttatatgacatc

SEQ ID NO: 953034 - DNA, 610 bp, Homo sapiens
atagttactgttaactattgtcatcctcctatgctatcaaacactagaacttattccttttatctaattatatttttgtacccattaaccaaycttttttcatctccctctccattctaccctttccaatctctggtatccaccatgccactctctacctccattaaatcaattttatttaacactcatgtatcagtcagaacatgcaatatttgtgtttctgtctctggcttatttcatttaacatactgtcctccaggctcatctatgttgccacaaatgacaggatctcattcttttttatggttgataataatctattgtgcatatatactacatcttttcttctttctcccattgataatgaacacttaggttgattctacatcttggctgttatgaatagtgctgcaataaacatgggggtgcagatatctttttgacatactgattcccttttcttaggatatttatgcaccagtggggttgctggatcataagatagttctatttgtagttttttgaggaaactacatactgttgtccataatagctgtactaatttacatttccaccaacagtgtatgagagttcccttttctctgcatct

SEQ ID NO: 953035 - DNA, 594 bp, Homo sapiens
tccctggccagaacttccaataggatgtggaataggagtggtgagakaggatatctttgtctttcggtggttttcaaggggaatgcttccaccttttgtccattcattatgatattggctgtgggtttttcacgtatgactcttactattttgaggtatgttccttcaatacctagtttgctaagagtatttaacatgaagggatactgaattttattgaaggcctcttctgtatatatacaaataatcatgtggttttaatctttacttctatatatgtgatgaatcacatttattgatttgcatatattgagacaacgttgcatcttggggatgaagcctacttgatcgtggtggataagtgttttgatgtgctgctggatttggtttgccagtattttgatgaggatttttgcattgatgttcatcaaggatattggcctgaagttttctttttttgtcatctctccaccaggttttggtgtcagaatgatgctggtctcatagaatgagttagggagtaatccctccttctcaattttttttggaatagtttcagtaggagtggtaccagctcatccttctacctctggt

SEQ ID NO: 953036 - DNA, 607 bp, Homo sapiens
ctcatggcaagttcccagcttgaaaaagcaaagaactgaaaagcagaggtacctaacccagagtggagaccataaagggcagggaagcacacaagtcagtcytctgacattcctgaacaaatagatttcctttaactcatttatctccatggagtcaggttgactgttgggcagagaagttggagagttggaggggaagagtgacagaaacattttaattacaaagttaggttcgttatagaaatgcaagcctgtctcaacagttggtaatcagtatgatagatctctcagtatgagagatttgaagtaaataggccatatcatcagtagaaacagaaaaaaagctaattctacccaactgtatgtttgtacccattaaccattccctgtctacctccccctgccactacccttctcagcccctggtaaccattattctactctctatctccacgatttcaatttttttagcttccacatatgagtgagaatatgtgatatttggctctctgcacctggataattaaaaattttaaaaattaagaaaataatgccaactcttaaacacgtcgaagtgcatttaccataaaccaatagtaaacatcat

SEQ ID NO: 953037 - DNA, 560 bp, Homo sapiens
tctcagatggaaatgaggaacttattgggaactggagcaaatgtcacgtgtgttatgcattaacaaagagcttggctgcattctgttcatgccttagggaatctgtggaagtttgaactaaagagtaatgatttagtgcatctggtgaaagaaatttctaagcagcaaagcattcaagagctaccctggcttcttctaatagcctatgctcagatgcaggagcaaaggaatgacttaagttagaacgtatgtttaaaagggaagcagagtgtaaaagtttggaaaccttgcagcctggccctgtggcagagaaagaaaaagctctttagggagaggtattctagcaggccacttgctagaggtatttgcataactaaaagtgaaccaagtgataatatccaaggcaatggggaaaaggcctcaaaggcacttcagagactttcccagcagcctgtcccatcacaggcccagaggcytgggagaatggaatggattcatgggccaggcccagggcttcactgctctgcacaccctcaggacactgcaccccatatcctggt

SEQ ID NO: 953038 - DNA, 576 bp, Homo sapiens
tggaccacagttcacagagaggtaaaaattgggaaccagcctaccttattaaactcattctcaatacccacccacaagcaaaagrcatttaattctagacttggtggccatgccatgaagcccttctcatactcagtccccttaccctttttctcacatcttatttctctctctctcccacatatctcttggttcatccaattcctttgctcttaccgcctgccttaatctggctcccagaatcagtcaccagttggtgttcagaatcaaggatcacactggacatctgatcagagccaagcagtttgacaaggcttggaagaagagtcagaaagggtgtgttaaatactattgctgtgtggccactttagcgagcatgaggatagaagtataactaacagcggaggacatgattaatgtggtagaatggcctcagctcaagtggctttttatggttgaaggatataatcaaggttgggagaaggtcgttaaggtcaggaatgcaggtgtgaccagagagaggttgggaacaggtctgggaaatttatctgagttgttgggtatcatcaggattca

SEQ ID NO: 953039 - DNA, 613 bp, Homo sapiens
gcagacagagccccagctccccttctgccagagccgggagaaactccttaggtgctgtctaggttggggtattcttcaacaggtccagcaacatttctgtctcactctaatttctatgcatccatctgtaggttggagaagtgatctcgaagtagctgcattaaaaaaaaaatctgacagtaacattttctggggtttactttttaattccctctgtagctagaaacagacattaaaattaatgccagcccgagtgtaaaggataccttagtaacaaacttgcttcattttagattcataatttctcattactaaagaacatttgtattttaggttttcgaaacactacaacatccacaaggatactgcagtagattacaacgtgtttttgaagaatctcagcataaataacgacttgaaccttagatattgtatgggaaatcaaggtaagtatttttaaagtatatagctaaagatttcaatatcttttggcatggtaattcctgttctttggatcattcctgaggaaatactttcaaatataggaaatayattatctacaaagctagccatggtatcattatttataagaataacgtcaatgcctaagaat

SEQ ID NO: 953040 - DNA, 428 bp, Homo sapiens
tcttttttcccccttcctttcttctgggttgataatgacaatttcaaagaaaaactttaattaaagattttatacaaaatasccaaaagtagaataataaggaaaatgagcattgatgtgtttattgtaagagaaatcctttttcatggtttcatttcaaatctgtacttcttaaatttaaaatgaatttagtggtggagacagaaaggtgccagactgacagccgtgggtgttgaactcttccgcttgctgctgagccaagacatgggggtgcccgaagccccctccccttgggactcagtctcagtctacaggcaggcgggtgggatgcggttcctgacccccttctcttagaagccaggtgagaaaaagtggctccgggtgaggagctgcacagaaaacagctacacggaagccaataagaatga

SEQ ID NO: 953041 - DNA, 446 bp, Homo sapiens
caaggctcagctaggctgctggaggatgagggaccattagagactagggggagaacagccccagttatcctggctgcagccatcctacaccrtcttagagccaactgacttgcaaatacatgagagagtccggccaagaccagcagagctgcccttcctaacctttagttgaccacagacacatacgtgagccctgctgactcacagacatgtgagcaattacagttgtttttaagtctcgtgagtattggggtgatttgttatgcagcattattgttgcagtgcataactcattactaactaaatactcagcatacacacagatgatgtacacacacagcaaaagcatataccattgacatacacataggattgttggctctgtgtactaaaagtattagttagttatctgttgctgttacaaattactccaaaatttaggagct

SEQ ID NO: 953042 - DNA, 628 bp, Homo sapiens
attaaattattatttttaaaagtaattttgttttgtaaatataaaaacatattacrgcttctgcctttcaaatattattttaatattattttaaagttcacttttttgtgaactttttgacattaagaattatatcttatttacctttgtatccttgcaacctatttcagtgcctgggtacagagtagatcctccaaaattactaaacagttctttggatttttttcttggtcatagaaggtacacgcaagtaacttttacatacttaatagctaccctgcacttctctaggtcatttggacagaatccaacatgtaccacaatagacatttgggcacttaaatagatattatagcatatagtggtcagaaaccactggaaaagccaatcctgtttttttttttttttcacagcaaaatcacactgtttgaaataccaggatcctggaacttagaaaagtctagatttgttacagtgtcaacaaagcatgatatgtgttttcttgtgcttccacatggtcacacacacaaattcaacaaaaccaaatcaaacaaaacgatgcgtgcatttttggggtgtgaaaaagccactcacaatcgtaaataatgtacactcaagaagctgacag

SEQ ID NO: 953043 - DNA, 628 bp, Homo sapiens
attaaattattatttttaaaagtaattttgttttgtaaatataaaaacatattacagcttctgcctttcaaatattattttaatattattttaaagttcacttttttgtgaactttttgacattaagaattatatcttatttacctttgtatccttgcaacctatttcagtgcctgggtacagagtagatcctccaaaattactaaacagttctttggatttttttcttggtcatagaaggtacacgcaagtaacttttacatacttaatagctaccctgcacttctctaggtcatttggacagaatccaacatgtaccacaatagacatttgggcacttaaatagatattatagcatatagtggtcagaaaccactggaaaagccaatcctgtttttttttttttttcacagcaaaatcacactgtttgaaataccaggatcctggaacttagaaaagtctagatttgttacagtgtcaacaaagcatgatatgtgtttkcttgtgcttccacatggtcacacacacaaattcaacaaaaccaaatcaaacaaaacgatgcgtgcatttttggggtgtgaaaaagccactcacaatcgtaaataatgtacactcaagaagctgacag

SEQ ID NO: 953044 - DNA, 797 bp, Homo sapiens
cttggagaaacagtgtaaaccggcagtgtaaacaagagcagggcatgtatgagtcgttgagaacggtgaataggagtatgactagacagaagatagtagggatgacaagttttttggggcacagtccaacttggtttggtgtctggaatgagactggggcctaataaaaaggagcgtccaaacaggagctcaaacgggctgtaccctgtggcattccaaggacaggcctgaattctgagaagggaaagtggtaaaagtattgtccagtcctttttaagttggtggctgagcttggtgaggtgtgttttttaaagaccattagtccgttctacctttcctgaagactgaggaccgtaagggatataaaggtttaactgaataccaagagcctgaaaaactgcttggctgatttgactaataaaggctggtccgttatcagactgtatagaggtgggaaggccaaactgaggaattatatctgacagaagggaagaaatgaccgcagtggccttctcagatcctgtaggaaaggcctctacccatccagtgaaagtgtccacccagactaagaggtattttagttttctgacttggggcatattgagtaaagccaatttgccagtcctaggcgggggcaaatccccgagcttgatgtgtagggaagggagggrgcctgaataatccatgaagagtagtagaatagcagatggaacactgagaagttatttccttgaggatagatttccacgatggaaaggaaatgagaggttctaagaggcgggctagtggctagtact

SEQ ID NO: 953045 - DNA, 609 bp, Homo sapiens
agagtaactgctccctcataatttctcacagtagttatgagagtaaaatgagcctcagagggtccagcctctcaaggttcacctctatgggaagctgacgcctccgtgagttcaggaaataagacattgagtagaatctcaatccatttagaatgagctgctttgtttccttagatcctttctttttgtggaattctcaaagaaaaataatgattgtaagagatgctggtggaagagaagtgtgatgcgtaagaacttacactctgaaatcaggtagacctgggttttaacttcatctctgccgtttatacctgtgtgtctcaagcaagctacttaaccactgtgtacctcaagttcctctacagtaaaacagagatcaaagtagtagtagaaggaagctaacaaagattaaattaggtaatgtacatttgatgatgatgacaatgatagctctaagcagagtatctggcacatttcacctcggtacatgttagaacttgygtttggctccactcttttgctgacagcttctatcaaaaataactaggttgcttttgtggggacctagaagcttaaggagatgggcagggatagagacatgatttcagg

SEQ ID NO: 953046 - DNA, 572 bp, Homo sapiens
gggtgggcctgcctctcccagtccactgactcaaatgttaattttctttggcaatgccttcagagacacaaccaggaacaawactttgcatccttcaatccaatcaagttgacactcaatattaaccatcacaagtccacctcttgtaaacatgaacccatactcaccttctgaaatcatacataatcctcaaataaagacaatcataagatcataattactgctaacataatacagctatcctttgtacaaccagaagctcactaatccttaacctaaatgctattacttaaagttaacaccacttaaatgttgatgtgaagtcaataaatactatgtcacatgataaagaaaaaataaaggaaataaaaatatttttagtataagtgtaaacgtgcacacgcattcttaacagaataaggagaaaatatttatgacaattataatccttgtttctgcaactggtcacaaggtcatagctgatattgatgactacctctcctattactcactctgtattccctgccaaaggctccaaacaacatccctatctgccactgatacctgaagca

SEQ ID NO: 953047 - DNA, 699 bp, Homo sapiens
cagtgggtgcaggacagtgggtgcagcgcaccgagcgtgagccaaagcagggcgaggcatcgcttcacccgggaagcacaaggggtcagggaattccctttcatagccaaacaaagctgtgacagayggcacctggaaaactgggtcactcccaccctaatactgcacttttccaatggtcttagcaaacagcacaccaggagattatatcccacgcctggctcagagggtgccatgcacacagagccttgctcgttgctagcacagcagtctgagatcaaactgcaaggcggcactgaggctgggggaggggcgccagccattgctgaggcttgagtagggaaacaaagcagcagggaaaatcaaactgggtggagcccaccacagctcaaggacgcctgcctgcttctatagaccacctctggaggcagggcatagccgaacaaaaggtagcagaaacctctgcagacttaaatgttcctgtctgacagctttgaagagagtagtggttctcctagcacagagtctgagatctgaaaacgaacagactgcctcctcaagtgggtccctgacccccaagtagcctgtctgggaggtgccacccagtaggggcagacagacacctcacaatgctgggtacccctctgagacgaaacctccagaggaatgatcagacagcaacatttgctgttcagcaat

SEQ ID NO: 953048 - DNA, 596 bp, Homo sapiens
gggtgcagtatagtggatgcagtgcactgagcatgagccaaagcagagtgaggcatcgcctcacccgggaagtgtaaggagtcagggaattccctttcatagccaagcaaagccatgacagaaggcacctggaaaatcgggtcactcccaccctaatactgcgcttttccaatggccttagcaaacggtacgccaggaaattatatcctgcccctagcttggagggtcccacaccgagggagcctgactcattgctagcacagcagtctgagatcaaactgcaaggcagcagtgaggctgggggaggggcgccagccattgctgaagtttgagtaggtaaacaaagtggctgggaagctcaaactgggtggagaccatcgcagcacaaggaggcctgcctgcctctgtagactccacctctggggtcagggcttagcgaaacaaaaggcagcagaaacctctgcagacttaaatgtccccgtctgacagctktgaagaaagtagtggttctgccagcatggagtttgcgatctgagaacggacagacagcctcctcaagtgggtcgctgacccccaagtaccctatctagggggca

SEQ ID NO: 953049 - DNA, 596 bp, Homo sapiens
gggtgcagtatagtggatgcagtgcactgagcatgagccaaagcagagtgaggcatcgcctcacccgggaagtgtaaggagtcagggaattccctttcatagccaagcaaagccatgacagaaggcacctggaaaatcgggtcactcccaccctaatactgcgcttttccaatggccttagcaaacggtacgccaggaaattatatcctgcccctagcttggagggtcccacaccgagggagcctgactcattgctagcacagcagtctgagatcaaactgcaaggcagcagtgaggctgggggaggggcgccagccattgctgaagtttgagtaggtaaacaaagtggctgggaagctcaaactgggtggagaccatcgcagcacaaggaggcctgcctgcctctgtagactccacctctggggtcagggcttagcgaaacaaaaggcagcagaaacctctgcagacttaaatgtccccgtctgacagctttgaagaaagtagtggttctgccagcayggagtttgcgatctgagaacggacagacagcctcctcaagtgggtcgctgacccccaagtaccctatctagggggca

SEQ ID NO: 953050 - DNA, 702 bp, Homo sapiens
tgtccaaagcagaacctaataagggagtcatcaggacatcagattgcagcaagtttaggaagactatgagcaaattttagggaagcaaatcaataagtggataatcgtaaatgtctcggtcctgcccagcactccatccaccctgagatttttactgtcagtaaagagagtgtctgaactgggagcaatcccagaggagagaaacaaagcaaggaaaatgagcagaatgagtatagattcactggggaaaagattaaattcaccgttattattaatattaccattattattttataatcaaacacttatgagcagttgtattccaaaaagcaccttggtaagtggctgagaaatatagatgctcccgggtctcttttcagtcccaggcttggtgcccatttgtctccagggactcaaatactttccctccacccataaagctgcaagttcccactctttccccaggggaatagatatgctaaggtctggttgcagtctccctccagactgcctcaaaaagcacctcataggctctttttttgttgttttaggagtcttaccactgaccaccaaaggaaaaacaggagaaaaaataaaaaacttaagaaaagtacaaatacatcttgcakagttcttacctctgtgatccttaatcagcaatgatgagagaatggagccagtaggggacagtgcagcgcagtt

SEQ ID NO: 953051 - DNA, 707 bp, Homo sapiens
tgtctatggagtagccattctcttattccgttactttcctaataaatttgctttcactttatggacttgccccgaattctttcttgtgcaagatccaagaaccctctcttggggtctggatacggacccctttcctgtaacatgtgtgtctatttccaggggccaccttgagccctagtccacctggagcacaggctgggatcagtaacaatggccgggttgttgactaaccaccttggggtaacctctggagtttttcagctttgtctccatgcttggtctgtctcaagattagtccctggaacttttaagtaagcacagaattagatacaaagatgcaattagatacatatgcctggggtaaaaggagtacacagtgagaaagggaagggagtgaagtttcaaggctacattttaagactaagagaaaaggattttgtttcaaggttacatcttgagagtgaaaagaaaggataaaagaaaaaaagcttttaaagtgtgttttgggctgggcgcggtggcttgcaccggtattcccaagactttgggaggccaaggcgggcagatcacgaggtcaagagatcaagaccatcctggccaacatggtgaaaccccacctctactaaaaatacaaaaattagctgggygcggtggcacccgcctgtagtcccagctactcaggaggctcaggcaggagaatcgcttga

SEQ ID NO: 953052 - DNA, 458 bp, Homo sapiens
atattaaatagcagtgactttcccattgtcagtactacactggtatttgttggatgcatgaatatccttcaaagtaatatgcgaatcaagatttagtcagtaatgacacctgttaagtttggtagaagtcttgccacatatatacgtatttttaaaatcaagaaaataaattaattactgcagtttcatggggtgcatcctttacatttactttgtctactccctctccataactcttagcacaaggaagctgcttacatacttcctttcttcgtgtcttctactcttctcagcatgagtacacataagtaggcagcaagaatcacaaaaagtctgagattttaccctgcttgtaagctaacacagtagcctcagttgcacggatataggaagaagacccaaggatccaggktatgggggcacttggtgagcagtttagtaagactacttgtctagta

SEQ ID NO: 953053 - DNA, 656 bp, Homo sapiens
cctttccaacaccagtgtcttcctctgggctttgggtgtcttctccctgaccgtctccagacctttacactggccaggatcctgtcttgtatttgtattcctccttttaggtggatccccgcattgatattcagatgtgcttgtctccttccccttcataaactaccttttttttttttttttttttttgagacggagtctcactgtgttgcccaggctagagtgcagtggcgcggtcttggctcactgcaacctccgcctcttggattcaagtggttctcctgcctcagccttctaggtagttgggattacaggtgtctcccaccatgtcaggctaacgtttgcatttttagcaggtgcagggtttttgccatgttgtctgggctggtttggaacgcctgacctcaggtgatctgcccaccttggactcccgaagtgctgggattacagccatgaggcagcacgcccagccaagagggaaagagggagggagtgggaggccaaaagcctacagcacctggtgtttccccgaaggtggggtggtagtctcccatccaagtaccatgcaggaccggaccgaccctgcttwgcttctgggatcagacaagatctagcacattcagggtggtatggcggtagaccacaaacttcttaaa

SEQ ID NO: 953054 - DNA, 451 bp, Homo sapiens
acctgaagagaagcagctgtgctttgttttttgctaagtcttgggcagttcagtttggcacttagagtattccagctccttttcttataagaatatctatctttatctatctatctatctatctatctatctawctatctatctttaactaactaactaactaactaactaactaaagcattttaaaacgtggcatctcgctttgttgctcaggctggtctccaactgttggactcaagcactcctcctatcttggcctcctgagtgtctgagactacaggcacaggccaccatgcccagcctcagctccttttcttttaaatctcttggtccaatttatattctttgccagcatccttgggacagcacaaatgttgaagtttggggaaacattttgtacaactttgttcactgaatcacagtcactgcttgtgctgttgataatcaaaac

SEQ ID NO: 953055 - DNA, 582 bp, Homo sapiens
gatggacattttggtggatttcttcctggttcagtcttgggagtgtatatgtgtccaggaatttattcatttcttctagattttctggtttatgtgcatagaggtgttcataatatcctctgatggatatttgtatttctgtgggttcagtagtaatatcccccttgttgtttctgattgtgattatttggatcttctctacttttttctttcttagtctagctatcaatctatctattttattaattgtttccaaaaagcagttcctagattcattgatcttttcgatggtttttttgtgtgtatgtctcaatgcctgtattagtcagtttctctacagggacagaactaataggatagatatatatgtataaaaaggtattattaagtattaacttacacaatcacaaggtccgacaataggttgtttgcaagctgaggagcaaaaagagccagcccgagtcccaaaactgaagaacttggagcctgatgttctagggcargaagcatccagcacttgagaaagatgtaggctgggaggctaggcccgcctctccttttcaggtttttctgactgcttta

SEQ ID NO: 953056 - DNA, 573 bp, Homo sapiens
ttgtcaatattaaataaaaatgttaaaggcagctataaagaagaggcaggtcacctacaaaaggctaacagcagacttttcataagaaactctataagcaagaagagtttggagacttatattcaacattctttaaaaaaatttaaatcaataattttatattcagccaaacaaagcttcataagtaagggagaaataaaatccttttcagacaagcaaatgtggaggaaatttgttagcaccagacctgccttaggagaggtcctaaaaggagtgatagctatagaaaagaaatgtcgttaccagccactacaaagcacacttaagtacatggaggagtgactctataaagcaaccacacaaacaagtctgcataataaccagctagcagcatgttgacagaatcaaacctacatacatcaatacaaactttgaatgtaaatgggctaaaggaccccmaaaaaaagcacagaatggcaagctggatgaaggagcaagatccagtggtatgcagtcttcaagagaaccatctcacgttcaatgacacaaataggctcaaaataaaggcatgga

SEQ ID NO: 953057 - DNA, 608 bp, Homo sapiens
gacagaagtaggcttcagacagtcggtaataacaaacttctccaagataaagaaagaagttcaaacccatcgcaaggaagctaaaaaccttgaacaaagattaratgaatggctaactagaataaacagtgtagagaagaccttaaatgacctgatggagctgaaaaccatggcatgagaactatgtgacacatgcacaagcttcagtagccaactcgatcaagtggaagaaagggtatcagtgattgaagatcaaattactgaaacgaagcaagaagagaagtttagagaaaaaaaagagtaaaaagaaatgaacaaagcctccaagaaatatgggactatgtgaaaagaccaaatctacatctgattggtgtacctgaaagtgaaggggagaatggaacaaagctggaaatcacagcaggatattatccaggagaacttccccaacctagcaaggcaggtcaaattcaggaaatacagagaacactacaaagatactcctcgagaagagcaactccaagacacataattgtcagattcaccaaggtagcaaagaaggaaaaaatgttaagggcagccagagagaaaggttggttacccccaaaggg

SEQ ID NO: 953058 - DNA, 608 bp, Homo sapiens
cgactagaatttttttgcaaatcccatataatgttctatatacaaccctatgttgtctgtgaactaaaacagctttacttttcgtttcaaaccttgatgtctttaatttctttatacaatgagcaaaagttaatgttgagcagaaatagagaagacagaaatcctcatcttattactgattacaagagaaaaacactgtctttcatcattaagtgtgatgttagatgtaggattctcaaagatgccccttatctcatggaggaaatccctctaattcctcttttcttaaaaggttttgtcaaaaatgggtgatgaattttgttaaatgttttgtctatatctattaagatgattgcgtggttttaatcttttagtctactaattgttaattgattttgagctgttaaaccactcttacattgctgggataaattccatatgccacaatgtttaatcttctttatatgttactggrtttatttggcttttttttttttttttttgagacagggtctcactctgttgtccaggctggaatgtagtggcatgtgatcacggctcactgcagtctcaacttactgggttcaaggaatcttcccacctcagcc

SEQ ID NO: 953059 - DNA, 568 bp, Homo sapiens
gatttgattctcagtttggtcrtgttggtgtatagcagtggtactgatttgcttacattgattttgtatcctgaaacttcactgaattcatttatcagatctaggagtttttgaatgagtctttagagttttccaggtatacaatcatatcattggcaatcagtgacagtttgacttcctcttttccaatttggatgcctttatttctttctcttgtctaattgctctagctaggactatgccatatgatttaatacaatatctttatgtttgcttacatttcttttgaatgtgaacggtgccatgtatgatctgtaagtgtgtgtgtacgttctgataaattttcactttttataatagatttgtgtgtattttgcagtaaataaaaaattagattagtatttacatatattttatacattcatgacataacttcacttaaccttttttctttttttttttgatatttttgaggctctgaggtttgtctttgaattttttcaaattgtttcaaacctccaaaattttttccaatatatttattgaaaaaaatctgtgtataagtgga

SEQ ID NO: 953060 - DNA, 600 bp, Homo sapiens
aaaaaggtttgtttttaattttcgtgttttttttggcaagttggccaatagtttacaaacattttccaaataatatttctttctgcattgctttcagcacctaggattacagaggctgttactttataatgctctacgatgtttttagcatttgcatgtctattcatcatatcaattgtaaattacaagctcttgaaaatcaaggatttattatttatttgtatttttcctctaatagcgttaaatacatttctgagcatacagaaattattagataaacattttttatgtatgtgtgaatgaatgaataaccataaccagtgagtatgcctggatatagcagactgaatctgtgaattcaggcttcccttggcttccaaaattattgagatgctaaaaaaaataataaaataaaatgaagtttatatatataactgaggccagacatggtggctcaagcctgtaatcccagcactttgggaggctgaggtgggcrgatcacataggaaatcaaggccatcctggccacatcgtgaaacccccctcaactaaaaatacaaaaattagctgggtgtggtggcacgtgcctgtaatcccagc

SEQ ID NO: 953061 - DNA, 812 bp, Homo sapiens
tgccagctgcactacctgaggtttggagagatatggtgcaagccctcttttagctgtgccatctggtgtctctctcygtcacgtgccaacctagttcactggttctcagaactaggacttgcctaggaactgcagtccttgtgtcctagactgtcattcaagtatacctaggacctcagagtacttttgcctgtagtgatgaggcttgtctgaactcaggttccgagtgctgggatgggtgattctcctctggctagggctggtccgaatgctcccttggtgtgtgggcatggactgagtcagcatcgctttgctctccaccgcaatagggcagcactgagtttaacgctaatgttataggagttattaagaaattattttaggtagctagagaggaaaaggtgtccttgggaagtttttgtctctttcaaagcagctccaaaaatgtttcttgtctagcaggaaagccctggctcttagagccaggcagacaacctttaatatgcaaatgcaggccattagaaactggatccacccaaacatggcaattcccactgttatcctcttgcccttgcccctacatgtgcttggcagcatggctgcccccacatatccccacgtgtgtaaaacatcatggcgccctgtatttgcaaattaaaaggctaggatgggagggccaattattttacgaactgcgtgaataacatgcctgatcaaaccaatcccctgcgccctatgcaaatcagacactgcctcctccagcctcctcatataactggctggtttccaccacactcagggtttcctctctt

SEQ ID NO: 953062 - DNA, 604 bp, Homo sapiens
atttcagacttgcatgacacctgtaactccttttgttttggccaatttctcccatgtggaacagctgtatttacctaatgcctgtacccctgttgtatctagaaagyaactaacttgcttttgattgtacaagctcataggcggaagggacttgacttgccttgtctcatgttagactttggactgcggacttttgagtcaatgctgaaatgagttaagactttggggaactgttgggaaggcatgattgattttgaaatgtgaggacatgagatttgggagggccgggagcagaatgatatgattttgctatgtccccacccaaatctcatcatcttgaattcccatgtgttgtgggagggacccagtgggaggtcattgaatcatgggggcaagtctttcccatgctgttcttgtgattgatagtgaataagtctcacgagatctgatggttccgtaagggggagttttcctgcacagtatctctctctttgcctgtcactatccacttaagacgtgactttctcctccttgccttccacatgattgtgaggccttcccagccatgtggaactgtaagtctattcaacctcttttttttttt

SEQ ID NO: 953063 - DNA, 784 bp, Homo sapiens
ccagatgtggtttcattgcttgagcaaattaataaatccctctggtatctggtatgcagccactgatctagcaaatgcctttttctccatacctatycatataacccaccagagcagctttctttcaagtggcaagaccagcaatacaccttcaccatcctacttcagggttacatcaactctgcagccctatgtcataatttagtttaaagagaacttgttcacctttcctttccataaggtatcatgctggcccattacgttgatgacattatgctgattgaacctcgtgagcaagaaataacaactactctagacttattggtaagacatttgcatgtcaggcaagggaaattattcctcctgaaattcaggggccttctatcttagtgaaacttctagaagtccagtggtatgggggcatgccaagatatccattctaaggtgaaggataaatttttgtatctggtgcttcttacaatccaaaatgaggcacaacacctagtggacctcttgattttggaatcaacatattccgttccttatttgggtgtgttactctggcccatttacccagtgacctttaaagcaaatagttttgagtggggcacagaacagaagcctctgccacaggtctgggctgctatgcaagctgctatgccacctgagccacatgatccagcagatctaatggtgcttgaagtggcagtggcagtagagatgctgtttgaagttttgggggaagacccctataggtaaatcacagcatgagccttttagattt

SEQ ID NO: 953064 - DNA, 644 bp, Homo sapiens
ttgggatacctcccttcatatttgtttgtagtagtatattttgggagtcctcattcttgggtctgggtcctcacagcctatcacagtcaagacagattagacatgggaggagggagagaatacagatttgacctgctcccctgtttttacccaataaggattattgtgaaacctcaggtcatttagaagttctccgaatttatcctggaccacatttgaaagctcagggaaaacctcacaggtactttcaagttatcctggtaaccaggcgtggcagagtgatccagcatggcagccaccaggttttgcttattggcactcaagcaaagctgactgtgccttcctgatagttctctgctgttttgctgtggcagattgcacagtggaaactggtggtgttatggtctcagctatggtgaaatgccagtgttcccagaaatgccctgagatgaaatacttaggaatatctcagcgaagtgtcttggagggccagctatgcttagaaaattctcattaacggccagrcacggtggcttatgcctgtaatcccagcactttgggaggctgaggcgggcggatcacgaggtcgagagatcaagaccatcctggctaacatggtgaaaccccatctctactaaaaatac

SEQ ID NO: 953065 - DNA, 644 bp, Homo sapiens
ttgggatacctcccttcatatttgtttgtagtagtatattttgggagtcctcattcttgggtctgggtcctcacagcctatcacagtcaagacagattagacatgggaggagggagagaatacagatttgacctgctcccctgtttttacccaataaggattattgtgaaacctcaggtcatttagaagttctccgaatttatcctggaccacatttgaaagctcagggaaaacctcacaggtactttcaagttatcctggtaaccaggcgtggcagagtgatccagcatggcagccaccaggttttgcttattggcactcaagcaaagctgactgtgccttcctgatagttctctgctgttttgctgtggcagattgcacagtggaaactggtggtgttatggtctcagctatggtgaaatgccagtgttcccagaaatgccctgagatgaaatacttaggaatatctcagcgaagtgtcttggagggccagctatgcttagaaaattctcattaacggccaggcrcggtggcttatgcctgtaatcccagcactttgggaggctgaggcgggcggatcacgaggtcgagagatcaagaccatcctggctaacatggtgaaaccccatctctactaaaaatac

SEQ ID NO: 953066 - DNA, 644 bp, Homo sapiens
ttgggatacctcccttcatatttgtttgtagtagtatattttgggagtcctcattcttgggtctgggtcctcacagcctatcacagtcaagacagattagacatgggaggagggagagaatacagatttgacctgctcccctgtttttacccaataaggattattgtgaaacctcaggtcatttagaagttctccgaatttatcctggaccacatttgaaagctcagggaaaacctcacaggtactttcaagttatcctggtaaccaggcgtggcagagtgatccagcatggcagccaccaggttttgcttattggcactcaagcaaagctgactgtgccttcctgatagttctctgctgttttgctgtggcagattgcacagtggaaactggtggtgttatggtctcagctatggtgaaatgccagtgttcccagaaatgccctgagatgaaatacttaggaatatctcagcgaagtgtcttggagggccagctatgcttagaaaattctcattaacggccaggcacggtggcttatgcctgtaatcccagcactttgggaggctgaggcgggyggatcacgaggtcgagagatcaagaccatcctggctaacatggtgaaaccccatctctactaaaaatac

SEQ ID NO: 953067 - DNA, 634 bp, Homo sapiens
caagtccatgaaagggtctttataagaaccttgcctgaggctgggcacagtggcttacgcctgtaatcccagcattttgggaggccgaggcgggcagatcgcaaggtcaggagatcgagaccatcctggctaacatggtgaaaacccgtgttcatttgaagactgccaggttagcacggataggggattattgtttctctaggagaggcatagaaaggcctaaatggaagcaaagcagtacccaggtagggttatagcttagagtcaagaggtaaaggtatgttactgagggactagaaccagagacatggtagcctactcaaggcatctgtaactggaaatgccagaaacaatataaatccaaaattccttaggtgagcagagttaaaccctgggaattaggtgcaaacgacaagtccaaacaatcagagacaggattggattgatgatgaagttgaaactttagaattaaatgaagaaaagttggaaggatttcaagttttcaaacatgaaaaaaattcagtacaattgctaaacatcagtctcctcatttattaaccagtggaaataataactacctacaagggtggccaagaagtttcactyggaataataaacataaaacacatactag

SEQ ID NO: 953068 - DNA, 550 bp, Homo sapiens
gggggatcccttctctccccagtcagtctggactctctgaagcctgcaggctggaaaagctgggtcattcaaacagcaaagatagtggcccacccctcccgtcaggaacaccaacctgtcctgggaaggcacaamactattgccagggactggctggaattccaagccagtgagtcttattctgtgaggcaccatggaagtggggccctcagaccaatgctgcttggacccctggattccacccccttcctaggggtacctgtggaccacctgccttccctgagttgcagtcacttttaccagggatcctggagccagagtatgtaaagctcctgagactctgtgcacacctgagtagctgctctgctgagacttcacacagctctgtgtgtcagactgaaggccccagtggagtgggttcatgaggggatctcctgacacgagagtttcaaaggtctgtgggagaatcatggtttcccaggattgcacattcattaaccacttccctcggtaggggaggttcccttggctctgtgtcacgcctgcatgg

SEQ ID NO: 953069 - DNA, 550 bp, Homo sapiens
gggggatcccttctctccccagtcagtctggactctctgaagcctgcaggctggaaaagctgggtcattcaaacagcaaagatagtggcccacccctcccgtcaggaacaccaacctgtcctgggaaggcacaacactattgccagggactggctggaattccaagccagtgagtcttattctgtgaggcaccatggaagtggggccctcagaccaatgctgcttggacccctggattccacccccttcctaggggtacctgtggaccacctgccttccctgagttgcagtcacttttaccagggatcctggagccagagtatgtaaagctcctgagactctgtgcacacctgagtagctgctctgctgagacttcacacagctctgtgtgtcagactgaaggccccagtggagtgggttcatgaggggatctcctgacacgagagtttcaaaggtctgtgggagaatcatggtttcccaggrttgcacattcattaaccacttccctcggtaggggaggttcccttggctctgtgtcacgcctgcatgg

SEQ ID NO: 953070 - DNA, 524 bp, Homo sapiens
acccaagtggcagagcagcttgcacagcagcctggacctgctgcagaactttctcctgttctggaacccactcaaaactggaaacctttcaggtcactcaataaatgggctggagtagcacactyaaatgaggaaggtgttgcctccaaaatccaagtaggcacgctaggcgttatgcctctttctgagttgtaggaggggccaaatacagcaacttatccttcaccttagaaggaatatctcaacaggccccacaccactggacttctagaaattttactgaggtagaaagttcccgagtttcagttagatttcacatcctctggcatgcaaatgtctcaccagtaagtccagtgtgtttgctacttcttgctcactggatccactcagcagaatgtcatcaatgttatggaccagtgtgatatcttgcagaagtgagaagcaatcaaactctctctgaataagattataacacaaagtcagagagttgatatacccctgaggtaggacagtaaaggtatatt

SEQ ID NO: 953071 - DNA, 653 bp, Homo sapiens
tgcagcaaattcatgcagaatcaccaaaaacaatggtttacttattgcattagccgaactcctaccctcgaactgcaaaaaaaaaaaaaacagaactaaaagcagtagccaccctctagagggtacaagcaatgactaagcaaaagagtactttttcttgctaaatggaatgaaaggaagcatattggtttttttttttttttttttttaatgagaaggagtctcgctctgtcgcccaggctggagtgcagtgtgatgtgatctcggctcactgcaagctccgcctcccaggttcatgccattctcctgccttagcctcccgaggagctgggactagaggcgcccgccatcacgctcggctaatttttgtatttttagtagagacagggtttcaccttgttagccaggatggtctcaatctcctgacctcgtgatcagcccacctcggcctcccaaagtgctgggattacaggcgtgagccaccgcacctggccacatactgttttttaaggaattctagagccctgggtgctttctccccatcctcaaatgcaagcatgtttgtaaatgagccaaccatgctgcaactgwactttgacatcagtcaattctttatgttccttgagcccagcatactatgactaaggatgacc

SEQ ID NO: 953072 - DNA, 605 bp, Homo sapiens
agatggggcagaaaaagtgagatgagacatttacttcctcaggtccttttccaggagtaaatgaccatcgtgcgcccatgggaagagtgctgcatccacggaggacatgggccaacagtgctctcaaatgggtttcatgaaagcatctgtgactcatccctgttcaagaatgttttcattacgattcagcagaagcgatgtgccaggtcagcaaatacaactgcaaaaccggggcctgccagcctggccaacacagcaagaccccgtctctactaaaaagtaaaattaaaattagctgagtatggtggtgcgtggctgcagtctcagttactcaggaggctaaggtgggagggtcacttgagtccaggaggccggggctgcagggagccgtgatcgcaccactgcactccagcctgacgccgtctcaaaaacaaaacaaaaaaaacccagggcctgaatgcaaagtgaacacttgctcctgttaatcgtagcacttgcattacaggcctggtggctcctagcatccgtccgcagcacaaggccatgttgtgtagtrgcacatccccagtccagccgcggggagctgcctgcaaggggaggtggtg

SEQ ID NO: 953073 - DNA, 631 bp, Homo sapiens
ttctaagtttttatcattttagatcttaaatttgggtcttcaatccactttgagttaatttttgtatatgtataaggtaagggtccagcttcattcttttgcataygagtatccagttttcccagcatcatttgcttaaaaaaaaatacaaaacaaaacaaaaactaaaacaactgtctttccccattgagtggtcttagcagcactcctgttgaaattcaccatgtatttgagtgtttatttctgggttctctcttctgtttaattggtctatatgtctatctttatgccaataacacatattttgattacggtagctttgttgtaagttttgaaatcaggcagcgtgagtcattcaaatttgttctttttcttcaagattgttttggattttgggggtctcttgagatttcatataacttttaggatgagttctctatttttgcaaaatatgtcattaggattttgatagggattgcactgaatttgtagattgcttttggtagtattaacattttaacaatattaagtctttcagtccaagaacacagatgtctttccatttatttatgtcttctttaattttcttctgaaaatattatgtacttttcagtgtataaggcttttgtct

SEQ ID NO: 953074 - DNA, 585 bp, Homo sapiens
gaggctgaggcgggaggatcagttgagcccaggaattcaaggctgcaatgaactatgatcacaccactgcactttagcctgggcaacagagcaagactatctctaaaacaaacaaataacaacaacaaaaacagtaacaaaagaaagcccagctttttgggcaagaagtgacagctcaggaccagggacattataatacaaattccgggtgagcagaggccacagccaatgaagcaccattttgtctgaaaagtacaaaatgcttccccttccaccctttgaacacctgctttgttcatcaataaccttacaattgcagcccacatatccaagcttcaaagtaaaagcagagagctcaatttgtgtctatgaagcagcgtgccgtgatgtcatctgaccctttgttttcatctgtgtgcagtggagacaggaaaggcaccactcatcagactcctgcaggagccatctgccaagcctctctcttctgaactgagtcctgttttcygtggctattttacatttctaatgagaagctattatgtatcacataggttcatccatgtagtccctcactatggaggacct

SEQ ID NO: 953075 - DNA, 720 bp, Homo sapiens
ctgctttaatactgttagaggccctaaaaatcacaaactatgctcaactcactctctacatttctcataacttccaaaatctattttcttcctcatatctgaygcatatactttctgctccccggctctttcacaattaccattgttcctggcccggactttcacattattcctgataccacacctgacccccatgactgtatctctctgatccacctgatattcacaccatttccccatatttccttctttactgttcctcaccctgatcacgcttgatttattgatggcagttccaccaggcctaatcgccacacaccagcaaaggcaggctatgctatagtacaagccactagcccacctctcaggacctctcatttcctttccatcgtggaaatctgtcctcaaggaaataacttctcagtgttccatctgctattctactactactcagggattattcaggccccctcccttccctacacatcaagcccaaggatttgccccccacccaggactggcaaattagctttactcaacatgtcctgagtcaggaaactaaaatacctcttagtctaaatagacactttcactgaataagtaaaggcctttcctacagggtctgagaaggccaccgcagtcatttcttcccttctgtcagacataattcctcagtttagccttcccacctgtatacagtctgataacagactagccttt

SEQ ID NO: 953076 - DNA, 616 bp, Homo sapiens
ccttccacagcctggcagatgtgcttggagtcgaactggttgaattcacgtgataccatcgcacrgtcagtccctgggagttgggtgaagagggtgggtgactcaggaggaacaaacaggacaggacgtgaagccatgcacagaagcctccttgccaaagcactggcagggtgggggaagaggaatccattctggtgccccggaagcctctgaggatggggcagaggagacaagctggggttggggggctgtgaggcctgtcatctgtgacacagtccatatgccaggcacccaggcaggggctcagtatattttccccattggtttcagttggaaaccctggagggtcgatcttatccgctggggaaatcaaggcacggagtagataagcgacctggcttagattacacagccaggaaaagtccaggaacgggttcccttgtcgtggatgtctccttggccaggcaggaacggccagcatttctaggggaaccaggaacgtgctgaagaatgtgttccttgcaagtttaaaaacacaaaacgagttacattatttcttggcttaaaacgtgtctgcaacctcccctgccctcaggctagagcccaagcacctggc

SEQ ID NO: 953077 - DNA, 611 bp, Homo sapiens
tctgtagttacgggctgttgaattgataccttcctctcagccatttgccatcacaatattataaaaagctattttaagaattgagagtgcccaatctatggggtgaaaaatggactcggtgtgataacagcctrcatcttcaaaaagacttaattttaaccagaatagttcttacacgatgcaatattccccagtagcaagacggaaaaacgcttccaaatagttagctgcattctgccatcatctttggataacgctgtgtcccattacagaccaatctctgcctcgagacccattttgcacaccgctgtggaccacacgagacatgagaagttgggagtctttaggtttttgatgatttcccacctaagaagatcactgatggagaaaacagggcattagatattgcaggtggagtctgtttggcccctctgtgaagtcaggttatttccatcatcctgctgattttgaaaatggcccattagtagaagaaatggtgtcagagttatcaccagaagtactcaaaatcattctcttgaaaggtcacactagtggaattttcaggtaatacttggcattggcttttttttttttttttttttttgcaggaa

SEQ ID NO: 953078 - DNA, 654 bp, Homo sapiens
agagaaaatcctggtctcctgttagaagtcagagcagcagacctagagaaggtgtattcagttcttggggaggaggatgtgaggatgggagggaggtaggaggagagagctcaaaatcccaccagttgaaggcctgtgtgagctttaattttggccatttaaacaattcaaagaggctgggagtggtggctcacacctgtaatcccagccctttgggaggctgaggcgggcggatcacttgaggtcaggagtttgagaccagcctggccaacatggtgaagcccggtctctactaaaaatacaaaaattagccaggcgtggtggcaggtgcctgtaatcccagctacttgggaggctgaggcaggataatcgcttgatcccagaaggctggaagttacagtgaaccaagatggggccactgcactccaccctgggcgatggagtgagactccatctcaaaaaaaaaaaaaaaaaaaagcaattcaaagaaaaagaaacaatgaaacttgaagatctgagttttckctctgtccccattagttcatcacgattacagccttttgattttcatagttaattgttcttcggcattctatttcagggttttgaaatcaaattgctcgatcttttctctctcctgtgtgattaggttat

SEQ ID NO: 953079 - DNA, 654 bp, Homo sapiens
agagaaaatcctggtctcctgttagaagtcagagcagcagacctagagaaggtgtattcagttcttggggaggaggatgtgaggatgggagggaggtaggaggagagagctcaaaatcccaccagttgaaggcctgtgtgagctttaattttggccatttaaacaattcaaagaggctgggagtggtggctcacacctgtaatcccagccctttgggaggctgaggcgggcggatcacttgaggtcaggagtttgagaccagcctggccaacatggtgaagcccggtctctactaaaaatacaaaaattagccaggcgtggtggcaggtgcctgtaatcccagctacttgggaggctgaggcaggataatcgcttgatcccagaaggctggaagttacagtgaaccaagatggggccactgcactccaccctgggcgatggagtgagactccatctcaaaaaaaaaaaaaaaaaaaagcaattcaaagaaaaagaaacaatgaaacttgaagatctgagttttctctctgtccccattagktcatcacgattacagccttttgattttcatagttaattgttcttcggcattctatttcagggttttgaaatcaaattgctcgatcttttctctctcctgtgtgattaggttat

SEQ ID NO: 953080 - DNA, 654 bp, Homo sapiens
agagaaaatcctggtctcctgttagaagtcagagcagcagacctagagaaggtgtattcagttcttggggaggaggatgtgaggatgggagggaggtaggaggagagagctcaaaatcccaccagttgaaggcctgtgtgagctttaattttggccatttaaacaattcaaagaggctgggagtggtggctcacacctgtaatcccagccctttgggaggctgaggcgggcggatcacttgaggtcaggagtttgagaccagcctggccaacatggtgaagcccggtctctactaaaaatacaaaaattagccaggcgtggtggcaggtgcctgtaatcccagctacttgggaggctgaggcaggataatcgcttgatcccagaaggctggaagttacagtgaaccaagatggggccactgcactccaccctgggcgatggagtgagactccatctcaaaaaaaaaaaaaaaaaaaagcaattcaaagaaaaagaaacaatgaaacttgaagatctgagttttctctctgtccccattagttcatcacgattacagccttttgattttcatagtkaattgttcttcggcattctatttcagggttttgaaatcaaattgctcgatcttttctctctcctgtgtgattaggttat

SEQ ID NO: 953081 - DNA, 633 bp, Homo sapiens
ctgggcaggctggagactcacgggagaggcaggaggagaatcagcgtgttgagtccctcgctgtgttagtgtgaaaaattctcattacwgttgcaaataaaagggatcacgatcactagccccggaaaccctcatctcccggaccatcaggatcgcactgaacagaatggtcccctaatggtccctgaggacagcgtcttgcagaacataaatgtaaacattgaatggcagacgactcccttccccttgaaatcttcacaaaagtgtgtacgagaaagtatgtacatcagcacttcagaaagtttaaaagagtctctaaaaagtatatacaggatttaaactaccttcctgggagcagaagctacgtgaggaatgtgtgggtcgctggcgatgccagcccccttcccgctgagtgtcccagactcagtgctggcctcaagcggggagggctggatggcaggggacgcatccaaccctctccagaaactgagcagaacaaaaccgccttgccagccactggcaagaccatgctttcaatggcgcctccgccaggggcttccctgcagaagttttaggggaagaggtgcaggtcaaggggaaaagcatggcagctcaaggaaggtttttggctga

SEQ ID NO: 953082 - DNA, 638 bp, Homo sapiens
caggcacgtgccaccacatccggctaatttttgtatttttagtagagacagggtttcaccatatgggccaggctggtctcgaactcctgacctcaggtgatctgcccgccttggcctcccaaagtgtttgggattacaggcatgagccaccacacccagtccctgctctcctctttgttttttgttgttgttgttgtttttgtttggttttttgagatgaagtcttgctctgtcgcccaggctggagtgtaatggcctcccaagtagctgggattacagacgtgtgccaccacacccggctagtttttataattttagtagagatggggttttgccatgttggccaggctggtcttgaactcctaacctcaggtgattctccagccttggcctcccaaagtgctgggattacaggtgtcagctacctcgcccagccccttgcttctctttttaggctacagggcaatgcaatgttaagcccaagctcagtctgctctagtgtgtgcacacgcaatggcacccactgtgccctcacttggatgaccckcctttgtcccacaggtaattcctactgagccttcaagagctggctgggcaggcacctccctccagaagcctcccctgacaccatcgtctcc

SEQ ID NO: 953083 - DNA, 558 bp, Homo sapiens
tcccatgcccacggagccttactcactgctagcacagcagtctgagattgaactgcaaggctgcagcctggcagggggaggggygtccaccattgctaaggcttgagtagctcacagtgtaaacaaagaggccggaaatcatgaactgggtgggtggagcccaccgcagctcagcaaggcctactgcctctacagactgcacctctgtgggcagggcatagctgaacaaaagccagcagacaacttctgcagacttaaacgtccctgtctgacagctctgaagagagcactggttccccagtatggcatttgagctctgagaacagacagactgcctcctcaactgggtccctgacccccatgtagcctaactgggagatacctcccagtaggggccaacagacacctcatacagggcggtgcccctctgggacaaagataccagaggaaggatcaggcagcaatatttgctgttctgcaatatttgctgttctgcagcctctgctggtgatacccaggcaaacagtgtccggagtggacctccagcaaactctaaca

SEQ ID NO: 953084 - DNA, 586 bp, Homo sapiens
cagtaggtttttttttttaatcccttttgtttttccaggtggttgtgggaagagaagtttrcagaactgaaatggaggtcagagcttcattacagaaggttagtggatcatctgattctgtggctacaatgaacagtgaagaatttgttttggttcctcagtatgcagatgataattctacaaaacatgaagaaaaacctcaactgaaggtatttttttcttttctacatatggtataatttttaattaaaaactatttgaaacttaggagatgtgtaaaatgcaaaggtttttctcaagtgctgactttcaaaataaaatcaatgtttgatttatccagaccctaattatttggtttgtgtattttaaaaagttcttgcttttggttgtttaccttttgatttggaattttagggggaagaataaaagaagaaaaagaagagaaaggattttttggtgaattagacataatggttaaattttacattactttatctggatgtttttgtttctcttactgctgggttttagaagttaattaaatgttttgctttcacttgagagacttttttctttatgattttta

SEQ ID NO: 953085 - DNA, 682 bp, Homo sapiens
tgttgaactgtaatccccagtgttgtgggagggtcctggtggaaggtgattagatcatggtggtggtttctaatggtttggcaccatccccctggtgctgtcttgagatagagttctcatgaaatctggttgtttaaaagtgtgtagcactcccccttcactctctttctctctctcctgctctgccatgggaagactggcttcccattcgccttcctcatgattgtaagtttcctgaggcctcccagccgtgcctcttgtacagcctgcagaactgtgggtcaattaaacctcctttctccatacattgcccagtctcaggtagttctttacaacagtgtgagaatggactaatacgccccttctctcttggctcactctgcaggctcctgagggctgggcacctgactcaggcctgacaattaaagcacagcatcccttgttctctgtgatacattcagggatgaacacgtcacccaagttgggccaaggagagttctcctaggacctttgctgggactgtcatttttccctctggcccaaggtttatagaacataagtctggagcttctcatggccacctgctayggctcagggaaagcctgtctgtgagtgaagccaacacaaaggaagaaagagtctagaaaaagagagacagattcatgatgacacgacttgagcc

SEQ ID NO: 953086 - DNA, 665 bp, Homo sapiens
acgtgcttgctacagaacgtgcactgagcggttacttagaattgcagttctttttttttttttttgagacggggtctcgctctgtcacccaggctggagtgagtgcagtggcgcaatctcggctcactgcaaactccacctcccaggttcacgccattctcctgcctcagcctcctgagtagctgggactacaggcgcccgccaccacgcccggctaatttttttgtattttcagtagagacagggtttcactgcgttagccaggatggtctcgatctcctgacctcgtgatccacccgcctcggcctcccaaagtgctgggattacaggcgtgagaattgcagttcttaatacatggaagatgagaaattttatctcatggatcttcacgagatgtacatgatgagagaccgaggacaacatctataatgatatctctacagcatattcactggcgagttacaggggctgttcagttaaggtctctcaatgcaagccagtggaataagagtgcaaatataggaggaatttgggtatttttcracctgcctctaaatttgtatccttttaagtatgttgtcttcaattctagcaatgccaatacttagttgttttcacagagatctattcttaagggagaagcagaattgaattgaatacttgta

SEQ ID NO: 953087 - DNA, 598 bp, Homo sapiens
tatatgtggggtataggggtcaaggggatgaagcaagcagcttgtacctgatggttcgatagggaggtggtcaccagaggcggtcatacaaggcagatgtctggactgaccacatagaggaagtgggaggaggcacagaactagagactgtccagggtgactaagccctgcttctagtttgagaaggttaaacctgtcctcagaatggatagtgaggcctttgatatgttctcccacctcttcatcaagcatattgacaaatcctttttcaccaacttgtcttgctataaccgcccagtaggttcaccttgccgtctgcctagatagagccaatttatcaagacggggaattgcaatagacaaagaattcatgcagagctggctgtgtggggggccagagttttattattactcaaatcagtctcctccagcagtcgagtttttaaagacaatttggtgggtggggaggggcagtaagtcagggagtgctgattggytgggtcggagatgaaactatggggcatcactgtcttcttgaactgagtcagttctgggtgggggtcacaagatcagatgggccagtttatcatctgggtgt

SEQ ID NO: 953088 - DNA, 665 bp, Homo sapiens
agcatctgttagtttttggctttttaattagtcattctgacgggtgtgagatagtatctcactgtggttttgatttgcatttctctaatgattaatgatattgagcattttttcatatgcttgttggctgtgtgttacatcttcttttgaaaactgtctgttcatgtcctttgcccattttttaatggggttgtttggttttcgcttgttaatttgtttaagttccttatagattctggttattagacccttgttggatgcatagtttgcaaatattttctcctattctgtaggttatgcagaagccctttagtttaattagcttccatttatccatttttggttttattgcaattgctttaggtgtctttgtcatggaatctttgccagggcttatgtctagaatggtatttcctaggttaccatcagacctgccttacaagagatccttaagggagggctaaatatggaaacgaaaaactattaccagccaccacaaaagcacacttaagtacaccattgacgccatgaagcaactacacactcaagtctttctcctcrtccaggtactcaaattacatttacgttaaaattaaaattgtcccacagctcactaaaattcttcatttaggggtctttcttctatgtttcattttggatggttt

SEQ ID NO: 953089 - DNA, 572 bp, Homo sapiens
agttcatgtcctttgcaggaacatggatgaagctggaaaccatcattctcagcaaactaacacaagaacagaaagccaaacaccacatgttctcactcataggtgggagttgaacaacgagaacacatggacacrgggaggggaacatcacacactggggcctgttgggggcgggtggggggttagggaagggatagcattagaagaaatacctaatgtagatgatgggttgatgggtgcagcaaaccaccatggcacatgtatacctatgtaacaaacctgcacgtactgcacatgtatcccagaacttaaaatataatacattaaaaaaaaaaactatggagatagtaagacatagtctttctgagggcaaaatagatggtgagtcaacaagagcattgcttgatatatacaataacaacaacaaaaaaagaggatggatgttcagaagactgagggcagccacttcaataaaaagccaaaatcccttgcccagtttctgtaacttagccaagttttaagtccagagctcatggtctacaagagaggtcaggtgaccagagaggaggaac

SEQ ID NO: 953090 - DNA, 513 bp, Homo sapiens
gtaatgtgaggtggtttgaaaattttccagcaggaacaatcatttgtatattcgtacaacagattaaattgtttttggggctagagatacagaagtgagcaaartagacaaagccctgccctcctggggttccagtgttgagacagagatagaacatgcaagaaaacatctagtgtgtcgaatgatgatcaaggccacagagaaaacgcagcagggaagggggacaggaagtactggtacagattgggaagttggctgtcattttaaatagcatggccagagaatgccacacagagaaggtaacatttcatccaggccttaaaaggaagtaaggaaaccagccatgtggctgcctggggaaaatgtcttccaggctggtgaaacagtaaacatatgagagaggggcatgcctggcatgggtggaggaacagcaaaaaggtgagtgtgactagagcgagtgaaggaggggagaggagatgaagtgagagaatggatggcagggaggcccaatcc

SEQ ID NO: 953091 - DNA, 645 bp, Homo sapiens
tgagagctcagtgaggaaactttcaagaaacggaaagcaattcaccrtgttgaatgctgctgggaagtacaactatggtcattggatctgcaagagggagttgttgcataatgaagaatttatctggtcattatctctgttccttggagggagattctaaattttgggaatttcccaagcaataggagtgtctttgctattcatggtgggccctgatagtttttgctaatgaaatgactccagatgacaagaggaggaggagggccagcacggtggctcatgcctataattccagcactttgggaggctgagacaggtggattgctttgagctcaggagtttgagaccagtggatcactttgagctcaggagttggagaccagcctggcaaatgtggcaaaaccctgtctgtactaaaaatataaaaattagctgtgtgtcttggcacatgcgtataatcccagctactcagaaggctgaggctgtataattgcttcagcctgggaggtgaggttgtagtgacccgagattgcaccactgcactccagcctgggtgacagagtgaaactctgtctcaaaaagaaaaaaaagaggatggggctggtcatgccaggaaaaccatgtgattagtgggtttggtctttg

SEQ ID NO: 953092 - DNA, 699 bp, Homo sapiens
ggcttgcagaactgttatgactagctggaggattgtakatgcaccaatcagcactctgtctagcttggggtttgtggatgcaccaatcagcactctgtgtctagctcagggattgtaaatgcaccaatcagcacgctgtcaaaactgaccaatcagctctctgtaaaacggaccaatcagctctctgtaaaatgaaccaatcagcaggatgtgggtggggccaaataagggaataaaagcagactgcccaaagggacagtggcaatcagattgggtctggttactgattgtggagcctttgttgtttggctgttcttgttactgctcactgtttgggttggcagtgaccttgtgagctgtaacactcaccacgaaggtttgtagcttcacttttgaagccagtgagtccacgaacccacctgaaggaatgaagaactctggacgtgctgtttttatgagctgaagcctcatggtgaaggtctgcagcttcactcttgaagtcagtgagaccgtgaacccaccagaaggaaaaaactccggtcgtaccatctttaagaactgtaacaccacgagggtctgcggcttcattcctgaagtcatgttgaagtcagcgagaccaagaacccaccaattctggacacactaggaatggacatagctctctaaagttgctaccaccatgattctttcgagttttac

SEQ ID NO: 953093 - DNA, 690 bp, Homo sapiens
gttcttatcctggttcaccaaggatgactttgaacccactgggagttaagtgacctcccttcccccaggcccacagggctggtgagcagggaaagtggaggttccatggtactgactttggggcctacgctaatcaatccactgcccacgctgcctccatggcctcttcaggggacgtgatcagccgttccctgccctaatggtggcctcctgagctttggtcatatccagccatcctctcacggctgggctttacattttttggccagtaacatgagactaaaaactccagggagaattcatatctgcactgatgcttcctgcaccctgaagaaagcagatccagaaaagcatttctgtagctgtaactctgcccaagaatgggaagcccatcaactccaacccaagacagatgagggcaggtctccccctgcatggcacgcgtgtgttcccgagaaagaaacatggcggcaagtcaccgccgctccacgtagccgtggagagctaaagaggattagttctgatgtggacaaagtcctaagggaaggtgcatgcagatggggtcacctcaggggtctactgacctcaggaacccgtgtagctcctgyccctctcttccctccagggacacaggagaaaacagaactggaatttgagaaactggattttggatatttcctcaacactctg

SEQ ID NO: 953094 - DNA, 578 bp, Homo sapiens
gcaaatcccatccattgcattcttatttcaaatattgtattttttctttctagaggttacatttgggctctttttctatgtcttctatttctagcctcatcatgttcagtttcctttacatccttaggratatttgtaagattcatagtagctgctttaaggtttctttgtactaattctataatctgtcatttttaagtctgttcctattggttgattttcctctcagatatgggtcatattttccttttcatgtctggtaattttgtattagatattggacattttgaattttacattgctgggtgctgggttttgatatattcctgcaaaggatgtggcacacttttcagtaacttgtagatccatctgaccctttcaagcttttaaactttgttatggcaagtccagagcagcttttattctgggaataatttatccccactactaaggcatgacatttctgtgaactctacccaattcctatctaataccatgtctctgcattctggtttatggtaacatgcaacattcccagttctgtttaagccccagaaattgttcagcctatggccttt

SEQ ID NO: 953095 - DNA, 599 bp, Homo sapiens
gccactacgcccggccaattttctgcattttttagtagagacggggtttcaccgttttagccgggatggtctcgatctcctgaccycgtgatccgcccgcctcggcctcccaaagtgctgggattacaggcgtgagtaaatttttgtatttttagtacagatagggtttcaccatgttggccaggctggtctcgaactcctgacctcaagtggtctgcccacctcggcctcccaaagtgctgggattacagatgtgagccaccgtgcccggctcagttgccatctttattggctagggaggaggggtgcctaaggtgctagtgtcagggatcactgagttggcaatagatctgattaactccagagagatctctgcttgccatcaaggctgggaaagaacgtgatgctctggaagcctatgaccacagttttagtaggcaggtagtttcctgctgcctccatagttacagtttaacttgctaaggttggtaggatgaaggtaatagattgcttcaggcacctgcactatgagagctgggtggatatgtcaacagaatggcacatctgtcagtgccaggaaacagacaccctggagtcct

SEQ ID NO: 953096 - DNA, 568 bp, Homo sapiens
tgcccctcatccatgagttgattcaacattgcacctgaggtcctagcctggaaagtaggcatgaagaaaagggataaggattggaaaagaaaagcaaaactggtattatttataagtggtatgactgtctattcatagaaaaccccaaatcatctaactggcaaagtattagaactatgaatgaaatttagcagagaaaggatattcctacatcaaatcaatatcaataactaattatagggtgcggtggctcacgcctgtaatcctagcactttgggagaccgaggcaggtggatcacgtgaggtcaggagttcgggaccagcctggccaacacggtgaaaccccgtctctactaaaaatacaaaagttagccgggcgtggtggtgggtgcctgtaatcccagctactcaggaggctgaggcaggagaatcacttgaacccgagaggtggaggttgtagtgagccgagatcgcrccactgtactccagcctgagcgacagagcaagactccatctcaaacaaaacaaaacaaaacaaacaaaaaaactaattagagctaaaacaccg

SEQ ID NO: 953097 - DNA, 557 bp, Homo sapiens
atataaaacttaatttgaggtgtatcacagagctaactgtgggggctaaaacgttgaagcctttggatggccgcacaagagatgtctgcattcataaccttggggagggtatgaacatttcttggtaacatgcaaaaagcactaactgtaaaagagaacagttggtcagttgaatttcatgaaacattgtaaacttctgctaaacaactgacaccattaagaatgtggaaaaaggctgggcacagtggctcatgcctataatcccagcattttgggaggccggggcgggagaatcacttgaggccaggagtttgaaaccagcctgggcaacatggcaagaccccgactctacaaaaatatttttaaaaattagttgggtgtggtgatgcactcctgtagtcctagctgcccaggaggctaaggtggaaggatcacttaagccctggaggttgaggctgcartgagctatgatcacgccactgcactccagcctgggtgacagaacaagaccttgactctaaaaaaaatcaaataagaatatggaaaactatagattg

SEQ ID NO: 953098 - DNA, 671 bp, Homo sapiens
tctcacgttccaggagttcccaaataggaccaagaaaaccagaccaggcacactggggccctcaactttgacgcagagagatttctcctagtcataccacgcaaaacgagtggcatcagaaagacccccccagacggtgtcactccagggaaatttttgtcccaagtgttgagatcaaacaaaaccatcatgcccaaaactctttaaattcttctcagcactgagaagaaaaaaactacttttaaatcctcacaattgaatgcatcaacgggccacttagttctcatgagtcaggctgctcgaagagcgagcaggaaaaacaaagctgcaagggtgcctcagcaccaaagttagtccacgtttcctccaaagacatgaccatggccatatacttctgagtaactatgcagattgtttttgagacatgcaggataaaaacaagacctggttctcttgtgggtatctttgaagtccccaactttccaaagatcttctatagcaatgggtcccaaatacgcctccgccaaggggtctccctgtttccctaaactatttcccaacacaccttgcatctcccaaaccaaataccagcataggtaagtcaaactgtagcccaagaaaccgagatagacaraaggagcaaaatcctaggagcaaacattttgggggag

SEQ ID NO: 953099 - DNA, 619 bp, Homo sapiens
aaggacttaaataaatggagggcttaacaatgtttatggattagaagactcaatgttatgaagatatcatttcttcccagactggtctgtagattcagtgcagtgccaatcaaattggtacagaataatttagaggaagttgaaaaaaattgacaatctgattctaaaatttatctgtaaataaaattggctgagaatagccaaggccactttgaggaagagctgaggtgggaggacttggttggctggatgtcaaggcttgttatagagccactgtaattaggagagtgtgtcattaagagtggccaaggatagccagataggccagcggaatggaagagagagcccagaaaacaggctcaacatatttaacagtgtagccagtcaagtcacaaggaataaagaaatcatagagctgaattgtcctccgcgagggtagattgtgtgtctgcctttttttctgaatctgtttcattcttaatattcttttttgacctgttttccagtttactagcttgcttagctgggtacaatctcatcttactcggagaagtaaggtattagtgtgttctcacmctgataataaagacatacctgagactaggtaatatataaagaa

SEQ ID NO: 953100 - DNA, 469 bp, Homo sapiens
aggacagtttgagcccaggactttgagacctgcctgggcaacatagggagaccccgtctctacagaaaatttctaaaattaaaaactttagcctracgtggtggtgcacgcccagggtcccagctactcgggaggctgaggcgggaggatggcttgagcccgggaggccaaggctgcagtgagccgagattgcaccactgcactccagcctgggccacagagcgagactctgtctcaaaaaaaaaaaaaaaaaaaaaaatggaagaactgtcgtccatgtgcagtgtgaccaggcaggggggtccctacaccccaaacacacccccacacggggtcccctcaatcaccttccggtggcttcccaagccccagggagccccccacaccatgtcctactccctacagcagtgactgccaactggggtgactctgcccccacaagggacatgtgggggtgtctgcagaggat

SEQ ID NO: 953101 - DNA, 626 bp, Homo sapiens
agtaaaaaagaaagtaacaacctattacatttctttctttgtcaaaaatatgtaatctacgaatcattggggtgagcatcaatattatatacatgggatgaaaatgaatttaatttcattaggatcaggctttaaagatctaaactaaggctgtttgaatttttctttttaatttgataaactacaagttcacaggaagtttcaaaaaattgtatagggaggttgaaggtcctgtgcacccttcacggaggctcactcaatatttacatcttgcaaaactgcggtataatatcaaaagaattgacattggtataatccataaaccttcttctgatttcaccatttatgtacgtatacatttgtgtgtgtatgtgtgtgtgtatatatagttatactcaattttaccacatagatcacttcacgtaagcacaacacaagtggtagatgtaccatcacctcaagacaccccatgttatccttttataggccacctgccaccttcccccaatccatatcacattatgmtgagtgaaataaaccagtcacaaggggctgcatacagcatgattccattgacatgaagaccaggtcacccaaatccttagagacagaaagtggtttcgtgg

SEQ ID NO: 953102 - DNA, 582 bp, Homo sapiens
ggttctgaagaagaagacaaatggtgcgggatgtcacagtgtgtgttctgcaaaaagtagagcctcggacaaaaatttgagtgcaagtattttatctggaggtgatcccaggaaatakaatgagggtttgggggatggaagtaaaacaataaaggaataattacggagaatgttacctctgtgggcgatgggcacaatccccctagatattcggcaggatggtgtagcacacacctcagaattgtcccaccagggtggagacaaggggtatttatccatcagcattcccttctctttggatgggagtttttcttgagggtagtgactccctagtagctagctccagccagcccctcatgggccaagcaagctcctggagccagagaagccctcagggagagagctgcatgtgccagaggcaggaagtcttaggcatgaatgagatagtactaaagctatgggaggttgaggagacaagggaatatgagtggggcaccaaaagtgtctactgcagtgggctccccttcaactttggagagttagcagcattgggagagaacattcaaagtagacttactttgt

SEQ ID NO: 953103 - DNA, 591 bp, Homo sapiens
tgtaggtgcatgcctgtcatcccagctacttgggtggctgaggagggtagatccaagctccaggagtttgaggctgcagtgagctatggttgtgccactgtactccagcctgggccacagagcaagamcctgtcccattaaaaaaaaaattgcttgggacttttttttttttccaaactttttttctgcctgttccctctctcttcttctgtgattccataatagactgagtaatgcacctccccattccctaatctctggaacctgtaaatatgttgctttaaatggtaaagtgaacttttcagatgtggttagcttaaggattttaatatgggacagttatcctggattatctgggcaagtccagcataatcacaaggatcgctataagagggagacaggaggatgagagtgagaaggtgatgtcatgaccaaagcagaagttggagtgatacactttaaaaatggaagaagaggtcagaagcccagaaatgcaagtgacctctagatggaaaaggccaagaagtcgactcctttctagaatgtgcagaagtcatgcagctctgccaattccttgattttagcccaaaa

SEQ ID NO: 953104 - DNA, 562 bp, Homo sapiens
gatttctaaaaaacacaaataggtatttccctttttctactaaaaacattcaaatgagtctccttgctctttgcatgacacccaaattccaaccattgtctccacagttttacatgacctggtgcctacataccattccacactctctttattccattccacttttcatacaccatggctctgcttcacaggacttgtgatttctccaaaatcccaggattactttgactttaaagcccttttgtactaatgagctttcttctctgtgtgctccagacccctgatctttgcctggatggctcttcttttcatacagatctcagcttaaatgtctcctcctcaaagagtcctcctctaaccactcaaaagaaaacaaaatacacctggttactccaactggcaccttgctttagttacttcataccatttttcctgatcatgaactcatttgcttattgcctgtcttccttcactgggatttcagctcygtgagatcagggaccttaactgtcttatttattgttgtttctggggtctctaagatagtgtctggaacaaagta

SEQ ID NO: 953105 - DNA, 594 bp, Homo sapiens
tcctttcctgatacagaattctttccataatcaagctttcctaytgagtccacctccatgtcatgcatgccatcttgtgccatggcaaactaaataccattctgggcctttctaccttccacattcagatcctgttaactggaaaacccctcttctctgatcctctgacagaactaatttgggaagccttctctgaccccaggtagacaaaacaaaccctcatgcctctctgctacttccctatgctgcacacacactgttatgcacccatcacaccgaactgtaattatgcataaccccagactgcaaagctctctgaaggaaagggtcatgtaggggctgatacagaatagaggctccaggtattggctgtttactttcttcctacactgaaatgaatacctttcctattcgattgttgtcatacttcaaatcatattccaaataagcatcaaaaataataacatgcggccgggcgtggtggctcatacctgtaatcccagcactttgggagattgaggcaggcagatcacctgaggtcggaagttcgagaccagcctgaccaacatggagaaaccccatctctactaaaaa

SEQ ID NO: 953106 - DNA, 689 bp, Homo sapiens
aaaaaaggtattgggtaacagaayagtcacactcttcaaaacatcatgccacagatcatttactaggtaaaaggggaaaatgtacctttacatcagagaactccagtggtctctgccttaaacgcgagatcacacagcatcaccatagtgggacaacctgacattgttcgcccccactgtgatgcaataagatatactcaacatcttctatgtcatattcttgccaaaaatacttaacctgattttaatcatgaggaaaattaagacaaatctagaatgtggggcattctaaaagcctagactctctttttaaaagttaatatcattttttatagtggcagggacttattccagattgaaagagattaaaaggacacaataaaaagtgcataatgcgtgcaccttgattggctcttggactgaacaagtaaatagctatgaaagaaatgttgtaaaccacagggaatttaaatattatctgtacattagatgacattactggattgacattactcttcttaaatatgacaacggtgttctggtcgtggttatggaggaaaaggtccttttttgttgtttgttttttgagacagggtctcactctgtcacccagactggaaggcagtggtgctatcacaactccctgcagcctcaacctcccggactgaagcaatcctcccacctcagcc

SEQ ID NO: 953107 - DNA, 552 bp, Homo sapiens
tccacagggtgactccacccagcgtaggtccctcaactaccccgcctcatggcctctactggatcacgtggcggctcacttcacaattctttattatagrgttgtttccttgtttattgttaatcttccccacaagactgtgcgcaccacctggcaaggtattctgtttcctcctgtatcactggcatccaacatggtctctgacacagagataacctcaacacatacatgttggaagaaaaaatatataaaatctttttaattttgataagtccaaaaaatgtatatatatagaatttcgtgtcttttagcatattcacaaagttgtgtaatcatcaccactttttttttcccccacatacctgctgtgtcaaaaccactatctaattccagaacattttcatcatctcaggaagaaaccccatacccactagcagtcattcccatttctccctccctccagcctctgtcttgggccttgtctctatttatctattctggacacatcatgtaagtggaattatacaatatgtaacctttttcctgtcttct

SEQ ID NO: 953108 - DNA, 589 bp, Homo sapiens
actctccctgcattccttccatcctctttctcagtgacctcttctttgtcattgcattcttgggttttcttttacttcattaccctaaaaaattatccttcttaattttgtcctctatttgatgaaaatatctttgttgatttttttctggttataaagcacaggacaatggaacagaataggaaacgcaaaaataaagctgcacacctatagctatctgatccttgacaaggctgaaaaaaaaaaaaagcaatgggaaagggctccctattcaattaatggtgtgtgataacctgcctagccatatgtaggatgaaactggatgcccaactttcaccatatacaaaaattaactcacaattaaatattttaatgtaagacctcaaacagtaagaatcctagaagaaaacctaggaaatggtattctggacatcaaccttgggaaagaatttatgagtaagtcctcaaaagcaattgcracaaaaaacagacttgacaagtggaaactaaaccaaagagcttctatacagtaaaagaaactatcaacagggtaaacagatatgctacagaataggagaaaagattcaca

SEQ ID NO: 953109 - DNA, 628 bp, Homo sapiens
aatactcctgttttctactgggcctattcccttgaygttatgacactaagttatgggactagaggttgcactgtaaaatgaatgttcttagcccaagaaggttgcgggtggtagaggagaaacaagttttgaaatgtgtggagccaggaaaacaagcctgtgtagcattctttcaaatatcagatacatcaattttttttttgagatggagtctcactccaccgcccaggctagagtgcaatggcacgatcttggctcactgcaacctccacctcccgggttcaagcaattctcctgcctcagcctcctgagtagctggggctacaagtgtgcaccaccacacctggctaatttcttgtatttttagtagagatggggtttcaccacgttggccagtctggtcttgaactcttgacatcaggtgatctgcccccttcggcctcccaaagtgctgggattacaggcatgaaccactgagtctggtcagatacatcacattttaattagaaaaaaaaaatcagctcttatggaagcctgttcagaagttcttttgtagtaagcatatacttgataattcaatatgtacaattttaaatgtaccatgcattttttctttttttaatagagt

SEQ ID NO: 953110 - DNA, 621 bp, Homo sapiens
ctttgctgaggttttgttttgttttgtttttttgttttttgtttgtttttgagacggagtcttgctctgttgcccaggctggagtgcagtggcaccatcttggctcactgcaagctccgcctcctgggttcacgccattctcctgcctcagcctccagagtagctgggactacaggcgcccaccaccacgccgggctaatttttttatatttttagtagagacggggtttcactgtgttagccaagatggtctcgatctcctgacctcgtgatccacccacctcggcctcccaaagtgctgggattacaggcatgagccaccacgcccggctaatttttgtatttttggtagagatggggtttcatgatgtggcccaggctagtctcgatctcctgacctcctgatctgcctgcctcggcctcccaaagtggtgggattatgggtgtcagccaccgcgcccggccctgtttttttttgtttgtttttttaagaggcagggtctcactgtcrcccaggctagagtgcagtggtgcaatcttagcttaccacagcctcaacttccaggctcaagcaatctctccacctcagccttctgagtagctgggactacaggcacatgt

SEQ ID NO: 953111 - DNA, 752 bp, Homo sapiens
gcagtgtcccaaggttgcacagggcagcggtgctctatctccagcccatgaaaccattctttcctccttggcctgtgagctggtgatgggagggactgccatgaagctctctgaaatgccttccaggcatttcytccattgtcttagatattaacatccggctcctctttactattacaaatttctgcagttgagttgagttccttcctcccctgaaaatggatttttcttctctaccacatggccaggctgcaaattttccaaactttcacactttgcttcccttttaaatatgttttagtttcagatcatctctttgctcatgaatataagcttatgctgttagaagcagccagggcacatcttgaatgccttgctgcttaaaaatttcttccatcagatactccaaatcatttctctcaagttcaaagttgcacagatctctagggtagaggtggcttgttccagagggtgcaagccaccaggctctttgctaaagcgtagcaagtgtgaccttttttcagttcccaatatgctccttatctccatttgagaccactgcagtctggacttcattgtccatatcactattagcattttggtcacatcagtttaacaagtctctagaaggttacaaactttcccacgtctttctgtcttcttctgagccctctaaaccgtcccaacttctgcctgttatccaattccaaagctgtttccacattttcatgtatctttgtagcaatgctcca

SEQ ID NO: 953112 - DNA, 623 bp, Homo sapiens
cggtggctcacgcctgtaatcccagcactttgggaggctgaggcgggcggatcatgaggtcaagagattaagaccatcctggccaacatgatgaaagcccatctctactaaaaatacaaaaattagctgggcgtggcggtgcgcacctgtagtcccagctactcaggaggctgaggcaggagaatcgcttgaacccaggaagcagaggttgtagtgagccaattgcactccagcctggcgacagagtgaaactctgtctcaaaaaaataaaaagaaaaaaggaagtaatgaggccaggttcagtggctcacactctcacctgtaatcccagaactttgggaggctgaggcaggaggatcatttgaagccaggagtttgagattagcctgggcaacattccaaagccctgtctctacaaaaaatacacaaatcagccagaagcagtggtgcacacctgcagtgccagcttcttgggaggttgaggtgggaggacacttgagccagggaggtctaggctgcctggacycatgttcacagcactgcactccaccctgggtgatagggtgagattctgtctcaaaaaaaaaaaaaaaaaaagtaactgaactgtagagctagagcta

SEQ ID NO: 953113 - DNA, 605 bp, Homo sapiens
ttaggaggcagaggtcgcagtaagctgagatcatgacactgctctccagcctgggtgcgggtgacagagtgagactctctctctctcaatctctctctctctctctctctmtatatatatatatatatacacacacacatatatagcttgaatttgttttataatgcagaataataatactttgttataattaaaaataaagtatgtcattatatgaagctaaaataacattaacattcatttgagcattaactcaactgtcaagaactgttctatattttattgagactacatatagtaaaaagcataggtcttaagtgtattgatcagtgagttttgacaaatatatatatatccatgcaaccagcacctaatcaagatacagagcagaggctggcaaattgctatctgtgagccaattcgaccctgtggaatgttttctgtgtggcctatgagtgaagagtgttttttttacatttttagaaggttattctttaaaaaggcaaagaagaatatacaacaaaaaactatacatggccctcaatgcctcagctcatcaagtggcctcaaggggggcaccattttctattaataatttgcatgaa

SEQ ID NO: 953114 - DNA, 642 bp, Homo sapiens
aaaactcttaatcctatcaggaattaaaattttttgttactaagttatacatacttagtttactagaatgtaatacttggtaccttaaaccatctgtatcttggataggatctttgttttcttaaatccatggactccaaacatatataactattactttttgaagctaattgtgctggaatgggacatagtccaggaggtatgaaaatggatgtcatgcctgggaggcgtggaccaatttatagatgtcctaggcaggagccaggctactggtaccacatgtacactcagcttcttggcaatgacagaatgagatctctgcatgttgtacctcattccagctctctttcctcattgtgagaattaaggaccacccagccagagtgggaggttatctgctacaagtccttactaatttatcagacaaaccaattcaaggtatcagaattcatggagaagaggagaggacagatttctgactaaaccgtgtgtctgaatctccccctcaataaagggaagccattggagatcattaaraaacaaacaaaaacttttatatggtcagattgtgttttagcaagcttattggcggtagtttggaggctgtgtcatagaggaaaaagataatatagaatggattgt

SEQ ID NO: 953115 - DNA, 226 bp, Homo sapiens
actgctgcttcacatctaccttcccagctttgtgaatctctggggttggccagctgtcacytagaatcatacaaggaaagggattctgcaagatgtaggcccagcttaaccaagcagacacacaccctattttcttctttcactaaaaccaatcattccctattttattctttaaacaaaggactactcgacaatgctattaattttcagcataattaattacgcc

SEQ ID NO: 953116 - DNA, 728 bp, Homo sapiens
aaattcacaacataaaaattgccatttaaaccattttaaaatgtacaattcaggggcatttagtacactcacaatatgcaattatctccactatctagtggcagagctttttcatcactcctcaaagaatcccccaactccattagcaggaactccccatttccgcctatccccagcccctgccaaccccaactctttctgtctctgtggatttgcctattctgggcatttctttttcttttttttcttttctttttttttgagatggagtctccctctgtcgcccaggctggagtgcagaggtacgatcttggctcactgcaacctccgccttccgggttcaagtgattctcctgcctcagcctcctgagtagctgggattacaggcatgcaccaccacgcccggctaatttttttgtatttttaatagagacagggtttcgccatgttggccatcctgttgtcgaactcccgacctcaaatgatccgcccacctcagcctccaaagtgctgggattacagtcgtgagccacctcgctcggccctattctgggcatttcataaattaacaaatggaaccacacaatatgtgatttgggtctgacttattttacttagcataatgttttcaaggytcggtcatgttggaggatgcatcagtagctcattcttttcttatggctgaatgagagtctattatatgaatattccatgttttgtcgatgcat

SEQ ID NO: 953117 - DNA, 611 bp, Homo sapiens
tggaaggcagagctcaggctgataggcacagatttaaggagacagatgccggctgaatgggaggaagaagagctggacagtggcagaaagtgagcattctgtcgctggagatatacaaacaaaggcctatgaccacttgtgggccagtgcaggggacttagacctcccatgggagagtggggtcggagtgggtggtcttaatggcctttgcagccctgagttgccaagcccctgaccaaatcctggaagatggatttttgcctctttatttgacctccctagggatcgctgagtttgcagtttgagtttctggttcctgggccagccagtgggcaaggaaggctgttagactcaggaaggaaagagctttggagtcactagacctgggttcaaatctctaccatgtgccttacaggtgtgaccttgggtaagcccctttacctctctcagcatctattttctcagttataaaaatgaggatagtaacctcagcttcagagggaaatatgaggattaaaggcaatgaggagtgtgaagaggctggcaaggatgtgaagcrcacgtcagagtgtttgagggtgtggattcccatctggattgaaccctggctc

SEQ ID NO: 953118 - DNA, 590 bp, Homo sapiens
tgggctgaggtcccttctcggtcctcctcgtcctgttggcaccgtagggggacacattcccatttgtgacttggaattgggtgactctgagagctgacgccgagatttcttgtttgtgttttctcactcagactcagaggatggtgaggcctggggaaggggcaggcaggcctgagaggacagtgggtgttggggtgagggtgcctcttgcccctgggggcaggcagagtgtccacgagcaaatcctttgcgtccggagtggggtcttcactggctgctccatttgtctgcgtggggagcgggagacaggagctccctgtggctcagaccctgctcagctccgtggctccaggccaagtaacggtgccctgaatcccggcccctgccttcctctcagccctgcagaggaggccgcgcagcgtacaaggccctctggccagcccggcaccaactcattcctgttgttggtcttttcccagttttattgagaggtaatttatccaccacctaactcgccaatgaagggtccarttcggtcgttctccctgtatcctcgcggtggtgcagccccagcagcgatgggttccaga

SEQ ID NO: 953119 - DNA, 632 bp, Homo sapiens
cccacctcagccttccaaagtgctgggattacagtgtgagccaccgtgcctggcctgaacatgtgttttgttttgttttttttccttgagatggagtctcgctctgtcctccaagctggagtgcagtggcgtgatctcggctcactctaagctctgcctcccgggttcaagcgatcctcacgtctcagcctcccaagttcaagtgctcctcgcgtctcagcctcccgagtagctaggactacaggcgcgcaccaccacacccagctaattttggtatttttagtacagacatgttgaccaggctggtttcgaacccctgacctcaagtgatttgcccgcctctgcctcccaaagtgctgagattacagtgtgagccaccgtgcctggcctgaatatatatatttttttctttttcttttttttcctgaggcagagtcttgctctgttgcccaggccagagtgcagtggcacgatctcagctcactgcaagctccgcctcctgggttcacgccattctcctgcctcagcctcctgagtagctgggactacagacgcccgccaccacgcctggctgattttttgcatttttagtagaracggggttttgccaggatggtcttgatctcttgatc

SEQ ID NO: 953120 - DNA, 742 bp, Homo sapiens
aagtcaaaatcctggcctgggtgtagtggagcatgactgtaatcccagaactttaggaggccgaggcaggaagattgcttgagtccaggarttggaggtcagcctgagcaacagagtgagaccctatctttaaaaagaaaagtcagccgggcgtggtggctgacgcctttaatcccagcactttgggaggctgaggcgggtggatcacctgaggtcaggagtttgagaccagccatgccaacatggtgaaaccagtctctactaaaaatacaaaaattagccaggcgtggtggcacatgcctgtcatcccagtacttgggaggctgaggcagaagaatcgcttctcagcttccagctacccgggaggcagaggttgcagtgagctgagattgagcagtgacagagcaagcgagactccatatcaaaaaaaaaaaaaaagtcaaaatcctaacactgcctactaattcagtgaattattctgtggaggctgtggtggtttaagatggctctggagccaggctgtctgggttcaaatccaggctccaaccactgattagccgtgtgatcctgggccgtttcacctctctgtgcctcagtttcctcatcaatgcaataagaacagcaataagagcaacctcaaagaagtggtatgaggatttaaagagtaaatgaagttgaaatgctttggacggtgcctaacacttgatgagtgcccccaaaacatgagttcctgacaacagac

SEQ ID NO: 953121 - DNA, 637 bp, Homo sapiens
agtggaatttctgggccatatgtttaatagacactgctggccgggcacggtggctcatrcctgtaatcccagcactttgggaagctgaggcggggggatcatgaggtcaggagattgagaccatcttggccaacatggtgaaaccccatctctactaaaaatataaaaaattagctggatgtggtggtgtgtgcctgtaatcccagctactcgggaggctgaggcaggagaattgcttgaaccagggagtcggaggttgcagtgagctgagatcacgccactgcactccagcctggtgacagagtgagactccatctcaaaaaaaatagatactgccaatcagtttccaacctggctgcagcagttcacatttccaccagcggtatgtgaaagtccccactgtttcacattctcaccaacacttggattttagctattccggtgggtatgtagtcacatcacattgcgattttaatctgcatctcatgagtcattatgccattgccccacttccgatggaccatatacactccagaactccttaggaagaggggctttgtcaggcctgcactgcaggttcgcttctctctctgcccaatcctgctgccaccctttttttcccccacagatattgatc

SEQ ID NO: 953122 - DNA, 589 bp, Homo sapiens
ccccacatttgtcagcaggtcacccagataggccccttggctgtctcctttccttttataaccaggttggttatacagctgtccaagtgtctacatcaaattctaacttgatctgcctcctttcactccccttttagccaggggatccattccctgtccttccctagggtaacattctcactatccatgataagggacaactacctgaacaagctggaaatagtgaagaacacctttagctcaacgcttctcaacactgacttcaaagtagagttaaattagattttcaatgtagagacccatgtccccccaccacccgcaaatttggactcgactggtatggagaagcgttgtgtattgaatttggatgaaagcatagcccaggtgattctaatgtacagcctttcatgcgcgtccgtgtgaagagaccaccaaacaggctttgtgtgagcaacatgkctgtttatttcacctgggtgcaggcgggctgagtctgaaaagagagtcagcgaagggagataagggtggggccgttttataggatttgggtaggtaaaggaaaattacagtcaaagggggtttgttctct

SEQ ID NO: 953123 - DNA, 789 bp, Homo sapiens
aattctaacttgatctgcctcctttcactccccttttagccaggggatccattccctgtccttccctagggtaacattctcactatccatgataagggacaactacctgaacaagctggaaatagtgaagaacacctttagctcaacgcttctcaacactgacttcaaagtagagttaaattagattttcaatgtagagacccatgtccccccaccacccgcaaatttggactcgactggtatggagaagcgttgtgtattgaatttggatgaaagcatagcccaggtgattctaatgtacagcctttcatgcgcgtccgtgtgaagagaccaccaaacaggctttgtgtgagcaacatggctgtttatttcacctgggtgcaggcgggctgagtcygaaaagagagtcagcgaagggagataagggtggggccgttttataggatttgggtaggtaaaggaaaattacagtcaaagggggtttgttctctggcgggcaggagtgggggtcgcaaggtgctcagtgggggtgatttttgagccaggatgagccaggagaaggactttcacaaggtaatgtcatcacttaaggcaaggaccggccatttacacttcttttgtggtggaatgtcatcagttaaggtggggcagggcattttcacttcttttgtgattcttcggttacttcaggccatctgggcatatacgtgcaagtcacaggagatgcgatggcttggcttgggctcagaggcctgacattcctgccttcttatattaataagaaaaata

SEQ ID NO: 953124 - DNA, 582 bp, Homo sapiens
ctacctttcctgtgaattgtggtttccaagcacaatggagatggtattctatgcctagtgcctttgataatccctgggtgacagccaccttgaatgaagggccattatcgctctggagttacttagggagtccaaagccaggaattatctcattaattagtacgtttatcacctcaaaggctttttctgtctgacatggaagtgcttctacccagtttgtgaaggtatctacccataccaggaggtactggatgccccttatctttggcatatgggtgaaattcatctgccagtcttcccccgtgtagcctcccattctttgggttccagcaggggagaacctgttgattgaggaaattatttttaaggcaagtctcatgagcattaacgacctgtttgattatttttagcagatttttacctgagaacaacctttggaccaattgatacattttatcctttcctaggtggaaggcttgrtgaaggattttaagaactttccattggctggaagttggtggatggtttgccatcctcctattgtacctatcgtgaggggtgaaaggtgtattcccaagaggt

SEQ ID NO: 953125 - DNA, 711 bp, Homo sapiens
acagatgggaaaacggaggctcagagatgtcaagtgatttgtccaagatcacacagtgaatcgggctaagatggggatatgaacgtagartattttttgcctcctaatccagggttatacatgacagccaaaatagaaggccctgtcctcagggaggaagtctttcttgcaggggaacagtgaactgaaaggatccatcctccttgctttcctccccaagacattttactcttcctccgttgatccaagcatatcaccctagctgggcctgggaagtgtgagagggatgcacatttataatgcttcagagatgtttcatcaaaggtagctgtgcgcagccctgggaataggctaaacttgaacttgggctctgaagacctgaactcaaagcccgtgtgatcttatacaaatcacttcacctttctcagccacaagtccctaacttgcaaaatgaggcccataattcacacccatgtgagactggtgtaaggactaaatgagataatgcatgcttgaatgcttgattaatgccccaaatatgataaaagctgggatcccctggtgagccagcaccttatttatctctgtactcttggtatttaccaccgcacctggaacataggaacctctgataaatgttgactgaacaagaaaatgaagtaaactctttacatttaaacgtggtatgtttgtgtgataacaacattcttt

SEQ ID NO: 953126 - DNA, 604 bp, Homo sapiens
tggtgggcgcctgtagtcccaggtactcaggaggctgagccaggagamttgcttgaacccaggaggcggaagttgcagtgagccaagatcgagccactgcactccagcctgagtgacagagcaagactctgtctccaaaaaataacagtttaaaaaaaacctcaaaacagattaaagattaaaatgtaagacctcaaactgtaagaatcctagaagaaaacctaggaaccatcattctggacatcagccttgggaaagaatttataactaaaccctcaaaagcaaatgcaacaaaaacaaaaattgacaagtgggacttaattaaactaaagagtttccgcacagcaaaagaaactatcaggacagtaaacagacaacctacagagtgggagaaaatattcacaggctacgcatccaacaagggtctaatatctggaatctataaggaacttaaacaattcaacaagcaaaaaaacgactccattaaaaagtgggccaaagcaatggggaaaagaccccctatattcaatcaatggtgctgggagagctggctagccacatgcagaagaatgaaattagacccacatctttcactatatacaaa

SEQ ID NO: 953127 - DNA, 702 bp, Homo sapiens
cccagctgagtttaactggtgaaaattcatcaagctggagacacgatatgactacttttctttgcatatgttatcttttttttttttttttgagatggagtctcgctctgtcacccaggctagagtgscgtggtaccaccttggctcactgcaacctctgcctcccaggttcaagcaattcccctgcctcagcctccccagtagctgggattacaggcatacaccaccacacccggctaattttgtatttttattagagacggggtttcaccatgttggtcaggctggtcttgaactcctcacctcaggtgatcagtccgcctcagcctcccaaagtgctaggattacaggtgtgagccaccgtgctcggccgcatatgttactctttaaaaaaagttaaaaaaaaaaaaaaaccagcctacttggccaagtgtaagttctcaccggcttatcttcaacgtcgtcatatccatacaccttccagcattactcccagttccctggacatgccgtgcaatttcttctgcctggaacctccttatctagttggcaatatgctctggggtcgctgccaccacgaagccctcccttctggccccagatagaagtgtggtcactctcttcttgggaagccatatgcacctccattgcagcccttattcatctgacagtcactccaccagtattcagtgagcactggtt

SEQ ID NO: 953128 - DNA, 384 bp, Homo sapiens
actcatggcctcaggctggtagggcaggttaggtccacttgccagacaggcttgggaatgctcagaggggagttttgtctagggtcacatgcaatgagctataggcagagtggacaagtccctgggattccataccccactcattcagcagacgtttactggagtcaggctctgggcatacagagccgggaagacaaagcccctggcctcattagtcagggacagatgggatgaaaacacacatctgtctgtgtgatgaagrgcctggctggaaattcgggcatgcagggagtgaagagatggaatgtgtctcaggggtttctcctaggggttagcttttggttgtcacgcaggatgcacacagaacgcaaagccaggcaacca

SEQ ID NO: 953129 - DNA, 581 bp, Homo sapiens
cctttccctgggcctgccacctagtggcgacctgcgtgatggcctyccgcgctcccaggtgcccaggtaactggagctgctgggctgtgcctagccaggtgggtttccaacgacttccaccaggccagatcgccctcactctctccatgggacctgtggccgctggaatctgggacgcttgcccagtggtttgcagacaaaaggaaggaggagtcatttcctcgcagcctcgctgctggagctggtggccaaagcaacaggctcactgcggctggcgctgccctcctctgggtgcccagaggcaggtgtgccgtgaggccagcaagtggcaggggtactgttgggaggaggtgctaaaatggcttgtcttgggcacccctcccctgggcctcctccattccaaaaggccctgcaatttgtgttctccactcctaaggtggccaccttggtcatggacgagctcatctagcacatggttttgtgattttgtgggccagggctaggtgatgctttattgctattccagtgggctgagcagatgcccctgagcccctgccactgttgttaatgacatctccatt

SEQ ID NO: 953130 - DNA, 603 bp, Homo sapiens
ccagcactttgccttacagattcaaatagaggctactaaagtaatgaatcggtcttaatgtaaaactttcctctagtcctcccttgacctagtacctggattcagtaactagacttttacccaactgatcctgttactaaatacccattagacttttctccaattctgaagattaagatgcttcctttatgcttccttcttcagagttcatagaaaatatgctacctattaatctctgatatggtctgagtgtttttgtgtcccccaaattcatgttgaattcctaacgtcttaggtgatagggttaaacaacaaaaatatagtgatagtattaatgtgagagtattaagaggtgggccttttggatgtgatcagggggatctgccctcaggaatgggattattgcccttataaagaagcctgagagagcttgtttgccactttcaccacatgaggacacagtgaaaaartatcatctgtgaaccaggaaatgggttttacctaacaacaaatctgccagtaacttggtcttgggcttctcagcctctagaactgtgaaaaataaatttttgttgttcagaagctacccagtctaggatgttt

SEQ ID NO: 953131 - DNA, 604 bp, Homo sapiens
taaggccattttgaactttattttcttgttattctagttaactaataatataaaataatatcgaagcaagaaattacccttgaccccttcgtgggccttgtgacaggtatgcctcacttactcagcccacagctctcaatccctcgtgggagggggagcatgcaggtgagtgggtgagggagccagagtgagcacttttgggcaccgaaataagcaaaactctgtgcaggacccttggcagtgtgtatgggggtgtacctgcaacccccaaagccccagagggcatgggttacaggcagcactcttaactttgccatccatggatacattaagtgtttaagggctcagtggaccttctgtcatttcacgagggcagtgggtcagtgtgacagctttctgtatcctaagctcttgtccagcgtccaggaaaaatcaggtcacatgaacaaatttaaggatagtaaatgtgaaggattttattgccgatggaagtggcattaggygggaaggggagctagaaaagggatggaatgggaaggtattcttccctggaagtaccaccttcaaactgtccctctgaaggaaagctgcttctgtctgatgt

SEQ ID NO: 953132 - DNA, 565 bp, Homo sapiens
atcatcaaaatcagaaaataaactgatatattaccattaaacctcagcgttccattccagttttcctaattatcagaaaaacgttccttataggaaaaaaatcagttcagaatcatgaatagcattcaattgtcacacttttaagcctccttcaatttggaatagttccgggtgctttcctggacttctatatttttcacactttttaatcttatagatcaggtattttgaagagtgtcacttaatttgggtttgtctgatgtaccctagagtagattcaggttacaaagctttgacaaaaatattatgggagagatgctgtattctcatttcatcttatcaggcatcacataatctaaatttatcccattacagatgatcacagtgctcacttggctaaagtagtatctgtcatatttcttcatgtaatgtgacttttcaaaattttatgattgtggcagctttgtactgtttcaccttagctaagcttgaactttgattcccagattcctttgccrgtatgattctgagctagaattggccacaagagaaagctgggtgagat

SEQ ID NO: 953133 - DNA, 546 bp, Homo sapiens
aagatggagacaaatatgcaggagaaacaccctctgagggcgatttaacagagcagcgaatgtggaaaggggaaggggaggtgcttcttgggtgcccagtttccttgggaggaactygggtacgtggtcaggggttgtgggcagttattcccctcgctggccctcagggggctcacaggccaagagcagcttggttgtcgtacatgggttaggggaagacgggagagttagggtgcatgataagatagagaggcaatgtgcaactggatatttctatgtacttggcctttcaaaattcaaaatttgttaactcatgaatacttgtatactgacataatgtacagatgccatttaaggttggatagttttgtaattaatgaggcattatggatctcattgagaagccaatactgactctgtgagtgaaaaaacacaaatcgtttttcctctgttctcacagcacaaaagccaacacagaagacttctgtgacccaacgtgtaggggtgtttccccatacaccaagcaggaaatcaattctgccatag

SEQ ID NO: 953134 - DNA, 546 bp, Homo sapiens
aagatggagacaaatatgcaggagaaacaccctctgagggcgatttaacagagcagcgaatgtggaaaggggaaggggaggtgcttcttgggtgcccagtttccttgggaggaacttgggtacgtggtcaggggttgtgggcagttattcccctcgctggccctcagggggctcacaggccaagagcagcttggttgtcgtacatgggttaggggaagacgggagagttagggtgcatgataagatagagaggcaatgtgcaactggatatttctatgtacttggcctttcaaaattcaaaatttgttaactcatgaatacttgtatactgacataatgtacagatgccatttaaggttggatagttttgtaattaatgaggcattatggatctcattgagaagccaatactgactctgtgagtgaaaaaacacaaatcgtttttcctctgttctcacarcacaaaagccaacacagaagacttctgtgacccaacgtgtaggggtgtttccccatacaccaagcaggaaatcaattctgccatag

SEQ ID NO: 953135 - DNA, 540 bp, Homo sapiens
aaatatttagtctttgtgggccaagaggtaaaagtgagttaaaaccacatgactgtgatttgtagtgtgcaaagcaacgggagcgccacatacagtctctgtcgtggctgcctgactccaccattgcagtacaaaagcggccataggcagcacataaatgaatgagcatggctgtgttccaataaaactttatttatggatattggaatttggatttcatatcattttcacatatcacaaagtattattcttcttttgatgattttataactacttaaaaatgtaaaaaccattctgagctctccagccacatgcacacaggcggtggcccagatgtggccggctgtggtttgccaacctctgatctagtggaagggacagaaaataatgaagataaataagttaagtatggccaggcacggtggtgcatgcctgtaatcccagcgtttcgggaggctgagatgggyggatcacttgagctcaggagtttgagacaagcctgggcaacacggcaaaaaccccattgctacaaaaaataca

SEQ ID NO: 953136 - DNA, 611 bp, Homo sapiens
acccaaatataagtccacacatttacagacaactcatctttgcaaaggtgccaagaacatacaatggggaaaggccagtctttttaatacmtggtgttgggaaaattgcataactatatgcagaagaatgaaactacacccttatctctcaccatacacaaaaatcagatccaaatgtattaaagacttaaatctaaggccccaactatgaaataactagaagacaatattggggaaatgctccaggacattggactgggcaaaggctttttgggattaagaccccaaaaacacaggcaactaaagcaaaaatagacaaatggaatttcatcaagctaaaaagcttctacacagcaaaggaaacaatcaacaaagtgtagagcaaacccacagaatggggacaaatatttgtaaactaccatctgacaagggattgataaccagaatatataagaaactcaaacagttcactagcaaaaaaaaaaaatccaatttaaaaatgggcaaaaatagatatttcttaaaagaagatatacagatgtccaatagatatatttaaaaaaatgctgaaggtcactgagcatcagaagatgcaaatcaaaactacactg

SEQ ID NO: 953137 - DNA, 469 bp, Homo sapiens
tagtggctcgcacctgtggttccagctacctgggaggctgaggtgggaggattgcttgagccccagaggttgaagctgcagcgaactgtgattgcactactgcactccagcctaggcaacagagtgagaccmtgtctcaaaaaaaaaaaaaaaaaaagaaaatctataaatttggtgagttgccctgaagagttggaactaagacttcttcggttatgttgaggctggttctgggaacattggaaatactgcaaactggaaccaactgttgctactggaacaatactgctactactggggagaatagggttggtgtgatggtaatggttcccttttagatttttcggttctttagaacccggctaactctgtttctgcctcctgtatggactcaccctgatgctaccaactcatgtctttttgtctcctcctctccactactgtgttgatattatttagaattttagtt

SEQ ID NO: 953138 - DNA, 620 bp, Homo sapiens
tagtagaggcggggtttcactatgttggccaggatgctctcaatctcatgacctcaggtgatccacccgccttggcctcccaaagtgctgggattactggcgtgagccaccatgcccggcctagmcttcccttttttcttaatttttatttttaaaattttaattgtggttaaaatacatatagcataaaatttaccagttaaccattttttaagtgtacagttctgtagttaagtaaatccatgttcaaccaatctccagaacccatttcatcttgcaaattgaaactatacattcattaaacaacaatatcccattccctctccttatagttcccagcaatcatgatttaccttctgtctctgaatttgactactctaaacaccccatatgattagaaaaatacaatacttgtccttttgtgactggtttattgaacttagcatgtcctcaaggtccatttatgttgtagcatgtgtcagaatttcctttttttaaaggctaaatattttattgcatgtatataccaaccacattttcccacctttggttttgttaaatctttatttgtttttattttgttaacctttattttcagtccaggggtacacgtgcaggtt

SEQ ID NO: 953139 - DNA, 530 bp, Homo sapiens
aaattaagcttaggtttaaaagaaaataaagaatagggctgatggagaaacattttattgcaaagggtaaacaatttcaaatgaaatyaggtgggaaataaatagcatatataaataaatatatctacagatagatctatacccatcaccataaagaaacatatccttacctttgacagtggaatgagaaaatccaatttgtaggaaaggatcactctggtgagcagtaccacaaacaccacataggcagagttctcaaagtctgttaattgcacctagacaagcagaagcccagagaagttatgaaccaactacacaaacatgctcttccctgacccaggcccttcctcagatcatgtcattcccaagccatctcctaattccccatctgggtctggaagccctttgcccacatctattctcagaaatcaaccctccttaacttggactgacttgctaccatgcacatacttaatttttattttatatataagagccttctcatagcagcatcagaagggtgatgaaca

SEQ ID NO: 953140 - DNA, 614 bp, Homo sapiens
aaagcaaaaaggggatgccatctgcccaacccaacctttccaaggccttcaactgcttttaggagaacaactaaaatttatggttaacctgacctggcctgccaattacctgccagcttccctttmccccatacctgcacttcctcctcagcctcctagtcacactggccagcttgctttcttctagttcccaggaagtccccgcttgtttggttcatcctaggacttctacacacactgctccccctccctaagactgtcctccgctcctcattcctatttcactcctcctggaaccttggacatcccaccccctccccctccacccaccagagtccactggatacctaggttgtactctttgctccccatctcctcctgctagcacagccccactttgacgcttatgaatctatgggtatttgattgttcttcaaccccccagctccacagagacagagctgtccgtcttcactcatgagagcatgcccattctgcctgcagcaggcactcaagtgtctgagtgaatggcagggccaatgatttttcacctcctctttcaaacattaggtcgaagaaatgtgcccactctaatcaaaacaaatctgtccacc

SEQ ID NO: 953141 - DNA, 544 bp, Homo sapiens
atgcaactgtgtctgcagctctactgttacagagtctatcaagtgcagtctataaaagataaaccatctgtaaygtatgaggattgtaaggtggaatgcccgggtcgtgacttgctcttttcattacctgtatctctgagagatctgctggggcatgttaatataggaactaacctgggaaatgaagttattgtgcaaagagcctgattttcttctaatatagaagtagcctccttccggcgttttcgcatgttggcctcaactgtattgaactcggacattgttcctccgtagggctgtcctggtgtcccttcaatcatgtaactcccatactctggtctccaaagggtaggatggctacggaggagaaataacttagttccatcttattcttttgctatagtctgctcaatttttaagtttttaaagttgctttaaaagtgtagaaaccattaggtataaatgaagctaagaagtccttcacagttctcagtgattattacttttccatagctattcaactacataagggtcaacaagtatt

SEQ ID NO: 953142 - DNA, 680 bp, Homo sapiens
ctttcgaggcagcagattcatttgggcttcaggaaacgcggtgcatgagctgtttcaggtgctggggaaaggctctgcgttagaacccacaccttccgtctcccgggccaggtctctttgtaggccaccacggagagagaaaagcatcttgagaatcctaatgggaaccaatgaagaaatgagtatcatatttatatatctgctataactcactttctaatgaacaaagtcgcttactttgaaaagtgatttctctcttgtgtatggctcgggaggagggtctaaggtgggcctcgctactccagtgcctccggagcccagggaagctcacctcaggcagcctgcagaggctctccccttctagaaggcccagcaagcgccccgtttcccacagacggttcccacctggggatgttgaaccagtctcaccagatctgcttacacggaggagctgcacatcgaacatgctaaaaactgcgttatgttttttaaaaacccaacaaactctaaaatgttagctgtgggctgaaacactgactggactaaacaaagcctggcaatgggccagatctggtcagctaggtctcccagctcagcaatctggcytaaaggagcaccgggtaagggttctttatttcctgctgaatctgacttaagtgtaaaatcgagcagggatcccc

SEQ ID NO: 953143 - DNA, 651 bp, Homo sapiens
gactgcagcttcctccgagamcctgagccagaactactctgctaagccactcctagatttctggctctcagaaattgaataagaaagtaaatgttgttttaagatgctcagtttggggtgatttgttacatagcaatgcatagttaacacatgaatgaatatgtaagctcactttgctcattgagaaactcctaagaacaatttggtgacataaagccctagggtggcctggtgaccccacaacagccccttctgttctcacaaacctggtgccctttgtcctcatgttctatccctcacaggaagggagccaagagtctaagcccaacttttccaacagaggcaagcatggactgccagcctgggtgtgtgcatttgagggttcaatgctatttgggagccacgaagaatccacaaagatgtgctgtggttggccattttttaaaatttattttttatttttttgagatggagcctcgctcttgttgcccaggctggaatgcagtggcgtgatctcagctcgctgcagcctccacctcctgggttcaagtgattctcctgcctcatcctcctaagtagctgggactacaggtgcgcatcaccatgccccgataatttttgtatttttagtagagatggggtttcaccatc

SEQ ID NO: 953144 - DNA, 525 bp, Homo sapiens
gtaagccatgattgcaccactgcactccagcctgggagacagagtggatcccatctcaagaaaaagaaaagaaaaagagtttagcagcaaattcactgtcctctctaacactgctcttgaggttcagttcattcggtgtccatgcaggtgagccttcctaccccagcctctcagtccctccacgcatggcctcaccttgccctgacctcagcactgtccctcaggatcagacctggacaggcctctcacccttgggactgctaggtgctgcttccacctgcgatccaagctgcaggtgcccttccctcttccctccccacgatttcttcctctccattactttgggcaccccctttcagccattttatagtttggggttttggcgatctcctacttttattaaagataggctttttgttactgtacaggattcaccaatatgagatcacttgacggggacttgagctgacatgagcatctatctatttctgtaaaactcagyggcataaaacagccaccgtttta

SEQ ID NO: 953145 - DNA, 572 bp, Homo sapiens
caattacacatgcaaaggcagccatgaggtacagaacaatggtcaggagcagtgtttggaagtgacaaaggacttcactgcatatgtgatttaagataagacgcaacctctcaggccgagcacagtggctcacgcctgtaatcccagcactttgggaggccaaggcgagtggatcacgaggtcaggagattgagaccatcctggctaacacggtgaaactctgtctctactaaaaatatgaaaaattagccaggcatggtggcgggcacctgaagtcccagctactcgggaggctgagccaggagaatcccttgaaccgtgaggcggagcttgctgtgggccaagatcgcgccactgcactccagcctgggagacagagcaagactctgtctcaaaaaaaaaaaaaaaaaaaaaaaagacacaacctctcctttctcaactgtaaagtaggggtgccaatatttcctcctactcaaggactaagcaagataacatacataaagcacygggtcagtgcctgtcacaaagcattcgaattatagttccatttagtacacataatagatacagaa

SEQ ID NO: 953146 - DNA, 609 bp, Homo sapiens
ataaactctactcccggacttctcaattaccttcttgaaattctacacattcagcttctctatggacacaaacctgcagaagcaatccrgccgaccttaactgttctcttctctatgttctactatttaataaggagaaaatctagagggaaacaaatcttcaataaaacaaagtatcttgctgtgattaagaagtgattctaaataactaacaacaggctctcacgcagaaaaatttttttaactttctaaataatgtttcttctgtttaatcttatccaattcaatgttatataaatatatggtctcagaaataacattaacattaaaagcttccacatgaaacgaccaaaaaacaggccgaacatataaaacaataatttttcaagacattgaacataacacaatgcagaacagtgacccctgagagacggaaaacaaatgaagtgggccctacaattgccccagcttactgctttgtcagtttccagacttggctgcagttgtgcaaggcagtcagtccagaagactctgcactaagacagagttaagaatttgaggaaatcaaggcttgctagagtttgtaagacagagtacttgagaggagta

SEQ ID NO: 953147 - DNA, 624 bp, Homo sapiens
accatagcaccagcccaaagtaggcctattctgttgataacaggacgccaagtcaccttgtaggcataacrgagtgaaaacttcaagtcacataggccaggcatgcgcaatagaaaaaggtttgacctttaacaacacctggtacaaggattcgtctctggggaaccaaaagactgggaaatgactggaacctgaatgctggagctctttcaaaagggatctgttggcccagaagatctgggactaaaatccttactgtaaatggtttgtttgaagttctcccatcagactctgccaagtcaacattcctaaatcctttctcttgccctcccaacccttagaacttgccccagatcccaaatcagtcagatagatatgaactgcatctcctgtctccttgctggctggtcttgcaataaagcctttcttttctcaaaagctagtgccacagtattggcttcccatgtgtgtcaggcagcaagtccatttattcaataccatcttcaccaaccagaaagttccaatgagctttggtgtctagagtttttattggtgtttcatgatgtaagcatgatagattgaataattggccacatagttgaattcaatcttgaggcctccatt

SEQ ID NO: 953148 - DNA, 789 bp, Homo sapiens
cccagtgcgagaccatcctaagcaacatagggagacccttgtctctacaaaaaaatcaaaaaattagccaggcatggtggtgtgcacctctagtcccggctactcagaaggctgagatgggagcatcacttgagtctgaaaggtccacgctgcagtgagctatgattgcaccactgcactctagcctgggagacagagcaagaccatgtctcaaatttaaaaaagagagagaaaaaaaaaaaaaaaggccaggcatggtggctcacgcctgtaatcccagcactttgggaggccaaggcgggcggatcacgaggtcgggagattgagaccatcctggcttacgcggtgaaaccccatctctactaaaaatgtaaaaagttagccgagtgtggtggcaggcgcctgtagtcccagctactcgggaggctgaggcaggagaatggtgtgaacctgggaggcggaggttgcagtgagctgagatcatgccactgcactccagcctgggcaacagagcaagactccgtctcaaaaaaaaataaataaaaaataaaattaaaattaaaaaataaaaattataatgtgtcatggaattagggcacaaaattaataaagtaaaaattaaactatataaatttacatttaaataaactatattggctgggcatggtggctcacacatataatctcagcactttgggaggtcaaggtgggcagatgacttgagcccaggagtttgagacccacctggrcaacagggtgaaaccccatctctacaaaaaatacaaaaat

SEQ ID NO: 953149 - DNA, 739 bp, Homo sapiens
ctaggaggggaggggacaaagcagaccacccgtcagacagaacagccaggctgcccggcagtggtcggccgagcacagggacggccagctctctgctggttgagcttgaatccacctgtttccccagtcaccacattcactcttatttttcaacatctttttgacacaggtgcctaacttactgagaatcatgcctgctgtgatgagcccttggaaaccatcaggactggatggtaggggtcctgagaggattgggggaggaggccttgatatgacagagtggacagaggccgtggaacccaggacagccagcctgctccacaatcctcatccccacagaccttcatgtgtggctcctaaataagaggaaacccactcctgataagtcaggggctttgaaaagtgattttgtttaaatggtgcaaacaagcaagccaatcttggggagacagggctaaacttaagtcctttaagaagctctacatactgacaagattctagttcccttccaccttatatgctgcaaagtaaaaagtatcactgaatgagaaaatcagcataaagaagcccaataatgtctgcctgagtttcccctatgatgacttttggtactttttggkaaacattaagtatgaagttatttcaaaataattttttggtgcctctgcttggtgatgccttaaactctgggtaagagaaacaccaggtgcctgtcaggagatggccttttccaggtttc

SEQ ID NO: 953150 - DNA, 739 bp, Homo sapiens
ctaggaggggaggggacaaagcagaccacccgtcagacagaacagccaggctgcccggcagtggtcggccgagcacagggacggccagctctctgctggttgagcttgaatccacctgtttccccagtcaccacattcactcttatttttcaacatctttttgacacaggtgcctaacttactgagaatcatgcctgctgtgatgagcccttggaaaccatcaggactggatggtaggggtcctgagaggattgggggaggaggccttgatatgacagagtggacagaggccgtggaacccaggacagccagcctgctccacaatcctcatccccacagaccttcatgtgtggctcctaaataagaggaaacccactcctgataagtcaggggctttgaaaagtgattttgtttaaatggtgcaaacaagcaagccaatcttggggagacagggctaaacttaagtcctttaagaagctctacatactgacaagattctagttcccttccaccttatatgctgcaaagtaaaaagtatcactgaatgagaaaatcagcataaagaagcccaataatgtctgcctgagtttcccctatgatgacttttggtactttttgggaaacattaagtatgaagttatttcaaaataattttttggtgcctctgcttggtgakgccttaaactctgggtaagagaaacaccaggtgcctgtcaggagatggccttttccaggtttc

SEQ ID NO: 953151 - DNA, 739 bp, Homo sapiens
ctaggaggggaggggacaaagcagaccacccgtcagacagaacagccaggctgcccggcagtggtcggccgagcacagggacggccagctctctgctggttgagcttgaatccacctgtttccccagtcaccacattcactcttatttttcaacatctttttgacacaggtgcctaacttactgagaatcatgcctgctgtgatgagcccttggaaaccatcaggactggatggtaggggtcctgagaggattgggggaggaggccttgatatgacagagtggacagaggccgtggaacccaggacagccagcctgctccacaatcctcatccccacagaccttcatgtgtggctcctaaataagaggaaacccactcctgataagtcaggggctttgaaaagtgattttgtttaaatggtgcaaacaagcaagccaatcttggggagacagggctaaacttaagtcctttaagaagctctacatactgacaagattctagttcccttccaccttatatgctgcaaagtaaaaagtatcactgaatgagaaaatcagcataaagaagcccaataatgtctgcctgagtttcccctatgatgacttttggtactttttgggaaacattaagtatgaagttatttcaaaataattttttggtgcctctgcttggtgatgccttaaactctgggtaagagaaacaccaggtgcctktcaggagatggccttttccaggtttc

SEQ ID NO: 953152 - DNA, 575 bp, Homo sapiens
atccccaggaaactaacacaggaacaaaaaaccaaacactgtatattctcacttataagtgggagctgaacaatgagaacacatggatacagggaggggarcaacacataatggggcctgtggtagggggagtggggaaagggagagcaccaggatagatagctaatgtatgtggggcttaatacttaggtgatgggttgataggtgcagcaaacaaccatagcacacgtttacctatgtaacaaacctgcacgtcctgcatgtgtatcctggaaattaaatttaaagaaacagaatgtccattgactgctgagtgatcttcagtagcgacctaacctctctgactaccagcttccttgcctgtagacatgataatggggtgatactttgcctccaaggagtgaagtgagacaaggaatttgaaaaccctttggcaacatcgggctgtggtttggatgttcttttctctggaagctcccatggtcctgcacctttccctctctgcagatggcagggcttgtctttctcaatggccactgcaagaagtggccaagatttgtgggtttatcccagtc

SEQ ID NO: 953153 - DNA, 595 bp, Homo sapiens
agcctgcagaaccatgagccaattaaacatcttttctttattcatagcaatgcaagaacagcctgatatacctctccaatttttctagctttttattgaaaaaaawatatatatatatttgagatagagtcttgcttttttgcccaggctgaagtgcagtgatgtgattttggctcaccacaacctccacctcccaggttcaaggagttcttcttcctctgcctccctagtagctggaattacagatgcaagccaccacacccagctaatttttgtatttgtagtagagatggggtttcaccatgttgctcaggctggtttcaaactcctgacctcaggtgatccgcccacctgggcctcccgaagtgctgggattacaggtgtgagccaccatgcccagctgaaaaatatataaaaagtagagagaatattataataattcctcccatagccttcacataattcaacagttaccaatacattgtcatgtattatttatatatacgtttatctaattcctccctccctcagttaccttgaagtaaaacaagatatatcatttcatgcaaaatatttcagtaggtatttctaaaat

SEQ ID NO: 953154 - DNA, 649 bp, Homo sapiens
gacctgcatcctgaaaattcccagttgtacctayagtaagtagttcctaaatgtgagccatttatcctctttattattcagcagctatggtgcctgtggagttggaaagacactttaatttccatttcttaggaaagctgtatggacataacacacctgatgactggtatagctcacagggggaagacatttaggaaccacgggcaaaagccactttccagaatattcccaataaatgtgaagtggagaaaagagtagactttagtgcgtcccagatttttattcttcaccctcaccgtctaagtgatgctgcttatccaaggtaaatttcaaatttttatattatccacctcatatatttaaaaagctacagaaataatttcctgaattatttttgaagagtttcaagaactgtcaagttttgaactggaacactatgaaaaatgagactgagtgtctgagttggcttttaagaataaggtgaatctgttccaaaagagatggataaaatgatctacacccaggtctattgatcacgggcactaatacacatagggaagatggcaattatttagcaagatatttccccagattggtggcacattttttatttacttataccctaaatcctgttctgttatggctctta

SEQ ID NO: 953155 - DNA, 588 bp, Homo sapiens
tagttttgtttcattactcttttaggttaagacaatctttaagaccctctgaactagtcaaaattatattccctytaacaaaagccatattcctgtgcctttttataatcttttaacaaaaacacgttttacacaccttgcatgtaaaactgtttctccagttgtcttaattgtatgttataatgttaacttttagcaacttttatttttagtgaaaaacttgataagtaagtgatttttaactatataccggggtggatcctaggacgtcagacagaaatgaagataaggtttgactgttttcagcatagctagcgggcatagctcttcgtatgtccccaggccttatttataatctaatgctccaaagtaggtaaatcaaacaattttcaaaagttaaagaaacactttgaccttaaagcatttagcaaatcggatatctgaccttcatttagaccaaatgtttacattttcaagacattttattttactaataatttttaaaactgtccttatttccaaaagatgaccgaggtcatgtgaacaaaacggcattaaagtttttatttttctgacaaaatatttgac

SEQ ID NO: 953156 - DNA, 618 bp, Homo sapiens
aactgaaatagtcaaagacttcccctcccaggtgcttttttttaaaaaaaaaaaaaaaaaaaacaggtgacttccttctatcaccgggattttcmatgatgggaattcaatagtttttattccgaatattgcattaaattgacatggccagaaaaatatatggcatccttttaggcagaggcatcaattcgttcaaggcctatcacacaagccttctgatgcatggtacattgcattttcacattaaatgtaaacagagaggggccgggcgtggtggctcatgcctgtaatcccagcactttgagaggctgaggggagtggattaccccaggtcaggaattcgagaccagcttgactagcatggtaaaaccctgtctgtactaaaaatacaaaaattagccaggcatggtggcatgcacctgtagtcccagctactcaggaggctaagacagaagaattgcttgaacctgggaggcagaggttgcagtgagccgagattgcgccactgcactccagcctgggtgacagaccaagactccatctcttattaaaaaaaaaaaaaaaagtaaacagagacaaaaagttttatgtctactaaaccataaggcaccaacctaa

SEQ ID NO: 953157 - DNA, 565 bp, Homo sapiens
ggatagaagctggaagagtttggaggtgcatgctttaagcagtatacattgctgtaaatggatctttaagggaaattttggcaagggctcagaaggaaaggagaagagctgcagagaaagcctcaatattcttaaagaatagctgagcagtagtgaacagaatgttggtggaaatgtgcatggtaaaggccaatctgatgatttcttagacaagagaaacatggtattgaaaactgaatgaaaagcaatcctgttatgaaccagcaaagaacttggctgaattgtgttcgtatcctagtgttttgtggaaggcagaatttgtgagtaatgaaattggatatttagctaaagccatttctaagcaaagtgttgaaggtgcaacttggctcctcttgactgtttatagtaaaacagcagaggagaaaagtgattkaaagacaaaattgttaatcaaaagggaagcagaacttaaagatttggaaaactctcagcctttccatactatcaagaatgagaaagcctgttcaggagagaacatcaagaatgtggccaaccaaccacctga

SEQ ID NO: 953158 - DNA, 626 bp, Homo sapiens
ctgctgtgacagggcagcattgaattcaatgcaacatctcactatcactgcagcctccttctcctaagcacatgtattctctctcagtccacatggctgctgccaatgggtggggaaggggtggtgtcagtgattcaagactcttttctaccctctccagtgcctccttcagtgatatgaagttaaaatcaggtactgtgagtgctcacctaatttttaggttttttttatgaagatggttttttgtgtagataattgttaaatttggtgttcagggcggggatgatcaatgcggccttttattctactatcttgctccacccccaattgattaagtttcaatttatttatttattcaaatagatttttgcggaacaggtggtgtttggttatatgaataagttctttagtggtaatttctgagattttggtgcacccatcacccgagcagtgtacactgtactcaatgtgcagtcttttatcccttacacccctcccwccctttcccatgagtccccaaagtccattgtatcattcttatgcctttgcgtcctcatagcttagctcccacttatgagtgagagcatacaatgtttgattttccattcctgagttacttcacttag

SEQ ID NO: 953159 - DNA, 665 bp, Homo sapiens
gattgaaaatagtataactggttgggcacagttgctcacgcctgtaatcccagaactttgggatgcccaggtgggtggatcaccaaaggtcaggaattcgagacaagcctggccaacacagtgaaacactgtctctactaaaaatacaaaaattagtctctactgaaaatacaaaaattagttagctactcaggaggctgaggcagaagaatcacttgaacccgagggccagagtttgcagtgagccaagatcacaccactgcactccagcctgggcgacagagcgagactccgtctcaaaaaaaaaggccaggtgcagtgcctcatgcctgtaatcccagcactttgggaggccaaggccggcagatcacctgaggtcgggagttggagaccagcccgaccaacatggaggaacctcatctctgctaaaaatgtaaaattagccgggcgtggtggcacatgcctgtaatcccagctactcagaaggctgaggcaggagaaccacttgaacccaggaggcggaggttgcagtgagccaagatcgtgccattgcyctccagcgtgggcaacaagagcaaaactccgtctcaaaaaaaaaaaaagaaagaaaatagtatagttgaaagaaacgtggagtttgtaattagagttctcttttcccccat

SEQ ID NO: 953160 - DNA, 469 bp, Homo sapiens
gcagactcacacaagtgggtggtctcagtgactcactctggcggcatcccagggaaagtgccaatccaaacaaagtgaaatctcccytcaatacatggtagctgtaaatctggaaaattccatgtgtattaaaatcatgcaaaaacatactttgtttttctgcataaaacgaaattagattctgggctcagataattataaaaacctgtctcacctataggaatgtctgacaaaacatccaatatttgtgagggatgtggaacaattctttgatgggcagtgctgtgctgtgcattgtggaaaatttagaatccctggcttctcccaaatgccaatggcactctcaaatattacgacaaccaaaagtagtcccatcaatttccaacatggcccctagtaggcaaaatcatccccactgagaacccctgacctaggtgactgggtttatgaggaggtagactcaaaaaat

SEQ ID NO: 953161 - DNA, 594 bp, Homo sapiens
gatgctattctaggggttgtaaatacagcagtgaaaaaaaaataggcaaagtccctgcccttttggagcttacattctagtctgggtggtacgaggtagacatgcctacatacgaatgtaagtatataatgtgtgggaaggggaaagagaggggaacaggaactaaaggacgaagggggagaaggagaactggggatgacatttggcttctattttatatgagatggttggggaacctgacttatccagtaaggtgacattgagtagagacctgaatcacacacaggaacaagccagggagatttctagggagggcaaaggctcagagatatgagaggccctgacttgtctgagaaacagtggggcaggcatggagtggaatgaagggaggtgtgggcagcagatgaggccagagagaagtaggacccgatcaggtccccttggggactgtgaggtcttgtagggactttggctcttattctgagtgagatgggggacactgacyggtgttgagtagaggaacgacacgagatgatttatgctttggcacgctgtgtggcaaaggctgtccagagacaaaagtgaaggcaggaa

SEQ ID NO: 953162 - DNA, 602 bp, Homo sapiens
tcatctctgaaacagggacggtgggacccaccccttgtaaggttactgcaaagataaaatgaaaycattcaggtttgtgaaaatagattctgtatctggcccggcattctccagatgaattccatttacatgtgcatctgaactattaaaccacataaaatgccttcgcttttacttgggacaataaatgaaaactcttttgacatttgaagcatttcatgtctctgtgcttccagagaacagttccatttaacttgaaaggggttttcagtgtaattcacatttaatgttatgaaagcatttctctctcacattgggctttatctaaatttttaaacaaggcctaatttacaggccccaaacgacttggcaaatttcctgcaatctcattgaaaaagtcctggctgcttatatgctgcgggtgtgttgaaagactgctttgtctagggtgccaactaaaactgaaattactccgccgacaaaaggtcgtcctttcaaacaaactcacaggatccataggcatgcatgctacacagaactgcacccggatccactgccccaggaccagatcaggtgtaatctgtacccggtctgtagcaatg

SEQ ID NO: 953163 - DNA, 603 bp, Homo sapiens
cctacccaatgagaaagaaagggatctgggacccgctttaaaaaaccagtctggctacatttctgtagggtagctgtgctatgctaggggtctgcttcagcccctggtcatatcagagactccaaagctcaaaggctggaacagctaagtcacccaaacagcaaagactgtggcccaccccttcttctgggagctctatcccaggatgattggaaacctctcctggctagagaacactagcaggtgtagctggagaactcggttgggaggtctcacccagtgtggaggaatgagatcaggaacctgctttaaaaagcagtctggccacgttttcatagaggagctgtgctgtgctgggactctgctccagccctcagacaccttggactctccaaagtccaaagactgaaacagctaagtcacccaaacagcaaagatggcagcccactccttcctcttggagcttcattccagggaggtttgaaacctctgtcagccagagaacaccagtgggtgtagctggagactttggttgggaggtcccacccagtgatgagsaacaagatggggaactttaaaaagcagtctggccacattttcata

SEQ ID NO: 953164 - DNA, 579 bp, Homo sapiens
agaaaatatgctcttggatctcttgagcctttgagagtgaattgtagaccaggtgtccttcccttttttggcaacaaagtcattaaattacttgtctgagtcaaattttctaataaatatttactgagtgcctactctgcatcaggttttgtgttagatgcaagaagaattaacacagtctccctgccttcaaagaactggtagtctagtggatgataaacaagtaatttcacacaatgtaaaaagaatatatggtgcatagggacacagaggagagacatctaaatctagtccgctgtaatagaggaggaactattgtgaaaagacctggaggaggacacccaagcagagttttaaaggatgagtagtagccaaatgaagaggagggtgggaatttccagaagaagcaatagcatgagcaaaggcactgaggtgagaaacatgtctgtgacatacacactaaacgtttgagmcaatgaatgggaagagatgatactaaaaaggcaggcaggagccaggtcatgaaaagcaaagcatggtaatgggaataatcctacccccccccaccccgaaacagaa

SEQ ID NO: 953165 - DNA, 587 bp, Homo sapiens
aacagaacaccaggtagacttctagagtgttttgactccaggctctagatcccagacagcacctctggacctgaccagggcctaggggagstcactgccctgaagggaaggacgcaagcctggcaggcttaagcacctgctgattgtagagccccagggccctgaacaaacatagatggaagacaggtagtggttacagtgggccttcagcaagatccagggctgtgctggctttaggtctaactcaggagaagcccactggcgttgaccacagggttgcttgtgtcactgccccccccccccccccagctccaggtggtacagaacagacagacagactccatttctttggaagaaataagggaagagaacaaaagtttttgtttaataatccaaggaattattctggatataatccaagatcatcacagttgtacttctagaagttggcaagaactacagtgttacttggcttggggtgcctcctaatgcagacaaggcttagatcctaatacttaagtccttttgaataccaggaaaggcttctcaaggaggatgcatacaaacaagcccagactataaagact

SEQ ID NO: 953166 - DNA, 759 bp, Homo sapiens
aagagtacccatggcagagacggagctggaaaggagggcaggggccagaccacgctgggctttgcagaccttggaagtagtcaggccctgttctaagaggagagaaaaccagtgaagagttttatgyagaggagagactggaacggcagcataaggcaggtaagagtggatgtggagggtgcacagtgatccaggtgggggaaggtagggtctggagcatcttccagaatggtttagggtaggggacacagagcatgtcctgggagcctccttgcatctggcttccattctgagtaaatggagatgccagtcactggatgggaaatatggggaaagtagcaggcttggggcagagagatgaattactgacttatttgaaacatcatctttaccgtattctaaaattttaggtaattttggaatatgttataatgcagagagtttatttgggagatgatccccacctctggtaggggagtggggaaatgagacagggaaaggagggcagccaggaaagggcacattgtcccaggagaatccaccatgggcaactggagcacaatcccgctgggaactcaggagcctgcttagaacgtgccaggcctcagggtcatcctgtctgaggggcaagggtgctggggtggacaccagcattccttcagagctgctccaggggacattacttctgcagcacccctggcctgctacacatgccaggctcctgccaccagagggaccctcaggcaaaggaatatagcc

SEQ ID NO: 953167 - DNA, 710 bp, Homo sapiens
tatcccaaagtgctcatgggctaataggggagactaacatgaaaacatgtaactggctgggcgcggtggctcacgcctgtaatcccagcactttgggaggccgaatcgggcagatcacgaggtcaggagatcgagaccatcttggctaacatggtgaaaccccgtctctactaaaaacataaaaattagccagtagcgggtgcctgtagccccagctactcgggaggctgaggcaggagaatggcatgaacccaggaggcggaacttgcaatgagccgagatcgagccactgcactccagcctgggcgacagagcgagactccgtctcaaaaaaaaacaaagaaaacatgtaactatgggaaaataatagtggcattatgggctgggcgcagtggctcacgcctgtaatcccagcactgtgggaggctgaggcgggtggatcactggaggttaggagtttgagaccagcttggccaacatgataaaaccccatctctactaaaaatataaaaaattagctgtgcgtggtggcgggtgcctgtaattctagctactcaggaggctgaggcaggagaatcacttgaacctggaaggcggaggttgcaatgagctaatatcgagccactgcactccagcctgggcaaaagagtgagaccytgtcttaaaaagaatggtggcattataaggttcctgggtgcctaggggcccga

SEQ ID NO: 953168 - DNA, 615 bp, Homo sapiens
ggaagggacccctttccacttggaacctgggctctcccaggaggtgtcccagcctcatgctccttcamgaacacatccacataagtctccacttttgctgaggatgggaaggtggggttgtggagctgagactcctctccctccaggcctcctatggaaacctgtgtgatttggtcacactgactggttaagacctgacccagggggagtcaacctataggggatggtcaccccatggccaggcaggaaaagtatgagctggcccaataattagagacttctggggactataaattaggaaactgaccagtgccgggaggtactgaagaagcagggcaagtgcacaaaagatgacaacagctagagccagggccagagtggaggcagagacacacttcttctgagagaataaggattgtgtggggagggagggaggcaaagagggaaggagggaaggaaagcatggttcaggtcacctaggtactctgctaggctaggaataacacaaaatccagaaatagacagtggacctgaaaaccacaaagccagagggaggataagatgtgactagcctccctccttccccagtactccaatcactttcatcacttctat

SEQ ID NO: 953169 - DNA, 728 bp, Homo sapiens
cacggagatgttgtgggaagtcagtgaccccaaacagagggaactgctgaagccaygacagaagaacataaattgtgaagatttcgtggacatttgttagttccccaaattaatacttttataatttcttatgcctgtctttactacagtctctgaacataaattatgaagatttcatggacatttatcacttccccaatcaatactcttgtaatttcctatgcctgtctttactttaatctcttaatcccgtcatcttcataaactgaggatgtatgttgcctcaggaccctgtgatgattgcgttaactgcacaaatttttcgtaaagcatgtgtgtttgaacaatatgaaatctgggcaccttgaaaaagaacaggataacagcgatgttcagggaacaagggagataaccattaggtctgactgtctgggagccaggtggaacagagtcatatttcttttcttacaaaagcaaataggagaaatatcgctgaattccttttctcagcaaggaacagccctgagaaagagaatgcattcctagggcacggtctctaaaatggccgctctgggaatgtctgtcttacatggttgtagataagggatgaaataaggcccggtttcccgtagcgcccccaggcctattaggatgaggaagttcctgcctagtaaattttagtcagaccggttgtctgctctcaaaccctgtctcctgataagatatta

SEQ ID NO: 953170 - DNA, 765 bp, Homo sapiens
aactgggtaatggacagaggttcatagagtttggagggctcagaagaagacaggaagatgagagaaagtttggaactktttagagacttgttaagtagttgtgaccaacatgctgatagggatgtgaatagtgaaggccaggctgatgagatctcagataaaaatgagaaacttattgggaactgtagtaaagatcacctgtgttatacctttgcaaagaacttggctacattgtgtttatgtcctagggatctttagaagtttgaacttaacagtgataacttaggacatatggttgaagaaatttctaagcagcaaagcattcaaaggcattcaaggtttggactggctgcttctaaaatgctatattcatatgtgggagcaaagacatgacttaaagttggaacttacatttaaaagggaagcagagcataaaagtttggaaaatttgaagcctagttatgtgatagaaaagaaaagcccattttctggggaacaatccaagtgagttgtggagtattcacctgctagagtgattagcatgactaaaagggagccagatgctgatagccaagacaattagaaaaaagcctggaagacttttcagagatcaatgaggcagcttttttcatcagaggaaaataggcctagaaggaaagaataatttcttaggaaccctaatttcctagggttctgccaccctgtgcagcctcaggacactgctccctgtattcaggctactccagcctcagcctcagatcaaag

SEQ ID NO: 953171 - DNA, 592 bp, Homo sapiens
ttttttgaaaccaaatgagaacaaacaacataccagaatctctgggatgcagmtaaaacagtgttaagagggaaatttatagcactaagtgccaacatcaaaaagctagaaagatctcaaatcagcatcctaacatcacaattaaaagaactggagcaaacaaaccccaaagctagcagaagacaagtaataaccaagatcagactagaactgaaggagatagagatacaaaaaaaaacccttccaaaaaatcaatgaatccaggagctggctttttgaaaaaattaataaaatacaagaccattagctagactaataaacaagaaaagacagaagaatcaaacagacagaatgaaaaataataaaggggataccaccactgaacccacagaaatacaaacaaccattagagaatactataaacacctctatgcaaataagctagaaaatctagaagatatggataaattcctggacacacacaccctccaaagactgaactaggaagaagctgaatccttgaatgaccaataacaagttctgaaattgaggcagtaacgaatagcctaccaaccaaaaaaagccaagaacc

SEQ ID NO: 953172 - DNA, 592 bp, Homo sapiens
ttttttgaaaccaaatgagaacaaacaacataccagaatctctgggatgcagctaaaacagtgttaagagggaaatttatagcactaagtgccaacatcaaaaagctagaaagatctcaaatcagcatcctaacatcacaattaaaagaactggagcaaacaaaccccaaagctagcagaagacaagtaataaccaagatcagactagaactgaaggagatagagatacaaaaaaaaacccttccaaaaaatcaatgaatccaggagctggctttttgaaaaaattaataaaatacaagaccattagctagactaataaacaagaaaagacagaagaatcaaacagacagaatgaaaaataataaaggggataccaccactgaacccacagaaatacaaacaaccattagagaatactataaacacctctatgcaaataagctagaaaatctagaagatatggataaattcctggacacacacaccctccaaagamtgaactaggaagaagctgaatccttgaatgaccaataacaagttctgaaattgaggcagtaacgaatagcctaccaaccaaaaaaagccaagaacc

SEQ ID NO: 953173 - DNA, 556 bp, Homo sapiens
gagactgcctcggttgtccatgtatcttctgactccttttatttggaacatatttggaacataatggttggattcatcatatgttcygttctcagactaaccaggtgatctggcttcaaactcagcctacactttgagatggacactgggagcctgccacagcatcttccccaacagaatcctttgccaaaggttaatctcaatgcagagctgaaatgacactgctaactctaagaacacaggccagacgtaagccaaagaaggaaattggattcctcacttcagatcttgacctctgtacctttctgttaagtgtgagcacttttgctttttctaatactctctcttatgagatgatatgccatctggcttcagactacaacgaattgttttttgaaaaactgcgttccataaaattgtcatctatttctttagaataccttagatattatggtcatttcaactagtaactgtgtttacatcatctctgagaatggcacacaattaagagaaaaacagccaaagcagttcggtgttactggcttattatttgatg

SEQ ID NO: 953174 - DNA, 593 bp, Homo sapiens
ccatgatgggagaggtgggacacaccctgttttaacctctcctttgctgactgccactagacttccttcactaagggccaagcagaagccagcccctttgaaagactccacccctgatatgaaccaacctcctgacgctgccccaaaacaaccagccagcgttcctttcaaagagactgacaaccacggggtggctctggctggtctatggagggtgtgcagtgcgggtttccgtgtcctctgcttcccttttacgtgtcagtggccgaaaactccaccctcggatcacgctaacatcatcactttgtgcacatgtgacttgcgatggggcatgaagtgcaattgcacatatgcgtgtttctattctcatcaatattcatgactcctcctgtagctcattgaatatgtatatttgaccaccttggtcaacataaatccctgtcttattcttttaatcctcaaagtgcctgtttccagcttctggacagaggctatgcttcccagcctttcagaatggctgcctgcaggctgcaagcccttagaagagatacaattctccttgccaaawgtatgaacctcgtcattcttcagtc

SEQ ID NO: 953175 - DNA, 529 bp, Homo sapiens
cagtcctttttccattattaactgaagaaaaatgggtttcctttacaatttttttaatattaggagacaaaaaaaaagtcaaaaggagacaaatcaggtctgtaaggtgcatgcctaatgattttccatcaaaatattccccaaattgcccttgtttgatgaaaggaatgagcaggaacattcttgtggtggagaaggactctctggtaggctttcctgggtttttttgctgctgacgctttggctttctcaaaacactgtcataacaagcagatgttattgttctttggcctcataggagtcagtaagcaaatttgagcagcccaaaaagctgttgtcatgacttttggtctagcccagtgctcttgtattttgactgggtcactcttggtagctgttgctttggttgtgctttgtcttcgggatggtactggtgaagccatgtttcactycctgttacaattctttaaagaagtgcttcaggagcttgattccacttgtttaaaattttcattgaaagctcgtcact

SEQ ID NO: 953176 - DNA, 722 bp, Homo sapiens
gatgccaaaaacaaaaagtatatgcattaattttatatctgcttttcttgaaagtataaaaagtacaaatacttrcattgtatagattgtcattgcaacattgggtgaaggcaggccaagtacaagctctattatctgtctatctcaccaatcttatctacacacatgtgtatatatctctgtgatatgtctatcttgacatattcctttcttgttgctgttgtaaatatgttcactttatttcacttcaggatctcattaactttttatgttttccctctttaacacaaaaaacacataaatatatgcaaacagtatatgaaggataatcatagtatttatagattgaaaaataaaaatattctttcccaccgtaatagatttgcatgtatcatttcagtttgcttgtgccattttctacacatttacaaacctgaacaatacaccgttcaataatgaatgtttctgttatgaaaattagatcacactttattggtaaataggggaatcatcagtataatatagaagtcacattggttcacatgtttgttgtttataaggcaaggagaaccagaagaatgggagtagaattataaatttcagcaggaaagaacagagctctgagctcagtatttgaactggcagcagaggccgttttgtttgcattaaaaataataataaggaaaagctagcaattgcatccagaattcctttcttcgaga

SEQ ID NO: 953177 - DNA, 562 bp, Homo sapiens
aactcggcctcccaaagtgctgggattacaggcgtgagccactgtgcctggccacatttaccaattttaatatccttgtattttagaattcggtgtctagcrggcaataggatcatcatggcagatgggaggcaagactagattgcagctccggacatagaagcttgcggagacacacgttgtgaattttagctccaaattaactgtaagaacaaaccagcaatcccaagaggacccacagaccctctgaaggaagcggactgctcctgcaggacatgggagacaccccaaatactgtgggtgccccaactgtggaagtgggaaagggagagcctcctctcctgaatacacacccccccactggagaagctgaaagtatgtttgcaggagaagtttccaactttacctagagctgagtcaatttagagagccgagcaaaatataggggtagaggaagcagcagaaaggccctggtagctcactgggtccccgagagggccattcctgcctggcaccatggggatccatcggcagagcagccagaggagtggggttgtggggg

SEQ ID NO: 953178 - DNA, 562 bp, Homo sapiens
aactcggcctcccaaagtgctgggattacaggcgtgagccactgtgcctggccacatttaccaattttaatatccttgtattttagaattcggtgtctagcgggcaataggatcatcatggcagatgggaggyaagactagattgcagctccggacatagaagcttgcggagacacacgttgtgaattttagctccaaattaactgtaagaacaaaccagcaatcccaagaggacccacagaccctctgaaggaagcggactgctcctgcaggacatgggagacaccccaaatactgtgggtgccccaactgtggaagtgggaaagggagagcctcctctcctgaatacacacccccccactggagaagctgaaagtatgtttgcaggagaagtttccaactttacctagagctgagtcaatttagagagccgagcaaaatataggggtagaggaagcagcagaaaggccctggtagctcactgggtccccgagagggccattcctgcctggcaccatggggatccatcggcagagcagccagaggagtggggttgtggggg

SEQ ID NO: 953179 - DNA, 585 bp, Homo sapiens
agatattaacaacaataactgataataaattagaagaattataacaatatgtcagcatcactactctgtgctttggggccataatgaagtagaataaggttgacttgaacacaagcattgagaaacatgacagtcgatctgataaccaagccagctactgagtaacaggtgagtggccgtaggcagtgtggatacactggacaaaggggtgattcatgtcccaggtgggagggagaaaggcagtgtgagatttcatcatgctactcagaatggtgcacaatttaaaatttacagattgtttatttccagaatttttcatttcattttttttttttttttttttttgagatggagtcttgctctgtctcccaggctagagtgcagtgatgtgatctcagctcactgcaacctctctgcctcctgtgttccagtgattctcccacctcagcctcccaagtagctggggttacaggtgtgcaccaccacgcccrgctaattttttttttttttttgagacagtctcgctctgtcacccaggctggagtgcaatggcatccacctcccgggttcaagcaattctcctgc

SEQ ID NO: 953180 - DNA, 545 bp, Homo sapiens
tgcttgaaccccagaggcagaggttgtggtgagtggagatcgtgccattgcactccagcctgggcaacaagagcgaaactccatctcmaaaaaaaaaaaaagttataatatccctttctcttaaatagccatactagacaatgatgggtattactgatgtcctgaacttttttcagggagaactacactgaagatgatgagtgtagtgcagtacttgagcagccttaatattttattgggaaaacagtaagtcactacacctgcaaccctgccgggcaccgacacctcgcgggctcacctgtaaccggaccgcgtgctcgtgtttccgcttcatgtcattgatatgccaggcgactcgctgcattgtgtctatagcatcaagcaccacatcatagccttctgtgtccttatcaaggtggttttctatttccttaaacaaaaaagaacgagggtttttttttttttcattttattttcatatagacagtgaaacaaatggcaccgctatgattagttccttatattttatttttgcttatttattt

SEQ ID NO: 953181 - DNA, 545 bp, Homo sapiens
tgcttgaaccccagaggcagaggttgtggtgagtggagatcgtgccattgcactccagcctgggcaacaagagcgaaactccatctcaaaaaaaaaaaaaagttataatatccctttctcttaaatagccatactagacaatgatgggtattactgatgtcctgaacttttttcagggagaactacactgaagatgatgagtgtagtgcagtacttgagcagccttaatattttattgggaaaacagtaagtcactacacctgcaaccctgccgggcaccgacacctcgcgggctcacctgtaaccggaccgcgtgctcgtgtttccgcttcatgtcattgatatgccaggcgactcgctgcattgtgtctatagcatcaagcaccacatcatagccttctgtgtccttatcaaggtggttttctatttccttaaacaaaaaagaacgaggktttttttttttttcattttattttcatatagacagtgaaacaaatggcaccgctatgattagttccttatattttatttttgcttatttattt

SEQ ID NO: 953182 - DNA, 572 bp, Homo sapiens
gggaggatcgctattgtcctggaggtcgaggctgcagtgagccrtaattgcaccactgcactccagcgtggaccacaaagcaagaccctgtctcaaaaaaaaaaaaaaaaaaaaaaggaaatgatataaatgatagaactgaaaaatatagccaaacattgataaattggacctcataaaaattaaaaacctttgctttgtgaaagcccatgtgaagagaatgaaaagacaggccacagactgggagaaaatatttgcaaatcccatacctgacaaagaactagtttctacaatatgtaaagaactctcaaaactcgactctcaaaaaaaaatgcagttcacttttacaggtcaatacacaattcagtttctccacatccttgccaacaacacttgttattttctgcttttttgatagtgaccatcctaatgggtgtgaggtgatatctcactctggttttgacttgcacttttctgatgattggtaacgttgaacatattttccacatgtttattggccatttgcataccatctttgaagaaacatctattgaaatcctttgcctattttt

SEQ ID NO: 953183 - DNA, 585 bp, Homo sapiens
ctgcacccagcccctttattatttgtatttggattttgttttcatcactgttttgataataacacttaccataagatcaacttgscttagtaaattttaggtatacaatgcagtattgttacctataggcatcatgccacacaaatctccagagctcattcatcctggataactgaagcttcgtaccttctgatcatcatctcctcatttccccctccccacagcccatgaaaaccaccattctactctctgcttttgagtttgattattttagagtccacattgctatggtttgaatgatggcatcccctccaaaatttatgttgaagccatccccagtgcagtagtattaagaggtatggtctttgggatgtgattaagtcatgagggctctacttttatggatgggattagcacccttattaaaaggctcaaggtcaaaaggagtgctctttcacccttctatcttcctccatgtgaggacacatgcatccctctggaggaagcagcaacaagacaccatcttggaagcagggagcagccttcatcagacaccaatgctagtgtcttgatcttggacttccc

SEQ ID NO: 953184 - DNA, 605 bp, Homo sapiens
ttcatgaacatttcagctctccaggagagttctaaaagtttttttcccctattttaatgtcacagtctccaaagttatcagaaacctgcatacaggaacatctgtcaaagtcctatagctgattataaaccacattttaaagaggatcaaaacaagacaattgtctgtgagtgacaaaaaaatcttaggacagtcactattaaagccaaaattgactaagaaatttggttacttcttgctggctgtcaagatggctgaataggaatagctccagtctgtagctcccagtgagatcaatgcaggaagtgggtgatttctgcatttccaactgaggtacccagctcatctcattgggactggttagacagttgggcgcagcccacagaaggcaagccaaagcacgatggggcatcgcctcacctgggaagcgcaaggggtcagggaactccctcccctagccaagggaagctgtgagagactatgatgtgaggaatggtgcattctggcccagatactatgcttttcccacagtattggcaatgygcagaccaggagattcccttcggtgcctataccaccagggccctgggtttcaagcacgaaac

SEQ ID NO: 953185 - DNA, 598 bp, Homo sapiens
cagagattctggtatgttgtctctttgttctcattagtttcaaagaacttctagatttctgccttaattttattatttacctaagagtaattcaggagcttccatgtagttgtgtggttttgagtgaatttcttaatcttgagttctaatttgattgtgctgtggtctgagagactgtaatgatttcaggtacgatgtttggcaaacccacagccaacatcatacttaatgggcaaaagtggaaacattccccttgaaaactagtacaagacaaggatgccctctctcagcactcctattctacgtattactggaaattctggtcaggacaattgggcaagagaaagaaataaagggtattcgaataggaagtgaggaagtcaaaccatctttgtttgaagatgacatgtttctatgtctggaaaaccccattctctcagccccaaagcttcttaagctgataatcaacktcagcagtctgaggatacaaaatcaacttgcaaaacccactaacatttctatatactaagaagaggcaagcaaggagccaaatcatgaatgaactcccattcacaattgctacagaaagaataaaata

SEQ ID NO: 953186 - DNA, 645 bp, Homo sapiens
gccaggtgatggccaagtaaagaaacaatatgactaaatgaaacaattagattagaaaacccttaagggctttcygactctaagaatacaattacaacatctcccacttccctacccattcatatagccctaggaatgagacatggcagagaacataaccaaggcaattcagtcagatcaggaatataagcaaaaggctctttctaacacaagggggaaagcagctactccaaccaggcttgccttccatctacgacctagagatgggagctcagaaaaatgagactgattgtgtctattatagacttgaaacaagaaggcacagaatagacctttctatccagagactgtattactctgagtggctagtaacaaggtgctgatgaacgagttagtcaaggggactatatggttgtaaagggcaggttaacagcacaggctagcaaggaaccattccagtgtaagggaaaggaaaagctagactctcaagatacttactgccaggctcagtgtgtacacacacacacacacacacacacacacacacacacacacacacacacactgctcttcataaatatattgtcctatatccaagaaatctatcagccccctgagtgacgtccaaagtatcactgcttctta

SEQ ID NO: 953187 - DNA, 376 bp, Homo sapiens
gttcctgctcaaatttcatctcttcggagaggctgctccagagagctctgagcgtcacaagtgtgtcttctgccaagcgcctaccccagcctgtgtgactgttcacctgactggccccagcgggacactgagggcagggggtgggtctgtctcgtttcctgctgaatccctcatgcccggaacaggaactgacacctcattggtgcccagcacgcttttgatgaacgcacgaaggtgtctcagcccgctctgaacaagcagctttctgcttatagataacacagatgccagcatgaggctgaagccaagcagagcagtgggaagyggagcgatgggaggtcatgttctgctgctcctcttagggcgacagagggtg

SEQ ID NO: 953188 - DNA, 574 bp, Homo sapiens
ctgtgatgtgatctgacttcaggtctacagccatggataccagcacctgttcagtggaggtggcaggggagtgaaataagactctgtgagaatccttggttgtagatatgtttagtgcacttgctgaagtggcattgttgtctggggtaaatacacaaggtttgttgcctcatgccaaggaaatcaaggacatgaacacatgtggagtgaggttaagagcataggtttaataggcaaaaaaaagcgaaaggaaaacagctctctctcctatgagacagaggggtgcctgagtgggacttcaggcctgcatcagtgcaccggattttatagacaggcttgaggaggcagtgtctgatttacacaggggccaaagattggttggaccaggtgcgcacatttatttacatagcgcatggggaagctggcccccaccctaatcttattatgctaatggrgtctttactttattatgcaaatggcgccacgttgtctgttccttgctgtagacatggttgataaggaaaggggaagatggagccaccatgttggacatgcctagccctcaggtagcctt

SEQ ID NO: 953189 - DNA, 695 bp, Homo sapiens
ctgtattttttgtagagacaggggtctcactacattgcctgggctgatcttttttttttttttgagacagagtctagctctgtcacccaggctgagtgyagtgctgtgatctcggctcactgcaagctccgcctcccaggttcaagccattctcctgcctcagcctcccgagtagctgggactacaggcgcccgtcaccatgcccagctaattttttgtatttttagtagagacggggtttcaccgtgttagccaggatggtctccatctcctgacctcgtaatccgcctgcctcggcctcccaaagggctgggattacaggcatgagccaccgtgcccggcctgagcctgggctgatcttgagtctttgggctcaagcaatccgcccacctcagcattccaaattgctaggattacaggtgcaagccactgcatctggtctgaaacctacatttttaaccattagcttttcctggctccttggctgcccaccctggagacagcccaaccctgtgtgtagtggcagggtttccctctccctgctgtccctaacccccttctccagcttgggtattatatggttatggcttccctttagtgagcacgttacgtgcctggtctgcaggcaaagtgcttcacacaatttctaattcagacaagcggcctgaagtctgaagctgaaaggctgggtgact

SEQ ID NO: 953190 - DNA, 566 bp, Homo sapiens
agccaagtaattatgattcctgtaattattattattattattattttttgagatggagccttgctctgtcacccakactggagtgcactgtcatgatctcggctcactgcaacctccgcctctcgggttcaagcaattctcctgcctcagcctccctagtagctgggattacaggtgtgcgccaccacgcccagctaacttttgtatttttagtagagacggggtttcaccatgttggccaggctgacctgaggtgaactcctgacctcaggtgatccgcccgccttggcctcccaaagtgctgggattacaggcgtgagccaccgtgcccagctagttcctgcaattcttttatctaatctacagacttcattcagatttttctgacagtcccaggaatgtcctttatggcagaggtaattccaggccattcattgcattcaggtgctctgtttcttcagcctttttaaatctggaacaattctccgatccgtctttatcttccatgacaattacagttttgaatagtacaggtcagttattttgtagaatgtctccatttggat

SEQ ID NO: 953191 - DNA, 606 bp, Homo sapiens
tgggctggcactgagtgtgacttttccagcacacagtgcaagcagtcggtggatctacsattctggggtctggaggatggtggccctcgtctcacagctccactaggcagtgcttcagtgtgggagcttcaaccctacatttcctctgcactgccctagcaaaggttctccatgagggctccttccctgcagcaaacttctgtctggacatcctggaatttccatacatcctctgacatctaggtgcagattcccaaacctcaattcttgacttctgtgtgcccacaggctcaataccacatggaagctgccaaggtttggggcttgcactctctgaaaccatggccggaactgtatcttggccccttttagccatggctggagcacctaggacacagggcacgaagtccctaggctgcacacagcaggggaccatgggaccatcccatgaaaccatttttatctcctaggcctcctggcctgtgatgggaggggctgctgtgaaagtccctgatatgccgtggaaacattttccccattgtcttggtgattaacatttggctcctcattacttatgcaaatttctgcagcatacttgaatttcgc

SEQ ID NO: 953192 - DNA, 557 bp, Homo sapiens
taactatatgctgcttacaagaactcacctcacctgtaagaccacacatagactgaaagtgaagggatgaatataagctacacttataycaaataaaattaactttaaatccaaaactgtagaaacaaaatattcatcattatataatgataaaggaattggttcagcaagaggatataacaatcataaatatttatgcacccaacatcagtgcacccaaatatataaagcaaatattagtagatctaaagagactacaatacaataataagaggagatgtcaggctgctgccatgttgtaggatgctgaaggctagtacgcattgacgtggtggttactctgagtctctagctggacttgaatgtctgtgttgccattcctcactgtgggttcatgatctacggggtggcaggcccaggccctatcatctgggagctggaacacaattctgactaggagccagaggaatggaagctaaaggaggtggagaggtaccggctcctccctgggccctcagcttgaagcagggcctcatgccctggcaccccaggccaca

SEQ ID NO: 953193 - DNA, 582 bp, Homo sapiens
aaaggggccaatgtgtatctcaggctgttgcttcagaggttgcaagctcctgggcttgakgacttacacatggtgttgggcttgtggatacacagaagtcaagaattgagtttagggaacctccacctagattacagaggatgtatggaaattctcggatgtccaggcagaagtctgttgcaaggttggtagcctcatggagaacttctactagggcagtagggaagggaaatgtcaaatggaagcccccatactgagttcccaatggggcactgcctgatggagctgtgagaagagggccaccatcctccagacctcaaaatggtagacccaccaacagcctgcactgtgtgtatggaaaagccatagacccacaacaccagcctgtgaaagcagccagggttgggggactgtaccctgcaaagccacagggtgaagctgcctaaggccatgggagcccagctcttgcatcggcatgactgggatgtgagacatggagtcaaaggagattattttggaactttaaggtttaatgactaccctataggggcctgtagtccctttgttttggccaatttctcc

SEQ ID NO: 953194 - DNA, 602 bp, Homo sapiens
ccagcagtacatcaaaaagataattcaaaatcatctagtgggttatgtccaagggatgcagaggtggtttaatatatgcaagttaaaaaatgtgatacatcacatcatcagaattaaaaacaaaaaccatatgatcatctcaatggatgcagaagtgactgacaaattttagctctcctttatgaaaaaaaaaaactctcgacaaactagacatagaaagaacctatcttaaaataataaaatccatatatgacaaacccacagtcaacatcatactgaatgggaaaagttgaaagcattttctctgagaaattctggtctctgagaccagaaaagacaaaaatacccacttttaccatttctattcaacatagttctggaagtactaaaaagagcaattaaacaagaaaaaaatatggggcatccaaattgaaaaagagaaagtcaaactactgccatttatagacgatatgagtgtagtacatctagaaaattctaaagactcctccaaaagattcttagatttgaaaaacaaatttaataaagtctcaggttacacartcaacgtacacaaattagtaacactgctatatatcaacaac

SEQ ID NO: 953195 - DNA, 560 bp, Homo sapiens
acacaaaaaaatgaccaaaaacttcccaaatctggcaaaatacataaacytacagattcaagaagctgagaaaaaacccatacaatataaacccagaaaagtctgcatgaagatatatcatactcaaacttgtaaaaactaaaggcaaatacaaatgatagaagcaactggggagaaatgacattttggctataggagtaaaacaatttgaatgatattaacttttcaatcagaaatcagtgcgtcagcatttttttaagtgctgaaagaaaactgtcagctcaaaattctaaataccatttacatttctattaagaatcaaagctaaatgatgacattctctgaagaaggaaagctaagagaatttatcaccggcagatatattctaaaagaatgactaaaggaaattatccatgttagttagcataggctattaatataccatagtctggatggcttaaacaacagacatattttctcacagttttggaggctaggggtctcggacaaagacaccagcatggttggtttctggtgaggtttctctttccttcttgtag

SEQ ID NO: 953196 - DNA, 573 bp, Homo sapiens
acatctgtctactcatatctgactgtscatccatgggaagattttgaggaaattggatgaggaaacagcgtgggtgggatagagcatcccaactcttccaagccagtgacacagaaggccggctgacttctctgcctcggtttccatgtctgaagaatggggtgttgtgagaatggaagcagttgtggagtgcaggcctggtccctcctgggagcacgtgtttatcccccatggacaatggacgtgagtctggccctgacctcaggcagtgcagtgaccttggggaggagccatgaacgccacaagcagtgcagtgactgcctcagtagagccggcacagagaagctgggggcatcctgggaggctttctggagaaggtgctatcagaactgggtctgggtctgaatgatgtcagggcaatgtgggctttgagagaaggggatcccaggcagaaggggcagcagtgagcatagccacagggagaaaatggggtgtgtggggggagaaaccggtgcatgttgctggaacatctgggagatgccagagagaatgggaaggctctgcagggccttg

SEQ ID NO: 953197 - DNA, 573 bp, Homo sapiens
acatctgtctactcatatctgactgtcyatccatgggaagattttgaggaaattggatgaggaaacagcgtgggtgggatagagcatcccaactcttccaagccagtgacacagaaggccggctgacttctctgcctcggtttccatgtctgaagaatggggtgttgtgagaatggaagcagttgtggagtgcaggcctggtccctcctgggagcacgtgtttatcccccatggacaatggacgtgagtctggccctgacctcaggcagtgcagtgaccttggggaggagccatgaacgccacaagcagtgcagtgactgcctcagtagagccggcacagagaagctgggggcatcctgggaggctttctggagaaggtgctatcagaactgggtctgggtctgaatgatgtcagggcaatgtgggctttgagagaaggggatcccaggcagaaggggcagcagtgagcatagccacagggagaaaatggggtgtgtggggggagaaaccggtgcatgttgctggaacatctgggagatgccagagagaatgggaaggctctgcagggccttg

SEQ ID NO: 953198 - DNA, 573 bp, Homo sapiens
acatctgtctactcatatctgactgtccatccatgggaagattttgaggaaattggatgaggaaacagcrtgggtgggatagagcatcccaactcttccaagccagtgacacagaaggccggctgacttctctgcctcggtttccatgtctgaagaatggggtgttgtgagaatggaagcagttgtggagtgcaggcctggtccctcctgggagcacgtgtttatcccccatggacaatggacgtgagtctggccctgacctcaggcagtgcagtgaccttggggaggagccatgaacgccacaagcagtgcagtgactgcctcagtagagccggcacagagaagctgggggcatcctgggaggctttctggagaaggtgctatcagaactgggtctgggtctgaatgatgtcagggcaatgtgggctttgagagaaggggatcccaggcagaaggggcagcagtgagcatagccacagggagaaaatggggtgtgtggggggagaaaccggtgcatgttgctggaacatctgggagatgccagagagaatgggaaggctctgcagggccttg

SEQ ID NO: 953199 - DNA, 610 bp, Homo sapiens
tatctccctgggtcccactggccacttctgagccccttctcctctctcctccctgtgttcagagccttgatgagattkgggaagagacagaggccagctcccatagagctgtgtagacagaccctggtaaggagtttgactctatttatgttccccaggaagccattggagggtttaagccagggaatgacaagaagccataaaccatttatatattttttatttatttattttttgagacagagtcttaaactgtcacccaggctggagtgcagtggcacaagctcagctcactgcagcctccacctccctggttcaagcgattctcctggctcagcccccgagtagctgggattacaggtgcacaccaccacgcctggctaatttttgtatttttagtagagacagggtttcaccatgttggccaggctggtctcgcactcctgacctcaagggatccacctgcctcggcctcccaaagtgctggaattacagtagtgagccattgtgactgactgaaaccatttatattttagaacattcttttcttgttctttcttgtcttgtctccagagtacctaggatggtgctttgactgcatcattatcgt

SEQ ID NO: 953200 - DNA, 630 bp, Homo sapiens
ctctatgaaaaagtggccagactgctttttaatgcacctcctgatcctgtttttcctcactgagtgggaacttctgggatccccagccaaccctgccagtgtgtttgggctggtaacaggtccattccttcctggagcagagctcccagagggaggcgcaggccgccatctttgctgtttgacaaacttcactgttgataccatcaggtactggaaaatctgaagtgactagggactggagcagatccccagaatatggtagcagctctatggaaaagtggtcagactgtatgttatgtgggtccccaatcctgtatcttctcctggggcagatcctcccagcctagtctccagtcacccttacactgggactattgagccagtagcagttctgcaatgccctgggacaaagctcccaatggaaggggtgggttgtcatctttgctttctcacagtcttcatccttgtgtccccaggccctggagagtctgtgggaccaagggctggttgggacccataacacagagcatccacrtcatagaaaagtggctgaactgttctccatgcagatcctgatcctcacttctcctcactgggcaaggccacatgacctgggactccagcacaatc

SEQ ID NO: 953201 - DNA, 567 bp, Homo sapiens
tggtaataaaaagcacaatccatagaagaaaagtaacttctgggttttgattggaattgmattgaatctatagatcaattggaaagaactgaaatcttgatataattgagttgttctatccatctccatggaatatctctccatttatttagatctttgatttcttttatcagagttttgtagttttcttcatgcagaccttgtgcctatttcactaaatttatacctaagtgtttaattttggggaagctaaagtaaatgtttttttttctgtttcattgatttttgctcataccttagttatttccttccttctatttgctttgtgtttattttgtcgtctttttctagtttctatttttttcactatcttctttttttagagacaggatctcactctgtcacagtaatgtgatcatagttcactgtagccttgaactcctgggctcaagcaattctcccacctcagcctcctgagtagctagaactaaaagtgctcaccagccaccatgtccagcttttgtctagtttcttaaggtgggagtttagattatttatttgagagct

SEQ ID NO: 953202 - DNA, 528 bp, Homo sapiens
ctccttctgcttgagaaaagcagaggaaaaartaaagggaaatttgtctagcatcttaggtaccagcatggccacaactgggtagagcacaaagagggcccttgaggtctctgattctaggacttgactcttctatgaaatttctggactttccctgagccagaggggagtgcacttccctgaaagttgagtctcagaccaggcagcattcaccataaactgacttaacagcgcttgggtcctaagggaatgttggcagtagtctggcagtacttccatggtctgtggtgttgggggctacaggatgagaggatgaggctcttttgcctttggcaagggtagggaaaagtgggaaggactgcatcttgtatttcttttgcactattgccacagtacaatagaacaacaggtaaatttattgactaaagttattgactctagtcccagattcctggatggcacctctggacccacctggggcctggagaacctccctgccctgaagggaaggaccccgggttggcttgt

SEQ ID NO: 953203 - DNA, 564 bp, Homo sapiens
cacaccagaatcttagcaatggaacctgtatatcagttgttacacaaatgttccaagtgattcctcaatttgagaaatatgttgacaccacctggttgtctagtggttaggatttggtgttctctcaatttaaggaatatgtggacatagtctggtaacctatctcatgccagacttcccaatatgaaacactgttccttttagtttcttaaatatatgaaaatatcaggtatcgcaggtctgtcagtcctcatccctcaaccaggaagaatgtgattctatcagaaatactcattttttcccagaaagccaaagtctattcatttcttttcccaaaagcttttgtagcttcaaatgaagtaaaataaaatgctgttgttttcagtcattttataaggactgtgagtaactgctaaatgctaacaatctgttaaaaccagcagagttcacaccctaactttcagcatttttcctaaaacctawaacagatttgtaatggcagtagtttcagaagaatgcaaaactcaggattatgaagacagagatacatgatttaggcagggt

SEQ ID NO: 953204 - DNA, 564 bp, Homo sapiens
cacaccagaatcttagcaatggaacctgtatatcagttgttacacaaatgttccaagtgattcctcaatttgagaaatatgttgacaccacctggttgtctagtggttaggatttggtgttctctcaatttaaggaatatgtggacatagtctggtaacctatctcatgccagacttcccaatatgaaacactgttccttttagtttcttaaatatatgaaaatatcaggtatcgcaggtctgtcagtcctcatccctcaaccaggaagaatgtgattctatcagaaatactcattttttcccagaaagccaaagtctattcatttcttttcccaaaagcttttgtagcttcaaatgaagtaaaataaaatgctgttgttttcagtcattttataaggactgtgagtaactgctaaatgctaacaatctgttaaaaccagcagagttcacaccctaactttcagcatttttcctaaaacctataacagatttgtaatggcagtagtttcagaagaawgcaaaactcaggattatgaagacagagatacatgatttaggcagggt

SEQ ID NO: 953205 - DNA, 574 bp, Homo sapiens
ggggatacagggcccatggatgtccgaaatccagcggggcactcaaatctcaaaggtccaaaatgatcttctttgactccatgtctcacatctgggtcacactgatgcaagaggtgggttcccatggtcttgggcagctccacgcctgtggttctgcagggtacagtctctctcctggctgctttcacaggctggcattgagtgcctgcagtttttccaggcacacagtgcaagccctcagtggatctactattctggggtctggaggatggtgatcctcttctcacagttccactaggcagtgccccaacagggactctgtgtgggggctctgactccaaatctcccttctgaactgccctagcagaggttctccatgagggccctgcccctgaagcacacctctgcctcagcatccaggtatttccatacatcttctgaaatctaggcagatgttcccaaacctcaatccttgatttctgtgcacccacaggctcaacaccacatgggagctkccaaggctgtggcttgcaccatttgaaaccatggtctgagttctacgttggcccctttc

SEQ ID NO: 953206 - DNA, 573 bp, Homo sapiens
gaattttagaatagtttttttctggccaggtgcagtggcccacacctgcaatcccagcactttgggaggctgaggcagagggatcacctgaggtcaggagtttgagaccagcctggccaacatggcaaaacyctgtctctactaaaattacaaaaattagccaggtgtggtggtgggcacctgtaattccagctactggggaggctgaggcaggagaatagcttgagcccaggcgccagaggttgcagtgagctgagattacaccattgcactccagcctggtgacaaccatgagactctgtctcaaaaaaacaaaacaaaacaaaacaaaaaaccaaaaagaatagtttttctaattctgtaaagaatgatggtggtattttgataggggttgcgttaaatttgtcgattgcttttggcagtgtggtcattttcacaatattgattctacctatccatgagcatgtgatatgtttccatttgtttgtgtcatctatgaattttttcagcagcgttttatagttttccttgtagaggtctttcaccacttggttagtatatttctaagttttt

SEQ ID NO: 953207 - DNA, 573 bp, Homo sapiens
gaattttagaatagtttttttctggccaggtgcagtggcccacacctgcaatcccagcactttgggaggctgaggcagagggatcacctgaggtcaggagtttgagaccagcctggccaacatggcaaaactctgtctctactaaaattacaaaaattagccaggtgtggtggtgggcacctgtaattccagctactggggaggctgaggcaggagaatagcttgagcccaggcgccagaggttgcagtgagctgagattacaccattgcactccagcctggtgacaaccatgagactctgtctcaaaaaaacaaaacaaaacaaaacaaaaaaccaaaaagaatagtttttctaattctgtaaagaatgatggtggtattttgataggggttgcgttaaatttgtcgattgcttttggcagtgtggtcattttcacaatattgattctacctatccatgagcatgtgatatgtttccatttgtttgtgtcatctatgaattttttcagcagcgttttatagttttccttgtagaggtctttcaccacttgrttagtatatttctaagttttt

SEQ ID NO: 953208 - DNA, 603 bp, Homo sapiens
tggctagaatgaagcaggcagaagttggaaagagcagacctgctgagtcttctggccctcaccgttctcccgtgctggattcttctggccytcaaacatcagactccacgttcttcagcttttggactcatggacttacaccagtggtgtgccagggcctcttgagcctttggtcacagactgaaggctacactgtcagcttctctaattttgaggttttgggactcagactgatccaccactggcttccttgctcctcaacttgcagatggcttctcacgggacttgactttatgatcatgtgagtcaattttccttaataaactccctttcatatatacacatattgtattagttctgtccctctagaaaatcctgactaatacattagccaagcatggtggcatgtgactgtagtcccagttgctcaggagggtgaggtgggaagattgcttaagcctgggtggcagaggctgcagtgaactgaaaccaaccactgccctccagcctgggtgacagagctcaaaaaaaaaaaaaaaaaagaaatgtaaagtgctagcccttccacactgtgtacgtgtcaaaccttttccagttggtatt

SEQ ID NO: 953209 - DNA, 603 bp, Homo sapiens
tggctagaatgaagcaggcagaagttggaaagagcagacctgctgagtcttctggccctcaccgttctcccgtgctggattcttctggccctcaaacatcagactccacrttcttcagcttttggactcatggacttacaccagtggtgtgccagggcctcttgagcctttggtcacagactgaaggctacactgtcagcttctctaattttgaggttttgggactcagactgatccaccactggcttccttgctcctcaacttgcagatggcttctcacgggacttgactttatgatcatgtgagtcaattttccttaataaactccctttcatatatacacatattgtattagttctgtccctctagaaaatcctgactaatacattagccaagcatggtggcatgtgactgtagtcccagttgctcaggagggtgaggtgggaagattgcttaagcctgggtggcagaggctgcagtgaactgaaaccaaccactgccctccagcctgggtgacagagctcaaaaaaaaaaaaaaaaaagaaatgtaaagtgctagcccttccacactgtgtacgtgtcaaaccttttccagttggtatt

SEQ ID NO: 953210 - DNA, 397 bp, Homo sapiens
ttcctttcatgtgaaggtttttcctgacatcactttctctcagacatcttcataactgccttcacaaygactttcatttatttatttatttatttatttatttatttatttatttattatctttttttgagatggagtctcacactgtcacccaggctggagtgcagtggtgtgatcttggctcactgcaacctccacctcccgggttcaagcgattctcctgcctcagcctccagagtagctgggattacagtcgcccgccaccacgtctggctaatttttgtatttttagtagagatggggtttcaccatcttggccaggctggtcttgaactcctgacttcgtgatccacccctccctcggcctcccaaagtgctgggattacaggcatgaacc

SEQ ID NO: 953211 - DNA, 397 bp, Homo sapiens
ttcctttcatgtgaaggtttttcctgacatcactttctctcagacatcttcataactgccttcacaatgactttcatttatttatttatttatttatttatttatttatttatttattatctttttttgagatggagtctcacactgtcacccaggctggagtgcagtggtgtgatcttggctcactgcaacctccacctcccgggttcaagcgattctcctgcctcagcctccagagtagctgggattacagtcgcccgccaccacgyctggctaatttttgtatttttagtagagatggggtttcaccatcttggccaggctggtcttgaactcctgacttcgtgatccacccctccctcggcctcccaaagtgctgggattacaggcatgaacc

SEQ ID NO: 953212 - DNA, 553 bp, Homo sapiens
taaaatttgatgactttcttcctgaaaatcatatttatgtgtcctgtcaggccttgagcccaagctaagccatcatatcccctgtgacctgcacatacacatccagatggccggttcctgccttaactgatgacattccaccacaaaagaagtgaaaatggcctgttcctgccttaactgatgacattatcttgtgaaattccttctcctggctcatcctggctcaaaagctcccctactgagcaccttgtgacctcccactcctgccagccagagaacaaccccctttgactaattttcctttacctacccaaatcctataaaacggcaccacccctatctcccttcactgactctcttttcagactcagcccgcctgcatccaggtgaaataaacagccttgttgctcacacaaatcctgtttggtggtctcttcacacggacgcgagtgaaatttggtgccgtgactsggatcaggggacctcccttgggagatcaatcccctgtcctactctttgctccatgagaaagatccacctacaacctcaggtc

SEQ ID NO: 953213 - DNA, 629 bp, Homo sapiens
ccagaggtacaaagaggcgctgctaccattccttctgaaactattccaaacaagagaaaaagagggaatcctccctaactcattttatgaggccagcatcatcctaataccaaaacctggcagaaacacaacaaaaagaaaatttcaggccaatatccctgatgtcccatcaatgtgaaaatcctcaataaaatatggcaaactgaatccagcagcacatcaaaacttatccaccatgatcaagtcagcttcatacctggaatgcaaggctggttcaacatatgcaaatcaataaacgtaatccagcatataaacagaaccaatgagaaaaaccacatgattatcttaatagatgcagaaaaggccttcaacaaaattcaacaccccttcatgctaaaaactctgaataaagtaggttttgatgaactgtatcttaaaataataagagctatttatgacaaacccacagccaatatcatactgaatggacaaaaacttgaagcattccstttgaaaactggcacaagactaggatgccctctctcaccactcctattcaacatagtgttggaagttctggccagggcaattaggcaggagaaggaaataaagagtattcaaataggaaa

SEQ ID NO: 953214 - DNA, 444 bp, Homo sapiens
ataaacttcctaaattgagacctgtctcagatacctggggttcaaaagggaagtatgtcacytctgtcgctgagtaagaggggccacggccccgaagcggcttttcctttgaatcagagcttgcttcaaatgcagaaagaaggcaatggcattctaagaaatataaacatctgaggaagcctatttcaacctttcttacgtacattgcttcctcgtacaacacagaaggaaaagcaaatctggagcaacccggatttccttccttgttcatcagtaagccagtggtagtgttactggaaaagggtcccaatccagacccaaacagagggttctcggatctcacacaagaaggaatttgaggtgagtctataaagtgaaagcaagtttattatgaaagtaaagaaataaaagaatggctcctccataggcagaggagccctaagg

SEQ ID NO: 953215 - DNA, 444 bp, Homo sapiens
ataaacttcctaaattgagacctgtctcagatacctggggttcaaaagggaagtatgtcacctctgtcgctgagtaagaggggccacggccccgaagcrgcttttcctttgaatcagagcttgcttcaaatgcagaaagaaggcaatggcattctaagaaatataaacatctgaggaagcctatttcaacctttcttacgtacattgcttcctcgtacaacacagaaggaaaagcaaatctggagcaacccggatttccttccttgttcatcagtaagccagtggtagtgttactggaaaagggtcccaatccagacccaaacagagggttctcggatctcacacaagaaggaatttgaggtgagtctataaagtgaaagcaagtttattatgaaagtaaagaaataaaagaatggctcctccataggcagaggagccctaagg

SEQ ID NO: 953216 - DNA, 735 bp, Homo sapiens
ctgtaaactagttcaacccctgtggaagacagtgtggtgattcctcagggatctagaactagaaataccatttgacccagccatcccattactgggtatatgcccaaaggattataaatcatgctgctataaagacacatgcacatgtatgtttattgtggcactattcacaatagcaaagacttggaaccaacccaaatgtccatcaatgatggactggattaagaaaatgtggcacatatacaccatagaatactatgcagccataaaaaatgatgagttcatgtcctttgtagggacatggatgaagctggaaaccatcattcattcagcaaactatcacaaggacaaaaaaaccaaacaccgcatgttctcactcataggtgggaattgaacaatgagaacacttaaatacaggaaggggaacatcacacaccagggcctgttgtggggtggggggaggggggagggatagcactaggagatatacctaatgtaaatgacgagttaatgggtgcagcacaccagcatggcacatgtatacatatgtaaaagacctgcacgttgtgcgcatgtatcctagaacttaaagtataataaaaaaatttaaaaaaataaaaataaaaaaatgcaaagagagaaaaaaaaaagaagttgcctggtttgagttatcctttgcctaatcccttgtgtctgttcctcacaaccagaatsatttttctctcttccagtggc

SEQ ID NO: 953217 - DNA, 638 bp, Homo sapiens
atttctctattgtattccataaaatcatgcatcatacayttctccacagtctgattcaggcccctttgcagaaatagtctttgaggctaggcagtgagatttttttccgaccccagaagggctcttcttagctgtttctttccctggttctctctgttaaacttctagctggtcttcagtttagcttgttgctatcatgaagctctcctcttaattgattaccaccaaaatcaccattaatttaaacatcacccttaggtttgaacctccccatgtctgttcttaggcctccccatcccctgaatgaaacctctgcaccacagctctcgtgctagaggtagagacaatggcacccttatcttagagtagcactcctgatttacaagtgggatactgaatgggggaggtagctctcatggcttactttagggtcacttttggtgtcctgcatggtaaggatttgagcaaatgtacagtgacatgtatgcaccattacagtattatccagaatagtttcactgccttaaaatcctgtgtgccccacctatgtatttcctccactaagcacctggcagtcactgatacttttactttctgcatagctttgccatttccagaatatcatatagtttaaatca

SEQ ID NO: 953218 - DNA, 613 bp, Homo sapiens
aagatgagcatttctgattcacaaagcgaagcacagtcaacatgccattcaggcctccctaattcttttgtttgttttgagatggagtctcactctgtcgcccaggctggagtgcagtggtgsgatctcggctcactgcaacctccgcctcccgggttcaagtgattctcctgcctcagcctccagagtagctggggttacaggtgtgcaccaccacacctggctaacttttgtatttttagtagagacggggtttcgccatgttggccaggctggtctcgaactcctgacctcaagtgatctgcccacttcagcctcccaaggtgctgagattccaggcatgagccaccacacctggcccgggcctccctccctaattctaagggtttcctgaagcaatgctgcattagcacccaaccgccagctagacccaggagagtaaagtgagggataaaacggaaggtgtgcaagaagcatcggggtcgtaggttgtctaatcttttgctttcaggaaaaaaaaaggcatcagaaatagctgaatttccacagggaaaacaatggagctggaccctaccccacacgatacacaaaaaccaacctgcacggatcagag

SEQ ID NO: 953219 - DNA, 549 bp, Homo sapiens
aggtgccaacacatgttcattttccttccttttycccttccctttatttatttatttatttagagacagggtcttgctctgttgcctaggctggagcacagtggtgcaatctcagctcactgcggccttcacctcccaggttcaagcaattctcccacttcagctccctgagtagctggaactacaggcatgcaccaccacacctgactaattttttgtattttttttggtagagacggggtttcaccatgttggccaggctggtctggaactcctgacctcaagtgatccatcagccttggcttcccaaagtgctgggattacaggcgtgggccaccgtgcccggccccttccttccatttaattcaacaagttcttaggaagtgcccacgtttgaggcagagctggcatcatgcacatgcacagccatttgcacagggccccacactcacaagaatgctgagcttggtttagcgttctgctgtcgctggcttgacattcttaatttttgaacaaggggccctgcattttcattttgtactggacccc

SEQ ID NO: 953220 - DNA, 731 bp, Homo sapiens
gcccagtcatggctgtggactcaggcatctctgcactctcgggggcccaggaagcccccyttccccacaggcttggaagtgcctgctcccactgcctggcctctgcccactcccagcacccactccaattttagagtgaagttgtggctgagcctgggtgctgtcatgacctggccaggtgtgctcatgctcagggcagtgttgacacaccagcctgctgatgccttgaccctctctgaacattgagcactgatgagcatgggagagaggctgaagggggactaaggatgacttggcatgggcttgtaggcaccacttgacacagacagcctgggtgccatggccaccatgggtggcaggttaatggtgttaggaggaagacaagttcctggatggaaaggggtgggtccccagtgaagctccccctttaggcctgggatggcctgaagcctgggggccaggttgccagttccacagaccagagtgagaacttactgtgctttttctgggcctgccaatgtctgcctgtggactaatcaggacaccctcttcccctctgaagcccataaaagcccctgactgagccttactcaggcagacatcaagatgacctgccttcaaagaggagctacccactgtgggtattctctctgctgagagctgagcagacatttagacaacctgtctgcagagcagagctactcactgtgggtctcctctgagctgttctg

SEQ ID NO: 953221 - DNA, 731 bp, Homo sapiens
gcccagtcatggctgtggactcaggcatctctgcactctcgggggcccaggaagcccccctyccccacaggcttggaagtgcctgctcccactgcctggcctctgcccactcccagcacccactccaattttagagtgaagttgtggctgagcctgggtgctgtcatgacctggccaggtgtgctcatgctcagggcagtgttgacacaccagcctgctgatgccttgaccctctctgaacattgagcactgatgagcatgggagagaggctgaagggggactaaggatgacttggcatgggcttgtaggcaccacttgacacagacagcctgggtgccatggccaccatgggtggcaggttaatggtgttaggaggaagacaagttcctggatggaaaggggtgggtccccagtgaagctccccctttaggcctgggatggcctgaagcctgggggccaggttgccagttccacagaccagagtgagaacttactgtgctttttctgggcctgccaatgtctgcctgtggactaatcaggacaccctcttcccctctgaagcccataaaagcccctgactgagccttactcaggcagacatcaagatgacctgccttcaaagaggagctacccactgtgggtattctctctgctgagagctgagcagacatttagacaacctgtctgcagagcagagctactcactgtgggtctcctctgagctgttctg

SEQ ID NO: 953222 - DNA, 731 bp, Homo sapiens
gcccagtcatggctgtggactcaggcatctctgcactctcgggggcccaggaagccccccttccccacaggcttggaagtgcctgctcccactgcctggcctctgcccactcccagcacccactccaattttrgagtgaagttgtggctgagcctgggtgctgtcatgacctggccaggtgtgctcatgctcagggcagtgttgacacaccagcctgctgatgccttgaccctctctgaacattgagcactgatgagcatgggagagaggctgaagggggactaaggatgacttggcatgggcttgtaggcaccacttgacacagacagcctgggtgccatggccaccatgggtggcaggttaatggtgttaggaggaagacaagttcctggatggaaaggggtgggtccccagtgaagctccccctttaggcctgggatggcctgaagcctgggggccaggttgccagttccacagaccagagtgagaacttactgtgctttttctgggcctgccaatgtctgcctgtggactaatcaggacaccctcttcccctctgaagcccataaaagcccctgactgagccttactcaggcagacatcaagatgacctgccttcaaagaggagctacccactgtgggtattctctctgctgagagctgagcagacatttagacaacctgtctgcagagcagagctactcactgtgggtctcctctgagctgttctg

SEQ ID NO: 953223 - DNA, 579 bp, Homo sapiens
gaatctttctggtcctgtgctttttttggttagtaagctcttaattactgcctcaatttcagaactcgttattggtctattcagggattcaacttcttcttggtttagtcttgggagagtgtatgtatccaggaatttatccatttcttctaggttttctagtttatttgcacagaggtgtttatagtattctctgatggtagtttgtatttcagtgggatcagtggtgatatcccctatatcattttttattgcttgtatttgattcttctctcttttcttctttattagtcttgttagtggtctttctgttttgttgatcttttcaaaatacctgctcctggattcattgattttttgaagggattttgtgtctccatcttcagttctgctctgatcttagttatttcttgtcttctgctagcttttaaatttgtttgccattgcttctctagttcttttaattttgatgttaggatatcaattttagatttttcctgctttctcttgtgggcatttagtgctawaaatttcccttgacagactgctttaaatgtgtcccagagattctggtatgct

SEQ ID NO: 953224 - DNA, 745 bp, Homo sapiens
acagggcaccaagtccctaggctgcacacagcacggagaccctggtcccagaccatgaaaccattttcccctatgcctccaggcctgtgatggcaggggctgcgtgatgacctctgacrtgtcctggagacattttcctcattgtctgggggattaacatttgactcattacttatgcaaatttctgcaaccagcttgaatttctccttacaaaatgggtttttcttctctatcacattgtcaggctgcacattttccaaacttttatcctcttcttcccttataaaactgaatacccttaacagcacccaagtcacctcttgaatgctttggtgcttagaaatttcttccatcagataccctgaatcatctctctcaagttcaaagttccacaaatttctagagcaggagcaaaatgctgacagtctcttcgctaaaatataacaagagtcacctttgctccacttcccaacaagttcctcatctccatctgagaccacctcaacctggaccttactgtccatatcgctatcaggcttttggtcaaacccattcaacaagtctctaggaagttctaaactttcccacattttcctatcttcttctgagccctccaaactgttccaacctctgcctgttacccagttccaaagttgcttccatatttgggggtatcttttcagcaatgccccactccttgtaccaatttactatattaatctgttttcacaatgctgatgaaaac

SEQ ID NO: 953225 - DNA, 630 bp, Homo sapiens
atttgaataccctttatttctttttctttcctgattgccctggccagaacttccaatattattttgaataggagtggtgagagatggcatccttgtcttgtgctggttttcaaagggaatgcttccaggttttgcccatttagtatgatattggccgccagtttgtcataaatagctcttattattttgagatatgttccatcagtacctagtttattgagagtttttatcatgaaggggtgttgaattttattgaaggccttttctgcatctattgagataatcatgtggtttttgtcattggttctgtttatgtgaattacatttattgatttgcatatgttgaaccagccttgcatccgagggatgaagctgacttgatcgtggttgataagctttttgatgtgctgctggattcggttttccagtattttattgaagattttcacatcgatgttcatcaggaatattggcctgaaattttcttttcttgttgtgtytctgccaggttttggtatcaggatgatgccggcctcataaaatgagttagggaggagttcctctttttctattgtttggtatagtttcagacggaatggtaccagcacctccttgtacctctggtagaat

SEQ ID NO: 953226 - DNA, 592 bp, Homo sapiens
actataataattactacaaaattagtggtttaaaacaacagaaatatattctctcacagttccagaagccagragtctgaaatcaatattactgggcccaaatcaaaatgtcagtaggtctatactgcccttgtcggttataagaaaggatgcattccttgcttcttccagtttctggtggctaccagagttctatagcttgtggttatatcattccaatctctgcctccacagtcacattgcctttccctcttccatcgggactgaatcatcctctacctctctcttataaggatacttgtgattgcacttagggcccatcccaataatccaagataaccttttcaattcaagatctttaacctgctgggcatggtggttcatgcctgtaatcgcagtactttgggaggctgaggcaggaggatcacttgagcccaggagttcgagaccagcctgggcaacatagcaagacccagtctctacaaaaaaattttaaaattttagccaggcatggtggtgcccacctgtagtcccaactactcaggaggctggcgtgagaggaacgcataagcctgaggttgaggctgcagtg

SEQ ID NO: 953227 - DNA, 592 bp, Homo sapiens
actataataattactacaaaattagtggtttaaaacaacagaaatatattctctcacagttccagaagccaggagtctgaaatcaatattactgggcccaaatcaaaatgtcagtaggtctatactgcccttgtcggttataagaaaggatgcattccttgcttcttccagtttctggtggctaccagagttctatagcttgtggttatatcattccaatctctgcctccacagtcacattgcctttccctcttccatcgggactgaatcatcctctacctctctcttataaggatacttgtgattgcacttagggcccatcccaataatccaagataaccttttcaattcaagatctttaacctgctgggcatggtggttcatgcctgtaatcgcagtactttgggaggctgaggcaggaggatcacttgagcccaggagttcgagaccagcctgggcaacatagcaagacccagtctctacaaaaaaawtttaaaattttagccaggcatggtggtgcccacctgtagtcccaactactcaggaggctggcgtgagaggaacgcataagcctgaggttgaggctgcagtg

SEQ ID NO: 953228 - DNA, 493 bp, Homo sapiens
tgttattgagttgtttgagtttcatatctattctgggtgttaaycccttgtgagatagatcatttgcaagtatttcctcccattctgtaggttgtctctttattgatgttttgttgttgctggttttctttgatcgatgtaatcctatttgtctcgttttgcttttattgtctatgatttcaaattcttatccaaaaatatctttgctcggaccaatgtcctataacattttccccaaggtttcttttagtggatttaaagttttaggtcttacatttaagtatttaatgcattttgaattaatttttctatatatatatatgttgaaaaatggggatataatttcatttttctgcatatgaacagctagttatctaagcaccatttattaaagagattgttctttcctcaatggaagttcttggcacttttgtagaaagtgaggtgactgtgagtgaatttaattctgttccattggtaaatctgttttttt

SEQ ID NO: 953229 - DNA, 450 bp, Homo sapiens
tttgctacaatgaaacccccaagtcatcaaggaagataaaagcaaaagatcccatccaaaggacagcaacttcaaagattaaaggaacatcagcccacacaaatgagaaagaaccaatgcaagaactctggtaactcaaagagccagagtgtttcttacctccaaacggttacattgaatctacagcaatggttcttaaccacgctgaaatggctgaaatgagatatagaattcagactatggatacaaatgaaaatcattgagattcagcagaaagttgaaacccaatccaaggaatttaagaaatacaataaaatgatacaggagctgaaagacaaaatggcaattttaagaaagaatgaaactgatcttatagagctgaaaaactgactttaagaatacagtgtctactaaamatacaaaaattagccaggcatggtggtggcaggt

SEQ ID NO: 953230 - DNA, 468 bp, Homo sapiens
tgaggtgaggtcacaggtgggaaggaccttcaatatctaccataggggtgttccctgtatccccctctggctgacctytgcggtggtgccttcaagctagagcgggttgtggcccattcttctggtgctgtgaaaaagagaaagatagtaacacacacatgacttcacagttaccaaaaatagtcatttaagacacaatagttgaccgagaaaaagaaaacaaaagatctcaacaccgaacgctaaagcctattttttccacatcgtgagaccatcaaaaaagtgtgtgtatataaatgtgtactgtgtatttattatgtgttagatttaaatgccacaaaatagaaagaggagtatcaatgtaaacccctgcccataaaatctttttacatagaattcttaaaaataaataaataaattggatataggaaaccagtagtccttagcccttgaataacttgagaatca

SEQ ID NO: 953231 - DNA, 583 bp, Homo sapiens
cactgggatgggcaattctcttctggttagggctggtttaaatacttcctctgtgggcagacatcagctgagttcatcctggttctgctttctgctgcgataggccagaactaagttcycacaatccttgtgctgttcctctctcaagcacacagattctctctgtacaacatggtcactgccagaggatgatggagaggtgatgtccatgattcaagactgtgtttcctaccctcttccattgtatctttcagcaatatgaagttaaaaccaggtactgtgagtgctcacctgattttttattcttttgaactgctttgtgtgtgtgtgtgtgtctgcagagagttgttaagttgatgtttatgtagggaagatgattggtggagacttctatttggccatcttgctctgcctctctctgtcaaggctaatacatttggcacaccccctttattgtgataatgtgtgttctaacaaataaatatttagcaaacttcctgaagaaagtccaggtaataggattatcctcagcagatactcagttaacacgtgatgcaattcttgttcattttttccctagatt

SEQ ID NO: 953232 - DNA, 735 bp, Homo sapiens
gctgggtccaggaacacaccccaagctctggcctcgggaggagtgtgctgagcttgttgcggagcaaagacagaagcccagtgaacaaaagatggcgaggagacaccagtgcagggaggctaagggtgcmgaggccgagtggggctgtgctcaaaagagaggcggtgctggagggacagggagaggtggcctgggtgttgggaggtgggggtgaggtgggggctgagggcaggggggtcagggtgagggataggaaaggccgcaggagaggagaggatgaagagctgtgctggaggcgctgtgggcagcatcgtcctgctcttgggcactttgtgttttgtgacacatcctttctatgctgaactgagaacccagggacctcactctccccacacgtgtctgtccagctccagaggatgaagcagagaccacccaagcagtgcccaccacaacccctgagccccccaacaagcctcgcctcggggagctgaccgtgacagatgccacccctgactccctcagcctgtcctggatggtccccgagggccagtttgaccacttcctggtccagtacaggaatggggatgggcagcccaaggtggtgcgggtgccggggcacgaggacggggtcaccatctcaggcctggagccagaccacaagtacaagatgaacctgtacggcttccacggtggccagcgcgtgggccccatctctgtcattggggtgacaggtga

SEQ ID NO: 953233 - DNA, 588 bp, Homo sapiens
taatttattcctctgtcattatatagttactgtctttgtctcttcatacagtttttgtctcaaacgctattttgtctgatattagcatagctactcctgcgttttttggttaccattagcatgaagtattttttttcatccctttattttcaggctatgtgtgtttatagagctgaagtttgtttcttataagcaacaaatcaattggttttgcttttttaaaaaagatctattaattctgtctatgcctttagattggagggtttaattcatttacattcaatgttattattgataagtaagaatttactcatgccattttcttatttttttctggctgttttgtggtcttctcttccttctttctttccttcttgttttccatttaggaaacttaaatgttttaaatgtgattttctctggcgatatgacttaatttattgcttttgatttatgtgtatcctttgtatgtgttttgatttgaggttgccatgaggcttgcaaatactatcttataaaccttattttaarttgataaaacttaacactgtttgcataaacaaacaaacaagcaaaaagaaaactaat

SEQ ID NO: 953234 - DNA, 638 bp, Homo sapiens
gcgaccctgtctctacaaaaactttaaaacttagccaggcatggtggtatgcacctatagtcccagctactcaggaggctgagatgggaggattgcttgagcmcaagagttccaggctgcagtgaactgtgattgtgccactgcactccagccaggggcacacagcaagaccctgtctcaaaaaaaaaaaaaaaaagaatttataattccaccaccaaaacataatctctgttaatatttatagtttcctttgttttttgtttattacattatatttttatgtagctgggatcaaaatgtaaatatgcttttatatcctgcttttttcacttatgttattgtgagcattttcttcatattcttaaaattgttcataagcattaacttacactttgctttctactgcttcagatgtatgcaccatgcgccataaaaccatttcactgttgctggacaatgaaattgtttccaattttttactgttagaaataaggctagatgaacatctttatccttcaagttctgcccaaaacattctaatttcttattacagatttttctaggagtgggttaaagaatatgactattcttaaggctcttaatcctgtgaccttatgccttctagaccagtggggcca

SEQ ID NO: 953235 - DNA, 587 bp, Homo sapiens
tgctgggttggatgaagggtggggagtcatgggaaaatgtgaaggacagaagaatttgagctaagggcagtgaactgggaacacccagcagggtggcttgtttggattcctctcggcattcctgtccctctatcttcagaggtgaagatgcttctttcctccaggtacagggagggctcctctcacctgaaggtcttgtgatctgcttcagaggaaagctcggagagtccttcctgcacccgccgtttctcaaattctttcagtttcaaatattcaatatccaaagcaccatattttggggtagtacattctgaatcctctcaacagggataataatattaggctaaaccaggtaaatttgtcaacatttgactctttggacctataataatggcagtttcacacagatctgtcctggaaagttttggggagaattacagtaattaatccatctaatctccttagctcagtgtctggcacatagtaagtgctccataggcagtagctcttcttatttatttatagtcctcrtcctcatgtaatagattttaaaaactgatgctcagagaggttaggtaacttgtgca

SEQ ID NO: 953236 - DNA, 418 bp, Homo sapiens
cggcccaacacaaattcgtaaactttcttaaaacattaagagattttttttcaattctttttttttttttttttttttttkagctcatcagctatcattagtgttagtgtattttatgtgtggcccaagacaattcttctccttccagcgtggcccagggaagccaaaagattgcacaccccagtctgtgtgaataaaaagtcagtcttaaggttttaatttaaatacacaaatgaggccgggcacagtggctcacgcctataatcccagcactttgggaggccgaggtgggcgtatcgcctgaagtcaggagttggagaccagcctggccaacatggtgaaatcctgtctctactaaaaatacaaaaattagccaggcgtggtagtggatgcctgtaatcccagctacttgggaggc

SEQ ID NO: 953237 - DNA, 614 bp, Homo sapiens
tagattgtgtccacccagattatgggtgggtctgcctttcccatcccactgaatcaaatgtgaatctcctttggcaacaccctcacagacacacccaggatcagtacttggtatccttcaatccaatcaagttgacactcagtattaaccatcacaagttgtttatttctactttttaaatataagtgtttattgctgtaaacttctctcttagtgctgcttttgccgtatcccacagattttggtatgttatatttccattttcatttatttcaagaagtttaaaatttttcttcctaatttcttcactgacccaccagttgttcaagagcatgttgttcaattttcatgtgtttgtgtcttttccaagattcttcttgttattgatatctagttttattccactgtggtcagaaatgatacttgatatgattttaatttttaaacatttgttgagatttgttttgtggcctaagatataatctattctggaaaatgttccatgtgatgatggaaagaatatgtattcygcagcaattgggtgagatgttctgtaaaggtcagtaaggtctttttggtctagtgtgtaactccaatatttctttgttgatttt

SEQ ID NO: 953238 - DNA, 602 bp, Homo sapiens
aagatacagagggagaggaacaaggactcattcctggtcyccaatgactcctgcagaagaggtgagttgaacaggcaaggagcaatctgctcttgccacaggcctctggaatcccttcaggcagagaccccttaaccaccacaaacccttgaattggcaggaagagctgcttagagaagtggtaggggcggagctcaagtcactgaggagaccaaagggtttggtgtgaaaggatttatagcaccgcacgacgagggattcccatatccctaggctcaacttgctctcataggagacgttagccctagaggaactgttggatctgaattctgcagggtagtcttgctcatgagatggggccaattcaaccagagcatccctcagtctgctggcccatcctggggctgcagcctagccatgccctacttgcaatgcagcccccaggtacctgctggaggcctccatcatggctcctatgctggcagaccacacctgactggcagagtgctccagaaaatcagcccccatggacatgcacaagccttcctgggccctctccccactgcagcctaccccgtggcactttgccagcacacactcac

SEQ ID NO: 953239 - DNA, 602 bp, Homo sapiens
aagatacagagggagaggaacaaggactcattcctggtccccaatgactccygcagaagaggtgagttgaacaggcaaggagcaatctgctcttgccacaggcctctggaatcccttcaggcagagaccccttaaccaccacaaacccttgaattggcaggaagagctgcttagagaagtggtaggggcggagctcaagtcactgaggagaccaaagggtttggtgtgaaaggatttatagcaccgcacgacgagggattcccatatccctaggctcaacttgctctcataggagacgttagccctagaggaactgttggatctgaattctgcagggtagtcttgctcatgagatggggccaattcaaccagagcatccctcagtctgctggcccatcctggggctgcagcctagccatgccctacttgcaatgcagcccccaggtacctgctggaggcctccatcatggctcctatgctggcagaccacacctgactggcagagtgctccagaaaatcagcccccatggacatgcacaagccttcctgggccctctccccactgcagcctaccccgtggcactttgccagcacacactcac

SEQ ID NO: 953240 - DNA, 616 bp, Homo sapiens
aaaatcagaccggtcctagttgataaggctcacatttatagatggactatattagtaagtctgtcaatatcaacggctagacagaatggatgagcaacaggaaatcacaaattattgctgaatggaatgtaaattgctaaaactactatgaaaatcgtaagtttctaatcctgtgaccaagcaacttatttggtgtccaatgaatcctggttaggaatttctactgtagagaaatgttacataagcacactacaaaacatgcataaatatattaaaagcagcactgttcatatgagtgaaaattttcaaacaattcaaatgtcatcaacattgaaagaatagataaattgtagcatgtaccatacaatagaataccaatgatatggttttcctctgggtccccacctgaatccaatctccaattgtaatccccacgtgttgggtgaggggcctggtgggaggagactgaataatgggggcagactcccctctcgctgttcttgtgatagtgaatgwgttctcatgagatctagttgtttgaaagtgtgtggcacctcccccttcactctctccctctctctctctcctactctgccatggtaagatttgcttgctg

SEQ ID NO: 953241 - DNA, 478 bp, Homo sapiens
aacaaacatagatgaatctcaaaaacataatgatatgatttggctgtgtccccacccaagtctcatcttgaattgttgttcccataatctcyatgtgtcatgggagggacccaggagaggtcattgaatcatgggggtgattacctccttgcttgttcttgtgatagtgagagtgagttctcacggtatccaatgatttcataaggggcttccccactactttgctctgcacttctccttgctgctgccatgtggagaaggatttgtttgcttccccttctgccatgattgtaagtttcctgagatctccccagccctgtaaaacggtgagtcagttaaacctcttttttaaacaaattacccagtcttgggtgcgtcctttatagcagcatgagaatggactaatacacatgatattgagcaaaagaagtcaaatacaaaagagtacatcctgtatgattttatttatagagtacaa

SEQ ID NO: 953242 - DNA, 605 bp, Homo sapiens
gaagctgtaccctgcaaaggcacaggggcgaagctgcccaagaccatgggaacccacctcttgttatcagtgtgacccagatgcgagacatggagtcaaaggaggtcattttggagctttaagatttgactgycttgctggattttggacttgcatgaggcctgtagcccctttgttttggacaatttcttccatttggaattgctgtatttacccaatgcctgtaaccccattgtatctaggatgtaattaacttccttttgattttacaggctcataggtggaagggacttgccttattttggataagactttggactgtggactttttgagttaatggtgaaaagagttttaagactttggggcacttgttgagaaagcatgattggttttaaaatgtgaggacatgagatttggcaggggctaggggtggaacaatatggtttgtctctttgtccgcatccaaatatcatcttgaatatagcccccataattcccatgtgttgtgggaggaaactggtgggagatagttgaatcaccggggtggtttctcccatcttgtctcatggtagtgaataagtctcacgagatctgatggttttac

SEQ ID NO: 953243 - DNA, 496 bp, Homo sapiens
aggcatgccccactactaggcttatcccataggtcccagcttccagaccactcccagcactaggctagcccccatggccccagcctccaggccagcctctgtagacccatcctccagggcagtacctacagattgcaacatcaggttgactgtgtagtcccagaacccaggcctgcctccacagactcagcctctgacccatcttccaggcccatcccagtgccaggctagcccctgctggcctggcctccaggcctatccccgcaccaagccagccctcacagccctagactccaggccagtacccacagacccagcctctagccccactgctacaccaggttggcaaccacagaccctgratcaggactagtccctgtggatacaagctccagacctgccaagtgccaggccaggccccatgagctaaggatcaagaccttccccaggccccagactggcccagcaccatgccagcctacacggccccaggctt

SEQ ID NO: 953244 - DNA, 590 bp, Homo sapiens
tggcttcaagagtgaagctgcagacctttgtgatgagtgttacagctcttaaggtggcacatctggagttgttcgttcctcccatccagagttgttcattcctcccagtgggtttgtggtctcgctggcctcaggagtgaagctgcagaccttcgtggtgagtgttacagctcataaaggcagtgcggacccaaatcgtgagcagcagcaagatttattgcaaagagcaaaagaacaaagcttccacagtatggaaggtgacccgagcgggttgccgctgctggcttgggcagcctgcttttatttccttatctggccccaccgacatcctgctgattggtccattttacagagagctgattggtccgttttaaagagagctgattggtccattttgacagagtgctgattggtgcctttacaaacctttagctagacacaaaagttctccaagtccccactagattagctagacacagcactgattggcgygtttacaaaccttgagctagacacagggtgctgattggtgtgtttacaaaccttgggctagacgtaaaagttctccaagtccccacctgactcaggag

SEQ ID NO: 953245 - DNA, 347 bp, Homo sapiens
atggtctacagagactggcaggaggcttttgccattgtcctggtgctccaactggtgtaggggtggggaggaattgagagagttggcagaggtggaatccatttgccttgataattggtttgatatggaaggtagagagaagtagtcatgggactgagtaagtgccatggatgacaggaagatgcttctgttatcaggtaagctgaaagagagagggcgcagtatgtcaataaccagcaagggttctggttattgacygctacacaacaaaccactctaaaactgagtggcttaggagagcaactatgttttaatctcccacagttctttgggtttacccaaagcgg

SEQ ID NO: 953246 - DNA, 468 bp, Homo sapiens
gtgcactgtggtcaacgttcctggctttgaaccctggctttgccccttcctgrtcttggtcaggagtgtgtctctcatgccagactgcctggatttgggtcctgcaactatgcacactgactgtgtgactctgaactcgtgacttcacctttcttggtgtgagttttctcctttcaaagatggagctagcactagtaccacacacaaggtggctggagggattgtgccgtcgcatgcagaattcttgggacaggacttggcacatttaagcacttagtaaacatctctggcctggtgccgtggcttaagcctgtcatcccagcactttgggaggccaaggcgggcagatcactcgagtccagcctgggcaacatcatgaaaccccctctctactaaaaatacaaaaattatctgggtgtggtggtgcacgcctgtagtcccagctactcaggaggttgaggcaagaga

SEQ ID NO: 953247 - DNA, 593 bp, Homo sapiens
accgaagatcatgaagatttactcctatgttttcttccaaaagttttatagttttagctctcacatgtaagtctataaaccattttgagaaakttttgtgtatcgtgtgagataggaggccaacttcattctttttatttcccttttttaaaaatttttcatgtaaccagtggggtataacaacttcattcttttgcatgtggggatgtacagtggtcccaacaccatttgttgaaaagactattcttattctttctccattgaattgtcttgacacgcttgtagaatcaattgatcataattttaagggtttatttttcaactctcagttcagtttctttgatctatatgtccattctcatgccagtatcacactgtctgggttactgtatatctgttgtaatttttgtcttgtctgtttatttttgagacagaatctcactctgtcacccagggtggagtacagtggtgcaatcatggctcattgcaacctcaacctcccaggctcaagcaattctcccacctcagcctcctgagtagctggtagccatgccaccacactcagctaatttttaaaagtttttgtagagatg

SEQ ID NO: 953248 - DNA, 620 bp, Homo sapiens
gaacaaggacattctcttacataaagaaaattgtaaggttcttgtatcggttcgaatcccgagagcgtgccaacagacaacacgaggcgatgtggagcaacatgcwgttttaatgagcgcctgggtgcaggcgggctgaggcctaaaatggcgtcagccccaagtgaggacaggacaaaggttttatagtctcctttaaacaggaagtgtcctagtctgacgtaattgctacgttgtacccggatggcctgtttctcaatcttcaggggtacgtgtcttctggccggctctcttcctgcttctgctatcttgctggcacaggctgctgatgcaagtggtcttgcaccttgggactgggcctgagaagggaggagttactcatccctttaagctatcaggccccagggagaatcttacaaaaatcaagaaatttcacattgaacagtaccagtatgaaatgcacaggccacatttgaatgctgccaattgtcccaactagggtcttcctagaccctctccctctcctcggcacctgtcacttgacccgcatgtttttgaagagtagagatcatttatttagtagaacattcctcagcttgggtttcctgatgtatcctaag

SEQ ID NO: 953249 - DNA, 602 bp, Homo sapiens
gaggccattatcctaagtaaattaatacagaaacagaaaaccaaatattttatgttcttattmctaagtgggaggcaaaattgggtattcatggatacaaagatggcaacaatagaaactggggactactagagggagggagcatggagggggacaactattgagtagtatgctcagtacctgggtgatgggatcattaactctcagcatcacacaatatacccaattaacaaacctgcagaggtaccccctgaatctaaaataaaagttgaaaaaaaatatgagatgcagcaacagtaatgctaagaggaaaatttatagcataaaattcaaatactagaaaaaaacctaaaaattaataacctaatttaccttgtaaaactagagaactaaagaaatataagcctaagcaaacagaaggaaataaataataataggacagaaatcaatgaaattggaaacaaaaaaatagcaaaactgaacaaaaccaaaagctgcttctttgaaaagatcaattaaatggataaacctctagccaggctaacaaataaaaagaaggagagacgtaaattaccaatacaataaataaaataggtgccagc

SEQ ID NO: 953250 - DNA, 587 bp, Homo sapiens
tctggtgtgaggtccaggaatctatttttaataacctcttcaggtgattctgaggcatgctaaagtttgagaagcatggctttagggcctcagcttcacaccatcaatttggtcccctctcaacttgttaggaaagcaagaacttagtccctaaccaatgacctatggaactagaatctgtattttaacaagatcctcagtagttcagtatgcttattaaaatttgggaaatgatgcttaagtctacagcatagcttcaatccaatctactctaacaggaactgattagatagaatatagaattaggcaaaatataaataaattattggaaaaaagggaaagccaagtagtgctgcttttacattggattgaagcaaataaagaaggaaagcttcaggatttaatactctgccatttatagggctgcttaataaaggtttgggaatgcatcaggctgaagtgaactgagttatagacagtgttcttkctggaacacaattggaatcaattcccatcttggcaagagctgtgagaaaaaagaagagtaatggtttccctgctccctctctgttcagtttggatcagca

SEQ ID NO: 953251 - DNA, 585 bp, Homo sapiens
aagtctgccaggttagaatgagctgaaagctttacactgccctgtctttccctgatttcagtaggatgtcagtgagataaaaaaacattctcatgtctcctcccaccaaaggaggtctggagggcttttgtagtagcaatggcaggaagggggctagtaagcatgaagaactgcagggccagccaatgaaacagcaaggagtaaccatggtttcattttaccttaaaacttcaaccacaagatgccccaattgttgtatagcaatgcaggataacatgaagacaaaggtcaaaacctaagcaagacaagatacataggggaggcgagggacgaccaggggaccacagactggatggacaccttccttctctcaatgcttcccatgcactgagaaactcacatttctgcatatccacaagtgtattttctctttattgcttaacaatttacaattttcacaggttagagaatcataaattattacaatatcaaggttatcctaaagtgtgattcttaayatattggtttaaaatgtctttctctcattcatccatttatttatttagtgagatagggtctcactct

SEQ ID NO: 953252 - DNA, 596 bp, Homo sapiens
actctttctctttatttctcagccagccaacacttatggaaaatagaaagaatctatgttgaaatgttgggggcaggttcccctgatagaataacagagtgaatgaaggggcttgctggaraaagaacattttctaaagggtggatgggtggtaggaggtggaaagcgatgaaatcaggtaaattcttgtaggccatggtaaggaatttgacttctctctcaatgggaaatcactgaggctttttgaaactagaaggaacatgatatgactcagattaaaagtatcaactctgcctatggcaaggaaaggtcagaagcgcaagacagttgttaggtggctatggccaaaacccaggagagaaatgctagtagtctgcagcaggatcaagcagtggtcagattttggacatattatgtaggcaaagccagcaggatatgctttggaatttaatctgggaggcaggacacaccagaaaaagataaattaaaaagactgtacggtataaaggcaaattcttatacattttaataattagcataatttaatcttcaggtaaagtttaaacatgtcagaattataagtgtcagttttttct

SEQ ID NO: 953253 - DNA, 568 bp, Homo sapiens
aacttccagtaccgtgttgaataggagtggtgagagagggcatccttgtcttgtgctggttttcaaggggaatgcttctagcttttgcccattcagtatattggctgtgggtttgtcataaatggctcttattattttgaggtatcttccatcaatacctagttgattgagagtttttaacatgaagagatgttgaattctacggaattcaatattgagataatcatgtggtttttgtcgtttgttctgtttatgtgatgaattacgtttatcgatttgcatatactgaaccagccttgaatcctggggatgaagccgacttgatcatggtggataagctttttgatgagctgctggattcagtttgcatcaggattgcattgaggatttttgcatcaatgttcatcagggatattggcctgcagttgttttttgttgttgtatctctgccaggttttggtatcwgtatgatactggcctcaaaaaatgagttagggagcagtctttccttttccattgtttggaagaatatcagaagaaatggtaccggtttctccttgtacctctg

SEQ ID NO: 953254 - DNA, 584 bp, Homo sapiens
tcttagcaaacggcacaccaggagataatatcccatgcctggcttggagggttccacacccacagagcctcactcattgctagcacagcagtctgagatcaaactgcaaggtggcagcaaggctaggggaggaaagcccacaattgcccaggcttgagtaggtaaaaaaagcggcctggaagctcgaactgggtggagcccaccacagctccaggaggcctgcctgcctctgtagactcaacctctgggggcagggcatagccaaacaaaaggcagcagaaacctctgcagacttaaatgtccctgtctgacagctttgaagaaagtagtggttctcccagcacggagtttgagatgtgagaacagacagactgcctcctcaagtgggtcactgacccccgagtaacctatctgggaggcaccccccagtaggggcagactgacacatcacatggccrggtacccctctgagacgaaacctccagaggaacgatcagacagcaacatttgctcttcagcaatattcactgttctgcaccccccgctgctgatacccaggcaaacagcgtttggaatggacctcc

SEQ ID NO: 953255 - DNA, 593 bp, Homo sapiens
tattatttaagaaatacattttgtaaggctgtagctgccataattarataaattactatctaatttatctgatggataaattaagttgggcaaagtaagttgaaaacctctggaaataaattgaaaacctctgtaaaggcttcatcattctagatgtcattaaactatttgtgattaatggggtaaggtcaaaatatcaacattcacagaagtttggaagaagtttattccaacccattgatgcctttaagaggttaaagatttcaatggaggaagtcactgcaaatgtggttaaaaaaaaaataagagaactagaattagaagtggagcctgaagatgtgactaaattgctggaatttcattacaaaaaagcctcaaactcgggatcatgcaatatacccttgtaacaaacctgcatgtgtagtccctggatctaaaattaaaattaaaattaaaaaattcctgaacagatgaggagttgcttcttatgagtaaacaaacttaatggtttcttgagatagcatcaactcctggtgaagatgctgtgaacattgttgaaatgacagcaaaggatttagaatattccataaact

SEQ ID NO: 953256 - DNA, 616 bp, Homo sapiens
tgctggccactgtattgctcacgtcagggagggtgtgactctaacatttcacaaaactcctttttctcatatctgattatgccgtgtttgtagacacactgtagacgtgtgaycatattttctacttctttgttttaatcatcttgatttaatccctgtgagctcatattccttcattaatgtcatcaaattaaaagaggaaaagggattttggaggcttatgctggatttccccaaagacaggcacgatagtggtccactcagcctctgctgtgcccttcctgtggcagggacacactatcagggaatgcagcctgtaataactagacccccctcattatcacataggccttccttttgttcagctgaaaatttcagcttttaccttccacacattggtccttgtcttgtccctttttcatgtgaaagtttttcaaatatatgagccagtcatcacgtagcattgaagttatataactggaagttgttatgttctgaaccatgtctctccagattcatatgttgaattcccagcccccagtgcctcagaatgtgactgtatttgggaacagggtctgcattagtttgttttcacactgctataaagacatacctg

SEQ ID NO: 953257 - DNA, 783 bp, Homo sapiens
tatttcaaatcatttgttattsagaaacatcattaaacacctactatgtgcagcatgcatgctcacagcctgacatcgatactgtctcccatttatgagtgccatcaggaaagttcagaaaggctcatttttcccagggccacagtcccagcaaagggcagagttgggatgcaaacccaggcttgtccaagcccaaaacccacatttgcagacttggcatcccagctccatctcaagttgaagacactgggcatatgttctggaagaatgtcaacttctcctttggaactcaggtgcaattcaagcctgtaaggaaagcaatgctttcaataacaaagcttcggccaaacagtacagcaatcgctttacacacagcagctcatttcatttcataaagcccttgtaaggcaaggtttgctatgtgcattttcaggtgaagaaacggaggctctgatgaccctgctgcaacctcacctgactggtctgtgcggctccttgttcccacgggttcttaatcccctcctctgagtcctgcaaagcactttgcatggggctaggctttgctctcagcagcccttgctctcaccagagcaccccccgagctgaaatccctgaagcccagaagcccctctgcagagccaatgcagtccctagaaaagatgctggctcagatggaatcttaaccctggctccctgtcccagtgggagatctgagcttcctgggggtggccctgtcagagctgacatcccacccaccctgctctgtcccctgcagttcctgag

SEQ ID NO: 953258 - DNA, 583 bp, Homo sapiens
gcctcctgagtagctgggactacatgcccaggccaccatgccaggctaataaaaaattcttttttttttttttttttttagagacagggtcttgctatgttgcccaggctrgtctcaaactcctggcttcaagtgatcctcttgccttggcctcgcaaagtgctgagccaccacacctgaccaacagatgttttcattcttcttgggtatatacctaagagtggaattgctgcatcatatggaaatgatgtatttaagtttttgaggaactaccacactgttttccacagcacacaccattttacattctcaggagcagtgtatgggggttccagtttctctgcatcctcgccaacactttttattgtctgtcatttttaattttaactatcctagtgcgtgtgaattggtatcttgttgtggttttgaattgcattttcctaaggattaaggatgctgagcatctttcatatgccgcttggccatttgtgaatcttctttggacaaatgtctattcagatcttttcccattttttaaactgtaactggctgttaaggaccgtatggtgtctggtgtgtggat

SEQ ID NO: 953259 - DNA, 583 bp, Homo sapiens
gcctcctgagtagctgggactacatgcccaggccaccatgccaggctaataaaaaattcttttttttttttttttttttagagacagggtcttgctatgttgcccaggctggtctcaaactcctggcttcaagtgatcctcttgccttggcctcgcaaagtgctgagccaccacacctgaccaacagatgttttcattcttcttgggtatatacctaagagtggaattgctgcatcatatggaaatgatgtatttaagtttttgaggaactaccacactgttttccacagcacacaccattttacattctcaggagcagtgtatgggggttccagtttctctgcatcctcgccaacactttttattgtctgtcatttttaattttaactatcctagtgcgtgtgaattggtatcttgttgtggttttgaattgcattttcctaaggattaaggatgctgagcatctttcatatgccgcttggccatttgtgaatcttctttggacaaatrtctattcagatcttttcccattttttaaactgtaactggctgttaaggaccgtatggtgtctggtgtgtggat

SEQ ID NO: 953260 - DNA, 834 bp, Homo sapiens
agccttggaaacatttagctcctctccaactcctaattccctaagtaattctgtggcgtgttgttcacggggcctctgggtttcctcatcatctccgggagttctatgcactgcctgtgtcagggaggcacacaagaagctcttgctctctgtaaacaagcgtctttgctgtaggaggaatgaactaaaggctggtggtgctttccagaaggatgatgcagtgaaatgccaaacgctgctgggacgctttccacactgacagcattctcttagttacttaaagaaacgagggagggtgactattcctggaagtaaccaggagtgatgagtagccttcccttaaggataacaaagtatgtcaattgccccctcaccctcccgccacaccacactgggttttgcagcagtggcttcctgcctggccagtgagcctggtgtggtaagcagcctgttcaggctgaagacaacgggcaaaacgcagcttctctgaggccatgaaactgaccttatccccttcattcagacgataggtactgggttacttgaaagagccatcgtattgaccaataatataatgacagagacttccacagaatatctttgatatggttgggctctgtgtccccatccaaatctcatttgaattgtactctcataatttccacatgttgtgggagggacctggtgggagataattgaatcgtggyggcaggtctttgcagtgctgttctcatgatagtgaataaatctcacagccggggaccgtggctcacgcctgtaatcccaacactttggaaggccaaagcaggcagatcacttgaggtcaggagttcg

SEQ ID NO: 953261 - DNA, 520 bp, Homo sapiens
tattatattaacactgcgcaatatagtgtgataaatttaatgtgttgtatgataacacgtaggtaattataatatataattatataataatgtatatatgataattattttaaaattaagagactaaaactatatcaagtatcttttccaaccacaatggtataaaattagaaatcaacaaatggaggaattttggaaaattcaaaaatatgtggaaattaaacaacaggctcctggacaaacaatgggtcaaaaaagaaatcaaaagggaaattttaaaataatttaagacacacaaaaatggaaaaacgatataccaaaatgtatgggataacagcaaaagcaactgtaagaaggaaatttatagcaataaatgcctacattgaaaaagaaggatctaaaaaaaaaagaaaacaacctaacattacaccccaaggaactagaaaaagaaraacaaactaagaccaaagttagtagaaggaagtgttaccggcgggtctttgttcttagagctcccaag

SEQ ID NO: 953262 - DNA, 644 bp, Homo sapiens
aaagatgaactgggagaaaagggagtttttatttctatagctggttacagggagaagggctggaaattatcgctggaccaactcaaaattacaaagttttccaaagcttatataccttctaagcgatatgtgtacatgtaagtgtgcatttacctaaagacacaagcgattaacttcttttaatctgtaactaagatctgagtcctgaagaccttcctctggagcctcagtaaatttacttaagctaaatgggtccaggtgctggggtgattaccgaccattatcttgtctcctgctaagtcatggaggtttggggacttactttagtccccaataaagcttgtttgtggaggcctggagagtttcttcaggcccacaataaaacttgtttaatcctcaacaggtcctgttaagaattccttcattatcttgtcatgctttaaggctgaggaaaagcctaagcaaaactcttggtgggcttttgtcacattccagactttgtacaagggcactagctctttcaactttcaacatttaacttaaccactcaatcagtactgaaacagttgttatggaggcctgcatyagtgggacctggcctgccacagtgtgattacagctcaccgcagcctcgatctcctggg

SEQ ID NO: 953263 - DNA, 430 bp, Homo sapiens
agaggcacccgccacgacaccaggctaatttttttttgtatttttagtggaratggggtttcaccatgttagccaggatggtctcgatcccctgacctcgtgatctgcccgcctcagcctcccaaagtgctgggattacaggtgtgagccaccgtgccaggccctagtttttggttcttacaaataatgtcttaaatttggaagcaagctacatgtccatcaacagataaatggataaagaaaatgtggtacttatacaaaatgcagtactattcagccatcaaaaagaatgagagtttgttgtttgtaacaacatggatggaactggaggtcattctgctaagtgaaacaaaccaggcacagaaagacaaatatcgcatgttctcacttatttgagggacctaaaaatcaaaacaattgaactcatgga

SEQ ID NO: 953264 - DNA, 613 bp, Homo sapiens
cccctgcaagactttgcctttgctgctgccaaaccaaagcctctgcttttttttgaatttttgaaatcacagatcctaattcctgggactttaagctaaatgctgacactatctgttwtgagctgttacagcttccagacaagctgtgctcaactgaaggcaggcataggttaggtgaataggacttcaacttgaggaccagtgcaggtttgagacattcctctgtgcagacatacgaaaacatcaaagacgctggctggaccacggatgctatgaaaacatcacggatgctggctggaccatctgggtcacatacagatactcacagaaggtttactctctgatgggaccacctgaaattgagctactcagttctgtgtttctaatacacctgcggactgtgttcctaacttgcaattactgccaaaagttacaccctgggggaagcacatcacggcaactggaatggaagagatcagtgacccctccaccgccccgacagaccagactatcaagcccctctgggtcttaacatccgttgacctgttgtgttctggattcgctgccgttgactataatgaattgacaacctgattctacttccctcgccttt

SEQ ID NO: 953265 - DNA, 860 bp, Homo sapiens
cagaaggtttactctctgatgggaccacctgaaattgagctactcagttctgtgtttctaatacacctgcggactgtgttcctaacttgcaattactgccaaaagttacaccctgggggaagcacatcacggcaactggaatggaagagatcagtgacccctccaccgccccgacagaccagactatcaagcccctctgggtcttaacatccgttgacctgttgtgttctggattcgctgccgttgactataatgaattgacaacctgattctacttccctcgcctttctcctggtacacacaatacagaaggcaggttaattgttaaatgcaactgtttccagaaaggggttgatcttttctaggctgctcactagatacatgatcaggacaaaagaggtgggaggttatgtcaatcattttgaaactttttgaaacttcaggattctgtcctgattcctgaacatgacgtgcctttctgcttaagtggcataaaactgtttttctgtgaaaatgcttttgtccccttgcctataacctttcagacaaaaggtctgatgagagaagaaaaaagtgactaggaaaaaaccataatgattacaaaatgggaaatactgattttgtaacaaagaagaaaaaacaaaacactggggaggtatggggcaggggcagggaggcattaatgacctgtttttagaactgtttctggaatgacctgtttttagaactgtttctggaagcttcctcctcttcatgagggaaaactccccatgctgcctttccaagattgaagcgggcactttgaattcaaactgactcctgagccaaagccacatggkgccagcactgaccgtggcacc

SEQ ID NO: 953266 - DNA, 660 bp, Homo sapiens
ctgtacgaagtgtctgtcgacccctgctgggaggtgtctcccckttaggaggcgcggggttcagggacccacttgaggaggcagtctgtcccttagcaaagctcgagcactgtgctgggagatctgttgctctcttcggagccagcaggcagaaatgtttaagtctgctgaagctgtgcccacagccatcccttccgccaggtgctctctcctagggagaagggagtttatctataagcccctgactggaactgctgcctttctttcagagatgccctgcccagagtggaggaatctagagaggcagtctggctaccatggcttttccacactgtggtgggttccgcacccagttcaaacttccgactggctttgtttacactgtgaggggaaaactgcccactcaagcctcaataatggtggatgcccctccccccaccaagctggaacatcccaggttgacttcagactgctgtgctggcagtgagaatttcaagccagtggatcttagcttgttgggctccgttgggggtgggatccacagagcaagaccactcagctccctggcttcagccctctttccaggggagtgaatggttctgtcttgctggcattccaagtaccactcagttggaaatgcagaaatcacccgtcttcttt

SEQ ID NO: 953267 - DNA, 555 bp, Homo sapiens
tttgacatactgatttcatttcctttggatacatacccaaaagtaagattgctggatcatatggtagttctattttcaattttttgagaaatatccatattattttccatgactgctacagtaatttacatttmcaccaacagcggcaagggtccccttttctccacaaccttgccaacgcatctttcgccttctttgataatggccattctaacggatgtgaggtaatggtaggaataacgctcaaaatcctaaggaaattgaacactcaaacaaaggattctcagcaaagctattttacttcttcacagaggggtgcctccttggccagttgccatgtgagcacacctgaacaaaggggcacgagagcctttattcctgacgcaagtcctgccccgtaccctttccccattggccggggttaggttgtacaatctaaactaaccccggttggctaaacatttgattttttttagatagggtgggcaagtaaaagaaagtgaacgggaaggggtgtctgtaatgagctagaaagtcagtcctctttccaaataa

SEQ ID NO: 953268 - DNA, 666 bp, Homo sapiens
aggtaagagaagatgaggattggactgrgtcagtagcagagggagtagagaggagtgacatatctgagacagaatttgggaggcagaagcaagaggacttggtgagcaatcaaacgtgaaaggaataaaggagaaaacaaaagcaacagtgattctgagggttgtagcatggatggctggaaggatggtggtgccattgacagagaagggacacagatgaggaggaacaaacctgcctaggagttccatcgtgaaggtgggtttagacacagtgaatgtgcctgcaggtggaatgcccagtggataggcacacttaaaagatctggtacttggaaaataaatctgggctgtacatatctatctgagagttaacagtatatatatattgatagtatcagaagctggagaagggccttgaggaagtgaggttgtccagggagaatatggagagtgaaaaggaagagacaaaagagtggagcctgtggaacatcagcatccagggtgcgtatgctttggaaaaggtctggaaagctctgctgaaaagaggaaattctaaggatggctgaaaatacttggttagagagggaggaggaaaaccaggaaaaagcaatattgccaaaactaaggaaagttttaagcaaggagggaatggtcaataacggctat

SEQ ID NO: 953269 - DNA, 616 bp, Homo sapiens
gtatttttagtagagacgaggtttctccatgttggttggccaggatggtcttgatctcttgacctcgtgatccatccgcctcggcctcccaaagtgctgggattacaggcgtgagccaccgcgcccagccaggtcttgaactcttgagctcaagtgatcctcctgccttggcgttccaaagtttgggattacaggcgtgagccaccatgcctggccagaaacttcttttttgtttcctgtgttttgttcccactctacctggccgttgacataattaacatgaaatttgcaggaatagatctcctggattgtcttctctatgtatgcttttcttcctgctgtccttgtattgtgtgtcctaattttattctccacccacaccccttccccatcaaatttgttttatagaataaatgtgtttttatatatctttgtccctcttgtataatcttttgataattgtctactttcatttttgtgacatgttcctctatgcggaatgatactagtgagtttttgccaataaatccaatgtatgtaacttggagcattmgctagattaactttttggtatggtaagacatcctatagcagcaacagattttagcccacagtg

SEQ ID NO: 953270 - DNA, 635 bp, Homo sapiens
ttcctttgtcggaaaactttgtattactggttcaatcttgctacttgttataggtctgttaaggttttctatttcttcctgattcaaccttagtaggctgtacaaacgtagtaktttgtatgtttccaggaatttatccatttcctctaggtttttccagtttctcagcatatagttgttcataacgtctgtgatgatcttttgtatttaaaatttattttttatttttttatttcaataggtttttggggaacaggtggtgtttggttacatgaataagttctttagtggtgatttctgagactttggtgcacccaagcggtatacactgtacccaatgtgtggttttttaatccctcaccacccgtcaccctttcccgagtgcccaaagtccaatgtttcgttcttctgccttagtgtcctcatagcttagctcctacatatgagtgagaacatatgatgcttggttttccattcctgagttacttcacttagaataatcatctccaattccatccaggttgctgtgaatgccattattttgttcctttttatggctgaatagtattccattatatatatatatatatatataccacattttggttatccactcattgattgatgggcatttg

SEQ ID NO: 953271 - DNA, 623 bp, Homo sapiens
ttgaataaagccactatgaacattcgcttacaggttttcatgtgagactttcatttctccagggcaaacatctaggagtaggatttcctagtgatatggtaagtggatgcttgatattatcagaaactgccacactgtttttccaaagtggtaacccactgaatgtgctgcccaacggtgtatgagagttccacttgcttcaaatccttgacaacacttggtacggccaatcttttttttttttttttttaagacagagtctcgttctgttgcccaggctgaagtgcagtggcatgatctcactgcaacctccacctaccaggttcaagcaatcctcctgcctcagcctcctgagtagttgggattacaggcaggtgccaccacacccggctaatttttgcatttttagtagaggcggggtttcgccatgttggtcaggctggtctcaaactccagacctgaaatgatccacccacctcagcctcccaaagtgctgggtttacaggcatgagccactgcacccagcctggtatggccaatcttttgaatattagccatattaatgggtttgcagtgcygactcactgtggttttaatttgcatttcctgaatggcagctgatg

SEQ ID NO: 953272 - DNA, 650 bp, Homo sapiens
atctctgcagttcagttgactcagccattccagcctgccagctttggagaatacaaactgtctggacgcggaagggtctctcccaaygcaacacacctgctctaccaaacagcagccagactgcttctttaagtagatccctgatcccattcctcctgactgggtgagacctcccaacaggggtctccagccaccttctacaggtgtggttgggccggcaacaggtcagtaccctactggaacggagcttccagaggaaggagctggctgccatctttgctgtttcacagccttcactggtgaaacctccagttacaggaaaaaacgagccaactagggcctggagtggacccccagcaaaccgcagcagccctatgctagagtggcctgaccgttaaaagaaaaacaaacagaaaacaacaatatcaacaaaaaagaccctacaaaaaccccgttcaagttagtatcctcaaagatcaaaggtagataagcccacaaaatgagaaagaatcgatgcaagaatactgaaaactcaaaaagccagagtgcctcttctccatatgactgcaacacctctccagcaagggcacagaactgggttggggctgagatggctgaattgacagaagtaggcttcaggaggtgggtaa

SEQ ID NO: 953273 - DNA, 669 bp, Homo sapiens
tgagagatcactgagacagaaaattagcaaagatactcaggacccaaactcagctctggatcaagtggacctcatagatatctacagaactttccaccccaaaacarcagaatatacagtctttaaaccatcaacgattaaaaaagacaaagaagggcattaaataatggtaaaggcttcaattcaataaaactgactatcctaaatatatatgcaccctatacagaagcaccgaaattcataaagcaagttcttggagatctacaaagagactcaaactcccacacaataatagtgggaaactgtaacaccccactgacagtagtagacagatcattgagacagaaaattagcaaaaatattcagggcctgaactcagctctggatcaagtggacctgatagatatctacagaactttccaccccaaaacaacagaatatacattcttctcagtgctgcatggcacttactctaaaattgatcacataatcagaggtaaaatactcctcagcaaatgcaaaaaactgaaatcataacaaacagtctatcagacccacagcactgtcaaattgagaaattcactcaaaatcacacaactacgtggaaattgaaaaacatgctcctgaatgactcgggtaaataattaaggcagaaatcaagaagttatt

SEQ ID NO: 953274 - DNA, 620 bp, Homo sapiens
ctcagctctggatcaagtggacctcatagatatctacagaactttccaccccaaaacaacagaatatacagtctttaaaccatcaamgattaaaaaagacaaagaagggcattaaataatggtaaaggcttcaattcaataaaactgactatcctaaatatatatgcaccctatacagaagcaccgaaattcataaagcaagttcttggagatctacaaagagactcaaactcccacacaataatagtgggaaactgtaacaccccactgacagtagtagacagatcattgagacagaaaattagcaaaaatattcagggcctgaactcagctctggatcaagtggacctgatagatatctacagaactttccaccccaaaacaacagaatatacattcttctcagtgctgcatggcacttactctaaaattgatcacataatcagaggtaaaatactcctcagcaaatgcaaaaaactgaaatcataacaaacagtctatcagacccacagcactgtcaaattgagaaattcactcaaaatcacacaactacgtggaaattgaaaaacatgctcctgaatgactcgggtaaataattaaggcagaaatcaagaagttat

SEQ ID NO: 953275 - DNA, 744 bp, Homo sapiens
tatatatgaatatcattaatcattagtttgtagcaattagtctttattccaatattataataatccttactctataatcataacctaggaaaaaccaggccatacagagataggagctgaggggacatagtgagaagtgaccagaagacaagagtgcaagccttctgttatgcccagacagggccaccagagggctccttggtctagcggtaacaccagcgtctcggaagacgcccgttgccaagcagaccatggtctagcggtagcgtcgctgtccaggaaaaacacctgctacttagcagactgggaaagggagtctccctttccccaggggagtttagagacaactctactcctttacctcttgtggagggcctgactaggcctaaccatctccctgtgatgctgtgcttcactggtcacgctcctagtctgctttcatgttccatcctgtacacctgactctgccttttagatagcagtagcaaattactgagagtactaaaagtctctgatatgcagaaataatggcacaagctgtctcctctctccctctctctctgcctcggcttccaggcagggaagggccccctgtccagtggacacgtgacccatgtgaccttacctatcattggagatggctcacactccttaccctgtccctttgtcttgtatccaataaatatcagcgcagcctggcatttsgggccactactggtctccgcatcttggtggtagtggtcc

SEQ ID NO: 953276 - DNA, 504 bp, Homo sapiens
tagtcccagctactcgggagcctgaggcaggagaattgcttgaatccgggaggyggaggttgcggtgagccgagattgcaccactgcactccagcctgccaatagagcgagactccgtctcaaaaaaaaaaaaaaaaaaaaaaaaaaaaaaaaagaaagaaacatttacaatctattctctctgaagccttcatcttcatgataaaacctaggtctccaaaaccccttatcttactccaaacattcctttctactgataattactctttcaaccaattgccaatcagaatgaatatgtttaaatctaactatggcctggaagcccccggccccgcctttgagttatcacacccttccagatctaaccattctaagtcttatgcgtactgattgatgtattatgtctccttaaaatgtataaagcaagctgtacttcgaccactttgggcacgtgtcctcaggacctcctgaggctgtatcatgggtgcatccttaaccctggca

SEQ ID NO: 953277 - DNA, 626 bp, Homo sapiens
ttctctatctggatctattttaactaggatacattttggctactgtaagaaatgccaaaataacaggattaaacaggacagcgcccccccacccccaccccgsccgccccccgcatagcaggctgagcttcagcagtctaaagctagcgtggtggtgacacgggcacacaggctttttgcagcttgttgctctgtgatcctcaacacccagcttcccttccataatcccacggctgccccactcctgccatcacctcattaatccaactgtgggaacagggagaagaagcgggggaaggcacctctcttccccctaaggtcaggaacccgaagtttcacaggtcacttcttctgcgtcattggcaaggatttggtcagataactacgtgtagctgcaagggaggctaagaacttgaatctttacatgagcagccacgtgtccagctcaaagctgggatttcttttactttagaaagaagaggaaaacggatactgggggcagccagcaatctctgccactgggacacagtcttcacccctttgccaggaccatggtgagccaaggtcatggggaaaaggtaactgccatctggcggggagagaggtgattggatgaggaatcggag

SEQ ID NO: 953278 - DNA, 626 bp, Homo sapiens
ttctctatctggatctattttaactaggatacattttggctactgtaagaaatgccaaaataacaggattaaacaggacagcgcccccccacccccaccccgcccgscccccgcatagcaggctgagcttcagcagtctaaagctagcgtggtggtgacacgggcacacaggctttttgcagcttgttgctctgtgatcctcaacacccagcttcccttccataatcccacggctgccccactcctgccatcacctcattaatccaactgtgggaacagggagaagaagcgggggaaggcacctctcttccccctaaggtcaggaacccgaagtttcacaggtcacttcttctgcgtcattggcaaggatttggtcagataactacgtgtagctgcaagggaggctaagaacttgaatctttacatgagcagccacgtgtccagctcaaagctgggatttcttttactttagaaagaagaggaaaacggatactgggggcagccagcaatctctgccactgggacacagtcttcacccctttgccaggaccatggtgagccaaggtcatggggaaaaggtaactgccatctggcggggagagaggtgattggatgaggaatcggag

SEQ ID NO: 953279 - DNA, 578 bp, Homo sapiens
ctgtcaagtgagcacctacccaaggcctccccaacatggcaatcttggtgcagtcaaatttcttacctggtagctcagtactccccagaaacccagatgaaagctgcaagccttcttttgattyagcttcagaagtctcagagcaacacattgaccacattatgttagtgaaataagtcattaaagccagctcagattcaaaagatggggagttagactccatctctcaataggaagaacatcaattaacctgtggccctctttaatctaccatagacaggctgctagacaagtatctaccagcttaaatatttactgcttgcttagatccaagggaaagataaatgagaagtaagacatcaaatggttcagggtactcaggggacagagcttcagaatgggcagttacaggacttatcctctgggtggttcctgtgggagacctagcccccaccaatcctgctcatttcactgatggtgatacctttaagaagtgttgaaaaaaggattatgaaggaaaatctgtaaaaggaggataggaatagtatatctatttcacagggttgtggggattcaat

SEQ ID NO: 953280 - DNA, 645 bp, Homo sapiens
ataatttttggctttgcaggtcatatggccttcatcgaaagtattaaactctgctgttggagcaggaaagcagcaataaatgctatgtatacaaatgagcatggctgtgttcctataaaactttatttacaaaaaaaaaaggcgtcagatttggcccactggctacagtttgctgacccctagatattgtttttaaactttttattttgccgtaattatagttttacaaaatgttacaaaatagcacagagagatgctgtatgccatttacccagttttccctaagttacatcttaaataactatagtacaatatcaaaaccaggaaactaacattagtatatggtgtgttcagagtctgtaccatttgataacacgcagaaccacctcacagtgaagatacacaactattccatcacacagagatctccctcattctaaccccatagaatcacaaccaccttccaccccactcccactcatctttatccttttacagtctctaatctgtgtcctrtctctctaatttttgtcattttttaataagttgtgcaggtgaaatcacacagtatgtgacctttgaagatgggctcgtttcacccagcattgaaatccatccagattattgcatgtatcagtggtgttc

SEQ ID NO: 953281 - DNA, 542 bp, Homo sapiens
gcctccgcctcccaaagtgctgggattacaggcatctgccaccacacctggccgagcccaggaktttgaaaccagcctgggcaacatggcaaaaccccatctctacaaaaaatacaaaaaaattagccgggcatggtggcacatgcctgtagttctagctacttgggaggttgaagtggttctgcctgggaggatcacctgagcctaggaggttgagtctgcagtgagctgtgattgtgccaccgtgctccagcctaggtgatggagtaataccctgtctcaagaaaaaaaaatcagaacagtttctcctgggaaggtatacaaatggccaataagcacatgaaaagatactcaacctcattagccatcagaaaaaaatgcaaatcaaaaccaaaataagataccacttcaggggagcagtggttcacactagtaatcccagcactttgggaggccaaggcaggccaattgcttgaggccaggagttcaagaccagcctgggcaacatggtgagactctgtcactgcaaaaaaataaaaaat

SEQ ID NO: 953282 - DNA, 655 bp, Homo sapiens
gtggggtggggggaggggggagggatagcattaggagatacacctaatgtaaatgacgagttaatgggtgcagcacaccaacatggcgcatgtgtacatatgtaacaaacctgcacgttgtgcacaggtaccctagaacttaaagtataattaaaaattaaaaaaaaggaaatggtaaaaatgagaattattgacttgttccaggtctcagggggaatgctttcaatttttccccattcagaataatgttgactgtgggtttgtcatacatgccttttattactttgaagtaaatcgtttctatgcctattttgttgaagtattttatcataacaagattctggattttatcaactgttttttctgcatttattaagaggatcatatggtttttgtctttaattttgtttttgtgatgtattacatttattaacttgcatatgtcaacccatctctgcatgcctgggatgatgagacccacttaatcatgatgtactatttttttgaggtgttgtttgattcagcttatgtcctttcctggttttggtattagagtgatactggctttatagaatactttagcgagkattgtttctttttctttcttttgaaatagtgtctgtagaattggtaccaattcttctttgaatatctg

SEQ ID NO: 953283 - DNA, 587 bp, Homo sapiens
accaaaatactgatatctgtatgaacaatgaaattaggctgaggtggtcttagatggagatgaggaacttattaggaattggagtaaaggttactcttggccaagctttagcaaagagactggcagcattaagcccctgctccagagacctgtggaacattgaactttagagagatgatttagggtatctggcagaagaaattttgtacagcaaagcattcaagatgtgacctgctgcttctaacagtgtacaatcatatgcatgaaccaagacattatctgaaactggaacttatatttaaaagaaaagcacagcataaaagtttgaaaaatttgcagcctgtctatgtggtagaaaagaaaagaaaacattttctgggaagaaattcaagctggctgcagaaacttacataaggacccaaatgttaatgaccaagatacagggaaaatgattccaaggtattgtggagacctttgcagtagcccctcccatcacaggcatggaggcctaggagggaaaaatgayttcatggaccaggctcagggccccactgctctgtgcagcctcaggtcatggtgccctacat

SEQ ID NO: 953284 - DNA, 639 bp, Homo sapiens
acaatttgaaaaaatgtgcaaatgaaccgtgtatcctagaaatattgaaaaaattaagaaaaaattaggtatgtcgtaggcataaaatatatgtacatgctagtcttgtatcatttactaccataaaatayacacaaatgtattatactaaattaaaatttattaaaacttatgcatacaaatgcttatagactatatacatgataccatttgcagtaatgtaaacaataggtaaagaaatgtaaacaaacataaaagctgcagtattaaatcataattgcataaaattaactctggtacatactgtactactgtaataattttgtagccacttcctgttgctattgcaatgagctcaggtgttgtgaatattcactgaaaactccatgtgacactaatcatctctgcttgagcagttaatctcttcagtaaatagtgtatctcagtaaaaagtgatgtctcagttttcatttatttttcgtcatatttaatttacaatactgtaaacctggaataagtaataccatgagacccataggaagtgccaccagtggtgctggaagtgctcccaagaagcagagaaaactcatgacattacaagaaaaagttgaattgcttgatacgttctgttgtttgagg

SEQ ID NO: 953285 - DNA, 584 bp, Homo sapiens
aaattagctgggtgtggtggcacatgccagtaatcccagctactcgggaggctgaggcaagagaatcgcttgaacccgggagggggaggttgccgtgagccaggaccgctccactgcactccagcctgagccacaagaaagggactccgtctcaaaaaaaaaaaaaaaaaaaaaaaaaacaattgtgatgggatttgctcagactttaacagggaaccaatacctatatttccaatgaatccaaataccagctctgacctaaaatatacaagggtctgccttcctctacctgagcaggtagatgcccaaggtaatcctgatactataaggctcaccacattgagttacttaaacacagagcagctctaccaaaaacaggctggctcaccccgatctgctcttcataataattccttttccaactcccttaacggccccccagtttgtgtactccacgtagtccggggtttggagttgttkttttttttttttttttttagttataacttacacgtagtaaggtgcataaatcttaaagtgtgcagcgtgatgaatttttttaatatgtatatacacataaagct

SEQ ID NO: 953286 - DNA, 554 bp, Homo sapiens
agccatgaatgtgccactgtactygagtctgggagcctggttgacagagcgataccctacctcaaaaaacaaacaaacaaaaaaaccatgtcaacatattctagttaaaaatttgttataacagagtgcattataatctaattctccactttaaaaaaaaggccaaccagggttagctgatagtccaggagttgatgtgggtaataaaggatgagaggatgaagacagagtgcatgtttaagaagatgccccaataccaataggctggaattgatgttcctctgccctggatattgaatctgggaaaggtgtccagttttttatgaagctgaatgccaaaggaggatgttgaagtctgaggacaaacctgtggcctggcaaatttagtccagttgttttaggtgactaaactctatacccttacaggacttttaaaatgataatattatataatcaacagctctgtattccatctagtgaattggttttattagtgattctttatcttcactgcctaccagataacatccaactcactccctagctggatgtcc

SEQ ID NO: 953287 - DNA, 591 bp, Homo sapiens
gcaaaaacctatctctacaaaaaaaamaaaaaaatacaaaaatgagctgggcttggtggctcatgcctgtagtcccagctacttgggaggctgaggtggaaggatcccttgagcccaggaggtcatggctgcagtgagctgtaatcatgccactgcactcctccggccttggtgaaagaagccggttggcaatgatagcacatataattggccacacatctcatccaaaaggccacatttcaagagctacatgtggtggctaccatattggacagtgccgatgcttcccagtggcaagaagtaattatttgagctccttctagaccctgttcaagtagcatatctattaattcttacaacaataaccaccgcaaacctatgaactgttttattacctaccctttctgacaagttaaacaaattaaacatggctttccagctaagcagcgatggagccgggattcaaatttggctctggctgactgatttgcactgtatcaggctgctttagccactttgttatactgctcccgtgagaaaccttggcctaaagtgaggggatcattagatcacccttatagaaatatctga

SEQ ID NO: 953288 - DNA, 540 bp, Homo sapiens
ggtgtaaggaagaggtccagtttcaatcttctgcatatggctaaccagttatcctagcaccgtttattgaatagggaatcctttccccattgcttgtttttgtcaggtttgtcaaagatcagatagttgtgggtgtgtggttttagttctgagttcttattagttcattctcacattgctataaagacatacctgaaattgggtaatttataaagaaaagaggcttaattgactcacagttctgcatggctggggaggcaccaggaaacttacaatcatggcagaaggtgaaggagaagcaaggcacatcttacatggcagcaggagagagaatgaagggggacgtgccacacttttaaaccatcagatatcatgagaactcactatcatgagaacagcaagggggtatctttccccrtgatcctatcacctcccaccaggcccctcctctgacacatggggtttacaatttgagatgagatttgggtggggacacagagccaaccatatcagttctctattctgttccactggtctata

SEQ ID NO: 953289 - DNA, 540 bp, Homo sapiens
ggtgtaaggaagaggtccagtttcaatcttctgcatatggctaaccagttatcctagcaccgtttattgaatagggaatcctttccccattgcttgtttttgtcaggtttgtcaaagatcagatagttgtgggtgtgtggttttagttctgagttcttattagttcattctcacattgctataaagacatacctgaaattgggtaatttataaagaaaagaggcttaattgactcacagttctgcatggctggggaggcaccaggaaacttacaatcatggcagaaggtgaaggagaagcaaggcacatcttacatggcagcaggagagagaatgaagggggacgtgccacacttttaaaccatcagatatcatgagaactcactatcatgagaacagcaagggggtatctttccccgygatcctatcacctcccaccaggcccctcctctgacacatggggtttacaatttgagatgagatttgggtggggacacagagccaaccatatcagttctctattctgttccactggtctata

SEQ ID NO: 953290 - DNA, 712 bp, Homo sapiens
aggagctacccactacacgtcttctctctactgagagctgttctgttgctcaataaatctctgccttgttcaccttccagttgtccatgttacctcattcttcatggacatgggacaagaactaggatatcactgaatggtaggtgtgaaaggagctgtaatgctttcctggcccgcttgccaagctgcaggcagtgacacgctcctggactatgagagtgaagagtggtaacccttctggggacccagaccttgggatttcctgaggtagagctgctgtaacactgtagcacttccaccctttgttggcgccgggtggccgccccatgcagtgggaagcagcagtggggctgggccagccacgggctgcagttgtggtggtgggactgaaagagctataacacaaatgggcttaaacactccccactgaaacttgctgccatcccctgctctctgcactgcaggcaatgagaaggagagaagagctgtagcccttctggaagcccagaccttggggcttcctaagccagagctgtgacatgctataacaccctctttggatgctctgtggttcctggcatctccgkgcttttgggcgccaccttgttcccctcatcgagacactggtctttgcagcagaagctgcttgcagtacatctggtccagccagagcctcacatggagccagtgcctgtgctggtgcttggtgctg

SEQ ID NO: 953291 - DNA, 753 bp, Homo sapiens
gcagagggggaaatcactaacagtttttaaaaatctctcccaggctgggtgtggttgctctgcctgtaatcccagcactttgggaggccaaagcgggcagatcacttgaggtcaggagtttgagaccagcctggccaacacggtgaaaccctgtctctattaaaaatacaaaaattacttgggcatgttgtcgtgtgcctgtaatcccaggtacttgggaggctgaggcaggagaactgcttgaacccgagaggcggaggttgcagtgaactgagatcgcaccattgcactccagcctgggcaaagaagtgagactccatttccccccccccaaaaaaaaaaatctcccctaaggtgattctaatacagagagctgccttcaagagcacctggatatggtagtctcagtgtgaatggtggtaccatgatgtttgggaaaggcgcctcagtgcctttgcttccttgacacaaaaatgagagggtttctgcctgcattcattagctgctgctcccagcatcacagcctttgtcagcctcctggtgttcctcccacccccatttgccacagtgattcctcccttgttcctcagcagcctctcagatagagccctgttttatggtagagaccggctttccrgttcccagcctgtgttttgccatatacatcacagagttcactttgaccttcttcctaccatctccccaaggaccttgagtggagacaagtcacaggttcttttcctgacttaggca

SEQ ID NO: 953292 - DNA, 608 bp, Homo sapiens
ccaagggcatactgggctccttaaatgacctcacccaactatgacgtggcacgaggtgaaacagtttcccaaaagaacgcttgtgcctccagaccagaattgtcacacctgaagttgtttatttgagcagccttgtcattgggctttccaaagcaggctttgtacagtggccacaccatggtcttgcatgatacttgaatttggaaggttcctggtagacgtagaaacggcccagactgcctgttcagagctaagcatcatggtaagttaaggtacattctctcctagtacaccttgagttacctaataaaataatccagagcagccaggcatggtggctcacacctataatcccagcactttgggaggccaaggtgggtggatcacgaggtcaggagatcaagaccaccctggccaacacagtgaaaccccgtctctactaaaaatacaaaaattagagggtgtggtggcgagtgcctgtagtcccagctactggggaggctaaggcaggagaattgcttgaatcsgggaggcacaggttgcagtgagctgagatcacgccactgtaccccagcctggtgacagagtgagactccgtcaaaaaaaaa

SEQ ID NO: 953293 - DNA, 608 bp, Homo sapiens
ccaagggcatactgggctccttaaatgacctcacccaactatgacgtggcacgaggtgaaacagtttcccaaaagaacgcttgtgcctccagaccagaattgtcacacctgaagttgtttatttgagcagccttgtcattgggctttccaaagcaggctttgtacagtggccacaccatggtcttgcatgatacttgaatttggaaggttcctggtagacgtagaaacggcccagactgcctgttcagagctaagcatcatggtaagttaaggtacattctctcctagtacaccttgagttacctaataaaataatccagagcagccaggcatggtggctcacacctataatcccagcactttgggaggccaaggtgggtggatcacgaggtcaggagatcaagaccaccctggccaacacagtgaaaccccgtctctactaaaaatacaaaaattagagggtgtggtggcgagtgcctgtagtcccagctactggggaggctaaggcaggagaattgcttgaatccgggaggcacaggttgcagtgagctgagatcacgccactgtaccccrgcctggtgacagagtgagactccgtcaaaaaaaaa

SEQ ID NO: 953294 - DNA, 602 bp, Homo sapiens
agctgaggctgggaacagaaagcaaccaacacaagattcattcttaagtcagctaccaaggtgggmaactcctaaaactaataattgaagtcaacatggttacaggattcaagacaaacatattagaatcaattgtattgatatgctagcaataaacacatgaacactgaaattaaaaatgtaacatcacttaaaattgctcaaaaatacaattcttaagagtacctctaaaaaccatgtacagtgcttataaggtgaaagttcacaatgatgattaaggaaatcaaagaaaatctgaataaagatgcatactacattcatagattgaatgaatcaacacaggaaagatgtcaattatccccaaaattacatacagttttaatgcaattcctgtcaaaagcccccccagcaatttctttagtagatatggaagaaactattctaaaatttgtatggggagggagacaaactgagagggatcagtcttcttgattctaggaatttttaaagagctatagtaatcagacccgtgtagcactgacaagaggaatagacacaccaatcaatggaacagaatagagaatccagaaatagattcatac

SEQ ID NO: 953295 - DNA, 576 bp, Homo sapiens
tctttggcaggccattgatgctttctgagcctcagttccsgtgtctgggaaataggcataacacaaggcagtggcagagtgaggacgcgcagccccacctgcacagctcctggcacatggcccgcctccctccttcctcagtggcctcaatctcagtggcctgaatctccttcagtggctgggcaggggggttggatggtttccgtccacaggagagggaggtggggccccccgtggtggggcaatgggatggaaaagcagcatctcttttgcacccaggcttggcttcagaacgctgagtggaagaaggatggcaaatggagctcaattgattgaccacctactatctgccaagcattcagatttccatttctcaaccagcccctatgctatgaagaaaccgaagccgagagacccaaggttacattctattaagactcagcgccattccctcagccctcaatgtccagtcattacccacccctgccctgtaggaatccctttcagaactacccctgcatctaaacctggcttcacctggatgccagcactcaggggacatactttgttcgtgcc

SEQ ID NO: 953296 - DNA, 716 bp, Homo sapiens
ttttcaattcctaccagcagcgcaggagggctctaatttatccgtatcctctgagagccgatgcttgttgccattggactagattctagccrtgctagtgggtgtgacatggtgtctcattgtagttttgatttgcagttccctaaacaatggtgagcatcttttcctatgcttattggccatttatagatcttctttagagatatgtctattcagatcctctgctccttttaaaattggattgccttttttattattgggttgtacgagttatttatatgttctggatacaagtcttttatcagacatatcatttgcaaacagttcctcccatttactgtgtcatcttttcaatttcttaatagggtcctttgaagcacaaaaacttttagttttgaagaagtccagtttatctattttttattttattgctcatgcttttgatgtagtatctaagaatcctttgccaaacccaggttatgaagaattcctcctatgttttcccctaagagttttatagtcgtagctcctacatttagctctttgatctattttgaatcaacttcctgtacggcatgaggtaggaggttctacttcattcttctgcatgtggatgtccagttgttccattaccatttgctgaagagactattcttttcccccattgaatggttttgacactcttgtcaaatggcagattttttaaaggtcaagtt

SEQ ID NO: 953297 - DNA, 541 bp, Homo sapiens
ttctttaaatacttgttgaatgaataaatgactattcacatccttgaacaagtaaagcaacctcccattcctgacttttaaggtctcttttactattgttttctctgtctagaatattcctctcttgaaatccatatcttgttcccacagtgccatcagcaacatttgtcaaattatcaatagaggtctttcatcctggtttttttttaattttaagttctggggtgcatgcgcaggatgtgcaagtttgttacataggtaaacatgtgccatggtggtttgctgcatctatcaacccatcacctaggtattaagctcagtatgcattagctacttttcctgatgctctccccaacccaccctctcccaacaggtcccagtgtgtgttgttcccctccctgtgtccatgagttctcatttttcagctccctcttataagtgagaacatgtggkacttggttttctgttcctgtgttagtttgctgagaaaacagctttcagctccatccatgtcactgcaaaggacatgatctcattcgtt

SEQ ID NO: 953298 - DNA, 254 bp, Homo sapiens
aatttgcctggtacagggctttttctgatttgtaagtttttaaattactgattcaatttcagaactcattattggtctgttcagggttttactgtmttcttggttgaatcttgaaaggtagtgtgtttctaggaattcagccatttcttttaggttttctagtttttgtgcatagaggtgctcgaaatagtctctgatggatttttggggtcagtgatatttctttaaaatgtactgctaccattgattgtcat

SEQ ID NO: 953299 - DNA, 558 bp, Homo sapiens
acttctagcaccctgtgaacagaaagtacggggtttactaggtataaaatcaaaacagaaaatccaagtaaacccaatcagaaatgacaaaagggacattaccattgacttcacagaaatacaaaaaaactctgagactactatgaacacctctatacacacaaactaaaaacctagaaaattggataaattcctggaaacatccaaacctcccaagagtgaaccacgaagaaatcaaaatccttaatagaccaataattaatttcaaaattgaatcagcaacaaaaagcctaccaatatcaatcagaaaaaagccctgtaccagatgaattcatggccaaattacaccagacatacaaagaagagctggtaccaatcccaccgaaattatgccaaaaaatctaggaagaggggacacttccctaattcactctatgaagccagcatcattctggtacctaaacttggcagagacacaatgaaaaataaaacttcagaccaataaaccaatactcctgatgaacacratgcaaaaatctccaacaaaatactagcaaa

SEQ ID NO: 953300 - DNA, 610 bp, Homo sapiens
gaattccttattgtcaggattaaatacaagaataaaatacgaggctcagaacaggtgttagttcatgtgagaaaggaagaactggccgggcgcggtggctcactcctgttatcccagcactttaggaggccaaggtggattggattgcttgagctcaggagttggagaccagcctgggctacagctatttcggaggctgagatgggaggatcatttgagcctgggaggtggaggttgcagtgcactgagattgtgccactgcactccagcctgggcaatagagcaagaccctgtcttacaaaaacaaaaaaacagaagaacctaggatcaagatttttaagatttgagcttcaaccattaggaattgagaagagggaaggatctaggaaaaaaaaaaacctcaagaaggaatggcctctggggcaagggagccaggctaggggatccctcaaggctgacaggagagaggaatttcagagagaggagggaggcagtgccagaacttgtaaggagacggagggtgaaggtgtctgtgttcacattytaactatagttacctttgcttcctgagtgacatttgtggctcacattggatctgagtgctacttcc

SEQ ID NO: 953301 - DNA, 619 bp, Homo sapiens
tggcactgggtgcctgtcaggctggtgatggatggcaacaacacatcatcccagcggcagcccggctgtgagctatgggggtcatatatcacagcaggcctggctggtcttccctgtacaccgtggaggccacagttggcaggcagcttgggctctgtctggggttgggggtgaagaggggcataggctagcccgggaggcccttccctatcttcttatggttcagatgaggaagctgggggccagagtgggctgtggtcagccccacacctattttctcctgcctccaataccctcaccatccaacccctcactctggaagacattgagaagcctaacttgagtctacccttttccccacttctttggtccaacccatcatcaacattcctgttgtttctgccccctaaatgtctccagaattaatctacttttctactcatcatgatcgccatccttgtctaagccaccacctctccctctctcttgctgtgctctcctactgtggttgggatggaattgyctgctcctgaaggtggccatgtgactttgtcactagaatgaagcagaagtatcaatgtgtcagttccagtcaagacctccagtggccttgtggctt

SEQ ID NO: 953302 - DNA, 388 bp, Homo sapiens
cttccagggcttaagatcaagtaagtagtgactcacacttgtaatcctggcactttgggggcgctgaggcagaagaagttcttgagcccaggagtttgaggtcagcctgggcaacataggagatcctgactctacaaaagatttgttttaagttcttaacaggaaaaaaaaaaaaaaaaaagatggagtaagtactggtcccaccaaacctagccatttgcctgactactaaacctagactccttaactctgccatatccaatttatcaggaagcctcggctctacctccagaataccccccacattcagctcctagctcaccccctttgccactaccttttwaattcaagatactatcatttcttgcctggaatgttacaactgatg

SEQ ID NO: 953303 - DNA, 648 bp, Homo sapiens
ctaatacccccattttacaaatgaagaaactgaggctctgagaagtgaaaacttatgtctggcaataagcgacaaagccagaattaaactagatctgygggactccaggccgaacctctttgacccctgccttttactgcctccttgaaccacttgttcctttcggggagctggtgtggtgtctccaccccttgcagtgagtcagggactgggtttctagtctctatttcatatggacgagattttggaatgtttctgaggatggggagaagcaggcaattgtccatggctggggaaacatatttatcactatttatatttgcaagtgagcagagttaaaaaaaatcaacaaaacccctagttttgccaaactcagggttgccattttggcctctgggaaggagatgttgacgatggaggcagagggtggagtcgtctccagaagccctgctgataccttgattttggcccagtgagtcatttggtcttctgatctccaaaaactatgagataataaattcaggctgggcgcaggggcttacgcctggaatcctagcactttgggaggccaaggtgagagaactgcttgagttccagagttcaaggccagcctgggcaacatagtgagaccctgtttctacaattaaa

SEQ ID NO: 953304 - DNA, 540 bp, Homo sapiens
ctggaacttgagaataggcctgcccagcctgccaccaccaccactgctggcaatcttctgcatgcactacctggaggattggggactgggctgcccagcccattgcagccaccgctaatatcagtgagtgcccatggggagcctgaggactcatccagtcatctggcacactgctgccataaccagcacccaagaaagctgcctggaggccccaaaatcagccctctggacttgctaacactggcgcccacatatgccaccccgggacccaagaacaggcatgcttggtctgccgctgccaacagcagggcctgaggactggcccacctggcgtcctatccccaggaaaacctcagcataatctctactaacaacggcagcctacgccactgaggaaatcacagacaccactgatggtgtatagccaaagaaatcctatggagactrcaccaccatatatgcccagaataaaagaaaagtaccctaaccaaccaacaccatagatctatctacaggaaaatgtcttcccctatgaaaacc

SEQ ID NO: 953305 - DNA, 603 bp, Homo sapiens
gcttcgacctcctggactcaaaggatcctcctgcctcagcctcccgagtagctgggactacaagcacataccactatgcccagcttatttatttatttatttatttatttatttatttatttattttattttattttttgagacagagtctcactctgtcgccaggctggagtgcggtgtcacagtcttggctcattgcagcctccatctcctgggttcaagcgattctcctgcctcagcctctcgagtagctgggactataggtgcacaccaccatgcctggctaattttttgtatttttttagtagagacggggtttcaccatgttgcccaggctgatctcaaactcttgagctcaggcaatcctcccacctcggcctcccaaactgctaggattacaggcatgagccatcgcgcctggactttttttttttttttttttttttttttgtagagacagggttttgctctgctgcccaggctggtctcaaactcctgtattcaagcaatccacttgcttgcctcggcctcccaaarcactgggattacaggcatgagcccccacacccaccctacatatatttgtttccataaaaacgtatc

SEQ ID NO: 953306 - DNA, 574 bp, Homo sapiens
ggattacaggtgtctgccagcactcctggctaacttttgtattttcagtagagacgggacttcaccatattggtcaggctggtctagaactcctgtcctcaaatgatytgccctcctcggcctcccagagtgctgggattacaggcatgagccactgtgcctggctggtaacgctctttcatgatagaatctttatttttaaatttatttatttattttgagactgagtcccactctgccactcaggctggagtacagtggcacgatctcggctcactgcaaccttcaccacccgggttcaagtgagtcttctgcctcagtgccccccgagtgtctaggattacaggcatgcgccaccatgccgagctaatttttgtatttttaggagaaatgaggtttcatcatgttggccaggctggtctctaactcctgaccttaagtgatccacccaccttggcctcccaatgtgatggaattacaagtgtgagccaccacacccggctggctcccacttttaaatgaaaacgtgtggtatttagttttctgttcctgcattggtttgctaagcatacca

SEQ ID NO: 953307 - DNA, 704 bp, Homo sapiens
cagccctgaagagaacagtggttcccacagaatggagtttaagctctgagaatggacagactgcctcctcaagtgtgtccctgacccccaagtagcctaactgagagacatctcccagtaggggtcaactgacacctcatacagccaggtgcccctctgagacagagcttccagaggaaggatcaggcagcaacatttgctgttctgcaatatttgctgttctgaagcctctgccagtgatacccaggcaaacagggtctggagtggacctccagcaaactccaacagacttgcagctgaggaatctgttagaaggaaaactaacaaacaaaagcaatagcatcaacatcaacaaaaaggacatccacaccaaaaccccatctgtaggtcaccatcatcaaagaccaaaggtagataaaatgacaaagatggagagaaaccagagcagagaagctgaaaagtctaaaaaccactgcacctcttctcctccaaagtgtcacagctcctccacagcaatggaacaaagctggatggagaatgactttgatgagttgacagaagtaggcttcagaaggttggtaataacaaacttctccaagctaaaggaggatgttcgaccccattgcaaggaagctaaaaaccttgaaaaaagattagatgaatggctaactggaataaacggcrtagagaagaccttaaatgac

SEQ ID NO: 953308 - DNA, 727 bp, Homo sapiens
ggagttcgagaccagcctggccagcatagtgaaaccccatctttactaaaaaaatacaaaaatacaaaaattygccggacttggtggtatgtgcctgtaatctcagctccttggcaggctgaggcaggagaattgcttgaaccagggaagtggaggttgcagtgagccaagattgcgccactgcacttcagcctgggcgacagagtgagactctctctaaaaaaaaaaaaaacaaaacaacaacagcagaacatccctaacaccctggcaatcaagctgattgaaaatcaatcaagctgttgaaaaatatcaacaacaatatcgatatcaaataagataagagcactacccagatataagcaatagtggttatttctgggtagtgctctttatctgattttttatatattttacattttctgaatttttttgcagtccagaactaatttttcaaaagaaaagttatttgctatgttcttcacaaaagagccacaaatcctttcattttcaggctttcttcactttggtaacttgaaaaataatctattaccttgagttgctttattttagcttgaacatcacactcagaaaaatgttcaatattagtgagctgcagatccatctctgtgagccagaccagaatgctgtcccgcgcagtctcaaactcctcacgctggccaataaaatgctggaaggcaagaggaaagtagtaacaattatttttatt

SEQ ID NO: 953309 - DNA, 606 bp, Homo sapiens
ctttttatagatgtatttttgttttttacaaaccaaatagcagaggttgattattagtacagtagtttggggttttttctcatcatyaaccacttagttactataaatgtgttttaactcacggggaaaaagtccagcataccgtaaaacctgagtcccacccagccagctcggaatggaaggcttccaaggcccgggaggcgcgctctgtcaagttgctgattcgggagatagcagtgaatcggggttccaccacgcccccagaatactattcacagcagctttgtcattgaccgttctcccttttggacgagatctgaaacaaagcttccaatcacttccgatcctaatagcgttacctctcttaggtagggtgtaaggattcttagtcaaatttcaactcaagtaggttacctaggaacattcttagggcttaacctacttagttcttcttgcggtttcagttgaaagtgatagactcttccaggctctttgtgttccacggtccggtggtgaaatcactgctatctctccctccttagagagcccactgcttcccaccaatgagttaagtagtttttcttgcccatttctgcaaatttgtgt

SEQ ID NO: 953310 - DNA, 636 bp, Homo sapiens
tgcactccagcctgggtgacagagagagactccatctcaaaataataataatgaataaataaataaaataaaaaataaaaaggtggaagaaactcagactttcaaaaattaaggatcctatttttacctaagatattggctttactcttcggttcccttgattgacttagccaataattttttttctacctaactacacaagaaaaatgaaatgaaggtgtagaactcaagaatccctgtgcatttctaaaagccaaattttacaaccactgcaatattaccatttactaacattttctttctgtctcagccaaaggtaaggggcctctaactgggacaggcatggtggctcacgtctgtaatcccagcaattcgggaggcctaggtgggtagatcacttgaggtcaggagttcaagatgagcctggcccatatgttgaaaccgtgtctcaactaaaaatacaaaaattagctgggtatggtggtgggcacctgtaatcccagctcctcgggaggctgaggcaggggaatttcttkaacacaggaggcagaggttgcagtaagcctagatcttgcccctctactccagcctgggtgacagagaaagactccgtctcaaaaaaaaaaaaaaaaaaga

SEQ ID NO: 953311 - DNA, 665 bp, Homo sapiens
tttcatgatgaaactaatttcgctatgttctccagtttaggatgacaggaagagctttaccacaggtatcttataagaaatatgtgcactctaatkgcatattgtatggtgatttcctcaacaaattatagcaaacaaactaatttctctttaagcaaccactggatcttaataagtcctgggatggaagctgtgccattaaggtttgttcaagcagctactttaatacgtgaccactgccaatttaccttgtataggttcataacaaagcagttccaaaattgtatgcctgtcatgtagtatatctttagctgaagattttaagatttcaccaaggttaattaacccttgaaagtaaatactcagatattaaaaataaatctaaagcatcatgaggtcattgataccatgtaagcttagagatgccagaaatgttggtggattagatcagttttctaatctgaactcccaaaatatgaggcaaaactaaaggtgaatggagaattgggctaatccagagggtaaacatgcacacatgtgagtgcaagtgtgtgcttgcatgagatatgtaccctctgcggccctgagaaagtagcagcagagatagacttctcagggacacctgggcactgcccctgcctttacacatttgtcaggtatattgg

SEQ ID NO: 953312 - DNA, 591 bp, Homo sapiens
gcatgtaactgtgagtgtgcaagggaatgtggtggggagaattggagcacagtaccctccaggctttgagttgggggcaaggactacactcgataaagaccagcccactcatggacataaacctagtgtctgattatctgtacacttatggatgcattaaagtaacctgctagtgtccttagcttactgcaaagagcaaatgtaattcttctctagagaatgttaacatttccagggcttcagattactctcagtttttcatgtataatgcctagtactcaatttcaaaatacatgtaaataaatacatgatgagatatgatgaagaaattattgaaaaaaatgaggatgatgtggtttggcactgtgtggcccaaatatcatctttaattgtaatctccaagtgttgaaggagggacttggtgggaggtaattggatcatggaggtggtttcctccatgctatcccgtgatagtgagggagttgtcatgagatctgatggtttyaaaagtggcagttttgtcagtgcaatggatcacacctgtaatcccggcacttagggaggctgaggtgggtggatcacttcagatca

SEQ ID NO: 953313 - DNA, 574 bp, Homo sapiens
ctagaagcaaggagccagcaagtctagcaggtatggaagccccacctcagcttctctcccaacactcagcttttctcccaacatgccccccttctcttttttgtaaaaaccaccacagctatcattattattagcataaggtggcctctttttaaaaattaattgagcaaggcagttgcaggctgtgcagcccttaattgccagttggtgatccagcttcatttttcttagtccttattccaaatggagttgctctggtttgaatgcttcctacatatctcccctttccctttcacaagaggacccttaatcctaggggttgcagaaggatgaaggtccatcttctgcaacttcttcatgctaaataggggtgatgatactcctgcctacctattggggtctcttgtattcagggtagagagcagttcagtcagaaagcattggtccattaagcatctataggtaaaactttggtgctccagcagtttctcagcgtggctcatactggggaacctcatccatggttgggatccaygagtccttctagtctcctgttccatggttgtacacatct

SEQ ID NO: 953314 - DNA, 493 bp, Homo sapiens
ggtcagtccaagtgaaagcaaagagaggctgggattaagggtgcaaaggaatagtaaagaaagcatgtttgagatctagaacagaataataggttgtagaggcaggtattgaggataggagagtatatgggtttggcaccacggggtggataggcaaaacaatttggttgataaggcgcagatcctgaactaacttgtaaggcttgtctggttttaggacaggtaaaatgggggaattgtaaggagagtttataggctttaaaaggccatgctgtagcaggcgagtgataacaggctttaatctttttaaagcgtgctgtggggtggaatattggtgttgagtggggtaagggtgattaggttttaatgaaatggtaagggrtgcatgattggtcaccaaggagggagtagaggtatcttatacttgtgggttaaggttgggggatacaagaggaggatgcaaaggaggctttggattgggaagaagggcggc

SEQ ID NO: 953315 - DNA, 572 bp, Homo sapiens
gattttcttccactccgtggattgtctgtttactctgctgattatttcttatactctgcttttcattttaattaagtccgatctatttatctttgttgttgttgttgcacttgctwttgggttcttggtcatgaactctttggttaagccaatgtctagaagagtttttctgatattatcttctagaatttgtatggtttcaggtcttagatttaagtctttgatccatctcgagttgatttttgtaaaaggtgagagatgaggattcagtttcattcttctacatgtggcttgcaaattatctaagcaccatttgttgaatagggtcttcctaggattgtttttctagttctgtgaagaacgatgatggtattttgatggaaattgcattaaaattatagattgctttttggcagtatggtcattttcacaatattgattctacccatccatgagcatgggatgtgtttttatttgtttgggttgtctatgatttctgtcagcagtgttttgtagatttccgtgtagagctcttttaactttttggtgaggtatatttcctaagtatttta

SEQ ID NO: 953316 - DNA, 614 bp, Homo sapiens
ctgttgcattttggcctgcctttgttttcaccaagtgtgagtgcagcacaatgccacagaaatgagggcataagaaaaacatcagatttattattcatagcaacagctccaagtccagacagctccaaagtaaatctgagcaaggacttgctgtgactttgtgaccaaatacttaatgttctcatatcattagtgcgctctggcactttatcaaatctgtaatattgactaactaccagtaattgctgatttatgggcaaagttttctcagtcttgttttcttcaggactctaacagaccttcatcttctgaaaacacgttgaatcagtaagttcacgttctctttgagctttgctgtttttatatctaaaaagatgatgtcttgctcttttacctgttgctgtcaacactttacttgccttaagttatcggtttgaaaaaaacagccacacgtctgcgcattcacagaaggcaattaatgagaatatggcatgtggggaataaattttattkttctataattttcaaaagctctttacttaagtgcaataaaataatgatacaactaagaatgatttctaaagagcatctagtccttggtgacaaataggttt

SEQ ID NO: 953317 - DNA, 740 bp, Homo sapiens
ctgggtcaaagtgcgagattgttctggctcaacttggtcaaactggggagctgcaccattccttgaatccccttccccaggttagacttggctaacagagawctatgtgaaatttggaaggcagggctaaagtggtgaccattactctcagaaatccattgtgaccatgtctggtgagagatgcagagctgcccgggcctcccaggtatgctagctttcattcccttcttccaaactgctggcccgctgaccaatagcagttcaaagcccagcaccagagtggggacccacagaggtggatgtgactgaggcacagcttctctgacccctctccacaagcccccatttgtggtctcaaggggaggctgcccgcccttggtttcttagatttccctgcaagctcagattttctaccgtgccagtgaatgaggaggtctagttggtgactcttcttagatcctccaactttgccttccaagtcttcacttctttagcttcttccacatttatgtgaggtttaattctagtgaaatctcttatccctaaaacatggtgttttcctgattgaaccttgattgatacaccagccaaccctcccagatagtccttgagcctgctaagggaagggccatgcccttctttgaactttttcatgatgtccaggacaatgccagttacaagtaggttgtcaatgattttcgttgatggctagatggaaaaaaaaaagtcccctacaaatt

SEQ ID NO: 953318 - DNA, 579 bp, Homo sapiens
aaactccagagatctggagggtccccctgaagaatttggctgagtccttgaaagcatacacaggtgagtcagttgtcagacgctgagaaaccactggaaaggaggggggttcacacagggtcagggatggtttgtttttccaacagcctgagaagaaaagccttgtaattcatggggcattgggaagacacagaagagctttgactgagtgatgaggggaaattagccctagactaaaggctgctgtggtctccctttaaaaagcttaaaagcaagcctcaaaatgattaaacgatttcagagtaatttagctgccttccaaaatgaagctcaaaagtatctatgggaatttaattatacctagcattcaacaaggcaaaatttacagtgttatccgtaaaaatgagcaggcctgcaaagaagcagcgaagagcaactcataatgggagaaaagtcaatcartagaaagaaatctggaagtgaggcagatgagactcttcaattagtagacagggacattaaaatagtttttataactgtattccttatatttaaggtgatagaagaaaaatatatttt

SEQ ID NO: 953319 - DNA, 645 bp, Homo sapiens
tgactgagcatggctatgtgccaagaaaaccatttcggacatagaaatttgcgtttcatgtaattttcacatcatggaatattattcttttgactttttccctaaccatttagaaacaaacaccattcttagctcacaggcttcactacatgctggtggcggaatgtggcctatgggcgatagtctggtaacccctggttgaagcttttgacaaagtgagagtatcattatcatttaaagtttcattaatttgtagcaaaataaaaatatcatttggagattcaatggcatagaattatttttattttcaacttctactggtgagttttatagctaacctaaaaagaaaaatttgtttaaatcagaattgtcacaatttaaaacaagcttaaaagtgacttattctaggttaatgaactgtttctggtgagaagaaaaggatcaaagcagtgtgggctcagatgcaatgagcatgttctacctcattcttctctcatcaaagtcctgaatatgaatwtggcaacaagaaagagaaaaaaaaaatctaaaaaataacatgagcttatccgaggctgggcagggcggtgagtgtgtgtgtcctgacctgaggccataatcaacaggactaggggaagatcaaggccc

SEQ ID NO: 953320 - DNA, 501 bp, Homo sapiens
ttcctaccaatgggctccatgtaggtgtgtctgttagtctgtttttgttgctgtaacaaaataccttagactgggtcatttataaagaatagaaatttatttctcacagctttgtaggctagaaagtgcaagatcagagccctggtaggtttggtatctagtgaaggcttctccccgcttccaagatggtgccttgttgctgggtcctcacatggcagaagggcaaaaaggaggcctagctagttctcttgagcccttttatagaggcactaatcctattcatgagggccctgccctcatgaactaatcacctcctaaaagccccacctcttaatactgtgagaggaaaataaaaacttgggatcccaattcgctctgccacaaggraaagttaagccgaaagctgagtcatgcaagaagctccctttccttttgctcctgagcagatacctaccgataaaagttaagtatttccacaggtagctactttatattcccctt

SEQ ID NO: 953321 - DNA, 599 bp, Homo sapiens
cagctcagctgactcccacccccatgacacacgtctaaaaagttgtgctgtgagtttctgaaatacattttaaaatagaattcatttaattatgaaaatgcaaacataaaatgaatttgtatctrggttttagtcaagtaaaattagagttaaatcaattaataaatggctaacatgttctacaatatgaaaaccatacccagttgcctcttcttctaattcatcatttttctttcttattcgattcacattatatttcagtgatgatattaactcaaaaagttttcttaattcttcattttcttttttaggcttaaaaaaagtgtttaaaattatttttgtaaaatctggaaaccctcatctcaaaaatattatttctcataagtggattagtaatacgtatttatgcaggtgtataaagtgcattttataaacctgacgccaataaggtcagatttcaataatagtcacttttcttaaaactgctaaaaatgattcaaattttcatcattatcttttctgaaatttaaactgccaacaatgtttgttacaaatgagggtttttacacacaaaatactaagggttagtttaaaaaaaa

SEQ ID NO: 953322 - DNA, 297 bp, Homo sapiens
cagctctagatctgcaagaagttgtgttccagctcttaaatcattagtaggaccagattttactcaaaaaactattctagcatttgaaattatttccactgctttgttgcttacactgaaatcatccctcaaaaaatataagaaatagaatatgaaccctgcttattctttaggacaaaatttaggatggtgtatctaataaatggattgtaattatgaagatggttttacatttgtccctagattcttctgttttyctcaggcctctatgaatctttctctctgagagatcccgac

SEQ ID NO: 953323 - DNA, 645 bp, Homo sapiens
atcaagggattcactggcctctccatccgccccgacttccagaagggcctgaaggacgggattattttatgcacactcgtgaacaaactgcagccgggctcagtccccaagatcaacggcttccgtgtagaactggcactagctagaaaacctctccaacttcctcaaggcaatggtcagctacggcatgatcccgtggacctatttgaggccaacgacctgtttgagagtgggaacaatatgcaggtgcgggtgtctcttcttgccctggcagggaaggccaagactaaggggctgcggagcggggtggacatccgtgacaagtactcaaagaagcagaacttcgacgacaccaccatgaaggccagccagtgcgtcatccggctgcagattaccaacaaatgtgccagccagtcaggcatgaccgcatatggcacgaggaggcatctctacgaccccaagaaccgcatcctgccccccatggacaattcgaccatcagcctccagatgggtacaaacaagtacgccagccaggtgggcatgacggctcccgggacccagcggcacatctatgacaccaakttgggaatcgacaagtgtgagaactcctccatgtccctgaagatgggctacacgcaggttgcc

SEQ ID NO: 953324 - DNA, 552 bp, Homo sapiens
tgaactgagctcaagttcaagytctgtgactcactggctctgtaattctgggtaagtctcttgctctccttgagtctcatatcctccttggtaaaatggagaggtagagctattgttagattttgaaggcaaggcaagggttaaagaaagacagagaaagacagttgacggcttcaacagcaacacctttattactagcaaaaccctgcagaggaggaaaccagcttactgccagcaccaactgcctctcacaggctggggtgatcatgggactgggaaggaggggtgtgggcggtagagcttgctgcccggcaggatatggcaaggatgttcctgcagtcaggctgttgggcctttgcccgggagggtgcgataaggatgtttctacagtcaggtgatcaggaaggatgcttctcacggcccgagttcccaaggaatgtttcattctgaccagggtgtgcaaaatggctgcaggtttacaaaatggtacaggttagactaacagcaacatctcccaggtagacagttctataaagtaaacttcccttgagc

SEQ ID NO: 953325 - DNA, 607 bp, Homo sapiens
acactgaggtttttccttacatactcttgagtctagacaaaggctcccaagcctgtgcacctgctggcttaacactatgtrgaagccaccaaggcttgcagcttgcaccctctgaagcagtgaaccaagctgtacctgtgcatctttcagccatggctggagctggagctggagctgcagggatgcaggcggcactgtcctgaggatggacacagcagcgcgaccatgggactgacccaggaaaccattctttggtcctagaactcagggcctttgacagcaagctctgctgcaaaggtctctgaaatgccttcaaggcctttttaacattgtcttagctattagcactgggctccattttatgcacatttctgaagccttcttgaattttcccactaaaaatcagcttttctttttgacctcttgggcaggctgcaaatcaaacttcaaagctctgcttctcatttaaatataagtttcaacttgaggtcatttatttggtcacacagaacaccacaggctgttcaatacagacaagatacctcttgagctttgctgcctagaagttcatttcaccagatataccctaaatcatcaccctcaagtt

SEQ ID NO: 953326 - DNA, 607 bp, Homo sapiens
acactgaggtttttccttacatactcttgagtctagacaaaggctcccaagcctgtgcacctgctggcttaacactatgtggaagccaccaaggcttgcagcttgcaccctctgaagcagtgamccaagctgtacctgtgcatctttcagccatggctggagctggagctggagctgcagggatgcaggcggcactgtcctgaggatggacacagcagcgcgaccatgggactgacccaggaaaccattctttggtcctagaactcagggcctttgacagcaagctctgctgcaaaggtctctgaaatgccttcaaggcctttttaacattgtcttagctattagcactgggctccattttatgcacatttctgaagccttcttgaattttcccactaaaaatcagcttttctttttgacctcttgggcaggctgcaaatcaaacttcaaagctctgcttctcatttaaatataagtttcaacttgaggtcatttatttggtcacacagaacaccacaggctgttcaatacagacaagatacctcttgagctttgctgcctagaagttcatttcaccagatataccctaaatcatcaccctcaagtt

SEQ ID NO: 953327 - DNA, 588 bp, Homo sapiens
tcacaatgctgatagtgatatggacaatgaagtgcaggctgaggtggtctcaggyggagatgaggaacttgttggaaactggagtaaaggtcactcttcttgtgctgtagcaaagagactggtgacgttttgtccatgtcctctatagatagagatctgtggaattttgaacttgagagagatgacttatagtatctggtggaagaaatttctaagcagtaaagcattctaagaggtgacttgggtgctcttaaaagcattcagttttatgcattcacaaagatatggtttggaattgtttaaaagggaagcagagcataacagtttggaacatttgcagcctgaggatgagacagaaaagaaaaacccatttctgaagagaaattcaagtcaactgcacaaatttgcataagtaatgagccaaatgttaatcaccatgacaatgggaaaatgtctgcaaggatgtcagaggtctttatggcagcccctcccatcaaaggcccagaggcctaggaggaaaaaatggtttcatgggccaggtccagggccttgctgctttgtgcagtttcaggacttggtgccctgcat

SEQ ID NO: 953328 - DNA, 738 bp, Homo sapiens
tgtgtgtgtgtgtgtgtgtgtgtgtgtrgccattttctctttctgatattggtaatttatatttttttctttggtagtctggctggaaatataaattttatcgaaattttccaagaaccaagataccatgtaagttatgtatttcacagactatggtttggtttgtccccaccagaactcacgttgaaatttatttatcaatgtggcactattgggaggtagaacttagcaggaggtgtttgagtcctagggtgcatccctcacaaacagattaatgccctcctgtgagaatgagtgagctctgctctcttgggactgaattggttcctgagagagtgggttgttaagaggagtctggattccttggttttgctctctggcttcctctcttgcatggggtcctttgcacacattgactcaccttctgctttctgccagagtggaagcagcgtgagcatctccccagatgccgacgcccaaccttgaactttatagccactggaatcatgaaccaaataaacctcttttctttataaactacccagtcacaggtattctgttataacaacactaaatggatgaatacaccactcctaagaacttaccccaaataaactaaagcgtatgtctaaagacacgtacacaaaggttcgtagcaactttatctgttatagccaaatctagaaagagcccagatttcttcaatacatgaatgtttaagcaaactgaactgtagta

SEQ ID NO: 953329 - DNA, 738 bp, Homo sapiens
tgtgtgtgtgtgtgtgtgtgtgtgtgtagccattttctctttctgatattggtaatttatatttttttctttggtagtctggctggaaatataaattttatcgaaattttccaagaaccaagataccatgtaagttatgtatttcacagactatggtttggtttgtccccaccagaactcacgttgaaatttatttatcaatgtggcactattgggaggtagaacttagcaggaggtgtttgagtcctagggtgcatccctcacaaacagattaatgccctcctgtgagaatgagtgagctctgctctcttgggactgaattggttcctgagagagtgggttgttaagaggagtctggattccttggttttgctctctggcttcctctcttgcatggggtcctttgcacacattgactcaccttctgctttctgccagagtggaagcagcgtgagcatctccccagatgccgacgcccaaccttgaactttatagccactggaatcatgaaccaaataaacctcttttctttataaactacccagtcacaggtattctgttataacaacactaaatggatgaatacaccactcctaagaacttaccccaaataaactaaagcgtatgtctaaagacacrtacacaaaggttcgtagcaactttatctgttatagccaaatctagaaagagcccagatttcttcaatacatgaatgtttaagcaaactgaactgtagta

SEQ ID NO: 953330 - DNA, 738 bp, Homo sapiens
ctaatgatatttcttgcaaggacacaccactcttgtaaagtgtcataaaaccctcttcgttgggtgacatctgctttcttatttagtgagaaactttgttcttcaaagtcatagactatcagaaatgtgatgttgaaatcacatcagtatgcatgaaacatctctctcttggattgcttggttgcttggtttgggcttcagtttttttaaacacacatttattatcccacagtttctgtaggtcagaagtctgggtgggctcccttggctcttctgctaagggtctcataatggtaaaatcagagtattggccaggctgcattcttttctggaggctctggggaagaatgtttccaagatcattcaggttgttgcccaaattcagttccttgcagttgtaggactagggtcccatttccttgctggccgtgtgagcctactggtctctgttcttggaggtttcccataaaaacatccccctcttacctggaagatttcagctattttaacattaaaaaaaaaaaaaaaaaaagcagcccagagttaacaactcatgtgcaaaccttcaaataagaggtttctggctgcaatattttacatctaccttaactttggtatytcaaagtaattaacaggaccttaacaggaccaaccctgggtctactttgtgtccagatataatgttgatccattaaatatggcactgctttgctttgagcccatcagaatactacttta

SEQ ID NO: 953331 - DNA, 481 bp, Homo sapiens
gggatcacttgtttatagccctttgatcactayaaataggctttttcgggaaattaatattccgcattttgtacacaggatcagaaatcatcatacatgctgagtgacaaatttgttctagttaatagtcctctcatggcaatagcataatttaggagcaaagcaattctactggatactgaaaatgtttaatggaatctccaatttctccatgcagacagagaattttgttttctaaatgctttagctcatcacttttccctgagcattcatcatctgggtacaatatcaatcagaagagaagcagaagaatcatttgtactgcataaccacaaaagccaaggacagaatgttctctctaaacagacttaactcaataagggttgctcaggtaatgacttttcatggctctttaaaaattgtatttcaacattgtggtttcaggcaaaatcacacttactcacttgacacaatggtcaga

SEQ ID NO: 953332 - DNA, 481 bp, Homo sapiens
gggatcacttgtttatagccctttgatcactacaaataggctttttygggaaattaatattccgcattttgtacacaggatcagaaatcatcatacatgctgagtgacaaatttgttctagttaatagtcctctcatggcaatagcataatttaggagcaaagcaattctactggatactgaaaatgtttaatggaatctccaatttctccatgcagacagagaattttgttttctaaatgctttagctcatcacttttccctgagcattcatcatctgggtacaatatcaatcagaagagaagcagaagaatcatttgtactgcataaccacaaaagccaaggacagaatgttctctctaaacagacttaactcaataagggttgctcaggtaatgacttttcatggctctttaaaaattgtatttcaacattgtggtttcaggcaaaatcacacttactcacttgacacaatggtcaga

SEQ ID NO: 953333 - DNA, 481 bp, Homo sapiens
gggatcacttgtttatagccctttgatcactacaaataggctttttcgggaaattaatattccgcattttgtacacaggatcagaaatcatcatacatgctgagtgacaaatttgttctagttaatagtmctctcatggcaatagcataatttaggagcaaagcaattctactggatactgaaaatgtttaatggaatctccaatttctccatgcagacagagaattttgttttctaaatgctttagctcatcacttttccctgagcattcatcatctgggtacaatatcaatcagaagagaagcagaagaatcatttgtactgcataaccacaaaagccaaggacagaatgttctctctaaacagacttaactcaataagggttgctcaggtaatgacttttcatggctctttaaaaattgtatttcaacattgtggtttcaggcaaaatcacacttactcacttgacacaatggtcaga

SEQ ID NO: 953334 - DNA, 646 bp, Homo sapiens
ttctccccaaggctgcccttagaagctagawtccctccatagaagctagaatccctcttccctaaaacaggtcctaggaaccagaacttgctttccccaaagccagccatcaaccctgaaaatgcagctctaactttccctctgccttgctatgtaaatactgtttataaaaacagtatgtgacttaactgtttgactgtaggtcataagacccacccctccactccattccagagagggtcttgccccaacccagaatgaaggaatgctgctcagagaggctgagaagaatctagatggacaggccttgctgggcttccccactcggtctgttggcattggaacctaccatttttgtccagtcacatttccacatgactgtccatactgtgttgaacttaagcatgagaatggacaatttcccctgtaactttgggtcttcattctgatggctcctgtgtgtacacattaaatcaatgtgtatgccttttctctaattaatctgactttttcgagttgagttttcagtgaaccttcagagggtgatggggaaagttctccttgacccctgcatttctaagtcagtggacacgtgaatctttggcttacagaaagataagaatcagctaaacatgttctttgaaac

SEQ ID NO: 953335 - DNA, 643 bp, Homo sapiens
tcaaaaggttggtttaggggtaagcttttaaaacctgccatcaatcaaaagcaaacaataacaaaagacttttgggggtataccagaaaagacaacgtgaaggtttattcawactgcataattaaatatgtatttcctaaatacctttgtagtcttatgattcttagaattttaattcctaaaataaacacagaaaggcaatttggaacataatatatacgccatttttttgaaagtgcatacattaattttcaaactcatttatatttattaatttcaaacaatttatcttggaatatttatatttatgcattaatttacacacatgcatctctttgatagacatactattatttaattaacataaaacaaaactacagacttctgcttccaggaagatggaatacacatacttttccctatccctcccactaagtacaatttaaaaccctagacatttcatatattaaacataagatgactcctcaaaggttgaaagaagcaagaaaactagacagggtggtgagttccttgggttttcttcttgcctcatgtagcccagacttgcaactaaaggacccagaaacaccaacaggcactgacaaaaaaaagcccccagtgaaaggctcctctcagccaaaga

SEQ ID NO: 953336 - DNA, 754 bp, Homo sapiens
aaccgagtgttggcagacgcggctgctcagtgcaatgaggaagccggaaaccgagtgttggcggacgcrgctgctcagtggaaccaggaagccggtgctggctctccaggcccacactgcacgccctgacatggctcctcagtggaaactcctcatgtacgtcggctcagggtgctctgggcagaagcggacatcgtgtgggtccttgaaagccctcactcagtcagtcaacaaacactgagcacctgctgcatgtcccacccaggtggagctgagcttctcctaggacaaataggattctgcccctctccctgtcccaaagctgtgtgcaaaggagctgtgtgtccgtccccctacagacagggactgtgtctttgctgccagacaacttgggccctggcacaggcctggtgccaaggcccaagtaggccaaggaagtaggggcgggggagggaggttggcaggcagggcgctcagagatgaggaggcacaccctccccgccatgcaggaggtcctcagctgtgagaatgacaccaggtgactgtcactttaacaaactcccactccgggctctgatgaccctcagctttgttgtcagaattaagtgcaaacactatgactgactccccacccccagtcatcacagcccggtggagtctgtgtgtctgtgtttaatacagaagtccccgaggggctgcattcccttcaggtcctcaggccccagtcagagaaaacggggtctgctggtctcca

SEQ ID NO: 953337 - DNA, 672 bp, Homo sapiens
gaggggaaatgggagtgcacttgggtcacttcatgtttgaggtgcttctcagatacccaagggacatgttaagtaggtctaggctgagcacatcaatctgcaagtcaccagagtacttaacacagtgggactgggtgaagtgcccccaggtgtggggctaaagcaggggagtctgaggacggaccctggacacacccacactgcactgagttcagggagaggggctgaatgagactgagaaggagaggctagtatggcagggggaaatgtggaggatgaggccaggtgaggaagatgtgtcggcttctagggctgctgtcacaaaggtccatggattgaatggcttaaaacaacagaaatttactttctcaccgttctggaggctagaagtctgaaatcagagtgtcccagggccatgctgtctctgaaggcccttcaggagaatgttccatgccactccctagtttctggtggctgctgtcagtcttcgacgtccttgccttgtggctgcatcactcccatctccatctctgtcttcacrtgggcttctccctgtgtgactccaagtatctgtgtctcttctttttcccttacaaggacctcagtcatattggattaagggcccaccctactccagtatgaccacatcttcattacatttgcaaaaaccct

SEQ ID NO: 953338 - DNA, 788 bp, Homo sapiens
tgaggcagaaggattgcttgagtccagatgtttggaagctgcagtgatctatgatcacrccactgcacttcaactacagactgggtgacacagtgagactctgtcccccccaaaaaaatacaaataataaaacaaaaaaacccccaaaggattatctttgagatttaaaatgttatactggattcacaaactatttcagttctttgtgtagtatttaataaaaaccttctcagaaagttagttattagagtgggcttatcaatatcctaaaaggtatggcttgagatacaaatcttcatgataaaactgatgagtggcatttctctggctaggttctttggtttatgttttggtgttttacacatgagacagaatttagttctgtgagggagccttaatttcatcagtgtgatcattgagtatatgcatttattctttcttcatttgttggtttatttgtaatttttagaaatgagggtctcactctgtcacccagtctggattgcattgacatgatcgtaactcaaactcctggcttaagggatcctcctaaaagtaagggatactttttaatatatattatataattacaaacattcctggatgcttcagaaaaagttccttagcctcctgagtagcagaggctacaggcccagctattttgtctttttttaaacctttcaaatggaccttttaagtcaacttataaattaatatagcataattaattctatgtatccataactccagtaattatgaggctctcatcttatttcttctctttcact

SEQ ID NO: 953339 - DNA, 779 bp, Homo sapiens
aatttctcctcagaaaatgggattttctttcctattgcattgttaggctgcaaaatttccaaacttttgtgctctgcttcccttataaaactgaatgtctttaacagtagtcaagytacctcttaactgcttcagtgcttagaaattccttctaccatatgccctaaatcactctctcaagttcaaagttccacagatttctagggtggggcaaaatgcaaccagtctcttttgctaaaacataacaagagtcacctttgctctagttcccaacaagtttctcatctccatctgagaccacctcatcctggaccttattgttcatatcactatcagcattattctcaaagccattcaacaagtctctgggaagttccaaactttagcacattttcctgtcttctgagccctccaaactgtttcaacctctgcttgttacccagttccaaagtcattttcacatttttggatgtcttttcagcagcgccccactctactggcaccaatttactgtattagtctgttttcatgctgctgataaagacatacctgaggccgagcaatttgcaaaaataaaaaataataagaggcttaattggactgacagttccacatggctggggaggcctcacaatcattatggaaggcaaggaggagcaagtcacatcctacatggatggtggcaggcaaagaaagagaacttatgcagagaaactcctgtttttaaaaccatcagctctcgtgagagccattcactattaggagaacagcatgggaaa

SEQ ID NO: 953340 - DNA, 682 bp, Homo sapiens
ctgctcttctcccagcatgtcagttttctgctgccacatgacaaatcaccgcagaattaatggcttaaaacaacaacactttattatctcacagtttcacagttggctgaaagtccaggcccaacctagttgggtcctctgctttgagtctcaaaagctgcaatcaaagtgttagttgcactagagtcctcacctcaggcttggaatcctcttccaagcccattagagcttttggcagaatttgatcccttgcagttgcaggactgaggtcaccattttcctgctaggtgttgaccagggatggcttttatcttctagaggccacctgcatttccttgccatatggtccccaaagcagttcaggacacgagcgctctttttcttccacgccagcaagagtgtgcctctatcactttctctacctcccacctctacgttccttctaaaagcccacctaattagtcaagtccacctgtttgtaattagccagactgattcaatacctttattccctctgtggaaatctcttttcctaatcaacagagtgactaccccatcatatttgaaggttctacgcaccctgaaggggagaaaactgaacaagatgtgcacacctaggggcgatcataytggcatcttggaggctgttttgaacttcagcctcccacgcagttccctccat

SEQ ID NO: 953341 - DNA, 608 bp, Homo sapiens
atcactccagagctgcctcatgtcctagatgtgatttgtttcttagtattagaggaagcaggtgctagagctggaagggacttcaagacattatctcgtctaaccctcccattttgcagatgagagaaactgagttccagagaagtaaatcatcccagctcacagagctggataataagtccccaatgaattgttctttttcgtgtgtaatggtggtgttttttgagaaaacatgaaaggggcccccagaattccccaaagcctgagataaccactggtggttctcaagatgatttaggtgatgttcaacagcatttaacttctctgtcaatcctccttgtgtgggtcaaagaggtaatctccatttggccctgtttttcacacttaacacttggtaatctctctttttaacaaagttcaggctcatatcctctgacagtcagcaaagcagccagagtctaataacatttttttcttttcattgtttttattattgtgcctctatttatgktaaattatactggctttcaatgtatagtactgatacaaagtgtcttctaaaatatctctatttatgtttttaacaattgatctaaactgttaaggaa

SEQ ID NO: 953342 - DNA, 608 bp, Homo sapiens
atcactccagagctgcctcatgtcctagatgtgatttgtttcttagtattagaggaagcaggtgctagagctggaagggacttcaagacattatctcgtctaaccctcccattttgcagatgagagaaactgagttccagagaagtaaatcatcccagctcacagagctggataataagtccccaatgaattgttctttttcgtgtgtaatggtggtgttttttgagaaaacatgaaaggggcccccagaattccccaaagcctgagataaccactggtggttctcaagatgatttaggtgatgttcaacagcatttaacttctctgtcaatcctccttgtgtgggtcaaagaggtaatctccatttggccctgtttttcacacttaacacttggtaatctctctttttaacaaagttcaggctcatatcctctgacagtcagcaaagcagccagagtctaataacatttttttcttttcattgtttttattattgtgcctctatttatggtaaattakactggctttcaatgtatagtactgatacaaagtgtcttctaaaatatctctatttatgtttttaacaattgatctaaactgttaaggaa

SEQ ID NO: 953343 - DNA, 798 bp, Homo sapiens
cctcagctgcacaaagtgctgggattacaggcgtgagccaccgtgcctggccggtttatyttttttttttttgagatagagtctcgctctgtcacccaggctggagtgcagtggcgcagtcttggctcactgcaacctctgcctcccgggttcaagcgattctcctccaagtagctgggactacaggcacgagccaccatgcccggctaactttttgtatttttagtagaggcagggcttcaccgtgttagccaagatggtctcgatctcttatagagaatatttcagcccaggttcccattcagatctgcttatgcaaatgaaggattcaagcttgcttagttctgattggttggtgtttgttgggctctgattggtcaatggacatcacagtttattggttggttcagatggcatatatatcaacatgtggctatgaaagtaccaaagttaagcagaagtgcaggttttctggaaactcagagtaggtgtgtaatgtctagtcagcaaatggccacttggctctaatctgaatttaggcccatttagccactctggattcatcttcagggatgattcatctttaggctttttcagggttcacaagcgtatttaatgtatttttgacttaatattttcaatgtacaatggatttattgggtcataacccaatcataaatcagggaacatctgtatataaaatgagatgccacttatatttgttttaatctgtaaataaaacatataaagtcttttaaaaaagggtctagggttcaggaaagagaataaatgaaaatt

SEQ ID NO: 953344 - DNA, 634 bp, Homo sapiens
agggcttcgtgtaccttaaggtcacttcaggagaatcttctggataagcaccaataacctaaaatggcccttggagtggcaacaagtagttttcgagagcttgttcttcctgccagtgacttgagtcaagttttggcaacatcttccaaaggcttagaaacctctaagaaaagcttcactggcatttgccagctttgcttacaatgcatcaaacaagcacctgggcatcaattcactgtgttttggggagatttatgttcctttcccccactgggtggccattaaatgtgacttcattttggctacaaatttattttcttccatgttctggccctaaatgaattattgactttattaacctattatttaaaacaaacatttacatttgtacaacaaagatatatttctaagacctaggattaaaattcatgctcattgagaataaatgcacatatatattatgctatgacataatgacattacaggaaaaaaaacttgagaaatgacataatttattatttttatttatttttatttttgagatggagtctygctctgtcgcccaggctggagtgcagtggtgagatctcggctcactgcaagctccgcctgccgggttcacgccattctccta

SEQ ID NO: 953345 - DNA, 634 bp, Homo sapiens
agggcttcgtgtaccttaaggtcacttcaggagaatcttctggataagcaccaataacctaaaatggcccttggagtggcaacaagtagttttcgagagcttgttcttcctgccagtgacttgagtcaagttttggcaacatcttccaaaggcttagaaacctctaagaaaagcttcactggcatttgccagctttgcttacaatgcatcaaacaagcacctgggcatcaattcactgtgttttggggagatttatgttcctttcccccactgggtggccattaaatgtgacttcattttggctacaaatttattttcttccatgttctggccctaaatgaattattgactttattaacctattatttaaaacaaacatttacatttgtacaacaaagatatatttctaagacctaggattaaaattcatgctcattgagaataaatgcacatatatattatgctatgacataatgacattacaggaaaaaaaacttgagaaatgacataatttattatttttatttatttttatttttgagatggagtctcgctctgtcgcccargctggagtgcagtggtgagatctcggctcactgcaagctccgcctgccgggttcacgccattctccta

SEQ ID NO: 953346 - DNA, 561 bp, Homo sapiens
cctagagacttggagggctcaggagactggaagatgtgggaaagtttggaacttcctagagacttgttgaatggctttgaccaaaatgctggtagtgatatagacagtgaagtccaggttgagatggtctcagatggagatgaagaacttgttggcaactggagtaaaggtcacctttgttatgctctagcaaagatactggcagcattttgcccctgccctagagttctgtggaactttgaacttgagagagaagatttagggtatagtggtaaagtgttcaagaggaagcagagaataaaagtttgaaaaatttgcaggctgaccatgtgatagaaaagaaaaacccattttctgaagagaaattcaagcaagctgcagaaacttgcataagtaaccaggagctgaatattaatcatcaagacaatggggaaaatgtctccagggcatgtcagagaccttcatggcagcccttcctgtcacaggcctggaggcctagcagaaaaaataatggttttgtgrgccaggcccagggcccccttgctatatacagcctgggga

SEQ ID NO: 953347 - DNA, 561 bp, Homo sapiens
cctagagacttggagggctcaggagactggaagatgtgggaaagtttggaacttcctagagacttgttgaatggctttgaccaaaatgctggtagtgatatagacagtgaagtccaggttgagatggtctcagatggagatgaagaacttgttggcaactggagtaaaggtcacctttgttatgctctagcaaagatactggcagcattttgcccctgccctagagttctgtggaactttgaacttgagagagaagatttagggtatagtggtaaagtgttcaagaggaagcagagaataaaagtttgaaaaatttgcaggctgaccatgtgatagaaaagaaaaacccattttctgaagagaaattcaagcaagctgcagaaacttgcataagtaaccaggagctgaatattaatcatcaagacaatggggaaaatgtctccagggcatgtcagagaccttcatggcagcccttcctgtcacaggcctggaggcctagcagaaaaaataatggttttgtgggccwggcccagggcccccttgctatatacagcctgggga

SEQ ID NO: 953348 - DNA, 626 bp, Homo sapiens
acagggaagagagtcagtagcaaggaaagtctggcaggaactaaaacacatcccatttcactggccagaacacaactatgtggcctttctaattgcagtggggaggctaggaaaggcagcctagctgtgtgytcaaggggaaagtgaaaagatgttaacacatatcaactctgccacgcatggccactaccatgttttgtgtgtgtgtgtgtgtgtgtgtgtgtgtgttttgagacagagtcttgctctgtcacccagactggagttcagtggtgggatcttggctcactgcaacctccacctccaggactcaagcgattcttctgcctcagtctcctgaatagctgggattacaggcgtgcaccaccatgcccagctaagttttgtatttttagtagagatggggtttcaccatgtttcccaggctagtcttgaactcctgacctcaagtgatctgcccaccttggcctcccaaagtgttgggattacaggcgtgagccatggcacctggccgcctctcttattttatcctcctaagaactctgggaggtacatggcaataatttatatcctctgttaatagatgaggcactaggatcatattggtgaagtcatttgcccaaagc

SEQ ID NO: 953349 - DNA, 595 bp, Homo sapiens
ctgcaatgaacatagatgtacatatatctcttcaagatccttttttcaattattttggaaatatatccagaagtgggattgctgggtcatacggtaatggtgtgtttaggtgtttttgagggatcttcactttgtcttccataatggctgcatcattttacattcccaccagcaaggcacaagggttccaatttctccccgttcttgccaacgctcattaatttttgtttttgtttgttttactaacgggtgtcaggtgatatctcattgtcattttgatttgcatttctgtaatgattagtgatgtagggtctcctgtaatacacctgatagcctttttttttttttttttttgagacctagttttgcacttgttgcccatgctggagtgcaatggcgcaatcttggctcactccaacctccgcctcctgggttcaagtgattctcctgcctcagcctcctgagtagctgggattacaggtatgtgccaccatgcctggctaattttgtatttttagtagagacggggtttctccatgttgrtcaggctggtcttgaattcccgacctcaggtgatctgcccgcctttgcctcc

SEQ ID NO: 953350 - DNA, 794 bp, Homo sapiens
ctgttgaagtcatttgttcactttcagtgtgttgtggcgtattgtagtttacatcataaaatatccaccttaaacaattaattttattcaaaagaagaagatgaaaaagaagactgtagtataggttgtagcatgatggagaggatggactctgaagctagactgcctgggcatgagaattctagtccagcctctcagcagctgtgtagccaagttacttaacttctctgtacttcagagatctcagctatttaatgtgaatggcacctagctcttagtgtgactctgtagttataatgtaaaatgcttacgagagttccttgcatataaaaagtacttaatatgtttttcctcgtagtatgataatactccatagtctagctggacatggctcactaagtttctttcccctttctagagggccttctcctcatgttcttcttaacttgccttccttttgttactggttatactttaagaactaactcagccttctcctccttggtgaatccttctgtaagcagttcttctattgccaggcatagatggccataccctcctttgactatatttttataggccacagttgtagccctgtactgaagctgtcagtatgtctgtctctatcagtttaaagttttgagggcataggcacagaagaggagctgaatgaatgaatgtataaatgatgaatatatttatgggatgagatgcacagtgatcttcagtcagttggcaagatcttctgaccggccagttattaraaatgctaagcttgcaaatttatctctatc

SEQ ID NO: 953351 - DNA, 713 bp, Homo sapiens
cccagtcgcctgagtttgtctgtcagtactcctcagcttaattgtgggtaatttattgyggcaataaaatgacccccgcattccttcgagacggagctcagcttcaagttgtgagcttgtgttttctccatcgcgatggccttgttttcttcctctctccctttgcccgcagcctgaagataaacagaaggcggcagctgcctttgcccagctccagggtgccatggagatgctcggcatctcagagagcgagcagcgggctgtttggcgggtcctggcagccatctaccacctgggtgcggcgggggcctgcaaaggtacgtccttcctgccgggctcacctgggagggcagctgtctcctttggcaggtgcctgacaaggcccttctctcggagcggtgggaacagggtcaatctgtcaccttctatgtctctgggacttcccttggggaggctgctgaaactaggcgtcgtgaggaggacacagggctggcttttcaagcaaaccttctagaccagctctgtccacaagaactttctgcaatgatggagattactgcggttcagtgcagtaaccactagccacaggctgctactgaacacttatatatagtagtgcgactgaggaattgaatttttaattgtatttaattctacttaatttaaatttaagtagtcataggtagccagtggctactgtactggcagtacag

SEQ ID NO: 953352 - DNA, 347 bp, Homo sapiens
taccatcttaaccatttttaaagtggcattaagtgcattcacactgctgtgcaaccatcacctccatccatctccagaactctttcatcttgcaaaactgcaactgtrcctgttaagcagtagtaccccgtacccctctccccgcagcccctggcaaccacccttctactttctgtctctgtggattcgacttctgggtactttgtataaatagaatcagatagtatctgtccttctgtgaatagcttatttctcttatttctttttttttttttttttttttttttttgagacagcgtctcactctgttgcccaggctggagtgcagtggtacaatcacacaactc

SEQ ID NO: 953353 - DNA, 605 bp, Homo sapiens
gagatagcacagtatcacagttatgtastccaaaatgttcccttcaatcttgaaatcactgaagcatttccctcttggagttagaaagttaaaagcaaaagcaaaaacaaaaaaaaaaaaccatgttagtaacgccggaaatcagtcatatacgtgggcttgacctggtgatctaacacctagacttttaagctagaactgtaagatgcacaggacttcttcaagaaactctttaggaaaaccctcagtcacaacattggctatatgaggcatgagaaacaatggcattgagggctaaattgctccatttggagatgttgtatgcaaatcaagactcccccaccattactgaccatctctgctccttcctgcagatctcagctattgcttctaaaccgtgaaatagttgtgatgatgagttagaaacagaaaacaaaataaaaattatttacatcgatatcatttgttgtatgaactattacaagaggaacactctcacttcctctagtcttgctttatctccttgccatcagaatgagcttattttctttttttcaacttttattttaggttcaagggtacacatgcaggtttgttatatgggt

SEQ ID NO: 953354 - DNA, 447 bp, Homo sapiens
gaaaatatgcttaccatatttagtcatcagtgtgatgcaaattaaaaccataagataatattatatagccattacaatggcaacatttttaaaaactgttaataccatgtcttggcaagagtatagaacaactggaaatctcatacatatatttccagagggaatgtaaaatggtatacctgctttagaaaacagtttcccagtttttataaatttaaatttacatttaccatataactcaacaattccccttcaaggttttcaaccaagagaaatgaaaatatatgcccatatgaagacctataagcaaacgttcaatacgactttattcaaaatggccaaacaaygcaaatgtatttcgataggtgaattgtgacatattcatacaatgaaatactatgcatcaataaaaaggaatgaactattgaaacacacaaccaccaagtg

SEQ ID NO: 953355 - DNA, 669 bp, Homo sapiens
ccacaaatccacaatcatcaacacaagcctacaaatacacayacacacaatcaagaaaacatgacaccaccaaaggaacacagtgattttcaagtaaccaacccaaagaaattgacattttagattagcttgaaaaagaattcaaaattatcattattttaaagcttggtgaaatataagagaaacggatagacaactaaaccaaaaatcagaaaaacaatacatgaacaaaatgagaagttcaacagagatagaaactgtgatattgtaaaatatatatttggtcttcatctctatctcctggtttaaggtcaatattcatgatgaacatagatgtaagaattctcactgaaatactagaaaacttattttaacagtacattaaaaggttcatataccatgacaaaatgggatttatccctgggatgcaagaatgtttcaacacatgtaaatcaatcaatgtgatacaacacattacaaaataaaagagaaaactcatgatcatctcaagagacacaggaagtatttgacaaaattcactatccattcatgattaaaactctcaacaaaattggtacataaagaacttacctagccacaattaaggccatatatgaaaaccccacagctaacataataatcagtgaagaaccactgaaacctatccct

SEQ ID NO: 953356 - DNA, 634 bp, Homo sapiens
acaaaaatgttttctttctttatatcctttttctataaacttttctatttttaaattttattttwttttttacttttcatacttttttgttagaaactaagacacaaacacatacattagcctaggcctacacaggatcaggatcttcaaatatcactgtcttccacctccacatcttgtcctaccagaaggttttcaggggaaataatattcagggagctgtcatctcctatgataacaatgccttcttctggaaaacctcctgaagaatctgtttgaggctgttttacagtaaaccttttatttttaataattagaaggcgtatactctaaaataacaatacaaagtataatatggtaaatacataaattagtaacatagtcatttatgatcattatcaactgtcatgtactatacataattgtatgtgctagactgttaggcaattggcagtgcagcaggtttgtttataccaacatcactacaaacatgtgaatgatgaataactccttgcactatggtgttatgatggctacaatgtcagtaggtgatatgaatttttcagctccattataatcttatgggaccaacaatctatatgtagtatgtcattgaaaaaatgtcattatatag

SEQ ID NO: 953357 - DNA, 569 bp, Homo sapiens
tcacccttcttcacatggtagccatagttttattaacttttctctgatgtggagtattccattgcatggacacaccacaacatatttatctgttctcctgttgatgtatakttgggttgtttcaagtattttttctttcactactcttaacattgggctgtgaacattctcgtgcatgccacctgctgcattgtgcaaaagtttttttaagatgcagtttgagaagtgcctgttaatatcctttgcccactttttgatggggttgggcatttatgctgccaacaatcatatgaaaaaaagctcatcatcactggtcattagagaaatgcaaattaaaaccacaatgagataccatctcacaccagttagaatggcaattattaaaaaatcaggaatcaacagatgctaggaggtgaggagaaataggaacacttttacactgttgctgggagtgtaaattagttcaaccattgtggaagacagtgtggtgattccttaaggatctagaaccagaaataccatttgacccagcaatcccattactgggtatatactcaaaggattatgaa

SEQ ID NO: 953358 - DNA, 562 bp, Homo sapiens
atagaaagacccctgtatctaaaaataaaaataaattcaatagcgagccatggtgctgtatgcctttagtcccactactagggaggcaaaggcaggaagatcctttgagcctaggagttcatgactcctagctatgactagagctatgactgtgccactgtactccagcttgggtgacagatttaatcccaggtatgcaagcctggttctacatttaaaaatcaatcaatgtggccagaagcagtggctcatgcctgtaatcccaacactttgggaggccaaggcaggcggatcacttgaggtcaggagttcaagaccagcctggccaacatggtaaaaccccatctctactaaaaagatacaaaacttacctgggcatggtggcaggtgcctgtaatcccagctactcaggaggctgaagcaggaaaattgcttgaacctggaagtcggaggttgcggtgagtcaggatcacaccactgcactccagcctgggcaacagagcragactctgtctcaaaaaaaaaaaaaaatcagctaatgtaatctatcacatagaaatga

SEQ ID NO: 953359 - DNA, 671 bp, Homo sapiens
gcataactcattattactgaaggggtaatggctactgttaaaagggaggaaggggtggcagagtagagatgaaatagaaaagtggtcaactcctttagtgaatatttttacgttacrctgacttttgctttctctgggtaatgttataactgaaacttaggtaggaatgctcatattgtgtccggaattggtgggttcttggtctcactaacttcaagaatgaagctgtggacccttgcggtgagcgttacagctcttaaggtggcgcgtctggagtttgttccttctgatattcggatgtgttcagagtttcttccttgtggtgggttcgtggtctcgctggctcaggagtgaagctgcagaccttcgtggtgagcgttacagctcttaaggcggcatgtctggagttgttcactcctcccggtgggctcgttgtctcgctggcttcaggagtgaagctgcagacctttgtggtgagtgttacagctcataaaagcagtgtggacccaaagagtgagcagtagcaagatttattgcaaagagcaaaagaacaaagcttccacagcgtggaaggggaccccagcgggttgccactgctggctcaggcagcctgcttttattctcttatctggtcccacccacatcctgctgattggtagagccgagtggtc

SEQ ID NO: 953360 - DNA, 480 bp, Homo sapiens
cgttgtctcgctggcttcaggagtgaagctgcagacctttgtggtgagtgttacagctcataaaagcagtgtggacccaaagagtgagcagtagcaagatttattgcaaagagcaaaagaacaaagcttccacagcgtggaaggggaccccagcgggttgccactgctggctcaggcagcctgcttttattctcttatctggtcccacccacatcctgctgattggtagagccgagtggtctgttttgacagggtgctgattggtgcgtttacaaaccttgagctagacacagagtgctgattggtgtatttacaatccttgagctagacataaaggttctctaaggccccaccagagcagctagatacagagtgtcaaytggtgcactcacaaaccctgagctagacacagggtgctgattggtgtgtttacaatccctgagctagacataaagactctccacctccccaccagactca

SEQ ID NO: 953361 - DNA, 747 bp, Homo sapiens
ctttctgttgccttttttctttcttctcacatctccaggtttctatctgkgataattttccttctcctatcagaacgtcccagggtattctctttcgggtaggtctgctagtgagaaattctctcatattttgtctaattccatcttcaccttggaaggatattttcactgggtatgaaagtctgggctgctggttttttcccagcacctcaaagatattccatcactgtcctatggcttccatttctaagctgttagtctaatttttgctcttttgaagattcattgcttgtcttagttttcagaagcttggaatttattttcttataatcttttatctcattttgagattgtaaacaaggtttttttttttcttttttgtggacaaatcttctggcatacttgtgtttatatatgtgttattctgctccttatcttctttcctcatataacttcaaatgcttttttttttttttcctgagaccgcatctcaccctgttgcccaggctggagtgcagtgccatgatctcagctcagtgcaacctccgcctcctgagttcaagcaattcttctacctcagccttccacatagctgggactacaggcaccacacccagctaacttttttatttttagtagagacagggtttcaccttgttggccaggctagtcttgaactcctgacctcaggtgatctgcccaactcagcctcccaaagtgccgggattacaggcatgagccacggtg

SEQ ID NO: 953362 - DNA, 719 bp, Homo sapiens
atccttcaaggcgaaattcaaatgtgaccttctctgggaagcttgcccygcctacccatttttgccctacctagtaaaattaattgctaccttctctataatccttatgtcatctctgagtacttgtcacactgtataatagtaactctctggtgaggctaaactctgagggtagggaacctggtctaaccagctttgtcttactctgtagtgccaggtatactctacaatgttcagttgtttttaggatggggagacaaagtgaaactgccagatgctaacatttaaggcatctgacatcttagtttttaatgtttttatttattttaaatacatagcaagggcaacctagagacattctgtagttagctaatgggatgaaccaagacccctggattctactccaggctctgccatgaaatccatcccttctctccaggtctcaatttctctctgcatctgtaaaataaggaggtgccactaccaatctatctcactcctgactcctgcacttgatacaagaatggttgaaattcagatttcacctcacttaagaaaaacataattttttctcaccagaagcctgatctttatcgttaaagtggtgctttattgggtgctgctttaattaagaatgagacaaagacatatctcaaagccaatttaatagcaaagtcttccaagttacctatcaatttcttacattatcctagggaaca

SEQ ID NO: 953363 - DNA, 581 bp, Homo sapiens
tcgtcatcatgattacttatttgtactttgcttatttgatttgctaatattttgttgaggtgaaagggggcatgaytgtcttgttcctgatcttaggggaaatcttcagttttttaccactaagtatgctgttagcagtgagttattcataaatgccctttatcctgttgaggaagttctcttctagtcctaattttctgagatttttgtttgttttttatcttgaaaggtaatggattttgccaaatgttttctctgcatgaactgagatgataatttttttcttcattctattaatgtgatgtattacattgattttcttatattgaactgacatttcattcctgggaaaaatttcagttgggcatattggtcatcctttataatatggtgttgtaatagatttgccagtattttgttgaagaattttgcatttctattcataagacatattattctgtaattttcttttcatgtgatatcttaatctggcttggtatcagggcagtgttggctatatagaataaggtaaatgttcccacctataatacttgttagaagagcttgagaataattaatat

SEQ ID NO: 953364 - DNA, 549 bp, Homo sapiens
agaaagcctgggcaatggtgggcgcccctcccccagcctcgctgccgccttgcagtttgatctcagactgctgtgctagcaatcagcgagattccgtgggcrtaggaccctccaagccaggtgtgggatagaatctcgtggtgcgccgttttttaagcccgtcggaaatgcgcagtattcggatgggagtgacccgattttccaggtgccgtccatcacccctttctttgactcggaaagggaaccccctgaccccttgcgcttcccaagtgaggcaatgcctcgccctgcttcggctcgcgcacggtgcgcacacccactgacctgcgcccattgtctggcactccctagtgagatgaacccggtacctcagatggaaatgcagaaatcacccgtcttctgcgtcgctcacgctgggagctgtagactggagctgttcctattcgtccatcttggctcctccccctcgtattttatcattttaaagaattctattttaaatatatttagttaaactccatttgtcttttaaatttatgtttttacctg

SEQ ID NO: 953365 - DNA, 615 bp, Homo sapiens
tacaatggactttggggacttgggggaaagggtgggaagagggtgagggataaaagactacacagtgggtacagtgtacactgcttgggtgatgggtgcacccaaatctcagaaatcaccactaaagaacttattcatgtaatcaaacaccaccttttccacaaaaatctatttaaataaaaataataataatgtgcttttcataattgttggcagaactggctatttgacttgtgggcccagtgaaaaattaaaacatggaaccccttgctcaaaaactaagaatttcaacacagtggtgctagagcattaaaacaagtgtgcggcccttctaggaatggcgcttagtgtgactgcacaggtcacacagccatgagctggctctaattgttctacactggccatttaggttaattttattaattgtcttgttcaaatccttaacatccttaccacatgttttgctgcttgttttatcagttgttaagagatgctacttccatcataattagattgtctatttcaccatttaattcattagttgtcctgttagagtttattaggtgcaaacaaatttaaaattgttataaayttcttgtgtattcaccattttat

SEQ ID NO: 953366 - DNA, 553 bp, Homo sapiens
cccaggtgctaagcccctcactgcctggggccagcagtgccggccagccgctctgagtgcagcctgctgagcccacccccaccaggagctcgcactggcccgcgattgcggcgctcagcagccccggttccygcccaggcctctccctccacacctcccgacaagcggaaggagctggctccggcctgggctggcccagagaggggtaccccacagcgcagtggcgggctgaaggctcctcgagcatggcaagagtggaggccagagcagacgccaaggccgaggaggcgctgagagcgagcaagggccgccagcacgttgtcacatctcgagggtaccagaaattacttttcattatgagaaactttaaaaattggaaaattaagaatcttatcaatctataagatctgcttctgtcttatgtctatttctatatgtttatatgtgtcgcgtgtgtgatagttcactaccaaaatgtatataagggctctgatcaattggcttaaagaagagtaagcatttagattaaataagactttttcagaaaatcaca

SEQ ID NO: 953367 - DNA, 578 bp, Homo sapiens
tctcccatgggaatatagcatgtatgcacctatagacagccttcttggaataattcaggatgattgaagccccacaggaggagtactctycagattcaggcttgcacaagaggcaaagtcacagttcctccctacttggaacatcaacattcctacagatgaaaagatatgcctgtctgatctgaatagccagaacagtgggacaggagtaaagcacagaggtagatagctttcctgctggcctggcaggagatttgaggtggcttccacccttcaccctgataaatcatcagcacatctaattgagagcttccccagccatcttcatcaaggctgggacctctgcccaccattgagtattacatctacccaactgctttagctacaactggtgccaaactagggatacctccctactggcctgaaacctgaagtatctactcagtaaataaaatactggagaaaaactgaataaataaataaagtgtacaccacaggagaatgagataagcttcaatagatccctgttattccgaccctataggagacagtaaacttgcccacacaccaaatgcaca

SEQ ID NO: 953368 - DNA, 524 bp, Homo sapiens
caggggctacaaagtcagccctcggggtctgcacactggccgtcagccctcggggtctgcacgctcgcagccagccctccgttctgtctcccctgcaggagttcatccgtctgggcagcctcagcaagctctcggggaaggagctccagcagcgcatgttcttcctggtgagtggagagagtggcttgtcctcacaaggactgtgtcacctgggcaagcaaggctcccgaggccggacctcggccacccaagtgagtgatctggggtagaggaggagcagccagaggtgcccaggcccaagttgttgaggacagtgaaggcacagttgaggacagggaatgctggagggaggcctgctgttgaacaccaactcttattttgaccttttaaaatgtatagatgcatactttctactgattttattgaattattactatagttaccataagtgctaatctgttgccarttatgtgttcctatttataaagaataagtaaagatccagttgagctgtataaatgcaa

SEQ ID NO: 953369 - DNA, 509 bp, Homo sapiens
accaggaaatgcggtggcccccagaagygtggagatgccaggaaccgcagggccccaaagagggagtcacagccctggctcggggagctcccaggtctgggttccccaaagggctgcagctcttctctccttctcttcacctgcaatgtggcgagcaaggggcatgtctcagccctgtttgtgtcacagctctcgtagcatcaccgttttggtgggtcccaagttcttgttgtgtgaccaagaagaatgaggtatgcagatgagtgcagggtgaataagatgaagattattgagcaatggaacagctcagcaaagacccatagtgagcagctcctcctcatggccagggtgtcccgatgagtgttcagctcccagcaaagagggtggctcctgtctgcaggcaggtcatcccaacaagtgttcagatatcagcagagagggtagctcctctctgcaactggtcatccatcatctctctgtcctttctctgctctagctgaaactggaac

SEQ ID NO: 953370 - DNA, 509 bp, Homo sapiens
accaggaaatgcggtggcccccagaagtgtggagatgccaggaaccgcagggccccaaagagggagtcacagmcctggctcggggagctcccaggtctgggttccccaaagggctgcagctcttctctccttctcttcacctgcaatgtggcgagcaaggggcatgtctcagccctgtttgtgtcacagctctcgtagcatcaccgttttggtgggtcccaagttcttgttgtgtgaccaagaagaatgaggtatgcagatgagtgcagggtgaataagatgaagattattgagcaatggaacagctcagcaaagacccatagtgagcagctcctcctcatggccagggtgtcccgatgagtgttcagctcccagcaaagagggtggctcctgtctgcaggcaggtcatcccaacaagtgttcagatatcagcagagagggtagctcctctctgcaactggtcatccatcatctctctgtcctttctctgctctagctgaaactggaac

SEQ ID NO: 953371 - DNA, 620 bp, Homo sapiens
agcgagagcctgtctcaataaataaatacataaatagaataaagatggtttgaaagtgatacatattcagtagaaactgtaccttggatacccatacgatcattctggttttcactttcagtacagtgttcaagaagttacatgagacattcaacactttattatgtagtagactttgtgttagatgatttggcctaactgcagtctaatgtaagtgttctgagcacgctggaggtatcctaggccaagctgtactgtttggtaggttaggtgtattaaatgcattttcaacttacaatattttcaatttaccatgggtttattcggacacagccccagtgtaagtcaaggagcatttgtaattggttctaccaggatgaatgggtttgtattttaacaggggtttcccagagacttttagctggagacgaccctaagagggaatgacaggagggctgagggcctggatgagctctcgggagcaggtggaccgttggcggagacgtgagcagttccttcccagcactgagcagcacattttgtwtatactgggaggctttctgacttcacagcgagagtattttgggagaaactgtctctcccacatctggattggggca

SEQ ID NO: 953372 - DNA, 584 bp, Homo sapiens
ggtggctcaagaccagcctggccaatatggtgaaaccctcatctctactaaaaatacaaaaactagccaggtgtggtggcgcttgcctgcaactccagctactagggaggctgaggcaagagaattgcttgaacctgggaggcggaggttacagtgagtggagatcacgccgctgcattccagcctgggtgacagagtgagacgctgtctcaaacaaaacaaaacaaaacaacaacaaccaaaaaatccaggccaggcacagtagctcatgcctgtaatcccagcactttgggaggctgaggtgggtggatcacatgaggtcaggagttcaagaccagcctggccaacatggtgaaaccccgtctctactaaaaatataaaaattagtcaagtgtagtgacatatgtctgtaatcccagctactcgggaggctgaggcatgagaattgcttgaacctgggaggcagaagttgcagcgagctgagatcgcgccattgcactcsagcccgggtgataaagcgagactccatttcaaaaaaaaaaaaaaaaaagccaaaagcaaaaccaaaccaaaacaaaaaacaa

SEQ ID NO: 953373 - DNA, 554 bp, Homo sapiens
aactgctctgcctcttgggccatattattcagcagatccaattgttcttgaaatgtcgctggcagataggaatgctatttggagctttgrcaggacctgataggtgagtcacagctcaggtgcttagtctgtgtctattgcctcatgggaatttcctacaatcaatcgacagaggaggagaaaactcaggtctggtttatatatgcttcttcactgtatgcagaaaacacctgaaagtagacagttgcagcactacagccactttctaggacattcctgaatgacacaggtgaagagaacttctccaaggggttagaaccacagaattgcatctgattgttcacttttctggaaggagaaatggtctgatatgagattacataccgagtcatggtctgtgacctatggttggctggatgatcaggaaattgaaaaaaacatgattgataaattaataacaaaaaattgggggaagaactttctgtataaacacatctaaatgggaaaaatcatggaggcatttgtaccccatatgaatgcttcaaaagaagaca

SEQ ID NO: 953374 - DNA, 600 bp, Homo sapiens
aaaatcatggaggcatttgtaccccatatgaatgcttcaaaagaagacatcatcagatgatgattttaataatttaattgacagaatgatccattgtatggataccagacaatttctttctccagaccctttcatgacccagtgagctcataaaaatgtggttatggtgtgagaaatggaggtgatgcatgaggtcagcaaaatcaacttccacttaccaaggctgacctggctacagccaccactgggtattcaatttgccagtagcaaagaacaacattgagtcttcaatatggcactattccccagggaattagcctgctacctggtggcaagttgattacattagaatgctcccatcatggaaggggcagtgttttgcgtttatttggatagacatttactctggatacaaatttctcttccctacatgcaatacttctgccaaaactaccgtctatgaattttcagactgtctttttcactgatacattgtcttattccacacagcattgcttctaatcaatacacccamttcactgcaaatgaagtgtggcaatgggcccatactcatggaattcactggttttaccatgttcc

SEQ ID NO: 953375 - DNA, 594 bp, Homo sapiens
caagaggtgtattaatagcataaccaacaggacctccagttttcaactaaaggaaaattggaaaatagaaaatatcttcctaacatcataacatttagagtcccttggtgtggaccaaatgcctstctttgaacagtatcatgtactggactcattccataaactcagaaggaaaaagaagtagtacaaatttaacaccaggttaacagtacttcctcctttgctggacaatagactataattaaaatgcacttcttttcaatcttttttttctcagggattattcattttactctttggatgcctctgggatctgaaggtaagagcaatgacagtttcatgtttctagaaaagtctgaagtgcttgtggcatgttgaagttacgatagcttctttttaacaatgcaggtacaggaagctttgctgaataagttttcattgtcgagatggtcttcacagcactcaaaggtaaactttttctctgcagagacttttcattttataacatcatgtattccactagcattctgaagtacagagtactaaattttttctttgggattttgatcaattaggctaaatatattgcatcct

SEQ ID NO: 953376 - DNA, 543 bp, Homo sapiens
gcactgactggcaaggaccttacctcctcctggtgacaggaacctgggtgcttggctcttcctgggtcaaggatgctcacatcctgcccacaccggccactgtggggcttagacatgatgaatatgctcaaagcatgtcagtttccttaataataataggtcctactttttttttttttttttttttttttgagacagagtctcgctctgtcccccaggctggagtgcagtggcgtgatctcggctcactgcaagctccacctcccgggttcacgccattctcctgcctcagcctcccgagtagctgggactacaggcgcccaccatcacgcccggctaattttttttgtatttttagtagagacggggtttcactgtgtaagccaggatggtctcgatctcctgacctcgtgatccacccgtctcagcctcccaaagtgctgggattacaggcgtgagccaacgcgyctggccaataataggtccttctaatcatgggtgcctactgtgtgtctggcacacatgctacctcgcttatgccta

SEQ ID NO: 953377 - DNA, 583 bp, Homo sapiens
tctgcagaatcacacagctaagtagaggcagaagtcttcagtcagyccatttcacctgcatcttattactgcattgacatggataattttctttacctcctttaattttttaaaaaagtttaaaatatttctttgtttggattttatgaattctttttccaatatattccagatagtctgggatattgttattgtgaatgggatgatgttttctcattatactttctagttggttattgatggtgtagaccctggtattcaaagagcagtccatgttgcagcagcgttggtatcacctgggagattgttagaaaggtccaatctctggcctggcatcacgtcagacctcgtgaatcagaatgtctttcagtaagatgttcatatgattcacacggacataaaaattgtaaaagaaatcaatatagagaaacttgatttagagaaccattgtcttaattttctcttgaagaaaaacactttcagttgcactatggggacagcggtccaattgtcccatagtactttctcttctgttcctaacccttactccttcagatctattcctgcaccccttccacaagag

SEQ ID NO: 953378 - DNA, 583 bp, Homo sapiens
tctgcagaatcacacagctaagtagaggcagaagtcttcagtcagcccatttcacctgcatcttattactgcattgacatggataattttctttacctcctttaattttttaaaaaagtttaaaatatttctttgtttggattttatgaattctttttccaatatattccagatagtctgggatattgttattgtgaatgggatgatgttttctcattatactttctagttggttattgatggtgtagaccctggtattcaaagagcagtccatgttgcagcagcgttggtatcacctgggagattgttagaaaggtccaatctctggcctggcatcacgtcagacctcgtgaatcagaatgtctttcagtaagatgttcatatgattcacacggacataaaaattgtaaaagaaatcaatatagagaaacttgatttagagaaccattgtcttaattttctcttgaagaaaaacactttcagttgcactatggggacagcggtccaattgtcccatartactttctcttctgttcctaacccttactccttcagatctattcctgcaccccttccacaagag

SEQ ID NO: 953379 - DNA, 545 bp, Homo sapiens
cgtgatctcagctcactgcaacctcttcctcccaggttcaagcgattttcctccctcagcctcctgagtagctgggattacagcgtgcaccaccctgcctggctaatttttgtatttttagtagaggcggggtttcaccatgttggccatgttggctggtctcaaactcctgacctcaagtgatcctcctgcctcggcctcccaaagtgttgggattacaggtgtgagccactgcacccagccgagatttatatttttaaacctttttctttgtgtctgagaatattttgtgtctgaaaatattttcattttgttggtgctgttcattttaacagaaattgatctctttgcaatgaactattctgataactttgaattttctatgtgatgttttaaatattgggtttgttgacttttcggactttagtgtcatatttgtggtaagaactacattagtatgttctgcaagatagtaatactcattgcatgagkaaagcgttttatggtcaaatatgtttgcggagtgctaggttcaactaagtcac

SEQ ID NO: 953380 - DNA, 518 bp, Homo sapiens
gatactgtttaaatgtaaagtcagattgtgtcatttctctccccaaggtctcccgtgactttttattgaaygcatagtagcagcttaaaggccggatgtgatctgcactctcctgactccaattttttctctctctgcgactcctcttggtccctctccctggcccacttgctccagccatgccagccttcctgctcctccttgtccatgccaatacccttcctgccattgcacctgctgctccctttgcccagaaccctctttccacagataatctgcacagctttctccattaggggcttgatgctacctctgtgaggcttctcttagatgtggcagcctcatcacctcctaccctatcctctttacctgctttatttttctccttagctctcctccctatctaacacagtttatgttttattacttccccccaatggaatgtaaccttcacaaagaaagggattttgtttcacttggcatttgttcactgccatatctcctgtacctagaaaagt

SEQ ID NO: 953381 - DNA, 480 bp, Homo sapiens
tttgctacaatgaaacccccaagtcatcaaggaagataaaagcaaaagatcccatccaaaggacagcaacttcaaagattaaaggaacatcagcccacacaaatgagaaagaaccaatgcaagaactctggtaactcaaagagccagagtgtttcttacctccaaacggttacattgaatctacagcaatggttcttaaccacgctgaaatggctgaaatgagatatagaattcagactatggatacaaatgaaaatcattgagattcagcagaaagttgaaacccaatccaaggaatttaagaaatacaataaaatgatacaggagctgaaagacaaaatggcaattttaagaaagaatgaaactgatcttatagagctgaaaaactgactttaagaatacagtgtctactaaamatacaaaaattagccaggcatggtggtggcaggtgcctttaattccagctacttgggaggctga

SEQ ID NO: 953382 - DNA, 505 bp, Homo sapiens; identical to SEQ ID NO: 952519

SEQ ID NO: 953383 - DNA, 489 bp, Homo sapiens
agtaaagagcctagggtggatccttaaattctgcctccctgtatctctgacaacgactcacacttggatcacccaagcacacagacttaaagcactccagctaaagacaaaatatgtgaagagacragatgccacccaagaaacggagtttgcagttcaagtccatccaatataattgcctactaaaacaaagggacatcattcaccagagaaaagtgacagaataaagaatctccacaaattagtatccacaatgtctcggttacagtccaaaactgtaaccagatacagccgggcacagtgagtggttcatgtctgtaatcccagcattttgggaggctgaggcaggcggacagctagagctcaggagtttcagaccagcctaagctacatagtgagaccctgtctctacgaaacatcaaaaattaaccagatgtggtggcacatgcctgtagtcccagctactcaggaggctgaggtgggaggatt

SEQ ID NO: 953384 - DNA, 570 bp, Homo sapiens
attaagcttagtgaggaaggcatgtcaaaagctaggtatcttgcaccaaatagttagccaagttgtgaatataaatgaaaagttcttgaaggaagttaaagatgatattccaaccaagacacaaataataagaaagtgaaacagacttattgcttatgtggataaaattttagtagtctacatagaagatcaaacccatcataatattttcttaatccaaattctaatccatagcaaggacctaactcctttcaattttatgaaggctgaaagagatgaagctgcagatgaaaagctggaagctagcagagattggttcatgaggtttaaggaaagaagccatctccataacatgaaaaaacaagctgtagcagcaagtgctgatgtagaagctgcaacaagttacccagatctacttaagattattgacacattaaacaacagattgtcactgtagatgaagcagccttatattggaagaagatgccatctaggactttcattgttagagaggagaataccatgcctcrcttcaaaacttcaaagaacaggctgattattgttagggtc

SEQ ID NO: 953385 - DNA, 620 bp, Homo sapiens
ccatttgaaaaccaggcccttgycttctcttcctctatcaacatatcacagggaactccccgtgaggctttcagtgcaggctggtggagagaaggcagggtaccaggagtggaaaccatgggcatttgagccacttcctcatgtaagtttcttgtgccttcaggacctgcttgagcccgatcacatatagaccacttccacttgataatggaatgcggctgtgcatgcccacgttatggctagatgggtcagaaagaacccagttcatataggcagttcaggtcacacgatgacttaatcacacatagtcaaacgttcagtttttactaaagcccagtaacatgccaagagctgtttctgaaaaggagagtagttatctgcagaagatggcagggccttgcatcaaaatcctaaaggcctccactgtgattcaccaatgggcctgccaaaggctccaaacagcattttcatctgccactgacacctcaagcaccattgaatctgccggctcatatggcccaagtggcagagcagcttgcacagcagcctggatctactgcagagccttctcctgttctgaaccccattcaaaactggcagccttttgggtcactcaataa

SEQ ID NO: 953386 - DNA, 620 bp, Homo sapiens
ccatttgaaaaccaggcccttgtcttctcttcctctatcaacatatcacagggaactccccgtgaggctttcagtgyaggctggtggagagaaggcagggtaccaggagtggaaaccatgggcatttgagccacttcctcatgtaagtttcttgtgccttcaggacctgcttgagcccgatcacatatagaccacttccacttgataatggaatgcggctgtgcatgcccacgttatggctagatgggtcagaaagaacccagttcatataggcagttcaggtcacacgatgacttaatcacacatagtcaaacgttcagtttttactaaagcccagtaacatgccaagagctgtttctgaaaaggagagtagttatctgcagaagatggcagggccttgcatcaaaatcctaaaggcctccactgtgattcaccaatgggcctgccaaaggctccaaacagcattttcatctgccactgacacctcaagcaccattgaatctgccggctcatatggcccaagtggcagagcagcttgcacagcagcctggatctactgcagagccttctcctgttctgaaccccattcaaaactggcagccttttgggtcactcaataa

SEQ ID NO: 953387 - DNA, 643 bp, Homo sapiens
acacctagaaaattgggacactcccaccctaatactgcacttttccaatggtctcaggaaatggcataccaggagattatatcctgtgcctggcttggagggtcccacgcacatggagcctcrctcattgctagcacagcaatctgagatctaactgcaaggtggcagcgaggctgggggaggtgttcccgccattgtgaggcttgagtaggtaaacaaagcagccaggaagctcgaactgggtggagcccaccacagctcaaggaggccatgctgcctctgtagactcaacctctgggggcagagtatagctgaacaaaaggcagcagaaacctctgcagacttaaatgtgccctgtctcatggttttgaagagagtagtggttctcccaacatggagtttgagatctgagaacggacagactgcctcctcaagtgggtgcctgacccccaagtagcctaactgggagggacaccccagtaggggcagactgacacctcacacagccaggtacccctctgagatgaagattccagaggaacaatcaggcagcaacatttgctgttcaacaataatcgctgttctacagattctgttgctgatacccaggcaaacagggtcttcagtggacctctagcaacct

SEQ ID NO: 953388 - DNA, 570 bp, Homo sapiens
atccccagccatatcatttctttgctccctttaaagcaaaacccttcaaaacagttaactgtgctgtctttaattttcctcctcttcattctctcttaacccacttcactcaaagcatcattgccaccacttcacctgggctgtctttgactttcatattaattaattaaggtcttcaatgactttcatattaataaatacaatggccatttctcaaccctgatcttacctgacctatgggcagcgtttgacactgttgattatcattttcctccttgatacactttcttccttggttccaagaccccacacccacttcttagtcaccagttgctctttctcaatctcctttactgactcctccccttctcacttatctcttaataatggagcagccctgggctcagatcatttctctcaatctatactcaattcccagtgagtcwtccagtctgtgatcttaaataccaccaatgttctgatgaattccaaattcatatgatcagcccaagcctctctccaagactccagacttacatatccagcttcctacttgtcatcttcacttgt

SEQ ID NO: 953389 - DNA, 592 bp, Homo sapiens
actgaaaatatatttttccagagaaaaagatatggaatcaacctacgtgtctatccacagatgaatggataaacaaaatgtgaggggtatgtgtgtgtgtgtgtgtgtgttgtgtgtgtacacaatggagtattattcagccaccagaagaagaaaatttttaaagagttattgcaaaagattccttactagtcttctagtttctcattacccctacatattggctcgatattctcaacacagtcgccgtagcaattattttaaaatgtaagtcagatcatatttttcctctgttcaaaatctgaactggtgccacatttccccagagtaaaaaccaaagtcttaaaactttctaaaaagtttaatataatttagtcttccctcatctttctgacttcattttctatttctatcccccttactaattccacttggtcttctttctgttagtcaaacataccaggtatattttcactgtagggtctttgctctggcttttccttccttctggaagtctcctccccttccactgcttcatgtccttcaatattamctcgtcaattggtcctaccctaaccaccctattaatact

SEQ ID NO: 953390 - DNA, 560 bp, Homo sapiens
tttttattttctaattaaggttaaaggcatataatataaaatttaccaccttaaccattttaagcatayaattcactagtaggtatatttgcaaccagtctcaagagctttttcatcttgcagaactgaagcttgtattatagccattaaacaataactccctgtcccacatgtcccttgccctggccaccaccattctactttctgtccctatgaatttgactattctagatgtctcacgtaagtggaatcatacagtatttgtttttttttctccattcataaaacttttattccacttacatgaatttaatacacgtgttcttaacaattgtgcttgtattgttcatgaaaatttcgtaagacattaaacaaagctagccatcatctcaagttatttccctgttaactatttttacagtgcatgcatgttaggcaagcatcaaaaaaaaatcacaaaagcaaagaatctaaaaatatgccgggcatggtggctcacacctgtaatcccagcactttgggaggccgaggcaggtggatcacgaggtcaggagatcgag

SEQ ID NO: 953391 - DNA, 620 bp, Homo sapiens
ttgcttaaattttcatgtaagtccaagtacatttgtctgtatctttttcttgtaatatatttgcttttggtatcaagatagtgtaggtcttataattagtttggaactatttttttcttttcaattttctgcaagagtttacatagaattggtatggtttcttacttaaatgtttgttaaaattcatcactgtgctatctatgccaggagttttcattgcaagaattatttttactaaaataatttaatagatatggaactattcagattatctatttcttcttaggtaatttttgttaatttgtctctttcaaataacttgataattttacttatgttgtcagatttcttgtcattaatttgttcataatgttcccttttgtatttcttaatatctgtggaatctgtagttatatctactctctcatttatgataaacagtgatttttttttccaaatcaatctggctaaggtatgttaacttcatggatttttttwaaaaagctagttttttatttcattgtttatcagattttctgttttctcttacatttatttccactgctgtctttattgtttcctttttttgcttattttatttttaatttactcttcttttt

SEQ ID NO: 953392 - DNA, 620 bp, Homo sapiens
ttgcttaaattttcatgtaagtccaagtacatttgtctgtatctttttcttgtaatatatttgcttttggtatcaagatagtgtaggtcttataattagtttggaactatttttttcttttcaattttctgcaagagtttacatagaattggtatggtttcttacttaaatgtttgttaaaattcatcactgtgctatctatgccaggagttttcattgcaagaattatttttactaaaataatttaatagatatggaactattcagattatctatttcttcttaggtaatttttgttaatttgtctctttcaaataacttgataattttacttatgttgtcagatttcttgtcattaatttgttcataatgttcccttttgtatttcttaatatctgtggaatctgtagttatatctactctctcatttatgataaacagtgatttttttttccaaatcaatctggctaaggtatgttaacttcatggatttttttaaaaaagctagttttttatttcattgtttatcagattttctgttttctcttayatttatttccactgctgtctttattgtttcctttttttgcttattttatttttaatttactcttcttttt

SEQ ID NO: 953393 - DNA, 573 bp, Homo sapiens
tctcctttcatcatgggattatgtaacaaagaggaacccttgccagatgtgttcccttagtcttagacttcacagcctctagaattgttagccagtaagtttctatctgatatggtttggatgcttatccccttcaaatctcatgttggaatgtagtccccagtgttggaagtggggcctggtgggagctgattggatcatggggacagacacttacgtatggtttagcagcatccccttggtgatacgtgagttccactcagttagttcatgagatctggtttttaaaagagtctgggacctctcctttctccttctgtcttgctcccactctcatgtgatacaccagcttccccctttgccttctgccatgattgtaagcttcctgaggccctcaccagaagtccagcagatgttgggactgtgcttgtacagccttcagaacagtgaggcaattaaacctctcctttttttaattgcccagcctcaagtatttctttataggaatgcaaaaawtggcctaacacactgttcatgaaaaatcaggtactatggtacagcagcataaaactg

SEQ ID NO: 953394 - DNA, 618 bp, Homo sapiens
actacacaaagctacaatgagattatctattgtagttttgatttgcatttctctgatgatcaattacattgagcaccttttcatatacccatttgcatgtcttgagaaatgtctgttcagatcttttgcccattttaaaagtggattagtagggtttttcccttttgagttgtttgagctccttatatattctggctgttaatcccttgttggatggatggtttatgaatgttttatctcattccgtgggttgtctcctgtttcctttgccatgctagagctttaacttgatgtggtcccatttgtcctattttctttggttgcctgtgcttgtggggtattgctcaataaatctttgccccatccaatatcctagagaatttcccaaatgtttttttttagttttggtttgaggtcttagagtctttaatacgttttgatttggtctttgtatatggcaagagatacaagtctagtttcattcttctgtgtatggatattcagttttcccagcactgtttactgaagagactgtcctttccccaatatgygttcttggcacctttgtcaaattgagttcactgtagatatacggatttgtttctggattctctattc

SEQ ID NO: 953395 - DNA, 774 bp, Homo sapiens
aggatgccaagtccctaaactgcacatggcagagggacactgggcctggcctatgaaaycattttttcctcctaggcctctgggcctgtgatgggagggggctgccacaaaggtctctgacatgccctggagacattttccctattgtcttggtgattaacattgggctccttgttacttatgcaaatttctgcagccagcttgactttctcctcggaaaatgggcatttcttttactgcattgtcagtctgaaaaatttccaatcttttatgctctgtttcccttttaaaactgaatgcctttaacagagcccaagtcacctcctgaatgctttgctgcttagaaatttcttctgccagataccctgtatcatctctctcaagttcaaagttccacaaatctctggagcaggggcaaaatgccgccagtctctttgctaaaacataacaagagtcacctttgctccagttcccaacaagttcctcatctccatctgagaccacctcagcctggattttattgtccatatcattaccaacattttggtcaaagccatgcaacaagtctctagaagattccaaactttcctacattttcctgtcttcttctgatccctccaaactgttctctgctacccagttccaaagtcagttccacattttcaggtattttttcagcaacacgccactctactggtactaatttactgtattagttcattttcatgctgctgataaagacatacccaagactgggaagaaaaagaggtttaa

SEQ ID NO: 953396 - DNA, 585 bp, Homo sapiens
gaaagaatacatgttagaaaaaaataaacatttccctgaagtactctggcaaataaaatgagaagcctatatgttctgatggggctgtaagatcttcagggaaaatgactatatactttttaatctctagtgcctaccacagtgtctggctaacagaagatactaaaaaactgctgaattgggctactgacttagaaacagccatacaaatacatgtgacatggattcatccaagtataattcagttagatctagccccaaaggccaactccattgtccatcattctcccattattgatacttttctgagtttttaaaggttttgatttccttggcatcctctaataaaatgcaaataccccaagccagtattaaatcctagagttgaaagattctatagctatcggttgatgccttagtttgaaagcaaggattttcagaagttgacaaaagagggctgggcatggtggctcacacctataattccaacactttgggaggccaaggcaggaggatcacttgaagccaggagttsagagaccaccgtgggcaacatagcgagaccttgtctttacaaaaaaaaat

SEQ ID NO: 953397 - DNA, 593 bp, Homo sapiens
atgtagaagacgctcattttatttattggaaaaatccagctttttaactccctgctttaattctttaattcttgctcctgacaatctattttcaacaaaaccttcaggatgtatctattaaaatctaggtggcattacctctctgccccatctcactcagggtaaatgctgaagtccttataagagcctataagaaccggtgtaatttacatccccaaggtcccaaatgcatcctcactccactctgacctcacccccttgctttcattccctgatctcaccacattggtctgcctttctactggctggttcttctgcttggaaacctctcctcctactgcatccttgctcaccctctcgtctttgtccagactttgttcaaatttgcccttcgcaagtagccctcctctgatcaccctgcttagagctgcatccctcccctctcggcttgatttccctaygtagcacttacatatcaccatcttatatcctacgtacctttcgtactcactattttgttcactgtctttcttccctctctagaatcaaagttccataaggccagggattccctgctgaatcctagcaccaag

SEQ ID NO: 953398 - DNA, 570 bp, Homo sapiens
caacccaaaggtccatcaactggcgaatagatcaataaattgcagttcgaccatatgttggaatactaggtgcagggaaaagaaacctacgactgatgtccacaatgacatgaattaatttcaaaagcattctgtaaagtgagggaagcagactccaatggctaaataccaggtgattctgtttaatgacaacctggaaaaagccaaactgcaggcacagaaatgaaatcagtggttgccaggggctagggaacggggaggggatccactgcaaaggggcacaggcaactttctggggctagagaaatgttcaatatctttttgttgttgttgtgtctagagatggggtcttgccatgttgccgaggctggtctcgaactcctgggctcaagtgcaggcaggagggcagtggcacgatctcagctcactgcaacatccrcttcctgggctcaagctattctcctgcctcagcctcccgagtagctgggattacaggcgtgagcctctgcacccagccaaatattcaatatcttgattgtggcggtgagtatactggtaactatgtctttc

SEQ ID NO: 953399 - DNA, 643 bp, Homo sapiens
agcctgaaaaactgcttggctgatttgactaataaaggctggtctgctatcggactgtttacaggtggaaaggccaaaccgaggaattatgtctgacagaagggaagaaatgaccgtggtggccttctcagaccctgtgggaaaggcctatacccatccagtgaaagtgtctacctagaccaagaggtattttagtttcctgactcggggcatgttgagtaaagtcaatttgccagtcctgggcgggggcaaatccctgagcttgatgtgtagggaagggagggggcctgaataatccctgagtagtagagaagtagtagaatagcagatggaacactgagaagttatttctttgaggatagatttccacgatggaaaggaaatgagaggttctaagaggcgggctagtggcttgtactatagctgtgcttttgctggtgtgtggcgattaggcctgatggaactgccatcaataaactaagtgtgatcagggtgaggaacaggaaagaaagaaatacggggaaatggggtgaatgtcaggtggatcagagaggtacagtcatggkgatcaggtgtgttatcaggaataacgtgggaggccggattgaagtccgggccaggaacaatggtaattgtgggagac

SEQ ID NO: 953400 - DNA, 643 bp, Homo sapiens
agcctgaaaaactgcttggctgatttgactaataaaggctggtctgctatcggactgtttacaggtggaaaggccaaaccgaggaattatgtctgacagaagggaagaaatgaccgtggtggccttctcagaccctgtgggaaaggcctatacccatccagtgaaagtgtctacctagaccaagaggtattttagtttcctgactcggggcatgttgagtaaagtcaatttgccagtcctgggcgggggcaaatccctgagcttgatgtgtagggaagggagggggcctgaataatccctgagtagtagagaagtagtagaatagcagatggaacactgagaagttatttctttgaggatagatttccacgatggaaaggaaatgagaggttctaagaggcgggctagtggcttgtactatagctgtgcttttgctggtgtgtggcgattaggcctgatggaactgccatcaataaactaagtgtgatcagggtgaggaacaggaaagaaagaaatacggggaaatggggtgaatgtcaggtggatcagagaggtacagtcatggggatcaggtgtgttatcaggaataaygtgggaggccggattgaagtccgggccaggaacaatggtaattgtgggagac

SEQ ID NO: 953401 - DNA, 585 bp, Homo sapiens
ttttcctaacttttatgctctgctttccttatgaaactgaatgcctttaatagtacccaagtcaacccttgaacactttgctgctgagaagtttcatctgccagagaccctaaatcatctttctcaagttcaaakttccacaaatctctagggcaggagcaaaatgctaccagtctctttgctaaaacttaacaagagtcatctttactccagttcccaacaagttcctcatctccatttgagaccacctcagcctggaccctattgttcatattgccatcagcattttgggcaaagtcattcatcaaatctctaggaagttccacactttcccacatttttctgtcttcttctgagccctccaaactgttccaacttctgcctgttacccagttccaaagtcacttccacattttcgggtgtcttttcagcaacacctcactcctggtaccagtttactgtattagtctgttttcatgctgctgataaagacatacccgagactgggaagaaaaatacatttaattggagttatagttccagatggctggggaggcctcagaaccatggcaggaggcaaaaggc

SEQ ID NO: 953402 - DNA, 585 bp, Homo sapiens
ttttcctaacttttatgctctgctttccttatgaaactgaatgcctttaatagtacccaagtcaacccttgaacactttgctgctgagaagtttcatctgccagagaccctaaatcatctttctcaagttcaaagttccacaaatctctagggcaggagcaaaatgctaccagtctctttgctaaaacttaacaagagtcatctttactccagttcccaacaagttcctcatctccatttgagaccacctcagcctggaccctattgttcatattgccatcagcattttgggcaaagtcattcatcaaatctctaggaagttccacactttcccacatttttctgtcttcttctgagccctccaaactgttccaacttctgcctgttacccagttccaaagtcacttccacattttcgggtgtcttttcagcaacacctcactcctggtaccagtttactgtattagtctgttttcatgctgctkataaagacatacccgagactgggaagaaaaatacatttaattggagttatagttccagatggctggggaggcctcagaaccatggcaggaggcaaaaggc

SEQ ID NO: 953403 - DNA, 632 bp, Homo sapiens
tttgtttcctgtggcttctataacaaaattacttcaaactgagtgacttaaaacaatattttcttctctcacagttctggaggccgagtccaaaatcagcagcactgggcccacacccaggggctgtaccccctcccggggctcgaggggagagtggttcctcacctcttctcgctgctggtggctgccgtgttccttgacttgcagccgtatcactctgatctctgcctccgtggtcacactgccttctctgtgtgtctataccaaatttccctctgcctccctctgataaacaagtgattgcatttcaggcccacccagataatcttcccatctcataatccttaatttaaatcacatctgcaaaaaccctctgcgcccccgccccccacttttttgtcatatgaggtaacattcacgggttccaaggactagggcatggatatcttttgggggccatttttcagcccaagctggagtgcagtggtgcaatcttggctcactgcaacctccacctccctggttcaagtgattctcctgcctcagccacctgagtagctgggattacaggtgtctgccacsatgcccggctaatttttatatttttagtagataaggggtttcactatgtt

SEQ ID NO: 953404 - DNA, 586 bp, Homo sapiens
agcgattctcctccctcagcctccggagtagctgggrctacaggtgcatgccaccatgctgagctaagttttgtattttttgtagagacggggtttcaccatgttggccaggatggtctcgatctcttgacctcgtgatctgcccacctcggcctcccaaagtgctgggattacaggtgtgagccactgtgcccagcttaaatttctttattataggttcaggggtacatatgcaggtttgttacatggatatattgtgtgatagcgagatttgggcttcaattgaacttgtcacccaaatagtgaacataggacccaataggtagtttttagacccttgccccctgcctccctccttcatttttaaagtcctcagtgtctgttgttctcatctttgtgtccatgtgtacccaatgccaaaaaatttttgtggaatgaatacgttttaaaaagtgaagtctgaccttgtcagaccacctgagagatgaacctgtgttcctagccttcttctcacaatacgatttctgagcttcctctgctccctttagggctctggtctgcactagcatttgatggctggaatagt

SEQ ID NO: 953405 - DNA, 543 bp, Homo sapiens
ggaagagcaccaagcaggctcttgtggtccctgattccaatccttggctcttagacagcttttctggacctaccctgggtcagaggagagctcgctgctctgaaatatgagtcccaggcctggcarcattcaccacaagatgactgaagagccattgggcattaagtgaacatcagtggtaccctggcagtacccaccgtgggactgtggttgtgatggacatggggagagactcctccttcttctccagaacagggaggaaagagtgggaaggactttgtcttgtggttttggtgccagtttagctgcagtagagtagagcactaggcagatttctaacatttccaactccagcatctttggacctgcccagggcctgggagatctcactaccctgaaggaaaagacacaagatgggctggcttgcccccccgctgattataaagacctagggccttgaacaaacataggcggtagccaggtagtggtcacagcaggccttgagcaagacccagtgctgtgctggcttcaggtctgacacag

SEQ ID NO: 953406 - DNA, 631 bp, Homo sapiens
gttgaaaagactgaaaataccaagggttggtgacaatgtggaaaaactggaactctcgcacattgctagaagaaatataaaatgatacagccactttggaaaacagtttgaaagtttcttataaagttaaacatactcttattatatgacccagcaatctcagtcttaggtattttatccaagagaaatgataacatgtctgtggaaagacttaaatgcaaatattcatattctctccaaactgaaaacaactcaaatatcagtaataaaatgggcaaactgctgatactgtcaacacagatgaatcaaaacaacaacaacactgtgcggagtcaaagaaatcatattgtattagtcagggttctctagagggacagaactaataagagatatacatatgtgtatatatatatatacacacacatatacatatgagtttattaagtattaacttacatgatcacaaggtcccacaataggctgtctgcaagctgaggagmaaggagagccagtccgagtcccaaaactgaagaacttggagtctgatgttagagggcaggaagcatccagcatgggagaaagatgtaggctgggaggctaggccagtctctccttttcacatttttctgcc

SEQ ID NO: 953407 - DNA, 554 bp, Homo sapiens
ttcatcctgatttagccttcctttggtggctcccaaatttgctacttctcttttttgttttgagacggagtctcactcactctgttgcccaggctgaagtccagtggcacaatcttggctcactgaaacctccgcctcccaggttcaagtgattctcctgcctctcagcctctcaagtagctgggattacagatgtgcaccaccatgcctggctacttattttttaatttttctgtatttttagtagagtcggggtttcaccatgttagccaggctggtcttgaactcctgacctcaagtgatccacctgcctcagcctcccaaagtgctgggattacaggcgtgagccaccgtgcccggttcttcagattggctacttcccttctgcttttgctaggactaccttagtctaggccttcaccatcttcttcctgaattgctaaaacagcttgcctgctagtctctttgtctactcttttctgctccaatttgcctgtgccctgctgctgtayactttttcatatttcagcacattttgttaatagaatgatctg

SEQ ID NO: 953408 - DNA, 666 bp, Homo sapiens
tattgtgaaatacatatttggtcatcattccacccttccacccctttcctcacctacagggaatctccaaagtgatgtctttttgtacrctaatgattaactgatagctggcagcccttagataccttctggatggaggctggtcatgaagagggttgcatgattaaaacgttgtgactttgagcttcaacccccaacctctgcagagggacctggcagttaagttcatcaccaatggccaatggtttaatcaatcatgcctatgtaatgaagtctccattaaaggcccaaaagaacaggattcctagagcatcctaatagctgaacatgtggaggttcctggagggtggtgtacccaaggagggcacggaagctctgcacctcttcccccataccttgacctctgcatctcttcatctgtatccattgtcatatcctttttaataaacgtaagtaagattccctgagttctgtgagctgctctaacaaattaatcaaacccaaagaggggactgtatgaacactaacttgaagctggtcagttagaagtttcagaggcctggacttaacgatttttgtctgaagcagggccagtcttgtgggactgagccctcaacctatgggatctgaggctttttccaggtagatagtgtcagaatttaattg

SEQ ID NO: 953409 - DNA, 602 bp, Homo sapiens
attccagaatgcaattccatttacaatagacacacacacacacacacacacacacacacacacacacacacaacaaagtagaaagagaakgaaactttttcaacctacaaaaggtcatctatgaaaaatccacagtggtggggcatggtggctcacacctgcaatcccagcatattaggtggtcaagatctctacaaggggaattacaaaacacagattaaagatactgtagctgacagaaacaaatggaaaaacatcccatgctcattgatcagaagaattaatattattaaaatgaccatgctacccaaagaaatctgcagattcaaagcaggccctatgaaaacaccaacgtcatttttcatagaattgggaaaaacaatcctaaaatttttatgaaaccaaaagagagtatgaataactaaagtaatcctaagcaaaaaaccccaaaaaacagaaaacaaaacaaaactagaggctttttacagtatattatgttacttgacttcaaattatactacgaggctatagtaacgaaaacagcatgccacaggtacaaaaatagacacacagatcaatggaacagaatagaaaacccagaa

SEQ ID NO: 953410 - DNA, 602 bp, Homo sapiens
attccagaatgcaattccatttacaatagacacacacacacacacacacacacacacacacacacacacacaacaaagtagaaagagaatgaaactttttcaacctacaaaaggtcatctatgaaaaatccacagtggtggggcatggtggctcacacctgcaatcccagcatattaggtggtcaagatctctacaaggggaattacaaaacacagattaaagatactgtagctgacagaaacaaatggaaaaacatcccatgctcattgatcagaagaattaatattattaaaatgaccatgctacccaaagaaatctgcagattcaaagcaggccctatgaaaacaccaacgtcatttttcatagaattgggaaaaacaatcctaaaatttttatgaaaccaaaagagagtatgaataactaaagtaatcctaagcaaaaaaccccaaaaaacagaaaacaaaacaaaactagaggctttttacagtayattatgttacttgacttcaaattatactacgaggctatagtaacgaaaacagcatgccacaggtacaaaaatagacacacagatcaatggaacagaatagaaaacccagaa

SEQ ID NO: 953411 - DNA, 589 bp, Homo sapiens
acatttccaaagagcttccacatacattgtttcatttgagatgatacraggtaataccatgaggtggttaagagcaaggtctttggagttaagcaagcttgggttaggctaccaggaatcagctctatgactgaacaagttaaggcttctgaacctaaattttctcattggtagcatgaaagtgataatatccatctcacaggattattatgcaatgataaaaagagataacttactatctcatatagccatatcaaagtgaatatgtaagctatataagaggcacaattgaacctttgatgtgatattattatgaagtaactgatgtctgtaaggaacagcactctactaagtgataggcgaataaggtgagaaaggacttagcttaaactataagttcaagccatgtggtagtctagactaggaccataaaataaattattaaggaccataaaataaatattttaggcttgtgggccacgcagtctctaggacaagaaacaactgctattgtaacaagaaagtagccatagacaatatgtaaatgaacagatgtggctgtgttccaataaaattttatttacaaaaa

SEQ ID NO: 953412 - DNA, 615 bp, Homo sapiens
atattaccacagctgatgctctctggaaagtgccacctcctggcaggaggccaaccagcacaaaaatagaacattaaaccaccaaagctaaaaaccctcacagagtccattttacccattcccccctccccmctcccaccacctccactggaacaggtgctggtatccaggactgagagacctatagacagttcacatcacaggactctgtgcagataaccccagtaccagcccagagccgggtaggcttgctgggtggcaagacccagtaaaaagataacaatcactgcagcttggctcacaggaagccacatccataggaaaaggggagagtactacatcaagggacaccccgtgggacaaaagaatctgaacaacagtcttcagccctagactctccctctgacagagcttacccaaatgagaaggaaccagaaaaccaactctggtaatatgacaaaacaaactcttaaacaactcccaaaaatcatactaactcaccagcaatggatccaaaccaagaagaaatccctcatttacctgaaaaagaattcaggaggttagttattaagctaatcagggaggcaccagagaaaggtgaagcccaatgaaagg

SEQ ID NO: 953413 - DNA, 593 bp, Homo sapiens
ttagctcctccctcgctacccactattggctttcttccctaaaggctaaaaagaaaccagcgctttgcagagactggctccacttctgatatcaaccaaacacctgatggtaccccttctttttgtggttataataaaacaaccaaccagccttccttccttataagacagcactgaccatgaaggatgcatggcaagagtgtttgggtcctcttcttaaacttttgataacagtgggtcaaagactccacccttggataatgctaacactgccagtttttgaacttgggatccgtggagagaggcatgaaactcaactgcgcatgcacgtttctcctttcataaatattcataactcctcctatagcttaatgagtatgtatatttggtcaccccattcagcataaattcttgtcttattcttttcacacttgaagtgactgtgttcagattccggctggccctgtgcttcccagcctgtttgccaccctgcaggctgcaaacccttgatgggaaataaagctttcctttccaaacgtatgaayctcatcattctttagttgacactgtgtaaccttgggaaagttacttaa

SEQ ID NO: 953414 - DNA, 555 bp, Homo sapiens
gtgaaagataagtaatactggtggtgagtacatcgtaagtccaatttcratagtcaattgtaaaagtgataagtttcaaacttaacattaaaattatgtcttatgtctgttactgaatccaagttatcatacaaagaaaaactcaaactgaaagtgccttaattttttgaaagaaatcactatgaaaaaattaaatttgaaaatgcccacttagggattcttatttttttttgtctcagtagagagtgagatcatattaaaaacataaattgtgttttaatttgtataattattaaacacattcaaaataaacatagaaaaacagaaaatacaagtgaaaaagttaaattagtaaaagctaatgatactgatactactattgacaatatttgaatatattctctttctgcttttctattttatacaatattagggtagtactacttaagtagtattataacatttttcctcaaaatacgatattgtagatattttctcaaatcccaaaatattttttgtaacataattttagtttgaatatatcatgccgtaact

SEQ ID NO: 953415 - DNA, 627 bp, Homo sapiens
ttcgatgaacataaacccacaccattgtcatttatttttgtttcattgcacttaccacagtcctgacagttattggggtgattgtgtcttcagaatctgtgtcaccggccacaccgcaagctccacragggaggggcttgaattccctgctgctgtaccttgagtctatccagtgtccagggacttggtaggatgaaagaaatgaacaaaagtttgctgaatggggtccttagcatttttccaccagtttttagctttagttcctttatgtcccattattatgattgttatttcattccgtgaagcccctgagagggagagattcatagtcccattttatagattagaaaatagcggctcagaatttgaggctgtgttgccagtatcatagctatgagtcacatgttgctatttaaattaaaactaattaatattaaattaaattaaaaaattttcagttcctcacctgtattagctacattagtgcttcataggcacatggggctgatggctactgtactggacagcacagcatagaaaatattttcaggctgggcttggtggctcacgcctgtaatcccagcactttgggagaccaaggtgggtggatcacttgaggtcaggagt

SEQ ID NO: 953416 - DNA, 758 bp, Homo sapiens
acaaagcaatgcacactgggcagtgtaacaatagatggttattgtcctgtagttctrgaggctggggctctgagattgagggttcggcagggctggctgtctcctgctctgtcctaggccagtctcctggcttctggtgatctgtgacattgctcggcttgtagaggcatcactctggtttctgcctttatcatcgtgtggtgctctcctaggaggctgtctgtgtccagactccccctttcataaggacacagcagtgtccgatcaggacccacctcataacctcattttttttttccaagacagagtcttgctctgttgcccaggctggagtgggcactaaccactaacctttggagttaatggtgtgatcttggctcactgcaacctccgcctcctgggttcaagcaattctcctgcctcagcctcccgagtagctgggattacaggcaccctccaccacacccggctaatttttgtatttttagtagagacagggttccaccatgttggccaggctggtcttgaactcctgacctcttgatccacccgcctcggcctcccaaagtgctgggattacaggtgtgaaccaccgtgcccggtgacctcatcttaacctgatcatctccaaggaccctattatgtctctgcccatgaacattcatggtctggggggagaatgagacatgacagaggcaggtgcaagatggggcagcgtgtgccctgagaaggggggtgctggggccccagcacaggag

SEQ ID NO: 953417 - DNA, 626 bp, Homo sapiens
gaaccagcccaaatgcccatcaatcaatgagtggataaccaaaatgtggtatatatatatatatatatataatggaatactattcagccataaaaaggaacaaaataatggcattcacagcaacctggatggaattggagatgattattctaagtgaagtaactcaggaatggaaaaccaagcatcatatgttctcactcatatgtaggagctaagctatgaggacactaaggcagaagaacgaaacattggactttgggcactcgggaaagggtgacgggtggtgagggattaaaaaaccacacattgggtacagtgtataccgcttgggtgcaccaaattctcataaatcaccactaaagaacttattcatttaaccaaacaccacctgttccccaaaaacctattgaaataaaaaaataaaaaatcatttttaaatacaaaagatcatcacagacgttatgaacaactatatgctgagaaactggaaaaacctagaggaaatggataaattcctggaaacatacaaamtactacgtttgtacagcctactaaggttgaatcaggaagaaatagaaaaccttaacagacctataacaagtagcaagattgaaccagtaatacaa

SEQ ID NO: 953418 - DNA, 612 bp, Homo sapiens
ttttcttgtggtgagaatatttaaaacccattcttttagctattttgaaatgtacaatacattattattaactatagtcatgacattgtgcaatataacatattgacaaactgactctaaaatttatagaaaaaagcaaagttactagaatagccaagacaattttgaaagacaaatttggagaacatacattactcaatttcaagaattactataaagttccaacaatcaagagagtgcaacactgctgaaattatagatatattgatcaacgaacagaatagagtgcccagaagtagacatgcacaaatgtagtcaactaatttttgacagagacatgaaggtaattcaatagagaaaggatagtcttttcaataaatggtactgaaacagttacaagtcaatatgtaaaataatgaataaataaggctggatatgaactttacaccttaaaaaattaactgaaagtagactatacaactaattgtaaatagcacaattgtaaaatttctagaaaaaaatacaagaaatgcaatgctatcttgggcttgatgatgcatttatatacaacacygaaagcatgaaccatttttttaaaatgttaagttgaac

SEQ ID NO: 953419 - DNA, 551 bp, Homo sapiens
aatagcagccaacactcacagtggcaggcagggcacccagaacattcacttcacttggcatcagtattttgagggacacccccaccaccgcccacctttgttggttcttgagcaggggaaataggactatgaaataaagggaggcgattctagccaatgcatacaggtcttcctaccactgagatgctcaaaggtctagagcaaggagttggggggggctcccgtggagacagagagggcatagcctcaagactcattgcttggtcgtaaccctagagccttggatacagaccctaagctgtccaaaagggatctcaagcctgcctgtggacaccctggagggacccccaatcctcccatacctatgggccaggcatgacccagggccaggtctgtaaatgtctacacttttcactggaaggagctaaccctgagcacagtggacatccctgtgcaaagatcaggayggaagcaaggctgtccccagccagaacaaacacctgctcccccagcgtccccttgcctattttcccaccctccttctcacgctg

SEQ ID NO: 953420 - DNA, 801 bp, Homo sapiens
tgcagaaaaatactcttcgctgccctatttataacaatgaaaacaaaaacagccgtaacacccaggaacagggagccagctaagtcaatgatgacacrtatcatggaccagtaggcagttgtaaaatctcgtggaaaattatttactgacacaggtaggagacagttcacaacagaagcaagcaaaaaccagtgtggacacggtgaggccagcttttgtttttggaaacaaagctttttaaaataagctggatccatcaccatagtgttttcagaaaaataaataaataaataaataacattttaaaaagctggaataagccaggtgtggtggctcacgcctgtaatcccagcactttgggaggccgacacggacggatcacgaggtcaggagatcgagaccatcctggccaacagagtgaaaccccgtctctactaaaaatataaaaaattagctgagagtggtggcacgcgcctgtaatcccagctactctggaggctgaggcaggagaattgcttgaacctgggagctggaggttgcagtgagctgagatggcgccactgtactccagcctggagacagcaagactccgtctcaaaaagaaaaaaaaaagctgaaataacacacatcagaatattaaccatggttattttgggatagtatgactgtgggtacttttaaatttcttcatattttctctgtcttccaaattttctcatgtctattaagacatgagtggattttgcaatgaggggagagagctatttttaagtgttggtttgttccatttactctcttggg

SEQ ID NO: 953421 - DNA, 617 bp, Homo sapiens
atggtgaaaccctgtctctactaaaaatacaaaacctagctgggcgtagtggcgggcgcctgtaatcccagctactcgggaggctgaggcaggagaatcacttgaaccctggaggcagaggtggtagtgagccgagatggagccactgcactccagcccaggtgacagagtgagactctgtctcaaaaaaaaaaaaaaaaaaaaaaaaagctgggcccagtggctcatgcctgtaatcccagcactttgggaggccgaggcggacggatcatctgaggtcaggaagttgagaccagcctgaccaacatggagaaagcccgtctctactaaaaatacaaaattaggcgtagtggcgcatgcctgtaatcccagctactcgggaggctgaggcaggagaatcgcttgaacccgggaggtggaggttgcagtgagccgaaactgcgccattgccctccagcctgggcaacaagagcaaaactctgtctcaaaaaaaaaaaaaaatacagaaattagccrggtgtggtggcacacccctgtaatcccagctactcgggagactgaggcaggagaatcacttgaacctgggaggcagaggttgcagtgagctgagatcgtgc

SEQ ID NO: 953422 - DNA, 494 bp, Homo sapiens
gtaggaagcatcagaagaaaagattgatgagacttcgtagcaaatgctgacaatggcagccagttttcttttgttttttttgttgttgttgttgttttgaaacagggtcagccgggcrcggtggctcacgcctgtaatcccagcactttgggaggccgaggcgggcggatcacgaggtcaggagatcgagaccatcccggctaaaacggtgaaaccccgtctctactaaaaatacaaaaaattagccaggcgtagtggcgggcgcctgtagtcccagctacttgggaggctgaggcaggagaatggcgtgaacccgggaggcggagcttgcagtgagccgagatcccgccactgcactccagtctgggcgacagagcgagactccgtctcaaaaaaaaaaagaaacagggtcttgctctgacacccaggctggagtgcagtggtgcaatcatggctcactgtagcctcgcatctgctaggctcccaccttagcc

SEQ ID NO: 953423 - DNA, 592 bp, Homo sapiens
aagaagacacaaaggatgagtaggagttagttctgtgaagattcatgcaactggaaaccgtgatgaggaagactcagaggtggaacagagctttcataagaagtgaaagaagggcagcgtggagcattacagagaagaggtaaaacggggcccaactacaaaggggtttgttaggaattttttttattttgtactaagtgcagtggggagccgtcaaagtgttttaagcaggaaagtgacatgatacaattcatgttttagaaaggtcattctggctgctgagtggagaagagacttgaagggtgacagagaaacaaagaggccctttaggatccacatgagaggagcaaagtgatgtggccgcgtgatggcggcagaggagagaagtgaaaggactggatatctgttttggagatgacgtggcttaaattgctgaaggactggatactggggaggggaagtgagggtttgaaaagagctgcttcgkttcaggggtagcaactgaagagatgcagatgccactgaatgagatggggagcacgcgggaggagaaagttgggcggctaggggagaccaagttctgttaccacta

SEQ ID NO: 953424 - DNA, 624 bp, Homo sapiens
gggccatagaagttagtattgctttgtagaatcagataaataggcactagagggaaataacatacttcttcctcagactagcaggactgcattattaaagtacagtagacttcagaaataatgtaagtggcaacgtacatcaagcaaaaactcaacataacattaaatagaaaggatgccaagagaacccaggtagaacctgaggaataatcaaagataaactatctacattgcctaatgcaaaaccatagatctgaatggaactgttgttatttcaaaattagtgaaacagaaataaacaacactctggggcctttgaaaatacttcatggtcaagaaacaaagaaaacacacccacacttaaaaaatcctgagtctacataataaggaaattttagaaatcacttgttttgtacaattatttaaaattaagggaaaataaacttaaaaatgcaagagatacatgcaataaaaccataaaagattaaggtggataggtcacttacttcaatgttcagagcatcaaatgaaagcrtaaaagatattaaaagaccataaaaatttgcatctaagccataaagagcaaagaagaccccacaggatgtcaattcagtgatgtaacat

SEQ ID NO: 953425 - DNA, 471 bp, Homo sapiens
agcaaaagaaataacgtagcatataaaggagtgccaatacagctggcagcagatttcttagtggatctttacaggcgaggaaaagtggcatgatatatttaaagtgccgaagggggaaaagaaaacttttatactagaataatgtttctagtgaaaatatccttcaaacatgaaggaaatacaaagactttcctagacaaacaaaagctgaggaattttgtcaacaccagacctgtcattcaagagatgctaaagagagttcttcaatctgaagaaaaaagatattaacaagcaataagatatcatctgaatatgcaaaactcacttgctattcgcaaacctcatggtaacctcaagtcaaatatcttaaaactgttacaygataaatataaagcaagaaattaaaatataatgctagacaaaataacttttacaaaaaggaagataagatgaaagaaaggaagggagaga

SEQ ID NO: 953426 - DNA, 597 bp, Homo sapiens
ttattgaggatcctttgtacatgaagaattgtttccctgtttctttttagcttctttcaagattcttgttgtctttggcttttgggatagttgcttatgatgtgtataggtgtggatttctgagtttattctatttgtagttcattgagttttgtgtatgttttggttaatgtctttcattaaaattaggaagtgtatggccattattccctttagcctgttgatgtaatggattacatttactgatgtttgaatgttgaatagtcttgcatacctgggataaatcccactgggtcaggatgtatagatcttttcatacatcgttggattgaatttactaatattttgttgatgatttttgcatttatgttcagcagagacatttatctgcagttttattttttattttttgtgatatatttatccaattttggtatttgggtaataatggcctcatagaatgagttaggaagtatttcctcttcttttatattcttgaggagattataaagaatttawatgatttctttattaaatgttgggtagaatttgctgatgaacccaagtggtcctgatgcattctattttggaaggtta

SEQ ID NO: 953427 - DNA, 591 bp, Homo sapiens
cttctaggcttccctagggagtttccattgattgctcattttttctaagtgagggctataatttcttctttctttgcttaccctatttgttgttgttcttgttggacaaggacactgtaaatagcatgcagtaacttgggaagtcagattctaccccctcaccagggttttttcttgttgctgcttgttgtagttatttgtttcatgatttttctgaacaaattctgtaaagtctgtattctttcagtgtgtccactgaagtgtcactcggttagctttgtggatagctcatatttgaacagagatttcctcaaatgtctggaaccaataaatctactctttgcctacgggctctgtgtgtgtgtgtgtgtgtgtgtgtgtgtgtgtgtgtgtgtgtgttggaacatggcttcaactctcacccaggtaactgacaactctgccttaactttcactttctgcttgtgcaaagcctcaaggtcagccaggagtaaaagctaagggccatctcaagtctttcctgagtatgcatataaccgtaygcatgtatgtggccttctagcttcccaggaatatgttagaggttttgaa

SEQ ID NO: 953428 - DNA, 793 bp, Homo sapiens
ttcccagctctctgctctggctgtgagggagatctgagtcaggtggcttaaaactaccagttrtggccgggcacggtggctcacacctgtaatcccagcactttgggaggccgaggcaggcatatcacgaggtcaggagatcaagaccatcctggttaacacagtgaaatcccgcctctactaaaaatacaaaaaattagccgggcgcggtggcgggcgcctgtagtcccagctactccggaggctgaggcaggagagtggcgtgaacccgggaggcggagcttgcagtgagccgagatcgcgccactgcagtcctgcctgggcgaaagagcgagactccgtctcaaaaaaaaaaaacaaactaccagttatggccgggcgcagcagctcatgcctgtaatcccaccattttgggaggccaaggcaggtggatcacttgaggttgggagtttaagaccagcctgaacaacatggagaaaccccgtctctactaaaaaatacaaaagtagctgggcgtggtggcgcatgcctgtaatcccagctactcaggaggctgaggcaggagaatcactcaaacccgggaggcggaggttgcagtgagcagagatcgtgccattgcactccagcctgggcaacaagagcaaaactccctctcaaaaacaaacaaacaaacaaacaaaacctaccaattatgggattagggtctggacttttctttccttctgtttctaatgggagcagcctgaaaggaatgtgccagctctagggattccaggctagcttgggtctgctc

SEQ ID NO: 953429 - DNA, 793 bp, Homo sapiens
ttcccagctctctgctctggctgtgagggagatctgagtcaggtggcttaaaactaccagttatggccgggcrcggtggctcacacctgtaatcccagcactttgggaggccgaggcaggcatatcacgaggtcaggagatcaagaccatcctggttaacacagtgaaatcccgcctctactaaaaatacaaaaaattagccgggcgcggtggcgggcgcctgtagtcccagctactccggaggctgaggcaggagagtggcgtgaacccgggaggcggagcttgcagtgagccgagatcgcgccactgcagtcctgcctgggcgaaagagcgagactccgtctcaaaaaaaaaaaacaaactaccagttatggccgggcgcagcagctcatgcctgtaatcccaccattttgggaggccaaggcaggtggatcacttgaggttgggagtttaagaccagcctgaacaacatggagaaaccccgtctctactaaaaaatacaaaagtagctgggcgtggtggcgcatgcctgtaatcccagctactcaggaggctgaggcaggagaatcactcaaacccgggaggcggaggttgcagtgagcagagatcgtgccattgcactccagcctgggcaacaagagcaaaactccctctcaaaaacaaacaaacaaacaaacaaaacctaccaattatgggattagggtctggacttttctttccttctgtttctaatgggagcagcctgaaaggaatgtgccagctctagggattccaggctagcttgggtctgctc

SEQ ID NO: 953430 - DNA, 648 bp, Homo sapiens
tgaccataaggtggacgcctctcatctggaaaccagggtagtaacatgaaaggctaagattatctagatgttcctgggacagaacgtggagaacgtggcccatctgagctgtagccctttccaggggcrtgagctcagcatctgcagaagacgcctgtgtcagaagggaccagtggcttttcccacccaacgtccacggggctccaggcccagtggcccctgcaatgcccctgggcaggcacctgcttgagcccaggaacattccaggaagccccacaacggtggtcctgccaacagaccccagccagtcatcctcccccacaggccgccttttcctgagggaagcttccagaagccagggtaggctgcaggcccagaaagcccacgaaatgccaggcaggcaccaaggtgttcctgtggcactgtgtgagcacccatcggcggcgtgcacggccctctatgagctcacgcgtgtcagcgtctgcaaagcccatcggcggcgtgcacggccctccatgagctcacgtgtgtcagcgtctgcaaagcccatcggcggcgtgcacggccctccatgagctcacgcgtgtcagcgtctgcagagccctccacccgcacatggggtcccagccaccattcacttctccttac

SEQ ID NO: 953431 - DNA, 648 bp, Homo sapiens
tgaccataaggtggacgcctctcatctggaaaccagggtagtaacatgaaaggctaagattatctagatgttcctgggacagaacgtggagaacgtggcccatctgagctgtagccctttccaggggcgtgagctcagcatctgcagaagacgcctgtgtcagaagggaccagtggcttttcccacccaacgtccacggggctccaggcccagtggcccctgcaatgcccctgggcaggcacctgcttgagcccaggaacattccaggaagccccacaacggtggtcctgccaacagaccccagccagtcatcctcccccacaggccgccttttcctgagggaagcttccagaagccagggtaggctgcaggcccagaaagcccacgaaatgccaggcaggcaccaaggtgttcctgtggcactgtgtgagcacccatcggcggcgtgcacggccctctatgagctcacgcgtgtcagcgtctgcaaagcccatcggcggcgtgcacggccctccatgagctcacgygtgtcagcgtctgcaaagcccatcggcggcgtgcacggccctccatgagctcacgcgtgtcagcgtctgcagagccctccacccgcacatggggtcccagccaccattcacttctccttac

SEQ ID NO: 953432 - DNA, 586 bp, Homo sapiens
gttgcacatggcagaacctcattcttttttatggttgaataatactccatcgtgtaaatgtgccacatttgtttaatacattcatctactaatggacacttaggttgcttccaaatcttggttattgtaaatattgctgctgtaagtataggagtgcatacaactctttgatatactaatttcctttcttcggatatatatctaggagtgggattgctgaatcatatgggagctttattattagatttttgaggaatctccgaattgttctccatagaagttttactaatttacatttccaccaacagtgtgtgagggttccctattctccacaccctcaccaacatttattattgcctgtctttggatataagccattttaattgggacaagataatatctcattgtagttttgatttgcatttgctgtccttgtggtctggactgcctttcaagtttacttagagccccagagctctttagcctattgtggtgagrcttgttgtaactcaagttctgaccctgggatcggcaattcccctctggctaggactggtttaattattccctctatgattgggcatca

SEQ ID NO: 953433 - DNA, 599 bp, Homo sapiens
tctggtcctggaatttttgttgttgttggaaggagaatttttttattattgattcaatcattgctctcttcaagttttctgtttttttccttgtygaatcttggaaggttgtatgtttacagaaatgtacacatttccattagatcaagttatatttgttttatgaacacgggaactctagtgttgggtgcatctatatttacagttgttatgtcatcttgcagtatttaaaccttttattattatataatggctttatttgtctttttttgctgtttttgatttaaagtttgttttatttctgatataagtcttgcctactccttatcacctttggtttgggatattttttacacttctttagtttcagtctatatgtgtctttaaaagtaaggtgagtttcttgcaagcatcatatacttgaactgtgtttatatttatcccttaagccaatctagatgttttgagggggaatttaaattagtccatttatatttaaggctcatattgtcatgttaaggttgtgcctgtaatagtattaaatattttcctgttgttttataaattgtttgtttatttcttttactctgactattgtt

SEQ ID NO: 953434 - DNA, 593 bp, Homo sapiens
aatgcttacttttgttgtttgcttgtttacttttctttttgtttttgcaccttagctggattagttgtgtaaaatttatttcacccaaagtatacaacctctgactttgctcatcatgaagagcagccatagacatgtgcattagtttgttctcatgctgatatgaagaaatacccaagactgggtactttataaagaaaagaggtttaattgactcacagttctgcatagctgaaaaggccttaggaaagttacaatcatgacagaaggcatcccttcacagggtgacaggagagggaatgagtgccgagcagaggggaaagccccttataaaaccatcagatctcgtgagaactcactttcatgagaacagcatgggagaaactgcccccatgattcaattatctccaccttgtcccacccttgacatctggggattattacaatgcaaggtgagatataggtggaaacacagagtgaaaccatatcaacatatatacagtcaccttaacaataaacagtgactggttttagccyggcttcctctttctctttatctgatatctccatcaagctcgtttgcttttattagt

SEQ ID NO: 953435 - DNA, 638 bp, Homo sapiens
gcattccagcctaggtgaccaagtgagaccatgtctcaaaaawaaataaataaataaataaataacaaaaccctattgggattttgattagaaaggtattaaaccaagatccctgcactcaagaatttaacaactacttggtcatgtgaagactaagttctaataggattgtggccataaaggaaatatgtgtggataggctgcaggaatccaaaagggagtcaccaattctaatgagaagaggtcagaaaaaacccacagactgacatcaaggcccagaacactgaaagaaagctgaatctggagtttatatggtttggctctgtgtccccacccaaatttcatcttgtagctcccatgtgttgtgggagggacctggtgggagatgactgaatcatggaggtgggtctttcccatgctgttctcatgatagtgaatgggtctcaggaaatctgatggttttaaaaatgggagtttccttgcacaagctctttttttttgcctgctaccatccacataagatgtgacttgctcctccttgccttccaccatgactgtgaggcttccccagccaagtggaactgtgagttctccattaaatctctttcctttgtaaattgcccagtctcaggttatgt

SEQ ID NO: 953436 - DNA, 792 bp, Homo sapiens
agtttgaaaaggaatttagaattaaattttagagttgttaacagtaaagaactgataatgatagcaacaagagtcagccaaatgcctaggcagataggggtgggtccccggtaaaaccccaccttcaagccaaaaaaacagcctgaagcctgaaagatcagactgctggtcccagatgaaacctgtgacacagggtgagaacttctgttcctgtttgcctgccctttcccatttgattctttctgaataatgccttttaaccaattgaatgttgccttttccaatactagctatggcctgcccttcccctattctaagctcataaaagctccagactcagccacattggggggactttcctgtcttcaagtagggggaccacccctgtgtcccctctccacagaaagctgttttgtcactagatgaaacttctgctttgctcactgttttattgtcagcatatcctcattcttcttggatgctggacaagagctcaggacccactgagtgcaggtacacagaaaggctgtcacactgaccttttgccctcaccggcagagagtagccactccatgtgacagggccaggggccgactgagctgccaacacactgccatccattgagctgtggacgggggaactaaaagagctcattagcacactaacatcccttctgggkcttcagagttgcaggcacccttgcctgggcaacagcatgttcccctcaaggtgacactcctggtctggctgcaggccccacatggagcttactcctgtgttggcacctggagt

SEQ ID NO: 953437 - DNA, 617 bp, Homo sapiens
tttctcgagcattccttgtctcgatgaccttgacagctctgaggagsactggctgggtgctttgtcgaatgcctctctattgaaatttgtctagtgttttctgatggttggacagggctttcggattttgtctgtgtgtatgaggaagaccacagaagtgaagagacatttccatcccattatactctggttatgtacaaacaacatgattcatcactgttgacgttcaccttgatcacctggcggaggagggatttcctgggcttctccactgtgatgtcactgtacttcctccctgtgcacattctttcgaaggaagtcactatgtgccatccatacttaagcaatgagggttggtgcttccccccattgagggtgggttatctacctgttattgggaatgcttctgcagggaaatttgccttccttcatatttatttacttatttaatcatttgtttatatttttatggaatcatggatatatatgttatacttttggttataatccattactacttttgttttgtttcaaatacttctagcttagccactgggacccctttcagttggctcctgtccccctttaacaagtccctcagtggggtgctgagagat

SEQ ID NO: 953438 - DNA, 637 bp, Homo sapiens
gttacataagatggtatatttgggggacccccaagaactctccaaactatttttgcaacttctatttagtctaaaattatttcagaaaaagtcatttcacaaagcaatagtcctggaatttgtatgtagagtmcaagaagacacaacacagatgggaagtcaggcctccctttcgctggaagcatgcagtcactgggctggaatttagtcagggccaaagtgctgtgcttttaactttatagatgatctctggtgcccttagaaggacatgagaaaatgtatctatttgtggatgctctaaaaagtgtcatatttgatcaggattatcaaacaactctaaaaacagcagccatcaccaataataatacctagttctatagatggaaatagagtcgggtggaaaaagcccagcttctcagattttcattgactatgtgcctttttctgacagtatcaccgaatcttctacaacggccctctctcagggggaccaactgttagtcactagtgagatggccgtagcagggagcaaccttctggaactcacccagctccccagagcacagcgtgcttgggctgactgactcgctgcagatggaggcacttcctcgagatcctagagggaaaatgctgattt

SEQ ID NO: 953439 - DNA, 452 bp, Homo sapiens
aaggttctaaccagggcaaataggcaagaataaagaaataaaaggcattcacagtagaaaggagaaaatgaaatgatctctatttgcaaataacatgatactatatatagaaaatcctaaagaatccaataaaaaaagtatttgagctaaaaaatggattcagcaaagttgtaggatatatcaacacaccaaaaaaatttattgtatttctatacactagaatgaataatttaaaattgaaaataagaaaacaattacattggcaagagcatcacaaatacttaggaataaatttaacaaaataaatgtaagggtttgtacactgaaaactacaaaatattgtgaaaagtaaacaaagaaaatgtaaataaatgtaaagatatctcatgktcatagatcaaaagtcttaatattaagatggcagtactcctgagattgatcaatcccaaaca

SEQ ID NO: 953440 - DNA, 627 bp, Homo sapiens
agaattgcaacagagaaagagtaattcacacagagctggccactgttgtattattcaaatgagtctctctgagcattyggggatcagtttttaaacataatttggcccaggtgtggtggcgtacacctataattccagcactttgggaggctgaggtgggcagattccttgaggtcaggagttctacaccagcatgaacaagatggtgaaaccccatctctacatttcaacaacatggtgaaaccccatctctataaaatacaaaaaattagctgggtatggtggagtacacctgtagtcccagctagccactgcacctggccaacccactgatttagagtgaaataaatttatactatcacagttctgaaggtcagaggtccaaaatcaaggtgacagcagaaccatgatctctctgaaggctgtaggggagaatctattccatgcctttctctgagctcctggtgctcccagcaatgcttggcacttattggcttgtagaggcatcacttgaatctctgcctgtgttgttgcacagtgttctcctgtgtatctcgcttcctgttgtcttccctgtgtgtctctgtgtttcttctccttttcttagaaaaggagaccaattagggc

SEQ ID NO: 953441 - DNA, 636 bp, Homo sapiens
aagaaggcttcaaaataatgaaataagagtatcaaagtcaaacccaatatgccttcaatgaagggaaagtaacaaacattcagctctacagatcagaaacaataagtattatttaaccttaaaaaactataaaattcaaagtggtttgccctcactttcataaccagtcagaaacaagaaatgcatattatacctgtctgaaatatttcatcaagtctttctgccaccttctgtgggaggcctgcctctatcagtgtcttgtagtgttctgtgtgagttacactggaagtatccattggttcttcctcttcttttaactgtaccgcattaccattcacctgattagccattttattatgctgctggaaaaaattcaggagctatattacattaagccagaaataactagtttgtaggacaatgcatgatttatctaaactaatttgtatacatgctgctaataacctctatcaaaataataatttattcctcctgtgatgtatctgacctaaattggcaataataatcctgtaaaaccatagaaaatgtacatggaagcattagatctttaaggaacttcatgtacaccrggtaagataaaggctttaatttactgaaggtagaattgctgattaa

SEQ ID NO: 953442 - DNA, 636 bp, Homo sapiens
aagaaggcttcaaaataatgaaataagagtatcaaagtcaaacccaatatgccttcaatgaagggaaagtaacaaacattcagctctacagatcagaaacaataagtattatttaaccttaaaaaactataaaattcaaagtggtttgccctcactttcataaccagtcagaaacaagaaatgcatattatacctgtctgaaatatttcatcaagtctttctgccaccttctgtgggaggcctgcctctatcagtgtcttgtagtgttctgtgtgagttacactggaagtatccattggttcttcctcttcttttaactgtaccgcattaccattcacctgattagccattttattatgctgctggaaaaaattcaggagctatattacattaagccagaaataactagtttgtaggacaatgcatgatttatctaaactaatttgtatacatgctgctaataacctctatcaaaataataatttattcctcctgtgatgtatctgacctaaattggcaataataatcctgtaaaaccatagaaaatgtacatggaagcattagatctttaaggaacttcatgtacaccgggtaagatamaggctttaatttactgaaggtagaattgctgattaa

SEQ ID NO: 953443 - DNA, 578 bp, Homo sapiens
cttaatacattttccctgaatgcccaacacatctgaattaccaacacccgtatgtagccaagaaactgacaatcatttataaattatcacctatgactccatctgctctatgcacttattttttaaattttactcatttatttattatttttattttttgtagagatgggatctcactatattgcccaggttggtccagaaacagaaacagacccacactaatttcataaattggatgaccatgcagtcatccgatttaagaaaaaaagtgccaaacagtgcagaaggaaaagaatagtcttttcaataaatggtgctggatcaagcagacacatccacgtagtaaaaagtgaatcatagccgggtggggtggctcatgcctgtaatccccacactctgggaggcttaagtgggaagattacttgagcccaagagtttgagaccaacctgggaaacatgttgaatcccatctctacaaaaartatgaaaattaagccaggcatggtggcacactcctatagtcgcagctactcaggaggctgaggtgggaggatcgcttgagccaggaggtggaggtt

SEQ ID NO: 953444 - DNA, 551 bp, Homo sapiens
atggtatcatatagagttgtttcactgccctgaaaaccctctgagctccacctacccatccctccttccccctcacccttggaaaccactgatcttttyactatctccatagtgttgcctcttccagaatgtcagagagtctgactcatatagtatgcatcccttaaagactggcttcctttgcttactagtattcgtttaaggttcctctgttactaatattcgtttaaggttcccccgtgtcttttcgtggcttgatcactcatatcttcttagtgctgaattgtattccattgtttggatgcaccatagttcatctgtttaccactggaaaggcatcttagttgctcccaatttttgacaattatgaataaagctgctagaaacactcatatgtaggtttttgtggacatcagggttcagcacatttggctaaataactaagaacacgattggtggatggtacagtaaaactctgtgtgtcttcataagaaactgccaagctgtcttctgtggtggccacgccattctgcagtctcagcctgctttgt

SEQ ID NO: 953445 - DNA, 602 bp, Homo sapiens
atctataagtccctgactgggcctgctgccttttgttcagatatgccctgcccacagaggtggaatctagagaggcagtcaaccttggtgagctgcagtgggctccacccagtttgagcttccyggcagctttgtttatgctgtgagcataaaactgcctactcaagcctcagcaatggcggatgcgtctccccctccaagctccagcatcccaggtccattgcagaccactgtgctagcaggagaatttcaaggcaatggatcttagcttgctaggctccgtaggcatggaacctgctgagccaggcactggagggaatctcctggtcttctagttgtgaagaccatgggaaaagcactgtatgtgggcaggagtgtaccattcctcctggtacagtctctcacggcttcccttggctaggaaagggaaatcccctgacctcttgtgcttccccagtgaggccatgccctgccctgcttcagttcaccctccatgggctgcacccactgtccaaccagtctcaataagatgaaccaggtacttcagttggatatgcagaaatcacccatcttttgcatcaatcttgctgggagctgcagat

SEQ ID NO: 953446 - DNA, 622 bp, Homo sapiens
ccaccctaggccatatccccctgaggacayagaagtgaacaaagctgacaacgtccctgcccccatggagctggcattctaggtaaggatcatttcatacacaaattaataaacaactctaataatggatggtaaagatagatgtgatgaagagcactaaagaaggtgagtttgtagaacatagtgatggtgctttcaggttggggtattagaaaagcggtctttgatatagggacatagggacagagactgaaatgaaatgaagggtgggccataccaatacctgggggcaaagaaacagaggaagagggaaaaggtcttcacatctgaggtggcacatttgaagacgaataagggaatcagtagctcagagtgaacaagaagaaaagtggtaggtggaagccagaccatgatagtcttgtagggccagcacagcactttgggttccaagcacaatatggagaccacaggaggttgagaaggggagtgacatgatctgagttaatttgaaattattactttgactgctctggagagaaccaactgcaggttgacaagggtgaatgaatagagacctaggaggctgctgaaaaggtcccaggaggcaagacgctagcttgaa

SEQ ID NO: 953447 - DNA, 592 bp, Homo sapiens
tattttctctgtttatatctttattctataagctttattctattatcttaaatttttaattttttctttttttttttgttaaaaactaggacacaaagacacacattagcttaggcctacacagggtcaggatcatcaatatcactgtcttccacctccacatcttgtcccactcggaggtctttagggacaataccatgcatagagctgtcatctcctatgattacaatgccttcttctggaatacttcctgaaggacctcccagaggctgtttaacagttacctttttttttttcaataagtaggagtacactctaaaacaacaaaatatatagtaaatacataaaccagtaacatggtcatttattatcattctcaagtattatgtactgtatataactgtatgtgctagactcttatatgactggcagcaagtggatctgtttatactgggcatcaccataaacacataagtaatgcattgtgctaggactttatgacagctacatggttattaggctacaggaatttttcagctccgtgataatcttctgggaccccrtcatatatgtggtccatttggctgaaatg

SEQ ID NO: 953448 - DNA, 730 bp, Homo sapiens
ggctacactaaacaacagatttttcttttcttttctttttttttttttgagatggagtttcacttttgttgcccaggctggagtgcaatggcgtgatcttggctcaccgcaacctccgcctcccgggttcaagccattctcctgccttagcctcccaagtagctgggattataggcatgcgccaccatgcccagctaattttgtatttttagtagagacggggtttctccatgttggtcaggctggtctcgaactcccaacctcaggtgatctgcccgcttcggcctcccaaactgctgggattacaggcgtgagccaccgcgcccggcctcttattcctttttttttttcagatggagtttcactcttggtgcaatggtgcgatctcggctcacttcaaactccacctcctgggttcaagtgattcttctgcctcagtcccccaagtagctgggcatgtaccaccacgcccagctaattttttatttttagtagaggcagagttctactatattggtcaggctggtcttaaactcctgacctcaggtgatccatccacctcggcctcccaaagtcctgggattataggcgtgaaccactgcrtccggcagagatttttaatatacacaaaacagccttctattggaaggagatgccatctaggactttcatagctagagaggagaagtaatacttggcttcaaagcttcaaaggacaggctgaatctct

SEQ ID NO: 953449 - DNA, 564 bp, Homo sapiens
aagttgaatccaatgctcatttacygttccgaaatttctagggttcttaggaattatgccaaatatactttgcctgtgcgctgtcaatgaaacaacaaagcctggacgacagcaaatctgtttacagcatgttttactaactattttaagcccattgttaagacctactgctcagaaaaatccctttgaaaatattactgttcattgacaatgcacctagtcactcaagagctctgatggcattgtacaaggagataaatattgctttaatgccttaacataacatctatttggcagcccatggatcaagaagtaatttaatctttcaagtcttattatttaagagatagatttcataaggctatagctgccatagatagtaattcttctgatggatctgggcaaagtacattgaaaacctggaaaagcacattcctgattcatgggaggaggtcaaaatatcagtcttaacaggagtttgaaagaagttgattccaaccctcatgggtaactttgagaggttttagacttcagtggacgaagtactgcagatgtggtagaaat

SEQ ID NO: 953450 - DNA, 483 bp, Homo sapiens
tggtagtaagcagtcttttttactggtcacacagtaaaaaattagaaataacctacatgttcatgaagagaagttggtgaaataaattatggtacatgcatacagtagaaaactttggagacaaaatagtaaaatagttacagatataggctttgaatataaattttaacaagctgaggcttctctcgtctcttcagaacaccctgagttcttcccggcctttcttccttgcttttcatttgtgtcagtcagctcttgcttgtacagcaatcttcaaatctcagtagcatataaaggtaagcatttagttctcacttacaagtttgcagggcaggtgaggcagctctgcctcaagccacaatgtctaggacagctctgtttcgcackgtggctgactagctaaaaaatgttcttgtctcagcaatcacaggagaacaagagggtgagagataatgtgtgaagcttcctaagtgctaagtttga

SEQ ID NO: 953451 - DNA, 464 bp, Homo sapiens
aatcaagaaataaccataaaaatgggcaaccagaatccctcatggctgttctctctatggagtagtcattcttttattcctctactttcctagtaaacttgttctcactttatggactggccctgaattccttcttgccggatatccaagaaccctctctaggggtctggatcgggacccctttcctgtaacacatattccagtggaatacgttacataataaaggcagaaattgtaaaaaatttgagcttacagtacaggtagtaagtatcagggaccagtagaaaggagaagggtgccaagttttatcaaatgagcaagatatttaaggaatgagtttatctcataatggggtaaggaaaaaagctgagactctcatggcttcttcaacttggtccagggctgcagaccattcaagagaaattcaaatcaggcatagggcytcatcaacccacaaaccaatt

SEQ ID NO: 953452 - DNA, 644 bp, Homo sapiens
ttagaagcaaaggctcctgggccgggcatgatggctaatgcttataatcccagcactttgggaggctaagacgggtggatcatttgaggtcaggagttcaagaccagcctggccaacatgatgaaaccccatctctattgaaaatacaaaaaattagccaggcatggtggtgcaggcctgtaattccaactactcgggaggctgaggcaggagaatcgcttgagcctgggaggcggaggttgcggtgagtcgatatctcgccattgtactctagtctgggtgtcagagtgagaccctcttttttttttgagaaaaaaaataaaagaagaagcggaggctcctgctgttgaatagacaccctttgaggcaatgaatgacacatgttagcaaggagcccatcttatctacgactcatcctcaaaaggtccccaacctgaagcagccagtgcctgtggtggtgtagatggtgtctggaaaggctgagaggacctcacttctttcactcaccaaattgwgtacctgtaatcccagcaccttggggtgccaagacaggaggatcccttaaggccaagagttcgagaccagcctgggcaacaaagtgagaccttgtctctataaaaaatcagaaaattagccgggtgtgg

SEQ ID NO: 953453 - DNA, 589 bp, Homo sapiens
ctcaaggtctctgcagcattagacatcgtggatctctttttctccttcctcaatgtctcaggcaacrctcttccctgcttctctttcggtgtcctggaacctccaccctcaccccatctctagccttctgatcttttcaactctatatctggatactggctgactacagtccatgccattaactttgaccatgacttccaaatacgtatcttaggatgagacagccctccttggttatctcctggacctatgttttctcctgtgctttctatttgaaggacaggtaccaccaaccttcctaatctcctaagctagaaacctaggagtcatcctagatacctctttttccaacacatgccccacatctagtctgtcaccagatcctattgacccaacctccacaaaatctccttaatctacctggggtggatactgtggatggacctacccaatctccatttcatcctgtttctgaggtgcagtgcctagaaagtaacagggacctctgaaagctggacctgagactacctggtacagcagcccaacatacacattcctccctccagggaccagcctcctgccctgggca

SEQ ID NO: 953454 - DNA, 605 bp, Homo sapiens
ttgctggctcccttgtgtccgggtggggctggatgtctgcttctggccaatgcgtgctgagtgcaagtgacatgtattagtttcaggttagagcatttaactgcttgtgtgagaccctccagagtttttttgcttctgcctcaggacaatactgtgaggtcctgtaatagctactgtgccagcctgggtcgctgtatcagttaagagtttgatctgggaagtagaaccagttgagtcatgtggagtaagggatttattagagggattagagcttacacagttgtggaagttggtcaagacatctctggaagatggttgcctctgtgaacgggtttgggcctgaagtttgttgtaggtgcatgaagaaaagctggatgtaaagtggggaagaacagagataattggatgctctgaggatggcctggaatccatgtctgtctctcaccacctccacgctcagtgatgctggtgacctgcagaaggagctggtctccagtgccrtggcgctgcaggtgcatctggttcaggaccctaaaaatgctgaataagaacactcagtgggttcctcacatctgctgtctagatttcacatgtttccctgtggc

SEQ ID NO: 953455 - DNA, 638 bp, Homo sapiens
aactatagttatgatgccagttctcccaaaattgaaccaatacaaatagatttaacataatgccaatgaaaaacaagatattttgtacatatagacatctgagtctaaaaagatttatatggaaaagcaaagaaactaaaatagccaaagcaattttgaaaagaaaaagttggatgcatcatagtacccaattttaaaacttcctaaaaaattacagtaatcaacacaatgtaatgagagaggagaaaggaagaaacgggtcagacaggcagttagggtaggtcatctgttgaattctttcaagcaaaagaacagcctgcaggcacagataagggaacttgcacagtcgggcttgcctaagacatgcccatagccacacagataagaaaggctgcacaggtgacttgcccaaacacacctgcaatggaaaattccatcccctgaacatgtgcagtaagcggaataaagcaatatggagtaactcaagcttagggcccacatgcgyattaaaagaatgggatggaactaccagaactttgtgccttatgcaaataagacacccagccctcatcagtttcttataaaagtctttgcatttaactgtaaaaacagcacccctcttctggatcccttcatcg

SEQ ID NO: 953456 - DNA, 548 bp, Homo sapiens
actagaccagcctaacaagcagtccttaagggactgctaaacatggaatcaaaagaacatctgctaccgcaactactcacttaaaaacatagtccacagacattatgaagcaactatacaaccaagtctatgtaacaatcagctaacaaatgatgacaggatcacaatctcatatgtcaagtctaacctggaatataaatgggctaaacacaccacttaaaaacatagcatgccaagctggataaaaagaaaagacccaaccatctattgtcttcaagagactcatcttgtatgtaacaacacaaacagaatcaaagtaaagggttggagaaagatttactatacaaatggaaaacaaaagagaacaggcatctttattcttaaatcagataaaaaactgattctcatatcagtttaagcctttaacaattagaaggacaaagaaaggcattacattatgacaaaaggtacaatccaaactattctaaatatataygcaccccaaattggagcacccattttcataatacaagttctttttgacccat

SEQ ID NO: 953457 - DNA, 735 bp, Homo sapiens
accgcgcccagacttaaatcacataaactctttttttttgagaccaagtcttgctctgtcgcccaggctggagtgccgtggcacgatctcggtttactgtaacctccaccttcctggttcaagcgattattttgcctcagcctcctgagtagctgggactacaggcgcgaaccaccacgcctagctaatttttttttttttttttgagatggagtcttgctctgtcgcccaggctggagtgcagtggtgcaatcttggctcactgcaagctccgcctcctgggttcacgccattctcctgtctcagcctcctgagtagctgggactacaggcgcccgccaccacgcctgtctaattttttatatgtttttagtagagacggggtttcaccatgctagccaggatggtcttgatctcctgacgtcgtgatccgcccgcctcggcctcccaaagtgctgggattacaggcatgagccactgcacccggcctttttttgtattttcagtagagacagagtttcaccatgttggccaggctggtcttgaactcctgaactcaaagcctgccttggcctcccaaaatgctgggatcacaggcatgagtcaccgcacctggcctatagcttccttttaaacagcacatcgttgcttttgcatcagccagamaaaaaaaatactttttagaagaaaacgtacattatcatgagtcatagtatttgaggagtacagctctgaa

SEQ ID NO: 953458 - DNA, 659 bp, Homo sapiens
ctcgctctgtcacccaggctggaatgcagtggtgcaatctcagctcactgcaacctctgcccctagggctcaagcagttctcctgtttcagcctcctgcgtagctgggactacactaccatgcccggctaatttttgtatttttagtagagacagggtttcaccatattggtcaggctggtctcaaactcctgacctcaggcgatttgcacctcagcctcccaaagtcttgggattacaggcgtgagcccctgtgcccagccctcccccaataattttgattcagttggtctgaggtgggatccagacaggggtatctgtttttaaagctcctcagtgattctaaaatgcagccagggaaccctggaacttgtgttttgttctcatttttagtatcttctgctcagagtgaccagtgaacccaaggcatcagcatcacctgctagacatgcagagtctcaggccccgccccagacccactgaatcagaatatgcatgttaacaagtttccctggccgggcatcatggctcacacctgtaatctcagcactttgggaggcagaggcaggaggattgcttgagcccacaagttcaaggccagcctgggcaacatagtggaccctgtctgtacaaaaaaatwaaaaaaaataatagctgggt

SEQ ID NO: 953459 - DNA, 580 bp, Homo sapiens
tgtcagatcagcagaggcattaggttctcatatgagcaccaaccctattgtgaactgcgcatgtgagggatctaggakgtgcactccttatgagaatctaatgcttgttgatctgaggtggaacagtttcatcccaaaaccatcactccaccacagatctcccctgaacccacatttctcccctcaccccatccgtggaaaaattgtcttccacaaaactgttccctggtgccaaaaagtttggggactgctgaggaagggcacccatgcacaaagacctggtgcagtggagtcataccataggagtaacaataagttaacatttattgaatacttcgaatctgctacaatgtctaacagatttttacatggacagtctcatttaattttcttacctcttattctggtcatttaacatgtgaagtaaataaagcataaaatagtttaatctcttgaggaagtcacacaagtagtaagtagaactaggatgcaaatttaggtatcttacctcaagaattcacatgcttaactgaaaaaccaaacttcccctctacagactgttttttttttttttttttgc

SEQ ID NO: 953460 - DNA, 560 bp, Homo sapiens
cagggttgtgttctaataaaacttgatttacaaaaacaggttgtcagcctgccaactgtagtttgctgcccctgatttaaatctataattcatatggttacaaaatggaaaaatctaatcctgccattctgtctacataaattaatggaatacatctgttaacataaactttcatcaactatttagttattttgagatatagttcacacaggaaaaacagtttaaatgcatgctttatttctttatttaccaattttcaatgaattggtttattagcatcctccaaaaatatttaaggaggattttgttgttgttgcttagtatcataagctcaaaacttcatacatatttgttgtgtttcactccatcacaccaattgaccttattgatgcttgaattatcccatcttttgccagaaggaaacttgtcaagttgtctcctgactcttttatatactgtytgatactatttgatagctctcttggatttttgcaatttcaacatgttccaggttcatcttatatattttttgccccaaatatggaatcagctagttcttc

SEQ ID NO: 953461 - DNA, 606 bp, Homo sapiens
ttcattgaaagggcctagaagcaattacatctcagtagcaatgacgacaccttgattttggtttctaaaaatcacctgatacacctgtaatcccaacactttgggaagctgaggcaggaggatcccttaagcctaggagttcgagaccagcctgggcaacatggcaagacccccatctctactggaaaacattaaaaatgagctggacatggtgtcacgcatctgtggtcccagctacttgggagactgaggtgggagtatccccttgagtctgggaggtcgaggctgcagtgagccatgatcatgctattgcactccagcctgggtgacagagtaaaacctcttctcaaaaaaaaaaaattaaagttggagggaagaaatctcctttacagaatgccagccaataaatatagaaggaatgaggctgggcaaagtggctcacacctgtaatcccagcactttgggaggccgagatgrgtggatcacatgagcccaggagtttgagaccagcctgggcaacatggtgaaactctgtccctacaaaaaaatacaaaaattatctgggcatgatgacacacacctgtagtgccggctactcaggaggct

SEQ ID NO: 953462 - DNA, 696 bp, Homo sapiens
gttacatggcttccctgggtctcacagagttatcagaaagactacatagcttaacatttataaagtggttaaaacagtgcttgacataatattctatattagtgtttgttcaacaaatgtattgcatttctaagtatttactttcaaaataggagagaaataacttcacattattcagggactcacgtgtggtgtgtttcctggcttcagtggggagagcatgtggccaggacgccttgttggccacatcccagccaccccacacaagtgacttctgtgtccagaggtgaccttggtgaccacagtttaatagtgggttttgctggaaagaagaaagactaataagaagaatcatgactgagagaaagtagcttagtaatagaactttatttttctgcctgaaaaccttttaaggaaagttagcccatcaacacaagcagtatgtgagtggatgagctggaggaactgccctccttttatttgtgaaaattcaaacacatgaaaacttgagccattcataaagaaaatcacccaagcaagtgaatgcaccactttgggggggattttggtggatgaytggcatgtttggggaattttctttgtcttagtgatggaattagacgtagttcatagaactatgaactcatacgccatataaaacataagccactgagattccaagagatatggccatca

SEQ ID NO: 953463 - DNA, 613 bp, Homo sapiens
cattttttaacttctttttttaaaataattrttattattatactttaagttctgggatacatgtatagaatgtgcaggtttgtttatgtatgccatggtggtttgctgcacccatcatcccatcatctacattaggtgtttctcctaatgctatccctccccttgctccccactccccgacaggccccggtgtgtgatgttcccctcctgtggctatatgttctcattattcaactcccatttatgagtgagaacatgtggtgtttagttttctgttcctgtgttagtttgctgagaatgatggtttccatcttcatccatgtccctaaaaaggacatgaactcatccttttttagggctgcatagtattccatggcatatatgtgccacattttctttatccagtctatcattgataggcatttgggttggttccaagtctttgctattgtgaataatgctgcaataaacatacgtgtgtatgtgtctttatagtagaaatatttataatcctttgggtatataccccgtaacgggatttctgggtcaaatggtatttctggtactagatccttgaggaatcaccacactgtcttccacaatggttgaagta

SEQ ID NO: 953464 - DNA, 582 bp, Homo sapiens
tgggaatctctgggtcagagagctctgaaggtcacaccacttgtgatccrtgtagccctgaggtgtatcttgtctatgaccagaagacgttgggcacagcttggtggggtatgcaaagacggaaagccctaaatgactaaagaatctgcttacttgggctatgtttaaaacaattggatgtgtaaaaatctgactttggtgcttgctgccttttgagctaacggatctcagcccactgtgaagaagtaaacaacatgggggccactacacggagaccatctgtggctcatttataggacagcttgataaaacatagattgctggaccccacctccagagttttcgattcatcagttttagggtggcccatgaacctgcatttctaacacgatcccaggtgatgctgctgctgggggcctggggaccacactttgagaaccaccactttacactctgggttcaaacccaggctccaccattagcgtgtgtgaccttcagtgagtcatttagccgcagtcttccaaatttaaatgcgagtccactcagctcctggtagcaaagttcctgttgtaaccatggcac

SEQ ID NO: 953465 - DNA, 611 bp, Homo sapiens
tgagccagaaatttagacccttagttgagatctgacctttcacctcaacagaacctctgcttatttatctgatggttcctgacctcaaacaactgagtcktgagctcagcaaaatgacaaactgtctttctgtttactcctcagttccaaagtctaacattggtatttgtttttagaattgctttgctaagtattcttaatgagtccagaggtgttcagttaaaccaactttgggattaagaataaatgttctgaaacgtggactgtaagtaggctgaccgttgatcattgttggctggataaggaacttgatggttttttaaaatgcgcgtgatacaatagttctctctttaaaacccaagcacagctcatacataaattgagagtgttctctagaagacattaaaaatagtgcattttaggccgggagcggtggctcacgcctgtaatcccagcactttgggaggtgagcagattgcctgactttaggattttgagatcagcctgggcaacatggtgaaaccctgtctctacttaaaataaaaaattttttttaaaaaagcaaaaaatttagccaggcgtggtggcgggaatctgtaaccccagctact

SEQ ID NO: 953466 - DNA, 674 bp, Homo sapiens
aagagaaaatgagaaagaagcaaaagcaaaaacccctgataaacccatcagatcgcatgagacttattcactattacaagaatagcatgggaaatacaggcccctgtgactcaattacctcccactgggtccctctcacaacatgtgggaattctgggagataaaattcaagttgagatttggatggggacacaaaccatatcaccacagcatcatgccatggagcacagggctggggctgaagccctgagatctgctccagcccgactgccctgtgaccttaggtgagtccctccccctccccagtcctctgtgtccttctgtgtataaaaagagtgtgggcttcttgattgtggtcatttttcctgctcctgcatctgacaggctccagttctgctcctgcaaagaatgtgctggtcctgctgacttgaggctgtaagccagtgggagcagggaggctttagaactctccactgctttccccttccggccctgattctgaccttctctctgagtggctgctccttgtccaggggtaatataaaggcttcctgggctgaggtggcaagtgccttggagatctrtccttgactctttgtccttgtggtttttgcctgccctctgcataggtggggtccccaggggccatatcagtgcttgtttggcctctgcat

SEQ ID NO: 953467 - DNA, 587 bp, Homo sapiens
gagaaccactactgtcttccaagctgtcagacagggacgtttaagtctgcagaggtttctgctgccttttgtttggctatgccctgcccccagaggtggagtctgcrgaggcaggcaggcctccttgagctgcattgggctccacccagttcgagcttcctggctgctttgtttacctactcaagcctcggcaatggcaggcgcccctcccccagcctcactgccgacttgcagttagatctcagactgctgttctagcaatgagcgaggctccgtgggcctaggaccctccgagccaggtgtgggatatactcttctggtgtgccgtttgctaagactgttggaaaagtgcggtattagggtgggagtgacccgattttccaggtgtcgtctgtcacccctttctttgactaggaaagggaattccctgaccacttgtgcttcccaggtgaggcgatgcctcaccctgcttcagctcgcgctcggtgcactgcacccactgtcctgcaccccctgtctgacactccccagtgagatgaacctggtacctcagttggaaatgcagaaatcacccgtcttctgcgtcg

SEQ ID NO: 953468 - DNA, 582 bp, Homo sapiens
ccatttgagctgtttctactttttttttcgctattgtgaatagtgctgctgtgaacgtttgtgaacaagtttttgcgtgaacagactggttctcttggtatatacatagagatggaattgttgggtcatacggtaattctgtgtttaacttttggaggaactgccagattgtttccacaagggctgcaccattttacattcctgtcaacaatatgtgaagattcccatttctccatatccttgctaacacttgtgattttctgtttttaaaattttagccatccaagtgactaagtggttatagtaggttttggttttggttttgagacagagtcttacttttgtgttgcccaggctgcagtgcagtagtgcaaacatggctcactgcagcctcacctcctgggctcaagtgattcccacctcagccccccagatagctgggactacaggtgtgcaccaycacacccagctattttttgtatttttttgtagagatggggttttttactgtgttgcccaggcatgtcttgaactactggcttcaagtgatctgcccacctcagcctttcaaagtgctgggat

SEQ ID NO: 953469 - DNA, 802 bp, Homo sapiens
atgagggtttcagtttttccacatcctaacacttgttattttccttttttaaaaaaattataggccaggcgcagtggctcacacctgtaatcccagcactttgggaggccgaggcaggcagatcacctgagctcaggagtttgagaccaccctgggcaacatggtgaaaccccatctctactaaaatacaaaaaattagccaggcgtggtggcaccagcctgtagtcccagctactagggagcctgaggcacgagaatcacttgagcctgagggatggaggttgcagtgagccaagatcatgccaccgcactccagcttgggctacagaatgagactttatctaaaaaaaaaaaaaaaggccaggtacgttggctcatgcctgtaattccaacattttgggaggccagggtgggaggatcacttgagcccaggagtttgagaacaacctgggcaatataatgacaccccgtctctacagacaataaaataactagctgggcatggttgtgtatgcctgtattcccaggtattcgggaggctgagttgggaggattgcctgagcccaggagttcaaggctgcagcaagtcacgttcacaccactgcactccatccagcctgggcaacagagtaaaaccctgtctcacaaaaaaaaaaaaaaaaaaaaaaaattacagccatccyagtgggtgtgaagtgggaactcactgtggttttgatttgtattttcttttttaagtgaaagcaagtttattaagaaagcaaaggaataaagaatggctattccataggcagagcccatt

SEQ ID NO: 953470 - DNA, 632 bp, Homo sapiens
agctgatgaacaatctttttaatgtattgttgaatttggtttactagcattttygcatcaatattcatcagagatattggccatagttttctttttctgatgtttctttgtctggttttggtataggggaaatactggcctcatagaatgagtttggaagtattccctcctcctctacttttcagaacagtttgaataggattggtagtagttctttaaatgtttggtagaattcagcaatgaagccattgggtctcaggcttttctttattgggagactttttattgtgacttctatcttgttacttgttatttttctgtttaggttttggttttcttcatagttcaatcttggtaggttgtatatgtctaaaaatttatccatttcttctagattttccaatttattgacatatagttgttcatagtagccattaataaccctttgaattcctgtggtattagttatgtctcctttttcttctctgattttatttctttgggtcttctttttttttcttattcagtctggctaaaagtttatcaattttgttcatcttttcaaaagaactttttttctgtttcattgacctgttgtattgttttcttcatgtcaaattcatttatttctg

SEQ ID NO: 953471 - DNA, 599 bp, Homo sapiens
ggatttatttttcaaactgtttgagcatcatttgttgaaaagtctatcctctctataatgaattgcctttgccccgtgtcaaaaacaaactgacaatttgtggggtaggtgtgagttttcttaaactttctctatgtctcattgattactttatctgtctttacaccaatcatacagtattaactgctgtggctatatattatgtcttgaaatcaggtaatgcaagtcctccaattttgttcctatttttcaaagttgttttggctattctaggtcctttacattctcatacgaatcttagaattagtttgtcatttcctacaaaaacctaacctacttgaattttgattattttgcattaaatatacgcattgatctggggcaaactgacatcttcacaatattgagtcttctgatccacgaatatgatctatatttcagttcacttagttctctcattatttcctctcagaaatgttctatagtttkcagtttatagatcttatgtaacatttaccagatttatctctaagtatcacttattttaatgctattttgatagtttaagaaaaacttcagtttccaattgttggttgctg

SEQ ID NO: 953472 - DNA, 606 bp, Homo sapiens
catctaggctatgttcctgcctgtctgagaggatgaggccaagaggggtttggggtcctgcttggtccacgaatggctcaaaggctgtggatagtacaggtggcccctgaagtgcagattggcaggagagggatccaggcagttcccttgggccaccacaaccaaaagccaggctccaggtccagcgacagccaggtccagctcagaagtccatgatttgggagagaactcagaggcccttggagcacccacagcctaccctgccacccccacactggccactagtactgggtggcatccctgtttgccaatacagctcatgattcctcagataaacagccaggtggggcttggaaagtccagccaagactcattctagaggttgtggtcaccgtagtctctggcttcacatggcctgtcccttgccaagcaaggcctgggcccttccctcctacagacacgatcctagagagggcttgggaagttcagatgycctgagcaaccctcctggctcagcttctgtgctcagcagaattgggcaagatgccctgagcaaccctcctggctcagcttctgtgctcagcagaattgggcaagttgaaccca

SEQ ID NO: 953473 - DNA, 556 bp, Homo sapiens
gtggtcagtataaacaccgaagaagagattggtggagcgatagagaatccagaaatagatccacacatatgcgagcaaccaattctcaacaaagttacatgggcacttcatggagaaaggattgtcctttcaacagattgtgttggaacagttagacatccatgtgcaaaaaaatgaacttcaatccttcagagatctaaatataaaacttaaaacttctaaaagacaacacagaagaaagtctttgaattaggcaaagatttctttggtacaagcccaaaagcacaatccataaagaacacatgagtgaagtggacttcatcaaaagtaaaaacttatgctcttcaaaatacactagtaaaagaattagaagacgaggtgggtggatcacctgaggtcaggagtttgagaccagcctggcaaacatgctgaaaccttgtctctactaaaaataaaaaaaatgagccgggagtgggccrggcgtggtggctcatgcatgtaaccccaacactttgggaggccgaggcgggcagatcacgaggtcaagagatagaga

SEQ ID NO: 953474 - DNA, 711 bp, Homo sapiens
tcttgagggtagagtccctatgatgggtccccataatgggattagtttccttatgaaaggkgacaagaccctttctctctccttcatgtgaggacacagcaggaaggcagccatctgtgagccagaaagtgagccctcacctgatggccaagcctgctgatgctttggttttggactttccagcctccagaatggtgagaagtgaatttccgctgtttaaactccccagtttgtattgtcttattgtagcagactcaactgattaagacaggactctaggggagaagaagaaagatggcgcagataaaagtgagggaaggaagaagggaaagcagatcttcggaagaaagaggccgtaattttggacactggatgttaaccttagaagaggaagccctgggactgtgaagccacagaggcactctgacccactctttctttcgaataatactggaaaatcatctcacttaaactagcaataaaagcttgtgactaaatgcaaagttagtataaaaaaaggaacaattagcataataatatccctacagacactaaggcacaacagaaagatatggtcacaataaaccaaaaactttaatctttcaaaaacaatatgttgttcttttacaaataacagaatttgtgaaagaatagcatctatcagaattaaaataacacataaataaggtgactggataagtagatgacaaa

SEQ ID NO: 953475 - DNA, 667 bp, Homo sapiens
tttgcattcctaccaacagtgtgcaagggttccaacttctcctcatccttgccaayacttgttattttctgcatttttgataatagtcgtactaatgggtatgctttattcatcatagttcaaagctggaaacaacccacgtggcctttgtgggtggattattaaataactgtggtacatccataaccatgccatggaacacttactactcagcaataaaagaacaaactattgatctatgcaaccatctggtagagtctccagaggattgtgtaagtgaaaaatgtcagtccccaaaggttacatactgtgtgattcaatttctataacactgaatcaacacagttacaaaaatggagagaagactcctagctgccagtgattatggatgtggctgtaagaggcaacaggaaggatccttgtagtgatggaagtagcctggattttgcatacattgtcatcagtatcctgattgttacattttattatatgcttgttgcattgtatgtagtgtatacatatttttgctagatgttaccatggaggggaacttggtaaagggcacacgaggtcactgtgtattatttcctacaacttcatgtaaatctgtacttatctcagaattaaaagcctagttccaaacataaagggacggaatcaataatta

SEQ ID NO: 953476 - DNA, 746 bp, Homo sapiens
ttcctttcacaaaagacttctctgtgatatgccacactatttgataacattttatttatttatttatttatttatttatttatttttaggaggagtctmgctctgttgcccaggctggggagcagtggcgtgatctcagctcactgcaacctctgcctcccgggttcaagcgattctcttgcctcagcctcctgagtagctgggattacaggggcataccaccatgcccagctaatttttgtatttttagtagagacagggtttcaccatattggtcaggctggtcttgaacttctgacctcaggtgatccgcccaccttggcctcccaaagtgctgggattacaggcatgagccaccgtgcctggccgtgatagcattttacccacagtagaacttttttcaaaattagagtcaattctctcaaaccatgccactgctttattaactaagtttgcagaatattctaagttctttgttgaagtttcaacaatgttcacagcatcttcaccaggagtagattccatctcaagaaaccactttctttactcatccataagaagcaactccccatccattgaagtttttaacataagattgcagcaagtcagtcacatcttcaggctccacttctaattctagttgtcttgctatttctaccaaatctgcagtgactccctccactgaagtcttgaatccctcaaagtcattcatgagagctggaatccacttctcgcaaactcctgtt

SEQ ID NO: 953477 - DNA, 545 bp, Homo sapiens
ttgtcttggattgttacttggctccatttgagtcatgctaatctctctagcaagtggttgctccacagcctgcttgggcttggattctttctgtaccacaggaccaggctgtaaactttccagactttatgctttgattcccttttaaatatcagttccaactttaagtcatttctttgctcctatatttgatcaaaggctattaggagcagtcaggccacatcttgaatgctttgctgcttagaaatttcttctgccagataccctaggtcatcagtcttaagttcagtcttccacagatccgtaggacatgcagccaagctctgtgccaggacaaaacatgggtgacctatactccggtttccaatacattcctcattttcttctgagacctcatcagcttagccttcactgtccatgtcactatcagcattttggtcacraccatttaatccgtctcttagaagtttcaaacattccctcagcttagtgtcttcttctgagccctccaaattcttccaacctctgcttgttactcagttcca

SEQ ID NO: 953478 - DNA, 592 bp, Homo sapiens
attgtctctgtttgcagatgatatgattatctatttagaaaacccaattgtctcagttcaaaaactccttaagctgataagcaacttcagtaaagtctcaggatacaaaatcaatgtgcaaaaatcacaaccattcctatacaccaataatagacaaacagaaagccaactcatgagtgaactcccattcacagttgctacaaagagaataaaatacctaggaatacaatttaaaagggatgtgaaggacctcttcaaggagaactacaaaacatgctcaaggaagtaagagaggacacaaacaaatagaaaaatattccatgcttatgtataggaagaatcagtattgtgaaaatggccacactggccaaagtaatatataaattcaatgatatttccatcaagctaccactgactttcttcacagaattagaaatactactttaaatttcatatggaaccaaaaaagatcttgtattagctaagaaaatcctaatcaaaaagaacaaagcgggaggcatcacrctacctaacttcaaactataccacaaggctacagtggccaaaacagcatggtactggtaccaaaaca

SEQ ID NO: 953479 - DNA, 769 bp, Homo sapiens
aacccacccagggaccagaggaacttactgcacttaaaggaaggacagaagcctggctggcttcactacctgctaattgtagagccccagggccttgagcaaaataggtggcagcgggtagttgttacagtgggccttggcccaccacagtgctgtgccagctttagacctagtgctgtcccagtggtggtggccacaggggtgcttgtattgctcctctctgagctccaggcagcctagaacagagagacttcatttgtgggaaagtaagggaagtgagtccctgtctgctaattcagaagaattccttcaggtgtgatctcaaaccaccaatgtggtacctccacaagtctgcaaaaaacaatgacattcttcacagaaatagaaataaaaaatgaattctaaaatttatatgtaactacaaaagacttagaatatcctaagctatcctgagcagaaaacaaacaaaactggaggaatcacattatctgatttcaaactatactctatagctatagtaaccagaacagcatggcactggcataaaaacagacacataaaccaatggaacagaatagaaaacccaaaaaccagtttatacatctgcagtgaactcattttcagcaaaggtgccaaagcacatacaatgggaaaatgacagtctcgtcaataaktggtggtgggaaaactggatattcatacgcaggggaatgaaactagacctctatttctcacctcatacaaaaatcaaatcaaaatggattaaaga

SEQ ID NO: 953480 - DNA, 580 bp, Homo sapiens
tcacaagaacagcacaggaaagacctgcccccataattcaatcacctcccactgggttcctcccacaatgtgtgggaactgtsggagttacaattcaagatgagatttgggtggggacacagccaaaccatatcaaccttcatggtccatttggatctaaccaggtgtattagctttctcttattctctctctctatatatatatattgtctgtgatctctggagagacagagagagtgagatttattataaagaattggctcacacagtcacagaggctgaggagtctcatgatctgccatctataactggagccccaggaaaactgctgggagaagttctaatctgagtccaaagacctaagagtcagagagccaatggtgtgattttcagtccaagagccaggaaagaatgatgtctgagctgtagcagagagcagattgtctgtctcccgctcctccttttgttctatcaaggcctctaacagactggctggggcccagcacatgggatggcaacctgcattacttgttctacctgttagggtctgagtgtttgtgatccctttgaaaaagattca

SEQ ID NO: 953481 - DNA, 479 bp, Homo sapiens
gttaggtgctggctggcctcttatgccatcgctttccctgtgtctctcacccscttccagtaaggctatcctggtgtgtttttgtgaggtaacaggagtctgagagaagtagtgggaaacatacaagtgagttttcaagccactgcttacatcaaatttactaccctcccattagccagagcaaatcacgtagacaggcccagactcagtatagatcactaaccatgcacatagatacagagaaactagacaaagtggagccctcagtctagtcctccacagtacatgtggacattttaatgaaattttatgacatggaatatagacttcaaaggtaacaagtacacaggtgtaaaaaaattgctctaagtgctaataggagccatgaaacctgggttttaattttggtttttccaccattatttgtataaccttgaataaatttggtagctagaggaaggaaggaagagatagaagga

SEQ ID NO: 953482 - DNA, 647 bp, Homo sapiens
acacaggctctctggctccctggcttgcgcgaggcaacattagccctgagatttcaactaggaagggtagcacgagatgaagctttctagctgakaaagcttgaaaacagaggctgttctttctctttcttgatcaccctatggaaggctgcccacggaactgcacagaatgagagctcataattgtctgagaaacaagtcaagtgcttttattgctagagtacaaaccacctgacccatgatctcaggccagttttcaggactcccagaagaccgatttcactgtctgcatgtttctctttgtgccaaaggaagcacgttttgccaaagaatgcagggcaaaatatatgactctgttgattcattagtctaacctggcgtctccctggagcatttttgaatttaaaccttacactactaaagctagtgttcttaagttaatatatatgattgcactggaaattttatataatgagcctctgtgtttgtactccccaaagcaattggcaataggctaaaagaaactaaactttgtgaaataataataatgataataaacattagcattgcattgtatgcagaatcactacctcttgtataacaccatcttccaagtgtattacatgaacagggggaaaaatgcaaac

SEQ ID NO: 953483 - DNA, 583 bp, Homo sapiens
ttaaaagcttagggtgcagatacataggaatgtgggggagtttacctaaatagcttgtttmctcatgtggtcctaagaccaacctttgatcatccactggtgcatgattgctcgctattcagggggtcggcaatgttaattaccctctagtggtgtttactcgagacctttgtcatttagtctgtactaaataaatgcgaacttcgcctggcattgaggactacactgcagactcaggctgcagagccccttagccgcactgacaggcaaaatatctgtcagtgtatgtctgtctgtctgtttttttgagacagagtctctgttgcccaggctggagtgcagtggtgcgatctcggctcactgcaagctccgcctcctgggttcatgccattcttctgcctcagcctctcaagtagctgggactacgggcgcctgacaccatgcccggctaattttttatatttttagtagagatagggtttcaccatgttaaccaggatggtctcgatctcctgacctcgtgatccgcccacctttgcctcccaaagtgctgggattacaggcgagagccaccgcacccggc

SEQ ID NO: 953484 - DNA, 604 bp, Homo sapiens
ccaaccctaatgtaaactctgaactctgggttataatcatgtgtctgtggccgggcgtggtggctcatgcctgtaatcccagcactttgggaggccaaggcgagtggatcacctgaggtcaggagtttgagaccagcctggccaacacagtgaaaccccatctctactaaaaatacaaaaattagctgggtgtggtggtgggcacctgtaatctcaactactcgggaggctgaggcaggagaatcccttgaaccctgaagggcacagaggttgcagtgagccgaggctgtgccactgcactccagcctggtgacagagcaagactctgtctcaaaaaacaaacaaacaaaaaaacaaacaaaatgatgtgtctgtgtaggtttatcaaatttaacaactgtaccaggctggtggggacattgatagtgggggagtttatacatatagggggagagagtatataggaattttttgtgctttcctctcaattttgctgtgaacctaaaactgctctaaaaaataaagtctactagaraaaaaaaacaaacctccagtgacttcttattacacgttggataaaattcaaatttcttcccatgtcctt

SEQ ID NO: 953485 - DNA, 665 bp, Homo sapiens
aatccaagaatgaaggaagcttagcagcttccacctagatttcagaggatgtgtgggaaatcctgggtgcccaagcagaaacctgctgcagagacagaggccctgcagagagtccctactagggcaatcccaaggaaaactgtggagtcagagtccgcactggagcactgcctagtggagctgcgggaattgggccactgccctccagacccctgaatgttagagcaactggcagcttgtatcattggcctcgacaggctacaggcactcaactccaacctgtaagggcacccacaggagctgcatcatgcaaagccacagaggtagagttgcccaacgagttgccttgggagcctgcccagcacaacagtgttcccaggttgtgggacatggagtcaaagattattttggagctttaaagttttaagtctgccctgctgggtttcagacttgtgtggaacctactgctcctttcttttggctgatttctcccttttggaatgggaaagtttacccaatgcctataccaccattatatsttggaagtaaataacttgtttttttaatttacaggctcataggagtctcagatgggactttgaacttcggacttgggacttttgaatgatgctggaattagttaagacttttgaggacgatcagga

SEQ ID NO: 953486 - DNA, 567 bp, Homo sapiens
catcctggccaacatggtgaaaccccatctctactaaaagtacaaaaattagctgggtgtggtggtgcacacctgtaatcccagctactcgggaggctgaggcaggagaatcacttgaacccgggaggcagaggttgcagtgagccaagattgtgccactgtactccacctggcgacagagcaagactccatctaaaaaaaaagagagagaatcccttcagtggcagaacttctttcctgacctctgcagatacatctctgttttgaatgtccttgcaactccttcagtagcatctagaaattcaatatgtgtctccaagtttttgcctgtggggttcacgtgtccctccaggcagctttactgaacagggccaaagatggccccacacaagttatctcctctgtgtggcctacttctgatggacaggaaaactcgcacattttttgctttcagcatggagataaatcctgatgcagccgggtagcctcscataacccactgacatcctgaattacttctctaagtgtgagccaagcaccagtcttttatgttttcaactgcaggga

SEQ ID NO: 953487 - DNA, 665 bp, Homo sapiens
tcagcccacttggaccactaacactggtgctgacatacacaaccctggagcccaaagacagatatagtcagccctattgctgccaccactggagccccagggactggcccacctgacatccctgtccctaacataacttcaccacagcctccactaacaattacaccctaagctactgaggaaaccacagatcccactgatgctgctgacagccaaagaaattgcatgaaacacactactgtaagcacccagaattaaagcctaagttccctactcagccaaatccatagatacattataaggaaaaagttatcccctacaaaaacaaatttaaactattggaagaaatgactgttacactacccgtacaaatatcaatataaaaacacaagaaacatgaaaaagcaaggaaataggacaactctaaaagcaacacaataattctctagcaagagatcccaatgaaaaggaaatttgtgaaattctagaaaaagaattcaaaataataatatcaaagcagcttactgagatataagatgtcaggtccagggtcaggttccagcctatgctgaggtccaaaggaagtgggtggatgaatggcagayagctgaaagaacactcggggggctgcaggtaggtgaaatacggctttattcagcagcact

SEQ ID NO: 953488 - DNA, 548 bp, Homo sapiens
ttcatcctgatttagccttcctttggtggctcccaaatttgctacttctcttttttgttttgagacggagtctcactcactctgttgcccaggctgaagtccagtggcacaatcttggctcactgaaacctccgcctcccaggttcaagtgattctcctgcctctcagcctctcaagtagctgggattacagatgtgcaccaccatgcctggctacttattttttaatttttctgtatttttagtagagtcggggtttcaccatgttagccaggctggtcttgaactcctgacctcaagtgatccacctgcctcagcctcccaaagtgctgggattacaggcgtgagccaccgtgcccggttcttcagattggctacttcccttctgcttttgctaggactaccttagtctaggccttcaccatcttcttcctgaattgctaaaacagcttgcctgctagtctctttgtctactcttttctgctccaatttgcctgtgccctgctgctgtayactttttcatatttcagcacattttgttaatagaat

SEQ ID NO: 953489 - DNA, 742 bp, Homo sapiens
aggccagcaatatacctttactgtcctacctcrggggtatatcaactctccaactctttgtcataatcttattcggagagaccctggtcacttttcatatccacaagatatcacattggtccattacattgatgacattatgctaattggatccagtgagaaagaagtagcaaacacattggacttattggtaagacatttgcaggccagaggatgggaataaatccgattaaaatttagagaccttctacctcagtaaaatttctaggggtgcagtggtgtggggcctgtcgaggtattccttctaaggtgaaagataaattgctgcatttggcccctcctacaaccaagaaagaggcacaacacctagggggcttacttggattttggaggcaacacattcttcattggggtgtgttactccagcccatttatcaagtgaccctaaaggctgccaattatgagtggggtccagaacaggagaaggctgtgcaacaggtccaggctgctgtgcaagctgctctgccacttggacaacataacccagcagatccaacggtgcttgaggtgtcggtggcagatagggatgctatttggaacctttggcaggctcccataggtgaatcacagcggaggcttctagggttttggagcaaggccctgtcatcttctgcagataactactctccttttgagagacagctcttggcttgtaactgggctttggtggaaactgaacgtt

SEQ ID NO: 953490 - DNA, 604 bp, Homo sapiens
actgttagaaggaaaactaacacacagaaaggacatccacaccaaaaccccatctgcacatcaccatcatcaaagactaaaggtagataaaaccacaaaaatggggaaaaaccagagcagaaaagctkcaaattctaaaaataagagcacctcttctcctccaaaggaacgaagctcctcgccagcaacggaacaaagctgaacagagaatgacttcgacggttgagagaagaaggcttcagatgatcggtagtaacaaacttctccgagctaaaggaggatgttcgaaaccactgcaaagaagctaaaaaccttgaaaaaagattggatgaatggctaactagaataaacagcgtagagaagatgttaaatgacctgatggagctgaaaaccatggcatgagaactacgtgacacatgcacaagcttcagcagccgattcgatcaagtggaagaaagggtatcagtgattgaagatcaaatgaatgaaatgaagcgagaagacaagtttagagaaaaaagagtgaaaagaaatgaacagagcctccaagaaatatgggactatgtgaaaagaccaaatctacgtctgattggtgtacttgaaa

SEQ ID NO: 953491 - DNA, 643 bp, Homo sapiens
gtatgttcgacaactcctaagctctgaacgcctaaatccctgctccccacaaagacgaattctctggttttgacccaggtgctaccacggctgtgtcacttgagggatgggatttggctccgggggtctgtttccttgtctggaaaccaggcacagtgggggtgtgtccccacgtgacccatctgccctatggccctggcccactcccaaattatctccttcctcaaaagtgaggtgtgcttttggacctcggggacacagtgaggaacagtcattaatgtcaatgaaggggatgtcttaggcagagggaactacatgtgcaaaaaggccccagagaaaaggagagactcagaatggctggtgttcggaatgtgttgggatacttttaaaagatgcatatctgtattttctgttttttttttttttgttgttgttgtttgtttgtttattttacagtgaccttgcagttcttatttattcattttaaccagtatttcttgggcaccaactgtgtgctcaaccacaatccctgctctcaggaagktggaggaagcattcacgaagcagaataaaaaacagaaacatagagcaggtcagatggtggcaaggactccggaggaaagcaaagctcctgaatggggaa

SEQ ID NO: 953492 - DNA, 627 bp, Homo sapiens
gggaatggcagggaggaggggacattggtcttccaagaagagtccttggaagactcttctcccacactctttaaaacctcatttcttctccaaagctcagctcacacattgctccccagaaaggctgcactratgacagtggtctttctcccccttctcttgatcccctctgtgctcacccctctgccccatctttgccacatcctgttccctttcagagtcagtggcttccttctgtctcatctagtgaactgtgagctccctaagaaaaggaacagagtcttacccttgcttttcaccctcaatgtctatagatatgccatatagaaagccacacacagaagacaggtggatttgcaaatgcttggatacaaatgatttcagaggtacagtaagggaacaaaatgtctttgcagagggggcatccgagtgtacctttgaagggtacactcaggaattcccctgagtacactaaggaattccccaggtggtcaccagtgatggaggcaaagctctccaggcagaagaagaccaaagagcagccacccgcctagagtgttagtgccacctcctctctgagggctgtttgtgctcgacctgggagttcgtgctcggccagtgagcatc

SEQ ID NO: 953493 - DNA, 592 bp, Homo sapiens
cgctcagaatggaaacaagcatgtaaacaacagctacagaaaattcaaagcctaggtacagagcaccttgattcagcacctctgggaaattagaaacagtctcttttcaatttagtcttaaaaaatcagcttcatctactatgttcttaagaaaaatggaagttacagtcaaaattaagtttcttgttacctgtatgagagtgaccattgtccctgtttttacatgaagctgtaaatttgattataaatacttgcatacaaatgtgaaacaaaagtcctgggtgagaagacaaagcaaaggaagttacctccaactgtccaagtcattcatatcaatgaccagcttgggatcatgtcattgacctttgaaaatccccattgcctgcaccaccagctacctccaattaagccaggtttttgtgtaactgtggttgaatatcaagtggatcagcagactcaaagcaggagttgatgctggatgcycccatattaatatgacaatatcatgattattttggtatttttcttagtagtttagatgtatatagaacttcaggaagcacttacattttctaatagcattcactctaaa

SEQ ID NO: 953494 - DNA, 447 bp, Homo sapiens
ggaaatagaaaaaagaaaaagaatcagtcacaacccttccctcctcccayaatcactactgctttttgttatttctatgtaaccattttcatatatgtgttttatgaggctgtagttctgttgggcatgtgatttggggtattgctttttcacttaatcataagcatcatccatgttgctgtatggtcatgataatcattatttttaatggttgtaaaaatatttcagtagctgtcacaccacctacttaaccgttttcttattaacagacaatttgctatttctaagccttgttgttataattaaggttgccataaacatcttcatgcatacaatcttttccccattttgggttaatttctttagacagatttctagaagtgaaatatcaaaatacaaacaatttaaacctttcctttttatggttttggatgcatactatcaaat

SEQ ID NO: 953495 - DNA, 648 bp, Homo sapiens
agtgtccataggctgaggagtgtcctgggcctggcccctsaaaccattctttcctcctaggcctctgggcctgtcatgggaggggctgtctccaagatctcccaaatgcctttgaggcctttgttccattgtcttggatattagcacttggctcccttttagtgatgataatctctctagctaatggttgctccccagcctgcttggattctttccctgccacatggccaggctgcaaattttccaaaatttcatgctctgcttcccttttaaatatgagctccaactttcctttgctccaatatatgatcattggctgtgacaagcaggcaggccacctcttgaatgctttgctacttagaaatttcttctgccagttaccctaggtcattactcttaaggtgtctttacagcaatgccctgcttcttggtaccagttttctgtgttaggctacttttgcggtgtttataaaggaatacctgaggacgggtaatttataaagaaaagaggttgaattggctcatggttgtgcaggatgtacaggaagtgtcgtgttggtctctgctaggtttctggtgaggcctcagggagcttttactcatggtggaaggtgaagcgggaacaggcatgtcacatgttgagagcag

SEQ ID NO: 953496 - DNA, 557 bp, Homo sapiens
aatattttcaagtcagtcactaaggtagtagcaatttgtgctttasacaagttttgttaatgtttttcccatgcaatttgaaaatgtattttgcgttcctttttgttttctttttttaaaatttgagacaaggtcttactctgttgcctggctggagtgcagtggtgtgatcatagctcactgcaacctggaattcctgggctcaagcaatcctcctgcctcagcttcctgagtatgtgggactacaggattgtgccaccatgctcaccagattttttaaacaattttttctacagatacgggtctgcctgtgttgcccaggctggtcttgaactcctaggcttaagagatcctcctgcctcagcctcacaaagcactgggcttaaggcgtgatccaccacgcctggcccattctgttttcctgttgtcccatttgcactctttattattgctgcccttggtgagcccttcgaggctggccaggtggacatccttgttcttgacagtattctgaagacagtggctcatgggggcacagcgctggtgaccatcaactc

SEQ ID NO: 953497 - DNA, 578 bp, Homo sapiens
cttcctcccttttttcaggcctttctattctctgagacttaagattattgagattaggccaattaataaccctccagtggcctctaaactttcaagtgaaaggaagaattgcatgtctctcactttaaataaaaaactagaaatagtcaagcttagtgaggaaggcatgttgaaaagctgagataggcccaaagctaagcctcttgcactagttagacaagttgtgaatgcaagaaaaagttcttgcaggaaattaaatatagtactccatcaagcacacaaatgataagaaagtaaaacaacctttttgctgatatggagaaagtttgagtggtctggatagaagatcaacccagccacaacattcccttaggccaaaatgtaatctagggcaaggccctaacacatttcaactccatgaaggcggaaagaggtgaggaagctgcagaataaaagtttgaagctagtagaggttggttcataaaagaagctctctccataacatayaagtgcaaggcgaagtagcaagtgattgtgtagaagccgcaacaagttatccagatctaggtaagataatt

SEQ ID NO: 953498 - DNA, 647 bp, Homo sapiens
tacaagaaggaaaaaacattaatccaaaaacagcaagaaattaggggctaaaatgtgataaaaatggaaagcactaaaatagataatacaaataaatctaaaaaaattactattaataaaaattaaataaattctcaagttaaaaaacacaaaccattattttgtttagaaatacagaattttcctatattctatttgctgtggactcaactgaaagacaagcaaccatgcaattgaaagtgaaagcctagagaaagagatgccagcaaacattaacatctgaaatgccggtgttgttctagtaatacagactttacctggacaaaatcaagaaaaaataggaaatctgaattattctataactatcaaaggaattggatcatttttcaaacatttttacagagaaaacataaagcctaagaagctttatatgtaggcctaccaaccattcaaggaacaaaaaattccaataatacacaaaaactttaaaaataggaaaagagtgaagatggtctgattatttatttatttatttattgagayagagtctcactctgtcgcccaggctggagtgcagtggcgtgatcttggctcactgcaagctccacttcccgggttcacaccattctccttcctcagccttccga

SEQ ID NO: 953499 - DNA, 602 bp, Homo sapiens
tgcgactcgaagaaacagaagttcaaaatgtcctcttacatcagcgttatcaaagagtttatgactaagtccccaaaagaaagtgcaacaaaaataaaaattgaccaatgggacctaattaaactaaaaatcttctgcacagcaaaagaaactatcaacagagtaaacaaacaacccatagaatgggagaatatgttcagaaactacacatctgacaaaggtctaatatccagaatctataagtaacttaaaacaactcaaaaaacaaacaacaacaacaaaatgtaaaaatgggcaaagaacataaacagatatttatcaaaagaagacataaaaatggccaataaacataaaaaatgctttacatcactaatcatcagagaaatgcaaatcaaaaccaaaacgagatatgatttcacagcagtcagaatggctattgctaaaaagtaaaacaataacagttgctggtaaggctacagaaaaagtgaatgcttatacactattggtagaaatagaaaagttcagccactgtasaaagcaatttggagatttctcagagaacttaaaacagaactaccattcaacccagcaatcctatgact

SEQ ID NO: 953500 - DNA, 579 bp, Homo sapiens
tgtcttttgcttcttttgcctccttctcgtattctcttgccactgccatgtaagaagtgctgttcatccaccaccataactctgaggcctcctcagccatgtggaacccttaatgcaattaagcctctttttcttccctgtctcggttatgtctttatcagcagtgtgaatatggactaatacattttgtattgtcaaacttcttaatatttgtggagagaatagatgtgtagtatcttgtgcatttccctgattactaatgaggttgagaaaatttttatgttttgcaggctttctcttttgtgaaatccctattaatgcattttcccaattttctgttgggttgctatttttaaaattagaaataactgtcatcaatccaaaagcttacacatggcagatcccttcacaccagttcacagtacaaagtaactccttgcttgtagaaaacattattattatcattattatttttgagatggaatttgacttttgtagcccaggctggagtgygatggtgtgatctcagctcactgcaacctctgcctcccaggttcaaaggattctcctgcctcagcc

SEQ ID NO: 953501 - DNA, 634 bp, Homo sapiens
actattaggaaggctccttcgatggtggctggccctaccttatatttacccctgatagtgtttgtccaacttcccaaccaactttaattaaaactcacaatctgaccatcctggctaacatggtgaaaccccatctctactaaaagtaaaaaaattagccaggcctggtggcaggcgcctgtagtcccagctacttgggagactgaggcaggagaatcgcttgaacccgggaggcggaggttgcagtgagccaagattgtgccactgcactccagcctgggcaacagggtgagactctgtctcaagcaaaacaaaacaaaaaaaaaacaacaaaaaactcacagtctgtttccctttttggatggagatggggctcccaaggacaggtcatataggtaatgatcattttagttgatgtgatatataggcagttttagagtctcttgctaagtagaaaatgctaattctttaaaaaaagataattcttattaactcttaaaaagtagtttccaatttacgtcaagttgtgtcacattatgtctygccatcaagcctggagtgtgacctgtccagagacggaggacaggctggctgagtagagcctccttaccatttctccacccctgcctgtctc

SEQ ID NO: 953502 - DNA, 752 bp, Homo sapiens
ggcacatgcctatagtctcagctacttgggaggctgaggcaggagaattgcttgaacccaggaggcggaggttgcagtgakccgagatcgtgccgctgcactccagcctgggtggcagagcaggactccgtctcaaaaaaaaaaaaagaaacaaaaggaaaatgaagtcataatttttatcccatctctgtccactgaaaaggcctagaggcaacaatcaacccattgaaataagaacaattagcactgtcaatatcattcctcactaaaaggagtcagaactctttgggtaaacgtcagattctgagtctgaggtagaaaggcacaagaagctggaacatcttatcacgttggaaagaaagaaaacaatcaaagaatattgaagacaaattgaaaagtgtcctactgattaaaaatggcccaatttgagcatcaaaaataatttgaggtagatttgaaaagcatcatgttggaatccataagtctatgatgatctatctatatatatgtatgtatatgtttgtgtgtatacatatatatacacacatacacacacacatatatatacacacatagatacattaaaattgatagtagttgcgcatggtggtgcacgcctgtaatcccagctacttgggaggctgaggcaagagaatcgcttgaaccagggaggcagaggttgcagtgagctgagatcacaccactgcactccagcctgggtgacagagcgagactccaactcaaaaaaaaaa

SEQ ID NO: 953503 - DNA, 752 bp, Homo sapiens
ggcacatgcctatagtctcagctacttgggaggctgaggcaggagaattgcttgaacccaggaggcggaggttgcagtgagccgwgatcgtgccgctgcactccagcctgggtggcagagcaggactccgtctcaaaaaaaaaaaaagaaacaaaaggaaaatgaagtcataatttttatcccatctctgtccactgaaaaggcctagaggcaacaatcaacccattgaaataagaacaattagcactgtcaatatcattcctcactaaaaggagtcagaactctttgggtaaacgtcagattctgagtctgaggtagaaaggcacaagaagctggaacatcttatcacgttggaaagaaagaaaacaatcaaagaatattgaagacaaattgaaaagtgtcctactgattaaaaatggcccaatttgagcatcaaaaataatttgaggtagatttgaaaagcatcatgttggaatccataagtctatgatgatctatctatatatatgtatgtatatgtttgtgtgtatacatatatatacacacatacacacacacatatatatacacacatagatacattaaaattgatagtagttgcgcatggtggtgcacgcctgtaatcccagctacttgggaggctgaggcaagagaatcgcttgaaccagggaggcagaggttgcagtgagctgagatcacaccactgcactccagcctgggtgacagagcgagactccaactcaaaaaaaaaa

SEQ ID NO: 953504 - DNA, 715 bp, Homo sapiens
atgaaccagaaatgacaacagacacaggtgtttagtcattttctttccctgtgggctctcctctcccacacatcacaagcatatctccccaaccaagggaagcgctaggcttgtctcacaacagagtatgaatctggcatgttcatctgagccagcacaactcaccactttaaaaagcacaaacccgtccatcactggaatgtgtatgaagccgcaaaatgttttacctttgctgaactttcaaactgaaatagttcattacacttgagagcgtagctggcataacaaacccagttttcccccactcacttcatgaggcccatattttaaaaaaacattattaatgatcaagagattccgaacagaatctgcctgccaagatttatttggcaaaggaaatttactctatctcttgaaacacagggattaaaaattagatccaatcttctttttgctaaacttttcacctacccacttaagagaaaaatcacaacgctatgcaaaaccagcatggttaagatgaaaccttagcacccagttttctaatgcactcaccctcggtgttggaacctatgttgtcttccagtcccacctcatacgtccctcgacttaagggtgtagtgtgayctgaagcagggtaacttcgaagaacaatttcttcttcaggatgagctgggggaacatccatttccgaaggcactggccctccatctgg

SEQ ID NO: 953505 - DNA, 587 bp, Homo sapiens
tgtttaacttgctcttcttagaaaaacaactcacacaagcccttcttttttaaaagattttacagtgaatacatatggggaagttacattagatcttaaagaatttaacagtagtatttcctggggaatgggaccttttcttatttgctgagaggctgatgaagggccccctttctcgtctatcccaaactcctccaaaactccgaagatgaagggcatactgatctcttatctccagaaaaccagctgaaccaagtggctaggcatgggttttggaatcaaagatctggattggaatcaaagacgtgagtttacctctgtgtctctttatctttaaaaaaatagtatcttagagttggctttgagatttaatgagctctgatgcctctcaagcccttgccacagagcctggtcatggtaattacatttattaaaggccagcttcccaacttgaaagaaggagcactgatggcagattagtaaatacagaactrtcttacctcatatgggaaatttgcatttatagtgatctccagactgatgccaccttattaattggtgaagtttctgaccagcttttggcccct

SEQ ID NO: 953506 - DNA, 708 bp, Homo sapiens
gttttgtttaagggggctaaagacaggacccagttacttctagcttgcagggtttctgctgagaatactgctgttaatctgatagattttcctttataggttacctgactcttttgcttcacatctcttaagattcttcatgttgactttagataacctgatgactatgtgcctaggcagtgttctttttgcaatgaatttcccaggtgttctttgtgcttcttgtatttggatgtctaggtctctagcaaggccagggaagttttccttgattattttctcaaataagttttccaaacttttagatttctcttttacttcaggaacacaaattattcttaggtttggtcatttaatataatcacaactattggaggctttactcattttttaaattctttttttctttgtcttcattggattgggttgattctaaagccttgttttcaagctctgaagttctttcttttatttgtttgattctattgttgaaactttccagtgtattttgcatgtctcttagtgtgtctttcatttccagaagttgtgattatttttaatttatggtatctatttctctggagatttttttcatctatatcctrtattatttttaaaattcctttaacttggttttcacctttctctggtgcctccttaagtagctcaataatcaaccttctgaattcttttttttctggcaaatca

SEQ ID NO: 953507 - DNA, 576 bp, Homo sapiens
aaagtgaagggtctcttcaaggaaaactacaaaccactgctcaaggaaaccagagaggacacaaacaaatggaaaaatattccatgttcayggataggaagaatcaatatcataaaaatggccatactgcccacagtaatttatagattcaatgctattcccattaaactaccattgatattcttcaaggaattaaaaaaaaactattttaaaatctgtatggaaccaaaaaacagcccatatagccaagacaaccctaagcaaaaagaacaaagctgtagtcatcatgctatgggacttcaaactatgctataaggctcagtaaccaaaacagcatgatactggttgaaaaacagatatatagaccaatagaacagaatagagaactcagaaataagattgcccatctacaaccatcaaaacaagcaaaaaccagacaaaacaagcaatggggaaaagggttccctatttaataaatggtgctgggacaactggctatccatatgcagaaaagtgaaactggaactcttcctcacaacttatacaaaaattaactgaagatgaattaaagacttg

SEQ ID NO: 953508 - DNA, 596 bp, Homo sapiens
caatatgaagcagagcaggagtttgttgaatagactgaactaatggagaactgaaataatttttawggctttttaaatttgaaatatcagtgattatttttgttttgcttttcagggtctggagaactttttttgagctatttatagcttttaaatacactttaggtatactgagtagagtatacagaatttgaggcatatttatctctctttgcctaatttccccagaatttgtaaactatttgtgattcttaatttatggcaatgtgtttgtttgcatacatttaataagaatctgtttccttttataatgggacacagttgaaagaactgattattttcccatggttttgactgaaatgaccttgtgagaggttccagcaaagccaatttagaagagcctttgtggacaatgattcttgctgcactttgtgtgggtaatcagtccaagtatatgagactgaagattatttggtaagtaagttagtcctgctgtgattagtctttggtagaagtggaggactagagagagaaagattgtttttcagaagaaaactacagtattagattaacctttgattcctgggtggtcacgt

SEQ ID NO: 953509 - DNA, 564 bp, Homo sapiens
cctaagcagcttttaagaaatgaggaggacttggccaggtaaagaaagataggaagagcattctacacagaggaaataaaaagtacaaaggaaaatagacataaagtagactgtgtgctgaaaagaaactgttcagagtttctagagtataaaaattgaagtatggtgtacaagagatgaggagatggagaggtaagttggaccaggatgtagatggctttggatgccttaatacctatcttcttatatgcaatataacatcctactcagaacaagaggttggcaattctgaactactaagtatggagtaagtatttgttccatttagttgctgaaagttaagttctgttaaacactccccttttttgtgtgtctatgggggaaggtagttggctttcttcttgcccccgacttctaattgacccaaggcttttcatggctgctggcctctctcckcaaaacggcttctggtcattatttagaaataagacatttgatcagaattttaatgggatgctaaaaaacaaaaatattatcacgttgagagtaccacctgttcttaag

SEQ ID NO: 953510 - DNA, 471 bp, Homo sapiens
gaactattcaatgtttattattagraagacttgatattatcaagacatcagttcttctcaactcgatcttctcaatgcaatctcaatcaaaataccagcagcttattttgtaggtatcagcaaagtgattctcaggtttatttggagaggcaaaatacccagaggagccagctcaatattgaaaaagaacagagttggaggattgactctacccgacttcaagacttactattaagcatagtaatcaagacagtatggtactggtgaaagaacaggcaaataaaccaacagaacagggtagaaagcccagaaaaagacccaaataaatatagtcaactgatctttaagaaaggattaagggcaatacagtggacccaaaatagccttttcaacaaatggctctacaacacttggacatccacatgtaacaaaatgaatttagacacagactttacacccagcctaaaaatt

SEQ ID NO: 953511 - DNA, 547 bp, Homo sapiens
gtgaagaatgtcaatggtagtttgatgggaatagcattgaatctataaattactttgcgcagtaggccattttcatgatattgattcttcccatccatgaggatggaatgtttttccatttgtttgtgtcctctcttatttccttgagcagtggtttgtagttccccttgaagaggtccttcacatctcttgtaagttggatgcctagatattttattccctttgtagcaattgcgaatgggagttcactcatgattatgctctctgtttgtctgttgttgatgtataggaatgtttgtgattttcgcacattggttttgtaccctgagactttcctgaagttgcagggaacaacacacaccagggcctatcggagggtggggagcaaggggagggagagcattagggcaaatatctaacgcatgtggggcttaaaacctcaatgacrggttcaaaggtgcagcaaaccaccatggcacatgtatacctatataaaactgcatgttctgcacatgtatcctggaacttaaagtaaaacttaaaaaaa

SEQ ID NO: 953512 - DNA, 736 bp, Homo sapiens
agaaataatttaagaacatttcccagtactgaggtcataagtttccaaattgagttttctcttaamccccacttttcccaccaactactacatttatttttactctgttttgcaacaaagattattatctgtgacctgtctctcattcttttctaaactgacatcaatgaggcatccagtcaccagtaactttcatattgctagaccagcagtcagttctcaggtgccgtgtggtttgctctcacagcagagcttgtatgtgctgtttgcatggcttcccaacctcgccccctcttgctcattttgtcttctccttcccgcctcactgattgctctttctcagcctcctgttctggcacctcctattctctttgagctttaattgttggagtgccccaatattggatgttctgcatgaggtccaaactcaccgtctccatggctctcattcagggcaagatcttgaagcccatccctattttaaggactctatgtctgcagattagaactttcctcctaatcccagactaatctatctagctgtacttgtcacattctctggatgtctgtcatctcagactcaaaatgtacaaaattagatgcctcaccatccccccaaattccacttcacccacagccttcctcatctcagcaatgctacgtctactccttttagttgctcaagccgaacattttgcaatcatcttaagctcctctttttcttttttctttccac

SEQ ID NO: 953513 - DNA, 780 bp, Homo sapiens
tgcagattagaactttcctcctaatcccagactaatctatctagctgtacttgtcacattctctggatgtctgtcatctcagactcaaaatgtacaaaattagatgcctcaccatccccccaaattccacttcacccacagccttcctcatctcagcaatgctacgtctactccttttagttgctcaagccgaacattttgcaatcatcttaagctcctctttttcttttttctttccacctccaatataacaggaaatcccactggctctgccttcaggatgtatttagaatgtaaccagttctctccttcactgctgctgctgtactgagagcatccactttgtctctcgtcggcactgctacgggtcttcccaacaggccttcctgcttctaccctcacacaggctgtccttaactccggagtgacagtaagactgtaaagctgtgttaactcattgtcactactctgctaagaggcctgcttgggtccctctataactcggaagaaaagtcagagcaccccatccccactcctagaagctgataagggcctcatgatctctctgtctcatcatctaccactctccctagctgtcagtctacccctgccactctaattccctgatgtttcttcaacattgccaggaacctgcttacctcagagcctgctgcggactgagttgtcttctccaaaatccatttgtggaggccctcatccccartgggagagtatttggagatgaagcatttggaggtgattaagcttagatgagctcag

SEQ ID NO: 953514 - DNA, 581 bp, Homo sapiens
attacagtagtcaggtacaaggaagtttattattacaggcgatatactttcagtgaagagaaaattgtgtgtatgctttattttgtatattgtaggcagggatttttagtgtttcatttaagggagggattgataatccaggtatttttgactgcctctcagatattctttgttaaatgtcatttatttctttaagaatcctgttcagtcaaatatttacttgctttttaacaaataataactcagggcccttcattcctccttttacattattatagagtagaatttcaacaacagtgaacctaattacataagtctttgtttttatcaaagtttttagtgttttgtcagccaaaactctaaaatattacaaccaaatatcagatggatttagttacaagcagttagatttattttttaagtgtgaatgtattacttctgaataaaggaaagagctgatatcggggaaggtaaattcaccgaaacctaaggcagataattcactgtagatrgataataatttacttttctatagctttgctattttacagggaggagcgtgtgactctggtttatgtgac

SEQ ID NO: 953515 - DNA, 623 bp, Homo sapiens
ccacagttaaaacatagtgattttaaaacatatcataaattctctaacactcctccctttgagaggaggagtctgtgttccctccccttgaatcggggccaaacttagagatgtgcttttttttgttttgttttgttttttgagatggaatctcactctgtcaccccaggctggagtgcagtggcgcactctcggctcactgcaacctccaccccaagggttcaagcgattcttctgcctcagcttcccgagtacctgggatttcaggcacctgccaccacgcctggctaatttttgtatttttagtagagatggggttttatcatcttggccaggctggtcctgaactcctgaccttgtgatccacccaccttggcctcccaaagtgctgggattacaggtgtgagccactgcacccggccagtgatgtgctttttactaatagaattaagcagaagtagggctatgaaattccaagctaggtcagtaaaggccatactatccttggttctcatgagttaccttccttgggggaagtcagccmccatgtaaaacgttatactactctgagaccaccatgcaggagaagagatacatagactctctgaccaactgtccagctg

SEQ ID NO: 953516 - DNA, 623 bp, Homo sapiens
ccacagttaaaacatagtgattttaaaacatatcataaattctctaacactcctccctttgagaggaggagtctgtgttccctccccttgaatcggggccaaacttagagatgtgcttttttttgttttgttttgttttttgagatggaatctcactctgtcaccccaggctggagtgcagtggcgcactctcggctcactgcaacctccaccccaagggttcaagcgattcttctgcctcagcttcccgagtacctgggatttcaggcacctgccaccacgcctggctaatttttgtatttttagtagagatggggttttatcatcttggccaggctggtcctgaactcctgaccttgtgatccacccaccttggcctcccaaagtgctgggattacaggtgtgagccactgcacccggccagtgatgtgctttttactaatagaattaagcagaagtagggctatgaaattccaagctaggtcagtaaaggccatactatccttggttctcatgagttaccttccttgggggaagtcagccaccatgtaaaaygttatactactctgagaccaccatgcaggagaagagatacatagactctctgaccaactgtccagctg

SEQ ID NO: 953517 - DNA, 437 bp, Homo sapiens
agttcctggtctgataatttcaatattccttccatatctgattctgatgcttgatctgtctcttcaaacttttgcttttttcttttagtaagtcttgtaagtttttcttgacagccaaacataatgtactacgtagaagaaaaaaaagaacgacaataaataagcctttagtcatgtggtggttagatgtcaggggaggggaagtattatatagttatgtgattagatctcagtctcttggcaaccctgtacctctgaactgtgaacatctcaagtgtttcttaggtcctccacctcttttaggtggggcaagagggctagagtaaactggaattrggcatttcctttcttctatctggaaggctagagtgggctagagttgagtatttccctttccccaggttggttaggatctgatagaaccccaatagtttagg

SEQ ID NO: 953518 - DNA, 533 bp, Homo sapiens
accatcatgcctggctaatttttgtatttttagtagagacggggtttcaccatgttggtcaggatggtctcgaactgctgacctcatgatccacccacctcggcctcccaaagtactggcttcacaagatrtttgagagttctttccatgtgagtacataaaattttacctcacttctgttaaatgctgcataatattgcattgtgtgaatttagtttagtttaactactcccctactgaaggatatttaggttgtttccaatctatgatggcttcagttgtgggggcttcctcctttgagcatgggctgtctccctgagggtcagttcccccaaattaagggctctctttgcagtaactttcttgtaaatcctgaaacagccacaagctagttataaaatgaagatgttatgaaaaccagttagaattgctggggaattccagacaacatcacgtgactcctccaagtccctagagaactagaatgagactctgaagaggtgggttgggacaggatgctggagagagaagag

SEQ ID NO: 953519 - DNA, 550 bp, Homo sapiens
caagagagtaagaaagatgaatgacaaagtctttttaaaaaaatatttaacctttttaattttgagatcattaattgcagattcattcacatgtagttgtaagagagatcctgtgtagcttttacccagtttcccccagtggtaacatcttccacaactatagtaaaatatcaaaccaggatattgacactgatacagtccagatacagaatatttccatcaccagaaagatgcttcatgttgtccttgatatcttcggatacatttacttcctaccaacttctcctccttaatccttggcaactactactctcttttctatttctatagttttgtcatttcagcaaagctatgtaagaagaattgtgtagtatacaaccttttggcattggttttttcattcggctaattctctggatattcattcagttgttccatgaattaacagcttcgttctttttmctgctgactagacttatctggagtggatgtactacactctacttacccattcagccactgagggacatctggctttggagaggccagt

SEQ ID NO: 953520 - DNA, 614 bp, Homo sapiens
catatattgtggtcttttacacattcagggtttgtggcaaccatgcactgagcaagtctatractgccatttttccaatagcatgtgctcatttcatgtccgtgtcacattttgcttattctcacaatatttcaaactttttcattattgtcatacctgttatgatgatctgtgatcagcaatctttgatattactattaaggtaccaccaaccacactcctgtacgatgtcaaacctaatagataagtctatgtgttctgactgttccaccaggacagccattctcctgtcttgctgcctgcctttgggctccctattccctgagacataaaaatatgaaaattagtccatttaataactctacatttctctgaatcacgttagacaaaaaaatggaaaaaaaatgaaataaccataaaatggcccctaaatgttcaagaaagaggaacagtcacacatctctcactttaaatcaaaagctagaaataattaagattaatgaggaagacgtatcaaaagctgaatcagggcaaaaactaggcctcttgcaccaaatagccaagctgtgaatacaaacaaaaaaattcttgaaggaaattaaatgtgctgctac

SEQ ID NO: 953521 - DNA, 483 bp, Homo sapiens
aggagagtcagcccatcctttgaaacattgaggccaggaattgacttctcctcagttttcttcaagaactttttctttgcattcacaacttggctagctggtgtaagaggtctagctcttggcctatcttggctttctacatgccttcctcacttagctttttatttaaagtgagagatctgtgagtcttcctttcacttgagcccttagaggccattgtagggttattaattagcctgatttcaatattgttgtgtctcagggaatagggaagcccagggaaagggagagagatgagggaacggctggtcggtggagcagtcagaacacacacaacatttctcagttaagttttctgtcttatattgggtacgawttgtggtgccccaaaacaattacaatggtaacatgaaagatcaccgatcacatatcactgtaacagacacattaataatgaaaaagtgtgaaatattacgagaattt

SEQ ID NO: 953522 - DNA, 553 bp, Homo sapiens
gcagagagtttatgagtattaaaggatgcagtgaatggaaagtgcccagcaaagggcctggcacaggaggggcaaaatagaggtttgctgtgaggttcatctggtgactcgatttttctttggatattttccttttttcgttttgtgatcatgcatgccaccttggctctatgataaattacgttgtgtggacaccataagagaggtatttgtgctggaaaagggtttacagtggaggaaggcccgtctccaccttcagggaggaaggctgcctggatccagcacggctcagacagctctgacactggggctgtcgtgtctctttgtgggcagaaagcacaggtcccaggctgggcagagtgggaccctgtggctcaggaggcaggatgggcttgccggagaccccaccccctccccggggctggagctgaagcacagttgggctttgtgcagagtcacgaggggccgctgagggggaactgcgcccggctgagctcacaggcctcagttcttgtaagtggttttkaaagagtcagcggaaagtgctgactga

SEQ ID NO: 953523 - DNA, 769 bp, Homo sapiens
agcatgcactcgtgcacatttttatgtctgcagctcgactttacaggctgttatttgttagaaaagagaatgattgaccgggtgcggtggctcacaactgtaatcccagcactttgggaggccraggctggtgcatcacctgaggtcaggagttcgagactagcctgaccaacatgacgaaactctgtctgtattaaaaatataaaattagcctggcgtggtggtgggcgcctgtaattccagctacttgggagggtgaggcaggagaatcgcttgaatctgggaggcagaggttgcagtgagccgagatcgcgccattgcactccagcctgggcaacaagagtgaaactccgtttcaagaaaaaaaaggaatgatttgggggctgctttgtattaaaagggaaaccttaccgaggacttccttacctttactatctgctaaattaattcctttttaaactcctatatcagtttcacagatgtgaggtcagattattgatttgggacatttcttcttttctgatgtaagcatttagtgtcctaaatttccctctcaccactgtttaagctgcatcccacaaatttagatgtgttttcattttcactcagttgaataaatgttttgatttctcttgagacttctctgcgactcaaggattatttagaagtgtgttttttagtttcctagtttttggagattttctcgtgacctttctgattgatttctagttcgattccacaggggttggggaacacacttggcatgatt

SEQ ID NO: 953524 - DNA, 452 bp, Homo sapiens
tctgttggagtttgctggaggtccactccagaccctgtttgcctgggtgtcagcagcggrggctgcagaacagtgaatattgctgaacagcaaatgttgctgcctgatcattcctctgcaagcttcgtctcagaggtgtacccggccagttgacgtgtcagtctgcccctactgggaggtgcctcctggataggctactcgggggtcagggacccacttgaggaggcagtctgtctgttctcagatctcaaactccgtgccgggagaaccactactctcttcaaaggtgtcagacatggacgtttaaatctgcagaggtttctgctgccttttgttcggctatgtcctgcccccagagttggagcctacagaggcaggcagtcctccttgagctgtggtgggctccaccctgttccatcttccaggccgctttgtttacctattcaagcctt

SEQ ID NO: 953525 - DNA, 452 bp, Homo sapiens
tctgttggagtttgctggaggtccactccagaccctgtttgcctgggtgtcagcagcggaggctgcagaacagtgaatattgctgaacagcaaatgttgctgcctgatcatkcctctgcaagcttcgtctcagaggtgtacccggccagttgacgtgtcagtctgcccctactgggaggtgcctcctggataggctactcgggggtcagggacccacttgaggaggcagtctgtctgttctcagatctcaaactccgtgccgggagaaccactactctcttcaaaggtgtcagacatggacgtttaaatctgcagaggtttctgctgccttttgttcggctatgtcctgcccccagagttggagcctacagaggcaggcagtcctccttgagctgtggtgggctccaccctgttccatcttccaggccgctttgtttacctattcaagcctt

SEQ ID NO: 953526 - DNA, 452 bp, Homo sapiens
tctgttggagtttgctggaggtccactccagaccctgtttgcctgggtgtcagcagcggaggctgcagaacagtgaatattgctgaacagcaaatgttgctgcctgatcattcctctgcaagcttcgtctcagaggtgtacccggccagttgacgtgtcagtctgcccctactgggaggtgcctcctggataggctactcgggggtcagggacccacttgaggaggcagtctgtctgttctcagatctcaaactccgtgccgggagaaccactactctcttcaaaggtgtcagacatggacgtttaaatctgcagaggtttctgctgccttttgttcggctatgycctgcccccagagttggagcctacagaggcaggcagtcctccttgagctgtggtgggctccaccctgttccatcttccaggccgctttgtttacctattcaagcctt

SEQ ID NO: 953527 - DNA, 615 bp, Homo sapiens
tgaacactgttgaaatgacaacaaaagatttagaatattacataaacttagttgatagagagtggcagagtttgagaggattgactccaattttaaaagaacttcyactgtgggtaaggtgctctcgaacaacattgtgtgctacagaaaaatctttaataaaaggaagaatcaatcaatgtggcaaactttactgctgtcttactttcaaaaattgctgcaaccactccaatcttcaataaccatgaccctggtcagcagctatcaacatcgaggcaagaccctccaccagcaaaaagattattatgaattactgaaggctcagaagattattagcattttatcaataaaatatttttaaatcaaggcatgtgaattttttgtaatcataatgctattgcacaattaatagactacagtatagtgtaaacattacttttatgtgcacttggaaaccccaaaaatcatgtgactcactttattgcaatattcacttcattgtagtggtctcaaacagaacccacaatatctctaaggtatgcctctatgtgcataaaaatttttaaagaatcttcaaacggaattaataagtaaatttagcaaggtcactatata

SEQ ID NO: 953528 - DNA, 574 bp, Homo sapiens
actatgttgaataggagtggtgagagagstcatccttgtcttgtgccagttttcaaaggggatgcttcccgtttttgcccattcagtaagatattggctatgggtctgtcaaaaatatctcttattattttgaggtatgttccatcaatacctagttgattgagagtttttagcatgaaaggctgttgaattttgtcaaaggccttttctgcacctattgagataatcatgtggtttttgttgttggttctgtttatgtgatggattacatttattgatttgcatatgttgaaccagccttgcatcccagtgatgaagccgacttgatcgtggtggataagctttttgatatgctgctggatttggtttgccagtattttattgaggattttcacattgatgttcatcagggatattggtctaaaattctctttttttgttgtgtctttgccaggttttgttatcaggatgatgctagcctcataaaatgagttagggaggattccctctttttctattgatttgaatagtttcagaaggaatggtacctgctcctctttgtacctctggtaga

SEQ ID NO: 953529 - DNA, 761 bp, Homo sapiens
aatgaaatatatttgaactgaactaagtaattatgactaactgatgttatttgtcattatatgtgtgattgaccaataactactatcattgtgtttaagtaygagagccaattacagaatataattctaaaaagtaaaagaaaaaaatgatattgcgcatatttgattgggtaaagaaagctacatgtggaggcttaagttcattggggcagataagtgcaatcatgccttatgctcaataagttgagacccgaaattgcttggtgaacagtattaatagtgaccactttatgatatttttaaaaatgttttccaaaagttttaacacaatttattttccacagtaaaaaaataatgttaataatggctgtcttatatgctttgggctagttgcctattcttaaaattctttagaataatttacattatttcatataatacaattctgatcgttttgtaatatattcattttgggaatgttatttattatttagataatgttttaatttaaaaaaatattgttttattaagaaaattacatagttatatcattaaaaactatttctatacatttgtaaagattaaagattgttcatggtctattgtaatcttaccatactgatttaattaaccatgatttacttttctaacattattgacatttttcctatcttaaaaaagaataactttctgttatatgagtcaaaattctactccaattatttaaatatacttattgaccgtgagatggttaatggcaa

SEQ ID NO: 953530 - DNA, 652 bp, Homo sapiens
cccttaagccaaaacttaatctagatcaaatccctaactcyctttaattttatgaaggctgagagaggtgaggaagttgcagaagaaaagtttgaaggtagcataagttggctcctgaggtttagggaaagaagccatctccagaacataaaagtacaaggtgaagcagcaagtgctgatgcggaagctgcatcaagttctacagaagatcgagctaagatcactgatgaaggtggctacactaaacaacacattttccatgtaggcaaaacagtcttctattggaagaagatgccatcaaggactttttttttttttttgagatggagtctcactctgtcacccaggctggtgtgcagtggtgcaatctcagctcactgcaacctccatatgctgggttcaaacaattttcctgcctcagcctcccaagtagttgggactacaggtgtacaccaccatgcctgcctaattttttgtatttttagtagagatggagtttcaccatgctgaccaggctggtctcgaactcctgacctcatgatctgcccgcctcatcctcccaaagtgctgggattacaggcatgagccaccatgcccagccagccacctaggacttttatagctaaagataactcattgcctggattcaaag

SEQ ID NO: 953531 - DNA, 602 bp, Homo sapiens
caaaaaaagtacaagaatgtttacagaagctttattcataatagccaaaaattggaaacaacccagacataaatgggtaaatggctaaacagtagtagtacctccataccatgaatactcaggaatgaaaaaaaaacaagctattgataaacacaacctggatgttatctccagagagttatagtgaggaaggaaaaaaaaaaaagcaaataccaaaaggttacagtctgtatgataccatttatattacattcttgaaatgacaaaattatacaaatgtaaaatatattagtggctatcggggttaaggtgggaaagaagataacatcactgattattagagaactgcaaatcaaaaccacaatgagatactatctcacaccagtcagaatggctattattaaaaagtcaaaagataagacactggtgaggttgcggagaaaaagtgcttacacactgctggtggaagtgtaaattagttcagccattgtggaaagcagtgtggtaattcatcaaagagctaaaaasagaactaccatttgacctagcaaccccgttactgagtatatacccaaaggaatacaagttgttctgtcataaag

SEQ ID NO: 953532 - DNA, 576 bp, Homo sapiens
agttcttgatttgtttctcagcttggtcattgttggcgtatagcagtgctactgatatgtgtacattgattttgtatcctgaaactttatcgaatttatcagatgtaggagctttttggatgagtctttaaggtttatttggtatatgatcctatctttggtgaacagcgacagtttgacttcctttttatcaatttggatgccatttatttctttctcttgtctgattgttctggctaggacttccaatactgtgttgaagacaagttttgaaagtgggcatccttgtcttgttccaattcttagggggaatgctttcaacttttcccagtttagtataatgttggctgtgggtttgtcataggtggcttttattactttgaggtatattccctgtatgccattttttgctgagggttttcatcataaaggaaagctggattttgtcaaatcctttttctgtatctattgagatgatcacatggtttttgtttttaattycctttatgtgatgcatcgcatttattgacttgcttatgttaaatcatccctggatccctgatatgaaacccactt

SEQ ID NO: 953533 - DNA, 519 bp, Homo sapiens
tgggaagtcagtcactcctcattctattccctcccttttgtggtttggaaacaacaattgaccagcattaatattcaaataggtatcatgaaactgamagaatggactttttgtggcaataagatacaaattattaagaagacctgaggccatgccaggcaaaggttacatcatggacctctccctacacttaaagaataagcaatttctaactgccacgaggtttttctttttctctagcagctaaacgatcactggccttgagataagcaatattaaaacaatttgcagctcatccaccaccagacgctgactaactaaccccctattccacaagccataactacagctttgatgagacaagagactggtttcagtaacctcgccctgcaagagaccactgactacggactggttctggccggtttacagaggctgcacacgtgagtgccttcatgcctctgtttcaccctttgatggatagtgcctaattataatgcacttatatgttaagtctcc

SEQ ID NO: 953534 - DNA, 784 bp, Homo sapiens
cccctcccccataccttgccaccacatcaatagggatcctgtatagtagcaggaaacaattatacaactgaatgaaccacatgtctcagaccttagttaagtctctaggaggccaggcatggtggctcactcatgcctataatccccaacactttgggaggctgaggcaggcatatcacttgtggtcaggagtttgagaccagcctgaccaatatggtgaaagctggtctctaccaaaaaatacaaaaattagccagtcatggtggcacacgcctgtattcccagctactcaggaggctgagttgggagaatcacttaaatgcaggaggtggaggttgctgtgagctgagatggtgccactgcactccagcctgagcaacggagtgagaccctgtctgaaaaaaaatggaggctgggcacggtggctcacgcctataatctcagcactttgggaggccaagacaagtggatcacctgaggtcaggagttcaagaccagcctggccaacagtgcaaaaccctgtctctactaaaaatacaaaaattagctgggtgtggtggcgggtgcctgtaattccagctacttgagaggctgaggcacaagaattgcctgaacctgggaggcagaggttgcagtgagccaagatcgcaccactgcaccctatcctcagtgasagagtgagactctgtctcaaatcagtcaatcaatcaatcaatcaatccggaaagctgaagacaagggaaggagacaaaaacaaggacacccaaggaaagtttagcctctg

SEQ ID NO: 953535 - DNA, 784 bp, Homo sapiens
cccctcccccataccttgccaccacatcaatagggatcctgtatagtagcaggaaacaattatacaactgaatgaaccacatgtctcagaccttagttaagtctctaggaggccaggcatggtggctcactcatgcctataatccccaacactttgggaggctgaggcaggcatatcacttgtggtcaggagtttgagaccagcctgaccaatatggtgaaagctggtctctaccaaaaaatacaaaaattagccagtcatggtggcacacgcctgtattcccagctactcaggaggctgagttgggagaatcacttaaatgcaggaggtggaggttgctgtgagctgagatggtgccactgcactccagcctgagcaacggagtgagaccctgtctgaaaaaaaatggaggctgggcacggtggctcacgcctataatctcagcactttgggaggccaagacaagtggatcacctgaggtcaggagttcaagaccagcctggccaacagtgcaaaaccctgtctctactaaaaatacaaaaattagctgggtgtggtggcgggtgcctgtaattccagctacttgagaggctgaggcacaagaattgcctgaacctgggaggcagaggttgcagtgagccaagatcgcaccactgcaccctatcctcagtgagagagtgagactctgtctcaaatcagtcartcaatcaatcaatcaatccggaaagctgaagacaagggaaggagacaaaaacaaggacacccaaggaaagtttagcctctg

SEQ ID NO: 953536 - DNA, 715 bp, Homo sapiens
tgtgaggcaagggatttcaccattccaagcccaccactctccccctagaacrtgtcctagccacggtggccattgctcctgtacaccagggatgtgcccacctcagggactttgcacttgcctttgcctggataaatccctggctaagtacgttttgtgttgctatagcactataccacagaatgggtaatttataaagaatggaaattttctttggctcatgggttggaggctgggaagtccaaaatccaggggggctgcatctggtaagggccttcttgctccatcatcccatggcagaaggtggaaggacaaaggggttgggaaagaaagagagagaagaagggagtcatactcatccttttattaggaatgcactctctctttcttttcttttcttgtcttttttttttttggagatagagtctcactcggccgcccaggctggaatgcagtggtgcaatctcgctcactgcaacctccactttccaggttcaagtgattcttctgcctcagcctcctgggattataggcacctgacaccacatccagctaatttttgtatttttagtagagacagaattttgccatgtttggccaggctggtcttaaactcctgacctcaggtgatccgcctgcctcagcttcccaaagtgctgaaattacagatgtgagccaccacgcctggcctaggaacccactctgtcagtaaccc

SEQ ID NO: 953537 - DNA, 603 bp, Homo sapiens
actttgtgcagctcctgttcccatttgggtctcgctttccctatctgtgtaatgagagggttggactggatgggtgagaagtccccttcccacactgagccgagaagattccatagaaacccaraaaccttccagtagggggttaggggtccagcgccccagcacggttccttgcatggtgctggagcccctttcccctttcctcaggggaaagttcattgcctctgaacagcacaggctcttggcagctatctcctgagtagatttttggatgtgcctttccaactcctcccttcctgacgtcagcagtgcctggtccaagtgggcccccagtggtcttgattccatcctattttccaccttgcacaatctaaaacttgaccaaggtgtgcacctcttgatgctggccaagtactctccccatagatgccctggctggttaatgtatcacactgagggcacggaatgctgcatgaactcattttgatgggctgtgcagagtttcggaaccctctggctccagggccaagtctggttactgcggcagccatgaacgtgcactgctcaggtctcctaccgtggggagcatgattgactgacggc

SEQ ID NO: 953538 - DNA, 564 bp, Homo sapiens
ccatggctattgtgaatagtgctgcaataaacatggagtgcaggtatctttttgatataatgattttatttcatatggattttatttyctttatacccagaagtggtattgctgcattgtatcttagttctatttgtaatgttttgtggaacttctaaactctttttcataatggctctaccaacttacatccctacctagtaaggaggtcgaattcccgatagctttgactgacacagctattccccctgccacttgcagttctcccaataaccgcagaatgtaccaaaaaatatgacatcttcagataaggataacaaccttatccttatccgtgcctctgttgcttagagaacaggatgttctccagtgcttacactcagtgagcccagatgagcttcatctgccatgagctgcttttctgagtcttgggggactggcttgccatggatcctaggcttctgtttattcttgctgcctgtctgtaaataatacatctgcattcactgacttgtgtgagtgtcctgtttcactggactcatgcaggtggtagagctactgggg

SEQ ID NO: 953539 - DNA, 630 bp, Homo sapiens
agcaagatgtggctatggaagaatggctggagaaatataacgtmactggctttgaaaatggagggaggggaccatgaccaaggaatgtaagtgcatgtaagtgccctctagaaatctgaaaagacaaggaagtggattcttccccagaagctccagaaaaaacaaaaaatgtagcactgccgacacctctattttaattcaggaagaattgtgctggactgctaactctagaagtgtaacatcataaatttgtggggtttttaagtcactaaaagctaacaacagcaaagaaaaactatatacaaagaattcccacaataaaactccataaccaaatgccatcgcttgtgaattgtaccaaacatttagagaagaataaataccattgctacccaaagtcttccaaaaatagaagagcagggtcaggagtgatgattcacatctgtaatcccagaatgttgggagttcaaggcaagagttcaagaccagcctggtcaacatagtgaaaccccatctctaccccaaaaaaaaaaaagaaacaaaattagccaagcatggtggtacatgtttgtagttctagctaattgggaggctgaggtggaaggatcacttgagttggagtctatagtg

SEQ ID NO: 953540 - DNA, 630 bp, Homo sapiens
agcaagatgtggctatggaagaatggctggagaaatataacgtaactggctttgaaaatggagggaggggaccatgaccaaggaatgtaagtgcatgtaagtgccctctagaaatctgaaaagacaaggaagtggattcttccccagaagctccagaaaaaacaaaaaatgtagcactgccgacacctctattttaattcaggaagaattgtgctggactgctaactctagaagtgtaacatcataaatttgtggggtttttaagtcactaaaagctaacaacagcaaagaaaaactatatacaaagaattcccacaataaaactccataaccaaatgccatcgcttgtgaattgtaccaaacatttagagaagaataaataccattgctacccaaagtcttccaaaaatagaagagcagggtcaggagtgatgattcacatctgtaatcccagaatgttgggagttcaaggcaagagttcaagaccagcctggtcaacatagtgaaaccccatctctacccmaaaaaaaaaaaagaaacaaaattagccaagcatggtggtacatgtttgtagttctagctaattgggaggctgaggtggaaggatcacttgagttggagtctatagtg

SEQ ID NO: 953541 - DNA, 657 bp, Homo sapiens
aatgtctcctagaagagaatcacttctaagtcatatttaaaattgagacatttttctgtgagcacacacaaggtactttctgtcatggacggaatatttgtgtcctcctcaaaattattatgttgaagccccaacccctaatgtgatggtatttggagatagggcctttgggacataattagagtcatattcagtcacaagggtggggcccatgtgatgggattagtggccttataaaaacagaaagagagggagatttctcttttaacatgcaccaagaaaagaacatgtgaggaccaagcaagaaggcagttgtccacaagccaggaaaaagcccttcagggaatcaaatctgccagcaacttgatcttgaccttcccaacctctggaactatcagaaataaatctctgttgtttaaggcactgagtctatggtattttattatggcaacccaagtagactaagatatttttctattagagatcatttactaccaaatttcaaccaatttttctccctactttactgtttttattataattagctctcatttttctatataaaatagaatcaaaagcaggattaacctttgaggtctgaaacttctccagaatggttgggatcaaratttattttcataatattaaatgtttatt

SEQ ID NO: 953542 - DNA, 648 bp, Homo sapiens
ggagaactacaaaccactgcacaaggaaataaaagagaacacaaatgaaaatattccatgctcctggataggaagaatgagtatcatgaaaattgycatcctgcccaaagtaatttatagattcaatgctattcccattaaactaccactgatattcttcaaagaattagaaaaaaactacttaagacatcatatggaaccaaaatagagcccgtacagccaagtcaatcctaagcaaaaagaacaaggcaggaagcatcacgctactgaacctcaaactatattacaaggctacagtaaccaaaacagcatgatgctggtataaaaacagatgggtagaccaatggaacagaatagagaattcagaaataagaccacacatctacaaccatctgatcttcaacaaacctgacaaaaacaagcaagggggaaaggatctcctattcaataaatggtgctgggaaaactggccagctatatgcggaaaactgaaactggaccccttccttacaccttatacaaaaattaactcaagagggattaaagacttaaatgtaaaacacaaagttacaaaaaaccctagaagaaaatctaggcaatgccattcaggtcatgggcatgcgcaaagatttcatgaagaaatcgcta

SEQ ID NO: 953543 - DNA, 589 bp, Homo sapiens
ttgtcatctgtgcaaatttctagagaaaagtcagaattgtgtttgaagaaatcactctgcacaagtaaacccttgccaaacagcaagtgccaggagacgatgtttcacaaagcttttaaaaattaytattattattattattattattattttgcacacattatctagtttggtaaaactgtcaccaatttacaatccggaatcaccatgtgagtcgaattaacaaatgtattagcaacttgtagtcaaccagattgcagttccagctccctaactcaatgcaattttaataatttctcttctctgagtctatctcagtttctcatctgtaaaatgagtaaaagcaaaccacttgcagttcagatgttgagattcggtgggaaggacctcgagaaacagcggacaatttcaggatttaggactttaggtcttgatgggtggatggtactgtggaagctgtttacttgtttgtatttctagaatcggaaggtaaagcgaaagggatggaaacgagcgaatggaagaagtaggacagacaccagacagagatcaactccagggactcttccggacctgcagggcaggcaga

SEQ ID NO: 953544 - DNA, 603 bp, Homo sapiens
tgacatagactgcatcatcccaatggcataggtgagaggaacagggtttgacaaaaagaatcctttgtggagttgacccattttccagcttgagaaaaagttcaatcagctctgagttaagtttctgcctctgrtgtcttctcatcatcccctgcccacagcctggttccccaccactccccctacctacctcatccctctcttgtgtctagaggtcagagtggtagaaagagctgtgcacttcgagtcaaaggaccaggtctagtttgtgtgtgtgtgtggttttttgtatgtttgtttgttttgttttgttttgttttttaagacggagttttgctcttgttgcccaggctggagtgcaatggctcaatcttggctcaccacaacctccgcctcccaggttcaagtgattctcctgcctcagcctcccgaatagctgggattacaggcatgtgccaccacgccgggctacttttgtatttttagtagagacggggtttctccatattggtcaggctggtcacgaactcacaacctcaggtgatccacccgcctcggcctcccaaagtgctgggattacaggcgtgagccaccatgcctggc

SEQ ID NO: 953545 - DNA, 646 bp, Homo sapiens
cattgcccctccctgggtctgcagctccacgaccctcagactagtacaagacctctccctgggtcgccagcttcctgaccgtcgaactacaacaaaattgctcctccctgcgtctgcagctccacgacccwcacaccagaagaagacctctcctccctgggtcgccagcttcctgaccctcgaactacaacaaaattgctcctccctgggtctgcagctccacgaccctcagaccagaagaagacctctcctccctgggtcgccagctttctgaccctcgaactataacaacaatgctcctgcctcagtctgcagctccacgaccctgaaactagaacaagacgtctcctccctaagtctccagcttccggatcctcgaattgcaacaacgttgctcctgcctgggtcttcagctccacaaaaatcaatctagaacaagacctctcctccctaagtctccagcttccggatcctcgaattgcaacaaccttgctcctgcctgggtcttcagctccacaaaaatcaatctagaacaagacctctcctccctgggtcgccagcttcctgaccctcgaactacaacaaaattgctcctccctgggtcggcagctccacgaccctcagaccacaacaagacctctccctg

SEQ ID NO: 953546 - DNA, 461 bp, Homo sapiens
aactacagcaacgttcctcctgcctgggtctgcagctccaccaacatcaaactagaacaagacctctcctccctgggtcgccagcttcctgaccctcgaataacaacaaaattgctcctccctgggacagcagctccatgaccctcagaccagaacaagacctctcctccctgggtcgccagcttcctgaccctcgaactacaacaaaattgctcctccctgggtctgcagctccacgaccctcaaactcgaacaagacttctcttccccgggttgccagctaccggaccctcgaactacaacaacattgctcctccctgggtctgtagctccacgaccctcagaccagatcaagacctctcctccctgggtcaccagcttccggacccttgaactacaacaaaattgctcctccctgggtctgcagctccaygaccctcacaccagaagaagacctctcc

SEQ ID NO: 953547 - DNA, 478 bp, Homo sapiens
tcaattccattttcatcatcacagatagttacattagcgtgactctacatccataaaamagcttttcagtaacaggattggagcttggggaaatttgactttattgctgctttcagaatgaacccttgtaaagtagcctttgataactttttattacagacatcccttacatgttattcaacctgcgtgcctaccaaagacttagcagagcttcattttctatagtttgtgatatgaaaaccaatgggcttgatgaattggcatttttccaactacacacgtccttggccctgccaagattgtggagaattgccgcctgtggtcgtttcactggggatgtgttgttgccctccatcacccatctgggtctgccagcaaaaagctctactgtgcattattgacccaattatatacaaaggctacacagagatgaaacagttgagcctttcccatccgaagatcctcaaagaacagaaca

SEQ ID NO: 953548 - DNA, 706 bp, Homo sapiens
gttactaccaatgttcacttagggccccagggactccacaatcagcaggtggcaaatccagccaggcttgtgtccctcacttcagagcaatgarttccccaagcctgggaccagcagacatgctgtctgggagctggggcctagagttggggaccttaggaatctacctggtgctctattctactgtggctgagctggcaccaaagcccaagacaaagtccttcccacctttctcttttctttcctcaagcagaggagtcttttcttatggccaccattaccacaggcccatggtaaatagtgtctggctattgctgatggtcactcaagacccaagggctctccagtcagtgtgtggtgaatgctgtcagtcctgagactctcctttcagggcagtgggcccccctctggcccagagcaggtccagaaattctgcctaagggcaaaggcctagaatcagcaggcccaggagcctacttggttctctactccactgtggtggagctgcaagaaaaactcccgtttgctcttgcctccttttctcaagctgaaataggctttcctcatagccaccacagttggcaatatgctgatttacacctgaagccagtatggctctgagtttcacccaaggcctgtggcgagtactgcctggctaccactgccaattattcagggttcaagggctctttagtcagcaggtcat

SEQ ID NO: 953549 - DNA, 612 bp, Homo sapiens
aaatgaagacatttttagaaaaatacaagctgccaagactaaatcataaagaaatagaaaaatgaacagatcaawaatgattaaagaaattgaaaccaaaaacctcacaacaacaaatccagaaatatgtggtttcattgataaattctaccaaatctttaaagaagaattaacttcagttcttcacaaaatcttcccaaaaatcgaagaggaggaaacacttccaaacttattttatgagaccaggattactctaatattaaagtcagacaaaaacactataagaaaagaaaactacaggttaatatccttgatgagcagtaatgcaaaaatcctcaacaaaatactagcaaactaaattcaatagtacagtaaaaaagtcatatcccatgatcaagtgatacctctaggattcaaggatggttcaatatacacaaattaataaatgtgttacaccatattaatagaaagaaaaataaaaatcacatgattatctccatagacacagaaaaagcactggacaaaattcaacaacctttcattataaacacacttaacaaactaggtatagcaagaatgtacttcaacatagtaaaggccatttatgacaaa

SEQ ID NO: 953550 - DNA, 582 bp, Homo sapiens
ccagatgacacagctatgcaycaagctgagagagcaaactgtccaaattggagcatgaagccagaagaggccaggaaaggtaattctaaggggagggaaaaataaactgactgaatacatgttggtttgaaattattgagagaaaatgtttcagattttgaggaaagtttggagatgaaagagtgactattaccaaaaaaataataagacttgtacaagaaatgaaatggaatcacagtatactatgtagttaggatgtgaatagctagagtaaacaaatataaactctcatactgataagctaaaaaaaaaaaaagagggagaaatataatacactgagagaagtttaattttcagaaccacctgccatgagacattttattatcatttacagatgaagaacctgagtttcagagaggttcaatgacttgctacagccatgctatagttgagtaggaaatatggcttcccccagcatcttctgtgccatgatccttgcttcatttgtagcaatgcctctcaggtaacacaaaaatctctgaataacctcaaaatgcaactgtgtgctggaaacctccatcc

SEQ ID NO: 953551 - DNA, 664 bp, Homo sapiens
gtgcgagagtggaccccgacactctaagggcagacaagcctctctggagaactgtgctgtggtcastccccaggcaatttcaagaaaagtcacaacctgtatagctgtacaaactcctccatccgttactgacttggccccaggaggagtcaccagtgagagggtcgcactccccaattttcaataatgcatctccctgctggttcttccttcccacccccggccctgagatggagtctcgctctgtcacccaggctggagtgcagtggcacaatcttggctcactgcaacctccgcctcccagcttcaagcaatcaagcgattctcctgcctcagcctcccaagtagctgggattataggtgcgcatcaccacacctggctaatttttgtatttttagtagaaacggggttttgccatgttggccaggttggtctcgaactcctgacctcaggtgatctgcctgcctcagcctcccaaagtgccaccgcgcccagcctccctactggttcaattggccacttgtgcaatacaaagtgaggagatgacaaagacccccacctatctcaaaacattcccactaccaaatactagcatctgaaatccttgtcattcctttgagttataccattatccccagaggccatgagtgaaattcttgttat

SEQ ID NO: 953552 - DNA, 636 bp, Homo sapiens
ctttgagaagagggggcgtctgggttttcttttggggctgatggaaaggttctaaagttagatagcggcgatggttgcacaatttggggaatgtactaaaaaccacagaatttcccacttttgaaagatgaattttatgtatgtaaattacatttcaataaggctattttaaaaagaaaatatataaaatcaagaagctactctacataattgtttttttctttcgaaaaagggggagggtggtttagacacaaagactctggattcgaatcctgactctcctgacttgtagccgtgggattctggggacctactcagcctccctgaaacccaattgttccatctgtaaagtggggatgttaaaaatgtcctttcctcgcagggctgctgtgaggacgagtgtgatgctgtttgtaggagcccgacacaagggaagtgctcgctgagctctgcagaatgagatgaatggatggtttgtaggaggctggaaaagctccactcacaggtgcttmggtggaaaaatgggctggaaatggggtgaaccaacaactttcagatgacaggactagggaaccctgtggtgacagcgtagtctcctcagacccttgcatgatcacttgccctagagctgtagca

SEQ ID NO: 953553 - DNA, 725 bp, Homo sapiens
catgcgccttgtggtcccagctactcaggaggctgaggtaggaggatcacttgagtctaagaggtagaggcttcrgtgagctgtgaccatgccactgcactccagcctggacgatagagcaagaccttgtctcagaaaacaaaccagaagaatgtcaatgtcatgagggatggaaagaaaaaaggcaaggggagggaagtgtggggaacattctagattaaagaactctaagagacatgacgactaaattcaatggtgatccttgattcatactggatcaaggcagaaagtgtattttcaaagactgataatgagatagttggggaaatttgaatatggactttatattaggtaaaattgctgtatcagtattaacttgttgggtgtgataatggtactgtggtcatgtaggagaatgtccttgttcttaggagatgcaggatgaagtttttagaggtaaaagttcattgggtctgcaacctactttcaaagagtatattagtctcttctcgcacttcagtgaagaaatacccaagactgagtaattcataaagaaaagaggtttaaatgactcacagttcagcatggcgggggaggcctcaggaaacttacaatcgtggtggacaacgcctcctcacaggatggcaggagagagaatgagagctgagcgaagggggaagccccttataaaaccatcagatctcctgagaactcactcactatca

SEQ ID NO: 953554 - DNA, 546 bp, Homo sapiens
aggaacatgcctccacacctgactaattttgttgttgttaactgttttgtagagatgggggtctccctgtgttatccaggctggtcttgaactcctgagctcaagcattctgcccacctcagcctctcaaagtgctgggattataggcatgaaccactatgccctccctactttactttttcatttcacatgttgagagatcattccaaacctgctaatagagagcatccttacttttttttttttttttgagacggagttttgctcttattgcccagggtagagtgcagtggcacaatctcagctcactgcaacctctgccttcaggtttcaagtgattcttctgcctcagcctcccaagtcactgggattacaggcgcccaccaccacacccatctcatttttttgtatttttaktagagacggggtttcaccatgttgctcaggctggtctctaactgctgacctcgtgatccacccgcctcggtctcccaaattgctgggataacaggcgtgagccaccgcgcctgaccctacatcctcact

SEQ ID NO: 953555 - DNA, 742 bp, Homo sapiens
tggctacggacctgggcgtcccctcttgggggcctgggaaaggccccytcccacctgcaggcttggaagtgcctgctcccactacctggcctctccctgctccctgcacctactctgatcttggagcaaagttgaggtcgagcccaggagctgttgcaacctggttgggtgtgtgcacaattggggcagcactgacgctccagccccctgctgccttggctgcctctggactttgggcactggtaagcatgggagggagcctgagtgggggctaagggcggctctgcatgggcctttaggtgtccctcagcatgaatagcctgggtgacagcaggaggcagacaggctcctgggtggaaaggagtgggtccctagtgaagctctaccttcgagctggggaaggcctgaagcctgacggccaggctgccggccccacagaccagagtgggaacttacggtactttttccaggcccacccatggccacccacggaccaatcagtaggcacttcttcctctctgaagtccataaaaaccccagactcagacagactcaaggagatgacaggacaacctgcctgcagagaggagctccccactccagggtctcctctctgttgagaactgaacactcatcgggacgccctgcctgtggagaggagctacccaatgcaggtctcctctgagctgttctgtcactcaataaagctcctctttgccttgctaactgtccacttttccct

SEQ ID NO: 953556 - DNA, 797 bp, Homo sapiens
aatttcaacagggattatgtaaaatctgtagatcaatttggagaatattgtcatgtcaacaatcttaacaatattaagtcttctgatccctgtaaatatggaatgtctttgcatttacattgacctttaattamtttagacaatgttttgtagttttcagagtataattttttactttttaaaaaaatttattagtgttaatattttattgtttctgatgctactataaatggatttttttgttaattttcagattagttattgcaagtgtatagaaattcaactgatgtttgtatactgatcttgtatcttgaaactgctgaacttgttcattagcacaaaatattttcggtggatttcttaggattttctatatataagatcaggtcatctgtgaatagaaacaattttactgcttcctctccaatctggatgccttttatttctttttcttgcctacttgctctggctagtacctccaggataatgttgaatagaagtatcaagaacgaacatccttgtcttattcctgatcttaggggaaggcatcctgtcttttaccactcagttgtgggttttttagatgccctttatctggttgaggaagttcccttctattcttagttttctgactggttttactatgaaagagtgttggactttttgaaatgctctttaaattgtttgccaaattattcttacctgatactgtcattataatacatagttatagccacctctccaggtagctctaagcctgagatgacagggtcaactcattatacatctttgtattt

SEQ ID NO: 953557 - DNA, 742 bp, Homo sapiens
tcgggttggggggtaagggagggttagcattaggagaaatacctaatgtagatgacaggttgatgggtgcagcaaaccaccgtggcacatgtatacctatgtaacaaacctgcatgttatgcacatgtatcccagaacttaaagtataataataataataataataatttcaaaaaagacactggcagactaaaaaggcacaagaggaacactggagcaccacaggtgtgaagatctgaatgtttctccccaccactccccctccctgccaaaattcatgttgaaatcctaacccctgagttgagagtatttggagatgaagactttgcaaggtgattaggtattgagggcaaagccctcatgaatgatgttagtgcccttataaaagagaccttggagagatcccttgagccttctgccatgtgaggacacagtgagaagacaggcatctgtgaagacgtggtccctcaccagacactgaatctgccagtgccgtgtcagccttcatagctgtgagaaataaatatctgttgttcataagccgtccgctctatgctattttgttatagtagcccaaataaatcccacattctttcagattgtcgtggttgcttgcttgcttgccttgtggccggctctcacaccagcctggggactgctctcccatcaggaagttttccttccatggaggtctcttgtttktcctgatgtaggtaggctggcagtaaattctaggagatag

SEQ ID NO: 953558 - DNA, 560 bp, Homo sapiens
acaacttcagcaaattctcaggatacaaaatcaacatacaaaaactactagcatttctatacccacaaattcaagctgaaagccacatcaggaatgcaatcccatacacaatagcctcaaaaaagaataaaatacctaggtatacaaataaccaagaaggtgcaagatccctacaataagaactacaaaacactgctcaaagaaatcagagatgacacatacaaatggaaaaaacattccgtgctcattgatagaaagaatcaacattattaaaatggccatgctgccccaagccatctatagaatcaatgctacttctatcaaattaccaatgacattcctcacagaactagacaaatctattttaaaattcatatggaaccaaaaagagcctgaatagccaaggcaatcctaggcaaaaaaacacaaagctgaaggaatcacactaccactacccaacttcaaactttactatgggactactgtaaacaaagtagcatrgtactgctacaaaaaaagacacatagactaaaggaactgaatagagagcccagaaataa

SEQ ID NO: 953559 - DNA, 588 bp, Homo sapiens
ttaaaatttaatagttacaaacagaaagaataaagaaatttgaattaaaaaatggcaaaaaaaaactttaaaaaagaatttaagacacacttcaaaggagaggatgtataaatggcaaataaacacatgaaaaaaaaaggttcaccgttactagccatgagggaaatgcaaatcaatagcacaatgagaaatcactacatacctattaaagaagctaagataaataattatgacaatatcagattttgaagtagatgaggataaactctcatactgctggtggagatgtaaataagatagccacagtggaaaacagttttgcagtttgttaagaaactaaaactatacttataatatgacccagcaaccacatacttatcccaaattctagggaaatgaacatttatgttcacacaaaaatgtttacataattgttcattgcgcctttatctgtattcacctcaaactggaaacaaccaaagtgtcccacagtattggtaaataccatcatctamtactaggcaatagaattgaatgaaggatacatgcagcaaatttgttgaatctccagtaattaggctgagtgaa

SEQ ID NO: 953560 - DNA, 576 bp, Homo sapiens
agaggaggccaaccaaagggggccaaccattgctgcccagggccctactcacaactcagcttctctctacctctgcttttctctgtctccctctcccagccttactcttctgcctgtttttttctctaggctatgtgtgagttttgcagtcacagttcctgaggatgttttttttataattttttttttaagttccagggtacatttgcaggacgtgcagttttgttacataggtaaacatgtgccatggttgtttgctgcacttatcaacccatcacctaggtattaagcccagcatgcattagctcttttccctaatgctctcccctccttgcccttccccaacagaccccagaaagtgttgttcccttccctgtgtccatgtgttctcattgttcagctcccacttatacatgataacatgcagtgtttggttttctcttcctgcattagtttgctaagtataatggcttccagcttcatccatgtccctgcaaaggayatgatctcattcctttttatggctgcacagtattccatggtgtatatgtaccacattttctttatccaatcttt

SEQ ID NO: 953561 - DNA, 700 bp, Homo sapiens
tcaaaaaacctaaattaaactggctcccacaaaaagggaatttacatgagtgaaagtctagaggcaggctrggctctggccttgacttaatgcaatgactctggccccatttccatgcattgctctgtgttcttccttctgccatgaggctttgtcttcagattgtcagaaaagtagctttagccattctggccttacacccatactctttctatggctcccacttaaaagtagggaaactttttccagaatagcccttctgccaagtttaccttcatatcccatttatccagactgtcatagcacaaattctttgaccaagccctccagccaaggatatgctatgggagcttaagcctcacatcctgaaaacggtactggtgctggcttgggagtaaggctttactgggattttcatagactaattagagctcatccttttagctgaaatcaatgccccaaacctcctagctgctgcaaaatggatgactcaaagccccatgttcaatagaaagtccaacccaagcctcattaaagagcagacgacctacaatgtaaactaataaagataaataataatttagaacattataaaatgaagtaatgtgacaagagatgtttttgataatagatacttccaaaagagaaagattgcctaaagagaattgagaggttagactgtctgtgtgtctgagtgtag

SEQ ID NO: 953562 - DNA, 615 bp, Homo sapiens
aacatatcatttcaagattaattttttaaaatacgtggtctcaaatgggatcactgctggaaaatagctcaaagatacacggattcaagcgraagaagtacattgttggtttcacttacaaattatgataattatttttcaaatccatccaccaattaagcaaaagtttttgtctcaactcatccagtatgtttacatcttccctgctgtcaattgcttatcaatatgcaaataaatttgttctcatattttacacaatatgttcacaagccattgaaactgttcaaactgttcacctgaacatttttaagcagattggaaaactgtaagtttaagtacctatattaggcagttcttgaagctggtgcataccatttccagcaacaaacatcatataacaacaaaaacattgtttttgaaatgctctctttgaagcacaggtttctcccttaaagaggttactctagcccccttactgtcacctgtagcaagaaggaacaaatttgtgattttttttgtgcgtgtgaaaataaatgtatcccagtgatatgtatgattatcacattgatgattttacctcctcttgatgctgactgagagcacaaactggaaaca

SEQ ID NO: 953563 - DNA, 648 bp, Homo sapiens
tttcattaagttgatcttcaatctctgatatcctttcttcaacttgattgatttggctattgatacttgtgtatgcttcacgaagttctcatgctgtgtttttcagctctatcaggtcgtttatgttcttctctaaactggttattctagctaggagttcctgtaactgtttatcgaggtttgtagcttccttgcattggattagaacatgctcctttagctcggaggagtttgttattacccaccttctgaagcctacttctgtcaattcatcaaactaattctccatccagttttgttcccttgctggcaaggaattgtgatcctttgaaggagaagaggagttctggtttttggaattttcagcctttttgcactggtttttcctcatctttgtagatgtatgtaccttttgtctttgatgttggttactttcggatggggtttctgtgtggatgtcttttttgttgatgctgatgctattcctttctgtttgatagtttcccttctaacagttaggcccctctgctgcaagtctgctggagtttgctggaggtccactccagaccctgtttgcctgggtatcaycagcagaggctgcagaacagcaaacattgctgcctgttccttcttctgaaggctttgtcc

SEQ ID NO: 953564 - DNA, 662 bp, Homo sapiens
caattaaattctgacactatctacctggaaaaagcctcagatcccataggttgagggctcagtcccacaagactggccctgcttcagacaaaaatcgttaagtccaggcctctgaaacttctaactgaccagcttcaagttagtgttcatacagtcccctctttgggtttgattaatttgttagagcagctcacagaactcagggaatcttacttacgtttattaaaaaggatatgacaatggatacagatgaagagatgcagaggtcaaggtatgggggaagaggtgcagagcttccgtgccctccttgggtacaccaccctccaggaacctccacatgttcagctattaggatgctctaggaatcctgttcttttgggcctttaatggagacttcattacataggcatgattgattaaaccattggccattggtgatgaacttaactgccaggtccctctgcagaggttgggggttgaagctcaaagtcacaacgttttaatcatgcaaccctcttcatgaccagcctccatccagaaggtatctaagggctgccagctatcagttaatcattagygtacaaaaagacatcactttggagattccctgtaggtgaggaaaggggtggaagggtggaatgatgaccaaatatgtatttcac

SEQ ID NO: 953565 - DNA, 592 bp, Homo sapiens
tagcactgatagctaaaggtaggcttccagcctaccttggaaagcagcaccccacaagagccaaaatagcagcagcccgtatttagaagtcacttgaaaatctgttttaaaaygtatgctacagtaatggttctcaaacttatgagcgtgcattagaatcatctagaggatccaccacgatcaagtcggcttcatccctgggatgcaaggctgactcagcaaatgcaaatcaataaatgtaatccatcacataaacataaccaatgacaaaaaccacataattatctccatagatgcagaaaaggccttcgataaagctcaacacccttcatgctaaaaactctcaataagctaggtattgatgaaacatctcaaaatagtaagagctatatatgacaaacccacagccagtatcatactgaatggacagaagctggagacattccctttgaaaacccacacaagacaaggatggcctctctcaccactcctattcaacatagtattggaagttctggccagggcagtcaggcaagagaaggaaataaagggtattcaaatagaaagagaggaagtcaaattgtctctgttt

SEQ ID NO: 953566 - DNA, 559 bp, Homo sapiens
gaggctgaggcaggagaattgtttcaaccagggaggcagaggttgcggtgagctgagatcgcaccaytgcactccagccagggtgacaaagcaagactccatctcaaaaaaaacaaaaacagaaacaaaaaaacaggagtcactcttttttgcctgccaccatccacgtaagatgtgacttgctccttcttgtcttctgccatgactgtgaggcctccccagccatgtggaactgtaagtctgattaaacctctttcttttgtaaatcaggtatgtctttatcagcagcatgaaaacagatgaatacagtaaattggtaccagtagagtggggtgctgctgaaaatatacccaaaaatatggaagcgactttggaactgggtaacaggcagaggttggaacaacttggaggctcagaaggaaacagaaaaatgtgggaaggtttggaacttcctagagacttgttgaatggctttgcccaaaatgctgatagtgatatggacaataaagtccaggctgaagtggtctcaaatggagatgaggaacttgttgggaactgg

SEQ ID NO: 953567 - DNA, 837 bp, Homo sapiens
tatgtgtgtggatcctagcccctgtatataccagtactcaatttcttttcattgcagaatactattcattgtatgaatatattgaattttatttacctatyaatcatgtaatcgacatttagattgtttctgcttttgggctattatgaacagtgctgttactaacattagtttacagatttttgcgtgaaaatatgttttcatttttcttggttattccttagagtggaattgctgctgggtcatatggtaaatcaatgctgaaccttttaaggtactgctggacttgtttcaaagagttttgcactctcactagcactgaataaagattccaattttcccacatcgttggcaacacttgttattgtctacttttatattgttattgtaataaccatgttatttgtgagtggtatctcattgtggttttgatatgcatttccctgatgactaatgatgtttagcatcttttcatgggcttattgtccatttgtacattttccctgggaaaaagtgtctactcaggtcctctgcccattttttaattgggttgtgtttgtattatttagtttcaagagtttttatatagtctagacataaacccctgatcagatatatgatttgcatatatttttttcagttctgcaggttgtcttttcactttctcgatggtgttctttgaagcaaaacatttttaatttttatgaagttcaatttatttattgttgtgtgtctgtttatgcttttggtgtcgtatggctttcttttcattattaatggtgaagactgatggtgccttcttcttcatcaagagctagcctcagcaatgagaagcat

SEQ ID NO: 953568 - DNA, 644 bp, Homo sapiens
tctatctgagaccacctcagccaggacttcattgtacatatcactattagtattttagtcaaagccactcaacaagtctctggcaagttccaaacttttccacatttttcagtctttttctgaggtgtccaaactgttccaacccctgcctattactcagttccaaagttggttccacatgttcaggtatgtttatagcagcaccccattctctctggtaccgatgtactgtattagttcattttcatactgctataaagaacttccaaatgctgggtaatttataaaggaaagaagtttaatttacttacagtttagcatggctgggaagacctcaggaaacttacaataatggcagaagttaaaggggaagcaaagcaccttcttcacaaggcagcaggaagaagaagtgccaagcaaagggggaagagtctcttataaaaccatcaaatatcatgtgaactcactcactgtcatgagaacagaatgggagaaccccctctttccccatggtttatytacctccacctagtctctccctcaactcatgggaattatgggaattgcaattcaagataagctttggctggggatacaaagcctaagtatattaccctccctgcatattaataaatttgtatgac

SEQ ID NO: 953569 - DNA, 570 bp, Homo sapiens
gctgttagcctgttagggttccctttgtaggtgacctgctctttctctctggctgcctttaacattttttctttcatagcaaccttagaaaatatgatgaytatgtgccttgggcatgatcttcgtgtgtagaatcttgcaggagttacctgcatttcttgaatttgacagttggcctctctaacaatgttagggaagtgttcacggataatattctgaaatatgttttccaagttgtttgctttctccccctctctttcaggaatgccaataattcatagatttggcatttttatataatcccatacttcttggaggttatgttcacttttttattcttttttaaacttttatcagatcgtcttatttctgagaacacgtctttaagttctaagattctttcctcagcttggtttatcctgctgttaatacttgtgatagcattgtgaaattcttgtattgtgttattgagctctgtcagacccattaggaattttttttaatcagctattttttcctttagcttctctgccactgcctctgcagtggaacttcccttgccactctcag

SEQ ID NO: 953570 - DNA, 633 bp, Homo sapiens
tggccagactgtttccacgtgcgtaccggccccggctattcctcactgggcaggtcctcctaacttgggcccccagcatggctactctgctcccacctgatcacttcagtcagtggtgactctgcaattttctrggcagaaaaatccaagagacaacccagaggcttttctgccattgccactgcagtggtattgcccatattgcctttgggctggggaaagaataaggacaccgattgctttgttgaacctccatcatgcttcagccatatggagaggagcccagtctctcttctctgtgaccctaatgtggtttggatttgtgtccctgctgaaatctcatgttgaattgtaatttctattgttggagctggggcctggttggaggtaaatggatcataggggcaaatttccccctttggtactgttctcatgatagagttttcatgagatctggttgtttaaaagtgtgtggcacctcccccttctctttcttgctcctgctcctggccatgtgaagttccagctaccacttcaccttccaccataattgtgagtttcctgaggcctccccagccatgcttcctgtacagcctgcagaaccgtgaaccaattaaacctctttctttataa

SEQ ID NO: 953571 - DNA, 746 bp, Homo sapiens
aggaacactgtactggaatgtaaggagcagagtcccaaggtggctctgggcagtgaacctgtggaggatgctccaggcccatcctcccaaaccattcttttgttctagaactttgggcctgtgatgggaggagaagcatcaaagatctttgaaatgcctttaggatctttctcccattgttttgctaaataacacctggcttctttctattcatgttaatctctttagcaaagggtttggttccttgtccacaccctgaatattctctttcaaatatactttttcactttttacttgaccaggctgtgaattttccaaatctttctgctctgcttcctacttaattataaatgacatctttaagttattccttttgtctcacatctcactgtatgtggttaaaagtagtcacatagctgccttaatgcttcactgcttatatatttcttctggcagatattctagttcatggttacattttgtattccataaagtcctaggacatgaatacaattcaaccaaagtctttgctactatataacaaggatggcctttactttagtttccaatactttgttcctcattttcatatgatacctctttagaatggcctttattatctatatttctaccagatttcyggtcaaaatcacttaagtaatctctaagaagttccagactttccctacacctcccctcttcttctgaaccctaactaaaattgcctttaatgcttcattcatggt

SEQ ID NO: 953572 - DNA, 609 bp, Homo sapiens
cctgcagggctgtctggattccgggccccaccagctcacctgctcagcaccttgggtctaatcttctgatgcgtccctgcccttggagccccacagggaaatgacacaatcccctgtttactacgaggctgggcttcctcatgggccctgcctccaacttcgagacccagttccaccccaggtagctttggacaaatgatggagcctctcggagcctccagtttccctctaacatctcatggatgatgatgtcagcccacagggctgacgggaggatggtcagacaaagcctggattcgccctgcatggttcctggcacgagggcaagcttgaatggaggtaaaaataagatggtcccttccagtcccacccacactcaccagggccagtgttcctccccagtgctctgtgagctgagtggtctctgccttcctgggcccccacctggatgtccagaggccatggctatgatggttaatactgagtgtcaacttgattagactgaaggatgcaaagtattgttcctgggtgtatgtctgagggtgctgccaaaagagattaacatttgagccagtgggctaagaaagccaractcaacctcaatctggg

SEQ ID NO: 953573 - DNA, 580 bp, Homo sapiens
gacttccagtactatgataaataggagtgsagtaagtaggcattctcgtcttgtttcagttcttagagaaagggctttcaacttcatcccatttagtataatattagttgtggattcgttgtatatggcctttattattttgagatatgtttctcgtatgcccagttttttgagggttttttttgtcatgaagagatattgaattttatcaaatgctttttctgtgtctattgtgatgatttttgtccttcattctgtctatgtgatgtgtcatgtttattgatttgcatatgttgagctatccttgcatccctggtataaatcccactttatcatggtatattatctttttgatgtgctgttgcatttactttgctagcgtttgggcagaattttacatctgtgttcataaagaatattagcctgtagtttttctttctttttttttttattttttccttgtctggttttggtattagggtgatgctggcctcatagaatgagttagggaaaattctcttctcctttattttttcaaatagtttcaagaaggttggtattagttcttctttgtatattt

SEQ ID NO: 953574 - DNA, 538 bp, Homo sapiens
tcctaacaagagagtcagcctgtcctttgaagttttgaaaacaggctttgacttttcctctctagctacaaaagaaggtggtaacttctttcaatagaaggctatttcttcgacattgaaaatctgttgtttagtgtaggcaacttcatcaatgatcttagctagatcttctggatagcttgctgcagcttctacatcagcacttgctgcttcaccttgcacttttacgttatggagatggcttcctttcttaaatgtcataagccaatctctgctagcttcaaacttctgcagctttataacctcttccagccttcatagaagagagttaggttcttgttctaaattaggctttggctaaagggaatgctgtggttggtttgatcttctattcagaccattcatactttctccatatcagcaataaggttatttcacttttttttgagacagggtcttrttttgtcacccaggctggagtgcagtgatgcaatcatagttcactgcaaccttgaacttctgagctcaatcctattgc

SEQ ID NO: 953575 - DNA, 512 bp, Homo sapiens
gacgtataatctgattttagaacattttcatgatccctccaaggaaacttcctattagcagtcactctgccttctattgcccccagccctagacaaccactaatctacagcctgtctctatacakttttctgttctgggtatttcatataaattgaatcatattgtatgaatgctgacttgtttcagcatggcttgctggcttctttcacttagcacattttcaagattgctccacattgtagcacgggtcatgtcattctcttttatgcccgttcattttccattgtatgaatagactaacactatatcttgattatccattcgtcagttgatggacatttgaggttttttttaatatatttttttctgattttaataatgatgctatgaactttcatgtgtaaatattttggtgaacttaatgtttttatttgtagctgacatataaatatgagtagagttgctaggttatatggtaggtctaaccttttgaaaacttgtgaaactgttt

SEQ ID NO: 953576 - DNA, 611 bp, Homo sapiens
ttttttgtatttttagtagagatggggtttcaccatgttaggcaggatggtctcgatctcctgatctcgtgatccgcccacctcagcctcccaaagtgctgggattacaggcgtgagccaccgcgcccagccgagatgctgcaatttaaagggggtggcatttggacaaagatttaaaggtgagcaagtgagccatgtaggggtctagagagtgttcctgcagaacaaacggcgaaggcaaaggccctggggcaggagcctgtcttttgtattggaggagcatcagggggtcagggtcagtaggcaggagtggggtgaccaaagacgagaatactaggagaggaaaccagggaccaggttgtccagggcctataggctgttgtaagacctgtccattttatcagcgaaatgggcacacggttgagggtttcaagcagaagcgtgtcatgacctgacttccatgtttttgctttttttttttygagatggggtctcactatgtggcccaggctggggtgcagtggctattcacaggcgctgtcactgcggcctacagccttaaactcccagagtcaagtgacccacctcagcctcctcagtagctgggacta

SEQ ID NO: 953577 - DNA, 611 bp, Homo sapiens
ttttttgtatttttagtagagatggggtttcaccatgttaggcaggatggtctcgatctcctgatctcgtgatccgcccacctcagcctcccaaagtgctgggattacaggcgtgagccaccgcgcccagccgagatgctgcaatttaaagggggtggcatttggacaaagatttaaaggtgagcaagtgagccatgtaggggtctagagagtgttcctgcagaacaaacggcgaaggcaaaggccctggggcaggagcctgtcttttgtattggaggagcatcagggggtcagggtcagtaggcaggagtggggtgaccaaagacgagaatactaggagaggaaaccagggaccaggttgtccagggcctataggctgttgtaagacctgtccattttatcagcgaaatgggcacacggttgagggtttcaagcagaagcgtgtcatgacctgacttccatgtttttgctttttttttttcgagatggggtctcactaygtggcccaggctggggtgcagtggctattcacaggcgctgtcactgcggcctacagccttaaactcccagagtcaagtgacccacctcagcctcctcagtagctgggacta

SEQ ID NO: 953578 - DNA, 611 bp, Homo sapiens
ttttttgtatttttagtagagatggggtttcaccatgttaggcaggatggtctcgatctcctgatctcgtgatccgcccacctcagcctcccaaagtgctgggattacaggcgtgagccaccgcgcccagccgagatgctgcaatttaaagggggtggcatttggacaaagatttaaaggtgagcaagtgagccatgtaggggtctagagagtgttcctgcagaacaaacggcgaaggcaaaggccctggggcaggagcctgtcttttgtattggaggagcatcagggggtcagggtcagtaggcaggagtggggtgaccaaagacgagaatactaggagaggaaaccagggaccaggttgtccagggcctataggctgttgtaagacctgtccattttatcagcgaaatgggcacacggttgagggtttcaagcagaagcgtgtcatgacctgacttccatgtttttgctttttttttttcgagatggggtctcactatgtrgcccaggctggggtgcagtggctattcacaggcgctgtcactgcggcctacagccttaaactcccagagtcaagtgacccacctcagcctcctcagtagctgggacta

SEQ ID NO: 953579 - DNA, 609 bp, Homo sapiens
gcccgccactgcgcccagctaatattttgtatttttagtaaagacgtggtttcaccgtgttagccaggatagtctcgatcycctgacctcgggtgatctgcccgccttggcctcccaaagtgctgggattacaggcgtgagccaccgcacccagcctaatttttatattttcagtagagacggggttttaccttgttggccaggctggtatcaaactcctgtcctcaagtgatctgcctgcctcagcctcccaaagtgctgggattacaggcatgagccaccatgcctggcatgattgcattttgacttctgagacctgcaggagccaaaatcttagggactctaatattctcttgtttcactgtgggccatcaatgctttggtgaataagagaaataagatgatgttggggcagatagggcttttaagcaacctaaattaggggaggggttcttctgggccctctggaaatttaccagatcttatcagatcttaaagcaaaatcccatagacattgagttggataaaataagccaggcacagaaagtataaactgtatgattccattcgtagggagtccaaaagcaagcaaaactaatcgacaaggtt

SEQ ID NO: 953580 - DNA, 624 bp, Homo sapiens
taaaaatgtatttcctagatagtaagacttataaatcaaaattactccttgatccatgggctacagaacggatgctgtgttagcagacaggaaaacaacattcagctccttgtaagtctccrtcagagctcttgggtgaccagatgcattgttactgattttgaaacaaatctttttatctgaccagtaaatctcaacagtgggtttaaaattttcagtaaaccatgctgtaaacagatgtgctatcatctaggccttgtttcatttttagcacacaggcagagtagattgagtataattcttaagggccctagacatttcagaatggtaaataaacattgacttcatcctaaagtcaccagttgcattaacccctaagaagagagtcagcctgttctttgaaactttgaagccaggccttggcttctctctagccatgaaagtcccagatggcattttcttcaagacaaggagttttcatctccattcaaagtctgtttagtgtagccacctttatcaattatcttcactaggtcttctcagtaacttgctgtaacttctgcatcagcacttgctgcttcaccttgcacttttatgttatggagacagcttctttacttaagc

SEQ ID NO: 953581 - DNA, 631 bp, Homo sapiens
cacattactcaacttcaaactatactgcaaggctacagtaacaaaaatagcacagtactggtacaaaaacagacacatagaccaatggaacagaatagaaaactcataaataaaggtgcacacttataaccatctgatctttgataaagccaacaataacaagcaatagggaaaggattccctattcaatagagggtggtgggtagccatattcagaagaatgaaactagatccttacttttcaccatatacaaaattaactaaagatggattaaagatttaattgtaagccctcaaactgtaaaaactctagaagaaaatttaggaaatactcttattgacattgaccttggcaaagaatgtatggctaagtccccaaaagcaattgccacaaaaacaaaaattgacaagtgggacaaactaaagagcttctgcacagcaaaagaaaccatcaacagagtaaacagacaacctatggaatggtagaaaatacttacgaactatgcctccarcgaaggtccaatatctagattctataagaaacttaaatcaatcaacaagcaaaaaacaaataaccccattaaacagtgggcaaaagacatgaacaaacacttttgaaaagaagacttac

SEQ ID NO: 953582 - DNA, 582 bp, Homo sapiens
aaaatgagggagaatcataaatggcagctgtattattagcttgtcctggaaaggtcatacttcagttcactctaatagcgaactctaatagtctgacccaaatgagttttcctgaggatttgagatctctaaaaataataatagatgaagaaagacacaaaatttcacattaaatatgatgtctatggggctcaagagaaaagctactggtgaattaaattccttatgtgatctctccttaaggatgtctgttttacttaaccttactttcctgattttaaattgaggcctttcttcaaaatactgctttttctaaattctatttttatgcattcttcttcatgatgaccttgtgagtggaaaaacaactccaactattttttctctgctctcacaccaatcaacacagaagacatctgtgaccaaatgtgtatgggtttttctccacacaccaagcaagcagtcaattctgtagcagacgccaacggggtatcctccaatttaattytgacactgtctacttgaagatagcgtcagaatccacaggttgagggctcggtctcacaaggctgcccctccttc

SEQ ID NO: 953583 - DNA, 622 bp, Homo sapiens
atgtggatggagggaaaatgatggggagaggcctttgcttgtcagcttgtagatgctcaattagctcccaggcacacagaaaaggccccscttcccaaatcacatctatattcatgatggggccgacaggctgcaggggcaaattgcacattcttccttctgatttttcatttatttcctggtgatatatttcatcttggcaaaaagcaggggttccgagctcacgcagagaggcaggcatgccatagctggactgggcatcagaaactctcctgcactctgtgaacgactaaaggaagcgtagcaagcaatgcccagtgctgtgatttgtctattttgggaggttgcagggcctgaaggtgcttcgaggtcatcttcatgtcttcattctccattgatgctagtgaccaccacatctctacctctccagcccaaacctcttccctgaactctagaccagcactgtccccatagaatctttgtgataatgaaaatgttcattctcctctaatactgcagccactggccacaggtggctactgagcccttgaaatgtggcaagtgcaactgtgggactgaatgtgtcattttatataatattaattcatttaaatgtaaatct

SEQ ID NO: 953584 - DNA, 661 bp, Homo sapiens
ggcagcgccaaggacactcagggacggaggaaccgacaggggacttgacgctccgccactccgaccagccgccccttgtccccgccgtcctcgtccgccactgagatatcccccacggtctacccacccgtcggctcccacctgcgacccaaggacccaagtcttccaagagctcagccgttagaattcaaaggttcttctttttaaataggagttaaaccctctagctagaaagccgattggcctgcgctcgagcgaggctgccttgtgattggttgacaacaaacccgacgccttgagtcgcgtttaagggcgcacaccgcgcgcaggcgcacttgctccctaagaacccggaagtggtggagccaacggccagccagacctgtggcagtcccagccccagggtgctctccgcggtcggccatttatcggtgaagcaacagccccttgacgtcaagcttgacgcattggagataaagtccaaggaggtgaactaacctttgaacgtgccagtaagtaagatggcgagraaagcaagagagagtgggaccgatcgatagcgcagcggtcggcttggcgccctttcagcgtgcgcagtgaacgtgcgctcggagcggtagattgggcaggattcgcgcctccatttttccaggagagagcg

SEQ ID NO: 953585 - DNA, 620 bp, Homo sapiens
tgtagttctccttgaagagatccttcacatcccttgtaagttgtattcctaggtattttattctcttagcagcaattgtgaatgggagttcactcatgatttggctctctgtttgtctgttattaatgtataggaatacttgtgttttttgcacattgattttgtatactgagactttgctgaagttgcttatcagcttaaggaggttttgggccgagacgatggggttttctaaatatacaatcatgtcatctgcaaacagagacaatatgacttcctgtcttcctatttgaataccctttattgctttctcttgcctgattgccctgcccagaacttccaatactatgttaaataggagtggtgagagaggggcatccttgtcctgcgccggttttcaaagggaatcattccagtttttgcccattcagtatgatattggctgtgggtttgtcataaatagctcttattattttgagatatgttccatygatacctagtttactgagaatttttagcatgaggagtgttgaattttatcgaagaccttttctgcatctattgagataatcatgtggtttttgttattggttctgtttatgtgatggattacatttatt

SEQ ID NO: 953586 - DNA, 634 bp, Homo sapiens
cgcctgccactacacccagttaatttttgtatttttagtagagatgggatttcgccatgttggccaggctggtctcgaactcctgacctcaggtratctgcttgccttggcctcccaaagtgctgggattacaggtgtgagccaccatgcctggcctggactcccatctaacttaatcttcataaatatttctttataaagatgaccctatgtgtcagttttcagagggagaaactagcatttactttgtactattctctgacgggagctgtgctaggagctttacagattttatcccatgccatcctcaagacaatgcttttaaatttatttttaaatttattattattattattttgagatggagtttcactcttcttgcccaggctggagtgaaatagcgccatctcggctcactgcaacctctgactcccaggttcaagcgattctcctgcctcagcctcctgagtagctgggattacaggtgcctgccaccacgcctggctaatttttgtatttttagtagagacagggtttcaccatgttggccaggctagtctaaaattcctgacttcaggtgatccacctgtctcagcctcccaaaatgctgggattacaggcgtgagccactgca

SEQ ID NO: 953587 - DNA, 588 bp, Homo sapiens
ccgggactcaaatgatgcctgtatgtttctgtttgtctctccactcagctctgagactctctgctcttctttgagttttggcttcattcccattcatgcttagacagggtttctttgcatcgtgggaaacagggtcctttgcagctctcacttctaagaaagtgagaccctccccctcctggcattgaatatcaaatttcagtgaagattccgattagctcttcttgcggcacgtgcccactgcttgagccaatcagcatggaggggaaatagggtcttgtaattgggtcaagtgcctactcctgcagccctgcttcggatggggggagaattgatagcgctgcaagagaagtgtggggccaggcaagccagcagaggccaggccatcgattacaaagtagctctgtggcaatcaagtccttcatccacattcccagccccagggaaatcccagtctaagcaaaggacatcttggaggaggtggcgcctcacaccttctgaacctttccttttggctctgcrtctgtgctacttggtgacaggtgcatctcttgtgacagcctcacctcttgcagatccttaaggtct

SEQ ID NO: 953588 - DNA, 591 bp, Homo sapiens
ttttctggaatcctgattgtgctagcagtgaagttgtcatgtgaacagactcaggacctctggttagccaggatgttacaggtggtgaaattagatgttttctcttttcttggagtagggtttgttcttttatgagtttatgtaatggcttgagttgattggcctccagccaggaggtggcactttcaagaaagcatgagctgcggtagtatagggggtatacaagcttgccctaaggtcacctggataagtattcaggtttctcatgtgatgggtggggtcatagagctcccaagagattatttcttttgtctttggctacctgggcaggtaaagaaagaccatcagggcagtgttaggtgtgtctgagctaaaactccctttgggcagggcttgctgcaactgctgaggggatgggggtgagttctcaggccaatgaagttgtgttcccagccggattatggctgcctctgttgcatcatactgtcgctaggaaagtgtgggaaagctggyagtgacaagcctcaccctgctcccatgcagccagcaaaacctgtctcactcccaccatgcctccccagtagcaccaag

SEQ ID NO: 953589 - DNA, 573 bp, Homo sapiens
gacaggttggagtaaaaaacttcatcacaaacctgttaacaagccatccccccatgaggtcatggaggccacaagagtagtaaaaacaaggcactcctgctccttataggktggggttttaggtagaggcctaaggggagtcaggactcccaccccaatgggcaataacaaaaaaccttcacttttcctcatatcaatggagcttaggtgggaatctgtattctacatctacatgacagtagaaggtgacattctttcccattcccccactggaatagtgtcagaggaaagcagctaaaatgaaatgtttaaagaatatttgcattcttacaactaatactcaaaatgtctagctttcagtaaaatccatcattataccaaagactcagaaaattttgcctgaatgagaaaaaatgaacaaccaacaccaaaagcaagatgacataaatgttaggattatctgtcaaaactttaaaaatagctatgataaaaatacaattatgaagcaataatgaacatgcttgaaggaaatggaaaaaaaaattctcagcaaagtaatagaaaatttaggaa

SEQ ID NO: 953590 - DNA, 573 bp, Homo sapiens
gacaggttggagtaaaaaacttcatcacaaacctgttaacaagccatccccccatgaggtcatggaggccacaagagtagtaaaaacaaggcactcctgctccttatagggtggggttttaggtagaggcctaaggggagtcaggactcccaccccaatgggcaataacaaaaaaccttcacttttcctcatatcaatggagcttaggtgggaatctgtattctacatctacatgacagtagaaggtgacattctttcccattcccccactggaatagtgtcagaggaaagcagctaaaatgaaatgtttaaagaatatttgcattcttacaactaatactcaaaatgtctagctttcagtaaaatccatcattataccaaagactcagaaaattttgcctgaatgagaaaaaatgaacaaccaacaccaaaagcaagatgacataaatgttaggattatctgtcaaaactttaaaaatrgctatgataaaaatacaattatgaagcaataatgaacatgcttgaaggaaatggaaaaaaaaattctcagcaaagtaatagaaaatttaggaa

SEQ ID NO: 953591 - DNA, 559 bp, Homo sapiens
gatcctggcccttcctcttcctatgtggaacctgggattccaactgctgggcrggaagtagaagcgctctagtggagggactctggccttgcgagagtccctgtttccccctttttcccttttcacccaataaaaccctgtcttactcaccaaattgtctgcaagcctgaattttcatggctgtgggacaaagaaccccatctttagctgaactaaggaaaagtcctgcaacagtagggcagataaggtgtactgctggccttgccagctaaaagaccactgcttctgatggtcttaatgattaagtatagagaaaaaagaactaaccatatcaataacagcatagcaggtaccaggagatgtgttaatatttccattaatgaaaccacatctggaatagcagatgcaattggaatatttacctgactaaattttcaataattcaccatcattctccataatccatttgtcttccgcagttgaataatgagttgaatagagatatgctaagaaccaccagccctgcatctttcaagtccttgatggtgccatcctttct

SEQ ID NO: 953592 - DNA, 648 bp, Homo sapiens
gctcactcatggcagcaaatgtctggctggggcygagtggactcgggggctttgtttccgtgggtgccacccacggaggtgatacgcgtggcgctctcgccacatgccatggcccgtgcgtctgggggctcgcagcctcccacgatccctgcttctgcactgcggtcttgcacctgctgcttgtcagcgtggactcctctgaacaggggctgtgccacttgcttgggggccacggtgcaggatgctattttgtctccaacacatttttccttgttaaaattagctcctctttagaaccttctgctggccagtgtgtctcttcccatcctagctttgtgtcaccctcacactcggggggcaaatctcgtgagtcctcagccagcaactgatactgggtcgatgtggatggagaagactgccccccaactcctgaagatgatttatcccctcgcttctttcccaaagcaactgctgaacagataacactttattccctgaaggaagatcagaaatctactccaagcatttgtcacaagtaggaaaatagtcctttcagatcctatgagtacaaaacattgaaagtcccaggacggactgcataggtccagcctcctgtgagacacggacttctctcacgcttctgcattg

SEQ ID NO: 953593 - DNA, 648 bp, Homo sapiens
gctcactcatggcagcaaatgtctggctggggctgagtggactcgggggctttgtttccgtgggtgccacccacggaggtgatacgcgtggcrctctcgccacatgccatggcccgtgcgtctgggggctcgcagcctcccacgatccctgcttctgcactgcggtcttgcacctgctgcttgtcagcgtggactcctctgaacaggggctgtgccacttgcttgggggccacggtgcaggatgctattttgtctccaacacatttttccttgttaaaattagctcctctttagaaccttctgctggccagtgtgtctcttcccatcctagctttgtgtcaccctcacactcggggggcaaatctcgtgagtcctcagccagcaactgatactgggtcgatgtggatggagaagactgccccccaactcctgaagatgatttatcccctcgcttctttcccaaagcaactgctgaacagataacactttattccctgaaggaagatcagaaatctactccaagcatttgtcacaagtaggaaaatagtcctttcagatcctatgagtacaaaacattgaaagtcccaggacggactgcataggtccagcctcctgtgagacacggacttctctcacgcttctgcattg

SEQ ID NO: 953594 - DNA, 434 bp, Homo sapiens
tactctttttctttttctttttttttttttttgagaaagagtcacactctgttgcccaggctggagtgcagtggcacaatgttggctcgctacaacctctgcttcctaggttcaagcgatcctcctgcctcagcctccctaatagctgggactacaggtgtgcgccaccatgcctggctaatttttgtatttttagtagagatggtgtttcaccatgttggccaggctggtctcgatctcctgaccccacatgaccttcctgcctcagcctcctgaagtgctgggattacaggtgtgagccactgcaccagtcaagctgctggattttgaagctaccatagagttgtagagaaggtaatggtagtaggccaagtttaatggacacaaaccacrctgctccaaattcagtcatttttctacaataaacactctta

SEQ ID NO: 953595 - DNA, 630 bp, Homo sapiens
ggcctggggcacccctagaccccaagccatcaccgtttaaggaagggtaccccccattcctgatggggcatggtayacagatgggtctagccaaggatctaatgctgcctggaccgctgttgcagtccaacctagtacagacaccatatggtttgaaaccaggtgtgggcaaagtagccaatgggctgaacttacagcagtatagatggtgatcactaaggagcagatatctatggtgatttgtaccgatagctgggcagcctaccgaggcttaaccttgtggttaactacttggaaaatacaaaattggctagtcagccactgacctatgtcatggagccaagtgatgtggcaagacctctgggaaatggatcatcagaaagatgtaattatttatcatgtgtcaggccatatgcctttggccacctttggcaatgatgaggcagatgtcttggccaaggtccaatggttagtcggcaccaacacaagatgtggccttctggctacaccagaaactgggacatgccaggggcaaactgatgtaacagggcaataagtgttggggtctgtccctgcccatgcaaggtatttgggaggctcgtcagaaatgcccagtatgtgcttggtcat

SEQ ID NO: 953596 - DNA, 587 bp, Homo sapiens
gctaagatccagaagaaccattaactcaccattaactctacagtctcagcattactgagctttctgtttaaaggttaaggccgtttataactcaacaacccctcargtcattcatgaaatacatcgcagcaccaagaaagtagtgttttcttccttaaacacatctcttatcccatcattcttctgctcaaaaatctgtgcttctctactgcttccagactccttaccatggaattcaacgtcctctatgatctggaccaaatgtcctttttggcgtatttcatactatccttaggttcccctggaaccctgaccccaggcaatcaagcagctcttggttctttcaatgtacctgatactttgccaatgatcttccatataagatgccctctctacctctgtctaaatcttattttaatatatgtgctgccgaaacgagaatgaaatcttcctactttgtaagaccaaactcagacaatattacctctatgaagatctttggtgtcagctattggaattaaatattccttatttgtgttaatagcacgtagtttaaaccttggttaaagcatttaatgttttctttt

SEQ ID NO: 953597 - DNA, 792 bp, Homo sapiens
ctcactgctattacagtacctatgtgttcttggctttgcctttttaaaaacatagattataagatccctaagttagaggtgttttcccctttcttattggtatcytctgccctggcacagggcccagcacacagtggcacccaaatcatgtttgttatatgaatgaacaatgcatagatgagatcttccaaaagcagccagtgacattttctaatgtatataaagttctatatatagaacgtataaaaacgttcagaagaactgcattttaccaaatgaggagactgaggcagggtagagcaaaagcaatatgtgagtatcacaaagtagaactcgaaatttgtgaatccagttacccaacttattctatacagccatcccagaaaatgatttttaagacttcattaaagcataagtagatttagccaatgattagacccctaaaagagagtgaaagtggacctaaagaaataaagcaaaatccaaaaaaaaaaaaaatcaatacacattatgactgttcttcctcctttggtttagttttcatgagaatctttaactgtggcattttgccgcaggcagataattaaattctcaaagtaagggaaatgagtcaaaagaggacattgggttttcacagtgagatggggcatgagtatatctaaagccaatttataagcccgtggaataattcaaaaaggaacttttttaagtgttgcacacttgggcactggaacaaatgggtaacaactgaaatctagattggcactcagtaggtgtgtaaacctgggcaaa

SEQ ID NO: 953598 - DNA, 624 bp, Homo sapiens
cacttgtggcctatggagaaatacatcagatgaagactatagagatttagctgtagaggataaatgaagagattgcttagttaagtaagtagactcttwagctcattttttgatctatttaattttaggtggtttggtttatgggtaacctgggtaaagagcatactccaaactcttggtattatcctcccgatagtcataataatagtttccctggtacactgtattctctcaaaggttttaagtgcttccacgcagccattgctagaatgtcaaatggtctctcttcaattagaatgacaagagctgaaagaaatgtgtgaccatgaggacaccataacctatgaatgatgtggtgagaccagaaacccgaaataatggtaactgagagtggtgctaaggccctaagttttggtcacactctcacctaagtgagaaccttatcaaaaaggggggaattttctttttaagcaaaagcataggaggcaattgttttggactgagttcatgcactaggccccaaaagaccaaaccaaaccaaaccaaaacagagtcgcttgtgctaagacattaaggaaacacatagatcctagaaaagaccaggttttgtttttctcctgcaaa

SEQ ID NO: 953599 - DNA, 618 bp, Homo sapiens
ctaatcagagaagttaggcaagaaaaataaataaaaagcatctaaattggaaaggaagaataaaattatctcataagatgacatggtcttacatgtggagcaccctaaaaatagaacacacacataataaaatctgatagaactaacaaataaattcagtaaactttcaaaacacgaaatgaacatgcaaaaaaacaattaaatttatatacaccaaaaatgaacaataccaaaaggaaattaagaaaacaattccatttaaatggtatcaaaaagaatactcaggaataaacttagccaagaagacaaaagactgtacactgaaaactacaaaaagattctgaaaaaaattaaagaagatgcacataagtggaaagatatccacaggaaacttctccaggcagccttgaaccaacccagttcttccactattctcacttgtagttctcaagaataactgtagaatgtactgggaatgcaacacacgaatataggaggaagtgactggaaggctctgttccagtctcctctagacacaggatgtccttcaatrttttagcctcacaaattctattacccttagagtgtaaaaccaaagatgaactactctcctgggcc

SEQ ID NO: 953600 - DNA, 465 bp, Homo sapiens
tctgctcatcctctaaacttctacacacctagagaaaaccagaggtcaaaccttggacctcatcttgacgatctcatctctctcctatttcctyccacaaactctacagtgttacgtccaactgctttcctcacatctccacttggatgctacctggatctcagacttcacgtccacactgaaatgattttcctccctgaacctgctcctcccacagtcacttaatggcaactccacctctccagatgctcaggtcgaatgccatgaggcatccttgcctcctcccactctcacacatccaatccgtcaacagtgtggcctgctggctgtacactcagaccatttacagaatctgaccacttttttgttttttaaacaggcttttttgctctttaaaccacttctatcactgatttgagccacagtcatctcttgccagaacaactgtacttgtctccagcccag

SEQ ID NO: 953601 - DNA, 743 bp, Homo sapiens
gctgcagcacagcacaggttgctgcctgcttcttcctctggaagcttcatcccagagggaggggcgctcaccagatcccagccagagctctcatatatgaagtgtctgtcgacccctgctgggaggtgttacccagtaatgaggaacggggatcagggacccacttaaggagccagtgtgtctgttagcagagctcaagcactatgcttgaagatctgctgctctcttcagagccagcaggcaggaatgtttaagtctgctgaaggtgagcccactgctgcccctacccccaggtgctgggtcacagggagatgggagttttatctataagtctctgtctggggctgctgcctttctttcagagatgccctgcccagagaggaggaatctagagatgcagtttggctacagcggctttgctgcactacagtgggttccacacacagttcgaacttcctggaggctttgtttacaatgtgaggagaaaaccacctacttaagcctcggctctctccccaccaagttcaaatatcccaggtcgacttcagactgcagtgctgcaattgagaatttcatcccagtggatctcagcttgttgggctccatgggggtgggatctgctragcaagaccacctggctccctggcttcagcctcctgtccaggggagtaaacagttctgtctcactggcattccaggcatcactggggtatgaaaaaaaactcctgcaggtagctcctttt

SEQ ID NO: 953602 - DNA, 614 bp, Homo sapiens
aacagttgggagggctcagaagaagacatgggaaagatgtgggaaagtttggaacttcctagagacttgttgaatggctttgacaaaatgctgatagtgatatggacaatgmaatccaggctgaggtggtcttagatggaaatgagaaacttgttgggaactggagtaaaggtcactcttgctatgctttagcaaagagattggcagctttttgcccttgccctagagaactgtggaactttgaacttgagagagatgatttagggtatctagtggaagaaatttttaagcagcagagcattcaagaggtgacagaacataaaagtttagaaaatttgcaaccctgacattgtaatagaaaagaaaaactcattttctgaggagaaattcaagctggctgcacaaatttgcataagtaatgaggagccaaatgctaattgccaagacaatggggaaaatgtctccaggatgtgtcagagaccttcttggcagcccctcccatcatagacctagaggcctatgagagaaaaatggtttcctgggccaggtccagccccccctgctgtatgcagcttctggacttggtgccctgcatctcagcagcttcagcaatg

SEQ ID NO: 953603 - DNA, 656 bp, Homo sapiens
tgtttttttttccttgtggagtgacccaaaccttcattcctgggggatctgggccatttctagtcctgcctggattgggctgttgtagtttcccattgaccttaatcatagggcgtggtaatactaagagacaccctaatggatctcctgtattccatgcatactcttccttacctccgttgtggagtaatagactgatttcatcttgaaagtctgggtcagtcagtcaccccagccaacaatgtaactcccctcttagcctgttgacttaaaggtaggaggagcccaaagtgtccaggtggcaatgttaacatccagtttaatggaatcgttgttgtctctcctggtggcagtgttcctccctctggaactaagacctctaggccagcagaaggtaatgtcgtgggaacattttgctagtggaaggaaaaattttgctagtgaatcactaggggtgatggtgagtggtgccacttccacttccacccttgattcgtgaacccgtgaatcctggctatgggagagacagtgccatatattggatgctgattcagagcrtacatggctttctagagaactttgccccagccctgcaaagtattgtcacctagttggcattgtaattgtgacttcaaaaggccattccaccattctgt

SEQ ID NO: 953604 - DNA, 638 bp, Homo sapiens
aagcaagttcatgtgtgaagtgaaaaaaattatttagtgtgacaaaagttgtctccttagagacactttattcctattttaaamccatgataatgaatacagagcaaggaaataattcatatcttattatgatgggtgtttttaatatgctttgaaaatatactgaaatgcttagaaaaatccaaacattggtcttgtcatggaaaaaagaattcccacagaatttggcagtcctagataggccagccctaatgcacaaacacatacatctttaattttagaaatatcaatgtgacccaaattctaggggaaccaatgcaaatattcaacaagtctatttgatacctgatcatctacataaagttcctagattaaaatccaggaagagttacccaagttgccctcaccttgcatgatccatgcaaggaaatgggcagacatcccacgtgttaaggagatatgtctgggaagtccgtgttgaaacaaggctctgggaaaatctgaagcaaaagtctgtctgcggctgcttgagcagtcacaatcctcacttagaagcccaagcttgggctcttacttgagagttccaaggtgggaggccaggaaaggagggctgcactggagggccctggtggtcatct

SEQ ID NO: 953605 - DNA, 608 bp, Homo sapiens
attctgctctctgcttctatgtgttggattttttttttttttagcttccacatataagtcagaacatgcagtatttgcctccatgtctggtttatttcattagsataaagtccttcaggttcattcatgttgtcacaaatgacaagattccctgcttctttgaggctgaataggtttctaatgtgtatatataccatattttcttgtccattcatcaattgatgaacactcagattgattccataacttgactgttttgaatagtgctgcaataaacataggagttcaatatctctcagacttcctgatttcaaatcttttggatacataccctggagtagaattcctggatgttatttctaacattcttagtacagtgcctggcacatagaaagctttccaaacagatagctactcttactagtaatgactaggaatgacttatcacctcagtcattgttactattataaaaactactctataaactattatgaacaccactcatcttggtgtgcaagatgagccagagatgggaataagctggaggaagggagatcagttaggaggcctctggaataatctaggaaagaatattctgttttctgtc

SEQ ID NO: 953606 - DNA, 618 bp, Homo sapiens
cagtcttgtttatgtttgctaattattagcaytttatcctgttatttgctatgaggaaaatggaatgtagttaaggactcccatcctcacaaagttgaagactactcatacagactagccatatacaagaaattcaattaattgcattgaaattaatttaaattcactgaattaaatgaattcagagaaagaaaatctttgctttgccagtggatagtttatgagtaattctttaagaaatttcataaatatttattggaaggctaaggtggtgtaagaaactgctaggtatcatggcgggtaggtaaaaaaaaaaaaatcacaaggcttagctgtttaaaaaaatagaatctttaagaggaaaagacaaggaataaaataagatagcatgcaatgattcccctagggaaagggcaaagtttaagtactcaaaaagagaagccaggcatagtggcagatgcctgcagtcccagctacttgggaggtggaggcagagaggatcacttgagcccaggagtgctgggctgtagtgtgctatgatctactatggttgcacctgtgaatagccactgcactcccacctgggcaacatggcaacactcatctcttaaaaaaaaa

SEQ ID NO: 953607 - DNA, 602 bp, Homo sapiens
tcatgtgctgtgacctgtattctgtaccatcttgctttcctactttttctgattacacttccaccctgcctcaatacctccttttgccctatcaccacattacggccaatatacttttgacccccaagctgaaatcaaacacggaacatgtatactcctataccaatgaatgtgggggtcttcccttttctgctggtagagtgtttttgtatttttttcatttttctccatttatctgcaatctcttgtctcagtacagggttgtcttctccctatctcaccccatacacatcacactattcacccagttttttattctgccttagtatgcgtctagggtaaggataataaaaattaaagtaatggcagtaataaagactaacattattgagttcttaacgtgcaatgaattgtttatagtgttttgcatttattatcatgtttaattttcacaacaaccctatgaaattggtaacataattacccttatcatgaggaaactgaatcamaatttgtttggcaagatgaatgtttctctgggcaagagcaatgaaatagaagaagaagaaatgattctaaagctgatttttcagtaaccttct

SEQ ID NO: 953608 - DNA, 634 bp, Homo sapiens
gctactcaggaggctgaggcagtagaattgtttgaacccgggaggtggatgttgcagtgagccgagatcgtaccactgcactccagcttgggcaaaagagtgagactttgtctcagaaaaaaaaaaaaaaaagttctgttacattaattgatttttggatgttacaccaaccttgcaatcctggaataaatcccccttggtcatgttatataatcttttaatatgctgcttggtttggtttgctagtattttgttgaggatttttgcatctatattgataagggatactggtctgtaggttttttgtgatgtctatatctggttttggtattaggatcatattggcctcatagaatgagttgggaaatgtttcctcctcttccgttttttggaggaggttgtgaaggattggtttaaatgtttggtagaatttaccagtgaattaatctgggcctgggcttctctttgtgggtcattaaaattaccaattcattctctttrcttattatgaatctatttaagttttatattactttttgagtcagttttagtaatttgtgtcttttttggaatttattcactttatctaagttatctaattgattcatgcagttattcatagttttctcttatc

SEQ ID NO: 953609 - DNA, 576 bp, Homo sapiens
tggcgcgttagcacgcctgtaatcccaggctatttgggaggctgaggcaggagaattgcttgagcttgggagatcaaggctgtagtgagctgttccagcctgagcarcagagtgagaccatatctcaaaaaaaaaaaaaaaaaaaaaaaaagaactgggaatataatcgttatgacacatttacctgtgcttaggttcatatgttagtgagggagatataaatgcttatagtattgtacataaataatataaaaaaaaactgtatcttcaagcagacaggtatgtaccagcatggaggtgggagtaactatgcctaaggaaatctggtgcaactttgcagaggtaacctgttagttgcatagaaatttgccagtagaaacacagggtatagaaagacatttcagatgtgggaaatatgtgtaaagtcatagaagtgaaagaaagacatggtgcgctataggaagtgcagataggttggtataattggagggcaaagtattttaggggaagaaaattgaaactagaaagagtttaaaggcctgggataaaaaggaactttgatggacacaaagagcc

SEQ ID NO: 953610 - DNA, 617 bp, Homo sapiens
tagaggaaactgcattccaggcaggaaaagtcactaatgcaaaggcccccaaagggaggaatcttggcctttttttttagaatcaaaaaggccagtgtagctagagcatagtgagctayggtagagtgctaccatgtgaggctgcaatggctaggtgtagactctgtgagactttgaggtagagtcccagggtaaagagtttgatttttttttagcctaatgtagttgaaagacattggatgattttgaataagtgagtgatatgatctgatttatgttttaaatagatgactgtggctgctgcttgaaagccattttggaggataaaaaaggaatggaagcgggaggactagtctggaagttttcacattaatctagatagtggcttgaaatggattggttgtggtgatatgactgacagaagtcagtggatttcagttagtttttaaagtaatattgacatggtggattggttgtgagagaaagagaagaatcagcataatgatgatgatgatgagagcttaagcatagtgaaaatttaatatttgccaagtgctattctaaatgctttatatgaattaatgcatttagtctttatggtaaccctataaggcagg

SEQ ID NO: 953611 - DNA, 575 bp, Homo sapiens
tgaggcggggaaaggagcaacatataggcaggtagaggtggggaacttttcacaccggtgcagttcatgagccacgtgtctcattagcctgttaaatctccacctttgggtctgattttkagtattataacaagataggttgggcgcggtggctcactcctgtaatcccagcactttgggaggccaaggcgggaggatcacgaggtcaggagttagagaccagcctggccaatatggtgaaaccccatctctactaaaaatacaaaaattagcctggtgtggtggccggcacctgtagttccagctacttggttggctgaggcaagagaatcgcttgaacccgggaggtggagcttgcagtgagccaagattgcaccactgcactccagcctgggcgacagagtgagactccgtctcaagaaaaagcaaacaagcaaaaaaaaaccaaaaaaaaaaaaaaaaaaaaccctacaagataatgaggaaaatcttggtggaaggtcagtgctggagtccatcttgtctttagctggctggatctggtcaggtttttatcaggagtgccagagtctcac

SEQ ID NO: 953612 - DNA, 594 bp, Homo sapiens
tacaggcatgtccagactgcaggatcttgaactcctggtctcaagcaatcctgctgtgacctcccaaagtgctgagattacaggcatgaatcatcatgcccagcctatttctacttttttgatgcaggtgtttrttgccataaacctgcttaatactgcttttgctgtattccatagctttggtatgttgtgtttccattttcatttgtttcaagtttttaagtttccttctgaatttcttcattgttcaggagcatgttgtctaatttccatacgtttttgaagttcttgaggttctttttattgatatgtatttttattctttttgtggtcagaaaagatatttgatatgatttctatttttttttttatttgttcagactcatggcctatgataatggtccattctggagcatgttttatgtgctgataaaaagaatgtgtattctccagcagttgggtggaatgttctgtaaatgtcagttaggcctattaggtctagtttgtagtttaactccagtgtttctttgtttattttctgtctgggttatctgtccatttctgagagtagggtattaaagtctcctactatta

SEQ ID NO: 953613 - DNA, 787 bp, Homo sapiens
tttactttttgtagagacgggatttcgccatgttgctcatgccactcttgaactcctggtctcaagcagtctgcctacctygggctcccagagtactgggattacaggcatgagccaccatgactagcctgcctttatttttgaatgatagttttgatgaaaaaaattctgggttgacaggttttttttcccagcacgtttaaaacctcattccatttggtatgtttttattggttccatttctgtcatgatattcatgttttcctttaagtccttgagcatacttaagttttatgagtgtttttgagtttttatctgctaattctgtcattttgcatttctaagtctattatgaactggctttcctcctctgatggctcacagttttctgcttctttgcatatctggttatttttcattggatcccagacattgtgaatgtaattgagtgttcctaagtactgttttctctggaaaatactgttgtttgttttggaaggcaattaagtcatttgcagataaggttgatcagttcaagactttttaaagctttttaaaagttggatctcaagtagccttttctttaaggccagcttagccttaatgctaaggcttgactgtctaggagtgtccactgattactacaagtgtttattgaggcccctctgctctgtataagtttgaacactcctcagcttactgtgagctctgaagcttgtttataagtcccttacagttttatttgcctggccttgttgaattttatgctgttcacgtgttgattagt

SEQ ID NO: 953614 - DNA, 586 bp, Homo sapiens
tcccatagactgatggcccactttagctgtatgtatactggtggcaaactgaaaacattaaatgaaagaaaatcttattttatgtggttttagcttagcaaaaaaawttttttagaagacggcatcactttaaaactctggcaaaatttattttcagtttcttttggtgtttattacaaaaaaaaaaccaataaagcaaaaacaaacaaacaaaccgaaacctctctcaaacagcctggaagactctgcaccaaaatattaattgtgattatctttgggtggtagcattagagaccattttcttttgtttgcctgtctgcctttttcaaagtaatgaagaaaagtaatgcaggagagcaatgaggaagagtgatagcaaatgaggcaatgaagaagagaatcatgcctttaaaaatatattctcagtaatattcagggaaaggtaaacagtttgagaatttttttcatgatagacagaagatttgaagagaggaagagtattcgttggcagcctagaacttacagcttgcactttagtgagatttctccctatcaagattatggattggctgtaccacccagggaa

SEQ ID NO: 953615 - DNA, 483 bp, Homo sapiens
gttcttattatttctttcatttccttactttggatttaatttgctcttctttttctagtattctaaggtagaagcttagattattaattttagatgtttctttttttctaatatcttattcaatattatacayttccttctaagcaatgcttttgttgcattccacaaatttggtaagttgtattttcatttagttcaaactgttttttaagtttctcataagattttttttacccatatgttatttagaagtgtataggttaatctccaaacattttgaggttttccagctatctttctgttattgatttctattttaatttcactgtgatctgataacagacattgtatgatttctgttcttttaaatttgttagggtgtgtttgttagtgtctatcttcgtgagtgtccatgaacttagtcaagttcatgtgaactagagaaaaatgtttattctcctgttggatgtagtagcctataaa

SEQ ID NO: 953616 - DNA, 721 bp, Homo sapiens
tttgaaatatttctacctcaacttgtatcccagttagatatattcacaagaatgctatataccagccactgcagtgccttcttaaaaaaaaaaaggcattatacaagagaattacaggccaatttcactcagaaacataagtggaaaaccaaactcttaacaaaatattagcaaataaaatccagtaatgcttaaaaaggactagactaaattggtctacaacaaaattaagaccttctctttatcagtaggtatctctgagaaattccaaaggcaagctacagatgggtgaaggtatttgctaacatatctgccaaagggcacatatccaaaatatatgaaaagcatatactagtccataaaagaaagactaaacctcaaagggaaatgggcaagagattaaatgggcactttaagaaagaattttaatatggccaataaacatatgaaaagttgttcaacttccttaataattacagagatgtggaataaaagcataataagacacatccaacagtaggactaaaattagactgttaataccaagttttcattagaatgcatagcaattgaggccaggagtggtggctcatgcctgtaatcccagcactttgggatgctgaggcgggcagatctcctgagatcaggagttcgagaccaccctggccaacatggtgaaatactgtctctastaaaaatacaacaatgagccaggtgtggt

SEQ ID NO: 953617 - DNA, 662 bp, Homo sapiens
ggtggctcatacctgtaatcccagcactttgggaggccaaggtgggcagataacctgaggccaagagtttgagaccagcctgaccgacatggcraaaccccgtctctactaaaaataccaaaattagccaggcgtggtggcacatgcctgtaatcccagctacttgggaggctgaggcaagagaatcacttaaacccgggaggcagaggttgccatcagccaggattatgccattgcactccagcctgggcaacaagagcgaaactccgtctctgttttgaagtacgtaacaataaccttttctcttcatgtgctttttagctcaggttcagattgaaggagattttttgccatgttccttctctatacttgaggaacagcccatggacatgcttctgggactggacatgcttaaacggcaccaggtaattaagagcttcacttattttttttgcatctgctttttgtaatatggtcattatcacattatttttattggttacatatactggaaaactaagaaataacgacttttcaaacctggaaatgtccttaaattatgttgctatacagaggttgaaatgatgtgtcgatatagatagaatctgtttttgtgaaatctctctgtgaatctgttaaatcttgccaaatgttttgagatt

SEQ ID NO: 953618 - DNA, 577 bp, Homo sapiens
cttcacagacaatctcagacatgcctcgactttctgaattgttgtaaacatttctttctttaaacaaccagttaatttactttaggacaagaatttaccatataagattcatttttatataaattctcttttctttaatattaaagatgataacagtcctttccccaaacaaacttccttcatggctgtggacaagactgcctaaggccataaaattagaagttagggcattttactaaatagttcaagatgtggctgtcttcattaaaccaatattaatgtttcacttattaaaaaattacacaagcaaagattattctgtttgggctgagttatagttttgtaacatctatgtcaaattttgacaccttgtaatacttggcagaaataagtatgaaattgcttgatcaattaatgcaaacaaaaatgtatgctggcaactcttaagacatttctaatcttactgtaccagcaagttttaaagattaaagtcacatraactgaaaggtcccacagcttttacttttcccttaaaaatatttaagtgcttatttttcttaggtcaattaattagagc

SEQ ID NO: 953619 - DNA, 719 bp, Homo sapiens
aatgaagcagaggtagataatgtaatccatccatggctcatgtaagtgcaaatattgtgatttgtgtttacagtgattgctgctgagtgggaggctcttctttggcttctgtggaaattttctagactgattgaattttgtcatatagttggtcacattgcatgaacaatgagttggcgcaaccttagagcagaaatacaagtaatttcctttaatgagaaagtacagtaatggttcagtctctttctagctcttcagggcatattactaggactgcaccaggaaacaaactgcacaatagttgaggtgttgtacttaggggaaagaaagaggtaacttgaagacctaaggcaatttgcagataaaagagcaggaagaggtctgtcttctagaccagaatagtaagtggcgggatgagtactcaaagttgatttcaaaatgtcagattcaaaacaccctcaagagttcactgcagttattcccaagatactgtattagttccagaggtcatccagccttgctttaaataagccacatgatgatgcttgtgtcatcagagtgcaaaggaaaggccacaggctttgagactaacaggactgggtttcamctgcagctccatcatctacaagctgagaatcttggggcaagttgctagttcatttgttcactcattcactcactcaacaaaaatgttttgagcacctgctgtgtgccagatc

SEQ ID NO: 953620 - DNA, 492 bp, Homo sapiens
cgcccaatggatccatgaacaaagtggccatggtggcagggatggaggttactcatgggctcagcaacatggayttccattcaccaaggctgacctggctatggccactgctgagtgcccaatttgtcagcagaagagacccacactgagccctccatatggcaccattccttggggtgatcagccagctacctggtggcagattgattatattggacctcttttatcatggaaagagcagaggtttttcctcactggatagaataagtgtctatccggaatagacacttactctggatatgggtttgcctatcctacacaaacggcttttgccaagactacatccgtggactcacagaatgccttatttaccatcatggattccatacagcattgcctctgatgaaggcactcattttatggccaaagaagtgtggcagtgggctcatgctcatgaaattcactggtcttaccatgttccccaacattctg

SEQ ID NO: 953621 - DNA, 568 bp, Homo sapiens
tgcatctcctcccatcgttccataaacctgccctgactaggccttcattcttccyggtcttctcagtgtactcttgtccagttatccggatctgtgcattgctaaatccaggggtcagtgtcccagtcttgatgactgctgcctcctcaaaagacttccttctctgggcctctaggacacctgctcttttggtctctgccattgtgaagtgtatatttggtctttggcctacttcctggtatatgaatcctaaaatccctggagtctccaaagtgatatctttttgtatgctcatgagttgactaatggctggcggcccctaggtagcttcaggatgggtgctggtcacctgaaagaccacggcaggattagatgggtgattcagccccaccccaacctgggctttccataggcattggaaacagggggcaggcttgtggacacagccctcaacctgagggatctgatgctacctctaggtattcatcatcagaatggagttggattggaggacaacgtgctgataactactgcagaattgattgcatgcttgctggtaggaagaaat

SEQ ID NO: 953622 - DNA, 568 bp, Homo sapiens
tgcatctcctcccatcgttccataaacctgccctgactaggccttcattcttcccggtcttctcagtgtactcttgtccagttatccggatctgtgcattgctaaatccaggggtcagtgtcccagtcttgatgactgctgcctcctcaaaagacttccttctctgggcctctaggacacctgctcttttggtctctgccattgtgaagtgtatatttggtctttggcctacttcctggtatatgaatcctaaaatccctggagtctccaaagtgatatctttttgtatgctcatgagttgactaatggctggcggcccctaggtagcttcaggatgggtgctggtcacctgaaagaccacggcaggattagatgggtgattcagccccaccccaacctgggctttccataggcattggaaacagggggcaggcttgtggacacagccctcaacctgagggatctgatgctacctctaggtattcatcatcrgaatggagttggattggaggacaacgtgctgataactactgcagaattgattgcatgcttgctggtaggaagaaat

SEQ ID NO: 953623 - DNA, 568 bp, Homo sapiens
tgcatctcctcccatcgttccataaacctgccctgactaggccttcattcttcccggtcttctcagtgtactcttgtccagttatccggatctgtgcattgctaaatccaggggtcagtgtcccagtcttgatgactgctgcctcctcaaaagacttccttctctgggcctctaggacacctgctcttttggtctctgccattgtgaagtgtatatttggtctttggcctacttcctggtatatgaatcctaaaatccctggagtctccaaagtgatatctttttgtatgctcatgagttgactaatggctggcggcccctaggtagcttcaggatgggtgctggtcacctgaaagaccacggcaggattagatgggtgattcagccccaccccaacctgggctttccataggcattggaaacagggggcaggcttgtggacacagccctcaacctgagggatctgatgctacctctaggtattcatcatcagaatggagttggattggaggacaacgtgctgataactrctgcagaattgattgcatgcttgctggtaggaagaaat

SEQ ID NO: 953624 - DNA, 784 bp, Homo sapiens
tacattagttggggagcagtggattgccagctccacatgtggcctctggtcatccactccccaactcccacaaagccaggcatcttggccagttccctaatcaaacaagaaaggtgccatatcttcgcctgtctgcaaatagtccttgagctgcagtgtctagacaggattaggttgaacaactgttttgccccttcttgggcattttccagaattgttgctctggggaaaattgcctccacagagccaacagcatttcactgggttgcccgtcaagtgtctcttgagcaaccctagctgaaagtaaatcaaaccacattggcttgtgggtcacccactgggccccttgttatatccttggatagttacctgtggaccttctttacagcatggactttcccttctttatggcatggagtccctggtcctgccaatggccttctgcctccccaagggctgccatagcggtagtcacttcatgtatacggtgccccacatatagggtgagaacagaggccagagagccaaaagagtttggggatgctgagcccagcaccagatccctcatgtgggaggcaaagcatttatcatctggcccccaggtattcagatcaaacacagcctgctgcatacccatctcctagagtatctgcaccaaatcagtatatgattgccatttactcacagtttctgrtatttctctggcatcattccaaacagtccatgtggctcccattagccactcaattaaagtgtggtcatcttgtccctgtgctgaccattg

SEQ ID NO: 953625 - DNA, 585 bp, Homo sapiens
cagggcctgtgcaggcacctggagctacctgcctcactgcagcagccagcatgcctgactgtgtgcagtggccggaacccacgcttgctttctcacacaccccttgctgctccatgcctggctcacccttgacagacatgggatccaggctggtagtgtaagcctagcacagcctgccaggctgagtggccggaacaagcccagcaggcctgagcaaaactcaggcaaaggcaccactggccacagagctttccagccagaaaagcaacacaccaaggatcctgtaacagttagatgatcagatgtcattcccaagcaaataacatattgctatccttgatgtttgcgaggtagtgctgtgtgtttagaaattttgtttgtacaagtatatctgtaaaagctgaggcgctcatagttatttctttttttttgttttgttttgtttttgagacagagtcctgctctgtcacccaggctggagtgcrgtggcacaatcttggctcactgcaacctacgcctccaggattcaagcaattctcctacctgagcctcctgagtagctgggactacaggcatacaccacca

SEQ ID NO: 953626 - DNA, 569 bp, Homo sapiens
tttctccttcaaaagctgagctgttccacttctgttctttcctttctcacatggttccctgaattgcctattgccattcatcatacagtatttattaacatcaattatttattaactattattgtcaagcacttttctaagatgtggagatccagcactgaacaaaagtgacaaatattcctgcccacaagaacttacattctggccaagcgcagtggttcactcctgtaatcccaccaatttgggaggccaaggcaggtggatcacttgaggtcaggagtttgactagcctggctaacatggcaaaaccccatctccactaaaaatacaaaaaaattagccaggcgtggtggtgcatgcctgtaatcccagctactcaggaggctgaggcatgggaattgcttgagtgtgggaggtggaggttgcagtgagtggagatcatgccactgcactccagcctgggcratggagtaaaagtatgtctcaaaaaaaaaaaaaaaaaaaaaacacacaaacaaaaaaaaaacctcacattctaatgaccctaagacaggactttctgctggttt

SEQ ID NO: 953627 - DNA, 545 bp, Homo sapiens
accttgcttgtttagctataaaacccatgcctgattcccttttatacagcatataggccactactgacaaataacaartatttgctgtcaatatgttcaaaagcaataacaatttaattgaaagtacatatgctatttttgctatttccctaaaataaggcttattgaaaacacgcaacacacccccaacaccaccaattacaatgcaagaccagagtgggattcttggacaaaggaaaagatagatatttttaatggtcatgattaggtctgaagccaggaatagacagaatccaacttaatcagcttctctcgaggaagaagaataccatccacctattagaaggaacaagaaaccctatatttgtataaagtaacttctgtctcaactcaactttatatatgagagaatgcttactcccaaagcttctttgcattgccctcttaactgtatgctgcttacagaggtgcacctgtataggaaatggcacctcatatagtgtcacatagaccttgagtcccatttttaatgccttcccacaagg

SEQ ID NO: 953628 - DNA, 612 bp, Homo sapiens
aggcagtctcagttgctatatattaatgataatattacatgttcattttacctcatcatcttatttccaagacagaactacaggatgccctgtctacagacaaaaaggagcaacaacatgcttctaagttgtctgcagactcagagttctccttccatccatccccaggcctccccctaggcactactgtgtgacccactaattttaatgtcggatataaattaccggtgatgctgaacccattcttgaatccgtcctgctccactgcaaacatccatccaatgatgcctccaactggggccagtggaagcagagaatatccaacggtctcgggaatggtgctgatggctgtgtaggagcgcccgtggttcattactacgtaagagtggaggtcagtgttctcaaagacaatggggacctggctgctccccacaaagatccttcctttcaccttgccattgactcgctggggggaacctgagcaagaaaacaaagaaagaatatagagatcacttccaagccagtcttkcaaacacgagtaatatgtaggacctgtacctattggtgaagaaagcaaagaaacaaaacagcactggggtcaatggctttggg

SEQ ID NO: 953629 - DNA, 608 bp, Homo sapiens
gaggtagctactaatgggaggtgtttatgtcatcaaggctctactctcatgaatggaatgaagccaattataaaaggttttgaggctgtgagtttgaccctttgctcccctgctctttacctctcttgccttgccaggggatgatgtagcaagaaggacctcaccagatgctggcaccttgatgttagacttcccagtctccacaatggtgagaaataaatttctattgttcataaattactcagtttttggtattctgttatagcaacacaaaacaaatgaagacagaaacaggtaccagaagtggggtgttctgtaaccaatttctaaaaatgtggaacagctttggaatggagtaatgggtagaggctggaagaatttggaggagcatgctagaaaaagcctagattgccatgaatggtgtattatggcaattctggtaagatctcagaagaaaaaagctgtagaaagagcctacgtcttctgaggcattatttaaatgactgtgatcagaatgwtggtaaaaatatgggcagtaaaggcttttctgatgtctcagatggaaatgaggaataaggtattcaaaacttatataaaggatactcttg

SEQ ID NO: 953630 - DNA, 589 bp, Homo sapiens
cctgggacctgggatgctgaagaggagtggcttgaccaagtgggagggtacagagttcctgattctgcagcttttcctgaggaggctggaagatgggggaggtgagggcagaggcacagggagaagggagcagttgccacaggctgagctgcaacagcagccacagcagtaggactgggctaggggagggaagcactactgccagcagttctgagctaaggatgccctcttctcccaactcagcagcagctccgaggcagaaagcagcagaacaagtgtccctgaagggatttgtataattgctcattctgtgcagttttcccattctgcccaacagtttttgtttttgttttttaaaggtgtatagataccataacattcaggctatggctctaggaccatttgtggatgtgggagagagactctgcccaccctatccagtatttaccgccatttctcactttctgttcatctggaataycttctgaggaaagagagtgggatgttgaaagttatgctgatattagggcttctaaaacttgaagatttagtcagactgactgatgtgttgggcttgcctgaggggtct

SEQ ID NO: 953631 - DNA, 627 bp, Homo sapiens
agctaggggagtgcttgtgccacccctcccacaaccccagcctgcacagctcatggcttcaamagaggtcccttccttccacgtgaggagagaggagagagaagagtaaagaggactttgtcttgcatattggataccagctcagccacagtagaataggacaatggtcaaagtaatgaggccccctttctaggctcctggattatatttctagcacaccttgggccagaagggaacctgcttccttgaagggaaagacccagtcctggcagtacccattgtctgctaactaaagagcctttgatccttgaataaccaacagtgatgcccaggaaatacactgtgggccgtaggtgaaactgagattttctgacttcaggtgagactcagcacattcttagctgtggtggctatggggagagactccttctgcttgaggaaagtggaggaaaaagaaaagcagactttggcttgctccatatgtaccagctcagccacaggggaatagagcaccaagcaggctcttggggtccccagttcaaggtcttgactcctggatggcatttttgggtctaccctgagtcagaggggagcgcattgccccgaagggtgagtcccaggctaggc

SEQ ID NO: 953632 - DNA, 591 bp, Homo sapiens
ttgctcactcacacaaagaacatcctacacttggcttcagtgcacttccaggaggggctgggggcgggcctagacctcgaagcaataaggctcccgcgctgcatctggtagttttagcgacatcaccacttctctctgatcagatcgccacaactgagaagaagctccaaggtggaggcaagaagccagaattaagagattagaaggcactttgggaggccgaggcgggcggatcaccagatcaggagatcaagaccatcctggctaacacagtgaaaccccgtctctgctaaaaatacaaaaaaattagctgggcatggtggcgggcacctgtagtcccagctacttgggaggctgaggcaggagaatggcatgaacccggggggcggagcttgcagtgagcggagattgcgtcactgcactccagcctgggcaacagagcgagactctgtctcaraaaaaaaagagattagctgtagcatcagctcttttattaaaaattagggccaggtgtggtggctcacacctgtaatgccagcactttgggaggccaaggcgggtggatcacctgaggtcaggagtccgagacca

SEQ ID NO: 953633 - DNA, 611 bp, Homo sapiens
tagtgattccactcattaatatgaccaagcaaattgaaaaattctgaatagaattcatcatcctrgatgccatgaagaacacttgtgattcacgaaaggtcaaaatagcaacgttaacaggagtttagaagaagttgtctctaaccctcatggatgactttgaggggtttaagacttcagttgaggaagtaatcccatcagcaaagttacttcctccactgaggtctttgaacccctcaaagtgaggttggagaatctcaagagaaatagaattagaagtggagcctgaagatatggtgaattgctgcaatctcatgatacagtttgaacagaggaggaggtgctttttctggatgagcaaagaaagtgatttcttgagatgaaatctactccgagtgaaggtgctgtgaacatttttgaaatgacaacaaagatttagaatattacataaatttggttgattaagcagcagcagggtttgagatgactgactacaattttgaaaaaagttttagtatgggtaaaatgctatcaaacagcattaccagaaaaatcctttgtgaaaggaagagtaaaccaatgtggaaaacttcatcgtcttattttaagaa

SEQ ID NO: 953634 - DNA, 558 bp, Homo sapiens
agaaaactgctagtcagcacrgagcctgggtgcctgcccatatcaagtgccaggtttcttttttatttattataattatttaactaacacaagaaactaagcatccctttctgcttctaaagacatcaaagggtctgttacaaattgaaaagtagactctagtcaccgtagaatgcttatgttcccatttaatgagtataattaaagagacagacaataagaagtgttgacaaggatgtggaacaactggaacccccatacactgctggtaggaatgtaaaatatattttattttagaagacaatttggtagtttcttaaaaagttagacctacaatattacctaggaattttgctcttaggaattacccaacagaaatgaaacatacattggcaccaagacatgtatgtgaatgttcatagcagcattattcataatagcagttggaaacaaatgtccttcaattggtgcatggactgttcagcagtaaaaaggaacaaactattgatatgtgcaacaacgtggatgaacttcaaaaccgttatgccaagtgaaaaa

SEQ ID NO: 953635 - DNA, 568 bp, Homo sapiens
tcttagttctagaattttcattygcttcttgtaactattttcagttttttatagagatacctcatctagtcactcatgataaccatattttcctttaagtctttgaacatatttaacataacttctttaaagtccttgtctgataactgtatctgcatctaggtcatcttggagttgatctccattgatccctttttcttttaactatggatcacattttcatatttctttgcatacctggtaattttggatgtgcacctgatgttgttaacatgtgtacaggctatggggtttgcattcttccttagcagaacattaattgtttttttcaatgttagcaagcagttagcttgagttgactcaaactccccagtctgtctgcctggcagttggcagtagctggaatctcagttctcttgaccttacacgtgttgctttctgctgggccctttggagttttccctacccatgcacacctaagggatcagccagaggtttcagtggagtttacttgcagattgtggggtttcccttcggtgaccttctcctttatggacatcttctcttc

SEQ ID NO: 953636 - DNA, 806 bp, Homo sapiens
ctgtgctgcatggaatcaaggtttaaggggtttagggctgcgcaggacgtgcctggttcacgatacgtttgcaggcagtgtgcttggtagaagtcatcgccattctccattctctgttaactaggcacagaatacgctgcggaaagctgaagggacctctgccggagaaagcctaggtattgtcccagtttctcctcactgagacagcctgagatatggcctcatggcaagggaaagacctgactgtcccccagcctgacacctgtaaagggtctgtgctgaggaggattggtaaaagaggaaggcctctttacggttgagataagaagaaggcctctgtttcctgcacgtccctgggaatggaatgtctgggctttacacccaccattcattctattctgaggtaggagaaaaccgccctaaggctggagacaagatatgctagcggtgatacggctctgttactcttcactacactgagatgtttgggtaaagagaaacataaatctagtctatgtgtacatcccagcacggtaccttccctgggagttatttatgatgcagattcctttactcacatgttttcctgctgaccttctccccatcatcaccctgttcacgctgttctcctgccgcactccccgtatggagatagtgaaaatagtcatcaataaatactgagggaacccagagaccggtgccggtgcaggtcctcgcgtgctgagtgtgccggtcccctgggcycactgttctttctctgcactttgtctctgtgtcttatttcttttctcagtctcgtgtttcca

SEQ ID NO: 953637 - DNA, 551 bp, Homo sapiens
gacacacttacagcctcctcccttttttttgtgtattatacatatctttattatagccattttcaaaattacatcataatcatttcaatgcctgtttttccctgtactgtaagctaatcaaatggatgaatgactagtttgaagaacaagtgttctataaatacttcaggatacttcttttgcttttgtcagaggttcagatggttacagtacttttaatgttagccattcaaattattattgccattgatggttgtgctctgaagttggcaaaagtggccaaatttagtttcactatagccccttaatgtattctcacaccaattcctttgacctaaaaaaaacctttttattttgaaatatggcatcataggaagttctaaaactagtacagaggtcccatgtacccctctctcattttaccccagtggcagttcttcagacttttatgtcatttttctgttctcttcccyagcccctgcataattaacaaatttattatggaggaaaaagtgtgattaaaaatttttttcgtgacaacattaatatgt

SEQ ID NO: 953638 - DNA, 726 bp, Homo sapiens
acgatctcagctcactgcaacctctgcctcctgggttcaagtgattctcctgtctcagactcccaagtagctgggattacaggtgtctgccaccacgcccagctaatttttgtatatttagtagagacggggtttcactatgttgaccaggctggtcttgaactcctgaccccaggtgatccacccgcctcggtctcccaaagtgctaggattgctggcgtaagccactgcgcctggcctagactctctttttaaagattaactggagatcatcatggcggatgggaggcagaactagactgcagctctgactctgatggacagagcagtgtgtggaggctcacgtcatgaattttagcttcagatcaactgcaataacagaccaccaatcctgagaggacccacagaccctctgagggaagcagactgctcctgcaggaccttggagacaccccaaatattgtgagagccccaattgcggaagtgggaaagcgagatcctcctctcccgaacacacaccccctctggagaaactgaaggactgtttgcaggagaagtttttgatcttacctggagctgattcaatttagacagcccaacaaaatacaggygtagaggaagcagtaggaaaggccctgggaacttgctgggtccccagcaggccattcctgcctggcaccacagggatctatcaggagagtgggcagaagagtgagggaaaacacc

SEQ ID NO: 953639 - DNA, 601 bp, Homo sapiens
gcctgtccatccatccagcagaaattttatgatctcaagaaattcatagcgtggtgggggaaacagacacatagamagaattttttttttttttttgagacggagtctcgctctgtcgcccaggctggagtgcagtggcgtggtctcagatcactgcaagctctgcctcccaggttcacgccattctcctgcctcagcctcccaagtagctgggactacaggtgcccaccatcacacctggctaattttttgtgcttttagtagagatggggtttcaccatgttagccaggatggtctcgatctcctgacctcgtgatccgcccgcctcggcctcccaatgtgctgggattacaggcgtgagccaccgcgcccggctacatagaaagaattttaagatgggatgacatgtttcagttgaaggatggtcagatccccctgggaacatcagtgatggaatgacctggaggttgtgggacggcatcgcaaaggagtgaggagggagcagggtctggaagaaggagtcagaatggtggctgcagaggagggcaggagagatgacagtgcttgaaacaggccggtggtctctgcttcttcacgctc

SEQ ID NO: 953640 - DNA, 583 bp, Homo sapiens
aggacagaaactcgtgagctttttgctcctcaacccaggtttttcttgctcatggaacactccccaagaaagtgcaaggcgcagcttggcttgtcttgggatctgccttggtgctgctcccagatgtatgcaaccagctctcgggatccctatggccagccggccccacctttggggggtgagatgtgtggacagggccccaagctgactcatcccctctagaagacaagtgtccattccctctcactcctattgttgtcttagggatgaagggttttcatgtacaagcctaggtttgggacggtgtggggtttggaggccttcctggggatgccaaggggcttgaaccagagacggtctttctctgttccagcaggaaaaaagctgatgagtccagctccaagctctgcccctggggctccctgcagtgcagaaggggcaggtcccaccaactcccattaggggacagcatcacctggcaggggaggagggctgcycagggctggcctggccaagagctctctgacgcatgttccttgtggcatgaccaggatgctgagctgggactcggggacttgggcct

SEQ ID NO: 953641 - DNA, 620 bp, Homo sapiens
atttattgaacagggagtcttttccycattgcttgtttttgccagctttgttgaagatcagattattgtaggtgtgtggccttatttctgggctctctattctgttctattggtctatgtgcttggttttgtaccattaccatgctgttttggttactgtagccctgtagtatagtttgaagtcaggtaacatgatgcctccagctttgttatttttgcttaggattgccttgactatttgagctctttttggttctatataaattttaaaatagatttttctagttccatgaaaaaggttgttggcactttagtaggaatagcattgaatctgtaagttctttgggcagtatgacaattttaataatactgatttttcctatccatgagcatggaatgtttttccatttgtttgtgtcttctctgatatttttgagcagtgctttgtaattctcattgtagaggtctttcacctccctagttagctatattcctagatatttgattctttctgtgaatgggattgcctttctgatttaactcttgtcttggctgttgttggtgtacaggaatactagtgttttttgtacgttgattttgtatcttgaaactttgctgaa

SEQ ID NO: 953642 - DNA, 620 bp, Homo sapiens
atttattgaacagggagtcttttcctcattgcttgtttttgccagctttgttgaagatcagattattgtaggtgtgtggccttatttctgggctctctattctgttctattggtctatgtgcttggttttgtaccattaccatgctgttttggttactgtagccctgtagtatagtttgaagtcaggtaacatgatgcctccagctttgttatttttgcttaggattgccttgactatttgagctctttttggttctatataaattttaaaatagatttttctagttccatgaaaaaggttgttggcactttagtaggaatagcattgaatctgtaagttctttgggcagtatgacaattttaataatactgatttttcctatccatgagcatggaatgtttttccatttgtttgtgtcttctctgatatttttgagcagtgctttgtaattctcattgtagaggtctttcacctccctagttagctatattcctagatatttgattctttctgtsaatgggattgcctttctgatttaactcttgtcttggctgttgttggtgtacaggaatactagtgttttttgtacgttgattttgtatcttgaaactttgctgaa

SEQ ID NO: 953643 - DNA, 620 bp, Homo sapiens
atttattgaacagggagtcttttcctcattgcttgtttttgccagctttgttgaagatcagattattgtaggtgtgtggccttatttctgggctctctattctgttctattggtctatgtgcttggttttgtaccattaccatgctgttttggttactgtagccctgtagtatagtttgaagtcaggtaacatgatgcctccagctttgttatttttgcttaggattgccttgactatttgagctctttttggttctatataaattttaaaatagatttttctagttccatgaaaaaggttgttggcactttagtaggaatagcattgaatctgtaagttctttgggcagtatgacaattttaataatactgatttttcctatccatgagcatggaatgtttttccatttgtttgtgtcttctctgatatttttgagcagtgctttgtaattctcattgtagaggtctttcacctccctagttagctatattcctagatatttgattctttctgtgaatgggattgcctttctgatttaactcttgtcttggctgttgttggtgtayaggaatactagtgttttttgtacgttgattttgtatcttgaaactttgctgaa

SEQ ID NO: 953644 - DNA, 555 bp, Homo sapiens
aacctgcgttttctttctggctgcctttaacattctttctttcatttttaccttggaaaatctgacaattatgtgtcttggggatgatcttcctgtgtagaatcttgcrggagttgtctgtatttcctgtatttgactgttgtcctctctagcaaggttgtggaagttttcatggacaatatattgaaatacgttttccaaactgtttgctttctcccccttcctttcagggatgacagtgatttgtagatttggcttctttacataatcccctacttcttggaggttttgttcattcctttttattcttttttctttatttttgtctgactgtcttatttcagaaagccagttttcgagttctgagattctttcctcagcttggtttattctactattaatacttgtgattgcattgtgaaattcttgtactgtgttattcagctatgtcggacccattaggttctttattatactggctattttgtctttcagctcctgtatcactttattgtgatttgtagtttctttggattgggttttgctgtcctcctg

SEQ ID NO: 953645 - DNA, 674 bp, Homo sapiens
tgggtcccctggaatcaatgtcagctcagagccagtgtccagtagtcccccaaatatctgcatttcccttttccccagtgcacagttaccctggtaaaaggttggaggtctccttgggaaaggacaggagaaagatgaacagtataaattgtcagaagtatagtggggtccttcctcaagggaacccagccttccccttcattcaaggtgttctgagtctgtaaaccggctcaagtctggaaattgattgagggtccatgattctctgtttgtataattcaaatttgtcttttgtccattcaacctagaagttttctgcttatataaattaaggaggaatgcagtaggcttcctatcattttcacttctaggaacaccgtgattaattagccaatgccagagctctacagaagtcagactattctgattgccgctttgcctctgctgtccattatgatagctatgcctaccttgcctttgacggttgagtgccactacttggcccctggcaccatgggatccaattactcccattgcagttaaattttgtagttsagtgactgcagctcccactgttggatctaacatacagagaagagcaattacagggctcttcaaagatgcaggtactgcctcacaaatctattttgcaaggcattggtcaagggtgtatc

SEQ ID NO: 953646 - DNA, 574 bp, Homo sapiens
tataatccagaggaacttaaaacaaattaacaagcaaaaaaaaaacccattaaaaaatgggcaaaacacataaacagacacttctcagaaaaagacatacagtgaccaacatgcatttgaaaaaatgcccaacatcactaatcattagagaaatgcaaatcaaaaccacaatgagataccatttcacaccagtcagaatggctattactaaaaagtcaaaaaacaacacatgctggcaagtttgcagagaaaagagaacatttgtacacttctggtgggaatgtacatttgttcagccattgtagaaagcagtttggacatttcttaaataacttaaaacagaactaccatttgacccagcaatctcattactgagtatatatccaaaggaatataaatagttctaccatagaggcatatgcacttgtatgttcatcacagcattattcacaatagcaaagacatgaaatcaacctagattccyatcaactggataaagaaaatgtggtacatatacatcacggaataccacgtaaccataaaaaaataaagtcatgtctttcacagcaatatg

SEQ ID NO: 953647 - DNA, 628 bp, Homo sapiens
atcacaggtactcgggaggctgaggcaggataattacttgaacccaggaggcaaaggttgcagtgagctgagatcatgccaccacactccagcctgggcaacagagcaagactgtgtcttwaaaaaaaaaaaaaaaaaaaaaaagaactgtaaggggaaggggaaaataaatgtataaacttccgttttttttttttttaagcctatctcgataacatccccggttctttaaaacatatttttaatatttacttttcacaaaaagtattatagagggtcattatcttaagcttctgcttccttagaccaaatgtttccttacattaaccaagttaaattgtgaaccacaagtaagtcctatcataaaatgtcagctaaatataaactgtatttgtttttataaacatttacgtgtaagtgtatgatatagtaatcatgttgcttaatcttaacccacacttttttaaaataataaagtaaacctaattaatttcccatgcaataccctgaaaggtactcatgctagcttcccaaaattcacataaattataagccttttgcaatctgcagcataaatactacatatgatgtgagaaaattgagatgtagtgtgtgtcctgcatatgta

SEQ ID NO: 953648 - DNA, 604 bp, Homo sapiens
ttatcacccaggtactgagcatgatatccaatagttcatttttctttttctttctttgagacagggtctcactctgtcactcaggttggagtgcagtagcatgatcagggctcactgccacctccrcttcccaggctcaagtgatcctcccacctcagtctcccaagtagctgagatgacaggcatgtcccaccacacccagctaattcctgtatttttagtagagatgggtttttggcatgttgcccaggctactcttggactcctgggctcaagcaatccacctgcctcagcctcccaaagtgctgggattgcaggtgtgatccaccgtgcccagccaatagtttgtttttcaacccttgcccccttccttcctccccttgtagtaatccccagtttctactgttgccatctttatgtccatgcatacccattgtttagcttccttttatgagtgaaaacatgcagtgtttgattttctgttcctgtgttaatttggttaagaagatggcctccagctatatccatgttgctgcaaagtacatgattttgttctttgtaatggctgtgtagtattccatggtatataggtaccacattttct

SEQ ID NO: 953649 - DNA, 576 bp, Homo sapiens
agatgtataaggaaatacaaactaataatgaaaaagtgaaatcttcaatctcttggttattgttatctgtaacagctaaaatgaaattaaaagagaatgctgtgttggatttcaatctgggcttaggccaccagcctcaaagatgccccccaagggcagaattatgcaggaacaacagaaagtacctctaagacctgtggttaccaagaaggcagtcaatgtgagagaagggcaaaaccaagtaactattgaaaccagaggacacagtatgaaggaattgttttgtagattggtaacattagcttcctgtggaatctttgctataataaaatggattatgagagtgactaacgtaggggcagtattttcggttttaaatgctgcagagtggaagagtgtgtttcggttaatgccagacccacagctcaccattaaacaattgcrgatgaatatatgatgcagacacacaggaggttattcttgagagaacagccagcctggtggacaggataaaagccaccttaggtctgtttaatctgagggaggggttatccaacaccacctagaaattccaag

SEQ ID NO: 953650 - DNA, 595 bp, Homo sapiens
ctttgtatgcaagccatgtgggactggctttgtgatgatgggaatattcacctgctgaatatgtctattacccaagtcatggtaaatgctgtggttaagggggccccttctacatgggtactccatgtgatgtgagtcctgcagaactgaacaacagttcaagaagccttgtcaaatttgctgcctcagcttgccaagtcttacagatgctaagaaaaacactaagttaattaacaagagaattgggaaaggcaaaaaggagagtcaaaaactcatccaggaaggtggaaatttttaaacagttattaagaaataaggtgaataaagaaagtagtgatggggtaaaactaagaagaaaaagaaagggagagtcatgggactcatcctagataaagatctctagatggttattcagaaatgaaatgaataaaatggaaattgatgggttagaacaaaggacttagaacacattgaaagttgggwggaccaaagggacccccatcttgtccaccatctttaaagggccccaaaccaccttggtgtatttctcccagtttggagaaattttaaaagctggaagacagagattataatg

SEQ ID NO: 953651 - DNA, 535 bp, Homo sapiens
ccaactgaacaggaagtctcctggccagaactcaagggagggcctgaatctggtgtgcagactccacaggccrataggcgtgaaagccctacttgttctcataagtgggagtctggtagcctggggcaagttctcagcccttcctgcccactgcctataaacaaacttggtgctgtttggggggacatggtgggagtgagactggtcttttgggttgtgtgggagctgggtgaggcctgtaactgctggctttcccccacttccctgacaacttgcatgacacagcagaggcagccataattctcctgggaacagctccattgacctgggaaccacacccccattccccacagcagacatagcaagccctgcccaaagagagtctgagctcagacacacacagccctgcccccctccccccatggtccttccctacccattctggtagctgaagacaaagggcatatactcttgagagttctaaggccctacccacagcctggttcttcctatactaccacaactgatgctctct

SEQ ID NO: 953652 - DNA, 535 bp, Homo sapiens
ccaactgaacaggaagtctcctggccagaactcaagggagggcctgaatctggtgtgcagactccacaggccgataggcgtgaaagccctacttgttctcataagtgggagkctggtagcctggggcaagttctcagcccttcctgcccactgcctataaacaaacttggtgctgtttggggggacatggtgggagtgagactggtcttttgggttgtgtgggagctgggtgaggcctgtaactgctggctttcccccacttccctgacaacttgcatgacacagcagaggcagccataattctcctgggaacagctccattgacctgggaaccacacccccattccccacagcagacatagcaagccctgcccaaagagagtctgagctcagacacacacagccctgcccccctccccccatggtccttccctacccattctggtagctgaagacaaagggcatatactcttgagagttctaaggccctacccacagcctggttcttcctatactaccacaactgatgctctct

SEQ ID NO: 953653 - DNA, 636 bp, Homo sapiens
cctgggatttcaggtcctctaacctgtgctccaaacacagtctcacatctccacctccagctaccctgggctgtgctgaggagggacccccaggtccttgccactcccccaggtctctcatcctctcagtgggctgagactgtggagccggagggcctgagtgcaaatcccagcttgccacttggaagctgtgtgacctgggcaagttacttaacccctctgtcctctgctcataagtaaagaggggatggcaataacaccccacagtccccgtggagctgggatgaggattcaatgaagctacgttcctaagatgcttagaacgatgccatgcacaggatgtgccctgtagtgacagttgtcactacctggttgaagcctggcctcagtctttaccagtgaggaagagaaaaccaagcggcctctgctcccgtgaagcactggaacctgatctgggccaagttattctcctgttggacaggagccatctcgcaggaaccaacctcagacaagtgtctctgagactgtgacagaattagaccaaggctaggccactctttgtccaaacacagacaaaagcaaggtcactgtgccaccctcaaaatcccagcccrtccctttgttggcaaaagtgag

SEQ ID NO: 953654 - DNA, 570 bp, Homo sapiens
ctgtatgttcctagtctactgagtctttattagaaatggaagttggagtttataaaaaatggtttttttgcatctaccargatgatcgtatgtgtttttctttttagcctgttaagatgctgaattataatgattgattttcaactgttaaaccaacatttgaattgctgagacaaaccccattttgacataatgtcattctgtttatatttagttggattcaacttgcaagtattttgttaagaattattgtgtccatgttcatgagaaatattggtctgtagctttcttctgtgatgttgttttccagttttggtatcagggtaatggcagcctcagaaaatgagttgaaaaattcttttcacttctatctttgggaagagtttctgtagaatggatacaatatcttccttaagtgctttggtggaattttccagaaaagccatctgggtctggaattttctttgtgaaaggtttttaaactacaaacgcaatgtctttaacaaatgtgtggctattcagagacctattaattcttgagagagcctcaggggtttgcatgcttcaaag

SEQ ID NO: 953655 - DNA, 620 bp, Homo sapiens
aacaggtggccccgctctgaaatggccctgaaggcctgtggtgaggggacatcctaccaattcrcagaatctgggttgttcattttgttggaaaagagagctggccagagatacgggtctgtattgatttgtgggctctggctaatggtttggctaagcggttagagaactggaattggaatacaattgagaaaccagtgagaagaaggtctgaggaagtgggtaagtggatagacctctccaaatcagcatagagtgtgaagatatttgtgtctcatgcgaaagttcagtgaaagtcatcaaagggtgatctcagcagaggaagattttattaaccaggtggatgggatgacctgttttggggatggcagtctcctctctggcctatgcttgggtttgtcatataggctcctgagcaaagcaggaaggagtggaggttgcacactctcagccacgtctgcttccattgcacaaagccaatcatctacagccactgctgagagcccgatgggccaccagcagagaccggcactgaatcctgccatggtccgcttcccagggaccggccagccacctagaggcagacgactgcactgggccacttcatcatggaaaggggt

SEQ ID NO: 953656 - DNA, 598 bp, Homo sapiens
ccgctctgaaatggccctgaaggcctgtggtgaggggacatcctaccaattcgcagaatctgggttgttcattttgttggaaaagagagctggccagagatacgggtctgtattgatttgtgggctctggctaatggtttggctaagcggttagagaactggaattggaatacaattgagaaaccagtgagaagaaggtctgaggaagtgggtaagtggatagacctctccaaatcagcatagagtgtgaagatatttgtgtctcatgcgaaagttcagtgaaagtcatcaaagggtgatctcagcagaggaagattttattaaccaggtggatgggatgacctgttttggggatggcagtctcctctctggcctatgcttgggtttgtcatataggctcctgagcaaagcaggaaggagtggaggttgcacactctcagccacgtctgcttccattgcacaaagccartcatctacagccactgctgagagcccgatgggccaccagcagagaccggcactgaatcctgccatggtccgcttcccagggaccggccagccacctagaggcagacgactgcactgggccacttcatca

SEQ ID NO: 953657 - DNA, 601 bp, Homo sapiens
acaaagaacccaggcctgccctatcacagccttcacatccactgcactggcaccaggctccagccctgtgtcacgcatcttagtgcatttagtccaccttagaacctagtgaggcatcagtacaggccctgactttcagaacaggaaacaggctgagaggcagtaacacgctacagatgtcgcagttagcaagcactggggctaggacttgaacccccagaacctgaactctcctccaaagggaggtgaggacggatgggagctgccctccccacccccaccccccacctcacccccggaagcagagattgatgtgtctgacccaggagggcttccccacaaaggctgggccattcctcttctccctttactacttaaggcttcctttggcaaattaccagggtaggttgggcccagtggctcacgcctgcactttgggaggctgaggcgggcagatcgcttgaacccaggagtttgagatcagcctgggcaacatggcgaaaccccatctctacaaaaaataacaaaaattatccaggcrtagcggtgtgcgcctgtaatcccagctactggggaggctgatgcttgaggattgtttgag

SEQ ID NO: 953658 - DNA, 602 bp, Homo sapiens
agatttattgcgaagagctaaagaagaaagcttccacgatctggaaggggaccccagcgggttaccrtggctggctagggtggcctgcttttattcccttatctggccccacccacatcctatggattggtccattttacagagagctgattggtctgtttacagaccgctgattggttcattttgacagagtgctgattggtacacttacaatcctttagctagacagagtgctgattggtgcgtttacaatcctttagacacaaaagttctccaagtccccaccagattagctagacaaagtgctgactggtatgtttacaaacctttagctagacacagagtgctgattggtgcgtttacaattctttagctagacacagagtgctgattggtgcatttacaatcctttagctagacacaaaagttctttgagtccccaccagattagctggacacagagcgctgattggtgtgtttacaaacctttagacacagagggctgattggtacatttacaaacctctagctagacacagtgctgattggtgtgtttacaatcctttagctagacagaaaagttctccaagtccccacccgac

SEQ ID NO: 953659 - DNA, 610 bp, Homo sapiens
caggagggccctccccctgcagcaaacttctgcctgggaatccaggtgtttccaaacatcttctgaaatctaggtggaggtttccaaaccccagttcttgacttctgtgcacttgcaggctcaacaccatgtggaagcggacaagacttgtgccttgtaccctctgaagccatagcccaggctcttcattggcccttttcagccatggctggagcagttgggatgcagggtaccaagtccctaggctgtacacagcacagggacactggcccagcccacaaaaccattttttccttctagacctcctggcccatgatgggaggggctgccgtgaagatctctgacatgccctggagacattctccccattgtcttggggattaacatttagctacttgttatttatgcaaatttctacagctggcttatatttttcctcagaaaatggggttttctatcctattgtcaggctgcaaattttctgaacttttctgctctgcttccctgataaaactgartgcctttaacagcacccaagtcacttcttgaatgctttgcttcttagaactttcttctgacagataccataaactatttctctcaagttcaa

SEQ ID NO: 953660 - DNA, 611 bp, Homo sapiens
tcatatagtagaataatgaaatttagcacaatggccttatatataacttgatatattagatcttgtggaatatttaattcttaattcatatatgtattttttctaaaagctacatcagggaagaagtagttatggacatttaaagaattctcttgtatttaaaaaaaatcaaagtaagatatcaaaaatatttcatttaaccctaagagttttactgtcgtcatgataaattgacaaaaatagcacttgttaatttgtttgttcattattcatgggcatgaataattatgaatttactaaatgccttcttagtaagtagcaaaatatactaaactgtagcccttgcagaccagtttgtgagataagtacttaaaataacttataaaaattaaaattgtatttatataccaaaactacaatgtaaacaatatgctataaaaattcagaggcgtggccaggcactgtggctcacgcctgtaatcccagcactttgggagactgaggcgagcagakcacctgaggtcgggagtttgagaccagcctgaccaacatagagaaaccccatctctactaaaaatacaaaattagccgggtgtggtggcgcatgcctg

SEQ ID NO: 953661 - DNA, 609 bp, Homo sapiens
gataagtagtatgaagaaaataaggtaatcaatagggagtactaaggccaggcgtggtgactcatgcttgtaatccagcactttgtgagrctgaggtgggtggatcacctgaggtcaggagtttgagaccagcctggccaacatggtgaaaccctgtctctactaaaaatacaaaaattatccaggtgtgatggcacgcgcctgtaatcccagctactctgggaggctgaggcaggagaatcacttgaacccgggaggcggaggttgcagtgagccgagatcgtgccattgcactccagcctgggggacaagagtgaaactccgtctcaaaaaaaaaaaaaaatgggaagtactggaagagttgggctactttagctagaatttagagaaggcctcttttgaggtaggacttacatggcaataaagagctagctatgtgaagagcatttagggcagaaggaactcttaagtagaagggcctgtagaagagaatgagcttgacatttgccagggacagaaaaaaggcttgtgtggttagcattcagtcaacaagggggaaataagtagaaaatagattataggcaagaactagaccagaaagggccatta

SEQ ID NO: 953662 - DNA, 614 bp, Homo sapiens
cttagtcattattttatgcccattttgaacccttcaactwtctctaggtttattaaacaaataaattcagtcttttctgtcacatctcaaaggatctatttccagaaaccttaatcatatttatacatccttccttggttcctctccaagttgagcacatccgacttcattttgtgttttgactttttttaagtagagcagatcaggaaaagaaagttattatgctgactcctgccccttaaattacctaggtcatacaatcagcccactattagaaacaagagttcaaatcttagctctcagaggacacctgaatcagaatgtgtaagtttattaatattttcattaattaaatgagatgtaatagaaagagaatgagtttcagcatcatcttttaaatgtgacctaacctctcaaagactcagttttcacatttgtaaaaataggaataccatctattttatgaagatataaaaacagaaagtaatacttattataaaaaagaactatcataggtcacaaattcttaagtaatgtctgtattcttgcatatccagcagccagactatgctggcttatagcaggcgttcaacaaaatcaacccctgggatata

SEQ ID NO: 953663 - DNA, 634 bp, Homo sapiens
gacccgcctcacaagtgtttgcatcagatgcttttgtacagacgagggaacccacccagggccttgtttgggcatacccacaacgaactgggggacccacctgmacactgggagacccacctgcacactgggagagtggggtggagacactgggaagatggtgccttgtgcaccaggaaggagcctggtctcttcggcacgtgtgtgtggtgacctggtattcaatctgggaggtgagaccctgttggcaggactcctttttttcactgagagctttcttttaataaattttgctctcctcaccttttttttttttttttttttttgagatggagtctcgctctgtcgcccaggctggagtgcagtggtgcgatctcggctcactgcaagctccgcctcccaggttcacaccattctcctgcctcagcctcctgagtagctgggactacaggcgcccgctcacgcccgactaatttttttgtatttttagtagagacagggtttcaccatgttagccaggatggtctcgatctcctgacctcgtgatccacccgcctgggcctcccaaagtgctgggattacaggcgtgagccaccgtgcccggcctcctcatcttttaatgtttctgcgtgcc

SEQ ID NO: 953664 - DNA, 590 bp, Homo sapiens
aaaaaagggcttctgagattttttcattggcattttgttgaatttatagatcagttttggaagaactgacattaactatattatgaacatagtatatttgtgtatgtatttaggcctgacaatctctttctgtgccatagctatttaaaccatttaaatttaatgtgactttcttatgaatgaatttatttacatcatgccttttggtattggttttatacttgtttcttccatttttgtccttttcttcctcttttactacctacttctaaattaatttatttttgtatcattattattattattattattattttgtgagacagggtctcactttgttgcccaggctggagtgcattggtgtgatcacagctcactgtagcttctacctcccaggatcaattgatcctccctcttcagcctaccaagtagctgggactataggcatgccactacgcttggctaatttttgtayttttggtagagctgggattttgccatgttgcccagactggtctgtaagtcctaggctcaagtaagccacctgcctcggcctctcaaaatattgagattacaggtgtgagccacca

SEQ ID NO: 953665 - DNA, 586 bp, Homo sapiens
gagtgtgaaagtgcctgtctcatttagccttcaccaacactggatatttggagaggttattgctaactcgatagatattttaattttatttatttgtttactaattaagttgaatactttatgtgtttttgactatgtgtatgttatttactttttgaattggcaagcatcattagctttgttctccaggtgaggaagctaaggctgagaaagcttaagtgacttgcctggggtcaaacacagaaagttgtagtcctgggatgccagcctaaattctggttcttattcagtgctcatttcattgttcaataatatcctgaaagaagaagaaatagggctttctcaattttctgtttctgatactcacaaagcattcttttttattattattaattcctggaaattgcaactgacaccaaaaatctcaggagaaatttattataagagcatacaaagcctcattcaaagatgaaggtcaacagagacaaagtagatacaatttcaatctgttttaatgaatcaagactgatggaatgaattcccttttgtgaaagaaaaaaagactrttactgtgatttcctttcaa

SEQ ID NO: 953666 - DNA, 837 bp, Homo sapiens
tctgcttgcccagcacagcacagccaaacactgacactgggatagcagcaagagaaagttgaggcatttattgtagggcaccaaggaaggagaattgagtagctcatgcttaagaccygaactcccacattgcttacaggtaagagtttttaaaggtgaggaggcagaggttacaggcgacgtcataaatcaatacacggaagctatacgttggtttgattttaaaaggctggacatcttgaagtggttcggggcacaggttacaggtggattcaaagattttctgacgtttgatttgctaaggaggcaaagctttgtctaaaaatttgggatcagcagaaaagaatattagctctcgctcaggggtgtgatctcctccaggcccctcaggaagaaattcagaacaaagaacagcgatcaggatttagtcttcagtttcccattatcaggggtcaaatcatgttggacagtagatctgtttggtgggggatctgggtttctggaaaacaacccagggacatatgttaaaatgttatcttaagtttctatagggaataaaacatctcctgacttttttgggccaatgttttaagctactattacctttttgtttatcaaattgctcatttatttctcagcgctagctaggttcctggaattttccttgaaggaactcaatattttcctttatttccatgcttgggggttgcccacgggcccctaagtagggtccctactccatcttaatacactcctccttcccagaaatctgaaaattccagaaattaaacacaagatacttctaaaaatgatggtgacatttggaactaaataaag

SEQ ID NO: 953667 - DNA, 734 bp, Homo sapiens
ccatgacttttgcaggcaccatcccaatgtggtgagcacacctttgaagacacggcctctccaggctgtctcaaagygaaacatagaatcttcacatgaccctgcaattccacttctcggtataagcccaaaagaacacaaagcaggaacaagaacagatatttgtatttccgtgtttatagcagcattattcaccaaaaggcagaaataacccaagtgtccatagactgattaatggataaacaaaatgtggtatatccatacaatggaacactattaagcctgataaaggaagaaaattctgacacatgcggcaccgcagatgagccttgaaaacattgtgctagtgaaataagacagtcatccaggacaaatcctgtgtgatcccacacatatgaggttcccagagtagttaattcatagagacagaaactggaatggcgggaccagggtctggtggagggaggatggggagcgagtggttaatgagtgccctgcttctgtctgagatgatgaaacagttctggagatagtcatggtgataacttcacaactttgtatatgtgcttaatgctactgaacagtacaacaaaaatggtgacagtggcaaattttgttttgtatagttcaccatgataatttctttaaataaaggaagcaatggccattaacacagagtggccctgccaattagtaagtcagggatgagtcagagggatgattttcttccacaa

SEQ ID NO: 953668 - DNA, 592 bp, Homo sapiens
taataacatataaaagagctaaacaagagccaataaatgtataattggtgcttctggaggaaaaaaaatcaaacaaattatccatggcatcttaaaaaaattctgaaataaacactaaaatctacaaaacaaaaaacatgttatatttcaggaaaaaataataaaatcccagtactatgactgaccctcaaagagaaacaaaacaaatcatgaagatatctaaacaagagaatcaaattacccagaatgaacctcagctattcaatgtcagaagagagttgactgttccaaacaaagttttgagggaaaacaatgtactcctaaattgcatagagagcaagctagtctttagccataaaaacaatagaaggtatcaaaggatggagtacttgaggactctagcagccctgactcattcttttaaaatctgctggactctaaacccagttaacaatgctgggaataaaaaaacaaacttggctgggtgcagtggctcacgcctgtaatcccagcactttgggagtyggggcgggcagatcacttggggtcaggagttcaagaccagcctggccaatatggtgaaaccccatct

SEQ ID NO: 953669 - DNA, 592 bp, Homo sapiens
taataacatataaaagagctaaacaagagccaataaatgtataattggtgcttctggaggaaaaaaaatcaaacaaattatccatggcatcttaaaaaaattctgaaataaacactaaaatctacaaaacaaaaaacatgttatatttcaggaaaaaataataaaatcccagtactatgactgaccctcaaagagaaacaaaacaaatcatgaagatatctaaacaagagaatcaaattacccagaatgaacctcagctattcaatgtcagaagagagttgactgttccaaacaaagttttgagggaaaacaatgtactcctaaattgcatagagagcaagctagtctttagccataaaaacaatagaaggtatcaaaggatggagtacttgaggactctagcagccctgactcattcttttaaaatctgctggactctaaacccagttaacaatgctgggaataaaaaaacaaacttggctgggtgcagtggctcacgcctgtaatcccagcactttgggagtcggggygggcagatcacttggggtcaggagttcaagaccagcctggccaatatggtgaaaccccatct

SEQ ID NO: 953670 - DNA, 468 bp, Homo sapiens
cagcattttcaataacaaaaatctggaatcccagacatggagaaaagcttctatgataaacttgtatgaytgaatattctgaattcatgaaaatttgtgttaaaaacatttagtatggaaaaattcaagaaaattcaatatattcaatataatgtaatgcttttacaaagcaatatgaaaatcttcctatagtagaatctcacttttgtagctatatattttatatatgcacaggaaaaaattggaagtaattacatcaaaataattatgggggttatgtctacaggatgggattaatagctattctgattttgtctttatgctggctccaagccccatccatgtattctaactattgaggacgcagcactactcatggctccaccagtggataagcacatataaccatcttcagaattccattgctcagggttttctgcatgggaacaaagcatccttccatttcca

SEQ ID NO: 953671 - DNA, 468 bp, Homo sapiens
cagcattttcaataacaaaaatctggaatcccagacatggagaaaagcttctatgataaacttgtatgactgaatattctgaattcatgaaaatttgtgttaaaaacatttagtatggaaaaattcaagaaaattcaatatattcaatataatgtaatgcttttacaaagcaatatgaaaatcttcctatagtagaatctcacttttgtagctatatattttatatatgcacaggaaaaaattggaagtaattacatcaaaataattatgggggttatgtctacaggatgggattaatagctattctgattttgtctttatgctggctccaagccccatccatgtattctaactattgaggacgcagcacyactcatggctccaccagtggataagcacatataaccatcttcagaattccattgctcagggttttctgcatgggaacaaagcatccttccatttcca

SEQ ID NO: 953672 - DNA, 642 bp, Homo sapiens
gtaacatacagatggggttttggtgtggatgtcctttctgtttgttagttttccttctaacagtcaggaccctcagttgcaggtctgttggagtttgctggaggtccactccagaccctgttttcctgtgtatcaccagcagaggctgcagaattgcaaatattgcggaacggcaaatgttgctgcctgatccttcctctggaagctccatctcagagaggcacccagccatatcaggtgtcagtcggccccaactgggaggtgcctcccagttaggctactcggggtcagggacccacttgaggaggcagtctgtccattctcaggtctcaaactccgtgctgggagaaggactactctcttcaaagctgtcagacaaggacgtttaagtctgcagaagtgtctgctgccttttgttcagctatgcgcttcccccagaggtggagtctacagaggcaggcaggcctcctcgagctgccatgggctccacccagttcgagcttcccagccactttgtttacctactgaagcctcagcaatggcgggcwcccctcccccagcctcgctgccgacttgcagttcgatctcagactgctgtgctagcagtgagcaagtctctgtgggtgtgggaccctccaagcc

SEQ ID NO: 953673 - DNA, 537 bp, Homo sapiens
caaagcaatgcacactgggcagtgtaacaatagatggttattgtcctgtagttctrgaggctggggctctgagattgagggttcggcagggctggctgtctcctgctctgtcctaggccagtctcctggcttctggtgatctgtgacattgctcggcttgtagaggcatcactctggtttctgcctttatcatcgtgtggtgctctcctaggaggctgtctgtgtccagactccccctttcataaggacacagcagtgtccgatcaggacccacctcataacctcattttttttttccaagacagagtcttgctctgttgcccaggctggagtgggcactaaccactaacctttggagttaatggtgtgatcttggctcactgcaacctccgcctcctgggttcaagcaattctcctgcctcagcctcccgagtagctgggattacaggcaccctccaccacacccggctaatttttgtatttttagtagagacagggttccaccatgttggccaggctggtcttgaactcctgacc

SEQ ID NO: 953674 - DNA, 637 bp, Homo sapiens
aaacaatcaacaaggaatagaagagaacttcttcagcctgataaagggcttttattaaaaaacccacagctagcatcacgcttaacagtgaagactaaatgctttcccattaagatgaggaaaaagacaaagatgtccactctcgccacttcaatttaacattgtactgagtgttctaaggcaactagagaaaaataaaaaaagaaattaaaggcacccaaattggaaaggaataagtaaaactaactatttacagatgtcacaatctagaatacagaaaattcctaaagaatccactcaaaaaaactattagagccaataagcaagagttcagcaagatttcacgatatgtgatcaatatacataaatcaactgtatttctaaaattgtagcaagaagcaaaaaaaactggaattatgaaaacaattccatttaaaggagcatcaaaaacagtaaaaacacttagaaataagtttaacaagtgcaagacttgtacaacaaaacatttttgaaagaaattaaaracaatctaaaaaaatggaaagctatcttgtagttcatggatcagaagatttaatattgttaagatgataatactccctaaattgacctacaaattcaatgcaatcactatcaa

SEQ ID NO: 953675 - DNA, 637 bp, Homo sapiens
aaacaatcaacaaggaatagaagagaacttcttcagcctgataaagggcttttattaaaaaacccacagctagcatcacgcttaacagtgaagactaaatgctttcccattaagatgaggaaaaagacaaagatgtccactctcgccacttcaatttaacattgtactgagtgttctaaggcaactagagaaaaataaaaaaagaaattaaaggcacccaaattggaaaggaataagtaaaactaactatttacagatgtcacaatctagaatacagaaaattcctaaagaatccactcaaaaaaactattagagccaataagcaagagttcagcaagatttcacgatatgtgatcaatatacataaatcaactgtatttctaaaattgtagcaagaagcaaaaaaaactggaattatgaaaacaattccatttaaaggagcatcaaaaacagtaaaaacacttagaaataagtttaacaagtgcaagacttgtacaacaaaacatttttgaaagaaattaaagacaatctaaaaaaatggaaagctatcttgtagttcatggatcagaagatttaatattgttaagatgataatactccctaaattsacctacaaattcaatgcaatcactatcaa

SEQ ID NO: 953676 - DNA, 650 bp, Homo sapiens
cctgccaggcttcttaactgggctgagatggctgaaatgacagaaatagaattcagaatatggatagaaacaaaggtcattgagattcaggagaacattgaaactcaatccaataggaacaaagatcataaagattcaggagaaaattgaatcctaattcttaggaagctaagaatcaccataaaatgatacaggagctgacagacaaatagccaggatagaaaagaaggtaactgacctgataaaactgaaaaacataagaattttataatgcaattgcaggtattaacagcagaataaccaaggtgaggaaagaatcacaaagcttcaagactggttttctgaaataagacaatcagacaataattttaaaaaagaataaaaaggaacaaataaaacctccaagaaatatgggattatgtaaaagactaaatctatgactcattggtgtccctgaaagaggtgaggagaatggaagcaacttggaaaatatatttaaggatataatccatgaaaacttccccaacctagctagaaaggccaaaattcaaattcagaaaatgcagagaacccccacatgacacttaactaaaaggtcaccttcaagrcacataattgtcagattctccaaagtcaaaatgaaagaagaa

SEQ ID NO: 953677 - DNA, 581 bp, Homo sapiens
catgttcattgcattattattcataatagctaggaggcggcaacaacctatgaatggataaaggaaatgtaatatyttaatggaatattatttcaccacaaaagaaggaaattctgccatgtgggacaacatggatgaaactggataacattatgctaagtaaaatactccaggcagagaaagacaaatgctgtatgacctcacttatatgtggaatctaaaaatgtctcaaacacacagaaacagagtagaagagcaaaggtggggactatggagaaatgttagtaaaaggccacaaactttcagttataagatgaacaagttctaagatacagcatgggtggtgatgggtatgtaaattaatttgactatggtaatcattacacagtgtacccatatcaaatcatcacattgtacaccttggatgtatacaatctatatttgtcatttaaatgaaaaaagtagttcatcatttcatttttttttaaaaaagccaaaatgtctaccaaaaaaattcaaattaactctcttaatcattctgttgacccttaactttatgaacatagctatctatggctgct

SEQ ID NO: 953678 - DNA, 581 bp, Homo sapiens
catgttcattgcattattattcataatagctaggaggcggcaacaacctatgaatggataaaggaaatgtaatattttaatggaatattatttcaccacaaaagaaggaaattctgccatgtgggacaacatggatgaaactggataacattatgctaagtaaaatactccaggcagagaaagacaaatgctgtatgacctcacttatatgtggaatctaaaaatgtctcaaacacacagaaacagagtagaagagcaaaggtggggactatggagaaatgttagtaaaaggccacaaactttcagttataagatgaacaagttctaagatacagcatgggtggtgatgggtatgtaaattaatttgactatggtaatcattacacagtgtacccatatcaaatcatcacattgtacaccttggatgtatacaatctatatttgtcatttaaatgaaaaaagtrgttcatcatttcatttttttttaaaaaagccaaaatgtctaccaaaaaaattcaaattaactctcttaatcattctgttgacccttaactttatgaacatagctatctatggctgct

SEQ ID NO: 953679 - DNA, 526 bp, Homo sapiens
aacaaacaaggcagtactgtgccttcttgtctcagttcttatactgaaaataagtgtcctttttgcatcctatttrgtgtcacattttttcatttttgtgccttttcttggtgattttgctgtttataatgcccctcaaacacagtgatgaagttctgtctagcattgctaagcacaagaagactatgatgtagcttatggagaaaaaaatgttggataaacttcaggcatgagtcatagagttattggctatgagttcaatgttactgaatcaatatatattaaataagttgtctttaaacagaaacacacataaaagaacagcatgtattggtcactttgcaaaaatgttttgaccagactctcagggatctaatcctgtatttctcctagaagcaatggttcggtatttggtaattcagtatttgtggtgacttcagaaaacatagctaccacaagtaacaagaattaactgtgtttatattatcaaagggacaccactccactgaatttcccaaaggaagac

SEQ ID NO: 953680 - DNA, 609 bp, Homo sapiens
agaacagagtactggggaggcaaaagctgcagagagtgagagaacattgaatatctgcagagggcttctgtcaagctttcagctaacagggattactacatgtgcttgtgaagaggacttagagttaggagtgtcctgtgctcacacagtgttgggaataatgcctgctccaaccagtaagactggaaaacctcatgattcatggggcattaggtaaagtacccaaaagggtcttgcctcagtagtggggaataattagccctataatgactactgctttgattctacctaacacttcttagaagcaagacccaaacggaccaaattgtttccaagtaacttaactgtatctcagaacaaaactaaagaatatttatacccaacaaggtaaaagtgacaacgctatacattaaatcagagattaccacaaatgcaaagtgcaaaataagatccatgattaggagaaaatcaatcaactgaaactgtaccagaactgatacatgttaaaataagygtaaacattaaaacagttatgataattgtattccatatgttttcaaagataagtagaggcatggaagattttaaaaaagtgaaccaaattggagt

SEQ ID NO: 953681 - DNA, 598 bp, Homo sapiens
tttttaaattaaaacaatatactttgaacatctgtgcatcaaaagaccctaccaacagagtgaagaggtaatcaatggcatgggagaaaatatttgcagattatgtatcttatatgggattaatattccraataaataaagaactcctacaaataataaaaaaccaagcaacttgattaaaaaataggcaaagaattagatagagatttctctaaagaagatataaaaatggccaatatacacataaaaagatgctcaaagtcactaatcattagggaaaggcaaatcaaaatctcaacgcaaatcaaaatcgcttcatatgcattaggatggctattattaaaaaaacagaaactaaaactcagtgagaatgggtatgaagttacttgaagttattccaatgcattgttagtgggaaagtaaaatcgtgccactgctgtggaaaacagtatgatgattcagcaaaaaattaaacagaattactttatgatctagcagtttcacttctgggtatatacctaagagaactgaaagcagaggcactgctgaagcctcgtctctactaaaaataaaaaaattatgtggtggcaggcacctg

SEQ ID NO: 953682 - DNA, 639 bp, Homo sapiens
tatatttataataaaaattttttaaattatatcttccaaaacaaaaaagtgagaaaatcagtattatttttaaaataatttttaatttttgtgggtacatagttcatgtatatatttatgaggaacatgagatgttttgtttggtaagacgtgcaatgcataataatcatatcatatagaatggggcatccatcccctcaagcatttatcctttgtcttacaaagaatctagttctactcttttaattatttttcaatatacaattaaattattattgactatagtcaccctgtggtgctgtcaaatactaggtcttacccattctttctattttttttttgtactcactgaccatccccaccttctccccaccctcttactacccttcccatcctctgggaaccatcccaaatcagtattttttttttttttggtgcgaccatacctggctaaattttgtatttttaatagagacggggtttcaccatgttggccaggctagtctggaactcctgacctcaggtgatccacccgtctcggcttcccaaagtgctgggattacagrcgtgagccacagcacctggccccaaatcagtctttttaatacatttttttcaagtctttttaatgtctggctt

SEQ ID NO: 953683 - DNA, 550 bp, Homo sapiens
aaggtgacactttttgagagagcatcagttgtggtagtataggaagaaccaggctgtgggtagggccttagaactctcaagagtatatgccctttgtcttcagctaccagaatgggtagggaaggaccatggggggaggggggcagggctgtgtgtgtctgagctcagactctctttgggcagggcttgctatgtctgctgtggggaatgggggtgtggttcccaggtcaatggagctgttcccaggagaattatggctgcctctgctgtgtcatgcaagttgtcagggaagtgggggaaagccagcagttacaggcctcacccagctcccacacaacccaaaagaccagtctcactcccaccatgtccccccaaacagcaccaagtttgtttataggcagtgggcaggaagggctgagaacttgccccaggctaccagmctcccacttatgagaacaagtagggctttcacgcctatcggcctgtggagtctgcacaccagattcaggccctcccttgagttctggccaggagacttcctgttcagttg

SEQ ID NO: 953684 - DNA, 550 bp, Homo sapiens
aaggtgacactttttgagagagcatcagttgtggtagtataggaagaaccaggctgtgggtagggccttagaactctcaagagtatatgccctttgtcttcagctaccagaatgggtagggaaggaccatggggggaggggggcagggctgtgtgtgtctgagctcagactctctttgggcagggcttgctatgtctgctgtggggaatgggggtgtggttcccaggtcaatggagctgttcccaggagaattatggctgcctctgctgtgtcatgcaagttgtcagggaagtgggggaaagccagcagttacaggcctcacccagctcccacacaacccaaaagaccagtctcactcccaccatgtccccccaaacagcaccaagtttgtttataggcagtgggcaggaagggctgagaacttgccccaggctaccagactcccacttatgagaacaagtagggctttcacgcctatyggcctgtggagtctgcacaccagattcaggccctcccttgagttctggccaggagacttcctgttcagttg

SEQ ID NO: 953685 - DNA, 493 bp, Homo sapiens
acaaataaacttctaatgcaatccggaaaatgaaggaaaagataaacattttaaaaatmaatcaatcagagcttctagaactgaaaatctcacttaagaaatttcaaaatatgattgaaacctttatcaagagactggaccaagcagaagaaaggatttcagagcttcaagaccagtctttcaaactaacccagcaagacagaaataaaaaaaaattcaaaaaatgaacaaactctttgacaaatatgggtttgggtgaagcaaccaaacctacaaattataggcattcctgagagagagagaagaagaaaaagtaaataacctggaaaacatatttgtgggaataaggaaaaaaaaaaaacttctacaatcttgctagagaggtagacagatacaagaaatccagaaaacaccggcaggatactatacaaaatgaacatcaccagggcacttaagtcaccaaacagtccaaagtcaattttaatgaaaaaat

SEQ ID NO: 953686 - DNA, 493 bp, Homo sapiens
acaaataaacttctaatgcaatccggaaaatgaaggaaaagataaacattttaaaaatcaatcawtcagagcttctagaactgaaaatctcacttaagaaatttcaaaatatgattgaaacctttatcaagagactggaccaagcagaagaaaggatttcagagcttcaagaccagtctttcaaactaacccagcaagacagaaataaaaaaaaattcaaaaaatgaacaaactctttgacaaatatgggtttgggtgaagcaaccaaacctacaaattataggcattcctgagagagagagaagaagaaaaagtaaataacctggaaaacatatttgtgggaataaggaaaaaaaaaaaacttctacaatcttgctagagaggtagacagatacaagaaatccagaaaacaccggcaggatactatacaaaatgaacatcaccagggcacttaagtcaccaaacagtccaaagtcaattttaatgaaaaaat

SEQ ID NO: 953687 - DNA, 444 bp, Homo sapiens
agatggtgcctgcatatcatggagagctatctgcaaacagggaacttgtcttctcttcctcagtcaattgatcataggtaactccccatgaggccatcgctgaaggctgggggagagaaggcagggtggmaggagtggggaccatggtcatttgagccactctttcatgtaacttgcttgtgacctcaggacttgctcaagcccgatcacgtatacaccacttccatttaatgatggaatgctgctgtgcatacctcactttgtggctaaatggatcagaaagtacccagtttatgataggcatttcaggtcgcatggtgacttgataacccatagtcaaatgttcagtttctaccaaagcccagtaacaggccaaaagctgtctctcaaaagaagagtagttatctacagaagatggcaggtccttgccccgaaaccttagag

SEQ ID NO: 953688 - DNA, 529 bp, Homo sapiens
gacttgtgtggtaatggattaaaattgaagaagaatatgaacaagaactcatgtttaacttaatatagatagatggttacataaagaaatagttacaggtgtgtctatatacatgggttactacacacacatatatttatttgctctgttaccggagaggccctaaaagaaacatctgagtagcaaaaagcaaacctagcatccagatcatgggtttagtaccattcttcaattaaaaacattcaggagggtttggagaaataactgattctaacactggacagatattataacaacataagcctatacaaataatatatttgataaaggattaacatgcaaaatatataaggaactccaataattcaatagcaatagaaacaagtaaccttattttaaaatagccaaaagacctgaataaacatttctccaaagaagatgtackaatgttcaacagatacaggaaaatgtgctcaacatcacaaatcatcaacaaaatgcacatcaaaaccacaatgacatatcacct

SEQ ID NO: 953689 - DNA, 690 bp, Homo sapiens
ccatagacagacaaagatctacgcaaagtttgaatcaggttttgagtaggatccactcacaggtttaaatctatagcaggmtacgattttattttgcacataacaaaaatgaaaaactgaggcacagaattcaagctttgcagaaaaatgtgttggctccctaaccaacacacacacacacacacacacacctactttcccaaattctttcctcctgtatgaaaaaaacttaaggctgggcacagtggttcatgcttgtaatccagctctttgggaggctgaggcagcaggattgcttgatccaaggagtccaagaccagcctgggcaacatgatgagaccctgtctctacaaaaagaaaaggaggaaaaaattagctgagcatgccaatagtcccatctactagggaggctgaagggagaggattgcttgagcccaggaggtcaaggcagcagtgagccgtaatccagccactacactctagcctgaatgacagagcaagactctgtctcaaaaatgaacaaagaaagaaaagaaagaaagagagagagagagggagggaaggagggaggaaggaaggaaggaaggaaggaatgaaggaaggaaagaaggaaggaaaaaaggaaggaaggaagtttacagagttttttgaggtgttagtgttccctaaattgtatggtcttcagaggtt

SEQ ID NO: 953690 - DNA, 690 bp, Homo sapiens
ccatagacagacaaagatctacgcaaagtttgaatcaggttttgagtaggatccactcacaggtttaaatctatagcaggctaygattttattttgcacataacaaaaatgaaaaactgaggcacagaattcaagctttgcagaaaaatgtgttggctccctaaccaacacacacacacacacacacacacctactttcccaaattctttcctcctgtatgaaaaaaacttaaggctgggcacagtggttcatgcttgtaatccagctctttgggaggctgaggcagcaggattgcttgatccaaggagtccaagaccagcctgggcaacatgatgagaccctgtctctacaaaaagaaaaggaggaaaaaattagctgagcatgccaatagtcccatctactagggaggctgaagggagaggattgcttgagcccaggaggtcaaggcagcagtgagccgtaatccagccactacactctagcctgaatgacagagcaagactctgtctcaaaaatgaacaaagaaagaaaagaaagaaagagagagagagagggagggaaggagggaggaaggaaggaaggaaggaaggaatgaaggaaggaaagaaggaaggaaaaaaggaaggaaggaagtttacagagttttttgaggtgttagtgttccctaaattgtatggtcttcagaggtt

SEQ ID NO: 953691 - DNA, 574 bp, Homo sapiens
atgtaagggggtttatgatgagaaagggccgagagaggagagacagctagatggcgagagagacagagagtgaggaaaaacacacacagagacagaaagmcagggagagagacagagagccagggcgccagcaggcagcattccttttcagactcctctgcactgtgtgagtgccctaaccggttccttccctctctctccccgctttcctttgtgtatttatttatttacttgttcgatggttcatttatttgttttaataccccccgacatcatctgggccatgacattctgagccacatgatggaaggctcaggaattgttgtaaagtgtcacttacatctccgatgtttgtgtgaacagcacgcacggcggtgacagtgataatggaggtcacgtgagctctctgatgtctcatcaggtcccgctgggcagccagtatcggcttgtaatgatccctgcagacaggtcaggggaacttgccacagcgctgggtctcagtatagcacttgcggtagtttttattctcctctttgcatttttagaagtattttcctaagtgtgtaatatttta

SEQ ID NO: 953692 - DNA, 567 bp, Homo sapiens
atttctgcaaataggttaaaaaaaaaaactgggcgtaatgacacatgcctgtagtcccagctactggggaggctaagatgggaggatcgcttgagtctggggacttgtgggtgcagtgggctgagactgcatcactgtactccagcctgagagacagagcaagatgctgtctcaaacaaaacaaaagaagtggtagaaagtcaaataaaccgtgacacataacagaaattagaatatagataaagatctgccatttagaaaggcagcaggaccagatgactttatcattaacatcgatctagcctcaaaaaacagacaattccttttcttataactacacacagaagaagatgaaaggatcccataagtgatggtatgaaacaaggataggctgaataacaaaatcagataaaaatacctaaaaagagaactataaatcaatatttactaataaaaacataagtattctaagtaaaaatagaaattttagtttattcaaaaaacagcatacttggccaagtagattttattccaagtrtactggtttttgaagggaagcccggccta

SEQ ID NO: 953693 - DNA, 616 bp, Homo sapiens
ccctgctggtcacgctttcttgaaagcctgtcttcactttgcttcttgtaccccactctttcatgaatcttcttttaactcattggctactccttctcagcctcaatttctagatagccctcatcttccttaattctaaatgttaggggtactaccaggctcacttttaagaattttttttaataaatattcagtctgtagttgatcttaactaattccttgaccttaagtacaatctataagctgtcaactcccaaccttattttccagccctgacatctcccctgatctcatcttactgcttattcaacatctctacttgatggtctaataggtatcccaaatgtcacatgtccagagctgaatttgtgctgcattcctatcactccccccagtcagtaagtggcaaccctaaacttccattttgttaggccaaaaaatcttagcatcatcctgtctcctctttttactcatactcccttcaakgtatcgggaaattctactgactctaccctcagaacgtatccagcatgcaacagctcatcactgccttccccatttccactccagttcagaccgtcaactgaactactgcatcactttaattggtctccct

SEQ ID NO: 953694 - DNA, 752 bp, Homo sapiens
agcgattggatgtctgctgccctcagatcttctttgctcagtctactgattcagatgctaatgtcttctggaaacaccctggcagacacacacagaaatattttaccagctatctgggtatcccttaacccagttaagttgacacataaaattaatcatcacactgacttaatttaaaactgaatcagtgtaccattttcttaaatggaaaaatcactattaattatcatgcaaaacaaaattaagtcctggatactcttgcctgagtaaatctgtgagcttgaggtttattctgcctttgttaaaacaggagattaacagataagtagtagatattctaacaataccctgagatttcctccttcactaaattagaatggaagaagaataaaatggatattttaatttggggattcagtgttcttaaggaccatggtattgtgaaatatgtatttcgtctccctgtttcctcacagaaaaaaaacctctaaaacccatgggatcatcagggtggtaactgtcttttctctgctacgagatgaccagtggctggggactcctatagcttcaggttggggactgttcaccagaaagaccaatgtatgcttagagggttgggactttcagctccagcctccttagaggggaaagggggtgaaggttaagtggatcaccaaaggccggtgatttaatcagtcatgcctatrtaatgaagcctccataaaaacccaacatcacagggtttgggagga

SEQ ID NO: 953695 - DNA, 641 bp, Homo sapiens
tcttggtgcctgctctgggcaaagttgccagcctgtgcgacaagagcgaaactccgtctccaaaacaaaaacaaaaaaccttgtatcatttcmaggggctcacatctccctaagggcctggtaattggctggctctggcctccatctggccctgagggtgtaggtaacaccccaccttacctggtttcttcctgccagggccaatcttcagacttcaggactttgcagcctatcccacctcccctctggccagccttgagcccttgtgggtccagcactttttccaggctgtctcctggttgtccttctgcctcgaggcctggctcatgctgctccccctcccactctccaagacccacaaggaccactccacacccagctcagcccctcccctcagatagtcctttctctttcctcaggtggccaggtgcatatcttgtgtgaggaccttcactgtatctgggaatgcctactggttacctcggtaacagagaacaaggcatttacctgatatgagtgtcttggttcactgtctacatggctagggagggagtcaataataggcttttcacttgctgcaagggccagttctcctggccccatggctctagggatggaggacgctgcaggagatgcgccgc

SEQ ID NO: 953696 - DNA, 730 bp, Homo sapiens
caaccaagaaagggatacaatgcctagtgggctacttggattttggaggcaacacatttctcatttgggtgtgttactctggcccatttatcatgtgacccataaggctgccagttttgagtggggtccagaacaggagaaggctccgcaacaggtccagactgctatgcaagctgctctgccacttgggccatatgacccagcagatccaatggtgtttgaggtgtgagtcgcagatagggatgctgtctggagcctctggcaggcccccataggttaatcacagtaaaggtctccaggatttttgagcaagttcctgccatcttctgcagataactactcttcttttgagaaagagctcttggactgttactaggctttggtagaaactgaatgtttgactatgggtcaaatcaccatgccacctgaactgcctgtcatgaactgggtgctttctgacccaactggccataaagtgaggcatgcacagcagcattccatcatcaaatggaagtggcatatatgtgattgggctcaagcagggcctgaggccacagatgagttacatgagcaagtggctcaaatgtccatgatccccactcctcccaccctgctttctctcccccagcctgcactgrtggccccttgtggagttccttataatcagttgatagaggaagagaagactggagcctggtttacagatgcttctgcacgatatgcaagcacc

SEQ ID NO: 953697 - DNA, 527 bp, Homo sapiens
atgaaaaaggcaatctcaaagcttacctactgtgattcaatttaaataatattcatgcactgataaaattgtaaagatggagaacaaattagtagttttcagactggattaattgaacagaagtccatgtttctgagtccatgtgcaaccccattcttgctggcatgactactttgtgcacaaggctgttagtcaagaaaagacattcctgtcaaaataggctttctgtcacccacaaaatgggttatattatatagctgaccattaagattattaagatcctcctctgttgagatttatctttgatgagtattcacatgaaacataaaattttacaaacattctttgcccatttagagcaaaatatctacatacttttttctgccaaaacctcattgtcatcaatcttctaattggttcctgaataccattcatataattattttttgtgamaatttagtaaagattcatatctctatttttccctccagccagaataaacaacctggtgtgcttttcaaagttct

SEQ ID NO: 953698 - DNA, 603 bp, Homo sapiens
agtttaattaagacccacttgtcaatttgtatttttgttgtaattgtttttgaggacttagccacgaattatttgcaaaggccaatattgagaaaggcatttcctagatgttcttctaggatttttatagtttgaggtcttacatttaagtctttaattaaccctgagttaatttctgtttatggtgatagacagggtaccagtttcactcttctacatatggatagccagttagcccagcatcatgtattgaataggaattcttccctatgtgatcatctcaacagacacagaaaaagctttcaataaaatccaacatcctttcatgttaaaaaccctcaacaaagtaggcatcaaaggaatatacctcaaaatagtaacagtcatctatgacaaacccacagccaacatcacactggccaggcaaaggctgaaagcataagcatttcttttgagaactggaaccaaaaaggatgcccactctcaccactcctactcaacatagtactggaagtcctagccagagaaattaggcaagagatagamataaaaggcataaaaatggagaaagaagtcaaagtgtattattctattttcatgcag

SEQ ID NO: 953699 - DNA, 636 bp, Homo sapiens
cagaaggtgaatagagatgagtggagaggcagtgagaagtggactctagctgtattagttttctattgttrttgtaacaaattaccataaacttagcagctttaaaccacacaaatgtattatcttacagttctggagatcagaagtctgaaatgtattttactaggtgaaagccaaggtgttggcaggtgcctttgtgtgtttgggcagctatcttagtctgggcaatttataaacaacataaatcattactcatacttctggaggctgagaagtccaagatgctggcagatttggtgtctgatgaggggcctgctccctgcttcaaagatagtaccctctggctgtgccctcacatggtggaagggacaaacaaattcctttaggcctcttatataaggaccctatcccctaaaaccatcaccttgggggttaggatttcaacatatgaatttgggtggacacacatattcagacatagcagcagagctctgtttcttcaggagtctctaggggagaatgtgttttcttgacattttcagcatctggagttccattccttgggtcttggcttcttcttccatcttcaaaacatagcatcttcaaatctctctctgcttctattgtcacgtgacc

SEQ ID NO: 953700 - DNA, 583 bp, Homo sapiens
cacttccttgcttagatgttttcctaggtgtgtgtgtgtgtttatattttttttatggctattgtacatggaattcttgatttggctctcagcttgagtgttactggtatatagaaatgctattgatttttgatttttgtaccctgaaactttactgaagttgtttatcagttttaggaggcttttggcagaatatttagggttttctaggtatagaattatattgtcagtgaagagattttttaattttttaatttttttttgagatggagcctcactctgtcagccaggctgcagagcagtggtgcgatctcagctcactgcaatctccacctccccagttcaagtgattctcctgtctcagcctcctaagtagctgggattacaggtgcgcgacaccatgcctggctaatttttgtatttttagtagagatggggtttcaccatgttgaccaggctggtctcgaactcctgacmtcgtgatctgtccacctcggcctcccaaagtgcgggattacaggtgtgagccactgtgcctggccaaaaagagatgatttgacttcctcttttcctatttgggtgc

SEQ ID NO: 953701 - DNA, 640 bp, Homo sapiens
caagctcccttcttcctcctgctctccctcctgctagggattagaaaggaaaatgagacacagccccagcccacaygaacctctaacactgtagaggagagtttcacctactgagtggcatttataatttagttaccatgggtattatggaagaagtgagaaaaactggaagcaaaaacaactttaaactagtagaagcccttatccctatttctgactagctttttaaaaagtatttaatatattttttaaactgacaatataaacctcaccaaattttcattatgatcatctgcaattaatgttttccatggtttactgtgaacacatacagtaccatccatggtactcttcttttttttgagacggagtcttgctctgtcgcccaggctggagtgcagtggcgggatctcggctcactgcaaccaccgcctcccgggttcacgccattctcctgcctcagcctcccaagtagctgggactacaggtgcccgccaccacgcccggctaattttttgtatttttattagagatggggtttcaccgtgttagccaggatggtctcgatctcctgacctcgtgatccgcccgcctcggcctcccaaagtgctgggattacaggagtgagccaccgcgcccg

SEQ ID NO: 953702 - DNA, 604 bp, Homo sapiens
gctgctccaggagaacccctgccatcaaggccaggccctacagggctgtggggattgggcagtggagtctggggacaagaggggctccccaggtgttctgagtaggtgagtgacatggtcagatgcagccagtgtgggaggatggactgaagacagagggcaaatgacagagaagcaaatcagaggagtgacaccagttgcagactcagacctgatgctggggccagacatcaggacatggacctggaggaaatgtaggagatggaattgactggagtcactggctgattggaagagggcttagggcagcagaagatggaggaactggggtggcttccaggcttctgtcttgagaatccgaagaaccggatatgtgttgtgacggagcggctcacaggaaactttatatttcccagattcttaagcccaggttcaattcttgccccctgaacaggctccagtgtgacggacgtgcctgttcttcytttttttttttttttttttttttttgagttggtctcactcttgcccaggctggagtgcatgcagtggtacaatcacagctcactgtaaccttgaactcctgggctcaagtgatcctccc

SEQ ID NO: 953703 - DNA, 601 bp, Homo sapiens
tagcaaaatggcataccaggagattatatcccgcgcccagctcggagggtcccacacccacagagcctcgctcactgctaacacagcagtctgagatcaaactgcaaggcagcagtgaggctggaggaggkgtgcccaccattgctgaggcttgagtaggtaaacaaagcagccaggaagctcgaactgggtgcagcccaccacagctcaaggaggcctgcctgcctctgtagacttcacctctgggggcagggcatagctgaacaaaaggcagcagaaacttctgcagacttaaacgtccctatatgacagctttgaagagagtagtgtttctcccagtgcagagtttgagatctgagaatggacagactgcttcctcaagtgggtccctgacccccaagtagcctaactgggagacacctcccagtaggggccgactgacacctcatacagccaggtgcccctctgagacgaagcttccagaggaaggatcaggaaacaacatttgccgttctgcaatatttgctgttctgcaacctccactggtgatactcaggcaaacagggactggagtggacctccagcaaactccaacagacct

SEQ ID NO: 953704 - DNA, 612 bp, Homo sapiens
atttgcatttctctgatgaccagttatgagyattttttcatgtgtctgtgggttgcataaatgtcttcttctgagaagtgtctgttcatatcctttgcccgcttgttgatggggttggttttttctgtaaatttgtttaagttctttgtagattctggatgttagccctttgtcagatgggtagattgcaaaaattttctcccattctggagatattagccctttgtcagatggataaattgcaaaaattttctcctgttctgtaggttgcctgttcactctgatggtagtttcttttgccttgcagaagctctttagtttaattagatcccatttgtccattttggcttttgttgccaatcaaatggtagttctacttttagttctttaaggaatctccacactgttttccatagtggttctactagtttacattcctaccagcagtgtagaagtgtcctctgatcactgcatccacaccaacatctaatggtttttggttttttgattatggccattcttgcaggagtgaggtggtatcacactgtggttttgatttacatttctctgatcattggtgatgttgagcattttttcatgtgtttgttgccc

SEQ ID NO: 953705 - DNA, 617 bp, Homo sapiens
tagaatgtgtattctgcagttgtagaatggaatgttctatatatctatatatatatagatatatctgttaagtckgtttgttccaaggtatagtttaaattgattgtttctttgttgactttctgtcttgatgacctgtctagtgctgtcagtggagtattaaagttccccactattattgtgttgctgtgtatttcatttcttaggtctattagtaattgttttataaatttgggacctccagtgttaggtgcatatatgtttaggactgtgatgttttcctgttggacaaggccttttaccattatataatgtccctctttgtcttttttaattgctgttgctttgaagtttgttttgtctgatacaagaatagctactcctgctggcttttggtgtgcatttgcatgaaatgcccttttccaaccttttacttcatgtgagtccttaagtgttagatgagtctctggaaggcagcagatggttggtgaattcttatccattctgcagttctttctgtctttcagatggagcatttaagctatttacattcagtgttagtagtgagatgtgaggtaccatttgattcatcatgctatttgttgcctgtgtacctt

SEQ ID NO: 953706 - DNA, 464 bp, Homo sapiens
tccttctccctgtggcattttcccagtgcctctggccgccctccagaaagatccctgtaatgccagacaggaatggcttgcttgtggacccagaaagctcacaggactttttcctctgatkcctctatccgtgtatttcgcttggctgtctaaattgactcagctccaggtaaggtcagaatcttttcccataaactagacattaagtttccccagtgaggatgtgtgttcgggggctgagaatctccctttcccactttctcagtttgggcagtcacattatctcaggtgtctcctgggtcctgcaggagcggtcctctttcttcagagggtctgtgggtcctctcgggtttcctgatttattcctgcagtcgttctgtagccaaaattcaccgtgtgaacctccacacgctgctctgttcatcccagtcagagctgccatgtagtcctgcctcccatccacc

SEQ ID NO: 953707 - DNA, 642 bp, Homo sapiens
gagaccctgtctgagggctaagatttatttttttctgaacaggataaattgactttagctactattgaagactgagtggctttggaaattagctttagctgcagagttgataatgaattcaacataaaactataaggcaaaacagtgcttatatgtgaaacttaatattgaagtaaagtcacttagatgccacctaacattgttttaatcactagtaatattaagatgctttatacacttcttatgctgtcaaaagtgaaaataagaaatgagatctctgtttgcataccagttgtagcagatacattttcttagctcaactaagtactgttgaccttccatatccatgagttctgcatctgtttttaaccagctttgaatcaaacatatctgggagaaacaaatggcatctgtactgaacattcacagacactttttgatcattattctctaaacaatacagtataacaactatttacatagcatttacattgtattaggtattatgagtaatctagagattatttaaaatatacaagaggatatgcatagattakaagcaaatactatgacattttatattagggactggaatatccacagtttttggaatctgagggaggtcctggaactaatctccca

SEQ ID NO: 953708 - DNA, 610 bp, Homo sapiens
agaactgagctattgcacactatagaggaaagataatttggagtttgaatctagccaagtaactgcctgggcaacaaaataattaacattatttagagtaagatagagagtctccgcaaaataatattcatgaaatactgtacctaataataaccatgagaagaagaggaaatttgactcatagagaagagataaaacaatcagtagaaaacagctctaagatgactgaagatgttggaattagtgcacaagacttaaaaagcatatatatataaatatgcccaaggacttaaaatatgatcttaatgaaacaaaagatgggggaatttttaatagaaaaatagaaaacattaaaaaacaggtggaagtttgaaagggtaagtggccttgaagatagatcaatattaattatttaatctagaaaacaaagagaaaaattattaaagaaaaatgaataaaatctcagtgctgttggagtaatktcatgtaatttaacatatatgtaattgtagtctcagaaggtaagaagagagcaaatgtaacaagaaaaatgtttaaagagatagtattagacagtcttgcagattaggtgaaaaacataaatttagag

SEQ ID NO: 953709 - DNA, 595 bp, Homo sapiens
actttggcagttttgtaaaataagacaacaatgaagtttgccacatcaattgacttttcctttcatgaaagatttctctgtggcatgcartgctgtttgatagcattttacgcacaatagaactgcttccaaaatgaaagtcagtcctctcaaatcctgctgctgctttatcaactaagtttatgtaatattagaaatccctggttgtcatttcaacaatgttcacagcatcttcagtaggagcagattccatctcaagaaaccatgtttctttgctcatctgtaagaagcagttcttcatcccttcaagtctgatcatgagattatagcagtccagtcacttcttcaggctccacttgtaactttcattctcttgctgctatttccaccacatctgcagtgacttccactgaagtcttgaacttttgacctttgggtcatccatgagagttggaatcatcttcttacaaattcttattaatgttgatatttggacctcctcccatgaatcacaaatgttctaatggcatatagaatggcaaatcctttccagatgttttccaatttactttgcccagatccatcagaggaatca

SEQ ID NO: 953710 - DNA, 592 bp, Homo sapiens
aattgatatacaaagaagagctggtaccattccttctaaaattgtgtattagttccttttcatactgctataaagaactgcctgagactgtgtaatttataaaggaaagaggtttaattgactcacagttcagcatagctggggaggcctcaggaaagttacaatcatggtggaaggtgaaaggaaagtaaggcaccttcttttcagggtagcaagaaggagaagtgctgagtgagggagggggcagagccccttataaaactatcaggtcttgtgagaactcactcgtcacaagaacagcctgggggaaactgcccccgtgattcaattaattccacctggtctctctcttgacatgtggggattatagggattacaatttaagatgagatttgggtagggacattgagcctaaccacatcagaggcactcctctccaactcattatatgaggccagcatcatcctcataccaaaacttgrcagaggcacaacaacaaaaaaagaaaatggcatgccaatgttattgataaacattgatgcaaaaatcctcaacaaaatcttgcaaaccaaatccgtcagcacatcaaaaa

SEQ ID NO: 953711 - DNA, 472 bp, Homo sapiens
ccagaagagagacaacaacaatcgttgcagtttggctcataggaaaccacatcaataggaaaagcggggagactgcaagaacaaaccagcaatcccaagaggacccaagattatatgacctttgtcttcagctaccagggtggatagggaaggaccatcaagtgggggcagggctaggtgtttctgagctcaggctctccttgggtgggtcttgatgcagttgctgtggggatgggagtgagattcccaggtcactggagttgtgtacctaggaggattatggccgcctctgctgagtcatgcaggttgtcagagaagtaggggaaagctggcagtcactggcctcactgagctcccacacaatccaaagggctggtctcactcccactgtgccccmaccaacagccctgagtttgtttccaggcagtgggctagctgggcttgagaacttgccccaggctacccgcctccc

SEQ ID NO: 953712 - DNA, 602 bp, Homo sapiens
ttacacaattctgtgcattgaagcyatttatctcctgccaactgtggtaattaattttgttttcagttagtggaggggggattgatcttccctttgtgaaaaactttctcacgcaaatgtttcccagtgttgaaatgttgaatggctttcctcctgttgtacaggtatttactggaatctgagctcatgattctctgaatccatgactaatgcaaagtcagagccaagtttattgatgacttctatttctctctttagggatcaaagtttttcaaagtatacactacttagaacttttaaattatctctaagtctatttgcacgtaatgcaagtatagcaacctgtacaggtaaataccttttagtttcataaacaaggaatacaatctcatgtaggcatacgttttcaattaaaaatttcttataaacatatagtttgtgtgtctcacagagttctttaacccaaatacatgccagtggccttgtagagttgagtagtgtttataagaaggcttgtcactgggcagctttatgtcaatatccagaaaacttgggccatactatcaaaccttcaccaccaatgttttttactttgatttatt

SEQ ID NO: 953713 - DNA, 595 bp, Homo sapiens
cagtggtgcaatcttggctcactgcaacctctgcctcccgggttcaagcaattcttctgcctcagcctcccaagtagctgagattacaggcttgtgccatcaagtctggctaatttttgtatttttagtggagacggggtttcaccatgttgtccaggctggtctcatactcctgacctcaagtgatcagcccgccttggcttcccaaagtgctgggattacaagcacctgacaccacacccggctaattttttgtattttttgtaaagacagggtttcaccgtgttgcccaggccggtctgattgcccaactcttagatccaactgtctacccctcctctcctgggggtgcttcagaagcacctcagcatatcttaagctgaattcatgacctgtccctgaacttggccctcttcctgtgcccttatttcagacaatgtggtcaacatctacccaattatgtgcaccggsgggggacaccccgggtgattcctctccctcacacccccatccagtctctgccaagcacagtctccactccgccacatctccgccatcacccgtgtccacgctatgctgaggtcactgggaccac

SEQ ID NO: 953714 - DNA, 579 bp, Homo sapiens
gaacagaccttgctttgcctttttgtttcagtgctcatactgtaaaaaagtgtcctttccaccgggcgcggtggctcacgcctgtaatcccagcactttgggaggcagargcgggcggatcacgaggtcaggagatcgaaaccatcctggctaacacggtgaaaccccgtctgtactgtgaatacaaaaaattagccgggcgtggtggcgggtgcctatagtcccagctactcgggaggctgaggcaggaaaatggcgcgaacccgggaggcggagcttgcagttagccgagatcgcgccactgcactccagcctgggcgacagagcgagactccgtctcagaaaaaaaaaataaaataaaataagtgtcctttccttggtttgtttagtgccacattgttgtatttttattggcgattatactgtttaaaacagcccccaagcatactgctgaagtgctatctactgttacaaagccagaaagctgtgatatgccttatgtagaaaaatatgtgccacataaactttatttaggcatcagttacggtgtcgaatgccatgagttcaatgctaatgaat

SEQ ID NO: 953715 - DNA, 575 bp, Homo sapiens
acccggaaaagtaaaatgatctgctcaatgagttagaaattcagtcacccacatcccagctacccacatataattgctagsaccttggtgattttcctttcactgactacccttttttcaaggtgacagaatgattacaggcgaaagagctctaatttggtagttaaagtgtcaggaggtataactatccttagttttgccatcaactcactctatggccttgggtcactggctacagtaccattattaataagttgatgtaggactgtgctggggtctgacctgcagatccaggcggcatgatggatcaataacatactcagacaccaatattcagtgaaagagtggctagggtccaaggccactcacagaaagagatgtagcaactgcacacactgaatagctggcccgtgggcatttattcagcacggatttaatgacaaaaagctttgaatcaacacacctgtgggtaattaatctggtcaccctcccctggagagagcagtcctacgaatgatcaaaggccagtcttaggaccacatgagtaaacaagctctttagataaactcccttac

SEQ ID NO: 953716 - DNA, 636 bp, Homo sapiens
gcctatcatttgaagctttgaagccaggcattgacttctcttctgtaactatgraagtcctagatggcatcttgtaatataaggctgttttgtctataatgaaaatctgttgtttagtgtagccactttcttagctagaccttctggataatttgctgtagcttctccactagcacttgccactttaacctgcacttttatgttatcaaaaggtcttcttaccttaaatgtcataaaccaacctctgctagcttcaaacttttcttctgaagcctccttacctctcttagcctttatagaactgaaaagagcccgcttgctctgaattagattttggcttaagggaatgttgtggctggtttgatcttctatccagaccactacaattttctccatatcagcaataaggctggttcactttcttatcattcatgtgctcactcactggagtatcacttttaatttctttcaggaatttttcctggccaggaacagtggctcatgcctgtaattccagcactttgggaggccaaggtgggtggatcacttgggcccagaagttcaagaccagcctgggtaacatagtgaaaccccatctctagaaaaaaatgtttaaaaaattagccaggaatggtg

SEQ ID NO: 953717 - DNA, 636 bp, Homo sapiens
gcctatcatttgaagctttgaagccaggcattgacttctcttctgtaactatgaaagtcctagayggcatcttgtaatataaggctgttttgtctataatgaaaatctgttgtttagtgtagccactttcttagctagaccttctggataatttgctgtagcttctccactagcacttgccactttaacctgcacttttatgttatcaaaaggtcttcttaccttaaatgtcataaaccaacctctgctagcttcaaacttttcttctgaagcctccttacctctcttagcctttatagaactgaaaagagcccgcttgctctgaattagattttggcttaagggaatgttgtggctggtttgatcttctatccagaccactacaattttctccatatcagcaataaggctggttcactttcttatcattcatgtgctcactcactggagtatcacttttaatttctttcaggaatttttcctggccaggaacagtggctcatgcctgtaattccagcactttgggaggccaaggtgggtggatcacttgggcccagaagttcaagaccagcctgggtaacatagtgaaaccccatctctagaaaaaaatgtttaaaaaattagccaggaatggtg

SEQ ID NO: 953718 - DNA, 636 bp, Homo sapiens
gcctatcatttgaagctttgaagccaggcattgacttctcttctgtaactatgaaagtcctagatggcaycttgtaatataaggctgttttgtctataatgaaaatctgttgtttagtgtagccactttcttagctagaccttctggataatttgctgtagcttctccactagcacttgccactttaacctgcacttttatgttatcaaaaggtcttcttaccttaaatgtcataaaccaacctctgctagcttcaaacttttcttctgaagcctccttacctctcttagcctttatagaactgaaaagagcccgcttgctctgaattagattttggcttaagggaatgttgtggctggtttgatcttctatccagaccactacaattttctccatatcagcaataaggctggttcactttcttatcattcatgtgctcactcactggagtatcacttttaatttctttcaggaatttttcctggccaggaacagtggctcatgcctgtaattccagcactttgggaggccaaggtgggtggatcacttgggcccagaagttcaagaccagcctgggtaacatagtgaaaccccatctctagaaaaaaatgtttaaaaaattagccaggaatggtg

SEQ ID NO: 953719 - DNA, 598 bp, Homo sapiens
cctggactttttttattggcaatttcaaaattaccatttcattctcactgtttgttattggtctggttcagagtttatatttcttcctggtttaatctaggagggttgtatatttccaggaatttatccatctcctctaggttttctagtttatgcatgtagaggtattcctagtagccttgaataatcttttgtctttctgtggtatccgttgtaatagctcctgttttgtttctaattgagcttatttgggtcttctctcttctttgttaatcttgctaatggtctatcaattttatttatcttttcaaataatcaggttttagtttcatttatcttttgtattttctttgtttcaattttatttagttctgctctgatttctgttatttcttttcttgtgcggggtctgggtttggcttgctcttgtttctctagttcctttaggtgtgaacttacattgtctatttgtgctttcagactttttgatgtaggcatttaaggctgtgarttttccttttagcactgtctttgctgtatcccagaggttttgataggttgtgtcactattatcattcagttcaaagaattttttaat

SEQ ID NO: 953720 - DNA, 758 bp, Homo sapiens
agggaagctggaactagtgaatcaatttgggaatcatcaggatatcatcaataaatttttaaagccatggaactagacagatgaaataacccagarcagtgctgttcaccggagctttctgagacgatgagcctgttctataatttctgccacacaatatagcagacaaaagccacatgtggctaggggctactataatgaacagcgaggacctagagaatgagtgtaagggagcagagaagaggttttacaactgagccctgggcttagcatggctgagtcaatggagagggtaagtatccaacacaggagactgagaaggaacagcaagtgaggcaggagaaaaatcaggtgagtggtatctcccagaaaccaggtgaagaaagcttgaaacagaaaagagtaaccaatgctatcaaaaattctgagagaaagctggcgggtgcagtggctcaagcctgtaatcagagcactttgggaaggtgaggtaggctaatcacttgaggccaggagttcaagaccagcctgggcaacatggcgaaatcccatctctactaaaaatacaaaaattagccggcatggtggtgcacacctgtaatcctagctacttgggaggatgaggtatgagaactgcttgaacctgaaagggggaggttgcagtgagctgagattgagccaccgcataccagcctgggtaagagtgagaccctgtttcaaaaaaaaaaaaaaaagaattctgagaagttaagttaagtaag

SEQ ID NO: 953721 - DNA, 556 bp, Homo sapiens
gacaatgtgacacatatacaccattgaatactatgcagccataaaaaagaatgagttcatggcctttgcagggacatggatgaagctggaaaccatccattctcagcaaactaacataagaacagaaaaccaaacaccacatgttctcactcataagtgagagctgaacaatgagaacacatggacatagggaggggaacatcacacaccggggcctgtcgggggtgctagtggagggatagcatcaggagaaatacctaatgtagatgacaggttgatgggtgcagcaaaccaccatggcatgtgtatacctatgtaacaaacccgcacattctgcacatgtactccagaacttaaagtataataatagaagaagaagaggaagaagaagaggaagaagaagagagaagaagaagaagaagagagaagaagaagaagaagaagaagaagaagaagaagaagaagaagaagaagaagaagaagamgacgacgacgacgacgacgacgacgacgacgacgacgacgaagacgacgacgacgacaacaacagccattt

SEQ ID NO: 953722 - DNA, 556 bp, Homo sapiens
gacaatgtgacacatatacaccattgaatactatgcagccataaaaaagaatgagttcatggcctttgcagggacatggatgaagctggaaaccatccattctcagcaaactaacataagaacagaaaaccaaacaccacatgttctcactcataagtgagagctgaacaatgagaacacatggacatagggaggggaacatcacacaccggggcctgtcgggggtgctagtggagggatagcatcaggagaaatacctaatgtagatgacaggttgatgggtgcagcaaaccaccatggcatgtgtatacctatgtaacaaacccgcacattctgcacatgtactccagaacttaaagtataataatagaagaagaagaggaagaagaagaggaagaagaagagagaagaagaagaagaagagagaagaagaagaagaagaagaagaagaagaagaagaagaagaagaagaagaagaagaagacgacgacgacgacgacgacgacgacgacgacgacgacgacgamgacgacgacgacgacaacaacagccattt

SEQ ID NO: 953723 - DNA, 596 bp, Homo sapiens
aattcaacattggaatggattattaatggaggatgtgacattttactcttgaaaatgcttgggagtaaatagaaagttttaaaraaaaaagtcactcttgaaaaaaaaaaaatcatgatttttttttttttttttgagggagggtctcactctgttgcccaggctggagtgcaacagtgcaattctagctcactgcagcctcaaactcctgggctcaagagatcctctcacctccgcctcctgtgtggctgggactgcaggtgtgcaccacaatgcctggctacgtttttttaatctgattttaaatctacgaaaatgtatgtgaaagtgtggacagcacaagactcactcccttttttatatcttacatataaatagggctgttagggaatccccacttccacccccacccctttatcacataatttgtttaacgttatgttaaactacttagaagtccgagttacttctatattcttgataatgaaatgcagagtcttcctgtctgtgccaagcatttcttttttactctctgacagaacttttgcaacatgggttacagaaataagatcctccttagttcagcagtgagagag

SEQ ID NO: 953724 - DNA, 447 bp, Homo sapiens
atccccaactcaatttccttcaacaaggtccccaaaatgcccacccaatgcatgggaacatgtggtcagttgcagtggaaagagacaatggtatcaactgacagtggctaatcttactttggcaaaaaaacacacgtccatgtgaacacattgccaggccccctccagaagttttggaagcaacctgtataagtagaggctgcctgaagtttacgcttctttggcttcgtagtaaatctgcctctgctgaaatctcagcctatcagaccatagaggcattcaggattgcagcacattcatgccttgtaagtgccaaaacattgtcattgcaataaaattttaattcttcgagaccaaagcatttgaaaagcatttcacacagtttcctgttttctttgcttttctttctttctyttttctttttttttttttttttttgagacagtt

SEQ ID NO: 953725 - DNA, 347 bp, Homo sapiens
atcctagcatggagagaaaggttgtgtctttccaagtcctagtcaatcaggtgtattcattgtatgcagttttgttttatcacaccttttgcttccgatattccaratttaaccttatagtaatatgtgcttcatgctcttagaccagacaggtacatctgatgagctccaccttgattttcagattggagctaaattaggcattaaaatgtggtcacatacataagagcacctgcatttagtcatcttcccgttttcaaatgtgagcctaaagtcttggctcttatctgtatttaaaactgacattgttaaatgcataaacacatctgaattatttatatttaggc

SEQ ID NO: 953726 - DNA, 584 bp, Homo sapiens
gtcttttttgatctttgctggtgtaaagcctcttttatcagagactaggattgcaaatcctgcttcttttttactttccatttgcttggtaaatattcctccatccctttattttgagcctatgtgtgtctttgcacgtgagaggggtctcctgaatacagaacagcaatgggtctttactctttatccaatttgccagtctgtgccttttaattggggcatttagcccatttacatttaaggttaatattgttatgtgtgaatttgatcctgtcatcatgatgctagctggttattttgcacattaatttatgcagtttcttcatggtgtcattggtctttatattttgttatgtttttgctgtggatggtactggtttttcctttctctatttagtgcttcctcttgtaaggcaggcctggtggtgacaaaatccctcaacgtttgcttgtctgtaaaggattttatttctccttcgcttatgaagcttagttyggctggatacaaaattctgagttgaaaattcttttctttaagaatgttgaatattggccctcactctcttctggcttgtagggtttct

SEQ ID NO: 953727 - DNA, 674 bp, Homo sapiens
agaatggagatggagaacccagcatcrgtgctgatcaaccacatgaccttggccaggtcaatccacttcactgggcctcacatctgtcaagcaaaaagctccatttttagctctactgaagaaagaaattttgagcatgaggctagatgtgtcaagggagccatccagccttcaggaactattccacatctttctgaaatccaggaaggaaggttgttgtcagaggagctattctgaaccagaggccaactgtgacttcatatgtgaggatcgtgaactagctttccaaatagaactgaatccgtggcctgctcactggcataaaccctcctcgccttggatgaaaggagagttggtcacaagaccatatttagctcacaaaaaattcactccaactcagaactcagcagcaccaacaacccaaagccaagatgtagctgccccgaagagaaaacttcccctttactaaaatcatacttggaagtctgtgtgatacaccaactctcccaactcaattccgatcaagtcaaaattcttggtcttagaattggggggcaaatgaaacgtgaggattaggaccaagccacacgtgcctaagcattccctccaatttctctcacaggccctaaagtggtgggagaagagagggagggccaggtggcctgaagccattc

SEQ ID NO: 953728 - DNA, 573 bp, Homo sapiens
aattccacatggctggggaggcctcagagtcatggcggaaggtgaaaggcacttcttacgtggtggcggcaaaagaaaatgaggaagatgcaaaagcagaaacccctgataaacccatcagatctcgtatgacttattcactaccatgagaacagtatggggaaatggcccccatgattcaactatctcccactgggtccctcccacaacccatgagaattatgggagtacaattcaagatgagatttgggtggggacatagggccaaaccatatcattcactaaaagtttggtattattaggctttctaattttaaccattctagtgggagtatagtggtatctcattgtggtttttagttttccctaatatctaatgatgttgagcatctttttatgtattactagccatttatgtatattcttttgtctattttaaaattgggttgtcttattattgagttgtaatagttctttatttattcatcgtatatatgtgtctttwatcatatatatgtgttccaatattttctcttttatttcatacatgtgttttatcatatacatgtattc

SEQ ID NO: 953729 - DNA, 495 bp, Homo sapiens
gcctacagggcttgctgtaggagcatttgtagtagagtagggccaggggtgcccatccctccaggatcaacttgctcccataggagactttagccctaggggaactgttrgaacaaaattctgcagtgttgtcttgcccttcagatggggtggtgtgacctgagcaccccttgttccactggtttcttctgggttcccagcctggctgcacctgtttgcattgcagcctctggtgccctgggggcctgcatcatagcttctgcactggtagatcattcctgaacagtggacagcttcagtagggcagtcctcactgccatacaccagtctgcccactcccccttcccactgcagcttccccagggtccatggccacccccatattgctttgtcaccatgtgtggtggggggacactttgccttccctgccctaccagggcacatggatgtgtggaccctgccagcaggagtgcactctgccttccctcacccacc

SEQ ID NO: 953730 - DNA, 654 bp, Homo sapiens
ccagcacttcggggaggccaaggcrggaggatcacctgaggtcaggagttcgaaactagcctggccaacatggtaaaaccccatctctactaaaaacacaaaattagctgggcgtggtggcacacgcctgtaatcacagctacttgggaggctgaggcaggagaatcacttgaacctgggaggcggagattgcagtgagccaagattgcaccattacactccagcctgggcaacaagagtgaaactccgtctcaaaaaaaataaaaaataaaaataaaaaagatctctaatgaatcacatccacaaagaccttctttccaggctgggcatggtggtggctcagcatggagctcatgactgtaatcccagcactttgggaggccgaggcaagaggatctcttgaggccaggagatcaagaccagcctgggaaacatagtgagaccctgtctttacaaaaaatttaaaaattagccaggtgcggtggtgcatgcctgtagtcccagctacttgggaggctgaggtgggacgatcacttgagtccaagcgttcaaggctgcagtgagctgtgattgcaccactgccctccagcctgggcaataggccaagactctgtctcttaaaaataaaaaataaaaaggaccctatttccaaat

SEQ ID NO: 953731 - DNA, 607 bp, Homo sapiens
ataaagaaatctgtcattaccttaacctagtcaccaatcatggcatctctaataacagtgagacagacattatgcatcttttaagatgaataaagtacatggtatcacctattaagtattcttgycagaaatgtttgcacttaattagattaagtcttcacattagctcccagtttatagaaaacacaagagatacagaagttaaatgagataacaaggaaataatcagatgaatccttcaggttggatattctcggtataactgacttggtctcttcaacaagccaatatattaaaaaagaagattggaataggtggtgctgatctaaatttttaaaaatgtaagtgaacaactgaatacaatgaaatcaatggcaaagacatttttggcacaactgaggaaatgtgaacatagactgagtattaggcagtattatggaactactgttaagtggtggaagcaatgtggtaaatgaggcaaattactttatggacatgaatactgatgtattaaagagtgaagtgtcacaatttctgagctttactttgaaaaaaataaatatgacaaaatattaacaatatttactttgaaatactttgaaaaaaa

SEQ ID NO: 953732 - DNA, 610 bp, Homo sapiens
ttgcctaaactggggcgtgagtactagatccactttccgttgcggaaacctggaggacttacttgccgcatttgttaaatggacagtgttggttccaacctcacggtaaagttcaagcttcatggaaacaggagtagtaacaatagccaatttcacggggctcctgtgagaacactgcaaataaaattcctaccacagtaaagtgcccagcaaatatgaccttgtagcattactgtattgcatgccttggttttttcaaagtccatagaagggaggcaatttagatgtctctgactcaagaaactgtatacttgaataaagccaaaggaagattagcaatgaaatgctggtgaattcaaatcccagctcagccactgagcagctagaaaaaccagggacaatttacttgtctctctctcagccttagtttcctcttctcaaaagtggcgatcaggacgggtgcagtggctcacacctgtaatcccagcactttgggaggccaaggcaggmggatcacctgaggtcagagttcgagaccaacctggccaacatggcaaactcctgtctctactaaaaatacaaaaattagctgggcatggtggtgggtgcc

SEQ ID NO: 953733 - DNA, 572 bp, Homo sapiens
ggagtgaaggaaatagaaagccacgactggaagaccacagtaagagctatcacaggccagacccaccggtggatgctaaaactagtgggcaaaggttcaaacaaaaacagggtatttccacagtctcaaagaatctcccccaaaatgtctagtaattacaaaggaaaattagtaacctcaccatggagtatcctggctttcaccatcttaattaagtgttaacatctccccttgaacatatcaacatcacatgccccctgattaaaatgcacagagaggggcacatcgctcctggggtatccctcctaattacgcataagctcaagtccaaagtggcagacagtctacaaaatacctgaccaggactcttcaaaaaagtgtcaaggtcatgaaaggcaaagaaagactggggaactctcacagattacaggagactaaggggccatgctatctaaatgcaacatggtgccctaggttggatcctgaaaataaaaagaacgtttgtagggaaactaacaaaattctactgaatyttatagttaatagtactgtatcaagattaattttttcta

SEQ ID NO: 953734 - DNA, 628 bp, Homo sapiens
ctcaggcggctcatacaaaatgaatgttgactgttcatgtagcrgtctggaggctggtgggcgtgggctggttgcatggctcctgctgatcagggttccaggattcctccgcctttctctttcaccatctttagcctcagagttcctcacagtgtatgatggctgctggagctcaataatcacaccatgaccaggcaggaggaaaagagagggtgggaagggcaaaggactcatcttccagatgagctagacccccttaaagatctttcctggaagctccctcttcacctaacaacttgactttctgttatgcttcatcagcaacaactacatgtgaggcggggaaatgagtccttgatctgggcattttgctgccccaaataaaaccgggattctgttggtgaggaagaaagggagactggacactgggtagagggctggcagtctctgccttggtgtggaaagggtgcacctccatgcatatgggagaagcaccagtgccttcattccctgacatcgtgtccctgaaggcacctgctgtcacaaacaccacaccatcattcccactcagcctccgcaggtttctctgcaagctcctttgtaggttggcgcagctttgacaacatcc

SEQ ID NO: 953735 - DNA, 628 bp, Homo sapiens
ctcaggcggctcatacaaaatgaatgttgactgttcatgtagcggtctggaggcwggtgggcgtgggctggttgcatggctcctgctgatcagggttccaggattcctccgcctttctctttcaccatctttagcctcagagttcctcacagtgtatgatggctgctggagctcaataatcacaccatgaccaggcaggaggaaaagagagggtgggaagggcaaaggactcatcttccagatgagctagacccccttaaagatctttcctggaagctccctcttcacctaacaacttgactttctgttatgcttcatcagcaacaactacatgtgaggcggggaaatgagtccttgatctgggcattttgctgccccaaataaaaccgggattctgttggtgaggaagaaagggagactggacactgggtagagggctggcagtctctgccttggtgtggaaagggtgcacctccatgcatatgggagaagcaccagtgccttcattccctgacatcgtgtccctgaaggcacctgctgtcacaaacaccacaccatcattcccactcagcctccgcaggtttctctgcaagctcctttgtaggttggcgcagctttgacaacatcc

SEQ ID NO: 953736 - DNA, 718 bp, Homo sapiens
agaaaactcaggcggctcatacaaaatgaatgttgactgttcatgtagcggtctggaggctggtgggcgtgggctggttgcatggctcctgctgatcagggttccaggattcctccgcctttctctttcaccatctttagcctcagagttcctcacagtgtatgatggctgctggagctcaataatcacaccatgaccaggcaggaggaaaagagagggtgggaagggcaaaggactcatcttccagatgagctagacccccttaaagatctttcctggaagctccctcttcacctaacaacttgactttctgttatgcttcatcagcaacaactacatgtgaggcggggaaatgagtccttgatctgggcattttgctgccccaaataaaaccgggattctgttggtgaggaagaaagggagactggacactgggtagagggctggcagtctctgccttggtgtggaaagggtgcacctccatgcatatgggagaagcaccagtgccttcattccctgacatcgtgtccctgaaggcacctgctgtcacaaacaccacaccatcattcccactcagcctccgcagktttctctgcaagctcctttgtaggttggcgcagctttgacaacatcccttttggttctcagagctcttctggagactttagttgtgggctgcctgctccttaggttcaagtaactggtaacacgcctacgg

SEQ ID NO: 953737 - DNA, 601 bp, Homo sapiens
ccgtcatgactatggaattccccagccatatggaactgtgagtcaattaaaactctttcctttataaatcacccagtctcaggcatgtctttatcagcagcgtgaacatggactaatacagtatatataccacattttctttatcctttcatctgctcatggacacttcagttgattccataacttggctattgtgaatagcgctgcaatgaatgtgggcgtgcagatatctcttcaatgtagtttctggattatatggtaattctattgttagttttttgaagaacctccatgctgttttctacaatggctatgtttacattctcaccaacagtgtgtgtaatctttgtctttttaataagacatttaatcaccatttcgatgggtatgagatgatatttcactgtggttttaatctgcatttccctaatgattagtgatattgaacattttttcttgcttggtakaaatgcgtggttgaggtttgcctcttcatctgggaagagctttagggtgagctttgagggtgcactgagccattgtttgaaagcctggatggtacaagtctagtgcctgagctttgctaaaaggggccttgagg

SEQ ID NO: 953738 - DNA, 560 bp, Homo sapiens
cagctacttggctgcctcaccaccttctccacagctasttggctgcctcaccatcaccacatgatgctccaaatttggaggaaggggctactgccccatctcaatatgatgagggagttggaatggtctgtccctccaagacccaacagggcactctgtttggacagggcaatactgtgactggagcagggcaattcccacttaggcagatgcctatgggtggttcacacatagaagtgccatctgtcagacattactggacttacagcctattttcaacatccaacttgctaaattggaaaagctccaaacaaccttatagagaagacccccagaaaatgactaatctctttgaatccatctttgctacccaccagcccccctgggcagatgtttggtcttttttattatgcttctgaccacagatgaaagaaggctagtaatagagaaggcaaatgaagaggcccatcacctccatgagacaaacaatatctccgatcctgcaggggcaattccaggtacaaaccctaattgagaccccaattgagatggggacatga

SEQ ID NO: 953739 - DNA, 602 bp, Homo sapiens
ctcccagcagggactgacagacacctcatacaggagagctccagctggcatcagcctggtgtccctctgggacgaagcttccagaggaagaagcaggcagcaatcttggctgttctgcagcctccactggtgatacccaggcaaagagggtctgaagtggacctctagtaaactgcagcaaacctgtagaagagaggcccgactgttagaagaaaaactaataaacagaaagcaacaacatcaacgtcaacaaaactgacccctacacaaaaagcccatcgaaaggtcatcagcctcaaagatcaaaggtaggtaaatccacgaggatgaggaaaaaccagtgcaaaaaggctgaaaattccgaaaaacagaatgcctcttctccaaatgatcgcaactcctctccagcaagggcacaaaactggatggagaatgagattgacaaattgacagaagtaggcttcagaaggtgggtaataacaaactcctttgagctaaaggagcatgacctaacccaatgcaaggacactaagaacctggataaaaggtyacaggaaccactaactagaataaccagtttagagaagaacataaattacctg

SEQ ID NO: 953740 - DNA, 621 bp, Homo sapiens
aaaatgggtttttctattctaatacatggtcaggctgcaaatttttgaacttttatgctgtttcccttttaaaatggaataygtttcacagcacccaagtcaccttttgaatgctttgctgcttagaaatttcttctgccagataccctaaatcatatctctcaagttcaaagtttcacaaatttctagggcaggggcaaagtgtcaccagtctctttgttaaaacataacaaaagccacctttgctccagttcccaacagctccccatctccatctgagaccacctcagcctggaccttattgttcatatcgctatcaacatttttgtcaaagccattcaacaagtctctaggaggttccaaacttggtcacattttcctgtcttcttctgagccttccaaactgttccaactgttcaaactgggtaactgccttccaaagttttgggtatgttttcagcaacaccccactctactggtaccaatttactgaattagtctgttttcacactgctgataaagatgtacctgagactgggaagaaaaagaggtttaattggacttacagttccacatggctggggagggctcagaatcatggtgagaggtgaaaggcacttc

SEQ ID NO: 953741 - DNA, 632 bp, Homo sapiens
tactcaatgatagatttcagggacagaaatacttcagcctccagcagatgcaagaactttccaacatcctgaacctcagctacaaacaggtkaagacgtggttccagaaccagagaatgaaatctaagaggtggcaggaaaacaactggccaaagaatagcaatggtgtgactcagaaggcctcagcacctacctaccccagcctctactcttcctaccactggggatgcctggtgaacatgactgggaactttccaatgtggagcaaccagacctggaacaattcaacctggagcaaccagacccagaacatccagtcctggagcaaccactcctggaacactcagacctggtgcacccagtcctggaacaatcaggcctggaacagtcccttctataactatggagaggaatctctgcagtcctccatgcagttccagccaaattctcctgccagtgacttggaggctgccttggaagctgctggggaaggccataatgtaatacagcagaccactaggtattttagtactccacaagctgtggatttattcctaaactactccacgaacatgcaacctgaagatgtgtgaagaagagtgcaattgacattaatcaatttcagtctgggc

SEQ ID NO: 953742 - DNA, 592 bp, Homo sapiens
caaatgtataggaaactcctgtaattctgatataacttagtgtacattatcagtaataatcataattgttatgttaaaattatcctgtgccacagaggtaacaaatttccttgtcaattgtgtcttttaactatggctaccttaaaactttttttcatccacagacaattgtcttgttttgccttgttttaaatgctctttaaaaggtggatttataggccaggtgtggtggttcacgcctgtaatcccagcactttgggaggccaaggtgggcggatcacaaggtcaggagattgagaccatcctggctaacaaggtgaaaccccatctctactaaaaatacaaaaaattagccgggcgtggtggcaggcgcctgtagtcccagctactcaggaggctgaggaaggagaatggcgtgaacccgggaggcggagcttgtagtgagccgagattgtgccactgcactccagcctgggtgacagagtaagactctgtctcaaaaaaaaaggggggtggatttataattagctatcrgactctaacagatgcacttaaatgcaggttttctgataactttggaaattgtgacatt

SEQ ID NO: 953743 - DNA, 602 bp, Homo sapiens
ttccagtacagaatttcccagccatcctctcatttttttgccagtacaaatcctgtacttcttagctaaagacctaacacgtagcccagaacgttggcctttagtaggcactcttgactgytgagtaaatggggacctgtattctcaatgagcttttctaaccagcttcacatgatattctccttcatgtccacatactccacaggcctgtttattaacttacatttctcatatcttatttcaagtttaataaatgattaattcattgaataaaatctggcatatgagtgccttagcatatactgtgaaatgtatttgaaatggcttcaaaagcattattgttctctttatttctaccttaattgtaaaagtgcttttaaattaagcctttaacataagtgaatcattggatctaatcaaatgatttcagcacatgctctgtgcaattacatttgtgcagcttagctgaaactatggcaacagagtgaaaaatgcatttttactgatcattttcctccataggagtgggaagttccaagttaaacatctcacaactttaaaaaattattatacaaattatacttacaatagcattgcttaga

SEQ ID NO: 953744 - DNA, 602 bp, Homo sapiens
ttccagtacagaatttcccagccatcctctcatttttttgccagtacaaatcctgtacttcttagctaaagacctaacacgtagcccagaacgttggcctttagtaggcactcttgactgctgagtaaatggggacctgtattctcaatgagcttttctaaccagcttcacatgatattctccttcatgtccacatactccacaggcctgtttattaacttacatttctcatatcttatttcaagtttaataaatgattaattcattgaataaaatctggcatatgagtgccttagcatatactgtgaaatgtatttgaaatggcttcaaaagcattattgttctctttatttctaccttaattgtaaaagtgcttttaaattaagcctttaacataagtgaatcattggatctaatcaaatgatttcagcacatgctctgtgcaattacatttgtgcagcttagctgaaactatggcaacagagtgaaaaatgcatttttacygatcattttcctccataggagtgggaagttccaagttaaacatctcacaactttaaaaaattattatacaaattatacttacaatagcattgcttaga

SEQ ID NO: 953745 - DNA, 570 bp, Homo sapiens
cactggacccccaaggaccccacgccagcggcagggtggggcgtgactcccaaaacctcctgaccgcagtacccctcccaccctgagccaggccagttacctctaggttgtcaccctccaacctcacttcctatcaaggctttgttagttcgtttgttagttcgttcgttcattcattcattcattcattcaacaaatgtttttgaatgcttaccgtgctccaggaatacaaacaagcagaaaataaactcgggtttctgtgcaaggaacgctctctcctgggccaccctagggaagctaatcttcctcaggcaagctttgttcttgcctctccagtgctcacacccgccagtggctgcttcctgctgcttccaggcaaacacacccaactggcccttgagtttacagagggctttccagcctcctctgccatcaccctccaggcctgcctggctgstttcatcacccccaagatggccttgctagtcccagctcaacaaactccagtgactccccggccccaacaacaaagtccacattccttggtttacactcaaggcctctcacagc

SEQ ID NO: 953746 - DNA, 565 bp, Homo sapiens
tcagccttcaacatctcatatctgggagaataagcacctacattctggagggagatctgaatggctctccacagtatccactacagttccaaaaaccaaatggataaaatctaatcttcttagcactgcacacaaggtccttcatgatcttgcacacgcccgccccagcctcatctcatgctgtcttctcagcctggaagtctctttcatgctctgccctggccccacttgtctgttggcaaacttctactaattctactaattcctcaaattacagttgaatgtacctcctccaagaagccttccctgactactcttgcaggctcaatgatccttcctcccaatgtggtgattagaaccatggactccagagccagggactgaattccagctctgccactttctagctgtgtaacccaatgcatattacttaacctgtctgtatcttagtttcctcatctataaaacaagggataacaatagtactcttacttcatagggttgtcatcargattaaagcaattaacatatgtaaagttagagtagtatctggcagaagtaaata

SEQ ID NO: 953747 - DNA, 554 bp, Homo sapiens
aattcgagaccagcctggccaacatggagaaaccccatctctattaaaagtacaaatattagatgggcgtggtggcaggcacctgtaatcccagctactcaggaggctgaagcaggagaactgtttgaactcaagaggcaaggttgcagtgagctgagatctcgccactgcactccagcctgggtgacaggagcaagactccgtctcaaaaaaaaaaaaaaaagaatgttttctttctgtttacaacataaagtatgcttttcaagtggaagtatttaggtgtttttggaaggttggaagcactctgaatcttaggtgttgttaaaatgcagccttgtatctttgctgctctcacccgtggctttccacgtgttccatgttggtttcctgatctgtgcttagtatttattgtcccatcatttgttccaaataacttgtcaatcagatcctgtggcttggttcttggctttcttctgytattgacaggagggctcctcttgctgtaaaagttctcagagcatttgtttctgtcgtgttgtaacaatcaggtggct

SEQ ID NO: 953748 - DNA, 589 bp, Homo sapiens
aaaacagtctgtcggtttcccaaatgatgaaacatagattaccacatgacccaacaatttcgctcttaggtgtgtgtgtatgtatatgcatgtgtgtgtatctcacacccaagaaaaatgaaagcatatgtccattcaaaaacttgtacatgaatggttacagcagcgtagcagcattattcataatagctaaaaagtggaaacaacccgaatttccatcagtggtggaatggataaacaagagttgttatagccatacaacagaatattattaagccatgaaaagcaatgaaatactgatacaggcttcaacttggattgaaccttgaaaacattatgccaagtcaaagaagtctgtcacaagagtctacatagcatatgattccattcaaaagaaagttcagaatagggaaatctgtaggaacagaaagtagattagtagttgttttagggatgaggatgaggagaggaggatgtaaagatgaaggggtgatcaataaaaggtacmaggttttttattgagatgatgaaaatgttctgaaattaactgtgatgatggtggcccatgtccgtgaatataccaaaagcc

SEQ ID NO: 953749 - DNA, 597 bp, Homo sapiens
aacctggcttctaccatccgccatttgtttaattaattttcgatttcagtatgcacgtatcagaattgttaatgcatatccccatgagaacaaactttattaaatagagtaaggtacaaaactcatatgagagaagaggccttggtgactgaccatagatggggttatcttagcctgcttgtgttgttataaaagaatacttaaggcttggtaatgtataaagaaaataggtttacttggttcatggttctgcagactgtacaaaaagcataggaccaatacctgcttctgatgagggcctccggctgcttctactcatggtggaagggaaaggtgaaccactgtgggcagatcacatggggagagaggaggcaagaggagggaggaggaggttctacactcttcaacaactagctcttgagggaactaagagtgagaactcactcccatgaggatggcagcaagccattcatgagagatatactcccatgacccaaacctcccagtgggccctacctctgacattggggatgaaatttcaacatgatattgtytttggaggggaggccaaatatccaaaccatagcaatgaatctt

SEQ ID NO: 953750 - DNA, 569 bp, Homo sapiens
gctctttgagagtcatcagggtggagattcagttctcccaccccatcaccatcactggctaacgtaagaagaaatctagggaccagagcaatgatcttgcagggaattcactgttccttttcctcgcccctctgcaggaagaaaatgggtgattcctcactatggtagatcaccaccaaagaagactgccaacaattcctcccttccctgtatacatacacttcatcaagatgtgcagtctccttcaccccctttgaatctaggctgaccttgttattgctttgacaatagaatgtgatggaagaaatgttctaggacatctgatcccaggctttaaaagtcctggcagcttctgttttcttgctgggatgaagtcggctgccatgtaagaagccaaactaccctgagacctccatgctatgaggaaagctaagttagcaacatagtggaaccatgtagctatccaagttggtcctcactgtttaagccatcccagacatggtgaagcatatactagccatctcccctgtgccctgtggaakgggatacatcaaaagggcataaagggg

SEQ ID NO: 953751 - DNA, 588 bp, Homo sapiens
tttttatttctttcaagaacttttcctttgcattcacaagttggctgtttggtgcaagaggcacctatagcttttggcttattttggcttttsacataccttcctcactaagcataataatttctagcttttgatttaaagtgagagatgtgcatgttttccttgcatttgaacatttggaggccactgtagggttattatttggcctaattttaacagtgttatgtctcagggaatagggcggtctgacgagagggagagagatgagggtatagctgacggatggagcagtcagaacacacacagcatttttcagttaagttcaccaccttctatgagcgcatttgtgatgccccagaacaatgacgatcgtcacatcaaagctcactgtgatgtaataatgaaaaagcttgaaacattgtgagaattatcaaaatgtgacagacacgaactgagcacatgctgttgggaaaatggtggtaacagacttgttcaacacaaggttgcttcaaaccttcagtttttaaaaaacgaggaatctgcaaagtacaatacaataaagcaaaataaaacgagttatgcctgtat

SEQ ID NO: 953752 - DNA, 605 bp, Homo sapiens
catgggtcaagtacagtcatgcatccttaatgacggaaatacattctgagaaatgtgttgttaggcaatttcgttgttgtgtgaacatcatagagtgtacttaacacaaacccagatggcacagctacggcacacccaggctatatggtagagcctactgctcctaggctacatcactgtacagcatgctactgtactgaatacttaggcagttgtaacgccgtggtaagttttgtctatctaaacatagaaaatgtccagtaaaaatatggtataaaagattttaaaaatggaaaagctgtataggacacttactatgaatggagtttgcagaaatggaagttgctccgagtgagtcaatgtgtgagtggtgagtgaatgtgaaggcctaggacattactgtacactactgtactttataaacactctacatttaggctacactaaattgacataaacattttatttcttcaataataaccttagtgaacagtaactttttaactttatgaactttaactttttaactgagttaaaaagttaacttattaactttattttttaaatttttgactcttgwaacacctagcttaaaacacaaacac

SEQ ID NO: 953753 - DNA, 578 bp, Homo sapiens
tatttacagatatttgatatattatgcttagtgaaatattaattttctaaaatttaatttttcacttgttatgtaaaaatatgtattttttaaatatttgattttgattccatatacattgttaaattcactcatcatgtctaattattttttgtagattcttttggattttttaaacgtacataattacatcatgtgtgaatgaaggatatttttcctcttcctttccagtctttgtaactattatttcttttccttgacttattgccctggctaggaccttcaataccaagccgaataaaagtggtgaaaaggaaatccttgtcttttccccagcagcatggggaaatgctcaatatttcattgttgaatatgatgttagctgtaagttttcacagataatttttatcagatgaagagtgttctttcctatgtcaactactattgctgtataactaatttcccacaaatttagtgttgtagaacattaatcatttgactttgtttytgattttgtgggccaggaatttggaaagaacctaacatgacagttgctacttgaaatctattcagcagtt

SEQ ID NO: 953754 - DNA, 625 bp, Homo sapiens
ctcaagataacttgaggtcaggagttcaagacctgcctggccaacatggtgaaaccccatctctactaaaaatacaaaaattagccgggtgtggtggtacacacctgtaatccmagctacttgggaggctgaggcaggagaattgcttgaaactgggatgtggtggttgcagtgagccaagatcgcaccactgcattccagcctgggtatcagagtaaccctgtctccaaaaaaataaataaaataaaatgggcatgttatgtataacatacaggtaataattaagtagatttactaagtctccttaattactagctgggcaataatagtacccactttcttggaatgttatgaagataaggtatgtaaagcatctgacacagagcctagcataggaaactttattttcccttcccagtcacatggcttttatttctgaagattcttgtagagagcaggccaatgagaggacagaatctaggatgggtataattagagatggtggggacctgcgaggccagacctaggtgtggatctcagtataagacatgtagcattcagggctgtgcaagaatttgtttggctggaacaatgaaaggaggactgaggaccaacaaattcaacc

SEQ ID NO: 953755 - DNA, 625 bp, Homo sapiens
ctcaagataacttgaggtcaggagttcaagacctgcctggccaacatggtgaaaccccatctctactaaaaatacaaaaattagccgggtgtggtggtacacacctgtaatcccrgctacttgggaggctgaggcaggagaattgcttgaaactgggatgtggtggttgcagtgagccaagatcgcaccactgcattccagcctgggtatcagagtaaccctgtctccaaaaaaataaataaaataaaatgggcatgttatgtataacatacaggtaataattaagtagatttactaagtctccttaattactagctgggcaataatagtacccactttcttggaatgttatgaagataaggtatgtaaagcatctgacacagagcctagcataggaaactttattttcccttcccagtcacatggcttttatttctgaagattcttgtagagagcaggccaatgagaggacagaatctaggatgggtataattagagatggtggggacctgcgaggccagacctaggtgtggatctcagtataagacatgtagcattcagggctgtgcaagaatttgtttggctggaacaatgaaaggaggactgaggaccaacaaattcaacc

SEQ ID NO: 953756 - DNA, 560 bp, Homo sapiens
ataaagagctggcaccaatccttctgaaattatttcaaagtatgaaggaggagggactcctctctaactcattctatgaggccagtattattttgataccaaaacctggcagatacacatacaaaaaagaaaatttcagtccaatatccctggtgaacatagacacaaaaattgtcaacaaaacacaagcaaatcaaatccagcagcacatcaaaaagttaactcaccaataccaagtaggttttattcctgggttgcaaagttggctcaacatatgcaaatcaatcaatgtgattcatcacataaagagaactaaaagcaaaaaccatattatcatttctacagatgaagaaaagcctttcaataaaattcaacatcccttcatgttaaccatcaacaaaccaggtactgaaggaacatacttcaaaatgataagagccatatatgacaaacccacagccaacatcacaatgaatgggmaaaagctgaaagcattccctggagaaccagaacaagacaaggatgctcactcttaccactccctattcaacatggtacca

SEQ ID NO: 953757 - DNA, 500 bp, Homo sapiens
ggcaggcagatcacttgaggtcaggactttgagaccagcctggccaacatggcgaaaccccgtcaccacaaaaaaatataaaaattagccaggtgtggtgtcaggtgcccataatcccagctactcrggaggctgagacatgagaattgcttgaacccaggaggtggaggttgcattgagccaagatcgtgccagcacactccagcctgggtgacagagcacaactgtgtctcaaaaaataaaaagagcatgtaactatttggctttccaaataattgtgtaaggccaaggtatcagaccacccagacctcctcacactggctcagtgacccccttgtaagacaggtgctgtgctatattctcctgcagggcctcagccagcctcaaaattttgaccttcttttctgaacaaatgaccactgagtcccacctctagctaggcccccatcctaagcatgggacccgtatgtccaaaagcttgtctgacatcctgctccaag

SEQ ID NO: 953758 - DNA, 611 bp, Homo sapiens
agctgcatgaaaatagaataatacactttgacttctttctccatttttatgccttttatktctatctcttgcctaatttctctggctaggacttccagtactatgttgagtaggagtggtgagagtgggcatcctttttggttccagttctcaaaagaaatgcttatgctttcagcctttgcctggccagtgtgatgttggctgtgggtttgtcatagatgactgttactattttgaggtatattcctttgatgcctactttgttgagggtttttaacatgaaaggatgttggattttattgaaagctttttctgtgtctgttgagatgatcacatagggaagaattcctattcaatacatgatgctgggctaactggctatccatatgtagaagagtgaaactggtaccctgtctatcaccataaacagaaattaactcagggttaattaaagacttaaatgtaagacctcaaactataaaaatcctagaagaacatctaataaatgccttctcaatattggccttgcaaataattcgtggctaagtcctcaacaacaattacaacaaaaatacaaattgacaagtgggtcttaattaaactaaaggtct

SEQ ID NO: 953759 - DNA, 491 bp, Homo sapiens
aggtcaggtgtggtgactcatgcatgaaatctcagcacttggaaaggccgaggtagaaggatagcttgaggccaggagtttgagacaaacccaggcaacacagccagacctcwtccctagaaaaaaaataaaaataaaaaataaaaatagccaggcatgtagttccagttactcaggaggctgagccaggaggatcgcttgagcccaggaggtcaaggctgcagtgaaccatgaaccatgactgtgctactgcactccagcctgggcaacagagtgaaaccctgtctcaagataataataataataatgaataaagaattagatggggctatttgagttcctttatatttgcataggaattttacagtcagtttgccaatctctacaaaaaagtctgcttggatttttatttggaaaattttgcatccatagttcaacttaggagaactgacattttttaaatattgcgttttccaacccataaatatggt

SEQ ID NO: 953760 - DNA, 771 bp, Homo sapiens
tttcaacaaaatcaccactaacagaaaccagaaaacatcaaaagaaaaattatttttacagattattttccacatagaattccctctcagtgttagytgaaataaatatgagttttaagagagagagaacagataaaaatatttttatatctcttgttgtaaccatgcacaggtacagaaaaagttataaaaggagacatgatctccacgttacaagatttgggaaaagtaaaagaaatataaagggaaaaatccaccaaatccaatatcattagctataaatcagaggcttaaaagatattaatgttgttgaattaaaaaaaaaaaccagaaatgtgacttaacaatagataactttaaagcaggggtcaacaaattacagaccagaggccaaatctggtccaccaccatttttgtaaataaaattttattggaacttgggccaggcacggtggctcatgcctggaatcccagcactttgggaggccagggcgagcagattaccgatgccaggagttcaagaccagcctggccagcatggtgaaaccctgtccctactaaaaatacagaaattagccaggtgaggtggcacatgcctgtaaacccagctactcgggaggctgaggcaggagaatcgcttgaacctggaagggagaggttgcaatgagccgagatcacgccactgcactccagcctaggcgacagtgaactccatctcaaaaagaaaaaaaaattattggaaccctaccatgcctatttattcactactgc

SEQ ID NO: 953761 - DNA, 620 bp, Homo sapiens; identical to SEQ ID NO: 953371

SEQ ID NO: 953762 - DNA, 484 bp, Homo sapiens
cctcacttcaccgtcctgtgactcagattgggttagcaaaatgtagtggcatcttttggcacaaasgccgtggagcaatgttgcatgatgacatgtaccacacagcttgatggtttcacctccatcagaaacaccccagagtggccgggcatgtggctcatgcctgtaatcccagcactttgtgtggccaaggtgagtggatcacctgaggtcgggagtttgagaccagcctggccaacacggagaaatcccatctctacttaaattacaaaaattagctgggcattgtggcacgcacctgtaatcccagctactcaggagtctggggcaagagaatcgcttgaacccaggaagcagaggttgcagtgagctgaaatcgcaccactgcactccagcctgggcaacaaagcgagactccatctcaaaaaacaaacaaacaaaaaaaaacaacaaaaaagaaacaccccagagctattgtggtaac

SEQ ID NO: 953763 - DNA, 632 bp, Homo sapiens
gctcttcctgtgttgagttttctgttccctgtgtcccgcrtcttggtctttgtgctttattcctttgctctgctggagcacatcctgccaaagcttcctaaagaagatgcatgggtggttcactttttgagaccaggtcgttggaaaaggtttccttactcccatactgttacacaacttgggtctgcctgctcagcacagtaagaccagatatccacactgaggcttcgcagcagtagaaaggaagccatttatttgcagggcaccatgcagggaggaccaggaagcaaatgctcaaatcctgactcccctgatggcttgtgggtaagggtttttagaggtggggtacatttcaggaaagtggaagctacaggcataatcatgaatcaatacatagagattacacattggttttggccttgaagggtgggatattgtgaaggaggggtggggcttacaggtaggttcaaagatgttctgatttgcaattggttaaggaagagaagctttgtttccaactttggggtccgtagaaaagaatattatctcaggctcatgggtgtggctccctccaggcccctcaggaaaaaacttagaacaaagaatgaagtccagacttcagtccccagttc

SEQ ID NO: 953764 - DNA, 485 bp, Homo sapiens
ccagcatggtgaaaccccgtctctattaaaaatacaaaaattagctgggcatggtggtaggcacctataatccccgctactcaggaggctgaggcaggagaatcrcttgaacccaggaggcggaggctgcagtgagcagagattgcaccactgccctccagcctgggcgacagagggagactccatctcaatcaatcaataaaatcaaaataataaaaaatgaaagtttcagagcaggaatgaaagacagtaaaatacacttgaaagagggccaagtgggtgacttgattcaagtgcatggtttgactcttgacttggggttttatctgttggcatgcttgtgaggtctacgtctcttctcccctgattcttccctgaggtgggctgtctgcatgcacagtggtctgccagcacctgggacaggaacatgcgcagtgtgtttaactggagttgtgcgcatgctcacttaaggcgttcttccctta

SEQ ID NO: 953765 - DNA, 485 bp, Homo sapiens
ccagcatggtgaaaccccgtctctattaaaaatacaaaaattagctgggcatggtggtaggcacctataatccccgctactcaggaggctgaggcaggagaatcacttgaacccaggaggcggaggctgcagtgagcagagattgcaccactgccctccagcctgggcgacagagggagactccatctcaatcaatcaataaaatcaaaataataaaaaatgaaagtttcagagcaggaatgaaagacagtaaaatacacttgaaagagggccaagtgggtgacttgattcaagtgcatggtttgactcttgacttggggttttatctgttggcatgcttgtgaggtctacgtctcttctcccctgattcttccctgaggtgggctgtctgcatgcrcagtggtctgccagcacctgggacaggaacatgcgcagtgtgtttaactggagttgtgcgcatgctcacttaaggcgttcttccctta

SEQ ID NO: 953766 - DNA, 578 bp, Homo sapiens
aaagatcactggttggttgttccttcaggccttgtttaaaaaaaaagtaattgggctgggcacagtggcttacacctgtaatcccagcactttgggaggccaaggcgggcggatcacctcaggtcaggttttcaagaccagcctggccaacatggtaaaaccccatctctactaataatacaaaaattagctaggcatggtggcgcatgcctgtaatcccagctactctggaggctgaggcaggagaatcacttgaatctgggatggagattgcagtgagccgagatcacgccactgcactccagcctgggcaacaagagcgaaactccacctcaaaaaaaaaaaaaaagtaattggatcactggttgtttgggtagaagatggactggaaggggtgtcttcctgaagtcaggagaaagcactgtgtagattggaaagtcattggaataaaagtggtagctggcacttgctgggcgtggtgactcatacctatagtcccagmactttaggagactgaggcaggcagatcacctgagttcgggagttcaagaccagcctggccaacatggtgaaacccc

SEQ ID NO: 953767 - DNA, 457 bp, Homo sapiens
aaatgagtcacattagatgtttagtttctcagtacatataaaagttatgttgatcctatcttgtagtctattaagtgtgcgatagcatttttttaatkaaaaaatgccaacaatcacccgacccatcagtaagtcataatcaatttgctggtcaaggtatcttgcctcattgttgacagctattgactgatcagggtggtgattgctaaagattggggttgttgtggcaatttatgaaaataagatacaaattaagtatgctgcatcaattcagtcttcttttcacaaaagatttctctttagcatgtgatgctgtttgataacattttacccatagaactgcctttaaaattaaggttgatcctctcaaatcctgcctctgatctatcagctacgtttatgtactattctaaatttgctgttgtcatttcaacagtgtttacagcatcttcaccca

SEQ ID NO: 953768 - DNA, 567 bp, Homo sapiens
accaatggcaaagaagttaaaaacttggaaaaaaaaattagatgaayggctaactagaataaccaatgcagagaagcccttaaacaacctgatggagctgaaaaccacggcacaagaactatgtgatgaatgcacaagcctcagtagccgatgcgatcaactggaagaaagggtatcagcgatggaagacgaaatgaatgaaatgaagcgtgaagagaagtttagagaaaaaagaataaaaagaaatgaacaaagcctccaagaaatatgggactatgtgaaaagaccaaatctacatctgattggtgtacctgaaagtgacagggagaatggaaccgagttggaaaacactctgcaggatattatccaggagaacttccccaatctagcaaggcaggccaacattcaaattcaggaaatacagagaacgccacaaagatactcctcgagaagagcaactccaagacacataattgtcagattcaccaaagttgaaacgaaggaaaaaatgttaagagcagccagagaaaaaggtcaggttacccacaaagggaagcccattagact

SEQ ID NO: 953769 - DNA, 628 bp, Homo sapiens
tgtagtcccagcactttgggaggccaaggtgggaggattgcttgagcccaggagttcaagatgagcctggtcaatatagtgagacctcgtctctataaaaaaatttyttttaaacaattagccaggtatggtggtgcatgcctgtggtcccagctacttggaaggctaaggtgggaggattcactgcactccagcctatgtgagagtgaccctgtctctaaaaaagacagtcagccaggcgcagtggctgatgcctgtaatcccaatactttgggaggccaaagtgggtggatcacttgaggtcaggagctcaagaccagcctggccaacacagcgaaaccccgtctctactaaaactacaaaaattagatggatggtggtgtgtgcacctgtaatcccagctacttgggaggctgaggcaggagaatcactcgaacccaggagacagaggttgctgtgagccgagatagcatcactgcactccagcctaggcaacagaaatgagactctgtctgaaaaaataaaaataaataaaaaataaaaataagacagtcatcttatttacttctctatcacacagacacacacacacacacacacacacacacacacacacactaggaaaaag

SEQ ID NO: 953770 - DNA, 591 bp, Homo sapiens
gttttcagagtctctaggcctcttttctcacctggataacaggaactgtgccacgtggggattaaatgagccaaagcttgaggaggtgttggtaatagtgctacctgagagtgggtgcacagtctacgtgtgagccttctttcttctcttattctttttctctatttttgtttttacttttgtcataattatctatggacgtagtttaaaagacaaattattcttttgctatgacaagaaccagtttcctaccctgttcccactgtttctttttccccagaggcaatcactctcaactctttttacagtaattattctggtatttactttcatatttcgaaataacttgtttgtgttgatactttttgtattttccatttcaagacttaccaatggactttctactgtgaaaaataagagtctggtctctttgacatacacctctcctatcctctttgccacccctctctctctctcwcacacacacacacacacacacacacacacacacacttcctgtgctgccccccatcttcccattctgattttgttgtaattttggttagagccattttcaggattcacatttat

SEQ ID NO: 953771 - DNA, 655 bp, Homo sapiens
gggggagccgggagacggatgaattgagcaaatctcttgctagatgtgtgccccatgcaggttttcagagtctctaggcctcttttctcacctggataacaggaactgtgccacgtggggattaaatgagccaaagcttgaggaggtgttggtaatagtgctacctgagagtgggtgcacagtctacgtgtgagccttctttcttctcttattctttttctctatttttgtttttacttttgtcataattatctatggacgtagtttaaaagacaaattattcttttgctatgacaagaaccagtttcctaccctgttcccactgtttctttttccccagaggcaatcactctcaactctttttacagtaattattctggtatttactttcatatttcgaaataacttgtttgtgttgatactttttgtattttccatttcaagacttaccaatggactttctactgtgaaaaataagagtctggtctctttgacatacacctctcctatcctctttgccacccctctctctctctctcwcacacacacacacacacacacacacacacacacttcctgtgctgccccccatcttcccattctgattttgttgtaattttggttagagccattttcaggattcacatttattata

SEQ ID NO: 953772 - DNA, 488 bp, Homo sapiens
cccaactctcagtgatgcagatgttatgactgtgagttctcgggggccctcagcacacataggggaggaggttggggactccaaggcagcgtggcctaggtgctcagcatggtctatggggttagatctcctgggttttaagccaggccctaccacctgccaggcatgtgaccttaggcctcagtttctcacactgtaaaccatagatagcaatagatccccatcccccagggttcttgtgaagattgtttgtaaagtatatagaacagtgcctgggtcatattaaaccctcacggaaggtggcgaggatgatgatggtgaggagaagaagacattgagggtgatagctctcaraaacttaatactgcttaaacactacaactgacaggtttttaaaaaatgaattctctattttaaacttagccacgaccttgtgatcttatagatagatttccattttatagtttaggcatctgagattgaagaat

SEQ ID NO: 953773 - DNA, 607 bp, Homo sapiens
ttcttagtgaatgaatggatggatggatggatgaagtgccctgcgcagtaggctacctgcttcctagagcaggcattttcccctgtaaagataatgacatcaatcaaaacatgttttgaacataaagtcttagagaacataaaggctttgaacataaagtcttagaagcctgtttatgaaaagcaaaataattctaacctgaggctccaaaagattcccaactgagacatcaccatgctgaccagaccatattgagcagaatagaggttgacaagttcagatggactacaatgaaaatggctgtaaaatgagtttactggctgaccctaaatccaattagccagacatctttctcaaaagactcaaagttgtatattacatttcactttgttcagatatgtggaatttctgcagacttatttatcgtgattctcgctattcattattaaggacaggatttgcgaaggaagagaaatatattttgagtatttggaaaagacatgaaataccyttctgaattttttttgtagtagtgggtataatgttgccagtactatgaggaaagtaatcctttggttacttttaaaaattagaccaaatcctaaag

SEQ ID NO: 953774 - DNA, 515 bp, Homo sapiens
aagacagattggttggacaacccaattaatggggagtcatggggagcatgaaggtagtgtgtcctrtggagctctctttttccctctcaagtaggggttagagaagcaactccctcagcattcactcagggcttgtcactcacgcctgcattggtgctgcaccatgggaagaatgctcctgtcttggctccaatccctggaggagacttggaacataagctctgaatggcagtcctggaggacagtggttctcgactcccacagaacagcaatctttggcccccaagttattctttattttttatttttttatttttgagatggagtctcactctgtcacccacactggagtgcagtggcgcaatttcagctcactggaaactccaccttccaggttcatgtaattctcctgcctcagcctcccgagtaggtgggattacaggtgtccatcaccacgcctggctgatttttgtatttttagtagagatggggtttcaccatgttggtcaggctgg

SEQ ID NO: 953775 - DNA, 677 bp, Homo sapiens
ggaattgcccatgaggccataggtgcaggctgggactagagaagacagtgtagcaggagtggggactgtgggcatttgagccatgatgacatttaacttacttgtgccttcaggatctgctttcgcctgatmgtgtatataccacttccatttgatgatggagtgctgctgtgcatgcccagctttgtggcttggttgatcatataatacccaattcatgatgggcagtttgggtcatatggtaacttggtagcccatgattaagtgctcattttctaccaaggcccagcccaagagctgtctctcagaaggagggtagccatctgtaggtgatggcaacaccttattgtaaaatcctaaaagccggtgctgcaattcatttgtaggatcctgctgaagagtctaaatggcatctatgtctgccactgatagacacttcaggcaatgttggaatctgctggatcatatggccccagtggaagagcaacttgcacggaagcctggatctattgcagagctttatcccattctgggcctcattcaaaactagcagctctttgggtcactcagtaagtgggctagagtaacacgcccaaatgcagaatatgttgcctccaaaatccagatgggtccactagtcattgcactttttgatggtaggaggggccaaatataac

SEQ ID NO: 953776 - DNA, 615 bp, Homo sapiens
ttctaccagatatatgaagaagagctagtaccaatcctactgaaattattccaaaaattcaaagagaagggactcctccctaactctctaaaaccagcatcaccctgataccaaagactggcagagacacaagaaaaaaagagaaaaattcaggctaatatctctgatgaaggtagatgcaagaatcctcagcaaagtactagctaaccaaatccagcagcacatcaaaaagttaattcaccacaatcaagtaggctttattcctgatatgcaaagttggtttaacatatgccaatcaataaacgtgattcaccacataaacagaataataaaaacctttgatcatctctatagatgcagaagaggcctttgataaaattcagcatcccttcatgttaaaaaaaatcttcaacaaattaggcatcaaaggaacatacctcaaaatagcaagagccatctatgacaaacccacagccagcatcatactgaatggacaaaagctggaagccttccctttgagaactagaataagacaagtatgcccattctcaccacttctatgcaacgtggtaytggaattgctagccagagcaaataagcaagagaaagaaataa

SEQ ID NO: 953777 - DNA, 548 bp, Homo sapiens
cagctccttaagctgactgcattgaatctccagtccatgtcctcagagcatctgctaatttgatgtttgtgggactctactggcctctgccttggtgtctgctgctgtgcctagagttgttctgcactgagttgacccagatgtgaaatcacccctccttcacacaaaaccctcataataataccatgtgtatatagcacccacataaggtaattgctgtcattatccccactttgcagatgaggaaactgaggcagagaagttacataacgtttttcctagattatccagtaagtgcgtggtggagcggacattaagcccaggcatattgaccccacagcctgtgttgaggtttcatggtcgtatttgctggcctctcagcagcattctactgaagacttaggcagggcatggaggggtgttacacagagggtggtgcagggcaggctgtatagcagaaacccaaaactgcrcatcagccattcctttccttagaagtccttttaggtcggatgcggtggctcatgcctgtaatcccagcactttgg

SEQ ID NO: 953778 - DNA, 728 bp, Homo sapiens
atgaggctgtttgtccacattttcctccccaggtatcttagatgtctttcacgatttctgtggatttttcttcttgaatttaagcttacaaagttgatctttatgtactktgctatttccaagtggctgaagcatgctaattgcctctaatctgccatcttggaaaatatggtattctttattctttagcaatgtttaatagtttttagtgtcagagtcttttattttcttgattattgttttctttgtgtattgtatgagatttttctatatatagaaacatgttatcttgaactacacatgatctgaatttttcctttcctatttggatgtgttttatttcattttcttgcatggttgctctggctagaacttccaatactatatttaatagtagtaaaagtggacatccttgttttttttcttttctttctgattttaagttataagactttagcctttcaaaatttagtatgccttagctttgcagttttcataaatatgctttattatggtaagggagttttatttatagttttatgagtatttttgttatgataggtgttgaaagttgtcatttttttctgcatctaatgagatgaacatgtttttctcttttattctaatatggtgtagtgcactggttgactttcttgttgaaccaccccttgcatttctgggataaatctaacttgtttattgtgtgtaatcttttaaattttgtaaaa

SEQ ID NO: 953779 - DNA, 606 bp, Homo sapiens
  misc_feature 528: n = A,T,C or G
ctttctcttgcctgattgctcaggctaggacttccagtactatcttgaatagatgtggtgaaagggcctccttgtattgttccagttctcagggggaatgctttcaacttttctctgttcaagataatgttggttgtgagtttgtcatagatggcttttattaccttaaggtatgtctcttctatgccgcttttgctgagggttttaatcataaagaggtgctggattttgtcaaatcttttactgcatttgcatttattgagatcatcatgtgattttcatttttaattctgtttatgtgttgtatcacatgtattgacttatgtatgttaaactatccttgcatccctgatatgatacccacataatcatgatggattatctttttgatatgctgttggattatgttagctagcattttgttgagaatttttccatctatgtttatcagggatgttggtctgtagttttcttttttttgttaggccttyccttgttttggtattagggtgatcccgctttcatagnatgatttgagaggcttccctctttctctatctttggaatagtgtcaatagaattggtaccaattcttcttcaaatgtc

SEQ ID NO: 953780 - DNA, 701 bp, Homo sapiens
tcctcaagtgttttcctttcaggctctaaattgctgacttaaatgtcatcattagagagagttgtctcctcggtagaagtacaaattttgttccagagtcaaatatgaagacttgatcagtggcctggcgcggtggctcacgcctgtaatttcagcactttgggaggccaaggcaggtggatcacctgaggtcgggagttcgtgaccagcctgaccaacatggagaaaccccgtctctactaaaaatacaaaattagctgggcatggtggcacatgcctataatcccagctactcaggaggctgaggcaggagaatcgcttgaacccaggaagctgtggtggcggtgagccaagatcgtgccattgcactccagcctgggtgacaggagtgtgaaactctgtctcaaaaaagaaaaaaagacttgatcagcttatagcctttatcatctagtcttctattctctggagagtcagtggggactcttccgagttcttgtagccttttcttaaggcctataggaagtcatctgtgctgagcctgcactttctataacagatggaaaactgaagcccagacatcttaagtggcattgacttagacagactatagagytagttagtggggggccagcaccatgacctgtcccctacctccagcaggcttcacccacccttgcacccttgcaggaagcacttagagg

SEQ ID NO: 953781 - DNA, 615 bp, Homo sapiens
gtggcagtcttcttcctgggcacccaggctttcccaaacatcctctgaaatctasgcagagtctgccaagcccgcttcatgcttgcattctgtacaactgcaggcttaataccatttgcaagccaccaaggcttatggttttattctcttcagagtggtgaccagaccaatatctggggccctttgagccaaggctggagctagagcagtggggatgtgaggaacatccttgtagggtggctcataaaagctgtgccctggacctagaccctgaaaccattctttcctcctaggtctctgggcttccaatgggagggcctatcctgaaaatctataaaatgcctttgacacctttttctaattaccttgtatattagcacttggctcccatttagttacgctaatctctctagcaagtgcttgctccacagcccacttacattcctctcctgaaaatgctttttctctctctactacatggccaggctgtgaattttccaaatttttatgctgtgtttcctttttaaatgtacgtttcaactttaagtcatttcttagctcccatatctgaccgtacgttgtcagaagcagccatgtcacatcttgagtgctttg

SEQ ID NO: 953782 - DNA, 693 bp, Homo sapiens
gctgcacacagcacggagaccctggtcccagaccatgaaaccattttcccctatgcctccaggcctgtgatggcaggggctgcgtgatgacctctgacrtgtcctggagacattttcctcattgtctgggggattaacatttgactcattacttatgcaaatttctgcaaccagcttgaatttctccttacaaaatgggtttttcttctctatcacattgtcaggctgcacattttccaaacttttatcctcttcttcccttataaaactgaatacccttaacagcacccaagtcacctcttgaatgctttggtgcttagaaatttcttccatcagataccctgaatcatctctctcaagttcaaagttccacaaatttctagagcaggagcaaaatgctgacagtctcttcgctaaaatataacaagagtcacctttgctccacttcccaacaagttcctcatctccatctgagaccacctcaacctggaccttactgtccatatcgctatcaggcttttggtcaaacccattcaacaagtctctaggaagttctaaactttcccacattttcctatcttcttctgagccctccaaactgttccaacctctgcctgttacccagttccaaagttgcttccatatttgggggtatcttttcagcaatgccccactccttgtaccaatttacta

SEQ ID NO: 953783 - DNA, 651 bp, Homo sapiens
gtaaatcagcagtattatccttttgatctggatcccataccaattaattatagcgctagcctacatgcccagtctctgaaattatgtaaaaagtgactatttaatagatacaataaatttcttcattctttcagataataaaatgatttacgttttacatctttaaaacatactacattattcttttttttgagatggagtctcactctgtcgcccaggctggagtgcagtggcgcgatctcagcttactgcaacctctacctccagggttcaagcgattctcctgtcccagcctcccaagtagctgggactacaggtgcatgccaccacacccggctaattttttgtatttttagtagagatggtgtttcaccgtgttagccaggatggtcttgatctcctgaccttgtgatcaacccacctcagcctcccaaagtgctgggattacaggcacgaaccaccgcgcccggccaccatattattcttatatcaagataaaactttaaataattgcaaatttcccttctatatgtttgcaaattttaaggttcttgaagaaaaagtaagaatgataatcaccagttcaaagaaatatatttatgcaatttggcayatgactggttgttatagcaaagattaattgaatctaaa

SEQ ID NO: 953784 - DNA, 491 bp, Homo sapiens
gagttagggaggatgtccttattctcaatcttttggaatagtttcagcagaattggtacttattctttgaatatctggtctaatgtggctgtgattccatctggtcctgagctttgtttgttggcacttttattatgattattctgattgattaaatcccactgcttgttatttgtctattcagaatttatatttcttcctgattctttctggcagggttgagtatttacaggaaagcattaattttctctagattttctagtttttgtgcatacaaggtgttcacagtagtctcagatgatctttagtatttctgtagtgtcagttataatgtctactgtggtatttctatttgagtttattggaatcttatctccttttcttgcttaattaagctagtggcctatcaattctgttcatcttttcaaagaacctacttttyatttcattgatcttttgtattgctttatttgtttcaatttcttttacct

SEQ ID NO: 953785 - DNA, 572 bp, Homo sapiens
aaatcctggaaaaataatttcttcaacatwtattaagtacctgccatgttccagaaagtgttcttggcataagtaaacagttgttatgaaaatgacagaagttttctgctttcatggaagttttatcatagtggtatgatagacaataaaccactgagaaaatgcatgctagaatatttgacatacacttttgcttctttttctgaaaaaagtatatgaatatggtttaaaaatgacatatcaccctaaaatgaacaattcatccataacctctgaggaaaataaagcaaaataagaaatagggagaaacaggaggtactaaaaaagaaagcctggttgagagctaaaatttgacaaaaaaaaaggctgtataaaacttgggtataagagaggaagagcattctacactaaggaagttgaaagtacaaaggccccgaggtggcaatgcactcaatttgtccagggaatagtattgagtccaatgtgactgcagcaaagtaaacaaggaaaagacgtataggagaggagatcagacagtttgagatgagcttgatcatgtatggttacatttt

SEQ ID NO: 953786 - DNA, 581 bp, Homo sapiens
aatgtgtctaatgaacttctcttacagcagggtatagatcaagagattcttgcacgtctgcaagccctcgaggctgccttggaatttgtgggggagcgacaagatgccctagcattctgatagcaattaaactgtgactgggagcataaacatatctgtgtcacatttttaccttggaatcaatcaatacatagttgggatgaggtgaaacaacacctctggggaaactttcatgacaatttaacagcagacgtaaagcaacttaaaactaaaattttagaatcccttcacatgatagatctacatactcaacaaacagccatatggaaaggtgtgcaagatcatttctcctggttatacccccgatcctgggggtcacactttgactggaaaggaatgttactaattatactcatgattgtcttacgttatttgctaattctatgaygcaaagccggaataaaagcaaaacctaacaaacctgttgctgcacacatctgtactcttaagtcaacagaacccgatgcaaagaacagaaaggggggagatgtgagagttcagtcaggctggtgggaaaattt

SEQ ID NO: 953787 - DNA, 591 bp, Homo sapiens
ggactacaggtgtgcaccatcacgcctggctaagttttgtatttttagtagagacagggtttcaccatgttagtcaggctggtctcgaactcctgacctcaagttatccacccgccttggcctcccaaagtgctgggattacaggcgtgagccactgtgcccggccgagtttttcaatataaatgtactttatttgagttacagagaagagatatataactggaaaagacctggttattactgttacagtaattcaaagatgaagtagggagattgtctctgccactgtttcagttttatcctgttgctttcaagtggtttgatgggcttgatagaccgtgggtctgatgtttgatacatgatgatttgaaatcagaaaggtgtttggtgttactatcctgctcttacatgacttcaaaattcagacaatactattattcaaatgaatagactttgcaccttcataggttcccctataaagtctaaacttcaagaatttagtctcacagcttcaatgasaaaaagagaattgaagacactttaaagtatcatacaatcatattaactttgaacaaggtgaacaaaaaagaa

SEQ ID NO: 953788 - DNA, 607 bp, Homo sapiens
caaatgcatctagtgttagctgaccaaaacttatgtttaaggcaatttttcttcaaagatatttgaagtctagttgttatatagagccagtgaggtcacgtaacccgagatctagttggtacaaactctaacatctgccatttgcaaagccaaggaaagctcgtcattcaagaaatgtgagggaaagagaaaaattgcaaaagtcagacttggaaagaaaaagaggaagaagtaaaatagaggcatcatacatgttccaatgagctatcatccactcagaagatagtctgcctgcactaaaggggataggatagcatattggaaagtctgtcaactaccaacaatttgttctagtcaaaattaaaaaaaaattgtggtcacctgtactatcagtgatagatgtgatgatctgagtcctcagtggttaaacaaggacatgcttttttagtccaaaagaaaactgagcaaaggataataaggataagaatagttaatagaggtgctgggcacagtggctcagccctgtaatcccagcactttgggaggccaaggctcacttacactcasaagttcaagactaccctgggcaacagggtgaaaccctgtc

SEQ ID NO: 953789 - DNA, 552 bp, Homo sapiens
gaaatagagagtagaatagtaaatagcagaggcagggaggttggggaggatggagagaggttggtcagtgggtacaaagttacagtttgataggaggaacaggttctgktgttctagtgcacactagggtggctatggttaataatattgtattgtatatttcaaaaaagctatgatatggtttggaggttttgcccctctaaatctcatgttgaaatgtgatccccagtgtcggaggtggggcctgatgggaggtgtttggggaggtgtgggggcagagcctgcattaatggcttggtgccctccccgtggtagtgggcaagttctctctctctgagttcacgtgagagctggttgtttgaaagaacctggcacctttctcccccgtctctctcttgctccctctattgccatgtggtatgtctgctcccctttcatcttccgtcatgatagcaagtttcctgagacctctccagaaacagatgctggcactgtgttttgtgtatagcctgcagaactgcgagccgaataaacctcttttctttataaatt

SEQ ID NO: 953790 - DNA, 721 bp, Homo sapiens
agcatgaggactgcccctgtctgacagcttccctttccccccgcctgcttttaactggcctctcgctctcactcttgcctcctttcagtccattctctgcccagcatcaacagtgatgcttcttaaaacaccaaccactgtttcatctcgtacttaaagctcttccgtggctttccatctcattagaggaaaacacaaatttgtacaaggctctatgtggcttgtgcccctgcaggtctgcatgcctgcctcctttcagacatctccttttgggctcctctggaccccatccctgtgttagccatactggtctacttccacctccccaaaagctacccctcacctgggcacatgcggtcctcttgattgacgtgctgttaccctccacacatacctgactagctcttcttgattatttagttcctggctttgatggcatcctccccaagaagacttccccaatgactgtgaatgtctctgtcttggcccttgtttccttttactggaaacttaaaattgcaattactttatctatttactgggtattggttgggttcctccctagaacagaagcctgacagggcaaggatcatgcccatcttgctcactgctatatctccagcacttagcacagtgcttggcacatggcagamtcctagaaaattcagatgaatctggtggaaggcccagctaaactctcactgtgcagccacttctgaca

SEQ ID NO: 953791 - DNA, 606 bp, Homo sapiens
gtgaagacctatacagtcattaacattctcctgacttagaacctgtgataattagggagtgacctgcagcagtttccttcactctgtgagccatgcatgcaaatgaggggtgcaggagaggaatgcagacctggggcccacccgcattcaagtgcaattgatggggccattgcaggtcaccctgatctgcccagtgcccctagctgctgctggtagacttgtaggatcctataatttaggcttctcattaattcagatgaaccgtgactttggtgtgcccttctccattccagttatgtggaagaaatttcatctcttggtcttttatgcattttaagatttgatagcaacgctagtggctcatgcctgtaatccagcactttgggaggccgaggtgggcagatcacaaggtcaggagatcgagaccatcctggccaacatggtgaaacactgtctctactaaaaatacaaaaaaaaaaaaaattagctggcgtggtggcacgtacctgtaatctcagctactcaggaggctgaggcaggagaatcgcttgaaccagggagtcrgagattgcagtgagctgagatcgcaccactgcattgcagcct

SEQ ID NO: 953792 - DNA, 702 bp, Homo sapiens
aggtcattgtataatttattgtccaaaccagtacatttttgagagtgccaagggagcactattaacgattatgccaggataacaggtgcaaacctgttttgcgcaaactggaacatatggtcaccatgtcttatgtgggatccaggagatgagctagaatctgtaacatagctttattcattaaagcaactagtagaaactatgtacttatgctgtgtacttatgcgtattaaaatcttcagcattatttttgcgtatgccctatccacctatcattgtttagtatcatactagggatcttgggcaatagaagagaaactttttaaagtatcaagcattatacaatttagttgggaagagaagactgatacagaactttgttctggtaaataaatcacaagaacaccttcaaaaatcccttcagtaagcagaatataacaagtaaaataaataatgagttagtgagagataaactgtaaattatgtgcatgctgttcttgacttgttgtggctccacttagagtttctggtcatggtccttgcatgcctccagcacttccagtaggcagagaccagttgacttcctgagctgctctgrgtctaaacctcagaaattctcttccttgtgagcatagcttctctattctcatagcttctctattctctattttcatagcttctctatgcactcgctaactcctt

SEQ ID NO: 953793 - DNA, 620 bp, Homo sapiens
tttattgttcataggggacagcaatagggagacattctcagatatccagagcctcagaaagtgtaactcttcatagccttgaaaaaaaaaaacaaattactggaatattcattttccattgttgctgtaacraatcgccacaaacttagtggcttaaaacaacacagatgtatcaccttctagttctataggtcagaagtctgacatgggtctctcactaggctaaagtcaaggtgtcagcagggctggttactttctggaggctcgaggggagagtctatttcctggcctttactagcttgtgaaggctgtctgctccttcactcatggcgccttcctccatcaccaacggtggcaatggcagggcaagtccttctcatgctgccccctctctgacttgcttctataattacgtctctttctgtggtcacagccaggagcctctctactttgatgtgatttatgcaattagattgaacccacctggataatccagggtactcttactatcttaacatccttaaccttagtaacatctgcaaaaccccttttaccatgtaacatattctcagggtccaaggattcaaatgtagacatcttttgggggctatcattctgtc

SEQ ID NO: 953794 - DNA, 568 bp, Homo sapiens
aattttctggattttccagctaatttgaaggtacctacatggaacattttsttgtcagaaaagattttaaaatacattcattcagcgtgacatgataattgggcctggctgcctgatgaatgccttttatctattcctgagctattgttcgctggtattgagctgatgggctggaaccagcactttgttaaatgcacaaacagagccacttgcaatgattccggtcaccagaggcagtggggtgtcagaggtgcagggagctggtaatgatagtgtcagaggaggaaggaactttagcgattagagaaggcaacttcttcactgtatacctagggagaccgagacccagggatgagcagggagccgctatgggggtggcagaaatgggacttggacctgggtgtcctgcccagaccctgagcatcctcccctgccttctgaggatcctgtgaagagaggcgagcaataaacagcgtgtgtccatgcaaagctgctcacaccccctggatcctctgctggagtgtgctccactcgcacttcatggcagggcttggctgccaagcggaat

SEQ ID NO: 953795 - DNA, 635 bp, Homo sapiens
tctgggaagtgaggagcgtctctgcctgagcacccatcgtctgggatgtgaggagcgcctttgcccggctgccccgtctgggatgtgagsagtgcctctgcctggctgccccgtctgggaagtgaggagcgtctctgcctgagcgcccatcatctgggatgtgaggagcgcctttgcccggccgccccgtctgggatgtgaggagcgcctctgcccggctgccccatctgggaattgaggagcacctctgcccggccgccccgtctgggaggaagtgaggagcgcctctgcccggctgccccgtctgggaggaagtgaggagcgcctctgccccgttgccccaaatgggaagtgaggagcgcctctgcccggccgccccatctgggaagtgaggagtgcctctgcccggctgccaccctgtctgggaggtcaggggcgtctctgccccgccgccaccccgtctgggaagtgaggagcgcctctgcccggccgccaccccgtctgggaggtgaggggtgtctctgcccagccatcccgcctgggaagtgaggggcgcctctgcccggccgcccttcgtctgggaggtggggagcgcctctgcccggccgccccgtctgggaagtgggcgcctctgc

SEQ ID NO: 953796 - DNA, 635 bp, Homo sapiens
tctgggaagtgaggagcgtctctgcctgagcacccatcgtctgggatgtgaggagcgcctttgcccggctgccccgtctgggatgtgaggagtgcctctgccyggctgccccgtctgggaagtgaggagcgtctctgcctgagcgcccatcatctgggatgtgaggagcgcctttgcccggccgccccgtctgggatgtgaggagcgcctctgcccggctgccccatctgggaattgaggagcacctctgcccggccgccccgtctgggaggaagtgaggagcgcctctgcccggctgccccgtctgggaggaagtgaggagcgcctctgccccgttgccccaaatgggaagtgaggagcgcctctgcccggccgccccatctgggaagtgaggagtgcctctgcccggctgccaccctgtctgggaggtcaggggcgtctctgccccgccgccaccccgtctgggaagtgaggagcgcctctgcccggccgccaccccgtctgggaggtgaggggtgtctctgcccagccatcccgcctgggaagtgaggggcgcctctgcccggccgcccttcgtctgggaggtggggagcgcctctgcccggccgccccgtctgggaagtgggcgcctctgc

SEQ ID NO: 953797 - DNA, 564 bp, Homo sapiens
ctggatcagcaagcacagtggtccccaacctttttggcaccagggaccagtttcatggaaaacaatttttccatggaccaggttgasggatggtttcaggatgattcaagtgcattatatttatggtgtactttatttctattattattacattgtaatatataatgaaataattatacaactcaccataatgtacaatcagtaagagctctgagcttgttttccttcaactagacggtcccatctaggggtgatgggagatagtgacaggtcatcaggcattagattctcataaggagcatgcaacctacatccctcacatgcacggttcacaacagggttcacactcctatgagaatctaatactgcccttgatctggcaggaggtggagctcaggtggtaatgctcactcactgccgctcatctcctgctgggcagtccggttcctaatgggccaatgaccagtaccagtccgtggcccaggggttggggatcctagagttagtggatacaggtgtgccatttattgagccagggaatggaggagaagcaatttgaaggcc

SEQ ID NO: 953798 - DNA, 640 bp, Homo sapiens
taaaaacaaaagcatggaacatacatctgcattttaactaaggtaacagtacaattatcyttccttgacatggagcccaaggtccaacattcctgtgacaacttgtgtgttatgataaagtgttttacgattttataacatctaatgttggtatgaccttagatctaaagatttaaaaccttgagaattcatttagaacttcacggtcctgtttcccaggcagtaaagttctataaacaagaatactcattctcaatattatcaatgactcaaagacatgaacatataattcacagaaaaaagcacacaaaatgttcatatttgctggtaacaaaagaaatgcaagtaaaacatgaatttaaacaaaaattaaatattatttttgtccataaaattgatattacccaaaaatataatattcaataattatgagggtgtagtatagggaaagaagtatacattgatataaactctctggaaaactattcttttgtgatataattccaggcttgaatcacagacacatggagacacatatacagcataatatttagcctatcagaatatatatacacacacacacacacacacacacacatatatatataatgtacacttttgttaaaattgtgaaatcaat

SEQ ID NO: 953799 - DNA, 618 bp, Homo sapiens
tagagaccaggtgagaggaggctggggtggtcaggactggaaaaggagacaaagaaagaagtggcctacattctttctggaataaggtggaagagagacgagaagagaagaggaaagaaaagcaaagacaacaacaaaatagatgcacacatgtgggcctcaaaccagcatacttagggccaaacaagccacagatatcagaattccaccttccttccagaaagctcttcagaaaattccacatagcctattttttcttttcaaagaagtaggtagagtctctatgtctgggctggccagacaagactcgggttattacaaagataataactggcatgtactgagagcttgctgtgtgccaggccttgttctagaacctcacacctagtacctcctctactcttcaaagccgcatcctaagaactattatccccattttacacttgaggaaactgaggctgtcatgggatgagataacactgtggagccttactcttgactgctagagtgaccstggtctcaaaacagataaccatgttccaagctgggaccgtcaagctagagggcactggggctccagcactgggtgccagggaggaagtacctcgcagaagctcc

SEQ ID NO: 953800 - DNA, 611 bp, Homo sapiens
attccattcttgatcttaaagacacttttttcatgattcccgtgcaccccttgtcccagcccctctttgcttttacctggactgaccctgaaacccatcagtcccagcaacttacctgggctttactgccacaaggcttctgggacagccctcattacttcagccaagccctttctcatgatttactttctttccacctctctgcttcccaccttattcaatacattgatgactttctactctgtagtccctcctttgagtcttctcaacaagataccctcctgctccttcaacatttattctccaaaggacatcagttatccccctccaaagctcaaatttcttccccatccattacctacctcagcataattcttcatgaaaacacgcatgctctccctgccaatcatgtctggctggtctctcaaaccccaaccccttctacaaaacaacaactcctttccttcctggtcgtggtcggatactttcgcctttggataccttgttttgccatctgattaaaccattatataaactcacaaaaggraacctagttgaccccatagatcctaaattctttccccactcctctttacattccttaaaaacag

SEQ ID NO: 953801 - DNA, 637 bp, Homo sapiens
ttttcaacaagtcaatttcattaaataaatacataaacaaagagtgagggtattttccaggttaaaaaagtcttgagctaaataatcaaatgcaatgtgtgtcccttgattagaagaaactaatttgagcaaaccagccacaaaagatatttcagggagaccaagctggaaggatcacttgaggccaggagtttgagaccagcctgggcaacgtagtaagacctccatctctacaaaaacaataaattagctgggcatggtggtgtgcacctatagtcctagctactcaggaagctgaggcaggaagatcacttgagcccaggagtttgaggctgcaatgagctatgattgtttcactgcacttcaggctgtgtgaaagagcaagactttgtctcaaaaaataaaaggacatttcataataattgaggaaatctgaatgtggactgggtaataaatgatataaaaaaactattttttattctgtttgaaaagatgattttgtaaccatacaggaaaatgttcttattttttagaaatctgcactaaakaatttaggggtaaaatatcattttctttaatatactttcaaacacaagcaaaaaataatcatgacacaaatatagcaaaatgtttacaa

SEQ ID NO: 953802 - DNA, 593 bp, Homo sapiens
tatacatgatatatacacatgatatatatatcatatatacacatgatatatatcatayatacacatgatatatatcatatatatcatatatatacatatcatatatatacatgcaaacacatatgattccaccttaaagagaaaggaaattctgacataagctacaacatgaaagaaatttgaagacattgagtgatataagccagtcctgagaggacaaagactatatatgattctacttttgtgaagtacttaaacaaatacatagagacagaaagtcgaatggtggttgccaggagctagggggaggggatagttattgtttaatggacaaaacatttcagttggaaaacattaaaaagttctagagctatatagtggtgatggtcacccaacaatatttatgtgcttaatgccactgaactgtacccttgggagtggttaaatgttaaattttacgatgtacgtatttaacccccacacgccccaaacaaatctgacaaaagttaaagaccattccctaggtgtagctctgttcctacatgcaaaattttacatattgttccagggagctcacggtcttctcaggttca

SEQ ID NO: 953803 - DNA, 552 bp, Homo sapiens
gcacagctcagggcacctcctgttaccttttcgcctcccagcttgggcgcctaggtgtgcccacagcaggcaaargcggacctcagcagccacgaggtgggaggcgggagaaagccgcggtggtattcgcgaccccacagggccaatggacaggcgcttctcgcctgccgggccaatggaacctttcatcctttggtcaataaattcaacccggtctgaagatataagagattaggggggcccagttgcactaagcaaggggttcttcccccaaaatctccccatttttccccccaaactgtttttcccctttttccttttctaagtgagaggcctaccccctactctgtttctgatatggaagttaacagtggaataatccctgttggctgagaactacaaattcagcagcacacatttgagacactctaaacggatgcaaacagcctctaaaataccttttcagtcccaaatttgactccaagtttcaagctgaggccctagacataaaaaccaggtctgggggatccaaagccaggcaacaggtacaat

SEQ ID NO: 953804 - DNA, 710 bp, Homo sapiens
acgagttaatgggtgcagcacaccaacatggcatatgtatatatatatatgtcacaaacctgcacgttgtgcacatgtaccctaaaacttaaagtataattaaaaaaacaaaaaagaaagaccagtcttcaagctattaaattatttattctgtttggttgagtctgttgataaagctttcaactttattttgaaattcctaagtgagtttttccatttcattacctccaattgatttatttttaagatgtttatctcttcctttgtttcctgcattgctttagaattttctttgtgttgtttttcaacatcatcttagatattgttgaacttccttgaaatccatgttttgaattcttaatctgtcatttctgtttttccatttggttagggaccattgctgtagaactagtgtgatactttggtggtgtgtcaacattcagatttttcatggtgccagatcctataccagtttgttctcatctagaaaggctggcacttctaattattgtaattattttcatgaaaatagactttttttctcttttcctatatattctttctttccctttagggtatgactgkaaagtatattggaaaaagtcttttggctttgtttttatagctctgtgcacttatgttagtaggttttatattgggctgtgcagttcaacctacaggccagcagatagggcttgcaggtaagatcc

SEQ ID NO: 953805 - DNA, 621 bp, Homo sapiens
ttatctcaatagatgcagaaaaggcctttgacaaaattcaacaacccttcatgctaaaaactctcaataaatgagtgaccaatttctyacactcttcacaatactctgtattacaactttgtttcacatattgtctttgacaacgtgataggtgtaaatggtatggcttttttttttatttacattttttggataattcgtgatttgactattttatgcttattagttatttaccctttttattttgtgcatctcctgtgtgcctcatgacatttttattggagtatatgttaattttagtaatattttattaagtatataaagggaaaagatcaaagggtgagagacttatttttggaaaacatccacagtcgtgagtatacaataaatcaggactcaaaagaggtaaatgaggaatgaggacagccttgcatacggaaacaactggcaatgtttctccaggaagagtatagaaggttatgggcaggaataacggggagaaagtctgttgatttggtagtgggagaatcataaatgatccctgagcataagtaaagcctactattgatgttttcttacattctgagattacttttggctccactgagtttggcattgtcc

SEQ ID NO: 953806 - DNA, 669 bp, Homo sapiens
cccacttcttatgtaaaccctgtgctcctgtcaatctggactacaggatgtgttccatacacaggcattcatatcttgcctcatgtttctggccatgcctgaatgctatacatagattgcagaagagataaaattttatccatgaagcaccagtgcctaggctgcccacagcgacctcagaatggtgaccccaccatttccttcttctagtatgttgccatggctccttccaggtaggctgatgggaagtcagcctgccctctgctgtagtcataacgagctgaactgatgaccagtgctggggcccaaggtgactgcactctggttggacatctgggaaatgaactgcccctgggaatgcttggcttgaaactgtccaacaggatagctttcaatttgatggcagccaaaaaacctacagagctcctctctttaagaagtgtcagggggtggccaggcgcagtggctcacgcctgtaatcccagcactttggaaggccgaggcaggtagatcacgaggtcaggagatcgagaccatcctggctaatatggtgaaaccccgtctctacaaaamatacaaaaaattagccgggcgtggtggcgggtgcctgtagtcccagctactcaggaggctgaggcaggagaatggcgtgaacccgagaggcggagc

SEQ ID NO: 953807 - DNA, 598 bp, Homo sapiens
taaattagttcagccactgtggaaagcagtttggagatttctcaaagaacttaaaacagaactaccattcaacccaggaatcccaagactgggtatacatccaaaggaaaataaattgttctaccaaaaaaaaaaaaaaatgcacctgtatgttcatcacagcactattcacaatagcaaagacatggaatcaacctaggtgcccgttgacagtagattggaaaaagaaaatgtggtatatatacaccatggaatactacatggccataaagaagaacaaaatcatggatgcagctacaggccattatcctatgtgaattaacacaggaacagaaaaccaaataccacatgttgtcacttagaaatgggaactaaatatagggtacacgtggatataaagacaggaacaatagacactggagactactacaggggcagggagggaggggtacacaggctaaaaaactacctattggatactatgctcactacctgggtgayggaattattcgtactccaaagctcagcatcacacgctatacccatgtaacaaacctgcatatgtactccctgaatctaaaataaaagttgaaattgg

SEQ ID NO: 953808 - DNA, 608 bp, Homo sapiens
tgaacattgatgcaaaaatcctcaagaaaataatggcaaaccgaatccagcagcagatcaaaaagcttatccaccatgatcaattgggcttcatccctgggatgcaaggctggttcaatatatgcaaatcaataaatgtaatccagcatataaacagaaccaaagacaaaaaccacatgattatctccatagatgcagaaaaggcctttgacaaaattcagcaacgcttcatgctaaaaaccgtcaataaattaggtattgatgggatgaaaacatcttttcttgtcaggaagacaggcaccttataggtaatcaataaatgatgagatgatggtggtggtggtgtcatttatttaaagagggataaaagtggatggctcaattattttcacctattacaagtcctcctcaccccatccaaatcttattcacatcaaatactttcttcacaaggacttctcacagaataatacaattaaatatcattaacactgaaaggaatgttagasgttattgactccaatgcccttgttttaacagacgtggaaagagttaaaatgaaccttctcagagttaaaggcagggctggacttccacataactctcct

SEQ ID NO: 953809 - DNA, 722 bp, Homo sapiens
gaaagaccaagttggggcccttctctactccttttaaataccgcgtttctgttgcttggaactttcatatttctgcatcagactgttctccttgctatatttcacactccctctggcttcacatcasaagaacaaggtcagtatttgtttgtaatggaataggggtgtgatggtgaataatacagatgtatattttacttggaacaaatgcagttcacctttcttctctgagtaaactgagatcttgagagaggctgcactgcataagccttcaaaaggaggccctccttgggtattccaaacattttatcaagccacaagatcctcttgtttcaagcaagaagcacctacaaagaaaaagacagtttctgtaagacacttggattttgggtttgttagttcttttggggtgaatttttaatgttaacagaaaaaccaaactaccttggtggaattgggtgccaggaggcattaaataaatggattcaagtaagtacatttgcaataccctagaatggtacattctctcaggtcctttgctttgggtttttcagagagattcagaatacgtttctacgtttatttaaagtagaatgttaaggccaagatgaagagaatcaattctaatcagcttttgaagtagaaacaggacaggatcaatcttgcagcactcaacagactatctcccatttggaactaaagatgcagaacataaaacattc

SEQ ID NO: 953810 - DNA, 596 bp, Homo sapiens
gaccagagcttagtgcagagccctactcagaaagagggcttaataaataggaacaactctgggaagattgtgtatattctcaagactgacaactaaaccaaaaatgacaatctccagtgagatttatttcaggacaaaataaaggtctgaagtttccttgggattaaaatttttaattgttcctgcctaaaatgtttctttcaaaaaaaaaaaaaaactggattagggcactaagctttatttaggtaaactgtgatctcctaccaattttattcacaaatataaaacagcctgagtagcgccaaatattctcagtacccaagttttacagctaccttccaagaacagaattttcaaagccacatgaaaaccagcaagctcaggccttttggttgtgtacatttttaagaagcagaagagagagggacgaggacctgagagcacaaagagagtaaaacaaaaacaaagtttagtaccagatgcagactcaggaaggcctgagcgctatccaagtgggagttttgagtgatcctcagcaacygtgaggacctttgaaaggtttaaaaatataaattgtggccactaaaaaaaatatg

SEQ ID NO: 953811 - DNA, 845 bp, Homo sapiens
cgagtagagcagacccctcttgccctgccttcacctctttcctgccagaaaccattcgccaagtttgtggagtcgtggcgctggatgggcttgtgtgtttgtaccttccttttttccaaaaaggacatgagatggcttgtagtataacagtttcaaaaataagtgaagaggtctggatgaagggcaagagtcgaattggtgcccacgatgcatgccgtgggtcttgtgtgcgtgggaaggaacctgacgcttgttccaagcttccccgcagccaccacagaaagaaccacagtcacagccagtttatgacagtgactcagagcacgagctttgaagcgacgcagacctgggctcaaattcaaactctggctcccctgctttgtaaccatgtgtgtttgagaggctcttatctgtgccaagccttagtttacttttctgtaaaatggggctaacaatatctaccttatagggttctagagaggattaaagagcgtaatataagaatttggctgggcatgggggctcatgcctgtaattccagcaatttgggaggccaaggtggacagatcacttgaggtcaggagtttaagacaagcctggccaacatggtgaaatcccatccccactaaaaatgcaaaaattagctaggcatggtgtcaggttcctgtaatcccagttattcaggaggctgaggcaggagaatcacttgaacctgggaggcggagtttgcagtgagccaagattgtgccacyacactctagcctggtcaacagagtgcgactctgtcaaaaaaaaaaaaaaaaaaaaaaaaaaaacacacagtatctagaatctaaaaagtactc

SEQ ID NO: 953812 - DNA, 565 bp, Homo sapiens
caaatccaggtctctcataccaaaatacaattgtaattgcatttcttcccaaatacatgtaaagtgcctaacagaatgtctgacatatattaaatcatcacgatgtgctagttccttttgtttcttactctacatcctctagcacatctcaaacatgctatcaaatttaacaaccacctaaaatatattatgccatcaaatctgcattgccaactcaaaccacctttctccagtctcaagaactatacatccagcttctttaagtgtccaacaggcatgccaaattcaaaatggcctcatgcaaacttatcatttttctcttaaatgtgctccatttatgatccccaaacagtgaatattaccatttattcagatgcctaaaatagaaatatgagagtcagggcttttaaaaaatagttttgtaatctgatttaagtcttcaatgcttattgacatgttgtttatatttyctaggatgactgatcaaatctttctaatcattaaaaattcagcttacatattatctcccctttggatctttgtaatatcagttaaatagtatcac

SEQ ID NO: 953813 - DNA, 551 bp, Homo sapiens
gagtgattctcctgcctcagcttcccaagtagctgggactacaggggtgcgccaccatgcccagctaagttttgtatttttagtagggacaggatttcactatatgttagccaggctggtctcaaactcctgacctcaagtgatccactttggcctcccaaagtgctgggattacaggcgtgagccactgcacccagcctgactttgttttttcaatttaattttacaaagcaataattttaaaaaatcaattgttctacaaggctgatatatttgtcagggttctctagagggacaacactaataggatagatataaatatatagatatataaaggggagtttattaagtattaaatcacacaatcacaaggtcccacaataggctgtctgcatgctgaggagcaaggaaagccagtcygagtcccaaaactgaagaacatggagtctgatgttcgaaggcaggaagcatccagcacaggagaaagatgaaggctgggaggctaggccagtctagtcttttcacatttttctgcctgtattatatactag

SEQ ID NO: 953814 - DNA, 667 bp, Homo sapiens
cagtcgatggcctcaactttgctgggctacaggtgtgttcctggtggcctttagatgacatcattgacaagattatgaccaagataattttgatgcatcctagtttcagcttaaaatttgggaaaacattcatttaaaaataacccataccaaggttttcacaaaatacaatcaaaatcagggcatattagtaggtagctcatatgtgtacctgctcggtatgtgctgttgtcattgatgtctggaatgaagtaatgaattagaaagtcttcaaacaccaaagaatgatttaatgaactatatttacatagtgtatataacacatataacataattactttttcctaaagataagaaattataattgtgcattttagaaagatttggtcaaaagaggaggaggtatgaggattttatcatgattctcaatttcacaagcatttctgtaaattaggagcctactgtactaactagaaatggtgaatgggttttcaacttcaattccatccatcacgtcccatctaaatgctctgaggtggtaacaacaaactgtgtcctagatcttcttcaagctgaagtgctttgggatgaccgcatattccaacaataccccctggaggccagttggccagggccagkggacacttgtcctcacagaagcaggtct

SEQ ID NO: 953815 - DNA, 698 bp, Homo sapiens
tacactcagacacacagacagtctaacctctcaattctctttaggcaatctttctcttttggaagtatctattatcaaaaacatctcttgtcacattacttcattttataatgttctaaattattatttatctttattagtttacattgtaggtcgtctgctctttaatgaggcttgggttggactttctattgaacatggggctttgagtcatccattttgcagcagctaggaggtttggggcattgatttcagctaaaaggatgagctctaattagtctatgaaaatcccagtaaagccttactcccaagccagcaccagtaccgttttcaggatgtgaggcttaagctcccatagcatatccttggctggagggcttggtcaaagaatttgtgctatgacagtctggataaatgggatatgaaggtaaacttggcagaagggctattctggaaaaagtttccctacttttaagtgggagccatagaaagagtatgggtgtaaggccagaatggctaaagctacttttctgacaatctgaagacaaagcctcatggcagaaggaagaacacagagcaatgcatggaaatggggccagagtcattgcattaagtcaaggccagagccyagcctgcctctagactttcactcatgtaaattccctttttgtgggagccagtttaatttaggttttttg

SEQ ID NO: 953816 - DNA, 632 bp, Homo sapiens
gtatatatttatggggtacgtgagatattttgatacatgcatgcaataagaaagaagcatgtcatgggaaatggggtatctatcccctcaagcattatcctttgaatgacaaataatcaaattacactccttacattatttaaaaatttacaattattacttactgtagtcatcctgttatgctatcaaacagtaggtctttttcattctattttttttgtaacaatttgcattagtcagagttcttcagagggacagaactaataggatatatgtttatatgaaagggagtttattaaggagaattggctcacacaattacaaggcgaagtcccacgataggctgtcttcaagctgaggaagaaagaagccagtagtggcttattttgagtcaaaaagccacaaaagtaaggaagccaacagtgcagccttcattctgtggccgaaggcctgagagaccccagcaaatcactggtgtaagtccaagagtccaaaggccaaagacactggagtccgatgcccaaggggaggagaaacrgatagaagcatccatcaagggataaagatgtaaaccagaagacttagcaagccagagtatccggccttcttcggcctgctttgttcaatccatg

SEQ ID NO: 953817 - DNA, 683 bp, Homo sapiens
ggtaaatgaggacacaagccaaggaatataggtggctactagaagttgaaagaagacaagggaatggattctcccttcagagcctccacaaggaaccagccctgctaatattttgattttagtctcataagactcatttcagacttccaacctctggaactgtgagagaataaatttgtgtttaagtcattaactttgtcataatttcttaccacagcaataggaaactataccactctccagggcacacatgccagtgtctagagacattttttcctattgtagcaggagaggtggtactacttggtagtatctagtgggtggagactcaacctcctgcaagacacagagcagtctcccacaacaaataattatccagcccaaatgtcaccagtgcttgacagagcaggagcaccgtcatgttggacaaacaccaccactttaagttccagctctctttctagtgtcatgcatttcaaggaaatcacttctcttctaactacaagcagccagaaagagcagacagtaaaacacagataaacagaggtggggggaaaggctcttgggtaactgccaaacttcgccctcatacaatgggccccggtaaaacagtgggccccartaagcacattcctttcccttcaggtgcactaagttagggaagctaaaagcagaattggggg

SEQ ID NO: 953818 - DNA, 569 bp, Homo sapiens
tctctcaccaagcagccccaagtgtcccttctccaagtggcatctccatatggactctccagcaggacagccagactacttacacgatgccacatractttcaaaagtgagagttccacagtagacactggggactacaagaggggagagagagggacggggggaagggctgaaaaattgcctgtcaggtactatgttcactacctgggtgacaagttcagtcatactccaagcctcagcgccacacaatatacccttgtgtagcaaacctgcacatgtaccccctgaatctaaaataaaagttgaagatgagagagagagacccaacggagaaaaaggagaagctaccagtcctcttaaagtttaggcctagaactggcacagagccacttccacccccttctattggctaacatgaatatagaccagcccaaattcaatgaggggactgaacaagagtgtaaatattgggaagtgtggttcattggatgactctccttaaagactagttaccacagttagataatccagtatgccaaaatttctgaaagcttacaaatatcataaat

SEQ ID NO: 953819 - DNA, 569 bp, Homo sapiens
tctctcaccaagcagccccaagtgtcccttctccaagtggcatctccatatggactctccagcaggacagccagactacttacacgatgccacataactttcaaaagkgagagttccacagtagacactggggactacaagaggggagagagagggacggggggaagggctgaaaaattgcctgtcaggtactatgttcactacctgggtgacaagttcagtcatactccaagcctcagcgccacacaatatacccttgtgtagcaaacctgcacatgtaccccctgaatctaaaataaaagttgaagatgagagagagagacccaacggagaaaaaggagaagctaccagtcctcttaaagtttaggcctagaactggcacagagccacttccacccccttctattggctaacatgaatatagaccagcccaaattcaatgaggggactgaacaagagtgtaaatattgggaagtgtggttcattggatgactctccttaaagactagttaccacagttagataatccagtatgccaaaatttctgaaagcttacaaatatcataaat

SEQ ID NO: 953820 - DNA, 594 bp, Homo sapiens
gctatcaccactgcctgcaccactctggctaaccaggaggtcctgagtctgtctatatgactacttcattactactttaactggcattcgagaaagccaatacactaaggctaacaataaccaaggaatctcacagagtatacatcattcccctgccactcccattagagctggtgctgctacccactgctgggagacttgaggtcatatcacttgatcccttgcagacattttccagctcctgcctggagtgtggcaaccttactgggtggctagacccagaggagcaacaacactcacaatagtctgtctcccaggtactcccactcttaggggaagagggagtgtaccacagcaagggaataccctgtgagacaaagtaatctgtatggcaggccttgagcagcagatctttccactggtgggaagtttctttcagcagaggcagagttgcagtgctgggctcagcagggagcatcttsagttctaacccaacagtcagacagccctggtgtgtgtaaagggtattggagaaggggacatctttccccccttgttcactattgcacgcacagttggggcttcttctatggg

SEQ ID NO: 953821 - DNA, 481 bp, Homo sapiens
tcactttgtgctagtagcaacaaccctctgagcctcggagttcccatctgtgaatcccagccataagatgatgttgttgtgaggatgacataagaaaacataaggagatgtgcccagcacgtagtagggctccacaatcatcttttgaacctgaatctgaataatgtaggttgctcacttacagggatgaaagggatgaaatctaggccactaaatcacaatatgacatgcagaaaaaataaacttgactaggtaaactttgatgtcccactattgaaaagatcacaaggcatttattggttttaaaaagagaaataacacatacattactctgtgtgtgtgtgtgtgtgtgtgtgtgtrtatatatatatatgtatatatatatataaatataataagacccagacaaatgttctggaaagtccaagctccccttatatatacagtatacaaggaaaatctgtaagaattccagaatgat

SEQ ID NO: 953822 - DNA, 551 bp, Homo sapiens
aaggtggtatctcattgtggttttaatttgcatttatctgatgattagtgacgttgaatattttttcatatgtgtgttggctattcatatatcttttttygagaaatgtatattcatgttctttcccaactttttgatgtgattattagttttttttcttgctgatttgtttgagctcctcattgattctggatactagccctttgttggatgcatagtttgcgaatgttttctcccaccctgtgggtagtctgtttgctgattatttctgttgttgtgcagaagtttttagtttaattaagtcctatttatttattctttggttttgttgcatttgcttttggattcttagtcatgaattctttgcctaagctaatatctagaagaggttttctgatgttatcttctagaattttttatggttttaggttttagatttaagtctttgatccatcttgggttggtttttgtataaggtgagagatagagatccagtttcattcttctgcatgtggcatgcccattttctcagcaccatttattgaatggtc

SEQ ID NO: 953823 - DNA, 551 bp, Homo sapiens
aaggtggtatctcattgtggttttaatttgcatttatctgatgattagtgacgttgaatattttttcatatgtgtgttggctattcatatatctttttttgagaaatgtatattcatgttctttcccaactttttgatgtgattattagttttttttcttgctgatttgtttgagctcctcattgattctggatactagccctttgttggatgcatagtttgcgaatgttttctcccaccctgtgggtagtctgtttgctgattatttctgttgttgtgcagaagtttttagtttaattaagtcctatttatttattctttggttttgttgcatttgcttttggattcttagtcatgaattctttgcctaagctaatatctagaagaggttttctgatgttatcttctagaattttttatggttttaggttttagatttaagtctttgatccatcttgggttggtttttgtataaggtgagagatagagatccagtttcattcttctgcatgtggcatgcycattttctcagcaccatttattgaatggtc

SEQ ID NO: 953824 - DNA, 551 bp, Homo sapiens
aaggtggtatctcattgtggttttaatttgcatttatctgatgattagtgacgttgaatattttttcatatgtgtgttggctattcatatatctttttttgagaaatgtatattcatgttctttcccaactttttgatgtgattattagttttttttcttgctgatttgtttgagctcctcattgattctggatactagccctttgttggatgcatagtttgcgaatgttttctcccaccctgtgggtagtctgtttgctgattatttctgttgttgtgcagaagtttttagtttaattaagtcctatttatttattctttggttttgttgcatttgcttttggattcttagtcatgaattctttgcctaagctaatatctagaagaggttttctgatgttatcttctagaattttttatggttttaggttttagatttaagtctttgatccatcttgggttggtttttgtataaggtgagagatagagatccagtttcattcttctgcatgtggcatgcccattttctcarcaccatttattgaatggtc

SEQ ID NO: 953825 - DNA, 580 bp, Homo sapiens
ccatgatggaaaggatccaatgcaaataatccacaaccacagagtacacaggcccctgaggagctgactccatcagaggctcaggtttggcctctgtgtatgtcaattgggcacttagcagtggtcagactggcctgggtgagtacatccttatgttactgaatccttccataaactctgcaccttccaccaaggccgcttcattaatgagccctttgagcaattgctggagtaactggagaaagaggctgcctgacattcagccagagcagatgatcacagcctcctgattcctgagatcttcctcagtaaggccttgggtgagtattctcataagacacaaatattctcatactctggatccattcaaagaggtccaacaatatgattcttgcctaatcttgcagttttattctttccaaattcctgaccatacagctccaaacactagccactgctcatgaatcagagtaaagcctcacctctggacatctcatcttccagtcaaagtggaccactggraatacccatctctgtcacaatcctccagggattcctgaatgtggttgaggtgctgcaa

SEQ ID NO: 953826 - DNA, 626 bp, Homo sapiens
ggcaaaccaggtgtggagtggcgagcggtgtgtaagcatgggttccagccactgtgcacaatcaggcatgctggctgcagcagggtgggcagctccagacactggcacaggcactggctttgtgtgaggctgtgactggaccagatataccatcagcagtttccactggcaccagggaatgtggtggtgaccagaagcttggagatgctaggaaccacaaagccccaaagagggtgttacagccctggttcagggaacccctcagtctggactaccccaagggccacagttcttctttcctcatcacctgaaatgtggccagtgggggcaggtgggtatttcagccctgtttttcttacagctctttcagccctgccatttggcaggtcccaaattcttcttccacatccaggaagaatgaggtatgtggacaatcagaggatgggcaaggtggagaggaatatcactgagtgtcttaacagttctctggagacccagggtagctcctttccgcaggcaggtcatcctgatgagtgtccagctctcagcagtgaggasacctgtggtgggtagcccctctccgcaggcaggtcatcctgaaaagtcaaggagaccaaagtgggtag

SEQ ID NO: 953827 - DNA, 602 bp, Homo sapiens
aatgttgtcttgtgaatgtggaccrtggacggtgaatgcggactgtgactgtgggttgatgaatattttcttaaagagccaaaaagtaaatatcccaggccttgctggacaagagttaaaatggaggaaattatgtatggagaatacttaaaatgtaactattaaaaaatgtgaaatgtgaaaataagctgggtgtggtggctcatgcctataatcccagcactttaggaggctgaggtgggaggatcgcttgaacccaggagtacgagaccagcctgggtgacatagtgagacacccacctcattaaaagaaaaaaaatttataaaaactaaaataaaataaaaatgtgaaaatcaaatcatccttagtttgctgtctgcaaaaagcagcaactggatgtatttagctaatgcactgtagtttactgacccttgtcctccatggtcttctagttctaatataaacttacttattaacagaaaaatcagtgcatgtgttgatacacacacacggtttttgagcagggtgagaagttaggtcgtttgcatacacactggctgtggccagcctgggggaaccagtgtcccatttcctagaaggc

SEQ ID NO: 953828 - DNA, 572 bp, Homo sapiens
aggaaactggggtttggagaggaaaggcgacatttctgccatctcacaatggttagcggtccgtttgactcaaggaatgtgcgcagcatcagttttagtcactgtgtaaattccaccttgagtgtagctgcccttttgaccagtcagtggagatgaagcacagagccgcctctctctcttgggcactgctggttgcctggtgcttgttatgtccttgatgaaggtggaagccattttcatcacagccgcctttctgacatccaggcaggtagaggccaactgtgtttaagaagctccactgaggtcagacagacaagctgtgatcgctcaggtcagacactgtctgtaaaaaggaaggcaactcctaagaattctctcgccaacatgaggagaaggtcctgtgtagaaagcacagtagtcaaggttcgttacatcaggttgaaagtgaaatgcttatattgaaaataaaaccgactgggaaaggccaagttttttaactttggttgactcaaggtgtggacctggcactttatttggcctgggtttatgcartttttagtcaactcctcagc

SEQ ID NO: 953829 - DNA, 580 bp, Homo sapiens
tcagagacctaagtgggactaatgggcattccagatggagaaatggaacagatggaagggagttaatcacactcataattgaaaactgtgcttgtttgacaaaagacttggtttgcagataaaagtgctcagagctccaaacgtgattaacgagaaaagacacactttagcacatcctggtaaaattatgagttaaggataaacagtaaaatgttacttttctaagcagaatagaaaaagataacgttagcatcaaaccgtggcttcattcctgatacaggccaagtccatattccccatgtttctggaactttcaggatccaaaagagagattttgttcctctcctatttggcttcactctgtgtggtagattaaagatgactgcagattctttttcactccctacagagaggtagaatttatttcccctgcctagaatctggggtggcccgaggattgcttaaccaatagaatgtgacggagctgttgctgtgccagttccaagcctagtctgtggagggctagyggcttctgcctcctgcttcttagaatgcttgcacattggcttctcatactccc

SEQ ID NO: 953830 - DNA, 552 bp, Homo sapiens
gtgaaagataagtaatactggtggtgagtacatcgtaagtccaatttcratagtcaattgtaaaagtgataagtttcaaacttaacattaaaattatgtcttatgtctgttactgaatccaagttatcatacaaagaaaaactcaaactgaaagtgccttaattttttgaaagaaatcactatgaaaaaattaaatttgaaaatgcccacttagggattcttatttttttttgtctcagtagagagtgagatcatattaaatacataaattgtgttttaatttgtataattattaaacacattcaaaataaacatagaaaaacagaaaatacaagtgaaaaagttaaattagtaaaagctaatgatactgatactactattgacaatatttgaatatattctctttctgcttttctattttatacaatattagggtagtactacttaagtagtattataacatttttcctcaaaatacgatattgtagatattttctcaaatcccaaaatgttttttgtaacataattttagtttgaatatatcatgccgta

SEQ ID NO: 953831 - DNA, 793 bp, Homo sapiens
agctccgtgtaaggctgtggcgggatcagatgtgatgcaagtgtcttccacygtgggcacctgcatgtggatgaggggaacacgatggagctcagacgcttggagatgccaggaaccacagagtcccaaagagagtgtcacagccctggcttggagagcacctaggtctgggctttccaaagggccgcagctcttctttcttttttgtcgctcgcctgcaacgttgtgagcagcggggctggttggggggtgaggtgactggggggaggaatttcagctcatttgtgttacagctctttaagtcccaccattcggtgagtcccaagttcttgacctgcatccgggaagaatgaggcatgcagacaactggagggtgagcaaggcagggaggagctttattgagtgacagaacagctctcagtagacctgaagctcctttctgcaggcaggtcatcctgactagtgtccagctctcagcagagaggagactcctagtgggtagctcctttctgcaggtaagtcgtcccgctgcgtgtgtgagtctggccaagtctgggaatttgatgtgctgagaacgaagaaagtgcgtgttgattggtctgcgggaggccatgggagggtctaaaaaagcaccattcgactggctgaatggtcatcagtgaagttcttactccaggctgtgtacttcgcccagaactggtagcctggcccccaggcttcaggccgttcctggcctgaaggaacggtttcaccagcgaaccaccccttcgcgcctacaaacctgtctgcctcc

SEQ ID NO: 953832 - DNA, 628 bp, Homo sapiens
actcaattattaggttggtgcaaacgtaattgcagtttttgcattgttgaaatttgctgtttgatattggaatasattcttaaataaatatgcttatgttggccgggcacggtggctcacgcctgtaatcccagcattttgggaggccaaggcaggtggatcacgaggtcaggggatagagaccatcctggctaacatggtgaaaccccatctgtactaaaaatacaaaacaaaattagccgggtgtggtggcaggtccctgtagtcccagctactcaggaggctgaggaaggagaatggcatgaacccaggaggcggagcttgcggtgagccaaggtcacaccattgcactccagcctgggcgacagagtgcgactccgtctcaaaaaaaaaaaaaaaaaagagaaaaaaaatatatatgcgcttatgttatatatcattttaatgtgcatttcttgctttgcattttttttggctaaggacttgttacttgctgtttattttatacttattttagactatggaaatggtgttagacaaaaagcaaatttgagcgattttcttatttgagttcaaaatgggttgtaaagcagtgcagacaactcacatcatcaacaatgcatttggc

SEQ ID NO: 953833 - DNA, 628 bp, Homo sapiens
actcaattattaggttggtgcaaacgtaattgcagtttttgcattgttgaaatttgctgtttgatattggaatacattcttaaataaatatgcttatgttggccrggcacggtggctcacgcctgtaatcccagcattttgggaggccaaggcaggtggatcacgaggtcaggggatagagaccatcctggctaacatggtgaaaccccatctgtactaaaaatacaaaacaaaattagccgggtgtggtggcaggtccctgtagtcccagctactcaggaggctgaggaaggagaatggcatgaacccaggaggcggagcttgcggtgagccaaggtcacaccattgcactccagcctgggcgacagagtgcgactccgtctcaaaaaaaaaaaaaaaaaagagaaaaaaaatatatatgcgcttatgttatatatcattttaatgtgcatttcttgctttgcattttttttggctaaggacttgttacttgctgtttattttatacttattttagactatggaaatggtgttagacaaaaagcaaatttgagcgattttcttatttgagttcaaaatgggttgtaaagcagtgcagacaactcacatcatcaacaatgcatttggc

SEQ ID NO: 953834 - DNA, 436 bp, Homo sapiens
cacagccaaacaatatcattctgtctctggccctccaaatctcatgtcstcatatttcaaaaccaatcgtaccttcccagcagtcccccaaagtcttaactcatctcagcattaacacaaatgtccacagtccagagtctcatctgagacaaggcaagtcccttctgcctatgagcctgtaaaatcaaaagcaagctagttacttcctagatacaatgggggtacagttattgggtaaataaagctgttccaaatgggagaaattggccaaaacaaaggggttacagggcccatataagtccgaaatccagtggggcagtcttacgttaaaactccaaagtgatctcctttgactccaggtctcacatctagttcatgctgatgcaagaggtgggttcccacggtcttgggcaactctgccccgtggctttgcagg

SEQ ID NO: 953835 - DNA, 425 bp, Homo sapiens
caagcatatgaagcatgactagcattactgaaaaactgaattttaatttaatttagtcttaattaacttacatttaaatggacaaatatggccmccgtataggataatgtggttatagaataaacaagctttcttgtgattgttttataattattccagtattatagcatcaccggcccacttttaggtcttccgttccgctcagccactttgaaaccattgttagaaggacagaaaaaatgaattcttgactgtatccatagtaatgagtgttaatggcaatcactttgaaatgtcaatttctaagagcaatattatggcatcacaatgtatctttgttcatgtctagcttcttttcacttaatgtgaaaaaggtaacatttttgtctttaattgagacaattagcatcaaagtgtaatgtaaa

SEQ ID NO: 953836 - DNA, 543 bp, Homo sapiens
ctgtttagccctcagcagagagaagaccctggagccggtagatactcttgcaggcaagtcgtcccattgtctcttagtctgaatgagtctggggctttyatgggtctcagtggggaggacgtgcactccgattgttccatgggtggccatgggtgggcccagaaaaagcaccacaagttcccactctggtcagcaagaccagcagcccagcccccaggcttcagccactgcccctaacctgcttgaaggtggggcttccacccaagatctagtctgcctcctgcccagactgcccaccactgccatcaatctcctaacatcttttgccttattttactttaatttaatgtagccataccatttttttgtgtttaccattttcatattacatgttttctttttatcttcctttcaacatatctgtttctgttatttaatgagcatctttcattgacggcatacatttgtgtttttcttttatatctactctggcaatattttttaattggaatgttgatacatttatatttaattaatggaatt

SEQ ID NO: 953837 - DNA, 543 bp, Homo sapiens
ctgtttagccctcagcagagagaagaccctggagccggtagatactcttgcaggcaagtcgtcccattgtctcttagtctgaatgagtctggggcttttatgggtctcagtggggaggacgtgcactccgattgttccatgggtggccatgggtgggcccagaaaaagcaccacaagttcccactctggtcagcaagaccagcagcccagcccccaggcttcagccactgcccctaacctgcttgaaggtggggcttccacccaagatctagtctgcctcctgcccagactgcccaccactgccatcaatctcctaacatcttttgccttattttactttaatttaatgtagccataccatttttttgtgtttaccattttcatattacatgttttctttttatcttcctttcaacatatctgtttctgttatttaatgagcatmtttcattgacggcatacatttgtgtttttcttttatatctactctggcaatattttttaattggaatgttgatacatttatatttaattaatggaatt

SEQ ID NO: 953838 - DNA, 559 bp, Homo sapiens
attcaagcagtcctcccaacttggccttccaaagtgctaagattacaggtatgagccaccacacccagcccctgtgaaacttcttagtgggacacttgatacctccagtgatttctgatctcttttctgctttttttgttttgttttgctttcccacttaaaatgttttttatcctgcaaaactaggagcttactatgaccacttgcacaaatgctttacaatctccatctatatagagacccatatacatataccccacacacatatgtgccttgtcttctgcatgttttctatgtgtgtctcgcctcaccatgatggcaagggacgagtcatttctctctcttccaacttacaccacttagcacataatcagcctgaagccaaaacaaactcaaactcaactcccagaaaggatttattaaatacatatattcttttttttttttttttttttgagatggagtytcatactgtcacctgggctggagtagggtggcatgatcttggctcactgcaacctccgcctcccaggtttaagcaattctccttgcctcagcc

SEQ ID NO: 953839 - DNA, 474 bp, Homo sapiens
gactaacttttaggtgctggtttttggttactgtattttcaaacactgatggtgtctgcatttctgccaaaggtattttagttttatagataatgtgatagtgtataaaggtttaataatgatacctccttaaataggaagaggagattattctgttacgtttatagcctcttatgatacacattctttgataatttaaaagctttgagtcaccttagtgcacagtaaatctcttgtagaattagttgattagtaatgatttggatataatgtcacattcatttgccaactggttggacctgatgttttgaagtgcttcttataatttataaggctgtatttgaagattacacaattgaatgtgaaggaaagttatttagaatattagtttcaagcttttaatgtctgtktctttgtgtttttccagataagtattcgtttctagtcttccccaacaaaatttcagttctcctg

SEQ ID NO: 953840 - DNA, 564 bp, Homo sapiens
aagttggattcctacttattttattctctttgtagcaattgtgaatgggagttcacccatgatttggctctctgtttgtctgttattkgtgtataggaatgcttgtgatttttgcacattgattttgtttcctgagactttgctgaagttaattatcagcttaaggagattttgggctgaggcgatggggttttctaaatatacaatcatgtcatctacaaacagagacaatttgactttctcacttcctatttgaataccctttatttctttctcttgcctgattgtcctggccataacttccaacactatgttgaataggagtggtgagagagggcatccttgtcttgtgcctgttttcaaagggaatgcgtccagtttttttccattcagtatgatattggctgtgggtttgtcagaaatagctcttattattttgagatatccatcaatacctagtttattgagagttttcagcgtgaagggctgttgaattttgtcgaaggccttttctgcatctgtttagataatcatgtggtttatgtcatcggttctgtttatgtg

SEQ ID NO: 953841 - DNA, 594 bp, Homo sapiens
gatatcaaataggtcattaaactgamtttaaatattcagatcacctcagaactcggaatgatgctgacccccaagaagcagacacagcttcctttgtggcaggacaagtttctgatctcacagacttgtcataacttgtattgtggctgtgcctgaaccatggtgcaatggttggtaactacttaaagacagtgccagccccccaccctctcagattcagtgaattgaggcaaataggctttttgaacttgaagaccttccttggtgaccaaatgtgggcttgggctttagctttctttactttcccttagctttggaaagcagcacagataaacatctgttctaatataaacaatacactttttatctgaatgtagcttcaagatacatcctggactttcccttctccctttcctggacccatcaaaccagggaatggaaatagttgtattattaaagacctttttagcaactcatgctgctttactgtttcacatatctcttttaatggctagaatcataaatttaatgtttaaaacacacttttacaccaaacccataggaacagacaagaaaacaactattaaatatgtg

SEQ ID NO: 953842 - DNA, 649 bp, Homo sapiens
acctctcaatccccccactaaataggacattgctattgggaactgggygatgaccactctagctaattattgctggataggggcgaagaaggggacttgcagttgtagtgtccttcagaggggaactctctaggccagtcagagagcctgtgggtcagtccaggggtcctcggtagaagttgtgagttgagctcatttgggatttcatttgtaagaccatctgtagcttgatggcctcaatcctggaggaaacaaatttgacaaggaggttaaaaatacaggacccaaaagcgaataatagcaagatggctgtcatgggacctagaaaggggagaagccatgtcgtccaactccagaggtgggtataagagtttgaaaggcattgtctgatttcagaagccttttcctgtaaactctgggcagtgtcttgtactatccctgactggttagagtaaaaataacattcttcccctaagaaggtgcagagtcttcctttctcagcagtgaggaggtctaggccttggcggttttggagagtcactgctgccaaagagtctatttgggattgtagagtaaggatagatcttgttatttcttgccaactctctgagaaatcctttgagagtgtgtggtagtaggataatcaagt

SEQ ID NO: 953843 - DNA, 589 bp, Homo sapiens
aacgtgttaggcggagaggcgtgtttcagccctgtttgtgttaaatctcttttagtctggccattggcggatcttgagttcctgtcctgcatccaggaagaatgaggtacgtggacaactggaaggtgagcaaggcagggaggagcttcactgagcaacagaatagctctcagaagacccacagtgtgtatgtagctcctttctgcaggcaggtcattggagtggggagggtgtctatgggctcaaagggaggaagtgagtgctgattggtccatgggctgccatgggccagccggaaaaagcatcataaattctcactccaggagggggactccacccggcaccggcagcccggcccccaggcttcaagccatccctggcttgaaggtggggtttcactgggcacccacccccttccgcccagggacctgtctgccttccacgttgcccaggctgttcaygttgaggggtgtctacaggcccgcagggagctgccctcagcaccccctgggctgcttcctgcgctcactgacgcccaaagtctggagggggccaaggcagcagggggcgctagcgtgtgagtgctgcc

SEQ ID NO: 953844 - DNA, 646 bp, Homo sapiens
taattagcagtaaaacttatgtaagcagtcccttgtgaagggctgtgtctttttgcgattatatcyggtgctatagtgtacatccttgtgtgtgcatcttggtgtgcctgtgctacgtatttctgtaggataaatctgtaaaagtggaatcactaggtcagagggtatgatccattttctttacttatttattttatttatttattcatttatttttgagacagagtcttgctctgtcgcccaggctggagtgcagtggcatgatcttggcttactgcaagctccgcctcccgggttcacaccattctcctgcctcagcctccggagtagctgggactacaggcgcccgccacccacgcctggctaatttttttgtatttttagtagagacggggtttcaccatgttagccaggatggtctcgatctcctgacctcgtgatccacccatctcagcctcccaaagtgctgggattacaggcgtgagccaccgcgcccggccccattttattacctttatttgcttggatccttcttagcttcttcaatgttaaagatattgagttttcctcttactgaaatttataaatccattgactcccttgatattattgccctggcctgactgattcttctctctcctttctc

SEQ ID NO: 953845 - DNA, 646 bp, Homo sapiens
taattagcagtaaaacttatgtaagcagtcccttgtgaagggctgtgtctttttgcgattatatctggtgctatagtgtacatccttgtgtgtgcatcttggtgtgcctgtgctacgtatttctgtaggataaatctgtaaaagtggaatcactaggtcagagggtatgatccattttctttacttatttattttatttatttattcatttatttttgagacagagtcttgctctgtcgcccaggctggagtgcagtggcatgatcttggcttactgcaagctccgcctcccgggttcacaccattctcctgcctcagcctccggagtagctgggactacaggcgcccgccacccacgcctggctaatttttttgtatttttagtagagacggggtttcaccatgttagccaggatggtctcgatctcctgacctcgtgatccacccatctcagcctcccaaagtgctgggattacaggcgtgagccaccgcgcccggccccattttattayctttatttgcttggatccttcttagcttcttcaatgttaaagatattgagttttcctcttactgaaatttataaatccattgactcccttgatattattgccctggcctgactgattcttctctctcctttctc

SEQ ID NO: 953846 - DNA, 629 bp, Homo sapiens
atttattaacaaccaacctataggccaagcatttttaaattagtgatcttaagtaatgagatgctaggsaaatcttgatgacctgatatttgatattcgagaatgagaagcagacataggcctacttagtgaattcacatgtctgagactccacgtggtggggacatggacgttagtagtagtaattagccttggatgagagaagaacagaaattcacatataaatgggaaacatccggcattggtaggtagagcttgtctagattgggactaatgaactacttttcaatctgaagccttcaggaatagacaggctcctgcttctgcaaataccaaatgaaaagccaacccactgttcttgaatttatagatccaatttacacttgctctttttaaccaatggaactagccggcccctgcatgccaagtttctatggcaatgtgatctcagtgacctctcttctctattgtggaatgtaggtgaaaagaacggaggggagcccgatgacgctgaactagtaaggctcagtaagaggctggtggagaacgcggtgctcaaggctgtccagcagtatctggaggaaacacagaataaaaacaagccgggggaggggagctctgtgaaaacc

SEQ ID NO: 953847 - DNA, 621 bp, Homo sapiens
gccatcgcatcccctgtgacttgcacgtataagccccgatggcctgaagtaactgaagaatcacaaaagaagtgaatatgccctgccccaccttaactgatgacattccaccacaaaagaagtgtaaatggccgttccttgccttaagtgatgacattaccttgtgaaagtccttttcctagctcatcctggctcaaaaagctcccccactgagcaccttgggacccttgcccctgcccaccagagaacaaccccctttgactgtaattttcctttaccttcccaaatcctataaaatggccccacccctatctcccttggctgactctcatttcggactcagcccgcctgcatccaggtgaaataaacagccatgttgctcacacaaagcctgtttggtggtctcttcacacggacgcgcatgaaaccggccttgcagagagtccctgtttccctcttttccttttcacccaagaaacgctgcccttctcacccttcaaatagtgtgcgagcctaattttttgtggtcgtgtgatgaggaccccatctttagttgaactaaggwaagtgtcttacaacagaagtgccagagaggtggccagcttggtatagaagtgaccc

SEQ ID NO: 953848 - DNA, 621 bp, Homo sapiens
gccatcgcatcccctgtgacttgcacgtataagccccgatggcctgaagtaactgaagaatcacaaaagaagtgaatatgccctgccccaccttaactgatgacattccaccacaaaagaagtgtaaatggccgttccttgccttaagtgatgacattaccttgtgaaagtccttttcctagctcatcctggctcaaaaagctcccccactgagcaccttgggacccttgcccctgcccaccagagaacaaccccctttgactgtaattttcctttaccttcccaaatcctataaaatggccccacccctatctcccttggctgactctcatttcggactcagcccgcctgcatccaggtgaaataaacagccatgttgctcacacaaagcctgtttggtggtctcttcacacggacgcgcatgaaaccggccttgcagagagtccctgtttccctcttttccttttcacccaagaaacgctgcccttctcacccttcaaatagtgtgcgagcctaattttttgtggtcgtgtgatgaggaccccatctttagttgaactaaggaaagkgtcttacaacagaagtgccagagaggtggccagcttggtatagaagtgaccc

SEQ ID NO: 953849 - DNA, 593 bp, Homo sapiens
gaagaggtaggaatacactgttctcaaggatagagatgcwatattaagcactaagagccagttgtgacaaatgtccagaaatccttaatgagcgatcccaagacacacaatgagaagattgtttctccccagataggatttggatttgtgtctccacccaaatctcatgcggaattgtaatccccagtgttggaggaggggcctgatgggaggtgattgcatcctgagggcggatatcccctttgctgttctcatgctactgagtgagttctcatgagatctgcttatttaaaagtatggagcacctcccccttgactttattccccctgctccagccatggaggacgtgcctgcttccccgttgccttcagccatgattttaggtttcctgcggcttccccagccatgcttactgtacagcctgcagaactgtgagtcaattaaacctcttttctttataaattacccagcctcgggtagttctttatagcaagaactatgcaaaaatggactaatacatccccctaaggtttatgttaggcatttgcagttagtacagggtttacaggtcttaaggaagagatggtgttgg

SEQ ID NO: 953850 - DNA, 819 bp, Homo sapiens
ggcttcacaaatttccttttcttttttcacaatggctcttatgctggattcacttaacttgaaatggcaggcaactgaagctgcagacctcaatccgcagtacatatcaagcaattcaacatcttcttataatgtcatgacttgtctttgcttgttagaagcatttccagcatcagcagtggcactcagtataggtcctacggttttattcaaggtttctgatattgccccaaacatgatgaaaaatatgcaagagctgtgagagatcacttttgactacagtatgcaatttactggagagaactgctcacgtggaggttgttagtgtcatgtggcattttcagcagatattcacaagacttgagctcacctcaatggtgacaaaaggtggctataaaattattacagtagtacagtattactacagttaatttaatgcagttatgacttagtactgcatatttatgtttgtttatatttcttgactgtgaatggcaccatgtttggtctatgtttgtatatgtaaattttgatgaattttaactttttataatagatttgtgcatagtttagggcagcaaatgataaaatagactagtatctacatatattgtatgcattcataatgtatctaactttttcttaatttttaaaaatatttctaggctatgtggttcatctgtgagttttttttttcaaattgtcaaaaatctccccctaaattttccaacatatgtttttaaaggcctgcatacayatagacccatgcagttcaaacccaagggccaaccgtattatataaaatgaaaacgcctgcag

SEQ ID NO: 953851 - DNA, 612 bp, Homo sapiens
atgaagatgattacaagattaaagatgactttgaaggttgctgagggatagctacattcccctttctcccccctctgccatctctgctttaataagagaagtgaagaaaataaactcagacaattaaaaggcaataaagagttctccaaaagagctttcgataaaaagcagggaagaaaacatgttataactttggctttccattaagaaatagccctgctaatcaaaactagaaggcagtacaggaaggagctttctataggaagatttaggtatatctatagaatttagggaaataaactaggtaaaatattagcctttggaaaagctagaaacacctaggtaataaatgtcaaaagtaatgtcaatgtttagtagaatagtggaattgatttggacagagaagaaaatctgtagaagtatgaagaataaacaattactatcattgttaaatagcctgagtgtttaggtattcaaattaagttatttaggttatgctttaactcttttgagaaagctttttktgggggactatataatacgagcaggaaaagtaaaatgatctgtcgtacttccttttataatacagttatgaaaatcagtctcgattgc

SEQ ID NO: 953852 - DNA, 612 bp, Homo sapiens
atgaagatgattacaagattaaagatgactttgaaggttgctgagggatagctacattcccctttctcccccctctgccatctctgctttaataagagaagtgaagaaaataaactcagacaattaaaaggcaataaagagttctccaaaagagctttcgataaaaagcagggaagaaaacatgttataactttggctttccattaagaaatagccctgctaatcaaaactagaaggcagtacaggaaggagctttctataggaagatttaggtatatctatagaatttagggaaataaactaggtaaaatattagcctttggaaaagctagaaacacctaggtaataaatgtcaaaagtaatgtcaatgtttagtagaatagtggaattgatttggacagagaagaaaatctgtagaagtatgaagaataaacaattactatcattgttaaatagcctgagtgtttaggtattcaaattaagttatttaggttatgctttaactcttttgagaaagctttttttgggggactatataataygagcaggaaaagtaaaatgatctgtcgtacttccttttataatacagttatgaaaatcagtctcgattgc

SEQ ID NO: 953853 - DNA, 617 bp, Homo sapiens
aaggcgctggattttccagaggacctggagtggggattcaggccagtgttacctaggtcttaacggcagggagagcccagcccacatctggtttacatatccttttcccctttatcatcttctctacaaaacctttgctgagcctttccaaatggtgatccacccacggcaccacattttaataatttcttgtaagacatttaccctattctgccctgatttatagttatctgtacatctgccttacacagtatactagatcgtgcactctttagggactctggccttacagtgccaatgatagtaaatgctcaatggtaatttattgaatggaatttctttctcagccatcgtcctctattctcctagaggcttttagttgggatgagtcacactgttgacacatagcaaatattaacaatgacaatgaatgtgaacaccaggggtatttcatatttgcaaaaaaataatatctggagtgcttgcaagtaggaaatcatatatatgtgcttggggtgggatggggaaggcaggcttcaccactagttattttacygctttctcaactgacaaagatccacatggaatatactttcatcccctatataaaattaatt

SEQ ID NO: 953854 - DNA, 606 bp, Homo sapiens
gaagcacacttcccttctgacatcttcctccccaaaatcaataagctcagtctaatacgaggaaaacatcttgcaaaaacccaaattgagggacattccacaaaacacctgactataccttttaaaactgtcaatgtaggccgggcacagtggctcacatctgaatcccagcactttgggaggccaaggcaggtagatgacttgaggtcaggagtttgagaccagcctggccaccatggagaaaccctgtctctactaaaaatacaaaaattagccaggcgtggtggcaggtgtccgtaatgccagttactcgggaggctgagccaggagaatagcttgagcccgggaggcagaagttgcagtgagccaagatcacaccactgcactccagcccaggcaacagagcaacactccacctcaaaaacaaacaaacaaacaaacaaacaaacaaacaactgtcaacgtcatcaagaccaagacaagtctgagaaaattgtcacagatcaaaaaggyctaagaagaaaactaaatgtaaggtggtgtcctggatgggaccctggaccagagagggacattaggaaaaaatgagtgcagtttgaattagcc

SEQ ID NO: 953855 - DNA, 620 bp, Homo sapiens
catgcctcacatctagggcacatgggcacatggatgtgccattggctcaaccaccctgggatctggaggatggtggccttcatctcatagttctactaggcagtgacccagtgaagacactgtgtgggggctccaaccactcatttccactccatactgccctagtagaggtttcctgtgaaggcacaacccctctcagcaggcttctgcctggacacccaggcttttcagatatatcctctgaaatctaggtggaggctcccatgcctcatctcttgcattctgcacacccacaacattaacacatagaagtctccaaggcttacagcttgcactctctgaagcagtggctggagttgcaactgggccctttaagccacagctgagactggagctggagtgtctgggatgcagggagaagtttcctgaggctgtacagggcagtggggcttcaggcctggcccaggacaccattctgtcttcctaaacttgtgggcatgtggtgggaggggctgcctcttagatcccctaaatkcctttgaggccatttcccattgtcttggctatcagacttgcttcctttttaggtatgcaaatttcaaagcctgcttgaatttcta

SEQ ID NO: 953856 - DNA, 619 bp, Homo sapiens
attctgatataaaaccagtgactattgtatatggttttttaatcttctctaatttaacattaaatgtttttcagatgaagtctcactttgtggtccaggctggagtgcaatggtgcaatcgtggctcactgcaacctccgccacccagttcaagtgatcttcccgccttagcctctctagtagttgagactacagacgtgcaccaccacgcccggctgatttttgtatttttagtagagacagggtttcaccatgttggccagtctggcctcaaactcctgacctcaggtgatctgcctgccttggcctcccaaagtgctgggattacaggcatgagctactgtgcctggccatctaattaacattaaattgttaagtttaacatttaatttaccaatttaaaagcactaatatgcccctattcctatttgttattaactttaaacatttcttcagtatactgttaatgttctagtaccttccttgacaccttgtggtcaactaagttcaatcattcaaaaatctgaatacacatcataattctcatcaggatttttcaaataggctttcttttcaattacagaaacaattacctataytgagtcttcattccttccac

SEQ ID NO: 953857 - DNA, 718 bp, Homo sapiens
ttcatttcttttatgctcttcagtagtattccatggtgtatatatagcatgttttctttatccactcattgattgwtgggtacttagattggttccacatctttgcagttgtgaattgtgctgctataaacatgtgcgtgcacatgtatttttcatataatgatgtctgtccttttggatagatattcagcagcaggattgctggatcaaatgatagctttacttttagttcttcaaggaatctgttttccatagtgattgtactaacttgcagttccacaaacataaaagtgttttcttttcaccacattcacaccaacatctattgttttttgactttttaattatggccattcttgtaggagtgaggtggtatctcattgtgtttttaatttgcatttccctgataattagtgatgctgagcattttttcatatgtttgttgactgttggtatctcttcttttgagaaatgtctattcatgtcctttgtccacttttttatgggatttgtttgagtttcaggaaatttttttaaagctttccttgtaacttttgtttctaattaattcttccaggtatcaaaagtcattgaaggaaacacatatataaaaatactttcaaaaatgaattagaggttaggattttatctagagtaaaatatttgttgggggcagtaatacataacagtcaacttagttatcaaatgctgcttaaac

SEQ ID NO: 953858 - DNA, 627 bp, Homo sapiens
agatatgtaagggtgagaattgcagcctttggggcatggatatgaggtgcccaagacaaaaacctggagttcgacctgtctggctatctttcacccaacctagctcaatctgtcattatatctcmtaaataacctctctattcacaccttcaccctttaattcagattgtccttcttattcagataatggcaagcattgggattcttgccttcaggcttcccctctgttttgcccatgcctgtgatgtgactggccataggcactgtccactgcatccttcacagtgctattagggtgatgctacaaaaacacaatctgattttatcacttctgtctcaggatggggttttctgagaagcagattcctagatggaaatttgcatgcaggaggcttattgctaaggtttactgcacatctatgaaggagtgaaataaacaggattgggcagggagagaaactagactgcaatgaagtccccacacaggcctgagctcatcagccataacctatcagcctgaagctgggaaggctctgcagagagttgtcccaaattgaaatgagagtaagccttaacactctgcatagatcagtcattgaatgggagctgcccttggaagcatgactt

SEQ ID NO: 953859 - DNA, 598 bp, Homo sapiens
ggctgtatcctgcaaagccacaggggcagagctgcccaagaccatgggaacctccctcttgcatcagcatgacctgtatgtgagacctggagtcaaaggagatcattttggaactttaaaatttgactgtcccactggatttcagacttgcatgggccctgaacccctttgttttggccaatttctcccctttggaactgctgtgtttacccaatacatttaccccaattgtatctaggaaggaactagcttgctttggattttacaggctcttaagtggaagggacttgccttgtctcacgtgagactttgcatggtggattttgggttaatgctgaaatgagttaagactttgggtgactgactgttgggaaggcatgattggttttgaaatgtggggacatgagatttggaggggccagggaaagaatggtattgtttggctctgtgtccacacccaaatctcatcttraattgaactcccataatttccacatgttgtgggagggacctggtgggagataatttgaatcatgggggcagtttcccccatactgttcttgttatagttaataagtctcagatctgatggttttat

SEQ ID NO: 953860 - DNA, 579 bp, Homo sapiens
ccaagtggtgactccaagtgcagctgctgtaccacatgtagtttcattgctggaacaaattaacacatctcctgtacctggtatttagtcaytactttggcaaatgcttatttctccattcctgtccataaggcccaccagaagccatttgccttcagcaggtaaggccagcaatataccttcactgtcctacctcatgggtatatcaactctccaactttgtgtcataatcttgtttgcagggctcgtgatcacttttctcttccacaggatatcacactggtccgttacattgatgacattatgctgactggacccagtgagcaagaagtagcaaacacactggacttatgtactgatccatggactatagccaatggtttggctggatggtcagggacttggaagaagcatgattgaaaaattggtgacaaagaaatttagggaaaaggtatttggatggatctctctgagtgatcaaaaactgggaagatatttggatcccatgtgagtgctcatcaatgggtgacctcagcagaggaggattttaataatgaaatggataggatgactaataca

SEQ ID NO: 953861 - DNA, 588 bp, Homo sapiens
tctttgaaaccactaaaatctttagtttatctrtttttgcttttattgcttatctttcggtgtcatatctaagaaaccattgcctcatccaaagtcagaaagatttacattttttaaagagagttttatagttttagctcttacattaggtcaatgatccattttgagttaatttttatgtatgacataaagttcaggtccaactcattattttgcatgtgaatatccagttgtctcagtactgtttattgtaaaaggctattctttcccatagaatcatcttggcattctttgcaaaaatcagttaaccagaaatgtaaggggttctttttggattctcagttctattctgttgatatatttccatcctatgccagtatcacaatgtcttagttactatagattttaagtaagttttgaaatagggttgtgtgagttctccaactttgttcttttttcacataattattttagggattctgggtccttgaattgttatgtgattttaaatattggcctatcaatttttgcaaaaagtcatctggtatttttatagagattgtgttaacaatattaagtcttctaatc

SEQ ID NO: 953862 - DNA, 652 bp, Homo sapiens
tagactgctggcctaccctgtggatttcagacttaaaactgcaacatcgactcttttcagtttccagactgcccggcaaatttcagactttccaccccacacarttgcatgagccaattccttaaaacaaatctctgtatctctatatattctctacataatttctatatagccctgtgattctgtttctctggagaaccctgactaatacagagggctccagggaggatgaccctggagaaaaaaatggagctgataatgaattgtgagtttgaccataacctgagaacattttttcagttttgacaaagaggttgcagagaagtcagtgatagctatttaaaaatgaaattatgtaggagaaaaaactgaagctattgttaactccagggaaaacaaaaagtggtacatgaagataatctgacacaattgtaaacactgactattgatttaaaagggatggcagtggtagaagaagttgtggtataagtgagttaaatcctcatcttaattgaggaaattaaaaagattaaaaaataaaaacttaagaaatagcaatgttatttcaaaacaaggagataaatggcagaagaacaactaaaagcttgtaaagcatctgcttctgctgagtgaatctggtgggagtgggtgg

SEQ ID NO: 953863 - DNA, 533 bp, Homo sapiens
aggctggtctcaaactcctagactcaagccattctcctgcctcggtctctcaaagtgctggaattacaggaatgagccwtagcgccaggcatgctacttttataagtaggtttgtttacaccagcatcacacaaacacatgagtaaggcattgtgctacaacattgcaatgaccatgacatcactaggtgataggaatttttcaactcctttataacctcatgggagaaaccaccatcttttttttttttttttttgagatggacctttgctcttttgctcaggcttaagtgaagtggcatgatctcagctcactgcaacctccccctcccaggttcaaatgattctcctgcctcagcctctgaagtagctgggattataggtgcctgctatcatgcccggctaatttttgcatttttagtagagacggggtttcgccatattggccaggctggtcttgaactcctgacctcaggtgacccaccggcctcggcctcccaaagtgctgggattacaggcatgagccaccacgcc

SEQ ID NO: 953864 - DNA, 658 bp, Homo sapiens
gggcgcctgtagtcccagctacttgggaggctgaggcaggagaatggcatgaacccagaaggcagagcttgccgtgagccaagatcacaccactgcactccagcctgggcgacagagtgagacgccatctcaaagaaaaaaaaaaaaaaggaaatgtctaaaaaccatctgaaatgatctgaaatgtaacatgtctgaaactgaactccggatctccccaacttaaaaatccacatgtctaggccaagtgaagtggctcacacctaaaatcttagcacttcaggaggccgaggtgggtacttgagcccaggagttggaggccagcctgagcaacatagcgagaccctgcctctaaaaagaattttaaaaaattagccaggcatggtggcgcacacctgtagtcccagctacttgagaggctgaggagggcggatgcttgagcccaagacgctggggctgcagtgagccatgattgcactactgcactccagcctgggcaacagagcaagaccctatctcaaaaaaaaaaaaaatctgcatttccacgacctagrttttcctccactcacctgagggtagctgcatccttcctggtttaggtcaaaaaccctagcatcacccaggtgcagggggatcactggaggtcaagagttcaaga

SEQ ID NO: 953865 - DNA, 608 bp, Homo sapiens
tctggctgggatctagcccagacccctcccagatgggcaattcttcctaggctcttccaagcctcagtttcctcacctgtgaggcaatatcttcctcttactgattttgtgtgggttaagaaccaaggtrtgtaaagacccagtactgtgcctgacacattcccagtgagcccccagccagtgggacctcacaggtcagtgctctgccatggcacagagaccctgttggtaaaggtcaggttgtgctgtgccccacatagctccagagcatgcaggttactcagtagggcagtaaggtgtaagcacatggtcttgagggaccttcccaaactcccccatacataatttccttagcaaatgccctctgctttcccgggccctatggcaggtctgattttgttctactgattccccacgggccacgtgcatcagcttcagaaacacaggagctggtgttcacacacacagagtccttggggaggctctcccagcccacaggcagtgagattcacaggtgccttggaatttatcaatcacacagtggctcgtaggaaccatggccatgacagtcccttctctgaaggacgaaagtgcctagtgcaagttgc

SEQ ID NO: 953866 - DNA, 532 bp, Homo sapiens
gttctgtgaagaatgatggtggtattttcatgggaattgtattgaatttgtagattgattttggcagaatggttattttcamaatattgattctaccaatccatgagcatgggatgtatatccatttgtttgtgtcatatatgactcctttcagcagtgttttttaatttccctgtagaggtcattcacctcctttgttaggtatatgcctaagtattttatttttttgcagctattgtaaaaggggttgagttcttgatttgattctcagcttggttgctgttggtatatagaagagctactgatttgtgtacattaattttgtatcaataaactttgctgaattattttgtcagttctaggagctttctggaagagtaaagcattctatgatctattatcgtatcactctacctttctacctcttttcctcatgccccattctttttagtcttgtttactcctctttataaaataatttggtttccctaacccttcagactcttgcagatcttgtgtctagagagttctc

SEQ ID NO: 953867 - DNA, 221 bp, Homo sapiens
aaaggcacccaacagaaatttgtggagcattatggtaaatgaagagatagaggtttgcataagttatgttgagaggtcygagtgggggcttgtacattgtcttgggggactagggagaaaacccctggagaggtgggctggccaggatacccagggcacctctgctgacccagggaccttgagttttacccgctgtggaatggggatttgaaacagcatgt

SEQ ID NO: 953868 - DNA, 618 bp, Homo sapiens
tttctggagaatcttgactaatctactacccttttgttctatttgaatttatttttaaccatattatttcacaaaagaagatattggatttcagggtaagatagatgtggggcaaactctttgatgcctcctcattcaatctctgagccatgcgatcatggggactgctagtcgcacagacagtttggaagccactggagtatgtcaccttgtggcttccaaccagacatgtgctaactagattccaattccaagagttacttttggctcccaaattgtgtcagttgtaaaaatttaaaataccttttagtgataatctgggacctatcatatatcatcaggaaatcattaaattgctgtagtggaatatgtgatattgtctatacaagcacttaatcttttgaagtgcagagatgactttggggtatcctaagcaactgtttaatctgagtcattagtagggatagatctagccacttaagagctgtctcatcctggcaaacccccyacctttctgggcctcatttcttcttgaaaatgagaaagttagaagtaagttgtcttttaaatttactctcaagttccacaaagtaaaaagccccatgaatattgcactgc

SEQ ID NO: 953869 - DNA, 612 bp, Homo sapiens
cctcttgtatccccccaccttaacccacaagtataagatacctctactccctccttggtgaccgatcatgcaccccttaccatctcattaaaacctaatcacccttagcctgctcaaygccaatatcccatcccacagcactctttaaaatgattaaagcctgttatcactcacctgttacagcatggccttttaaagcctataaactctccttataattcccccattttacctgtcctagaaccagacaagccttacaggttagttcaggatctgcgccttatcaatgaaattgttttgcctatccaccctgtggtgccaaacccatatactctcctatcctcaatacctccctccacagcccattattctgttctggatctcaaacatgctttctttactatccctttgcacccttcatcccagcctctcttcgctttcacttagactgaccctgacacccattaggctcagcaaattacctgggctgtactgccacagggcttcacagacagcccccattacttcagtcaagtccaaatttcatcctcatctgttacctatctcggcataattctcataaaaacacacatgctctccctgctgatcatg

SEQ ID NO: 953870 - DNA, 554 bp, Homo sapiens
gtgtatatatgtataaatagtatattatacataatagagattcattatagggaattggctcatatggttatgcaggcttagaagacccaaaatctgtagatggcaagctggagacccaggaaggctcatgggatagtctgagaagcaggaaagctaatggtgtaagttccagttcaaatcctagtccaaatccaaaggcaggagaagattgatgtcctagtttgaagataaccagagatcccttactcagccttttgtttcattcaggccttcaatggattggataaggcccaccctcattggggaaggcaatcagctttactcagcctgccatttccagtgttaatctcatcaagaaacactcacagacacaaccagaataatgtttaagcaaatatctaggcacactgtgtcccaggctagttgacatattaaacatttctgkttttttttttaaggcagagtctcactctgttactcaggctggagtgcagtggtgccatctcagctcattgtaacctccacctcccaggttcaagtgattctcctgcttc

SEQ ID NO: 953871 - DNA, 605 bp, Homo sapiens
ttgggccaacatgactttgagagacattcagactatagtttaataggcctcccccaaaactcaaccactttataaagctaatgtaaggccatcaagctgggggaggagaggagcctgattctgctaacctgtaggcatagactgccagccattcctgcagagaacaccactattgtagattaggcttttgagatatctttatagggtttttgtttgtttgtttgtttgtttttttaatgtctgacacccatggctccacttagacccaccaaccctgctcctgtggccccacccagaagtgattcagcatgcaggaggacagcttccaccgtctatgatttcatcttcgtcccgaccaattagcagcaagcctagctcccccaacacttcccccaaactgcctctgaaaaactctgaacctaggagctttggaggagatgatttgagtgctaactctgtctcccacatggtgtggctggcctagtgttaaactctttatttactacaatgtcatggtctttatttgtgcagtgagcaggaagaaacccttgggtggttacagcagtaraagttccattttacagattaggcaatatagccacgat

SEQ ID NO: 953872 - DNA, 583 bp, Homo sapiens
ccagtgttggaggtggggcctggtgggaggtgtttgtcatggggcaagtccctcatgagtggcttggtgctgtcctttcggtaaagagtgagttctcacactattagttcacgygagagatggttgtttaaaagagcctggcatctctctgtttcttcctctcttgccatgtgacatggctgctccccttcagcttccaccatgactggaagcttccccaggctctcaccagaagcagatgctggcacgatgcttcttgaaccatctacagaactgtgagccaaaataaacctcttttctttataaattacccagcctcaggcattcttttatagcagcataaaatggacaaatacagtgactatgtgaggtgttggatatattagcttaattatggtaatcatttcacaatgtatacatatatcaaaacatcacattatataccataaatatgtataatacttttctattataactcaataaagttggaaagaataaagtgtttgcttaatgaagaaacagaaaaagtgtaattttgggcagtaataggagaaaaacatcatatactagtgaactccaataa

SEQ ID NO: 953873 - DNA, 595 bp, Homo sapiens
ggccaacatagagctcaagctgtggcttcagagggtgtaagccccaagccttggcagcttccatgtggtgttgagcctgcaagtgcacagaagtcaaggattggggtttgggaacctctgcctagatttcagragatgtatggaaacacctggatgcccaggcagaagtttgcctgtacccccatcgtatctaggaagtaactaacttgcttttgattttacaggctcataggtggaacggacttgccttgtcttggatgagactttgaactgtggacttttgagttaatgctgaaatgagttaagactttgggtgactcttgggaaggcatgattgtttttgaaatatgaggacatgagatttgggagggaccggggcggaatgatatggtttggctctgtgtccccacccaaatctcatcttgaattgtactcccacgtgttgtgggagggacctggtgggagataaatgaatcatggggcagttttccccatactattctcttggtagtaaataagtctcatgagatctgatggttttttaaaggatttctgcttttgcttcctcctcattctcttctcttgtctgccgcca

SEQ ID NO: 953874 - DNA, 562 bp, Homo sapiens
atgagaatctaattcctgatgatctgaggcggagctgaggtggtgatgcttgctctggggagcagctgcaaatacagattaacattagcagagacatttgactgcacagagaccataatgttaaatcaattgcctgcagactcatatcaaaaccctatcagtgagtggcaggtgacaatgaagctgcatctggtggcagtctttatagtggcaagtgagttgatgtacttcagttgtacagctgcatctggtgtccttaaaagtatgtttgaggcaacttcaaatctccatatgttctggattacagtcaaggcagaatatcccgagattgccgagattgccaagaaagtactgaaaatcctgcttccatttccaacatcctaactttgtgaagcagggtattctgcagtgacagcaaccaaaacaagattatagagtaaactggacataarcaacacactttgggtgtcactgtctcccatcacccccagaagggaccttccagttgcaggaaaacaagctcagggctcccactgattctacattatggtgagttgtataa

SEQ ID NO: 953875 - DNA, 742 bp, Homo sapiens
aggggcaaggcgggcccagcctgccacactcccactattctctaatgtctccctgttcccacgccaggcacacgycactctagtgcacttccccctacccctgggggtgtctctgaatctgctgccctgccctaaagctttagctccctgggcctcattccctaagaacaagtcacctcctccaggaagtcttccctgaaaccttcctccctccaacccttgcctcctcagttaggtgcccactctgcactccacggtaactgtgtggaccccatcaaagcacccatcaatctgccacaattgtttggttacctgtgtgctgccacctccacactgagatccctgagatcagggacattccgttagtggcctcatggccttggctcctaatgagcacacaagcaggcagcctccttcctactgaccactggggactgtgggttatcgcctggcattggcttcctgtgagcctcggccctcctagaaatctgggctggggggcagtccctccccatgagtggaggaatgatgggcagacaggcaggcccctggggctcagggccttggcgccctggcctgagctcaccctcctggtcctccctagagtccagctccatccagcacgaggggccacatgcacttcacctcctccggggaggccccactgcgtgagaccccgggcacctaggttgcagcacccagatacagagaatttccttctggagaccaactgccctggatg

SEQ ID NO: 953876 - DNA, 609 bp, Homo sapiens
tgacaaaatcccatctctacaaaaaatacaaaaattagctgggcatggtggtgtgtgyctgtagtcccatggccttagggctttctgggagggtgaggtgggaagataacctgagcctgggaggttgaggctgcagtgagccgtgatcatgcactccagcctagacaacagtgggatccccatgtcaataaataaataaataagttctgaggaatctgtacaagaaaaatctcacagaactaataactgagctcagtaaagtgacaagatacaaaaaaaaccatgaataattcattatatttctgtgtgtctacagatgaacatgtactgaaatatatactgatattaaaactgtatcatttataattgttaaaaactgaaataatcaagtgtaaatctaacaaaacatgtttaagagttagatgctgaggactacaaaatgctgataaaagaaataaaagtgatctaagtaaatagagagattccctgtttatagattggaagaatcaggatagtaaacatgtcatttctcttcaaattgatatacagatttaagcaattcctgtcaaaattccagcaaggcttttttttttgtacatgtaaacaaga

SEQ ID NO: 953877 - DNA, 587 bp, Homo sapiens
tatggggcaaaactccttctgcttgagaaaaacagagggaaaagtaaagtggactttgtcttgcaccttaagtaccagcatggccacagtggggtaaaaagccaagcaggcttgtggggctcctgattatagatcctgactcttggatggcatttctggacctgccctgggacagaggggagaccacttccctgaagggtgagtcccaagccaggcagtattcatgccaagctgacttaaaagaccttgggctgtaagggaacatcaggagtagtctgttggtactcctcatggcctgggttggtggtgcctatagggtgagactcctctgcctttgaaaaggggagggaagagtgggaaggactgtatcttgtggtttgagtgccagctcagctacaatacagtagaataccaggtagacttctaaggtctttttttactttagtcactgactccagacgccacttctgtacccacccagggcctaggggaccttatcaccctgaagggaaggasacaggcctggctcactttgccacctcctgattgtagagtcccagggccttgagtgaacataggcagtagcc

SEQ ID NO: 953878 - DNA, 649 bp, Homo sapiens
cccacttcttatgtaaaccctgtgctcctgtcaatctggactacaggatgtgttccatacacaggcattcatatcttgcctcatgtttctggccatgcctgaatgctatacatagattgcagaagagataaaattttatccatgaagcaccagtgcctaggctgcccacagcgacctcagaatggtgaccccaccatttccttcttctagtatgttgccatggctccttccaggtaggctgatgggaagtcagcctgccctctgctgtagtcataacgagctgaactgatgaccagtgctggggcccaaggtgactgcactctggttggacatctgggaaatgaactgcccctgggaatgcttggcttgaaactgtccaacaggatagctttcaatttgatggcagccaaaaaacctacagagctcctctctttaagaagtgtcagggggtggccaggcgcagtggctcacgcctgtaatcccagcactttggaaggccgaggcaggtagatcacgaggtcaggagatcgagaccatcctggctaatatggtgaaaccccgtctctacaaaamatacaaaaaattagccgggcgtggtggcgggtgcctgtagtcccagctactcaggaggctgaggcaggagaatggc

SEQ ID NO: 953879 - DNA, 790 bp, Homo sapiens
tccatctggtcctggacttttttttgtwggtaatttttgtattaccatttcaatctcgctgcttgttattgatcagggtatctaattcttccttatttaagctaggaggactgtatctttccaggaatttgtccatctcctctaggttctctagtttatgcatgtaaaggtgtcaatagtagccttgaatgatcttttgtctttctgtggtatcagttgtaatatctcccattttgtttctaattgagcttatttggattttctctcttcttttcttggttaatcctgctaatggtctatccattttatttatttttaaaagaatcagctttctcttttattcatcttttgtaatttttttgtttgtttcaatttcatttagttctgctctgatcttggttacttcctttcttctgctgggtttggatttggtttgttcttgtttctctagttccttgtggtgtgaccttagattgtcggcttttgctctttcagactttttgatgtagaaatttagggctatgaactttcctcttagcaacacctttgctgcattccagaggtttcaacaggttgtgtcactattgtcattcagtttgaacaattttttaaattttcatcttgattttaccgttgacccaatgatcatttaagggcagtttatttaatttccatgtgttcgcatagttttgaaggttctttttggagttaatttccagttttattccactgtggtctgagacagtgcttggtataatttccattttcttaaatttattgaggcttgttc

SEQ ID NO: 953880 - DNA, 761 bp, Homo sapiens
agcccccacgcaggtgaacaatgcgcatggcatcacgtgcatttttctttgctttttttttttttttttttttttttaaattaaggctgttcattgcttagagaatcatggctgcaasctgaggataatgtgggaagagaaacctctctggcctgagctcagagaaaacaactaatgttgggcagcaattgtgacttctcaggagcccagcagcattctcagatgtcgggtgtccagtgatgcccagagaatcgagaattaaagaccccacaatcatcccagcatttttaaaagcatttccctgttctcttccgctgtttaaatttgaacgttctttctcctgatggtgccatctgcttccctcacaagggccccatctccagtgacgactgcagcctctgtttctaaccccactcactccacatgaggagttttttaagtggactgatgtgagggaaaatgtaataaagttgcttggattcaaagagcaaagcagagaggacgtgaatgagtcacatcccaaggctccctcattcgagctcccattcagcaattgccaaacccagcatccaccctccacgcgatcattactgggttttggtcagtaccagaaaggaggtggttgggacggtctgtgatgctcagcttttctgagagaggatgaaagaagggagagaatgaaagctgtcttcccactgttgagcttgtcaaagccaatgtgtaattaattctctcccacgtggtctcagaggaccgttccc

SEQ ID NO: 953881 - DNA, 838 bp, Homo sapiens
ttcaagagaccttctccccgcgtgcacttgcccacacttcctcttctgagaaggacgttagtcttattaacttaggcccaccctaacaatctcattttatttatttaatttcctccatctttcttaaggtataactgacagagaaaaattgtatatattcacagtgtataatttgatatcttaatatacattgtgaaatcatcaccaaaatcaagctaatttacacatccatttccttacacagttaacattttctttctttttttggtggtgagaacactgaagaagttctcttgggccaatttccagtgtgtgacatggcactgtgaactgtttaggcaccgtgatgagctcactcgcccagcgtctccccatctccctcatcctggatccggtggccactgtgctgctgtctgctcctgtgggttggactgttttaaacgggtcatagaggcagcgtcatgcaggacccgtccctgtgtgcctggcttattcacatagcatgatgtcttccggcttcatccacattgttgcgagtgacaacatggccttctatccatatttaaggctgaataatatcctgttgcatgtgatgccacgttttctttatccatgtatctgttcacggatacttagtttgcttccatgttatctgggtctatttaggctgctatgacaaaatacctgagacggggtcatttattaatataaacagtagaaatttatttcacatagttctggatgctgggaaggtcaagaccaaggcayctgcagatgtggagtctgccgagggctgctctctgctctgtgactggagtcccgtggctgtatcctcgcg

SEQ ID NO: 953882 - DNA, 441 bp, Homo sapiens
caggaactggagctgcgtgcggtgcttgcgggccagcgcgagttccaggtgggtgtgggctcggcgggccctgcactyggagcgcctgaccggccctggggccccgggcaatgagggacttagcacccgggccagcggctgtggagggtgtgctgggtcccccagcagtgccagcccaccagcgctgtgcttgatttctcaccgggccttagctgcctccccgtggggcagggctcgggacatgcagcccgctatgactgagcctatccccccactccccgtgggctcctgtgccgcccgagcctccccgacgaacgctgctcccggctccacggcgcccagtcccatcgaccacccaagggctgaggagtgcgggcccacggcactgggactggcaggcagctccacctgtggcccggtgcgggatccactgggtgaagc

SEQ ID NO: 953883 - DNA, 564 bp, Homo sapiens
tgtgtgtggcaactagcagtrtatataagggaataggctgtgggccctccaagttcgggggcaaatgccggaatcaatggtccccttaaaggaagtggcaggaaagggggacccagtctaataggcaggagagatgcctctaagttctcatctctggccaccagcttgagccatgtaggtgtggtgtcagactggaaactgccaggggtcactgagccctgcttctgcaggagaaagttaaacttgcattcagaatggatgctgaggcaacacaaaattataagaatgcattataggtctgaccgaaccaggtgagcattctgaaagaaactctaggggtcagaaagctgaagaaatcagctagcctcgaagaaatgagctgacctgagttatacagctgcgatgtaatggattcagccaacaaccctgtgaacatgcccaagaacccagcctcagaggagcccccagccctggctaacactcttgattccagccttgtgagatcctgagcagagaactcactaagtcatgcctggaaacctgcccatagaaaccacgagataa

SEQ ID NO: 953884 - DNA, 660 bp, Homo sapiens
cactgggtccctcagaagccccaggacaggagcaggggagcccagagctaggctggcttcagatccaggataagatacagcaggagaggacaggaacagatgggggtgcaggggggagtgaggtcaggacaggttgacaggctggcagggtcaagaggtagagggactggaggaggcatggagggtctgaaaacagaggggcccccatggcctttcccgcattccaataccatgtgctaaaaatactggatgagcataggccaggtgtggtggctcacgcctgtaatcccagcactttgggagaccgaggcaggccgatcatgaggtcaggagtttgagacctgcttagccaacatggtgaaaccccgtctctactaaagatacaaaaaattagccaggtgtggtggcacatgcctgtaatcccagctactcggcaggctgaggcaggagaatcacttgaacccgggaggcagagcagtgagctgagatcacaccactgcactccagcctgggcaacagggtgagactctgtctcaaaaaaataaaataaataaaataaaatactgggtgartgaatgaaccccacatgattccttgtgtcagggttgccaactggcaactcatgcacctaattcatccagcgcacagattttgtttaga

SEQ ID NO: 953885 - DNA, 580 bp, Homo sapiens
caccctattactcctaattgtaacttgtacccattaaccagtctctccccattcttcccttcccagtctctactaaccacagctctattctctgcttctattatatgaatgttttcattttaccttagattccccatataagtgagattgtgcagtatttatcgttcagtgtctgtttttttcattttatatgatgtcctcctggtccatccatgtcattgcaaatgaaatgcttttatccttttttatggctgaatagtttttcattgtgtatatatactacattattaaaaatctgttcatctgctgttggccactttgattctgtatcttggctattgtaaatggtgttgtaataaacatagaagtatagatatctctttgatacattgttttcattttttctggatttgtacccaggagtgggattgctggattatatggtagttctatttctaatttcttttttaagasacagggtctcaccctgttgcccaggctaaaatgcagtaacatgatcatagttcaccgtaaccttgaactcctgggctcatgtgatactcccacctcagcctcccaa

SEQ ID NO: 953886 - DNA, 580 bp, Homo sapiens
caccctattactcctaattgtaacttgtacccattaaccagtctctccccattcttcccttcccagtctctactaaccacagctctattctctgcttctattatatgaatgttttcattttaccttagattccccatataagtgagattgtgcagtatttatcgttcagtgtctgtttttttcattttatatgatgtcctcctggtccatccatgtcattgcaaatgaaatgcttttatccttttttatggctgaatagtttttcattgtgtatatatactacattattaaaaatctgttcatctgctgttggccactttgattctgtatcttggctattgtaaatggtgttgtaataaacatagaagtatagatatctctttgatacattgttttcattttttctggatttgtacccaggagtgggattgctggattatatggtagttctatttctaatttcttttttaagagacagggtctcaccctgttgcccaggctaaaatgcagtaacatgatcatagttcaccgtaaccttgaactcctgggctcawgtgatactcccacctcagcctcccaa

SEQ ID NO: 953887 - DNA, 573 bp, Homo sapiens
acaacacaggtttgaactgtgtgggcccacttacaygcagactatcttccacttctgccacctctgagacatcaagaccaaaccctcctcctcctcctcctcattctattcaacatgaagacaatgatatttatgatgattattattttttttgagacagaatcttgctctgtcatccaggctggagtgcactggtgtgatctcagctcgctgcaacctccacctcccaggttcaagggattctcctgcctcagcctccagagtagctgggattacaggtgcacacgactatgcccggctaatttttgtatttttggtagagacggggttttcaccatgttggccaggctggtctcaaactcctgagctcaaatgatcagcctgcctcagcctgccaaagtgctgggatcacaagcatgagccactgcgcctggctgatgatgactgacctccacttcatgaatattaaataaattttctctttcttatgattttcttaataacattttttctctagcttaatttactttaagaatatactatatgcttatatatactacatacaacatacac

SEQ ID NO: 953888 - DNA, 445 bp, Homo sapiens
cctctaaggtttcggggcaaggacctgccatcttctgtagataactactcttcttttgagagacagcttttggcctgttactgggctttggtagaaactgaacatttgactatgggttatcaagtcaccatgcgacctgaaatgcctatcataaactgggtactttctgatccatttagccacaaagtgaggtatgcacagcagcattccatcattaaatggaagtggtgtatacgtgatcgggcttgagcaagtcctgaggtcacaagcaagttacatgaaagagtggctcaaatgaccatggtccccactcctkccaccctgccttctctcccccagccttcagcgatggcctcatggggagttacctatgatcaattgactgaggaagagaagacaagttccctgtttgcagatagctctccatgatatgcaggcaccatct

SEQ ID NO: 953889 - DNA, 584 bp, Homo sapiens
agcatcttctcgattacatctcacaaactgtgcccgtgggctcaagcatgagcactaagaggcaaaatggcggagtgtaacttgtataggrccttcttctagaaacaccggactggtaagggaagaaggcctcaaatgagtatgcgcacaactccagtaaacacactgcgcatgcggcccctcccaagtgctggcggaccactgcgcatgcagacagcccaccccaggggaagaagcccactctgagactcaggggagaagggacggacacaagaccctggaagcatgctaacacagaaaaccctaagtcaaaggtcaaaccatgcacttgatctctcaagtcacccacctgaccctcttccaagtgtactttccttccttttgttcctgctgtaaagctttattaataaactttcactcctgctctaaaacttgcctcggtctctcactctgccttatgcccccttggtcaaattctttcttctgaggaggcaagaactgaggatgctgcagacccatctggactccccctgcgaataggaggagaggtgatggggactctgtggctgccccgccccagacct

SEQ ID NO: 953890 - DNA, 747 bp, Homo sapiens
aagaccctggaagcatgctaacacagaaaaccctaagtcaaaggtcaaaccatgcacttgatctctcaagtcacccacctgaccctcttccaagtgtactttccttccttttgttcctgctgtaaagctttattaataaactttcactcctgctctaaaacttgcctcggtctctcactctgccttatgcccccttggtcaaattctttcttctgaggaggcaagaactgaggatgctgcagacccatctggactccccctgcgaataggaggagaggtgatggggactctgtggctgccccgccccagacctcgccctatgtgccttttccatttggtggttcctgtgctgtatcttttatacaaaactgtaattggaagtataacactttgtgagtctttgagttgtcctatcggattatcaaacctgaatggagatcatgggaactcctgaatttgaagccaaattggacagaagtgcagttgcctgggaagcccacttgtggctggcatctgaaggaggagcagcccgtggagtctgcactaactctgggtagtgtccaaattattggacacccagccggtgtcagaaaattgtgagtgagtgtgtgtgtgtgagtrtgggtgagtgttgtgaaattaaattcaaacttaaaataattgggacttaaagctattggaacttcaaattatctagagccttgagaggaatgtggctttgtagcctgagcaacactgcctgcaact

SEQ ID NO: 953891 - DNA, 747 bp, Homo sapiens
aagaccctggaagcatgctaacacagaaaaccctaagtcaaaggtcaaaccatgcacttgatctctcaagtcacccacctgaccctcttccaagtgtactttccttccttttgttcctgctgtaaagctttattaataaactttcactcctgctctaaaacttgcctcggtctctcactctgccttatgcccccttggtcaaattctttcttctgaggaggcaagaactgaggatgctgcagacccatctggactccccctgcgaataggaggagaggtgatggggactctgtggctgccccgccccagacctcgccctatgtgccttttccatttggtggttcctgtgctgtatcttttatacaaaactgtaattggaagtataacactttgtgagtctttgagttgtcctatcggattatcaaacctgaatggagatcatgggaactcctgaatttgaagccaaattggacagaagtgcagttgcctgggaagcccacttgtggctggcatctgaaggaggagcagcccgtggagtctgcactaactctgggtagtgtccaaattattggacacccagccggtgtcagaaaattgtgagtgagtgtgtgtgtgtgagtatgggtgagtgttgtgaaattaaattcaaacttaaaataattgggacttaaagctattggaacttcaaattatytagagccttgagaggaatgtggctttgtagcctgagcaacactgcctgcaact

SEQ ID NO: 953892 - DNA, 671 bp, Homo sapiens
gccagagcaggactagggccaggcatccccaccacatggtgaagcatctcgctcccctctcgctgttgggctgtgttatctacacagcttgtcgacagggctggraagtccccaaggttggactctgccagctccccagctccgaacccatcacccaccctttcagcatggccacagggctctcatgtggctcttgtcttctgactaaaaaccatgataaggcgctggcctggggcagaggaggctggaggctgtgagttcacgatggagagtggggcagggacggactctgagtttggcatggctccaggagtcctctgacgtttcctgcccaggtggccatgggtgagggtgacactgacaggtacgtgctgtgggcagagcccaggtctgtggtctgccttggccaactggaatcagagggtctgttctgttcctctctggggaggtttagctgctgagctagtcatggagactcttctagaaggtattcacagacagcacctcaaaaacagcatcactgtgccgcagtgatgcctgaagaacattttagattatggtgaattatctcagcttaaatctggcagattttggcccaagtcagtgtcaggcagcagccatcttcatgagttgtttatatctacattgcctccctgcccactcgctgatcg

SEQ ID NO: 953893 - DNA, 673 bp, Homo sapiens
ttaaaaaaaaaatttcatgtttacgtatcctggcaaagaaagggtattcaataatgttcattattccacttgggaatacacacaaacacacacagtgacatagaaatatacatagaaataatttccagaaggctatgtaagatgtcattagagttatttcagagacgttaagggggtttgtttcaaatttttataataattatgcattgctaacatgatttaaaatcatcttaaataggccaggtgcggtgactcatgcctgtaatcccagcactttggtaggccaaggcgggcagatcacctgaggtcaggagtttgagaccagcctggccaacatggtgaaaccccatctctactaaaaataaaaaaattagctgggtatggctgcacatgcctgtaatcccagctacttggaaggctgaggcaggagaaacgcttgaaccagggatgcagaggttgcagtgagctgagatggtgccactgcactccagcctgggtgacacagcgagactctgtctcaaaaaagaaaacaatcatcttaaataggccaggcacagtgattcacrcctgcaatctcagcactttgagaggctaaggtgggaggactgctacagttgaggagtttgagaccagcttgggcaacgtggtgagacactatctctacaaaaaatta

SEQ ID NO: 953894 - DNA, 538 bp, Homo sapiens
tcactgcaacctccgcctcccgggttcacgccattctcctgcctcagcctcccragtagttgagactacaagcgcccgccaccatgcccggctaattttttgtatttttagtagagatggggtttcaccgtgttagacaggatggtctcgatcttctgaccttgtgatccgcctgcctcggcctcccaaagtgctgggattacaggcgtgagccactgcgcccggctacgtattttcttttctttcaatttagccctgcctgagttaatggcaacatacagctacacatagagagccagaaggtaaaaatattaagaaaagaatcaacaccgaggaacagagggacaaagggaaagtggccagtacatgcatttactgcccagtctaatgtaattgaattatttacaattacatcttgaaattacaaaacatagaattcataagcagaaaggtttcaagacaatggaacccataataatatggatttgaccttgagggaatttggcagacagcatcagtgtctgaaacaaaagtaaac

SEQ ID NO: 953895 - DNA, 630 bp, Homo sapiens
tagcagggttgaccctggtcctggtacagcccccaggtctgcttgcagctctggccaggcaggtgccatgccygactaagcagaaacccctggtgaggctctttattgaggaggagccggcccactacagagagaagaaaaacattccatctacatgacagtgaagggagtggtgttttatgtcacctccagaaaggaattttatggaagaaggggccccctataatgcattgaccaggaaagtccaccagagggatagccaagatgtccctgggtcctccagacctcacccatgaaactctgggtctcatggccaaagagctggaatccctggatgatatcttcaccaaagtgtacaaaaccaaatatcccatggttagctacacagtctgaagaattcttaatagggacagcaccccagcctggacttcaaacctgaagaccaaccccattttgacataaacaatgtgttctgttgtttcatctccaagagcagcttctttggagggtaggttagggagatactcagatgctaaatcttctgcaaaataggctacctaaagcctctgaatcaccaggatctgaataaagcagatgtttaacctggttggggggacatattttcaagaa

SEQ ID NO: 953896 - DNA, 630 bp, Homo sapiens
ccaggcaaaattacataccacttcttgagtgttttaaagcctcctaacygtatatatgtgagttctttgatatattgacttctttttctttgagtcgattcccagtagtggcattgctggatcaaatggtaattatatttttatttttttgagaaatctccatactgttttccatagtggctgtactagtttacattcccaccaacagtgtatatgagttcccttttctccactttcttgtcaacatctgtcttttttaataatagggattctggctgaggtatgctatctcattgtggttttgatttgcatttctctgatgattcatgaggttgaacattttttcatatacctgttggctgtttgtatttatttttttgagaaatggctattcatatactttgcccaagtatgaatgggattatttgtttttttcctgttgagttgagttccttatctgttctatatattagttcctgttggataaataatttgcaaatattttatcccattctgcaggttgtctcttcactctgttgatttttttgttttgtttttttttttttgtgtgtgggagctttttagtttaattaattcccaatcacttatttttggttttgttgcctgatc

SEQ ID NO: 953897 - DNA, 606 bp, Homo sapiens
aagtagtcaagagtcaacctattttgatagatagcatttctcatctgagtttcttgccaggccagaatagtcaaggctctgytggtcttactagtgatgatttctaagacagcttgtaaccgtatgattcagttgagcatgtaaatgggagtccagtatccccacgagccctcttgtgcctaagtagcaggcctataatattgtatgattctctcagggggccatttattatcttttttatttttttcatagctatgcttctctttttgcaggaagcatagacagggaagcccaggagttcgcctgtctttatgggcagtaggaagaaagatggtttaataatgccaataacacaactacctgcctactggtcgggtaatttggtgtaaggtctatgcctacatatccagtataatccagtgggggctgtccagtcccagtgggactccaggtgggtctacacagtttgcaactttgggaatctagtaaatggatttttttccagtatggtttgaactccactaggtcgctgtttttgtagtactattatatagttttggcctaaggcagctaagtcttcctacaggaagggtgaagtccttcccc

SEQ ID NO: 953898 - DNA, 774 bp, Homo sapiens
taatctttgtgctagtcccctcacacraggggtaatacaacatcccactgctgttaagactcctgccacaattatgagagatgtaaggattaaagctaccatgcctttccattttttccattttccattttcacattcttattaatagttgaccatcagaagagtcctaaaacccagcagctatttggttttaggcctaaattcattaggcacacctctagggactccaattgagttaacatatgtattgggattaaaagaatttgtcaaatctctctggtgtcagtggccatgtgtatttttgggtatcttatggaatgccagggtgaagggaatggccaattggactaaagcacaagtcctagtcccattggatggtaacaggttacagaggttccatttcccacaataccaccagacatcagcccggggtgtatggagagctgagtaattgccattgcttgactcaccagtgatgtttaggatgtaggcagaagttgagagttctcccacaggattattgaactcttcctcctgcctagagaggcaagagaagtggttcatattccctatagagaacaaggatattgctctgggatctgagctctggaatgtgggaaagagcgatcacagactcttacaagtcttacttccgcatgcatccttgtcctggtatagaaccaacatacagtgtagtcccttaggaggggtattccatcctaggggaaatggaaccacctgtgcccaaggtcatcccacagcagttactcttgt

SEQ ID NO: 953899 - DNA, 600 bp, Homo sapiens
agccatgcaggaacaatgacaagactctagcccaatcaggagtggcaatgggcacctcactggatcagaattgtggtggacaccctgccggatccggaggggtggaagtcattggtgggcctggcatggcggcaatcagcaatggtggacagcaagtgaaagctcagctcaagtcggaacaaacagaccagaagagtgtgcagttgcaagacttaatagagtgaaaacagagctcccatacaacgggagaagacccaaagtgggttgccactgccggctcaaaatgcctgggtttatatcgcaatcattgtccctctccctgtgctctcaggcaacagatgattgactatttctttacctccagcttttagcctaattggtattttagtgagctctctttactacctgattggtcgggtgtgagctgagttacaagccccgtgtttaaaggtgggtgcagtcaccttctccaggtaggcttaggaattgttagtcggcctaggaaatccagctaatcctgtytctcacagagaggaagagtacagcagttgtgaggcattgaactcagtgctgccctgttacagcagaaaacaaaactga

SEQ ID NO: 953900 - DNA, 714 bp, Homo sapiens
tataggaactgaaatctttctcttaagagaaaaattagagaaaccgaaagggtagcaaatatctcttacttttaacagacacctggcatttaaaatcctgaagaatacagctttacatgctgtacgtatagacacgcattatagtgtggacgtacatgtcacatacatgcacaatacataggcattgatacacatgtgtacatatgtatacatgcatgcgtattagctataatgctaatattagaaaatggagtcttttatgacattcagatttcttaatcagagctcgaagacaaactgcaggggaaaatcggtggattttaccatggcaagataaaagatttctgtaagggaggaagagactctagaggaagtggctatagcctctaaagccagccaaggctgatggactaggatagtaggaaagtcgtgcacatctgtgggggaagaaagcacatgaggaaagaagaaaacagaacaggccatccatagagcaaaacctgcagggccaaaacaaatacaacgcatcagaggccccacctcctaaccaaggaaagggtaaaggcaagaataacaccaagaggccaccagccycccatcagacgggcaggaccatggcggctcctagcacataagcctcggtcctgtgctagggaggaggtaggccaaacgtggtggacgtgccaagacccagggtgtctgcccctcagcccg

SEQ ID NO: 953901 - DNA, 459 bp, Homo sapiens
aattcatgataaacgtacttattttttgccatatagtctmttttctaattaagagaaccacatcctatttttaatttattattattaatgacagcacaggcatcaaattttaaggtgacttgtttgggcatctcttttttttgttttattttggctaacactttactcatattgtttatgagcccccaccagtcttcagttcttaatcttattttaaaaactgtggtcatgggaggctcagatgggtcataacacacatcaggttggtcatttcctgggctaaatacattatttgtatattgtattataaataattgtatagaataacattataaaaacaagttctttttagagttccagtacacttataataactgtaaaataataggactgtagcaaccttttgtcctacctcagtgacttgatgtatactctgggaacagccctcagtctgaggaa

SEQ ID NO: 953902 - DNA, 712 bp, Homo sapiens
tttatttttggtagagacaaggtctcgctatgttgcccaggctggtcttgaactcctgagctcaagcaatccccctacctcagcctcccaagmagctaggaccacaggagcaagctgccacacctggctaattttgtatttttgtatggggcttcaccatgttgcctaggctaatcttgaactcccagcctcaagcgatacttgtatcttgccctctaaaagtgctgggattacaggcatgagccactgcattcagcctatgtcttaaacaaaacaaaacaaaatgaaacaaaacaaacagctttatggaagtgtcatttacataccataaaattcacctgttttagacatacaatttaatgatttttagaaaatgtacagagctataaaactatcaccacaatccagttacagaacatttcttttactcaaataagatctcacatgactgtttataatcaaacattcccctttccatctgattaaagagcttctgcacagcaaaagaaactactgttctgtaaacagacaacctacagaaatgggaggaaatattctcaaactatgcaaatgacaaaggtgtaatatcaagcatctataaagaacttaaatcaacaagcaaaaaacaaccccattaaagggtgggcaaaggacataaacagacacttctcaaaagaagacatacaggcagacaacaaacacatgaagaaat

SEQ ID NO: 953903 - DNA, 594 bp, Homo sapiens
atttgtatttcctgagatattgaaggagagtataggagataaagggttaaggatgaatccttggtttaggcttgagcaaacagaagatgtgagttgatattaactgagatgggaaaggctgaaaaaggaacaggcttggggagagcagttcaggagtttggttttgaacatgtgatgtttgagatctccaatagactaaagtaatatgtactgtagggagctggatatacaattgcaggagttagatgtacagaaggcaatagcagctctggataggtccaagtagattataaatttgaaagtcatcagcatatacatactactgacatccttggggcagacgtgatcagcgagagaacaggaacagaggagttataaagtctgagtccaaagacacgtctattaaaagtttgagtaaataagtaagaactagcaaagaagaataagataaagtggctagttaggagaacaccaagaaggtagtatcctggaaaccaagggaagaaagtatatcggggaagaaggaatgatcartgatatcaagtgctattgatgaggcaagtcagatgaggcctgagagatgaccacagtaac

SEQ ID NO: 953904 - DNA, 586 bp, Homo sapiens
ctatatatattctgagtccctgggagaaccagcttggattccctggtcatgcaccagtatggagtagtagtgtttgacaagcttctcctgcctgatgacccacaaaggtggctggttctcttcccaactatcccattgaggagggctttttgatcagaggcagatccttgggccctgagcccgcagaatttatgatcatgagtgagtattgtggttctcatagagaatgatgcattgttcaatgtagggaaaatgtttagcagagattcatgaggaagaaggagagggcattgttgttgagtgctagaaaacacatagaaagaagaacaatctatatttagagagaaaatgaaaagattggagatcaaaagcgacctcagaagggctatctttctcagaaaaagcccactctgtttactataggagcttacatggctgcagggaaacctcaaatccttcttagaaaggtaggatagagttacagtgaggtctggggatatgcgagacaatgctcagacctcagcattttggttcaaaataaacaaggtgactcataacaaatkgctttgattaaaacattatattt

SEQ ID NO: 953905 - DNA, 641 bp, Homo sapiens
agtgaggattactccctgactctctaggctggaagtctcttttcycaattatttctctcaagtggggtctgacttcctaactgtgcattggaaaatgtttcctggctctttgtgaggcctgctttgtttgatcctgtttcttccataggaacttctcagttggctgaaaccaccttccctaacccctgctgactatatgctttgccacctctgtccatctccttcttgttggcacgattttactaaagataatgtggaacttcgttgtcttcttttggaaacataagttcgcacccaactgacccctttaagaccactcctttcccactgcttttgctccttccctcactttactacctttgatcccccttctgtcctcttgtaggggagcactttgatataccccttcgagtccctgctgcttctgccttctgtcccccccaccgccaggcctttcctttcccactgcagcctttcaactgcctacagccacttgagctttaggcccgctgcctccagtggggactctcaaaggatgcagggattcccaaacagcaaccacctgtggccaaaagaaaagaagaagaaaaggctaattggaaatagactagacattttatctactcagccaggctttggag

SEQ ID NO: 953906 - DNA, 443 bp, Homo sapiens
catgaaaatgtatgtatgtacaaggttttcatcacaataccatttaaattgtaaaaaaataggcataagaaaaatttctatcaataagagattgaataaattttagtacagccttataatggaacagtaaagtgcatttaaaatggtaatgtaaagttacatttactgacatcaaaagattctaaaatatttattgagtgaaaaagcaggttaaaaagtataaatacactaatatatatataaaattatatgtatgtgtttgcgtatatatatatatatataacttgttcaacagcactgactctagagtcaagcaaatttgagtatgaccattagcttcactatttactagctgtctggcttygggcaatttgttaacttctttgtgtattgctgtgcacatttgtataatggggattatagtgcctacctcatgaaatttt

SEQ ID NO: 953907 - DNA, 719 bp, Homo sapiens
ataaaggatgagggccgccaggcatgatggctcacacctgtaatcccagcactttgggaggccaaggcrggtggatcacctgaggtcaggaattcgagaccagcctggctaacatggtgaaaccctgtttctattaaaaatacaaaaaattagccaggcgtggtggcaggtgcctgtaatcccagctacttgggaggctgaggcaggagaatcgcttgaacccaggaggtggaggttgcagtgagtggagatcatgccattgcactccagcttgagccacaagagcaaaactccgtcccaaaaaaaaaaaaaaaaggacaagggcacaggcctcacctgtccagcaggtcattatgatttctgtgtctccttacacagtggaaaaaaagacaatgatggcatatgagaactgcacatggcttaaggccttgaggcaacagtgtcacatagtcctgagtttgaatcccagctctgtcacttacttgctgcatggccttaggcaagttacttgagttatttaatgaatctgagcctcagatgcctcatcactaaaatgggatgaaaaatagtacctactgcaagactactggaaaatgagtggagagtggatgtgaaacacttggcacagtgcctagaacataagaacacgtaaacaggagtagctgctgctgctgctgctgctgctgctgctgctgctgctgctgctgctgctgttgtta

SEQ ID NO: 953908 - DNA, 465 bp, Homo sapiens
tctgttggagtttgctggaggtccactccagaccctgtttgcctgggtatcaccagcggaggctgcagaacagcaaatactgcagaatggcaaatgttgctgcctaatccttcctctggaagcttcatctcagaggggcacctggctgtatgaggtgtcagttggcccctactgggaggtgtctcccagttaggctactcgggggtcagggacccacttgaggaggcagtctgtccattctcagatctcaaactccatgctgggagatccactactctcatcaaagctgtcagacagggatgtttaagtctgcagaagtttctgctgcattttgttcagctatgccctgccccagaggtggtgtctacagaggcaggcaggcctccttgagctgtgttgggctccacccagttcgagcttcctggccgcttttttttttacctmctcaagcctcagcaatggcag

SEQ ID NO: 953909 - DNA, 614 bp, Homo sapiens
gggcaaaacttcttaagtaatatcccacaagcataggcacccaaagcaaaagtaaacaaayggaatcacaacaaattataaccttctgcacaacaaagaaaacaatcaacaaaatgaggagacaacacacgaaattggagaaaatattttctattcatctgacaaggggttaataaccagaatatataaggagcttaaacaaccctatagaaaaaaatctactaatctgatttaaaaatgggcaaaatatttgaatagacatttctcaaatgaagacatataaatgaccaacatgaatatgaaaagatgctcaacatcattgttcatcagagaaatgcaaatgaaaactccaatgagatatcacctcacctccgttaaaatggcttatatccaaacgtcaggcaataacaaatgcaggcgaggaaatggagaaaagggcaccctcatatgctgttgatgggaatgtaagttagtacaaccactatcagaatagtttggaggttcctcaaaaactaaaaatagagctaccatacaatccagctatcctactgctgggtatatatccaaaagaaaggaaatcagtatattgaagagatgtctgcactgtcatgttt

SEQ ID NO: 953910 - DNA, 614 bp, Homo sapiens
gggcaaaacttcttaagtaatatcccacaagcataggcacccaaagcaaaagtaaacaaatggaatcacaacaaattataaccttctgcacaacaaagaaaacaatcaacaaaatgaggagacaacacacraaattggagaaaatattttctattcatctgacaaggggttaataaccagaatatataaggagcttaaacaaccctatagaaaaaaatctactaatctgatttaaaaatgggcaaaatatttgaatagacatttctcaaatgaagacatataaatgaccaacatgaatatgaaaagatgctcaacatcattgttcatcagagaaatgcaaatgaaaactccaatgagatatcacctcacctccgttaaaatggcttatatccaaacgtcaggcaataacaaatgcaggcgaggaaatggagaaaagggcaccctcatatgctgttgatgggaatgtaagttagtacaaccactatcagaatagtttggaggttcctcaaaaactaaaaatagagctaccatacaatccagctatcctactgctgggtatatatccaaaagaaaggaaatcagtatattgaagagatgtctgcactgtcatgttt

SEQ ID NO: 953911 - DNA, 581 bp, Homo sapiens
tagaagccttcacatatttgtatgcttgcatgtatgtctaaagctatacaaggtcatgaaagtagaygagatcaccaagaaagtgagtttagatgaaatagtgatgaaagccaggtcctgaaccatggggcacttctaatttccatatctaagaaacagcaacagagatttagaatagatggctagagtataaaagagaaatgatgagagtgtaatgtgatagaaatcaagtgaaaaaacgttctagaggaggaggaaggtttcaactctgcccaaagctgctgacgtgtcaagtaagataagaacacataactgttaggttgagcaatgtgaaaatcattgatgattttgtgagaacagattaatggaaatgatgagcaaaaggtttgtcagaatgggagaatgagataagagaaattgatgacagtgagaaaagatcactctttcaaggagttttataaaaggggagtgtaaaagttttttgtttgttttccggagactgatggggtattaagggagaataattttctttataattgggaaaaaatatcatcataagacccactagagtgagaaaaaac

SEQ ID NO: 953912 - DNA, 587 bp, Homo sapiens
ggaaagcaccccagcagtaggtgctagaattgtgctttcccccattgcaggtctggagtgggaggagagttgctgtagctgtgggttctttgggcaatgagatcttcagacaaggccaacttggcaacctagagccaatctgcatgtgtcattatgaggtgccccagcctgctccctagagattgtggtgtagtggggcactctctgctccatggccaggtagatttccaggcattctgagtgtctgttcacctggataagctgccgaagccaccccacccttcttgtgaagagattgtggtgcagtggggctctttctgttccatacccaggcagctctctaggcacttggagcattcactctcctagatgggagagttaggccactcacccttcttcatgctgggaaactggggaaaaggaggtttctcagcttcatgtctaggcacacctctaggcrcttggtggctgcccagtgagcttgtccttggagctagtgcttgtgcctgatattgtgggacctgtaggtgtgcctgcttgatctggccccacccatcttgctcccactctccagggctgtgcattcc

SEQ ID NO: 953913 - DNA, 618 bp, Homo sapiens
caatatactgatttcctttcttttgagtatttacccagcagtgagattgctgaattgtatggtagctctaattctagttttttgaggaacctccaaactgttctctgtagtggttgtaccartttatattctcaccaacagtgtatgaggattctcttttatccacatccttattagcatttgttactgcttgactcttggataatagccattttaactggactgagatgatgtcttgtacttttgatttgcatttctctgatgatcaataatgttgagcactttgtcatatgcctgtttgccatttgcatgtcttcttttgcgaaatatctattcaaatcttttgcccatttttaaactggattattagattttttcctatagagttgtttgagctccttatatattcttgttgttaatccctagtcatgagtcatttgcaaatattttctcccattttgtgggttgtctcttcactttgttgattgtttcctttgctgtacagaagctttttaatgtggtgtgatcccatttgtctatttttgctttggttgactgctcttgtggggtattacttaggaaacttttgcccaatatcttgaagaacttccctaaaat

SEQ ID NO: 953914 - DNA, 682 bp, Homo sapiens
agatacacccttgaccaatgccttgcaaaatagatttgtgaggcagtacctgcatctttgaagagccctgtaattgctcttctctgtatgttagatccaacagtgggagctgcagtcactsaactacaaaatttaactgcaatgggagtaattggatcccatggtgccaggggccaagtagtggcactcaaccgtcaaaggcaaggtaggcatagctaccataatggacagcagaggcaaagcggcaatcagaatagtctgacttctgtagagctctggcattggctaattaatcacggtgttcctagaagtgaaaatgataggaagcctactgcattcctccttaatttatataagcagaaaacttctaggttgaatggacaaaagacaaatttgaattatacaaacagagaatcatggaccctcaatcaatttccagacttgagctggtttacagactcagaacaccttgaatgaaggggaaggctgggttcccttgaggaaggaccccactatacttctgacaatttatactgttcatctttctcctgtcctttcccaaggagacctccaaccttttaccagggtaactgtgcactggggaaaagggaaatgcagatatttgggggactactggacactggctctgagctgacattgattccaggggacccaaaacatc

SEQ ID NO: 953915 - DNA, 577 bp, Homo sapiens
acctgtgcactgaaaattccaaacactgatgagagaattttagtatctaaataaatggagagatataccatgttttgatggataattttcacagtaaaaatgttaattctccccaaattgagktagacattcaacacaatcttaatgaaaatcccaggggttttttttttgtagaaattgatgagctaattctaaaatttatataaaaggtaacttaaagagtgtaactggattgtttataactcaaaggataaatgcttgagggcatggataacccattctccatgatgtgcgtatttcatattgcatgcttgtatcaaagcatctcatgtaacccataaatatacacatctaatatgtacccacaaaaattaaaaaataaaacttatataaacatttgaaggatctagaatagccaaaacaacactgaaaaagctgaacaaagtttctcttttttttgaggtggagtcttgctctgttgcccaggctggagtgcagtgatgcaatcttggctcactgcaatcttggctcactgcaacctccacctcccaggttcaagcgattctcatgcctcagc

SEQ ID NO: 953916 - DNA, 465 bp, Homo sapiens
gaggtagtgggcactgctataaggayacccaaaaatgtggaaacgactttggaattgtgtaatgagcagaggttggaacagttgggagggttcagaagaagacaggaagatgtggggaagtttggaacttcctagagacttgttgaatgtttttgaccaaaatgccaatagtgatatggacaatgaagtccaggctgaggtagtctcagagagagatgaggagcttcttgggaactgcagtaaaggtcactcttgttatgctttagcaaagatactggtggcattttacccctgcccttagagatctgtggaactttgaacttcagagagatgatttaggatatctggcagaagaaatttataagcagcaaagcattcaagacgtgacagagcacaaaagtttggaaaacttgcagcctgacaatgcagtagaaaagaaaagcccattttctggggaaaaattca

SEQ ID NO: 953917 - DNA, 465 bp, Homo sapiens
gaggtagtgggcactgctataaggatacccaaaaatgtggaaacgactttggaattgtgtaatgagcagaggttggaacagttgggagggttcagaagaagacaggaagatgtggggaagtttggaacttcctagagacttgttgaatgtttttgaccaaaatgccaatagtgatatggacaatgaagtccaggctgaggtagtctcagagagagatgaggagcttcttgggaactgcagtaaaggtcactcttgttatgctttagcaaagatactggtggcattttacccctgcccttagagatctgtggaactttgaacttcagagagatgatttaggatatctggcagaagaaatttataagcagcaaagcattcaagacgtgacagagcacaaaaktttggaaaacttgcagcctgacaatgcagtagaaaagaaaagcccattttctggggaaaaattca

SEQ ID NO: 953918 - DNA, 383 bp, Homo sapiens
caggcagaggcttgtgttgtcttttctcactttctcccatacatgcagagtttctctctctttgctttgagtcacataaagctagggtggagtgatacaagcacccctgtggycaccactactatgactgcactgggtcagcagtgacccggaagccagcacagcactgggtctcacccatggcctgctgtaaccactccctggctactgcatatgttcactcaaggccctgggactctataatcagaagtttgcaaatccaaccagattctgtcttcttcccttcaggtcagcaaggttcttcaggcccagggtgggtccagaagtaccatctgacagtcaggaactagagtcaaaaaccttagaagtccacatggtattct

SEQ ID NO: 953919 - DNA, 603 bp, Homo sapiens
acaataatgagcagatgagaactgcctcatcaccccctggctgctgcaggtggagactactaatccctttcgctgttaggccagtcgctgagaaccagaaagtcactgaaatggaagaccatgttaattgtacaattttcttcaagtttaatgccattaaaatttcataaaattaaaaccatgcaggatcactgaaaaaatagatgaataaaactccatataaacttcagtcacactctacctgtgtgcaaacacagtcttttttttcttcttttttttttttttgagacagggtcaaactctgtggcccagattggagtgcagtggcctgatctcggctcactgcaatcatctcggcccccgggctcaggtgatcctcccgcctcagcctctggagtagttgggaccacaggtggcaccaccatgcccaggtaattttttgtagaggaggttttgccatgctgcctaggctgggtctcttttccttcataaaaattcacatggcttgcctaggtaaggatttctattaaactctggggaaaattttttwaaaaaaatatagcatctataaacgccaaacaccttcacatggctctaaatatg

SEQ ID NO: 953920 - DNA, 603 bp, Homo sapiens
acaataatgagcagatgagaactgcctcatcaccccctggctgctgcaggtggagactactaatccctttcgctgttaggccagtcgctgagaaccagaaagtcactgaaatggaagaccatgttaattgtacaattttcttcaagtttaatgccattaaaatttcataaaattaaaaccatgcaggatcactgaaaaaatagatgaataaaactccatataaacttcagtcacactctacctgtgtgcaaacacagtcttttttttcttcttttttttttttttgagacagggtcaaactctgtggcccagattggagtgcagtggcctgatctcggctcactgcaatcatctcggcccccgggctcaggtgatcctcccgcctcagcctctggagtagttgggaccacaggtggcaccaccatgcccaggtaattttttgtagaggaggttttgccatgctgcctaggctgggtctcttttccttcataaaaattcacatggcttgcctaggtaaggatttctattaaactctggggaaaattttttawaaaaaatatagcatctataaacgccaaacaccttcacatggctctaaatatg

SEQ ID NO: 953921 - DNA, 656 bp, Homo sapiens
  misc_feature 616, 617, 618, 619, 620, 621, 622, 623, 624, 625, 626, 627,628, 629, 630, 631, 632, 633, 634, 635, 636, 637, 638, 639,640, 641, 642, 643, 644, 645, 646, 647, 648, 649, 650, 651,652, 653, 654, 655, 656: n = A,T,C or G
ccacccagttcaaacttcccggtggctttgcttacactgtgaggtgaaaaccacctactcaagcctcagtaatggcagaagcccctcctcccaccaagctccagcatcccaggtcgacttcagactcctgtgctggcagtaagagtttcaagccagtggatcttagcttgctgggctctgtgggggtgggatccactgagctagaccacttggctccctggcttcagcccctgttccaggggagttaacagttctgtctcactggtgtttcaggtgccactggagtacgaaaaagaaaaaatcctgcagctagctcggtgtctgcccaaacggctgcccagttttgtgcttgaaacccagggcctgggtggtgtaggcacccgagggaattgcctggtctaagggttgtgaagatcacggaaaaggcatagagtctgggccggaatgcatcgttcctcgtggcacattccctcatggcttcccttagctaggggaggaagttccctggccccttgcacttcccgtgtaaggcgatgccccacctgctttggctcgccttccatgggctgcaccccctgtctraccagtctcaatgagatgagctgggtacctcagnnnnnnnnnnnnnnnnnnnnnnnnnnnnnnnnnnnnnnnnn

SEQ ID NO: 953922 - DNA, 590 bp, Homo sapiens
tggctgagcgcagtgtgtttcaaaccagcaagtgcagtctttctgtctgaaaagtgactccccttgatttgccaagcaatcctctcagggcaaatcagaagaaagtaaccttttaatccactctgattaatgttacaaaaccagctctcccaacacctgtaatattattctctgagcaaatgatggaggagaacaggcttggaaacttagggaaacccaacaaacctccaaccaccttcaactccacagagagctagccattctccccgcaagctccgcctggacttcaactcaagttcctggttaatgtggtctgatctgcagcacctgtggccaaggtcaggcctgccctccttgactctgctgacttgtttgtgacttgcagagcccagtttccttacctgcccatggggtagagttgaaatggactcctgtgggcggggcagggtttggtgtctgtgccctttgtcaggtggcaagagctggtgtcactcayggcctgcaagaggactgcatttgcaaaaaggtgcctttctattctattgccctagggggtctccactggctgatagagaacttactcggctccc

SEQ ID NO: 953923 - DNA, 425 bp, Homo sapiens
tgaactcatccttttttatggctacatagtattccatggtggatatgtgccacattttcttaatccggtctatcattgatgggcatttgggttggttccaagtctttactatggtgaatagtgctgcaataaacatacgtgtcaatgtgtctttatagtgcatgatttataattctttgggtatatacccagtaatgagattgcttccacactccagctctctttaatgttggccattcattctcttctgttttcccttactgtcatttgcaggtcttaaaagggtgacaagatagagayagaggcagaggtagaggtagatagagacactcaggggttttctccttgtcctgaggcagccatattgaatcagaactagaacctacggaaactctttaaaaatgacctgatactaaccctatcct

SEQ ID NO: 953924 - DNA, 581 bp, Homo sapiens
ttcagtgggtccagacatgtaggataccaccttcatgggcatctctcagagcttcttctggagaatgcttttgctccaactgaggtaaacatctgtgagaacctctgcatggtgtccacagctctctaaaggrtcctcaaaggcagcccatgacttgcttagaacagcagagcccctttgcaagctttgtctcatctgtgtcttctaacttagcaaaagaatctgaactccttgcggtgagggtcttatctcctggcttcactgtaaacaattcaggattcctgcagtagctgccaaggaaggaagcctgggagagcttcccaaggcccaagacccggccagcccccaccgtgcatggcaggcagagctaattctccgtcagtctatgcatgctaggagaatgctttgggacaatgtcctgatagtaaacaccatgctgtttaaacagaattcccattagcttttccatgagggagcaaatgcagaagttttcttcagatagcttgcagtttctcagccatccccagccccacccccacagagtgacaagaaacaatcaccaaatggccgttgttccattg

SEQ ID NO: 953925 - DNA, 556 bp, Homo sapiens
atatgtacatatatacacgcatatacatatatgtgcatatatacacgcatatacatatatgtagatatatacacrcatatacatatatgtacatatatacacacacatatatataggtctttatagtcaacaatttctagtaacaagaatattaaagagaaatggaaagtttaggctatttgatattcagtataaccagatgagaatgaactgctgtgttactgtttaaactaattttggctagaacaagtaaagccttactctttctagagcataatgcatttaacgatattgaatttcttttttaatttacctcaagtactttcttttgtccaaggacttatgcttcagacagtcaggagtcatacacagcacagaacattgttgtgggaggttcagataattagtagagtatacatttgcaatttgttcaaatactgtacttgaattatgctagccacacatcagaaagttcccaaataagcccccaaataaatcataataaaacaaaatatataatattctttcttgtaaaacgttagtttggagaaagttt

SEQ ID NO: 953926 - DNA, 571 bp, Homo sapiens
cataacataaagtccacaattttaamcattttaaagtatacaatgcagtaaacttttgttcattcacaatgttgtacaatcatcaccacaatctaattccagaatattttcatcatcccaaaagaaaccctacacccattaagcaatcacctctcttctctccacccacctccagtcaatcgttcatttgttttctgtctctatggatttgcttatgcttgacctttcatagaagtggaatcatacaatatgtggtctttcatgactggtttatttcacttagcatgatgttttcaaggtttatctatatatctatatggtggtatgtattaacatcaatactttattgcttgtatagctgaataatattccattgcatagataaaccaccttttatttttccattcatcaggtgatgagtatttgacttgttccattttctggctattatgaataaactgatatgaacatgtgtataacaagcttttgtttgaaaatgtattttcaattctcatatgcctaggagtgaaattgccgggtcatatggtaatggtatgtttaacttcttgag

SEQ ID NO: 953927 - DNA, 413 bp, Homo sapiens
acatttgggctgtttgtactttttggccattattcatattacttctataaatattagtgtacatttttctttggacatgtgttttcatttctcttggatayatacttaggagtggaatactcagtcatatggtaattctgtttaatgatgtgaggaactgccagactattttccaaagtggctgctccatttttacattattatcagtagtgtatgagaatttcaattcttccacatcttcatcaacacttattgatatatctttttaattactgccatttgattacagtcatggcatccaaatcctagtgcatgtgaagtactatctcatcattgtcttactccacaatggtgttagaggatctttttgcatggtacttgttaatgttctttggggaaataatgtctactta

SEQ ID NO: 953928 - DNA, 601 bp, Homo sapiens
acctcaggtctgtgttacattcctttgtattttctctactstggcaaactttcttgtggagtattagttatctgcagaggaaatagcgcttgtggcatagaagaaattttcttgcctgatcctctgactgtaactccgttcagagctcttgtatttagaaatttcaagacttaggactttgcataaatatatatcttttgcctaaggttctgtgtgttcctctctgcctcatgtggtttagtaggctgatcttctccttatgttgagaaatagcatatttcatccaaaaaaataacaaatctgttcatgttaacgcccctgcttggaagccttcattggcttttccttacaatcaggagagttccgattcctatgccttggagaaggggcttttcacaatccaactccttctctctccagccttatctctcactcccagttctgtcaggaaaggcagtgttatgctgccctaacaaacaaccctaacatatcagtggcttattccagtgaaagttggtcatttctgctacatgaccgttgtaggttggcagggtagctctgctcattgtagtcactaaagggctcaggctgaaggaggcct

SEQ ID NO: 953929 - DNA, 623 bp, Homo sapiens
ttagtataattcttaaaagccctagggttttcaaaatggtaaatgagcattggctttaacttaaagtcaccatctgcattagtccctcacaaaagactcagcctgtcctttgaagctttgaagccaggcattgacttaccctctctaagtaggaaagtcctagatggcatcttcttccaatataaggctgttctgtctacactgaatatctattatttagtgtagccattctcttaaatgatcttcagtagatgctctggataacttgctgaagcttttacaccagcacttgctgcttcaccttgcacttttatgttatagagatggcttctttccttaaatgtcatgaaccaacctctgctaggttccaacttttcctctgtagctgcacctctcggcttcatagatttgaagagttacggccttgctctggattagggtttggtttaaagaaatgttgtggctgctttgatcttctctccagaccactaaaactttctccacatcagcagtgaggctggtttgccttcttatcatttgtgtgttaactggaktagcacttttaatttccttcaagaacttttcctttgcatttacaacttagctcactggtgcaagaggcc

SEQ ID NO: 953930 - DNA, 516 bp, Homo sapiens
ataaacccatgaaacaatcactaccttcaagataatgaacatatccatataccctaaaagtttccttattccccttagtaatccctccctctcatgycttcccatccgttccctaccccatccccatgtaaccactgatctgctgtcactatagattagtttacattttctagaattttatataactggaatcccacactatgtactctttcttgtctggcttctttcattcagcaaaactattttctccatattaacgtgtgcatcaatcattcattcctttttattgatgagtaatattccaatttgtttgataactgttttaaatacagtttgtgcattcatctgctgatgggcttttgggttgtttccagtttggggctattagaaataaaactgctatgaacattcataaataagtctttatatggttgtatgctttcatttatcttaggtaaatacctaagaatagaatgactgggtcgtatgttagctatgtgtttaactttctaagac

SEQ ID NO: 953931 - DNA, 581 bp, Homo sapiens
agagcctggcaacaacaagggcaagggttgtgaaaaaagcaaagatggcaacccacccctcccactgggaattgcagagctgctactgtctcgacggccccagcagagtgtgcctggagacccaggaccctcctagtgaggagatacaagatctggggcccatgtaacaaaaaatctgcatgctgggggtccactccagtccctagtcaccttagattttccagcacttaaaggtattaacagtgaaggctgcaaaacagcaaatatgacagccttcccctttctctgggagctctgtctcaggaaggtacagacctgttgccaacctaaacacaccagtaggggtggttgtagtcctcagtcaggagattccactcagtgaagagaaactaggacccccatgaaaaagcagtgtggcgactcctctgtagagctgttgcactgtgctgggggaccactccagaccctagttacctcagactccctagagcttgaaggcaacaatggattaggytgtgaaacagcaaagatggcagcccattcttctccctgggagctccatcccagggaggctcagaagc

SEQ ID NO: 953932 - DNA, 579 bp, Homo sapiens
cttggaaatcctcataacagcctcagaaggtaggtgtattgatttcctagggcagctataacaaattctcacaaattacgtggttgaaaacaatagcaatttgttctctcacagttcaggagtcctgamgtctgaaattacagatggcagggttggttccttctggaggctttgagggagaatccgttccatgcctttctcctagcttctcgtggttgctagcaatgtgtaacatttcttgacttgtaaatgaatcattccaaattctgcctccagattcacatggagtttcctctgtgtgtatatctgcatgccctctctttcccttataaagacaccagtcactggatttggggcccactctcacccagtatgatctcatcttaacaaattatatccgcaaagatcctatttccaagtgttacattctgaggttccgggtggacatgaattttggggcggggcactatttgactcacttcagtacttattatacccatttaacagatgatgacccagagtctcagggaggagaaaatcccttgcataagcatcacacaatcagtttatgatacccaa

SEQ ID NO: 953933 - DNA, 590 bp, Homo sapiens
gtggaggctgtagcgagccaagatcacgccactgcactccagcctgggcaacattgagcwctgactaatgttttaaatttgtgattgagttcagtttgctagtattttgttgaggatcttaacattttgtgttcatccgtgatattggcctgagttttcttttttcactgtgtccttgtttggtttgggtatcagggtaatgctggccttgtagagtttagtagtattcccacctcttcaatttttgtgaaaggttaagtaaaattgttattagttcttccttaaacatttggtagaattcagcagtgacgccatctttttttttttttttttgatggaagacttttttttacaccatcaatctcattactcattggtttattcagcattctgtttcttcatggttcaaccttggtaggttgtatgtgtcaaggaatttatccatttcttcaaggttttcctatttgttggtgtatagtttttcattataatctctaatgattctttgtatttctgtggcatcagttgtaatatcccattttcacttctgattctatttatttgggtcttctctcttttttccttggtta

SEQ ID NO: 953934 - DNA, 588 bp, Homo sapiens
agtggagtgttgagagtctgtcaaaagttgtcgtagtcmgtttgtgttgctatgaaggaatacctaaggctgggtaatttatgaagaaatgaggcttatttggctcatcgttctacaggctgtacaggaagtgtggtgctagcacctgcttctgatgagggcctcaggaagcttacaatcatggcagaaagtgaaggtggagcaggtgtgtcacatggcgagaaaggaagcaagggaggggaggaggtgctaagccatttttaacaatcaggtctcatagtaactaactgagtgagaactagaagagtgcccacaggagggcaccaaaccattcatgagggatccatctcatgacccaaacacctaccagaggcccacctccaacactgggggttcacatctcaacatgagatttggaggggaccaacatccaagctaactcaaaagtaaatggaaatagaaagaaaaggatgagtgtattatttgaagttacaatattatcaagagagatgctagaaataatctaattctcaaacatttcaaagaacagaggcgggaaaggtttggttgtcaggcaagcaaatcttc

SEQ ID NO: 953935 - DNA, 618 bp, Homo sapiens
taacgggaattccattataagcgttttcatgcttttctcttgctatcttaaaaaatctttgtctttgtgtctgggttgaatgtatttggggttctttgatcttcctagaactagatgtctatctctctctcttgagttgggaagttttatgctatcactttattaaatatgttttcctcacatttctcttcacttttccttctggaatgcccataataggaatatttgttcaaattaacagtgtccaataaatcctgtaggcttttttcattattttttattcttttttctctgcctgtgttatttcaaaagacttctcttcaagttcagaaattacttcttctgcttgttcttgtctgtaaagtcattgatttcattttttatttcttttattgaactgtttagctcttagggcttgtttggttctttttatgatatctctatctttactgaatttctcattcaaatcatgttttcctgatttcattgacttgtctatctgtattacctatatctcactgagtttccttaggattattcttttgaattytttttctggcatttcatatgtttatgattggggtccattactacataattattatttccctttgtagg

SEQ ID NO: 953936 - DNA, 471 bp, Homo sapiens
ggtccattactacataattattatttccctttgtaggtgacctgttttcttgcattttcatggttgatgtgtttctatgctgatttctatgcrtctggtgaaaaagtcaccttttccaattttatggagtaggttacttgtatgaatttacttgtatgaatgggtcttgggtgtcagttcattggggtatattggccttggttctacatggatgcagtaaagtgtagtctccatatagttcattccgctgtgatccacactagtaacatttgcaagtttctcagtggcctaggctaaggaagtttgtggtaatggtggtgcacctttgccaggggtgggctctctggactgtttctcagggtaggggtgtgtgcaggtatacagtgggtcagaaaacttggagtatggctttgtggggctggccatggtgctgttactctggccaggagcatggggatgcagttgctcaag

SEQ ID NO: 953937 - DNA, 618 bp, Homo sapiens
taacgggaattccattataagcgytttcatgcttttctcttgctatcttaaaaaatctttgtctttgtgtctgggttgaatgtatttggggttctttgatcttcctagaactagatgtctatctctctctcttgagttgggaagttttatgctatcactttattaaatatgttttcctcacatttctcttcacttttccttctggaatgcccataataggaatatttgttcaaattaacagtgtccaataaatcctgtaggcttttttcattattttttattcttttttctctgcctgtgttatttcaaaagacttctcttcaagttcagaaattacttcttctgcttgttcttgtctgtaaagtcattgatttcattttttatttcttttattgaactgtttagctcttagggcttgtttggttctttttatgatatctctatctttactgaatttctcattcaaatcatgttttcctgatttcattgacttgtctatctgtattacctatatctcactgagtttccttaggattattcttttgaattctttttctggcatttcatatgtttatgattggggtccattactacataattattatttccctttgtagg

SEQ ID NO: 953938 - DNA, 590 bp, Homo sapiens
acttttgttcatcaaaaacacaattaagagagtgaaaaggcaggccaagcgcagtggctcacacctataatcccaacactttgggaggccgaggagagtggattacctgaggtcaggagttcaagaccagcctggccaacatggtgaaaccctgtctctactaaaaatacaaaaaaattagctgggtatggtggcgggcgcctgtaatcccagctactagggaggctgagacgggagaattgcttgaacccaggaggtggaggttgcagtgagccaagattgtgccattgcactccagcctgggcaacaagagcaaaactctgtcaaaaaaaaaaaaagagtgaaaaggcaagccacacagttcaacactatatttgtaatacataaaaatgataaggacttatattcgtaatatataaagaacagccacagatcagtaagaaaaagaacacacacawtgcccctagtattgggtggcattggaatgggcacaggcatttttgggatcctgctaagagaaagttgaatagggatacacttaatttgggttagtgagacgtatctgtgtggctcgcagtcacttctgtgca

SEQ ID NO: 953939 - DNA, 586 bp, Homo sapiens
ccgaggtgggagaattgcttgcgctcaagagtttgagaccagcctgggcaacatggcaagacctygtccctactaaaaacacacaaaaaattagctgggtgtggtgatgtgcacctgtggtcccagctactcaggaggctgagggcggaagataacgtgagcccagggggtggaggttgcagtgagccaaggtcctgccactgcactccagcctgggtgacagggtgggtctttaaagcttgaaatttacttttgttttatctgagttccttcctcaggaaaggacccccaggcctctcaaaaagtatcaaagatctcaacctcaccagatcactgcatccagacaatgagagtcaggcccctccctagttcctgttttccaacacattgttacatttcttccctgctatataaactcctaattttagtatgtcagggagatgaatttgagactgatctcccttctcctcctcgcctacagcacccaattaaagccttcttctttggcagtaatcatcgtctcagtcattggctttctgtgcagccagcagcaggccctaaaccaaaccccaggcatttcagtaag

SEQ ID NO: 953940 - DNA, 734 bp, Homo sapiens
aaagtggaagacagtccacgtacatagcttttgaggaattggtctttagtttcaaacataggaatatcagcagtggagtgtaaataaggcaacccatatagtatttcataaggagataagccaatatatttttgatgggcagttcagtttcataacaaggcaatggggaggcatttagtccatgggaaccaagtctctaggactaatttggttaggtggttcttcggagtctggttcattctttctactcttcctgataaagatgggtgccagggggtatggtattcccattttatttctaatacttgggctttttcaaaacatgtacagtgaaatgagtcccattatctgactcaacattttctattaatccaagcttaggtataatattttcagttaatgccttaactacattattagcagtcacatttgaaaagggaatagcttctacccggtaaatgaggtgatccactattactaataggtatttcaggcaaccgattggagacatttctgtgtgatcaacttgaacactttgaaatggtgttagtcctggatttcttcccccaagtggtgattttcttggagcccacttattagtttwgttttttttttttttttacatattagacagctatctctaacttgtttggctagggtataaattcctatacacccataaactgctgtgtcacacatagtttggggtccccagtgggccccttgatgcagct

SEQ ID NO: 953941 - DNA, 603 bp, Homo sapiens
aagcatttttaaattagtgatcttaagtaatgagatgctaggsaaatcttgatgacctgatatttgatattcgagaatgagaagcagacataggcctacttagtgaattcacatgtctgagactccacgtggtggggacatggacgttagtagtagtaattagccttggatgagagaagaacagaaattcacatataaatgggaaacatccggcattggtaggtagagcttgtctagattgggactaatgaactacttttcaatctgaagccttcaggaatagacaggctcctgcttctgcaaataccaaatgaaaagccaacccactgttcttgaatttatagatccaatttacacttgctctttttaaccaatggaactagccggcccctgcatgccaagtttctatggcaatgtgatctcagtgacctctcttctctattgtggaatgtaggtgaaaagaacggaggggagcccgatgacgctgaactagtaaggctcagtaagaggctggtggagaacgcggtgctcaaggctgtccagcagtatctggaggaaacacagaataaaaacaagccgggggaggggagctctgtgaaaacc

SEQ ID NO: 953942 - DNA, 589 bp, Homo sapiens
gaagaggtaggaatacactgttctcaaggatagagatgcwatattaagcactaagagccagttgtgacaaatgtccagaaatccttaatgagcgatcccaagacacacaatgagaagattgtttctccccagataggatttggatttgtgtctccacccaaatctcatgcggaattgtaatccccagtgttggaggaggggcctgatgggaggtgattgcatcctgagggcggatatcccctttgctgttctcatgctactgagtgagttctcatgagatctgcttatttaaaagtatggagcacctcccccttgactttattccccctgctccagccatggaggacgtgcctgcttccccgttgccttcagccatgattttaggtttcctgcggcttccccagccatgcttactgtacagcctgcagaactgtgagtcaattaaacctcttttctttataaattacccagcctcgggtagttctttatagcaagaactatgcaaaaatggactaatacatccccctaaggtttatgttaggcatttgcagttagtacagggtttacaggtcttaaggaagagatggtg

SEQ ID NO: 953943 - DNA, 644 bp, Homo sapiens
attagttcaggatctgcatcttatcaaccaaactgttttgcctatccaccctgtggtgcccaagctgtacactcttttgtcctcaataccttcctccacaactcactattccgtgcttgatcttaaagatgcttttttcactattcccctgcacccctcgtcccagcctctcttcgctttcacttagactgaccctgacacccattaggctctgcaaattacctaggctgtactgccgcaaggcttcatagacagcccccattacttcagtcaagcccaaatttcatcctcatctgttacctatctcgccataattctcataaaaacacacgtgctctccctgctgatcatgtccgattaatctcccaaacctcaatcccttacaaaacaacaactcctttccttcctaggcatagttagtgcggtcagaattcttacacaagagccaggactgcaccctgtagtgtttctgtgcaaacaacttgaccttactgttttatcctagccctcatgtctgcgtgcagcggctgccgctgctttaatasttttagaggccctcaaaatcacaaactatgctcaactcactctctacatttctcataacttccaaaatctattttcttcctcatacctgacgcatatac

SEQ ID NO: 953944 - DNA, 666 bp, Homo sapiens
ttatttttcttattaatataagaagtcaggaatgtcaggcctctgagcccaagccaagccatcgcatcccctgtgacttgcacgtataagcccagatggcctgaagtaactgaagaatcacaaaagaagtgaatatgccctgccccaccttaactgatgacattccaccacaaaagaagtgtaaatggccggtccttgccttaagtgatgacattaccttgtgaaagtccttttcctggctcatcctggctcagaaagcacccccactgagcacttgcaactcccactcctgcccaccagagaacaaaccgcctttgactataattttcctttacctacccaaatcctataaaacggccccacccctatctccctttgctgactctctttttggactcagcccgcctgcacccaggtgaaataaacagccatgttgctcacacaaagcctgtttggtggtctcttcacacagaagcgcatgaaaataggatattgagtttggttccaatactttttccttttaagaaaaaaatgatgtatattcaatattttgtggctaaacatttgcatttgtttaattataacactasaagtggaatttctgggtcaaaactattcgcattttaaaaactttaggtcgaccttgcttgggtatcatccagaaag

SEQ ID NO: 953945 - DNA, 606 bp, Homo sapiens
agtgcaagatgtctttctgtaccatgaactctgctccccaatcttcaaagaacctcacacgatttacaatgtgtgaaaaactgctacaaatatacttacaggtcctcacacataggttaaagcattcattagctcccactatatgatacaagctggaacatatttattttacaaaattgggattatgtgtacaacctgctctctaacctgccctttcacttgctcatttataacatttggcttggatcttttttaaaaaactttaaaaaaaaaataacttctgggccaggtgtggtggctcacacctgtaatcccagcactttgggaggtcgaggtgggtggatcgcaaggtcaggagatcgagaccaccctggctaacacagtgaaactctgtctctactaaaaatacaaaaaaaagaaagaaattagctgggtgtggtggcagatgcctgtagtcccagctactcgggagkctgaggcaggagaatggcatcaatccgggaggcagagcttgcagtgagacgagattgcaccactgcactccagcctgggcgatagagcgagactccgtctcaaaaaaaaataaaaataaaaataaaacaaaaa

SEQ ID NO: 953946 - DNA, 606 bp, Homo sapiens
agtgcaagatgtctttctgtaccatgaactctgctccccaatcttcaaagaacctcacacgatttacaatgtgtgaaaaactgctacaaatatacttacaggtcctcacacataggttaaagcattcattagctcccactatatgatacaagctggaacatatttattttacaaaattgggattatgtgtacaacctgctctctaacctgccctttcacttgctcatttataacatttggcttggatcttttttaaaaaactttaaaaaaaaaataacttctgggccaggtgtggtggctcacacctgtaatcccagcactttgggaggtcgaggtgggtggatcgcaaggtcaggagatcgagaccaccctggctaacacagtgaaactctgtctctactaaaaatacaaaaaaaagaaagaaattagctgggtgtggtggcagatgcctgtagtcccagctactcgggagtctgaggcaggagaatggcatcaatccgggaggcagagcttgcagtgagacgagattgcaccactgcactccagcctgggcgatagagcgagactccrtctcaaaaaaaaataaaaataaaaataaaacaaaaa

SEQ ID NO: 953947 - DNA, 595 bp, Homo sapiens
acacttttcaaaagacgacatacaagcagccaacaaacatatgaaaaaatgcttattatcgctaatcatcaaagaaatgcaaatcaaaaccacaatgagataccaccccatgccagtcagaatagcttttgttaaaaagtcaaaaaagaacagatgatggcaaggctgaagagaaaatgaggcacttaaacaactgttgatgggaaagtaaactactccaactgtggagagcagtgtggagatttcacaaagaactaagagttgaactgccattcaacccagcaatcccattactggggatatacccaaaggaaaataaattgtcctaccaaaaggacacatgcatgcatatgttcctcgcagcactattcacaatagcaaaaccacagaaccaacctaggtatccatcaacagtggactggataaagaaaatgtggtacatatacacaactgattactatgcagccataaaaatcaacaaaatcatktcctctgcaggtgtccatcaatggcagactgaaaaagaaaatgtggtacatatatgccatggtacactatgcagccacatatataagaatgaaatcatgtcctttgc

SEQ ID NO: 953948 - DNA, 596 bp, Homo sapiens
ctcctctcatggcaccctgttcttttctttcttagcagttattcacaattagttattacatatttattggcatgtttatttatttgatagtcttggctttagattccatgaggtgtaccctgtggtccactccgatttgttccccattatattcccagcacaaagctcagtatctgatacatcgtatgtagtcaataaaaatctgctgaatgaacaaatgaatggtcagatgagtgacggattgcaatagatcccattactaaatgtcttctaggtaacaagactgcagtaagcacatagatcatcaaatttaatatattcaacaacgataccaggcacatttattatcagttttacagaggaagaagtggagccctagaaaagataaataacttgttcagtgtcatataatgaatacatggctgaagctataccaggtaggtctaactccaaagtttgtgtagtgagtcactgcacaatattgcctcccattaatttggtacttaccatgtactcatcatttgacatacattatctcatttcattcacaaccctgtaaatgaggtattawtaactcattcaatagataagaaaat

SEQ ID NO: 953949 - DNA, 631 bp, Homo sapiens
gaagtgaccttgatagacacagtggtcaagaaaggcctttgtgaggaggtgactgttaaaacctaagtcagacaatgtcattgccctgctcaaacctctgcaagttctccagttttggggttcaccctstgatgcctttattatttgtccctaacccagccctcacctttgaagtctcttcaacttggctcatctggtgtgaattctgtttctagcctagaacctgagtgttacaaaaaggagatccacgtgaaggagttggaaggagccgtacaaaagaggaaacagcatgtgtatgaaggtcccaatacaggaaaagcctggagtgtttgtgaagttaggagggctgtgtggctgaagtcccactagtaaggggaaaatggcttgagatggttatggagatgcaggcagggtcaggcagttagagccttgaggctacctaagaagcttgggttttactttatgagtgaactcacaagttctcactcttataaagaaggcaagttacttgctaattcaaattgctctttatttaagcaggaggacagaaagccaggaatgaatgagaagcttttgcttctcaagaggagaattatacatatagatatagatatatataatctttctgtta

SEQ ID NO: 953950 - DNA, 585 bp, Homo sapiens
aacataaaaatcaccagtttagaacaggtgtggtggctcatacctgtaatcccagcactttgggaggccgaagcaggtgacttgcttgactccaggagtttgagaccagcctgagcaacatagtgaaaygccatctctataaaaaaatagaaaaattagccaggcatgatagtgtgtacctgtagtcctagctactttggaggctgaggcaggaggatcacctgagcctggaagttgaggctgcagtgagctgagatcataccactgcagttcagcctgggcgacaaagtgagactgtttcaaaacaaaccaaccaaccccaaacaaaacccagtttaaccatttttaagagtacagttcattgccattgcgtacattcacactgttgagcaaccatcctcactatctgtttccagaagttttttatgatcccaaactgaagctctgttccctttaaacaacaactgccattcattcttcctccagctcctggcagccacgatcttactttctgtctctatgaatctgcctactatagttacctcatataactcgaatcatacagtctctgtccttttgtgcctg

SEQ ID NO: 953951 - DNA, 585 bp, Homo sapiens
aacataaaaatcaccagtttagaacaggtgtggtggctcatacctgtaatcccagcactttgggaggccgaagcaggtgacttgcttgactccaggagtttgagaccagcctgagcaacatagtgaaatgccatctctataaaaaaatagaaaaattagccaggcatgatagtgtgtacctgtagtcctagctactttggaggctgaggcaggaggatcacctgagcctggaagttgaggctgcagtgagctgagatcataccactgcagttcagcctgggcgacaaagtgagactgtttcaaaacaaaccaaccaaccccaaacaaaacccagtttaaccatttttaagagtacagttcattgccattgcgtacattcacactgttgagcaaccatcctcactatctgtttccagaagttttttatgatcccaaactgaagctctgttccctttaaacaacaactgccattcattcttcctccagctcctggcagccacgatcttactttctgtctctatgaatctgcctactayagttacctcatataactcgaatcatacagtctctgtccttttgtgcctg

SEQ ID NO: 953952 - DNA, 550 bp, Homo sapiens
tttaaaaaatttgcgacttgtaaatccacacattattttgttgttctgaaaagaaaatttaacattttmtatttttaaaatttgggggatcctatcatatcgttttttgtaactccagatattagcttaaaaataggtttcaacatgagtgattttcaggtatttattcaaacatttcctcctacttcaaaaatacataaaaacgtgatatgactgctttcttaaaggatttaccgagattatatcctttgagtaaagtgatcctgaactcagtctggttgtcagtttcattaggaaggaagtcgctcatcttggtctaaatattctccaatgccccgtaacgcggacattgctttcaaggagccatgctttcaaggagcgcccagatggaagacctttctaacgacagttggaaatattctaagaaaaattaatgctattttagagttactagtggtaggttttaagataaaacgtctttgtgggcttgtaatttttcctgggtagcaaagtgaaattcgcaaaccttggggctctcttctcatccttc

SEQ ID NO: 953953 - DNA, 620 bp, Homo sapiens
tgatgaggatctgtacattcaaatgaggagataatagattcattaaggcaaaatttgccaaggggtggccaaaattagtccttcaacacttcaccctttacccatctgttgtctatatgggattgctagagactgatctgagtttggagacagtatttcttctgaacagagctattggagttctatgcatttccctgatttttccctccccatggagggtgtaggagggatgatgtcccctatctcaaaccaagtgagggagactttttatagagaagaggaatatatgccacaaggagaaagtaacatctcactcttcccctatccacctccctgactgatacttgtagaacagcaaaatgtattggtttactagtgctgtttcctgatcagagtaatataagagaatcattttaactacttgacttgtatctcctgacatttccatggggtacaagactgatgctgattctcactttaatttttaactttttaacaacttaactcttccccacaccttgcyccacttatagaggaaccaaaaactataatatgagttgagaaagagagtagggccaggcacagtagctcatgcctgtaatcccagcactttgggatgc

SEQ ID NO: 953954 - DNA, 575 bp, Homo sapiens
gtaccatcttaatttcctaccagcaatgtagaagggttccaatttctccatattcttgtcaatatttgcctatcttttgattttagccatcctagtgggtataaaaagaaatctcattgtggttttgctttgtatttccctgtgactaatgatgctgggcatcttgtcatgtacttattggccatctttgaagaaacgtctattcaaatcctttgcccattttaaaactgggctatttgtatttttattgctgagcttaagagttcttcatattctgcataggcaacaaaagctaaaataggcaaacaggactctatcaaactaaaaagcttctgtacaacaaaggaaacaatcagcagagtgaagagacaacctgtagaatgggagaaaatatttgcaaactactcatcttacaagggattaatttccagaatataccaggaactcaaacaactcaatagccaaaataaataaataartaaataaaatggatttaaaaatggtggtaagagcaggtatccatgtctgtttcctgcttcccgatcttagggggaaggagctttcaccagtaagta

SEQ ID NO: 953955 - DNA, 563 bp, Homo sapiens
ttagcggtgatttctgagattttggtgcacccattacctgagcagtgtgcactgtacctactgtgcagacctttgtccctcagcccctccacccttccccttgagtccctaaagtccattatttcattcttatgcctttgcatcctcatagcttagctcctacttataaatgagaacatatgatgtttggttttccattcctgagttacttcacttataataattgtctctagctccatccaagttgctgcaaaagacattatttcattcctttttatggctgagtagtgtgctatggtgtatatagaccacattttctttatgcactcattggttgatgggcacttaggttggtttcatatctttgcagttgtgaattgtgctgttataagcatacatgtgcaaatgtctttttcatagaaggactttttttccctttgggtacacacccagtagtgggattgctggattgaatggtagttctacttttggttcttcaaggaatctccacactgttttccrcagtggttgtactagtttacattcccaccagcagcgtaaaa

SEQ ID NO: 953956 - DNA, 621 bp, Homo sapiens
cggaactcatttatgcctagtgttccattattggaacgctaagcatgtgggagttatttatatcctactgctcaaggtcatcaccaaggtctgatttcaaaattcaaaaagttgcaacctcaggcataaatgggttaaggagatctctcataagagggacagaaacaaatgctgcctgaagctgtgatggacaggcaagagaaaggagcatacctatcttctacaaagtgggattcccaatagccttccccgtaagacatgaaaactgtcatacatgcaaatcaaaaaaaaaaaaaaaaatggggaaaaggcaccaagagaagcacaactgcctaagtgcccagaagcccagtctaaaatgtgtttatagtaacatacacagaaagatataataaaaataaaatcagttataatcctacctcccaattaacaactgttagtttttcattatttttcatgcttatacatgcaaatgttcttgcttaaaaggaaatactatatattctcacttaygatttcataaacaacattctgtattgatgtttaagcatttacatcatcatttaaaatggttatatagtattattttctctgaccatataataatttattcaataaatc

SEQ ID NO: 953957 - DNA, 566 bp, Homo sapiens
ggcggtggctcacgcctgtaatcccagcactttgggaggctgaggcgggcagatcasgaagccaggagtccaagacggtctggccaacatagtgaaaccccgtctctactaaaaatacaaaaaattagccaggtgtggtggtgtgcacctgtaatcccagctcctcaggaagctgaggcaggagaattgtgtgaacctgggaggcagaagttgcagtgagcctcgcgccattgcactccagcctgggcaacagtgtgagactctgtctcaaaaaaaaaaaaaggataaaattgacaaacctttagctagactaacaaaaaaagagaaaagactcaaataaataaattcacaaatgaaaaaggagacataagaactgagaccacagaagtacactcattagagactattatgaacaactatatgctaacaaattggaaaatttagacaaaatgggataaattcttggatacaatctaccaggattgtaccatgaagaaacagaagactttaatagaccaataacaagtaatgagattaaagcagtaataaagtctcccagcgaagaa

SEQ ID NO: 953958 - DNA, 635 bp, Homo sapiens
atggtgaaaccctgtctctactaaaaatacaaaacctagctgggcgtagtggcgggcgcctgtaatcccagctactcgggaggctgaggcaggagaatcacttgaaccctggaggcagaggtggtagtgagccgagatggagccactgcactccagcccaggtgacagagtgagactctgtctcaaaaaaaaaaaaaaaaaaaaaaaaagctgggcccagtggctcatgcctgtaatcccagcactttgggaggccgaggcggacggatcatctgaggtcaggaagttgagaccagcctgaccaacatggagaaagcccgtctctactaaaaatacaaaattaggcgtagtggcgcatgcctgtaatcccagctactcgggaggctgaggcaggagaatcgcttgaacccgggaggtggaggttgcagtgagccgaaactgcgccattgccctccagcctgggcaacaagagcaaaactctgtctcaaaaaaaaaaaaaaatacagaaattagccrggtgtggtggcacacccctgtaatcccagctactcgggagactgaggcaggagaatcacttgaacctgggaggcagaggttgcagtgagctgagatcgtgccactgcacgccagcctgg

SEQ ID NO: 953959 - DNA, 455 bp, Homo sapiens
atctgagtaagttactctttttttttttttttgctttttttttttttttttttgaaatgtagtctcgctctgttktacaggctagagtgcggtggcacgatctcggctcactgcaacctctgcctcccaggttcaagcaattctcctgcctcagccccctgagtagctgggattagaggcatgtgccaccacacccagctaatttttgtatttttagtagagatggggtttcgtcatgttggccaggctggtcttgaactcctgacctcaggtgatccacccacctcagcctcccaaagtgctgggattacaggcatgagccaccacacccggccataagttactcactttcttggtgccctatgtaaaatggtgattatggtagtggccacctcacaagattctaattgttacttggtgaaggaaaaaagcactcctaatttctcctggcatgg

SEQ ID NO: 953960 - DNA, 565 bp, Homo sapiens
cctcttttcgattcttaaaaagagtcagtacaaaggggaaattttctactatttggaggttaagtaatttcattaggattcaattcctaatgtgttgttctttctataatggttttctcttgatcgctgggtgattttaaagtgttcttaaatttccaaatatatgggggtgttaaaagtttggctatcttttagttaatgatttgttattttatttaactttctgcagaaaatgtgacatgtatgacatagacatagatactttggaatttctgaaggcttgctttctggcttagtgcttattcagctttccaaaatagtccttatatgcttgtaaagaatgtgttttatctaactgttgaatgcaaggttctatgtaggtccattgagtcaaacttacatgtaaaatttatgtgtaaactttatatgaaaaagtaagcaaattatggtaataataataataaacctaggaaagtaatgtaaarggaccagcctaccaaatattaaaatcatttaaacagtcgtgataatcagatcaaaatgatactgttcacaaataaggaag

SEQ ID NO: 953961 - DNA, 745 bp, Homo sapiens
aaagcaaatagcaatttctaaagctttaatttaaggaggcttctctattcagtcagctcataatttgtagtttttaagtcccctaaaatatcacctattctggatttgctgataattgagagttcattctgattttcctttatatgcaaatcttccatgagcaccaactaatgactttttaaaggtctctttgtggacattgcagagaaagtaagaatgtcaccaagtgtaattgttatgctgaataccactattcatgccatcgttaaaaggtccgtttaaagggggtgagagacaaaagctaagcttgactggatggaggagcctttccgtgccactgcggaacccctcgcaggggtgggtagtgagggtgagtaaattgttctgccctcccctgagttcccaggctccttgagtcgcacgtgctcttctagagactgatgggaacgctcagcttgcttcactctcagaccttctctccccgcccagcgcggacgggctccgggctaggagctcgcagagggacgggctgtgtcgcctcgcctctccctgcctctgtgtaggaattccccgccgctgaggtcaggagggcgggagtgacacaggagccgtggctgcctggactcctgggctgccccaggagccgaggacagccaggtggaggcggctacggctcggcccgaacccaccayggcctcccctgcagggacctgtgtccagcctccacggccctgcagctgcattc

SEQ ID NO: 953962 - DNA, 584 bp, Homo sapiens
taatcttcataggacctacttctaatgattttggtatcctaaattctgggcagtggtgagtaataatgaggtcactttgtagtttagcagactctcactttgtttcttttaatatgtaaattagagttccaagttcttgaaggtaagaaacacctgccactaaaaagaaggttaaaatgtcctcctgaagaaatgttgtatctggctgttattaaaaagcaaaaaattaatggatgatggcgagatcttggagaaaagggaatccttagacactactggcgagaatgcaaatcagttcagcccctgaggaaatccccagtttggagatttctcaaactaaaatagaattaccattccacccaggaatcccattactacgtatatacccaaaggaaaataaattgttctaccaaaaagacacctgcacttttatgtttatcacagcactcctcacaatagcaaagatatgaaatcaacccaggtacccatcaaaggtgaattagataaagaaaatatggyacatatacaacaaggaatactacacagccataaaaagaacaaaatcatgtcctttgcagcagcat

SEQ ID NO: 953963 - DNA, 686 bp, Homo sapiens
tcattaacctaagtgaattaacacaggaacagaaaatcaaatactgcatgttctcacttataagtrggagctaaacattgggtacgcatggacataaatatgggaataatagacactgaggacctagagccaggagagagggaaaagaagaagggttgaaaaactacctattgggtactttgttcactacttgggtgacgggatcattaaaagccctaacagcttcacacaatataacagtataacaaacctacatgtgtaataaatttaaaaattaaaaatttttaaatgccatatccttatgctgatttctgtgcacatatacatggctcttttgcctcatttaggtcaagaagatgttcctttttgaatacaaatctctctctaaaggatactttttaaccattctcactttatttttcaagccgaccttgcataatgaagtttttgttgctttgaaaataggagtagtaggccaggcgtgatggctcacacctgtaatctcagcactttgggaggctgaggtgggtggatcacctgaggttaagagttcgagaccagcctggccaacatgcaacatggtctctactaaaaatacaaaaattagctgggcgtggtggagggcacttgtaatcccagctactcaggaggctgaggcaggagaatggcttgaacctgggaggtgg

SEQ ID NO: 953964 - DNA, 670 bp, Homo sapiens
gaacttttctgtctagctaaaggactgtaaatgcaccaatcagcactctataaaaatgcaccaatcagcgctctgtgtctagctaaakgattgtaaacacaccaatcagcactctgtaaaatggaccaatcagcaggatgtgggtggggacaagtaagggaataaaagctggccacccccagccagcagcggcaacccactcgggtccccttccacgctgtggaagctttgttcttttgctcttcataacaaatcttgctgctactcactctttgggcccacgccacccttaagagctgtaacattcactgcgagggtctgcggcttcattccttaagtcagcaagaccacgaacccaccaggaggaacaaacaactctgaatgtaccatctttaagatcataacactcaccgcaaggtctgtggcttcattcttgaagtcagcaagaccaagaacccaccagaaggaataaattctggacacaataccacaaaaagacaaagaaagcaaaggtgcgggaagaaacttttggacaagtttgtccaacctgtggcccaggtggctttgaatgtggcccaacacaaatttgtaaattttcttaaaacattgagatgttttgcgatttttttttttaaagctcatcagctatctttagtgatagtgtagttta

SEQ ID NO: 953965 - DNA, 718 bp, Homo sapiens
atgccccttttcaatactataggaaatgtaaaaatgagcgacatagtcctgatccttaagagagtcataagttggtgaggaggagaaaggcatagatatagtcatggtaacacaagtcrtatgtggtaagatctactgagcatggggctatcagagaaagcttcatgagggtgacatggaaagggagccctgagggactggtaaatttccatcagtgacattccagggagagaggccccaagacacaggggcagcaggtggtccactgtgctcctgccctggacagggagggcggggtcctctgctgtttgtttgcttgtgtaggaattttcccctcaaacaatgtccttgtctcccatgggagaagttttacatgagtgggaacctgtttctcttctctatcccaggccattccctgagagaagagaaaggggaatcttttttttttttggacagtttcgctctgtcgcccaggctagagcacagtggtgcaatctcaactcactgcaaccttcagctcctgggttcaagtgattctcctgcctctgtctcctgagtagctgggattacaggtgtgcaccaccatgcctggctccttttttgtaattttagtagagagggggtttttgctatgttgcgtaggctggtcttgaactccgagcctcaagccatccatctgcatgggccttccaaagtgctgggattacaggcatgagcc

SEQ ID NO: 953966 - DNA, 589 bp, Homo sapiens
aacccccgtgtgtggttttcgtctcccctttcacactcctgcttactaaccaacccctggaacaatccctctcggtcacagtggctctgttaccccaggctgatctctcagctcaccytgacaggtggctcatgggagtaggaaggaccttggcatctgcaacaagcagacctgaggcactgatagctctcctggacaagaggctcatgagagtggtagggctaaggcctgagaccatggaatgtctggggtttcctctgctattttaactaaaatcttttctttctcaaaaaacctgcacatcctgttctcctgttttctctaagtgtgttttgaaatagccttgtgcacccactgcactgtctgcctcaggggcaggtctgcctcttctctggtttcaccttgcatgctgtctgacttccttctctgccttaaaacacacactccctgtgatttgtgcacccgcggctcttgctgtatttgtgcagcagcaaagacatgggctccctgcaaatgtctgtaggctcattgccaggacagacactaattgcaaccacactctgccagctccttgtaaattaccatacac

SEQ ID NO: 953967 - DNA, 617 bp, Homo sapiens
aacaacctggagtttcagggaggcytccattaactcatgctggtccagggctactgcacaaatgcaggacaacatgccatttgtcgaaacgttttaaagatatgattcagctaatgaattgtgagcaaaatatgctctctccttttacctggacagatgcacctttgcaccctagaaggaaggctgggtttgaatatagccttctgggaatctgtgatggtgacttttatgtcaacttggctaagctatggtggcccagttatttggtcaaacccagcctagctggtgctgtgcaagtatattttagatgtgattgacatttaagttactagactttgagttaagtagatgaccttccatcatgtggctgggcctcatctaatctgttgaaggcctcaggggatagactttcccccaggaggaaggaattctcaagactgaagcacaaaaactttgcctgagattccaggcaattgccctgtggaatgtggacctaagacagcaatatctggcctaccagcctgccctacaaatttcagccagccctacttgccaggacccataattgcacaaactaattccttattccttaaaataaatctctctctctcccccaa

SEQ ID NO: 953968 - DNA, 665 bp, Homo sapiens
ctggagtttcagggaggcttccattaactcatgctggtccagggctactgcacaaatgsaggacaacatgccatttgtcgaaacgttttaaagatatgattcagctaatgaattgtgagcaaaatatgctctctccttttacctggacagatgcacctttgcaccctagaaggaaggctgggtttgaatatagccttctgggaatctgtgatggtgacttttatgtcaacttggctaagctatggtggcccagttatttggtcaaacccagcctagctggtgctgtgcaagtatattttagatgtgattgacatttaagttactagactttgagttaagtagatgaccttccatcatgtggctgggcctcatctaatctgttgaaggcctcaggggatagactttcccccaggaggaaggaattctcaagactgaagcacaaaaactttgcctgagattccaggcaattgccctgtggaatgtggacctaagacagcaatatctggcctaccagcctgccctacaaatttcagccagccctacttgccaggacccataattgcacaaactaattccttattccttaaaataaatctctctctctcccccaaccccacgcatacacacacacacacacacacacacacacacacacacacacacac

SEQ ID NO: 953969 - DNA, 617 bp, Homo sapiens
aacaacctggagtttcagggaggcttccattaactcatgctggtccagggctactgcacaaatgcaggacaacatgccatttgtcsaaacgttttaaagatatgattcagctaatgaattgtgagcaaaatatgctctctccttttacctggacagatgcacctttgcaccctagaaggaaggctgggtttgaatatagccttctgggaatctgtgatggtgacttttatgtcaacttggctaagctatggtggcccagttatttggtcaaacccagcctagctggtgctgtgcaagtatattttagatgtgattgacatttaagttactagactttgagttaagtagatgaccttccatcatgtggctgggcctcatctaatctgttgaaggcctcaggggatagactttcccccaggaggaaggaattctcaagactgaagcacaaaaactttgcctgagattccaggcaattgccctgtggaatgtggacctaagacagcaatatctggcctaccagcctgccctacaaatttcagccagccctacttgccaggacccataattgcacaaactaattccttattccttaaaataaatctctctctctcccccaa

SEQ ID NO: 953970 - DNA, 735 bp, Homo sapiens
aatctcaaggaatttccaaaacatcatataactaataactgaattttgaaaggtcatagaacacaaggtcaatattaaaagatcaattgtgtttccacactcaagcaacaaacaatatgaactttagccaaaaagcaccatttacaacaacaccaaaaaataaaatacttagcctagatctaacaaaatacgtgcaggatctgaatgctgaaaacaacatactgatgaaatagcaaagaagatctaaataaatggagagaaatactatggtcatgaaatcaaagactcaatattgttaagatgtgaattctccccagattgatgtaaaacctcaatgccatcccaatgaagatcccagcaggaatgtttgtcaatgccaacaagctgattcaaacatttatttgcaaaggcaaaggactaagcataatcaaaacaattttgaaaaagaaaacaaatttggtgaactcatgctactgtatttcaagacttacgataaagctacagttatcaagacagtgtagtgttagcaaaaggatggatgcatacattaaatagagggtccagaaatgagatgcacataatatggccaattaatttttgaaaaaattgcaaaggcaattcaatggaaaaaggatagtcttttcaacaaatgatgctggaacaagtggacrtcaatatgcaacaatatatagagagacagaatatgtgaacttggaacccaatctcttacacaaa

SEQ ID NO: 953971 - DNA, 658 bp, Homo sapiens
gcaaaccactgtggcatacatttacctatgtaacaaaactgcacatccttcacatgtaccttggaaattaaaataaaagttgaaggaaaaaaagatcattcaccataatcaggtgggattcatcccagagatgcaaggatggcttaacatatgcaaattaataaatgtgattcaccacatcaacataatcaaggacaaaaaacatatgatcatttcaatagatgctttaaaagcatttgatacaattcaacatttttttatgacaaaaactctcaacaaattggatagagaaggaatatacctcagcacaataaaggccatatatgacagacctacagctaacatcatactgaatggggaaaaatgaaaagcctttccgctaagacctggaacaagataaggatgcccactggaagtgctagccagcacaattacgcaagagaaagaaacaatgggtttccaaatcaggaaagaggaagtcaaataatccttgtttggacacaaaatgatcttatatttagaaaaacctaaagaatccataaaaaaatccttagaatgaataaataaatccagtaaatttgtaggatacaaaaatcagtagcatttcratatgctaacagtgatcaatttgcaaaataaatcaagaaaacaatctcat

SEQ ID NO: 953972 - DNA, 566 bp, Homo sapiens
aaatacttagaaataaatttaaccaaagaagtgaaaaatatctgcaagaaaaactatgagrcactaataaaagaaattgaagaggacacatacaaaataatggaaagatatttcatggtcattgattggaagaattaatattgttgaagtgtctgaactacccacagggatctacaaattctgtgcaatcaccacagaaacaccaatgacattcttcacagaaatagaaaaaccaatcctaaaatttgtatgtaaacacaaaagacctctaatagctaaagcaattttgaacacaaagaacaaagcggaggcatcacgttatcctatttcaaattatattatactacaaagctatagtaacaaaaatagcatagtactggcataaaaacagatacacaggccaatggaacagaatagaggacccagaaataaatccacacacttccagccagctccttttcaataaagtttccaagaacatacattgaggaaaggtcagtctctttaataagcggtgctgggaaaactggatatctatatgcaaaagagtgaaactagatccttct

SEQ ID NO: 953973 - DNA, 566 bp, Homo sapiens
aaatacttagaaataaatttaaccaaagaagtgaaaaatatctgcaagaaaaactatgagacactaataaaagaaattgaagaggacacatacaaaataatggaaagatatttcatggtcattgattggaagaattaatattgttgaagtgtctgaactacccacagggatctacaaattctgtgcaatcaccacagaaacaccaatgacattcttcacagaaatagaaaaaccaatcctaaaatttgtatgtaaacacaaaagacctctaatagctaaagcaattttgaacacaaagaacaaagcggaggcatcacgttatcctatttcaaattatattatactacaaagctatagtaacaaaaatagcatagtactggcataaaaacagatacacaggccaatggaacagaatagaggacccagaaataaatccacacacttccagccagctccttttcaataaagtttccaagaacatacattgaggaaaggtcagtctctttaataagyggtgctgggaaaactggatatctatatgcaaaagagtgaaactagatccttct

SEQ ID NO: 953974 - DNA, 609 bp, Homo sapiens
gcgtggttggagagtagctgggacagacaggagagtccctgagggmtggtgaagacacgagagagactggggagtaattcagtgaaatttgtgagtttggtggtgattcctgggtgcctgcaatggactcccgctgaagtgtgggcgtgtttggagagtagctgggacagacaggcgagtccctgagggttggagataaagacgtgctagagactggggagtaactcagtgaaagcggtgggcttggtggtgatccctgggttcctggaactgacccgcgctgaaatgtgggcgtggttggagagtagctgggacagactggagggtccgtaagggctgggggtgaagacgtgagagagactggcgaggatctcactgaggtctgtgagtttgtaggtgtttctggggtgtggggtacagactcccgctgaaatctgggcgtaggtggagagtagctgggacagacaggagagtcatgggtggctgggggtgagctgctggatgatggcagtaagaacatatggtatattattgatgaatgaggtgactgtgaagaatctccagaggaggtcacgggagaacacaatgacatgagtgactgtcctgctt

SEQ ID NO: 953975 - DNA, 669 bp, Homo sapiens
agggctgggggtgaagacgtgagagagactggcgaggatctcactgaggtctgtgagtttgtaggtgtttctggggtgtggggtacagactcccgctgaaatctgggcgtaggtggagagtagctgggacagacaggagagtcatgggtggctgggggtgagctgctggatgatggcagtaagaacatatggtatattattgatgaatgaggtgactgtgaagaatctccagaggaggtcacgggagaacacaatgacatgagtgactgtcctgcttggttaggaaagggaaacgtaaagttgtggaattctgttgatgacggatgtgagagtggtgaagccctgcgggatgatgtagaggacttccacatccctggtgaggagctgccccttgggtctgagtttctgggaggggagagggagaagctgggtgaggcaggcatgaatattgaggagtcagggctgggggaccgctcataatctcccgagacctgtgagtctctgggggactcctggttgcatggggctgactcccgcaggaacctggggatggctggagagtaactgggagccacaggagagtccctgaggcctgggggtgaagagatgaaagacgcaggggtggagcaaagtgaggctcgtgagwctgtaggtgattcctgggtgtgg

SEQ ID NO: 953976 - DNA, 669 bp, Homo sapiens
agggctgggggtgaagacgtgagagagactggcgaggatctcactgaggtctgtgagtttgtaggtgtttctggggtgtggggtacagactcccgctgaaatctgggcgtaggtggagagtagctgggacagacaggagagtcatgggtggctgggggtgagctgctggatgatggcagtaagaacatatggtatattattgatgaatgaggtgactgtgaagaatctccagaggaggtcacgggagaacacaatgacatgagtgactgtcctgcttggttaggaaagggaaacgtaaagttgtggaattctgttgatgacggatgtgagagtggtgaagccctgcgggatgatgtagaggacttccacatccctggtgaggagctgccccttgggtctgagtttctgggaggggagagggagaagctgggtgaggcaggcatgaatattgaggagtcagggctgggggaccgctcataatctcccgagacctgtgagtctctgggggactcctggttgcatggggctgactcccgcaggaacctggggatggctggagagtaactgggagccacaggagagtccctgaggcctgggggtgaagagatgaaagacgcaggggtggagcaaagtgaggctcgtgagaytgtaggtgattcctgggtgtgg

SEQ ID NO: 953977 - DNA, 589 bp, Homo sapiens
cgtactgttctccatctttacagccatagttgcctaagaacctacataaacccttggggctgagaagatgcagctsttccccagagtaacaaagacagaggcatttgaatcttggcttctaatggcagaagccctatagttagggtgtaggaaggagtagcctgtttatataaaaataaacctacacatcattgaatctggttatcaaaattcaactaaaccaaaccaaagctctgcttagaaaataaaatacagtttatattttaaacagtatataaatacagtttatacccaatggtcatgtcagaatcctgtaatcagaagcagcttgaaactctattttcacatcctctgggatttcaattcactgacttgccagttcaaaatcacggaagtcctctacataattaatgctcatttttagtgtattgcctcagtgtatatcttattttatacacgattcatagtttcttgatgaagatgcacttatataagcataattttgtagtttttaaaaattgttttcagaaatctactctttcaaagtaactccataagcactttggtccagaatgaatcatgagtgagt

SEQ ID NO: 953978 - DNA, 640 bp, Homo sapiens
tattacattagactaaaactctgtgggsacagtgctttttgtgcaatgcaaatacaaattcaaggagaaaaaagaatgccacaaaatttctgactgttaaagaatttgttcacgtttttgttgttgttttttcttttttgtggtttttttcttttttgagatggagtctcaatctgtcacccagactggagtgcagtggcatgatcttggctcactgcaacctctgcctcccaggttcaagtgattctgctgcctcagcctcacaagtagctgggactacaggcatgcaccaccacacccggctaatttttttgtatttttagtagagatggggtttcaccatgttggccaggctggtctagaactcctgaccttgggtgatctgcccacctcagcctcccaaagtgctgggattacaggcatgagctgccgcgcccggccagttcacatgtttgtaaatggacgaaggtggaaatcaaaccactgtggaatttgtagtccattggatacatgtataaatgcacataaagaaatataaatgtattccttttaaatgtcagtatttgcaatcccctgaaaataaaattgacaactacttcaactcatgctgaaaatttgagacgtcaacttgcaaacgggt

SEQ ID NO: 953979 - DNA, 578 bp, Homo sapiens
aacagttcatatattctcttatgaacacttytatcaggttgttttgtgactctttttgtttagctattggtccaccaaattcagtatgaactgcactaacacaaagaccctgttatattctctttctaaaagtttttataaaatagcaatgaaatgtttgtgagcgaaatgttgagtgttagacgagagagatgcatataaattattaaaacacaggaccaagaatgacacacactttactgagatattgatgaagactgaatatatggaagaggaaaagattgtgaccacacacattcagttttggcccaaaagtacatatattacaacagcaggagagggcgagatggcattatagggagcagtgttgatttgaagtcctgctatcaattgtccagtgacataatcaaaaaaaacctagggatatagatctagagttcagaaataagattgtgctgcaaaaatagatataatcattcttcaagtaattcttcaggttgcctggccatttaacttgcaatacaaacagctaattaaaatctaactaagaacatggaagtaaaaatcacaatacatac

SEQ ID NO: 953980 - DNA, 445 bp, Homo sapiens
aagagaattgcttgaacccaggagacggaggttgcagtgagccgacacggtgctactgcactccagcctcggcaacagtgagactccatctcaaaacaaaacaaaacaaaacaaaamaaaacaaaacaaaaacaaacagaaagtaaatacaatttaaaaaattaaaaaataaaaccctccagcagaaaaggtgatacataaggcaaaaggcaaacagttgttaaatacagacgctaggttttagatagtattctactagtctctgctctgtatctgacgtttttcttcataaaaacaaccagaaaaataagaacaagagtttgctttcgtttcagcagagtaagaaccggtctttgtcttccgccaaagatgaagccatcaacctgtggcctggatagtgcctcaggagcgtggagtgagggaccagggagctcagacagatgag

SEQ ID NO: 953981 - DNA, 581 bp, Homo sapiens
agctgagactgcactactgcactctagcctgggcgacagagtgagaccctgtcaaaaaaataaaaaataaaaaaataaaaaaaatcaatttcccgtatacttctgttataaagaagtctttaaaaaattgyctgctcccttaagtcagccttttcactgagtttaaatttcgttccaatttgaacaaatatggatgctaatactatcctttatagttactagtgctaagtgcgttgcatgtaacaccttgaatacttactgaagtctgcaaggttggttttatgccctgattactgatggagacacaaattctgaacaactgtgacttcagggatgctaaacaccatagtgaggcacgatgcggggatttgaatcttggcctgagggttccagagctgtggccttttctggggttactctgttaattgatttctagtcctttctgatctacaagccgcggcattataacttttagatgctgaagaaaactaaactatatgtcaaggattaaggcttgtgaacccccaaaatttgggacaggtctcagttaatttagaaagtttattttgccaacgttaagg

SEQ ID NO: 953982 - DNA, 595 bp, Homo sapiens
ccaccatgcctggctaatttttgtatttttagtagagacaggatttcaccattttggccaggatggtctcgatctcctgacctcaggtggtctgcccgccttggcctcccaaagtgctgggattacawgtgtgagctaccgcactcggcctcaatatattttttaaataggaatgtatacaaggaggatgtcttcatctagactgaggaggggacccctggactgagaccttagagtaggagagaactaggcggagagagggagaaactgtttcaggcagaggaagcagcatgtgagaagaacctggaggcaggaaggagcttagtgatttctgggtttgaggaaagcccagtagcaggaagtgagcagaggccagatcattcaaggcttcctagaccaggagaagaagttttagatagtatcttgaaggcagtgggaagctttggagggttttcaccaaagatacgttggtgaaatctagtatataccttcaagatacattagaagatagaattgatagacctggtaatagctataggtggtgatgcccagcattctggctcaggtgaatggcagggacattcactgagatggg

SEQ ID NO: 953983 - DNA, 550 bp, Homo sapiens
tccacatccatgggccatcatcaatctttctgaaagcctttctgagctttaaaagcccacggcttttcaattagccattaaaatcactgtgccatctactcgaagtcttccctggagacatttgtaatagatgagaaaggagcaggaagatgaaagggggcttgctgctgtagtcaggtactgcatctattaaagggttaacagcagttctaactagttacccaccaggaagtgtgatggcctcagggtgccctgtgtggatgctccagccccagttgcagggagtcttacaactccccaaccaagccactcagtaggggactgcttctatgtcagtcacacttttcgaataagcaggagaggcgaatgaagagttatttgacaacagttctattttgttttctctatccaaatacaagctctaattcaagtcctctcttctctgcatctcagttttccacacccataaaatacataaaatgctgctcctacgtacaggttcaaatgcagycctgcacctgaaagaagcttatgtcaataaacagatgtc

SEQ ID NO: 953984 - DNA, 428 bp, Homo sapiens
tgagacaacgaacctcaggtatcaccccccagacaacaaggctgcttcaaaaccacttttcttgataagttaccaagcctcaggtattcctttatagcaacataaatgaactaagacaatagtgtatggccccttctcttgaacttgggtggggctttgtgactacctcaactaaatatgatggaagtgatgccacatgacttcaaagtctaggtcataaatggtgatacaacttatgcctggctctctctcttaggatgcttatccttggaacccttggaacccagctaccatgctgtgtggaagcccaggccacatggagaatccacatatcatatccttgctggaagccccatctgaggtcccaggtagccagcatcaactggctatcargagatcttcaagctgactccagcccagccaccacc

SEQ ID NO: 953985 - DNA, 631 bp, Homo sapiens
ttttttcttctcgtgaaatcctgtgatgacttcctgggccaactccctcatggccgtgtgctgtttccacttaatctccagcttggggctaaggtatcctttgtttgtgatgaagggtgagtgtgacccagtgttgagaccaaggactcagtgtggagaatcactgagttaatccaattaaggagctgacctagtagataagaagtacccagagagattaatttatggaagggtagttttgaaataagcgttaatccaattaaggagctgacctagtagataagaagtacccagagagattaatttatggaagggtagttttgaaataagggtagggactaagtggcaccgccttcagaaaacaatgaaaaaatggcacatacaactcaatatcagatacaaacctaaatacagtcactgatcttgggtacacagttggaacttgaaatgaatgggtacgtatttatttggaggcaaaagaacataattttataaaatgtgtgctagaaaaaaaagatgaatgagatggaaattgtttgcctcataataaggcaaaggttgttttaggaaacttaaaaccagtcaatartggaatctgtaatagtgtatgaataactatgttttaacccaa

SEQ ID NO: 953986 - DNA, 668 bp, Homo sapiens
ggtataaagagaatcccagtattaaamcgtagaagtccttaggtcagctcctcaaggtacacttaactgtggccctatcagccttgcccttagcctgaccctgagagcagccacagtaagggcatgcctggccaatggcagggccactgtcttcagatagagtagcacccccttctccagatccaagggcccagcttcacctgtgctactgcctgacagaggcaaggggtggagactaagcccacagcacttgagagctgcgtcggagcttttctcatggtatcctccccagacaaaggtcagccctaattgcggagggctctaggtcttttgggcacaggactctggcctagatgcctagtgaacaagaattactgtcacccagggagaaagcatggacgccactttataggtttaacccttgccgtgccacccctcaccgctagcaagccaggtattctccacgggaaagcagactcatccaagagtcagcctgagccagacccaaggaggaagtagagtctgcggactgctttgggctgatctcctggggcagccgtcagcaggcagatttggggagtcactgctgtagggcatctgcactgtggcttcatccctgaggagagaccctaagctgaggctgggagggaagtcagtcttcacaccaa

SEQ ID NO: 953987 - DNA, 527 bp, Homo sapiens
gccttgctcactgctagcacagcagtctgagatccaactgcaaggtggcagcaaggctgggggaggagcgcccaccattgctgaggcttgagtaggtaaacagagtggccgggaagcttgaactgggtggagcccaccacagctcaagagggcctgcctgcctctgtagactccacctctaggggcagggcatagttgaacaaaaggcagcagaaacttctgcagacttaaaagtccctgtgtgacagctttgaagagagtagtggttctcccagcatggagtttgagatctgagaacggacagactgcctccttaagtgggtccctgacccccgagtagcctatctgggaggcacctcccagtaggggccgactgacacctcatacggccaggagcccctctgagatgaagcttccagaggaacgatcagacagcamcatttgccgttctgcaatatttgctgttctgcagcctccgctggtgatacccaggcaaacagagtctggagtgcacctccagcaaactc

SEQ ID NO: 953988 - DNA, 556 bp, Homo sapiens
tgaatttctccccagaaaatgggtttttcttttctactgcattgcctggctgcaaatttgtgaagtttttatgctctgctttctcttgaacattttgctgcttagaaatttctgccaccagttaccctaaatcatctctctcaagttcaaagttccataggtctctagggcaaggacaaaatgccaccagtctctttgcatagcaagagtgacttttactccagttcccaacaagtttctcatcaccgtctgagaccacttcagcctggactttatcattcataccactatcagcattttgatcaaagccattcaacaagtcttcaggaagttttgaactttcccacatctctctgtcttctgagccctccaagtctctaggaagttctaaactttcccacatcttcctgttttcttctgagccctccaaacagttccaacctctgcctgttacccagttccaaagttgcttccacatttttgggtatctttacagcagcatccyactacctggtaccaatttattgtattagtctgtcctcatgctgctaataaa

SEQ ID NO: 953989 - DNA, 605 bp, Homo sapiens
cccctcgctcagcccatgagacaaataaatgaatamataaataaataaataaataaaagatggagtcttgctctgtcgcccagggtggagtgcagtggtgcgatctcggctcacttcaacctctgcctcccaggttcaagtgattctcctgcctcagcctcctgagtaactgggattacaggtgcatgccaccacacccggctaatttttcgatttttagtagagacgggatttcatcacgttggccaggctggtctcgaacccctgacttcaagtgatccacccgccttgacctcccaaagtgctgggattacaggcatgagccactgcacccagccagaagtgggcattaatatgcaggcgccgtatagggcaacatctgtgtgcacctcttacaaatcttaatgctgtgtatatgaggggagtccttcgtgtccccctggggatgtttgaggttgcctgtatgtgttatgtgtgtgcatatttttaagctcagatatgcataggcggattgacacctctgtttgaatgtattcccatgagctcatgccattaattcaccatcacaagaaatatttactgagcgtgagccatgccattccaca

SEQ ID NO: 953990 - DNA, 751 bp, Homo sapiens
tttcattgtccaaatatagtcacatacatttgaccattttataattattgaataataaatttgttctgctattttacaatgaaaaataatgctgcagagagcatttttgcacatgtatcgtggcagatgtaggccagaggctcttcttttatccatcctatggccaacctatgaatgtatacacgtttaatgagattttgccagcaatcaaagccttcagggaaaatgtccctagctctttactacatcagatcaaggactctggataattggcataacatcctggaatagctgaaacagagatattattctctgctctcctctgttgtctttgtcttttcacgtcttaataaaagtgctggtgacaagagtgtaactatgtcagtgttctcctgctgtccttgcctgtgtgggtcttctcccaaacccgactttcctccagcggcttcactgaaaaagaggagggggctgtggggggtgggtcggggagcagaggaggaaataaactggatagggaggaagcttctcacaggcccggagagggtaaggaagggagtcaaagacagaattttcttcagcaaacagtaaaaggggaaatctggggatgctaagagtttttaaaccctttgctccatcayataagtaatccatgattttctgttccacaaatcaggactcctactcctccctccctccccatccccaatcctgattcctgtttacaaagaatgttgaaaaacaaggaattatg

SEQ ID NO: 953991 - DNA, 565 bp, Homo sapiens
cagccatatcatttctttgctccctttaaagcaaaacccttcaaaacagttaactgtgctgtctttaattttcctcctcttcattctctcttaacccacttcactcaaagcatcattgccaccacttcacctgggctgtctttgactttcatattaattaattaaggtcttcaatgactttcatattaataaatacaatggccatttctcaaccctgatcttacctgacctatgggcagcgtttgacactgttgattatcattttcctccttgatacactttcttccttggttccaagaccccacacccacttcttagtcaccagttgctctttctcaatctcctttactgactcctccccttctcacttatctcttaataatggagcagccctgggctcagatcatttctctcaatctatactcaattcccagtgagtcwtccagtctgtgatcttaaataccaccaatgttctgatgaattccaaattcatatgatcagcccaagcctctctccaagactccagacttacatatccagcttcctacttgtcatcttcacttgt

SEQ ID NO: 953992 - DNA, 599 bp, Homo sapiens
caaaggaactgaaaatatatttttccagagaaaaagatatggaatcaacctacgtgtctatccacagatgaatggataaacaaaatgtgaggggtatgtgtgtgtgtgtgtgtgtgttgtgtgtgtacacaatggagtattattcagccaccagaagaagaaaatttttaaagagttattgcaaaagattccttactagtcttctagtttctcattacccctacatattggctcgatattctcaacacagtcgccgtagcaattattttaaaatgtaagtcagatcatatttttcctctgttcaaaatctgaactggtgccacatttccccagagtaaaaaccaaagtcttaaaactttctaaaaagtttaatataatttagtcttccctcatctttctgacttcattttctatttctatcccccttactaattccacttggtcttctttctgttagtcaaacataccaggtatattttcactgtagggtctttgctctggcttttccttccttctggaagtctcctccccttccactgcttcatgtccttcaatattamctcgtcaattggtcctaccctaaccaccctattaatact

SEQ ID NO: 953993 - DNA, 587 bp, Homo sapiens
cagaagatagcaagcatgctcccagactggggtctcttagaaagcctgaattttcacctggaagcattctggttgtctcttattttatataactaatttattcacttccaaataatttgccatttgtgaaactttaaatcctctaagagtgtctattgccatgtttctgctaaacacattgctatctcattaagacaacaacggaattacctattaaaaattataaatttttaaacaagttatatcactccaggtataagataataggttttactgtggaagtggcactgggctaataaaaaataggtaactatcaacttgttataattatattccttggggaggattacttaaaaagaatgtcctggatcctaggagccttttttttttttttttttttttttttggtaaataagatctcactgtcacccaggctgaagtgcagtggcataatcacggctcacatgcaacctcgacctcctgggctcaagcaatcctccagcctyagcctcccgagtagctaggattacaggtatatgacaccatgcccggttaattttttgagaaggagtttcaccatgttcccc

SEQ ID NO: 953994 - DNA, 614 bp, Homo sapiens
aaattttcatgtaagtccaagtacatttgtctgtatctttttcttgtaatatatttgcttttggtatcaagatagtgtaggtcttataattagtttggaactatttttttcttttcaattttctgcaagagtttacatagaattggtatggtttcttacttaaatgtttgttaaaattcatcactgtgctatctatgccaggagttttcattgcaagaattatttttactaaaataatttaatagatatggaactattcagattatctatttcttcttaggtaatttttgttaatttgtctctttcaaataacttgataattttacttatgttgtcagatttcttgtcattaatttgttcataatgttcccttttgtatttcttaatatctgtggaatctgtagttatatctactctctcatttatgataaacagtgatttttttttccaaatcaatctggctaaggtatgttaacttcatggatttttttwaaaaagctagttttttatttcattgtttatcagattttctgttttctcttacatttatttccactgctgtctttattgtttcctttttttgcttattttatttttaatttactcttcttttt

SEQ ID NO: 953995 - DNA, 614 bp, Homo sapiens
aaattttcatgtaagtccaagtacatttgtctgtatctttttcttgtaatatatttgcttttggtatcaagatagtgtaggtcttataattagtttggaactatttttttcttttcaattttctgcaagagtttacatagaattggtatggtttcttacttaaatgtttgttaaaattcatcactgtgctatctatgccaggagttttcattgcaagaattatttttactaaaataatttaatagatatggaactattcagattatctatttcttcttaggtaatttttgttaatttgtctctttcaaataacttgataattttacttatgttgtcagatttcttgtcattaatttgttcataatgttcccttttgtatttcttaatatctgtggaatctgtagttatatctactctctcatttatgataaacagtgatttttttttccaaatcaatctggctaaggtatgttaacttcatggatttttttaaaaaagctagttttttatttcattgtttatcagattttctgttttctcttayatttatttccactgctgtctttattgtttcctttttttgcttattttatttttaatttactcttcttttt

SEQ ID NO: 953996 - DNA, 540 bp, Homo sapiens
catcttcttgttgaattgaaccctttaaaattacgtagtaccttttttctctttttaaatctttgttggtttaaagtctgtttcgtgagaaactaggattgcaaccccttcttttttctgttttttatttgcttggtagatttttctctgttcctttattttgagcctgtttgagtcattgcatgtgaggtgaatctttcgaagacagcataccgacgggttgtggttctttattgagctcgccacactgtgtcttttaattggggcatttagcccatttacatttaaagttagtattgatatgcatggatatgatcttatcatcatgatgttagctggttattttgcagactggttaatgtcgttgctttataatgtcactgttctgtgtacttaagtgtttttgtagtggctggtaatggtccttaccatatttggtacttccttcaggagctcttgtaaggcaggtctggtggtaataaattctctcagaatttgcttgtctgraaagggttttacttctcctttgcttatgacact

SEQ ID NO: 953997 - DNA, 600 bp, Homo sapiens
tgaagtcaggggcacaggaacacaagggggactacctggactggacaggctggagagaggtcatgataggaagtggacattgatatgatttggatgtttgtctcctccaaatctcatgttgaaatgtgatctcaaaagttggaggtgaggcttggagggaggtgtttggatcatggaggcagatcccttgtaaatggctaagtgccatctcctccgtgataagtgagtcttaaccctattagttcacaagacagtcggttgtttaaaggagtctagcacttccttctctctctctcttgctctgtctcttgccccgtgacatgcctgctcccccttcaccttttgccatgagtggaagcttcctgaggcatcactagaagcggatgctggtgccatgcttcctgtacagctgcaggacagtgagccaaatcaacctcttttctttgtaaattacccaggctcaggtaytcctttatagcaacacaaaatggactaacacaaacctatatatgccaagttctataataataaaacaaacaaacaaaaaaatcaaaacagaaacaatgaaaactttatactattcttcaaacaactctagga

SEQ ID NO: 953998 - DNA, 662 bp, Homo sapiens
ctgcagctcacaccctccaatttaaacattttatctttcagttcaagtcacttcaaaatatcactcttcaacatggccccttcaaactgccgtggctggctggccctggtatgggaggcacgtgtggaaggaacaggatgtggacacaggatgggaggacctttgttagtcccaggccggagggcctctcacttctcctggacaattgcctgtctccctgcacctgaccccacctgcttctgcccagaaagtccaggccgtgaccacagatgctgtccctcagggcagtcttctctgttggaacctgtaagccccacactttggatgttgggggagacaaagggagggtcttgatgtgtctgacccaggggactgcaaagctttcaatcctcaaatccttgtctccaggttcatcccctcaaccagaagtatggaatccctccttcctgcctgcctggtccctcaagccaatgagctaagggcacaaggggcgaacccaggactgaactagccaccggcccttaggacgctggtcacccacagagaagaggaggtagggcccygcctgggtttcttctgccagcgtcagctctccacttcagaacacacaaagctggggcctccaatccctccacagccacagcagccatcggggctgtggg

SEQ ID NO: 953999 - DNA, 561 bp, Homo sapiens
agttgcatttctcgatagtcactgtaaaaggagctctagcatgataacagttggagatgcatctgaaaagctctttgcagaaatggcttcttggatgggaggcatagtggggtgtgtgtgtgtggctcctctgtcctcattttgtgacaaggggaagcatccaacttttcctggaactacccgcaagcagtagtgtatcacattgcgtggtctgggcatggggtaatgaggcagccaagatcttggagtgcagattgcagctagaggagggagaatgatgtctctctaacacagttgactctccaatgtggctgacagcagatttgccacataagagttgactgaccacatcatggaaccaaccaggcactggactgggtgaattttcaactctgaaattcacttagtggttccgtcaccggctgtcgctgactggctactccttgcattgtgaagggaattcatcccctgcttatgcgcgtgcgtgcacacacacactcccatacacacacacacgcacamacacacacacacacacacacacacacacaggagtcttgg

SEQ ID NO: 954000 - DNA, 718 bp, Homo sapiens
gagtggtgggcggtagatccaatgatttgctgtcacggttgtggctctccaggagccaaagaygggagactcaggcccatttgccatctgctctcctgctggatttcatctttgtgtttttgggcatgtcactcccccggcccccgtgcctgggcctcctgggccctgccaggagggtctcttggggccctgccaagggactaggccactcagagggtcctggggagatctggcttgaggtcctggagccctcacgagagctagttggcccagcagagtccttggccttcacccagcctacccctcccttgagacctagtgctgaccaatcaccattgttttctttctctctcctgtcccccacccagcagaaagcgctttcagtcggagagtagaaggcaaagcacaaaaccactttgaagagacgaacagcagttcgcagaactccagcggtgagtgtgccccttgacagccatcctgtgcggtagctgccagcttcgcccgctcccccctggcagccgcggcagcatcctgtgggctggggtctttgtggtgcattatggatcttgttgggaggaggctgggagcagggaattagagggagaccacagaggcaggaggggccttttcttccagggacattcctctgagccttgggcatcagtggacaatgcctcctctctgtctcccccatggagagagcaacacccctccccat

SEQ ID NO: 954001 - DNA, 633 bp, Homo sapiens
agacaggaaaaaggaattgacagcttcagtttgttgtctgttaccacggtttaagggtagattgtatttttggaagaataaggcagagctcctcaaactcttcctcattctttcttcctcaggcctttggaggcaagctgatctgcttaaggttcacaatcagttttatatttttctaaaggtttgtgcttccagcaactatgaagaaaaattgggtaaaataacaaatatagtacagttattataatccttcgctactgttacttgatacagcttggttgctttgtttctattagtaaggtagcatttacacacgtggaaatttaagcaattgtataaaagaatacaaaggcaaacgaaaaacacctgaggttctgatacagcataggaattactgctctcattttggtaaaaattcatttagacttacttactcattgtcaaatattattcaatttatataaaattatacctgtaattacatttacatattttacatatataaacataaacatataattttatattttaaaacattttatggtttgcttttccatgtcaatgatgcttttaataaytatataatcatgaataccgttcttatcaagtagaaaataattagaccgaggttag

SEQ ID NO: 954002 - DNA, 596 bp, Homo sapiens
tccatgatcacctgctcaaagaagccccttcccagtttcccactatcacatatccttaatatactggtttcatagcacttgatacaagatagaattgggttgtttgtttgtctgttttctcattatttttaaaggctttctccccttcatggatgtgagctcagtaagggaagagagcctatttgtcttgctcctcattgtatctccatgcatggtataatgcctggtatacagaggtcacttaatatttgctaaattagatggctgactagaaggagctagtgtgcgtggctctcatggagaggaacagaagtggcgagtaaatacagcaccttcaaatgaaacatccaggaacacacattaggactaatcaaggaaacaactcaacccacagagaatgggggaaaaggaggcaggatgatggcccacccaggagagacagggagccaagggaacctcccctaacccagggaagcaataagtawatgtgtgaccctgggaatctacacttctctcacaaatctttgcaaccgtcaggtcaggaaacccattccaccagggccttcagtctgacacatagagtcccatggagtctc

SEQ ID NO: 954003 - DNA, 625 bp, Homo sapiens
acagctgggtctaccagtgtccacttctttttctgggcccacagggaaacagcatctcccgtggcyttcacgtcagggtggccatgagacttgcattggccaatcaagtgtgaatagaggcagcgagtgtaccttccaggtgggagcatctatgagtcagcgctcagctcccctgtcctccttccctgtcacagtgactgaagaagcacatgtggagatgttgacatcctcagacagtggagcctccatcagtgacagtccctgctgtctgtgatgcctccctgccagtcagaggggacatgtagtaagagcaagaaattacctttgttgtttcggggggttgtttttgtgccatatcctagactatcctgacagccacaccaatgtgaaagcaattatgaaaatagatgctagtataagaagagaaaagggaatgaaaaacaaggtattaataggggagtactacgagtactttgggaggcaagataccagatgagttatatactctcttacataaatgtctgcacttgccaaatgcttcacagtaagaatgcatggctgtgtcaaggggaaagatcaatgttattaacaagaacacctgggccccggccaaggccgtcctcac

SEQ ID NO: 954004 - DNA, 625 bp, Homo sapiens
acagctgggtctaccagtgtccacttctttttctgggcccacagggaaacagcatctcccgtggccttcacgtcagggtggccatgagacttgcattggccaatcaagtgtgaatagaggcagcgagtgtmccttccaggtgggagcatctatgagtcagcgctcagctcccctgtcctccttccctgtcacagtgactgaagaagcacatgtggagatgttgacatcctcagacagtggagcctccatcagtgacagtccctgctgtctgtgatgcctccctgccagtcagaggggacatgtagtaagagcaagaaattacctttgttgtttcggggggttgtttttgtgccatatcctagactatcctgacagccacaccaatgtgaaagcaattatgaaaatagatgctagtataagaagagaaaagggaatgaaaaacaaggtattaataggggagtactacgagtactttgggaggcaagataccagatgagttatatactctcttacataaatgtctgcacttgccaaatgcttcacagtaagaatgcatggctgtgtcaaggggaaagatcaatgttattaacaagaacacctgggccccggccaaggccgtcctcac

SEQ ID NO: 954005 - DNA, 555 bp, Homo sapiens
aaagcagccagactgttttccacgcaggttcacgtccccgccacttctckctaaacaaggcctcccagcccgacagcccagccacccactgctacctgggctatctggccggcagcagctctgcacttccctgggactgagctcccagtggtggcaggtaggactgccatttttgctactctgcagctttgccccctactgccctgagtcttgggagggagaaaagtgattaagaactaaagtgggccctcagcaagcatagctaccttacagaaaggcagccagacagtattccatgtatatccctgcccctgttaacttcactgggcagggcctcttgtcctgggcccccagcacaaccatcgtgccactacctaaacacttcagttggtagaggctctgcatttctctgcaaaggaaatgccagagaaaacctacagccactctcccattgcagttgcatggaaccactcttactgcccatatgctggaaaaggaacaaatggcctggttgtgtcaccggcacctccaacacaccacagcaacaatacagag

SEQ ID NO: 954006 - DNA, 647 bp, Homo sapiens
gcttgatttttctcacttaaacttcagttttcctttcagtgaagaaaaaaagcttattwaacatcactttgtgaggggagattattaatattcaactttctacataaaataatcagcctttattttaaaaaaatatggccttggaagatattatttttcagggaagttattcatattttaaaatattttatctgtttttattatcattttatctgagaagctgaacacgtggttatctaaaggaatggatcttgaagttgagaacaaaactccccagaatcagcacaatcacttaatgagcttgcgaattgaaattatctttgctacagcccaagaactgagtggtaattagtgtccagggacacgtggggaacaatttcagtgttagcagtgccaagaatctattcatttgtcattggtcccaaattatattcaatcagcaattcaactcagcttggaaaaaccaagtgacatatagctaactgtctataaaattaacactgtaaaatgaaactatatttctggctgtgagcagcagtaagatgaagctatgaaaatattgcatgtaaatgctgtcaaggttcattttaatcccaccactttccaacctatgcttccttccctgaaatgccgccttggctgccaac

SEQ ID NO: 954007 - DNA, 701 bp, Homo sapiens
caggcctcagtatacatcagagaacacacacaggagaaaaaccttatgaatgtaaggaatgtgggaaaaccttttgccagaagtcacacctcagcaggcatcaacaaacccatataggagagaaatctgatgtagctgaggcaggctatgcattccctcaaaatcactttttttttcccttgaacacacaatgtacacctctctggctactattatagatttctccatgctcagtctaggagaatatggacaaaaatggtgaccattacttcctggcctaccaacaagaaggtcttaacaatgctgtaacagaagtgctatcatgcaggctttcttgttcccatttttacagcacacttcgcactttaatgtcacagatatggctgttttcctagaagttcatgtaccaacctctgccagcttcaaacatttcttctgaaacttcctcacctctgttctcctccatagaattgaagagagttagggcctttctcaggattaggctttgtctcaggggaatgttggggctggtttgatcttctatgcagaccactcagactttctctgtgtcagtaaaaaggctgttttgttttttaaaaatcattcatgtgttcactggagtagcacctataacttccttcaagaactttttctttrcattcacaacttgggtagctcatgcaagaagcttagctttggcc

SEQ ID NO: 954008 - DNA, 524 bp, Homo sapiens
acaagtttgatcgtctgaagccttcttctctcaactcgtcaaagtcattctccatccagctttgttccattgctagtgaggaactgcgttcctttggaggaggagaaacactctgctttttagagtttccagtttttctgctctgttttttccccatctttgtggttttatctacttttggtctttgatgatggtgatgtacagatgggtttttggtgtggatatcctttctgtttgttagttttccttctaacagacagtaccctctactgcatgtctgttggagtttgctagaggcccattccagaccctgtttgcctggatatcagcagtggtgtctgcaaaaccgtggatttcgttatccgcaaatgctgctgtctgatcgttcctctggaagttttgtctcagaggagtacccggccatgtgaggtgtcagtcttcccctactggttggtgcctcccagttaggctgctcagggctcaggggtcagggacccayttgaggaggcagtctgcccattctc

SEQ ID NO: 954009 - DNA, 589 bp, Homo sapiens
ttttagtctcttcagctttttatttgttaagattaattgtgtcatattaatttgttgttaagcttgttataaaaattaattattgtaaagtaattattgattacttccaagcttcttacatgcagaaataggaacctggaatatgtttctaaaactatcttctcaatgcctatgtgcacagttaaatgatttttttccacaggaatatgatcaagatgaattatattagacttctaaatattgaacttttctttattcgtggaataaactcagaaagttccttcttggtcttcacagtctatttctcttccagtgtaaatgttagtgtttctgtagattctgtacttgtttcttttattctttccttctcttattttcatttggtctgatggattcaggtagcattgaaattctggtaatttccaaatctttatctttagtttgatctctcttctgaaccactggagctatattcccaattgccagttgaacattcccacatatggaacgtcagatgtttcacacatgatatgtccaggtctgtgtcacttctggttatcayattcttttattttttttgcaaatttca

SEQ ID NO: 954010 - DNA, 642 bp, Homo sapiens
ctcctgggtcgagtgggaagttggagaacttttctgtgtctagctaaaggattgtaaatgcaccaatcagcattctgtaaaaacgcaccaatcagtgctctgtgtctagctaaaggattgtaaacrcaccaatcagcactctgtaaaaatgcacgaatcagtgctctgtgtctagctaaaggactgtaagcacaacaatcagcaggatgtgggtggggccaaataagggaataaaagctggccacctgagccagcagcagcaacccactcgggtccccttccacagcatggaagctttgttctttcgctcttcataataaatcttgctgctcgctcactctttgggtctgtaccacctttaagagctgtaacactcgccgtgaaggtccgtggcttcattcctgaagtcagcaagaccacaaacccactggaaggaagaaactccggacacatctgaacatctgaaggaacaaactctggacacgccacctttaagagctgtaacactcaccgcgaaggtccgcggcttcattcttgaagtcagcgagatcaagaacccactggaaggaataaattccagacacagtactgcctgatcattacctagtgcagacccaagagtaagctctgccatgagcaaaa

SEQ ID NO: 954011 - DNA, 702 bp, Homo sapiens
ctccccactgtaagttcttctgaagacaatctgaataacaagtttctctggctgtccagaggccatttaaactcctgtgacataataaaaaataaatatttagccayggtccctggttcctgggacagagctccccaaacccttgggattcccagagtgctaagtgtcttttttatgctaatgtctgttggtgaggtccctagacagctagcttaagagactggtagctagaaaaaccagctatgcgattggggggttaaaactttcagcccctggccgggagcagtggctcacgcctgtaatcccagtactttgagaggtcgaggtgggtggatcacaaggtcaggagttcgagaccagcctggccaatatggtgaaacctcgtttctactaaaaatacaaaaaaattagccaggcatggtggcacatgcctgtaatcccagctacttgggaggctgaggcaggagaattgcttgaatctgggaggcagaggttgcagtgaactgagatcacgccactgcactacagcctgggtgacacagcgagattccatctcaaaaaaaaaaaaaaaaaaaaaaaaaaacaacttgcagccccatctcagtttctggggagaggggggggctggagatttaatcaccaatggccactgatttaatcaattatgcctaggtaataaagcctcaataaaagttcttgaac

SEQ ID NO: 954012 - DNA, 633 bp, Homo sapiens
tgcaatcattctcactttttttctctctcattcttttaatttttttcctggtttctcttcctcttcttggcctcttacatggtctctgccccaagactcaattcttggaactctyctctttgccatctagtctgcttgcccaggagagttcatcaaagttcctgtctaaatattatccctatgtcgaggactctgcctcccatcgattgcagtcctttctctataactgcacactctgtctcactgggatgtgtagtagatatctcaaatttgaacatgacctgcacgtggcccccacatttcccaccctgtcctgcaggaaccagtttctgctctcgtgaatggcacatctggtcctccgtgttgcagattaaacacctgctgttaacttcatctcctctcttacgctaacaccaataatctggtttttagcaaaccttacttttggctctacctccaaaatatatgcagaatgtggccacttccccactccttgcagccactctgatccaagccaccattggatttgactggattttctaacagcctttgcttctgccggtgctttctatcattggattctcacctccacagccagactgaacctgcttaaacccaggtcaggttgcttct

SEQ ID NO: 954013 - DNA, 684 bp, Homo sapiens
ttacttttggctctacctccaaaatatatgcagaatgtggccacttccccactccttgcagccactctgatccaagccaccattggatttgactggattttctaacagcctttgcttctgccggtgctttctatcattggattctcacctccacagccagactgaacctgcttaaacccaggtcaggttgcttctttccccgatcaaaatcctccagtgattcccaacctagtgcaaaactaagcttctcggctgggtgcagtggctcacacctgttgtcccagcacggccgaggtgggcagatcagaaggacaaaagatcgagaccagcctggccaacatggcgaaaccccgtctctactaaaaatacaaaaattagttgggtgtggtggcacgtggctgtaatcccagctactcaggaggctgaggcaggagaatcgcttgaaccagggagtcagaggttgcagtgagctgagattgcaccactgcactccagcctggcgacagagtgagactctgtctcaaaaacaaaaacaaaataaaacaacaacaacaacaacacgctaagcttctcactttgacccacacrgccctggcaacatactttacttccctgatgtcatctcccatgacattccatcttgctcagtggctccagacatttgcctcctggctcttctgcaaa

SEQ ID NO: 954014 - DNA, 703 bp, Homo sapiens
aatgagtgattcgcaaatcgggcagcccccagaatcacagcagattctgagagtcttcaggtaygtgttgtgatcagaacaaatttatagacaaaaaaagggaagagatgtacagacattggaagtgaggtacagaaacagctcgattggttacagctcagcgtttgccttatctgaacgcagtttgaacgcttagcagtctatgagtggttgaagtatggccactgggattgaccaagactcagctattgttacaggtgcatactcttaacttaggttttaaatcttgtctgcctattaagctatgttacctaataggcatagctcctatgcctattaaaagtacggagtccccttcaggccatatttagcttctcaggccatgtttagtttgctttaacaagagcaagtcccaaatcatgccgtggttttgttatggtggtaaccatattatggtggtaaatcaggttatactggcaagacaggtcatgggagggggaggcgaagcggcctggccggcaaaggtggtcttgttgtatagatgaaacctcacaggtagcagccctcagagagaatagatggtaaatgtttctttcagttgtctcaaggtatcagactctgagttaatcttgcctagatgtggacaagggaagacctggctgcattaatgcagattctctgcagatgcaaatctctcctgcaa

SEQ ID NO: 954015 - DNA, 600 bp, Homo sapiens
atgactatgtaaagcagcagaagcagcagtctccaacctaattttggcagcaggaactggttttgaggaagacaatttttccatggatggggcagggagggggatggctttggggtgaaactgttccacctcagatcatcaggcattcgattctcataaggagcacacaacctagatccctcgcatgtgcagttgacaatagggttcgcactcctatgagaatctaatgccatcactgttctgacaggaggcagagctcagccagtaatgctcacttgcctgacactcattcctgctgtgtggcccagttcctcacaggccatggattggtaccagtacatggcttagggactggggagccctgatgtaaaggacctataatattcaaaacaattttgaaaaagaagaatttggagaacttacacaaactgaattaaagacttactataatcaagaaaatgtggagatcaggcacaatgactcatgcctgtaatcctagcggtttgggaggccgaagcaggaggattgcttgaggctgagagttcgagaacagcctgagcwaagtagcaaaaccccatttctacagaaagtttaaaaatt

SEQ ID NO: 954016 - DNA, 566 bp, Homo sapiens
ttatcaccaaggcaatggggaaaatgtctccagggcatgtcagagacctttggggtagcccctcccatcacaggcctggaggtttaggaggaaaaaattatttcctgggccaggccctgggtccctctgctgtgtacagtctagaaacttggtgccctgtgtcttagctgctccagccatggctgaaagggaccaacatagatctcaagctatgccttcagagggtgcaagctccaagccttggcagtttccatgtggtgttgagtctgcaagtgcacaaaagtcaagaattggggtttggaaacctccgcctagatttcagaggatgtatggaaatgcctggatgcccaggcagaagtttgctgcaggggtggttccctcatgcagaacctctgctagggcagtgtggaagggaaatgtggggttggagcccccacatgkagtccctactggggcaccacttagtggagctgtgagaagagggccaccattctccagaccacagaatggtagatccaccgacagcttgcaccatgtgcctggaaaagctgcagacactcaacacc

SEQ ID NO: 954017 - DNA, 554 bp, Homo sapiens
catctttatgtccatatgtacccaatgtttagctctcacwtttaagtgagaacatgaagtttttggtattcttctcttgtgttagttcatttggaatgatggcctccagctacatccatgttgctgcaaagaaaatacttttattttttatgtttttatcagccagtgcatttcttaaggcaatgaaataagtataggagaatgagtaaaaatattcacagacttggcttagtaccagcataatgtcacttccaccttacttcattagtcaaaattagtgaaatgaccaagcccatataggtagggagggcactacaaaataccatgccaaagagcatggtaacaaaaaagagtaaaaaattatattcagggccagttttatcatctacatcagatgtacacagtattgaattatttccctttattaattaagcagaaggatgaaatcttaggtagtttgcctagatgttagctttgggcatattttttacagctctgagttaggtgactatgttctagatgtccaaatctgaaggggaaaaagaagaacactt

SEQ ID NO: 954018 - DNA, 567 bp, Homo sapiens
caggaactttgctaccaggagctgagtggactcgcatttaaatttggaagactgcggctaaatgactcactgaaggtcacacacgctaatggtggagcctgggtttgaacccagagtgtaaagtggtggttctcaaagtgtggtccccaggcccccagcagcagcatcacctgggatcgtgttagaaatgcaggttcatgggccaccctaaaactgatgaatcgaaaactctggaggtggggtccagcaatctatgttttatcaagctgtcctataaatgagccacagatggtctccgtgtagtggcccccatgttgtttacttcttcacagtgggctgagatccgttagctcaaaaggcagcaagcaccaaagtcagatttttacacatccaattgttttaaacatagcccaagtaagcagattctttagtcatttagggctttccgtctttgcataccccaccaagctgtgcccaacgtcttctggtcatagacaagatacacctcagggctacayggatcacaagtggtgtgaccttcagagctctctgacccagagattccca

SEQ ID NO: 954019 - DNA, 603 bp, Homo sapiens
gcctcccaagtagctggggttacagattcccgccaccacgcctggctaaattttttgcttttttaaaaaaaattttttattttaagtagagacagggtttcaccatgttgcccaggctgatctcaaaatcctaaagtcaggcaatctgctcacctcccaaagtgctgggattacaggcgtgagccaccgctcccggcctaaaatgcactatttttaatgtcttctagagaacactctcaatttatgtatgagctgtgcttgggttttaaagagagaactattgtatcacgcgcattttaaaaaaccatcaagttccttatccagccaacaatgatcaacggtcagcctacttacagtccacgtttcagaacatttattcttaatcccaaagttggtttaactgaacacctctggactcattaagaatacttagcaaagcaattctaaaaacaaataccaatgttagactttggaactgaggagtaaacagaaagacagtttgtcattttgctgagctcamgactcagttgtttgaggtcaggaaccatcagataaataagcagaggttctgttgaggtgaaaggtcagatctcaactaagggt

SEQ ID NO: 954020 - DNA, 586 bp, Homo sapiens
acttctgtataagacactcttttctctkactccatcattaaccagggagatgatgcagtcctttacctgattatatctccacattcactcagaagttgggggaccagttgctgatgttttcactgtccttctggcccctccctcatgtctgcatttcctgtggatgggattttcctctctcatttcagtaaattccactatcttgatgatccgctttgtcttctgtcttccaggtctgtgaactccatcccagcagcatttaaatcatgcttatgtatttcagtcttaaagaaaacctcttgcttagccacaaattcctttctggcgactcccctttatttctaactatgcctcttcagtgtctcagaagagtggtctgccctctgcttccactcttacacttctctctcctcagtcttcaacccagtgtcatctgtcatcgttcctactacttcactgactttttttctcgcaacagggtctttctttgtcaccaattggctgactacttggcagcagtgtccttcctttaagaacatcttctgcctcttctccgagtccaccatcctacctctctcatgacagc

SEQ ID NO: 954021 - DNA, 616 bp, Homo sapiens
gacaaatggacagaagtaggcttcagaagctgggtaatagcaaactcctctgagctaaagcagcatgttctaaaccattgaaaagaagctaagaatcttgaaaaaagkttagcggaattgctaactaaaataagagtttagagaagaagttaaatgacctgatagagttgaaaaacacagcaggagaactttgtgaggcatacagaagtatcgatagctgaattgatcaatcagaagaaaggatatcagagactgaagatcaacttaatgaaataaagcatgaagacaagattagagaaaaaaaaaataaaaggaacaagcaaaacctccaggaaatatggggctatgtgaaaagaccaaacccacgtttgactggtgtacctgaaagtcacagggagaaaggaaccaagttggaaaacactcttcaggatattatccaggagaacttccccaacctagcaagacaggccaacattcaaattcaagaaatacagagaacaccaaaaagatactccttgagaagagcaactccaagacacataatcatcagattcaccaaggttgaaatgaaggaaaaaatgttaagggcagccagacagaaaggttgggttactca

SEQ ID NO: 954022 - DNA, 585 bp, Homo sapiens
ttttcttttgaactaccagtgaaaatagctctattgaatcgggggtgaggagtatcaattttcctacaacttctrtgtcctgctttattgaccagccgagcatcagtgacataaatggggggcctttccgttccaaagcagatattctgggctatctgacctaactcagaggaggcagcctcaccatcccacacctgtcatcctagcgctcaggccaggcccctggcggggagcctccaagggatgacagcgtggcccgcccgaggccacagggaggtgggcgagctgtcaccttcgatgggacagcccgggctgcgtcctgagcacccggcctgcccaggtggcctggatcctcggcggggtccccatccctctgctccgagtgcgccgagggccgcgtggagcccggagcgccagggagggagcctggagggccgcctgtcttttcgagctgcgcttccagggacttcgcgtttgtgcctggcgggctgcggttggaagaaaagtgccaacatggcagctccagggtcaggccccttcttccaggaggcgtttctcagccacaccaacgcggcacttcttttc

SEQ ID NO: 954023 - DNA, 834 bp, Homo sapiens
agagaccttctccccgcgtgcacttgcccacacttcctcttctgagaaggacgttagtcttattaacttaggcccaccctaacaatctcattttatttatttaatttcctccatctttcttaaggtataactgacagagaaaaattgtatatattcacagtgtataatttgatatcttaatatacattgtgaaatcatcaccaaaatcaagctaatttacacatccatttccttacacagttaacattttctttctttttttggtggtgagaacactgaagaagttctcttgggccaatttccagtgtgtgacatggcactgtgaactgtttaggcaccgtgatgagctcactcgcccagcgtctccccatctccctcatcctggatccggtggccactgtgctgctgtctgctcctgtgggttggactgttttaaacgggtcatagaggcagcgtcatgcaggacccgtccctgtgtgcctggcttattcacatagcatgatgtcttccggcttcatccacattgttgcgagtgacaacatggccttctatccatatttaaggctgaataatatcctgttgcatgtgatgccacgttttctttatccatgtatctgttcacggatacttagtttgcttccatgttatctgggtctatttaggctgctatgacaaaatacctgagacggggtcatttattaatataaacagtagaaatttatttcacatagttctggatgctgggaaggtcaagaccaaggcayctgcagatgtggagtctgccgagggctgctctctgctctgtgactggagtcccgtggctgtatcctcgcg

SEQ ID NO: 954024 - DNA, 443 bp, Homo sapiens
ccccagcttgtaactacttttgctgtgtggtttgtatttttctttagccctgtcctctttccagccaactcaacacacttaagttttcactaagagcttaattctctgagaaggatactagtttcctcaagagacatgctttattattggagaaaatgctcataatatagtctagctagtagataaatccttctcaggccccaagttcccctccttgcctcagcaacaaagtaggacttgtatcatttctatgaatttgtgtccaccaggaaatttgtactgaacttgtcaaatatcgaagtcagcaactgcatagacaacttttggagagtttatttatttatttgagcagggtcttactctgtcacccaggctggagtgcagtggtacaatctcagctcactgcaatctctacttcctggrttcaagcaattctcccacct

SEQ ID NO: 954025 - DNA, 598 bp, Homo sapiens
ctgcaaacctaattttatggtaagaagtaagatatttctggcatctcggggttttgtgcctcaactgtcagaagaataatttagctggactcttaggagatctgtggttgtggggccttttctcaatgcatcctactcagtcttcattcagccttcacaaaaccatccacccatttggctttccaggatcttagctgttttctaattttaacaaaaaaatggaggatatagtttttaaatttttttattgtctttgtattttagctaagaagagtagtctgacagtacagttttatcttcaaacaagaaactgctatcaagtgtagcggttatacttgcattttctataactgagctaataaatcatgataccttaatattttttattcattggaatactatttatcttcatgctatatttgcatttttcacataaatttagttcatcaggtgacatattcagaaactgcaatatgagttcatgccaatagtctatctgtcccagatattacataaatttcrgcacatatttcacttaaaacataaacactgtttataaatgttctacatagctatcttcttttcaagactctgagta

SEQ ID NO: 954026 - DNA, 449 bp, Homo sapiens
tgcatgtctgaatgctagtgattctcattagaggatgggaaggtggaggtaacaaaaaaatggatatttaacttgtaaaaaccaaaaatatgaataatatcagtataatatttctctttgtgataattttactataccataactgagatttgctaatttaaaaaataaactattttatcatattgggttatttgtttttgacattacatttctgataggaaattgtaggttttgatcactatcttgaagttttaaagtttaaaaagggcttcaagaacatttttattttgacgatgataggacactcccatctgaataatgtacatgaggttcacacagagcctggggtctgccrttccagggcacgggcatgttctgtgagtgtgtgaatgttgtctttcacaatcttgctgatggatgttaaactaaaaggagttttacagggttca

SEQ ID NO: 954027 - DNA, 573 bp, Homo sapiens
gaccttctaaattataataattagcaactttgctcatctcaaaagtacgacccctacaaaaagaaccattttattgaggtctccttgggtataatcaccccctcataaccaaagatttaactagcagaaaaacaagagttcaaatcaaataaaatattaacaccattcaaaataacagatgaaacaactttttaaattcacaagctgtggattagggagaaaaataatcctgaaaagttaagcctatctatcacatatatcttagtgttaactgggttcattacaatttgagatgagctctgactgaatagatctaaggactgagagaagaaagtaaaagatatcaggaaagagagttcaaaacccgactgaaggaaaactgaatcctgttctaacatcatctatcttggctcatcacaacttctccagaaaacatccataaatttttatgtgycctcaaaatctcaccaccataagaaatacttctagtatctggcccctgtgaattcttcttgaatgttggtgtttcccagtcatggaatcatacatgtatattcataaaaattaatttgt

SEQ ID NO: 954028 - DNA, 474 bp, Homo sapiens
aaaaagaatgagatcatgtcttgtgcagcaagttggttggagctggaggccattatcctaggtgaattaatgcagttatggaaaaccaactacttcacgttctcacttataagtgggagctaatcattgagtacccaaggacacaaagaaaggaaggatagacaccagagcctacttgagagtggagagagggagaagggtcgagataaaagaagtacttctcaggtactatgcttattgcctgggtgatgaaataatctgtgcattaaacccccgtggcatgcaatttacccatataacaaacagacacatgtatccctggaacctaaagtaaaagttggaagaaaagtaaaaaacggccgggcacggtggctcacgcttgtaatcccagcactttgggaggccgaggagggcggatcatgagktcaggagatcgagaccatcctggctaacgcagtgaaaccctgtctctac

SEQ ID NO: 954029 - DNA, 579 bp, Homo sapiens
tccattcctatatcatgatccaggtccctgggatctcagaattccctataaggctgatttaaatctgcttctaggttggctcttccctaggtctggcctcctgagatcagactgcttgtcagtattcacacctttgggtctgtccaggcagtggccaaaggagactatctgtgaggggcatggggagagcttagatgtgtgggctgggagacaccacacatggtgcatggccccttgcagtgtggacagggtaaggggcggagaggggaggtgggtgatttagtttttctgcacggccaggtgctgccacaatctgctctggaatctgagtagtctcagagctctaaattgatcctgacctctcaggtcatcatgaaagtatatttgtccatagggggctaaaaggtatttaatggcttgtttgcttgatgtagaacttgtcagtagttagacgtatggtttgtgggcctccactggtactcttgtcttggctctgaaaatgtcagggcaagtctgttttcttctctccacctattcaaatcycaccttctctcttcctgttcaggtcctgcttccttc

SEQ ID NO: 954030 - DNA, 593 bp, Homo sapiens
gcacactgactcacacctataatctcagcactttgggaggcccaggtgggcggatcacctgaggtcaggagtttgagacaagcctagccaacatggcraaaccccgtctctaataaaaatacaaaaattagccgggcgtgatggcaggcgcctgtagtcccagctactcgggaggctgagtcaggagaatcccttgaaccctggaggcggaggttgcagtgagctgagactgcatctctgcactccagcctgggcagcagagtgagactgtttcaaaacaaacaacaagcaaacacctatgtcttcctttgcctccctcaatatgcacatggtttacgatggcatgcatattcccattgcaatgctctattcccagataaacatcatttccttttagagcctcactctgtttgttattgaggttaacgttactttcaatgttcagaaatctttgttggcttccagaaatagcatatgcaaaggatctgaggtaaggaagaatatgaaatgctgggtaatggcaagtagtttggtgtgactgcagcttatggtggagtgggaggcctactggtgaaaggtgaggccagagatgc

SEQ ID NO: 954031 - DNA, 390 bp, Homo sapiens
ggatcatctggttagtggcttctgactcagaggaccttcatcccctggggcaatgggtcttccagtgattcccttgacataaggggcatggacgagggggtggcttatttctacttggacaatcttttttaaagtgtccttgtagaccacactggaaataagccctattaggcatttgatttgcccagcttttcccttttccagagcctccaaagtctgattgcctgagggccgtgactaaagcggtggccctttttaaatcccrtttgtcccattctgcctgctcctcctgatctctattataaaaaaccgaggttgccaagttcaatagggtttctaagttttgctctgggcctaaggtggacttttgaagttttttctaatgtctgc

SEQ ID NO: 954032 - DNA, 653 bp, Homo sapiens
ccccagatcagggaggttaaggtttgggagaaaggttcaggtgggtsaatactatagctatatgaagttgatttaaatggctttccaggtgttctccctaattccactcttgggggctgagaatctatccttcatatggcagccagagtcgttttaaagctgggccatacaacctcaacgtgattgacgtttgttggggggccatcctatgcattgtagcacatttagcagcatccctggcctctacccactaggtgccagcagcagcactccctccccacgttgcgacagccaaaaatgtctacagacattgacacatgtcccctgggggaggggagtgaaatcataccccctatcttcacttccccctgccccactgagaatctccatcataaagtgtaagtcagcccatgttactccctggtcaaaaatcctaccatgtcttctcattgttctgagcatgaaatccgccgtttggcccagccttcaaggccttgtgtagtccagccttgcctccctctcctgccccaccttgtacccctctgctgtcatctaccatcaccctttagccacatataaccctttttgacatacctcgataaaccaagctctttcttggacagggtggaagatggagagatatgggcagattt

SEQ ID NO: 954033 - DNA, 577 bp, Homo sapiens
attgttttgttttttagtagtattccaaagtactgatatacaataattgtttactcactaactgttaatagacatttgcattctttccaacttttggctattataaaaaaagctgccataaacattcacataagtttctgtgtggacatatgttttcctttctcttggcaaatacccaagaaaagaatggctggtttgtatggtagatatatgtgcaattttaaaaaacaaactgtcagccgggtacggtggctcatgcctgtaatctcagattactttgggaggccgaggcgggtggatcacgaggtcaggagatcgagaccatcctggctaacatggtgaaaccccatctctactaaaaatacaaaaaattagccgggcgtagtggcaggcgcctgtagtcccagctactcgggaggctgaggcaggagaatggtgtgaacctgggaggcggagcttgcagtgagccaagaccatgccactgcactccagcctgggcgacaaagcgagactcmgtctcaaaaaaacaaacaaacaaacaaacaaacaaaacaaaaaaacctgtcacgctattttt

SEQ ID NO: 954034 - DNA, 599 bp, Homo sapiens
agacaactctaatcctacccaatgactgcatatagcttaacrttcaaggactctaggtcttgatgtgactcctctatgaacagggacccacaaattaataaacaaaacaggcacctcctcccatactcaacatgtaaaggcagagtaggaatgggaaagactagggaaataagaagatcagaaaaaaagaaacaagaaactctgaactctgcctctcataaaagggaggacttgaacacactgaactttaatgatgaaatctacagggcaggaaaaacggactcccagccctggagtgaactcatttcttgattagacactgattctgctctccaaacagcaccaccttgctcttcatggctgatgggtttgacccctttatctatcgttcgctgcagcttcactgcgtttgtagctaattttctgctggaattggtttgagcttccaggattggccaattatagttgcttgtaaactaggcttctgatttccttgcctgagtattggaagcaattttggaggtcagtagctctggacctatgggagtaaaccaggtgaacaaagcccttcaattttttattaaccccaaaccagttcc

SEQ ID NO: 954035 - DNA, 543 bp, Homo sapiens
agatgactagaacaaacttctcaaagtctatcttgttttttcaataaaaaamttttgagtttaaataccaaaagtaaagtcaactgaagatagctatcaatgagaagggatgaatttgaacgtgtaaacagtaagataagcaaagcaagaaaaactagtagccaccaaacacaggatgtgtcatattcatatctctgaccccattaatttaaactgctaagcaaaacaaatacaactgctcattttcaaaacactttgtaaaagaaaacaaaattaactattataatactagggtgattctcattttgctcctgaagaaactgatgagaaagtttaatggcctttgtaaggtagcagttgagctttgacaaagttgggatttaaaaaatagctccctgccctgtcttcaccaggatacctctctccctggatccttcaaacgggtacagatgaatcaccaagagggctggtaatctggctgccacatgaaaacaagtgagcttgagatgttctcagagtccgaggttgttggttcagtctgag

SEQ ID NO: 954036 - DNA, 566 bp, Homo sapiens
tccttcttaggtactagattgttatttggcatcaaatcctgctagaaagtagacattatgaactggatgttgtctaatcatgttttctgtccttggagaaacctataccattcagttttatgtatgaaaatttcccaggataaaaattaattttaaaaaaattactattggaacccctctgaaagaatagtagataatttgggggtcattttatatttttgccttatctttttaaatgacaaatgatattaaggaaggaaagtaaattattaaaagttccttcttgattttaattttccttgctgtccttatccccattatggatatttgagtgtttgatataactttttccttagaattatgagtaagatcagaaacgttccaccttccttgaatgagaggatactactctcttgaaagaaagacgattttatttttaacmgtttaaaaagtgttcaacattttagtcacatttacttctctttgatcttgctttcttgtaaataatgctggtgtgtgggatccaaataagggtatttaaaaaccagttttacatgcacacatgc

SEQ ID NO: 954037 - DNA, 567 bp, Homo sapiens
atgtttaaactttacctgaagattaaattatgctaattattaaaatgtataagaatttgcctttataccgtacagtctttttaatttatctttttctggtgtgtcctgcctcccagattaaattccaaagcatatcctgctggctttgcctacataatatgtccaaaatctgaccactgcttgatcctgctgcagactactagcatttctctcctgggttttggccatagccacctaacaactgtcttgcgcttctgacctttccttgccataggcagagttgatacttttaatctgagtcatatcatgttccttctagtttcaaaaagcctcagtgatttcccattgagagagaagtcaaattccttaccatggcctacaagaatttacctgatttcatcgctttccacctcctaccacccatccaccctttagaaaatgttctttytccagcaagccccttcattcactctgttattctatcaggggaacctgcccccaacatttcaacatagattctttctattttccataagtgttggctggctgagaaataaagagaaagag

SEQ ID NO: 954038 - DNA, 586 bp, Homo sapiens
cagagtgagaccctatctcactaaataaataaatggatgaatgagagaaagacattttaaaccaatatrttaagaatcacactttaggataaccttgatattgtaataatttatgattctctaacctgtgaaaattgtaaattgttaagcaataaagagaaaatacacttgtggatatgcagaaatgtgagtttctcagtgcatgggaagcattgagagaaggaaggtgtccatccagtctgtggtcccctggtcgtccctcgcctcccctatgtatcttgtcttgcttaggttttgacctttgtcttcatgttatcctgcattgctatacaacaattggggcatcttgtggttgaagttttaaggtaaaatgaaaccatggttactccttgctgtttcattggctggccctgcagttcttcatgcttactagctcccttcctgccattgctactacaaaagccctccagacctcctttggtgggaggagacatgagaatgttttttgatctcactgacatcctactgaaatcagggaaagacagggcagtgtaaagctttcagctcattctaacctggcagactt

SEQ ID NO: 954039 - DNA, 705 bp, Homo sapiens
gcggggctcatgcctgtcatctcagcactctgggaggccgaggcgggtggatcacctgaggtcaggagttcragaccagcctggtcaacatgattaaaccacgtctctacaaaaaatacaaaaattagccgggcatggtggctactcccaccatgtggtaatcctagctactcgggaggttgaggcaggagaatcacttgaacccgggaggcagaggttaaagtgagccgatattgcgccacttcactccagcttgggtgacagagtgagactccggctcaaaaaaaaaaaaaaaaacgagagagagagagagaaataatacaaaggaaggtggtcccttgccagcacttgtcttgcctacttgagttttctcttccattcagctcatgttattccactcattctagactttctttctttgctttttctctcctctgccataacactcgaataacattcctcccagcatcaactccccttctcctgccaatagcacctcacttttccttttggaaaaccacccttttggaactcttaattcttgcagtttggatggggctgaggctacattcttctgcccctatccactccaggggtgggaacatgacccaggtctgcagaatcagaggcacagggagtcaggtaggttgagggtttctctgcagccctaaggaagaaggtattttccacctgggttgctgagct

SEQ ID NO: 954040 - DNA, 474 bp, Homo sapiens
tttttttgttttgttttttttctttttgagatggagtctcgctctgttgcccaggctggagtgtagtggtgtgatctcagctcactgcaagctccacctcccagattcaagcaattctcctgcctcagcctcccgagtagctgggactacatcacttggcatgtttttaaggttcattcatgttgtagcatgtatttatacttcatttctttttgttgctgaataatattccattgtatggacataccacattttatttatcctttcatcagttgatggacatttgggttctttgtgcttttttgctatgatgaataatgctgctatgcacatttgtgtacaagtttttgygtaaacatgtgttgtcatgtcttttgggtatatacctgggaggtgaattactggcatctatggtaactctgtgtttaatcattcaaggaactgccagactggttgactgcagaatggtttcca

SEQ ID NO: 954041 - DNA, 474 bp, Homo sapiens
tttttttgttttgttttttttctttttgagatggagtctcgctctgttgcccaggctggagtgtagtggtgtgatctcagctcactgcaagctccacctcccagattcaagcaattctcctgcctcagcctcccgagtagctgggactacatcacttggcatgtttttaaggttcattcatgttgtagcatgtatttatacttcatttctttttgttgctgaataatattccattgtatggacataccacattttatttatcctttcatcagttgatggacatttgggttctttgtgcttttttgctatgatgaataatgctgctatgcacatttgtgtacaagtttttgtrtaaacatgtgttgtcatgtcttttgggtatatacctgggaggtgaattactggcatctatggtaactctgtgtttaatcattcaaggaactgccagactggttgactgcagaatggtttcca

SEQ ID NO: 954042 - DNA, 591 bp, Homo sapiens
attcaacagtcttgcccatcgtctgtttaacttgctcttcttagaaaaacaactcacacaagcccttcttttttaaaagattttacagtgaatacatatggggaagttacattagatcttaaagaatttaacagtagtatttcctggggaatgggaccttttcttatttgctgagaggctgatgaagggccccctttctcgtctatcccaaactcctccaaaactccgaagatgaagggcatactgatctcttatctccagaaaaccagctgaaccaagtggctaggcatgggttttggaatcaaagatctggattggaatcaaagacgtgagtttacctctgtgtctctttatctttaaaaaaatagtatcttagagttggctttgagatttaatgagctctgatgcctctcaagcccttgccacagagcctggtcatggtaattacatttattaaaggccagcttcccaacttgaaagaaggagcactgatggcagattagtaaatacagaactrtcttacctcatatgggaaatttgcatttatagtgatctccagactgatgccaccttattaattggtgaagtttc

SEQ ID NO: 954043 - DNA, 471 bp, Homo sapiens
cccacaattcccatgtgtcatgggaggaacctggtgggaggtgattgaattatggggtagatctttcctgtgctgttctcagaatartgaataagtctcacaagattggatggttttaaaaatgggagtttccctgcacaagctctctatttgcctgctaccatccatgacttgctcctccttgccttccgccatgattgtgaggcctcccctgccatgtggaactgtaagtccattaaacctctttttcttcccagtcttgggtatgtctttatcaacagcatgaaaatggactaatacaccacctcatgagaccttgtgccagttatcaatgtattgtctctcaggtccaaattcatccttcactgactgctctgagaaaatggatctgagccttaaattttttttcctttgttctctttcgtgatgatatgctttataggtagaaggccctgaagaggcgtttcagga

SEQ ID NO: 954044 - DNA, 452 bp, Homo sapiens
ttgagaagatggatacaccatttaccctgatgtgattattacatattgcatacctgtgccaaaatatctcatgtaacccataagtatgtacaattattatgtacccacaaaaattaaaaattaataaaaaagatccatttgcacaagcaaaaaatgcataataaatgtaaagttcgtttagcattaaaaagtacatcattgatttcataaatgtaattacttattaggtaacaataacaaataatacaacttctgctaaataaaacatggttgaatttcaaaaatatatgtttgttaggcaaaagagtacagaacactctctctctctctctctttttttttttttttttttgagatagtctcgctctgttccccaggctggagtgaagyggcatgatctcggctcattgcaacctccgcctcccaggttcaaaggatccttctgcctcagc

SEQ ID NO: 954045 - DNA, 776 bp, Homo sapiens
caaatatttattgaacaacaaaagtccagaaaatccaagccacgccctccgtcagttttccagagtgagctttcctctatctacaaagcctaaaattagaggaagatactaattttttttagaattgccttggaatcctgaatacgtttcagcatcatcgagcttagtatgttccaacgtgtgacaaaactgaaagcagaaatagaattcagatacaagggagagttgaatccattactgtattttctagatgaaaaacagaacaagacaattacaagaccacgacatggcctctcaactaagtgtggttcgatttcaaagaatcctgcttctacagtggatgggcacaattctcctgagttgccaaatttcaagttactacatgttaatgcatttcgcacatatattgatcacataccttgactacggaggtgatgttacaatggatgaggctctgtaataaataatcacaaccacacatcagccggatgattagagaaattctcctggaaagtagttggtgctaaagaaccatgaagtgggcaaaagtgcatgtctgaacggtttcatcactcaccctgcaaattaggctcataactgccttccagcaagcatgtactagcatcaagaaacatctgactcccattctgtcattctgtaccyacgtcatcttgactagacatcaattaagagtttcctggaaaactcggaactatattcctggaggaatataaatatggtttttcaaagggagctactccattctcagctggagg

SEQ ID NO: 954046 - DNA, 776 bp, Homo sapiens
caaatatttattgaacaacaaaagtccagaaaatccaagccacgccctccgtcagttttccagagtgagctttcctctatctacaaagcctaaaattagaggaagatactaattttttttagaattgccttggaatcctgaatacgtttcagcatcatcgagcttagtatgttccaacgtgtgacaaaactgaaagcagaaatagaattcagatacaagggagagttgaatccattactgtattttctagatgaaaaacagaacaagacaattacaagaccacgacatggcctctcaactaagtgtggttcgatttcaaagaatcctgcttctacagtggatgggcacaattctcctgagttgccaaatttcaagttactacatgttaatgcatttcgcacatatattgatcacataccttgactacggaggtgatgttacaatggatgaggctctgtaataaataatcacaaccacacatcagccggatgattagagaaattctcctggaaagtagttggtgctaaagaaccatgaagtgggcaaaagtgcatgtctgaacggtttcatcactcaccctgcaaattaggctcataactgccttccagcaagcatgtactagcatcaagaaacatctgactcccattctgtcattctgtacctacgtcatcttgactagacatcaattaagagtttcctggaaaactcggaactatattcctggaggaatataaatayggtttttcaaagggagctactccattctcagctggagg

SEQ ID NO: 954047 - DNA, 633 bp, Homo sapiens
cattatcacccggtgcagcagactcggggcttacacaggacgatgggatacctgcagaagtggggaatggaagcatgagagcctgttcagattggtgtagccctaatgactccaaaggtcagggcctaagaaagggtcaacaaattgtgccttcaaaaactgttaaatgcggccgggcgcggtggttcacgcctgtcatcccagcactttgggaggccgagccaggtggattacctgaggtcaggcgttcgagaccagcctgaccaacatagtgaaacccccgtctctactaaaaatacaaaaattagctgggcgtggtggcaggcgcctgcagtcccagctactcaggaggctgaggcaggagaatcgcttgaacccgggaggcagaggttgcagtgagccgagatcatgttaccgcacaccagcctgggcgacagagggagactccatctcaaaaaaaaaaaaaaaaagaactgttaaatccattaaaaatgtactcccaaccaacaatggcagtcatgggtctgagccaagtytactgaacttacaatcctgccagccatagagtttgtgtcatatacttccctcacactgaaagttacacaaatcttagtacctgggaagacagagaaa

SEQ ID NO: 954048 - DNA, 734 bp, Homo sapiens
gtggggccatttccaagctagtgctgttacttctaatgcattatttttatttattttattttattttttattttattttatttttacttttgtagagacaggatcttgttatgttgcccaggctggtctcgaactcctggcttcaagcaatcctcccaccttggcctcccaaagtgctgggattataggtgtgagtcaacatgcccagcccactgcattcttttagatataatgaagtcatatggccagtccagattcaagggcaaggaatcagactccacttctcaatgggaaatagcaaggtcacattgtggaggagtgggtagaaggatcacctttggaaaatacagcctgccacatgcaggacagaggacagccaggaaggggcacagaggttttcttgaagggaatgataatacacatgaccatgacatctaactggagaatgagttaggggaagcctttgacaggcaaagtgtagggtttagtgggttacagcctttgatgagattgaggaatcttagcagccaggagactagaacaacagggagtgcttgtcagagaatggaatgcttgaaaatgagatttggataaaatgacttctgtgaatgatgagactcagtgtgtgaccacggaagtggatggttgcagtggaggggaaaaagggtccttagtgctacaaygtcaaggacaaatagccaaggaggtggatgggtgctctacttggatattga

SEQ ID NO: 954049 - DNA, 596 bp, Homo sapiens
tgagttatgccaccagaaacatgattctcagactattttcataggtcagacccttaaaatggggtgttttaaatatgaacctctsaatttcccattagagatattatatagccagaatatactggaaccagatgtactgtagcaggaatataaaggttttaaaagacctttttccctctaaggctgcttatttatctttaagtgtaattattcagatgagaaattaggatcatggcccttaattgggagtcaaatgtgtgggttattctggattttgccacagccttatttgagttttgatttcctctataaaacgtgaagaataagtgagtcgtcctgtaattgcaagctgtgtagttgagacatactgtcgtgttgtcaaaggtttgcagtatgttagaaaaaattgcttgtaaattaaatgtcattaaaacatccagaaagattctcaaagtcaagaaatagactggagatggcttttaagggcccttcaatcattgacagttttgaaaccagtgtttctcagagtgtggtccccaaactagcagcatcagcatgacttggaaacattggaaatgcacattctcatgcctcat

SEQ ID NO: 954050 - DNA, 587 bp, Homo sapiens
cctgtggctctgcagggctcagctcccatggttgctctcaagagctgccattgagtacctgtggcttttccaggttcctggggtctgtagaacagttgccctcttctcacagctccactaggcggcgccccagtggggactctaagtgggggttccaatcccacatttcccctctgcactgccctagtagaggttgtccataagggctctgctcctgcagcaaacttctgcctgaacatccagacattttcatatatcctctgaaatctaggcagaggctcccaagcctcaactcttgccctctgtgtacctgcaggcttaacaccacgtgaaagccaccaaggcttatggcttgcaccctctggagcaccagcctgacacgtatctggtgcccttttagccatggctggagctggagcccctgggatgtaggcagcagtatcctgatgtggggcagggaatcagggccctgggsctggcctgtgaaatcgttcttccctcctaggcctcttggctgccacaaaggtctctgaaatgccttcaagacattttctccattgtcttggctattaacactcatctcctct

SEQ ID NO: 954051 - DNA, 574 bp, Homo sapiens
cccatggttgctctcaagagctgccattgagtacctgtggcttttccaggttcctggggtctgtagaacagttgccctcttctcacagctccactaggcggcgccccagtggggactctaagtgggggttccaatcccacatttcccctctgcactgccctagtagaggttgtccataagggctctgctcctgcagcaaacttctgcctgaacatccagacattttcatatatcctctgaaatctaggcagaggctcccaagcctcaactcttgccctctgtgtacctgcaggcttaacaccacgtgaaagccaccaaggcttatggcttgcaccctctggagcaccagcctgacacgtatctggtgcccttttagccatggctggagctggagcccctgggatgtaggcagcagtatcctgatgtggggcagggaatcagggccctgggcctggcctgtgaaatcgttcttccctcctaggcctcttggctgccacaaaggtctctgaaatgccttcaagacattttctccattgtcttggctattaacackcatctcctctttacttatgca

SEQ ID NO: 954052 - DNA, 462 bp, Homo sapiens
gttttcacaaatgtataatgacatatatccaccattataatatcatacggaataatttcaggggacttccaccctggaagtcctccatactttgctaattaatttctctttccctcataatcccargcaaccactgatctttttactttcttcatagtttgccttttccagagtgccatacggttggaatcatacagtatgtagcctttttagactggtttctttcacttaataatacacactaagtttcctccatgtcttttcttggctcgatagctcatttcttttagcaccaactatcccattctctagacggaccatgatttatttatccatacatctactgaaggacatcttggttgcttccaagttatggcaattataaataaagctgctataaacacccacgcacatgtttttgtgtggacatagttttcaactcctttgggtaaatccaaggag

SEQ ID NO: 954053 - DNA, 462 bp, Homo sapiens
gttttcacaaatgtataatgacatatatccaccattataatatcatacggaataatttcaggggacttccaccctggaagtcctccatactttgctaattaatttctctttccctcataatcccaggcaaccaytgatctttttactttcttcatagtttgccttttccagagtgccatacggttggaatcatacagtatgtagcctttttagactggtttctttcacttaataatacacactaagtttcctccatgtcttttcttggctcgatagctcatttcttttagcaccaactatcccattctctagacggaccatgatttatttatccatacatctactgaaggacatcttggttgcttccaagttatggcaattataaataaagctgctataaacacccacgcacatgtttttgtgtggacatagttttcaactcctttgggtaaatccaaggag

SEQ ID NO: 954054 - DNA, 722 bp, Homo sapiens
aactctctctcttgtcttttagaagttgatctcttagaagatgatggaagtttcaatatttcaatatttaatgaaacttgtttgaaattgaacaggcgttctaggaaagttggatcagaacacatgtaccaagtaaggagatctcttatgctttccattaaagaattgtgtcatttaaaaatttgggcgatctccaagtaagtatccaaagtatttaaaaatgaatgaacttctagacagtttgtgattgttgtttctagagatggatgtaagatgtgagatgggtgtaaatgaggtactaacttgaagaaagatactatatttggtgacttgctatcattttctgtgcctggcatttcaagcttatattttattttaatgcattaaacaatacagcttattttgctatcagattcacatttgggcatggaatttatttttattttttatttttattttttgagactgagtttcgctcttgttgcccaggctggagtgcagtggcatgatctcggctcactgcaatctctgcctccggggttcaagcgattctcttgcgtcagccttcctgagtagctgggattgcaggcatgagccaccacgcccagctaattttgtatttttagtagagatggggtttctccatgttggtcaggctggtctcaaactcccagcctcagatgatctgccctcctcrgcctcccaaagtgctaggattacag

SEQ ID NO: 954055 - DNA, 594 bp, Homo sapiens
tagttacagcttagcctttgctttatttgaacagttggccacctttgattggccaaaactttgtgattggcacgagagtaggttacagtctatttacacatccagttatgttaaagttcactctgtacagagaaacctttaggccaaacataaaatgtcaggaggcagctttaggctaaacttgatttaacaggcatgaggatgattttaatgattattttgagagactgcagtcacaagagaagctctaaagcagaagttagctttttgtaagggaaatttacatctataaaggaaattttcatttgcaagggtgtcttactctattctctgcaacaggaagagaaggatgactaaaaatcactggaggctctaatcaatggagaaggcacttagacttacatctgcaaaacaccttgctcttgtttacacttttcctgatcacctccccacaactggccttccttccacacycttctgtctttcctttaggggatgatggtatgtcagcctgaacccaaagccatctctttgagatttacccatttttcccttggtagatggggaaaccatgtatatatacaaggtatgcat

SEQ ID NO: 954056 - DNA, 782 bp, Homo sapiens
taacaggctttaatccttttaaagcatgctgtgggatgggatactggcgttgagaggggtaagggtgattaggttttaatgggatggtaaggggtgcatcatccattgccaaggagggagtagaggtgtcctatacttgtgggttaaggtggggggatacgagaggaagacacgaaggaggctttgggttgggaagaagggtggcaatgagatgtggctgtagtccaggaataataagggaagcagataatttggttaaaatgtctcggcctaataagggaactgggcaggtggggttaaataaaaaggaatgtataaaagaatattgtccaagttggcaccagagttggggagttttaagaggtttagaagcctggccgtcaatacccacaacaattatgggggcaagggaaacagtccttgaaaagaaggtaatgtggagttggtagcctcagtattgattaagaaggggacagacttaccctccactgtaaaagttacccaaagcgtctgtgatggtcctgtaggcttctgaggtgatcgggcagtatcagtcttcagccactaagctgagaagatctgggaaggagtcagtcagagagccttgggccagagttccaggggctctgggagtggctgccaggcgagctgaacagtcctattttcagtgggkttccacacagatgggacacagcttaggaggggtcctgggctgcaggcattccttggcccagtggccagatttctggcacttgtagcaagctcctggggtaagagggttt

SEQ ID NO: 954057 - DNA, 566 bp, Homo sapiens
acacagtacaccaagtccccaggctgcacacagcatggggaccatgggccaggcccgtgaaaccactttttccccctgggcctctgggcctgtgatgggaggggttgccatgaaggtctctgayatgccctgcagacattttcctcattgtcttggggattaacatttggctcctcgttacgtaatgcaaatttctgcagccagcttgaatttctcttgagaaaatggggttttctttcctatcacattgtaaggctgcaaattgtccaaacttttatgcactgcttcccttataaaactgaatgcctttaacaacacccatgtcacctgttgaatgctttgctgcttagaaatttcttccgccagataccctaaatcatctctctcaagttcaaagttccacagatctctagggcaggggcaaaatgccgcctgtctctttgctaaaacataacaagagtcacctttgctccaattcccaacaagttcctcatctccgtctgagaccacctcagtttggaccttactgttcatatcactatcaacatttttgtcaaagctattca

SEQ ID NO: 954058 - DNA, 632 bp, Homo sapiens
tgaaggaatccaacacagcatggaacacatggtccttgggcctgctctgagaaggccctccatccacccagagccaccaggcaggctgcaggtgtcgagaaagacgggcagcatctctgcatcatcacatatcagggctgaccacctggtccctctctttcatttacagagcagccaactgaggcccagagaggggaaggggtgtaccttgtggggtcaaaaagtttgcagtagaactagggcagctctccactatctcgaatgaatgaatgatgtacataggtaaggataaagtacatagaggggcagcagatgagattagggacatcaatttcatcttctttgaggcatcaaacagaaattaatggaagtggtaagtcttcctattgacatgcataggttctttgggctcagtacatgggtacatatatgtgtgcccacaccatgccccacaaggctctgccttgacccccacatgctctcctccctgtcccaggcaggtgctgaaggcataggagaagcattgctcagctcgtgcccacccrctgggttttctttcctctttccaagattcttctccaggaagccctcctgaattggggagtctgtggtgctgccctcctgcccagaca

SEQ ID NO: 954059 - DNA, 597 bp, Homo sapiens
gggactaaaggtacacaccaccacacccagctaatttttaaaaaaaaattttgctatgttgcccaggctastctcaaactgttgaactcaagcaatcctcctgccttggcctcccaaagtgttgggattacaagcgtgagctaccgtgcacagccagtaatttaaaatattaaattcatgttatgtttgattaaataatagataatcataaaatctctaagtcatttgtaagctaaaatactaaaacaataataaacataagtttaagtttatatactttgacatcttatttttatatgatatagaaaagctaaatatacttaatgaacaataatttaaggatgcatatttctaaaaaattataaaatagttttcatctataaatactgatacaaaacagttcaaaattatttgctagggttttcactagaacttaggttactaagagtttaaattacagttaatatatgtaattaaaactactagatgtaagacaaacaattctgtataaagtgtataaacaagcaagatgtgcttttagtgaggaaagctataaagtgtgtgtttgttaaaaagacttttttttgtctagtttga

SEQ ID NO: 954060 - DNA, 561 bp, Homo sapiens
aagaaaccccatctctaataaaaatacaaaattagccgggagtggttgcgtatgcctgtaatcccagctactcgggaggcagaggcaggagaatcgcttgaacccaggaggcagaggtagtggtgagccgagactgtgccattgcaatccagcctgggcaacaatagcaaaactcagtctcaaaaaataaaaagtaaaacaaaacaaaacaaaacaaaaaacagctctcataaaacatgaggggatgtcattagaagaggggagatttaacatattattggagaatcccataaatgatttgaagccagtaagtcagaaaccttggaccaaacaaattcttagaaaaatatgatagaaagctgaagaagaaatagcaagcttaaatagcctaataaccatagaaataaaattagtgttaaaaattatcacaaaaaattaccatcccaaatgactttgtcagtaaattctatgtaactttgaaggaaaggwttcccattattctgcattttccagaatatggtaaaaaatagaaataccctaatatcatgagaccagcagaag

SEQ ID NO: 954061 - DNA, 667 bp, Homo sapiens
ggctgaggcatgagaatcgcttgaacccagaaggtggaggttgcagcaaacagagatcgtgccatggcactccagcctgggagataagagtgagagtctcaaaaaataaaaataaawaaataaataaataaataaataaataaataaataatacaattctttagagatgatattatcttgaaagtcatataaaacactctacactcatcactcatcccaaaaatcagccacaaaagagcagtgaacaaaggataaaaaaccatagcttttcacctagtcttcatctcccaatgccaaagggctcatggacccatcgtgggatcacaatgagaaaattagaagaatccttaataatcaagcagaacagagtcagcagatgcctttatttttacaaataaagttttattagaacatagccacagtcatttgtttacatatcatgtgcagtgactttgatgccacagtgacaaaattaaatagttgcactacttaaactctgtataacactcggagcctaaaatatttaccatctggccctttaaaaaaaagtatgccatatgacccttggttttcagatggggaaacagggcccgtacagcaagcagatgagccatccccaaggtcatccagcaatttgaggctctggatctttgagactagtgcctcc

SEQ ID NO: 954062 - DNA, 571 bp, Homo sapiens
taatgtgtttgtgttttaaactaagtgttattaccagagtcaaaatgtttttaaaaaagtaaaagttgataaagtttaaaagytacagtaagcaaaggttcatgtattattaaaaaagaattttgtaaatttagtgtcgcctaagtgtacagtgtttataaagcccacagtagtgtttagtaatgccctaggctttcacattcactcaccactcactcactgattcacccagagcaacttccagtcccacaaactccattcatggtaaatgccccatacagatgtatcatattttgtttttcatattgccttttagttgtttgtttgtttgtttgtttttgtttagacagagtctatctctgttgcccaggctggagtgcagtgacgcaattataactcactgtagcctcgcattcctgggctcaagtgatcctcctatctcagccttccaagtagctaagactacaggtacatgccaccatgcccagctaagtttttttttttttttttatattatgttttgtagagatacagccccactatattgtccaggctggcctcaaactcctgg

SEQ ID NO: 954063 - DNA, 643 bp, Homo sapiens
agattgtggccagactacctctttaggtcagcccatggcccttttctcctcactgggcagggcctccacgcagraactccagcaacttcagccaagggcttagggacagaactctgattgccctgagcctgagcccctagagggaagagtgaccatggtttccaacagacatagtctttcctcctgctgccactaaggaatgtgggcagcccagacaaatgggtctccctgcagtacagcacacccctttcaccaagaaacagccaatgtgctttggtaagtggatcccagatcccatacccccaaactgggtgacacctcccaatagaggtcgccagacaccttatacaagaacgttcctactggcatcaagacagtgaccctcgaggacagagataccaaaggaaggagcaagtatccatttttgctgttctccagcctccttgggtaacatctccaggtgcaaaggagcccagatgaataggtcctgaagtgacccccagcaaattgcatcagccctgcagaagagggtccagactgttgaacaaaacaaacaaacaaacaaacaaacaaacaaacggaaagccacaacaacagcgtcaaccaaaaattcccaactaaaacaccatccaaaggtcagcag

SEQ ID NO: 954064 - DNA, 597 bp, Homo sapiens
ttttgccatgcagaagcgctttagtttaattagatcccatttgtctattttggcttttattgccattgcttttggtgttttagtcatgaagtccttgcccatgcctatgttctgaatggtattgcctaggttttcctctagggtttttatggttttaggtgtaagatttaagatgagagtgggggctgggcatggtggctcacgcctataatcccagcactttgggaggctggggtgggtagatcacaaggtcaggagattgataccatcctggctaacatggtgaaaccctgtttctactaaaatataaaaaattagctgggcatggtggcaggcacctgtagtcccagctactcaggaggctgaggcaggagaatggcatgaacctgggaggcagaacttgcagtgagccgagatcatgccacttcactccagcctgggcgacagtgtgagactctgtctcaaaaaaaaaaaaaaaaaaaaaagagagagagtgggtgccaatattcaacattctcaaagaaaagaattttcaacccagaatttcatatccagccaawctaagcctcataagtgaaggagaaataaaatccttta

SEQ ID NO: 954065 - DNA, 588 bp, Homo sapiens
gtatggtggtgtatgcctgtagtcccagctactcaggaggctcaggtaggagaattgcttgaatcctggaggcgtaggttgcagtgagccaagattgtgccacygcactccagcctgggtgacagagcaggactctgtctcaaaaacaaaacaaaacaaaaaaaaagaaataactatgagcgcctcagcttttacagatatacttgtacaaacaaaatttctaaacacacagcactacctcgcaaacatcaaggatagcaatatgttatttgcttgggaatgacatctgatcatctaactgttacaggatccttggtgtgttgcttttctggctggaaagctctgtggccagtggtgcctttgcctgagttttgctcaggcctgctgggcttgttccggccactcagcctggcaggctgtgctaggcttacactaccagcctggatcccatgtctgtcaagggtgagccaggcatggagcagcaaggggtgtgtgagaaagcaagcgtgggttccggccactgcacacagtcaggcatgctggctgctgcagtgaggcaggtagctccaggtgcctgcacaggccctg

SEQ ID NO: 954066 - DNA, 596 bp, Homo sapiens
atgccagtatctttttctcaatttctatccatacattctgggctccctgtggacccagctaatgttagtgtattattcacataagcatcatttattggataaaaacaatgtgcattaatttgaagcaaaaaataattaagaattgagggagaggagaaatgtgtcatatgacagtcaagtttattttttacaactattttcttatgatttccaaaattaggctcatctctctcataatagtctatcagttaaaaagaaagcatttcagaggttatctgctctgaagccgtaacaggaggatggaaaaactgtggcccaggaaagtcgcatgcttctccaaaattgacacctacttagaagcaaaacttggactgaaacccaataatcttgattcccagtttcatgctctttcaatctactctaccacttatgatagtgggaagcagagactatattttaaactggaaagaaccttggagtttacacaaaacataaaattcagaaccatttattaaacataacatccttatgaagtagatcrtatctgcagtttacagataagtggaatactcagatgggctgagtaacttacctga

SEQ ID NO: 954067 - DNA, 509 bp, Homo sapiens
ttttttttattttttatttatttattttttttgagacrgagtctcgctctgtcgcccaggctggagtgcggtggcgtgatctcggctcactgcaagctccgcctcccaggttcacgccgttctcctgcctcagcctcccaagtagctgggactacaggtgcccgccaccacgcccgactaattttttgtatttttagtagagacggggtttcaccgtgttagccaggatggtctcgatctcctgaccttgtgatccgcccgcctcggcctcccaaagtgctgggattacaggcgtgagccaccgcacccggctggatgctgtgtttatgaggaatgcttgggactgctgcagccatcttgtggccatgagactgttgacagggctaaggataactgagtagaaagatggaagcacctggttttgtaagtatgtcactgacccatggaatcagccaactcaagaactggtctccatttgctttcacagtatatgagacaaataaatgttc

SEQ ID NO: 954068 - DNA, 598 bp, Homo sapiens
cattggcagaccccgccgcccccccgccacccccactacacacacacacacacacacacacacacacacacacacacacacagttcccctgcttgggagctgtgacctttaactgagttcctgagattmaagtttagtcctagtttgaggctagacctaaaagattttaatttttcagatatatgggggaaagagacctgaaagaaggagagagaggctgggctcagtggctcttgcctgtaatcccagcactttgggaggccaaggtggaaggattgcttgagcccaggggttcgagaccagcccggccaacatggtgaaaccctgtctctactaaaaacacaaaaattagccatgtgtggtggcacatgcctgtaatcccagctactcgggaggctgaggcaggagaatcacttgaactggggagggagaggttgtagggagccaagatgacaccactacactcaacctgggcgacagagcaagactctgtctctaaaataaaataaaataaaaggagagaagtggctgcttgagatcctgaccattggaacagggcggggaggcccctgggttttgtaacagctaaggcacaagc

SEQ ID NO: 954069 - DNA, 599 bp, Homo sapiens
cttttatttctttatcttgcccaagtgctttggccatgacttctagtattattttgaataaaagtagtaaaagtgagcatccttgtcttgttctagatcttagaggaaaggcattcaatttttccatgttcagtacaatggtagctgtgggttttgtcatatagcctttattattttgaggtatgttccttctgtatgcagtttttggagcattttatcataaaaggatgttgaattttctaaaatgctttttcagcatgtatcaaaatgatcatttttttcccttggtgctgttaatgtgatatatcatgtttattgatttttgtgtgttgaaccatacctgcatccctgggatgaattccacctgatcttggtgaattatcttttcaatgtgttgtaaaatttggtttgcttgtattctgttgagaatttttgtatctatgttaatcagtgacattggcctgtagttttctttgtttgttgtgtctttgcctggttttggtatcaagktaatgctatccttgtagaaggagtttggatatattccctcttctttaatttttttgaagaatttgagtagaattagtgttagttcttta

SEQ ID NO: 954070 - DNA, 729 bp, Homo sapiens
aacttataaattaccggttaaaatatctaagaaaatagcttttgtttctatttataggtacagtatgcacttcctgaaaatgtttgccatctcactgaatcattttctcctttctcatcacctagttgttcatttagcaaatatttatttatgtgccatgctagtttgttcatagggtaacaattgtgagcaagataatagaggtctctgggcccttatgaagtttataatttggccaaatagataacagcaaaaacagcaggaacatcatcttgtcatcctattaagtattttctattttgccagatactgttctaggtgaagtcatgtattcaatcgcctaattattatgataagataatcattacacagatgcaggaaggtcctaggagaaagattccattattacccccattgtctggaaaagaaaacagaggcagagggaaattttaagcaatttgccccaggacatgtagcttggaagtagaactaacaatgctaacagtaaaatgatgaatattatgatacaggaagttcaggatattgtaagaacatgaagtagaggctcttgacccagtacctgagccagcttggtctgctgtaacaaaatattatagattgagwggcttaaactacagacctttattttctcagagttctgaagggtggaaagtccaagatcaaggtctagcagtgttcactttggggtaaggacccttttcctgtctt

SEQ ID NO: 954071 - DNA, 632 bp, Homo sapiens
caatttaatcattttttatgcatctagaaatgcaagtatcagaaggaaaacatgggagaaggggaagagcatgaggctggrggttagccctgccactggatacctccatgctacaatatatgcaacacctgtactagcagcccagggttttagagcctcagatatgcatttagtgcagagtacatgttaggatgactcgacagtcaacgtatttttatcatcatgtgcatctgagcttcatgttaaatattcttgcaagtttatataactttttttttttgagatggagtctcactctgtcctcaaacaggagtgcagtggcacaatctcagctcactgcaacctccgcctcccaggttcaagcgattctcctgtctcagcctcccaagtagctggaactacaggcatgcaccaccatacccagctaatttttgtatttttaatagagacggggtttaaccatgttggtcaggatggtctcgatctcctgacctcgtgatcccctcatcttggcctcccaaagtgctgggattccaggtgtgagccaccacacccagcctggataactttttttaaggcttgaacattttttaaaagaaaaggtttttaaagggctcacagtatttttgatg

SEQ ID NO: 954072 - DNA, 514 bp, Homo sapiens
gcatgccaagcttgggcaattgggcttgtcttgtctaggtcgtcctcacatttacaagtctgaacaacatttggccccacaaaactactagttaatattctcctattccactaagtacttctattttggtattggtatcattctgccctgaattgctgcatatagtgtcctgggtgctctagtggaagagcactagattgcaaactcggagaggcagggaaaggtctattttgtttctgcattttctgggcttagaggcctgggcatttcacatagtaggttctgtatcgctataaatgtatatgaaatatgtagacattcttgcctctcctggacacccctaccaccatatcttgttcccgtttgcacgctgggaacactatcatctgactgttgagcatacacacagaatttgcatgtatatatgacatgcacactgttttatatgtaccacatgtgtgtacacacaaacatgctacacrcatacaatatgtgtttagtaactgcaatacca

SEQ ID NO: 954073 - DNA, 632 bp, Homo sapiens
tgaacccaggaggcggaggttgcagtgagccgagatcatgccattgcactccagcctggatgacagagcgagactccgtctctaataataataataataataataataataataataataawaaaatgataataatcaggatctgctctcaggcagcagttgggaccttaggaattacaaaatcttccaaattaggtcacatttgtgtaaaggaattagaaacatctttcccatttcatcaggcccagattagaacagcctctgcagagggtcctagtagatcagtcctcctgtcaggcccatgggtgtgatttcctttctcaaacagccactgaacttttcttatgattatggagtgtttattgggtgtgtgcaatgtgtcaggtgcagtctggaatttggaactgtcacatactggcagcatgacctctttaagaggcaggaacttgttatctctgtcatccggtcccatgttggggaactatctatgaatcagccaagatgggttcccagccctccatccatctcccttcaaggcaaaatggtctaatgggaaaagtccatgatctagcatacctggctgctctacttccagcctatgttacttagagcaagaatcacctattttaacc

SEQ ID NO: 954074 - DNA, 628 bp, Homo sapiens
gctacccattgcaagtggactttaaaaaggcaaagttacacatcatctggcttctgcttgcctctctgaatttatctccctccatgttccccccactatgctccaattatgttagctttaagttagctatcttgtttttttttttttggtttttttgtttgtttgtttgtttttgagatggagtctcgctctgtcacccaggctggaatgcagtggtgcgatcttggctcactgccacttctgcctcctgggttccagtcccagcctcccgagtagctgggattataggcacacgccatcacgtttggctaattttgtatttttagtagagacggggtttcaccatgttggcaggctggcctccaacttcttacctcaggtgatccacccacctcggcctcccaaagtgctgggattacaagcatgagccgtcgcgcctggcctatgttagctttcagttagattctgtagaagatacacactgttgatggcctatccttatcctgcctgsagttgaagagttttcagcattctgacagtttctcatctttagcactgtgtctctttttgtgtttgcctgagggctttcttcaggggtttgcttgacctccacaggtgcaacctagaa

SEQ ID NO: 954075 - DNA, 477 bp, Homo sapiens
gttcatgcaattctcctgcctcagcctcccgagtagccgggattacaggcatgcgccaccacgcccggctaatttttgtatttttagtagagacagtgtttcaccatgttggccaggctggtcttgagctgacctcaggtaacccacccacctcagcctcccaaagtgctggtattacaggtgttagccaccgcgcccagccaacttggactcttcatagctagaccagcatgtattttaaatgtgttttaaaatgtatatagaagagatccatcatgtggcagtaatgccacccaattcttgttttgagtattaggatagcttggaatggatgtggatcaaaattttgcatttctgaaacattattctcccttttttgtttttgagactgagtcttgctctgtcrccaggctggagtgcaatggcacaatctcagtcactgcaacctccgcctcctgggttcaagtgattctcctg

SEQ ID NO: 954076 - DNA, 588 bp, Homo sapiens
ggtgcatgcctgtaacaggtgttacacctggctaatatttgtatttttagcacagacagggtttcaccatgttggtcaggctggtctcgaactcctgaccttaaatggtctgcctcagcctcccaaagtgctgtgaatacaggcatgagccaccgtgcctggctgaaacattattctcgatagctgaaaagcagaaacaactcagatgtccatcggctaataagtggatgtgggtatgcaaacaacagattattattcagccttaaaaatgagtaagttcttttgcaacatgcaacaacatagctgaatcttgaaaacatgatgctgagtgaaagaagccagccacaaaagatgacatattgtatgattctctttttaagaaatgtccagaatgggcaaatccatagatacagaggacaaattggtggttgccagggactagagggaagagggaatgggaagtgactgctaaagggtttagggtttccctttggggtgatggaaacgttctggaattacacagtgatggttgtacacctgtgtctgtaccyaaaaatcactgaactgtacactttaaaagggtaaatt

SEQ ID NO: 954077 - DNA, 693 bp, Homo sapiens
aggagaatcgcttgaacacaggaggtggaggttgcagtgagtgaagatcataccactgtactccagcctgggcaacacagcaagactctgtctcaaaaaaaaaaaaaacaaamaaaaaaattctcagtggaaacaaaacaaccttctactggaagaagatgccatctaaaactcccatagctggagaggagaagtcaattcaaagcttcaaaagacaggctgaccctcttgttaggggctcatgaggctgatgacttaccctcttgttaggggctcatgaggctgatgactttaagttgaagccagtgttcatttaccattcagaaaaatgtcaggcccttaagaattatactaaatgtactcttcctttgctcagtaaatgaaataacaaagcctggatgacagcatatctacttacagcatggttcactgaataatttaagtctactgttgagacctactactcagaaaaaagattcctttcaaaatattattgctcattgacaatgtacctggtcacccaagagctctggtggagatatacgaggagatgaatgttgttttcatgcctgctagcacaacatccattctgcagcccatggatcaaggagtcagctcaactttcgaaatctatttcatgaggctacagttgccacagatagtgattcctctgacagatgtgggcaaagtaag

SEQ ID NO: 954078 - DNA, 584 bp, Homo sapiens
ggatcacgaggtcaggagatcgagaccatcctggccaacacggtgaaaccccgtctctactaaaaatacaaaaaaattagccgggcrtggtggcaggcgcctgtagtcccagctgctcaggtggctgaggcagaagaatggcatgaacctgggaggcggagcttgcagtgagccgagatcgcaccactgcactccagcctgggcaacagagcgagactccatctcaaaaaaaaaaaaaaaaaaaacaataaaaaaacaagacatttagatagtgcatgagtagctacaatggacaacataaattatgtttcttgttattatttgtgtttgtattctaaagaggcatttgcctgccaaactatttcagtctgatattttcaaaactcttctaataaaaaagatactgagttatgtgacattttgatgttctgatgatgatcgttattaaggcagggcattgtttcattgagttgtttatagtactgtaagaatataacactgatctattaaaaacagatgcagtgttgtcatgaaatgggatatatgaaaatatgttaaagcctctaaatgaaaaaaagataaag

SEQ ID NO: 954079 - DNA, 584 bp, Homo sapiens
ggatcacgaggtcaggagatcgagaccatcctggccaacacggtgaaaccccgtctctactaaaaatacaaaaaaattagccgggcatggtggcaggcgcctgtagtcccagctgctcaggtggctgaggcagragaatggcatgaacctgggaggcggagcttgcagtgagccgagatcgcaccactgcactccagcctgggcaacagagcgagactccatctcaaaaaaaaaaaaaaaaaaaacaataaaaaaacaagacatttagatagtgcatgagtagctacaatggacaacataaattatgtttcttgttattatttgtgtttgtattctaaagaggcatttgcctgccaaactatttcagtctgatattttcaaaactcttctaataaaaaagatactgagttatgtgacattttgatgttctgatgatgatcgttattaaggcagggcattgtttcattgagttgtttatagtactgtaagaatataacactgatctattaaaaacagatgcagtgttgtcatgaaatgggatatatgaaaatatgttaaagcctctaaatgaaaaaaagataaag

SEQ ID NO: 954080 - DNA, 669 bp, Homo sapiens
tatgggcttccagagggaacggttgaggttaaggagggttttccgcctctggggctagcagggactttagagatctttctccatgtgtrgctgaaggggtccggagtggggaggttgctggctccaaacttcatgctagtcagtggcagatgagggagccccagtccagtgctctaggcactaatgaggcttcctgcccgttccctcgtcttgctccaagtgcaagaatgtctccaaaggggtgctgagagaccggagactacccctttaccttgccccaggccgcccaccccaaggtgcctgggaagggggtctggcctagtggtagggagcagggatacagcagaagtgcctagtatttccctgaccagaggctgactcagcagggcatcaggactggctgccctccccagccccctccacacctgaatccactcactcagcacttcccacttccctaccgggttctatgggcaccatccctgtcttcctggagcactggtgggcactgggcaggctggcagctcagagacccagagctagggtggagggggcaccggggcccgcaggagtcagaggtcaggcccaggaaggaagtgggcagccaacagcttccctcattctggctgagggcccacagccagcctggagtttttggctgatgtttgg

SEQ ID NO: 954081 - DNA, 619 bp, Homo sapiens
gattacgggcacccgccaccaygcctggctaattttgtatttttagtagagacggggtttctccctgtcttgaactcctgacctcaggtgatccgcctgcctcagcctcccaaagtactgggattataggtgtgagccactgtacccggcctctctgcttatctttggtgtcttataatttctgctttttaaatattggctcgcccatccactttgttttttctccatctctctttttttttttttttgagacggagtctcgctctgttacccaggctagagtgcagtggtaagatctcagctcactgcaacctctgcctcctgggttcaagtgattctcctgcctcaacctcgaatacctgggattacaggcaccagccaccatgcctggctaatttttgtatttttagtagagatggggtttcaccaaattggccagcctggtctcgaactcctgacatcaggtcatcctcccgcctcggcctcccaaagtgctgagattacaagcatgagccattgcgcccagccctccatctcatatttttagcctatttataggttctgcttacttatggcttcatcttcctcataagttttgcttgcttatgaccctcttgac

SEQ ID NO: 954082 - DNA, 601 bp, Homo sapiens
gcctgggcaagtaacagagcctctctaagcctcctatgttctccttctaatacagaaatgatggtgcctaaccactggggtgattgtaaaaactcacagatctgatgtatagaatggakcagtccagggaatagacttgtgctagactgcctggctccagggtgtgggttcttaacctagggtttcaaactcaggggcccggctgttatacacatagtgaagcagcgtgggttgactggtgggctggagggcatgtgcccaccactcagctcaggcaggggccatgcagaggttcagaccaggtgtggtggaatttctctttttctcttggtaagctagaaattactactttctctctctctctcttttttttttttttttttttttgagacagattctcactctgtcatctaggctggagtgcagtggtgcaatcttggctcactgcaacctctgcctcctgggttcaagtggtcctcccacctcagccttctgagtagctgggactacaggtgcccaccacacctggctaattatcgtatctttagtagaaatggggctttcagcaagttgcccaggctcctgaggtcgaaatcctgac

SEQ ID NO: 954083 - DNA, 559 bp, Homo sapiens
gatcatgaggtcaggagttcgagaccagcctgtccaatatggtgaaacctcgtctctactaaaaaatacaaaaattagccaggcstggtggcacgcacctgtggtcccagctacttgggaggctgaggcaggagaatcacttgaacccaggaggcagaggttgcagtgagctgagatcacgccactgcactccagcctgggcaacagagtgatactccatctcaaaaaaaaaaaaaaaaattatggaggaccccaaggaacttcagtttgttagaaactaacactaaacttttaaaaaatacttattttatgtaaaaataactatgataaacttattatatattaacagaaataacatatttggaaagaagaataacagtgttttacatgtttgcaaatctctttaaaatgcaacatgtagtctttcaaaagctcttctgtacactcatgaaagagagtgaaaaacatattaatatttttattaaaatagtttccatttcatggatcccttgaaagggtcttggggtatccttagggatcccagaaccatacattgaga

SEQ ID NO: 954084 - DNA, 595 bp, Homo sapiens
gcaattcatatcttacatgaatggctgcaggcaaagagaagagacagcatgtacaaggagactcctattttgaaaaccattggatctcttgagacttattccctatcatgagagcagcatgggaaagacctgcccccatgattcaattacctcccaccaggttcttcccacgacacgtgggaactgtgggagttacaattcaagataagatttgggtggggacacagccaaaccatatcagtcttgctctgttgccgagttggagtgcagtggcatgatcacagctcactgaagcctcaacctcccgggttcaagcagtcctcctgcggcagcctcctgagtagctggaactacaggcacatgccaccatacccggctaatttttaaaatttttttgcagatatgaggtcttgctatgttgcccaggctgttctcaaaatcctggcatcaagtgatcattccacctcagcctcccaaaatgctgagattacaagcataagccacagcacccagccaggaattacatttcaacatgagattttgagargtcaaacatccaaaccatgccaagtacttatagccctaaagcagagct

SEQ ID NO: 954085 - DNA, 697 bp, Homo sapiens
cagagtgttgaggaaatatccaaaatccagtttctcaaattccagttctgttttctcctgtgtccctggagggaagagagggrcaggagctacacgggttcctgaggtcagtagacccctgaggtgaccccatctgcatgcaccttcccttaggactttgtccacatcagaactaatcctctttagctctccacggctacgtggagcggcggtgacttgccgccatgtttctttctcgggaacacacgcgtgccatgcagggggagacctgccctcatctgtcttgggttggagttgatgggcttcccattcttgggcagagttacagctacagaaatgcttttctggatctgctttcttcagggtgcaggaagcatcagtgcagatatgaattctccctggagtttttagtctcatgttactggccaaaaaatgtaaagcccagccgtgagaggatggctggatatgaccaaagctcaggaggccaccattagggcagggaacggctgatcacgtcccctgaagaggccatggaggcagcgtgggcagtggattgattagcgtaggccccaaagtcagtaccatggaacctccactttccctgctcaccagccctgtgggcctgggggaagggaggtcacttaactcccagtgagttcaaagtcatccttggtgaaccaggataagaacacctcat

SEQ ID NO: 954086 - DNA, 567 bp, Homo sapiens
gttcctcctctctggtcacctgacctctcttgtagaccatgagctctggacttaaaacttggctaagttacagaaactgggcaagggattttggctttttattgaagtggctgccctcagtcttctgaacatccatcctctttttttgttgttgttattgtatatatcaagcaatgctcttgttgactcaccatctattttgccctcagaaagactatgtcttactatctccatagttttttttttttaatgtattatattttaagttctgggatacatgtgcagtacgtgcaggtttgttacataggtatacatgtgccatggtggtttgctgcacccatcaacccatcatctacattaggtatttcttctaatgctatcccttccctaaccccccacccgcccccaacaggccccagtgtgtgatgttcccctcccygtgtccatgtgttctcgttgttcaactcccacctatgagtgagaacatgtggtgtttggctttctgttcttgtgttagtttgctgagaatgatggtttccagcttcatccatgttcctgcaaaggaca

SEQ ID NO: 954087 - DNA, 554 bp, Homo sapiens
acttcagaccaggctccctaactgcattcatttatcaacagggtttattagggggtccacctaacaaaaccaccrcccactctttgcagagaccctggaaaccatcttcatagaagacaattataactataaataacaagtatctccctcttgtacctggttaaaaacttgtcagataccaagaagccacattctttggctttgctaaatccctccacaaaagatgggagagcaagctttctttgctccccccccaagattaacccaatgcgcagtatttcctgacatagttaccagggaaagtcgctgccagggtaaacccgtctggtgcagaacaggatggtggcagaatgtgcctgtgactgtagcccatagtcaggtccagggttcaagcgcatcactcctctctctggaaatacaagccccagatacagcactctggaggaagttcgtagtctattcctgggttaaagtataaaattgaatattcattgttttgggtgcgtgaattagcatttattcatttcctgtaacatcttgaatgcactgtaagg

SEQ ID NO: 954088 - DNA, 554 bp, Homo sapiens
acttcagaccaggctccctaactgcattcatttatcaacagggtttattagggggtccacctaacaaaaccaccgyccactctttgcagagaccctggaaaccatcttcatagaagacaattataactataaataacaagtatctccctcttgtacctggttaaaaacttgtcagataccaagaagccacattctttggctttgctaaatccctccacaaaagatgggagagcaagctttctttgctccccccccaagattaacccaatgcgcagtatttcctgacatagttaccagggaaagtcgctgccagggtaaacccgtctggtgcagaacaggatggtggcagaatgtgcctgtgactgtagcccatagtcaggtccagggttcaagcgcatcactcctctctctggaaatacaagccccagatacagcactctggaggaagttcgtagtctattcctgggttaaagtataaaattgaatattcattgttttgggtgcgtgaattagcatttattcatttcctgtaacatcttgaatgcactgtaagg

SEQ ID NO: 954089 - DNA, 642 bp, Homo sapiens
caaagaataaatctcaggatcttggagaatttgctattattaaaaatcaaagaataaatcaataacagcattattttaaatgcaaataaaaatgagttaacatttttcaactaccaagttagtagaggttttctttgtctttattgtggcaaaatgtaaacaacaaaaaatttaccatttcaaccatgtttaaattgtacaagttagtggcaataaataccatcacttttatcaattttcagaattttttcaacatcccaaacagaaactcttgcgactattaaacaatagctccctgccttcctcctcctcccagcccctagtaacctacctctattctactttctgtctctgtgaatttgcctattgaagatacctcatataagcagaatcatacaatatttgtccttttttgtctggcatatttcacttagaatagtgttttcaaggttcatccatggatagcatgtattagaatatcatccctccttaagggtgaataatattccatcgtacatrtaactacattgtatttatccattcatctgtggatggacacgtggacttttttttcgaatacctcaattcactgtcaagaacacaggagacttctaactgatgagagaaatgagaaaaatgatg

SEQ ID NO: 954090 - DNA, 632 bp, Homo sapiens
ttggttggcaatgcaatcataggggtgtggaaaatggtcaccatctgtgcactgagtccacctcttggtgggagaggagggcacagaaatagttgagttatgagtcatgagtctgggtggcatcagtctgaaaaacatctcaaaagaccaatcttaagttctacaatagtgatattatctatatgagcaattagggaagtcataaatcttgtgacctctggccacacgattcctgagaagtaagggatcataaaaactataccgacattttagcagaattcagggccctcccataatcctaatcttatggcctttcattagtcttatgaaagtagtttcagcccgccccctggccccaacaaggagaggattcgtttcagggagaaactattatcatccttgcttccaagttaaactataaattttaatttggttaaaagtaagaatatgttagcttgtcctatgcccaggaatgagtgaagacagccaaccggtgaggctagaagcaagatggagtcagycatatcagatttctcttactgtcataatctttgcaaaggtggtttcaactcagggattctgagtgagtctttacaccagtctgtaccatgtgcattgtggagaattttcac

SEQ ID NO: 954091 - DNA, 659 bp, Homo sapiens
ataaaatcaaaaataagttaataactcccaagatacaatggggggtataggcattgagtaaatactcccattccagaagggagaaatctgccaaagaaaaggggctacaggccccatgcaagtccaaaatccagmattgcaggcattaaatcctaaagctccaaaataatctcttttgactccatgtatcacatccaggtatgaaggatgggttaccaaggccttgagcagcttgtccccgtggctctgcaaggctctgccccatagctgctctcaagggcttgcattgaattcctgcagcttttccagttgcagggagcaagctgctggtggatgtaccattctggggtctggaggaaggtggccctcttctcacagctccactaagcagtgacccaactgggattctgtgtgaaggctccaatccatttcccctctgcattgccctagtagaggttctccatgagggctccacccctgcaacagccttctgcctggacttccaggcttttccatgcatcttctgaaatctaggtggaggctcccaagcctcaactcttgccctctgcacacctgtagccttaacaccatgtagaagtcaccaaggcttacagcttgcaacctctgaagcaacagcccaagctgtaactagagccctt

SEQ ID NO: 954092 - DNA, 597 bp, Homo sapiens
ttataatatctgttgtgctaatctgtgatcagtgatctttgatgttactgttgcttttattttggggygacacaaactacatccacataagacggtgaagttagtcaataaatgttgtatgcattctgactgctccaccaactgaccgttactccatctctctccctctcctcagacctccctattccctgagatacatcaatattgaaattaggccaattaataaaattacaatggcctataagtgttcaagtgaaagggagagacacacatctctcactttaaatcaaaaggtagaaatggttaagcttagtgaggaaggcatgtcaaaagtccagataggccaaaatatagatctcttgggctatatttagttagctaagttgtgaatgtaaaggaaaagtagtttaaggaaattaaaagtgctactctagtgaacacacaaataagaaagtgaaacagccttattgcacatatgaagaaagctttagtgttctagatagcagatcaaaccatccacaactctcccttaaactaaaccctaatccagagcaagaacttaactctcttcaattctgtgaaggctaagagaggtaa

SEQ ID NO: 954093 - DNA, 590 bp, Homo sapiens
gattattttgttatccaggtaataagcatagtacccaataagtagtttttttgtttctctgtctcctcycactctttaccctcaaataggccccagtatctgttgttcctctctatgtgtccatgtgttctcattgtttagcgtctgcttataagtgagaacatgcagtatttggttttctcttcctgcattaatttgtttaggatgatagcctccagctctatctgtgttcctgcaaaggaaatgatctcattcttttttcattactacatagtattccatggtatatttatatatatcacattttatttattcagtctactgttgatggacattcagtttgattctagtttttgctattgttaatactgctctgataaagatatgcatgcatgtgttttatcgtagaataatttatatcactttgggtatatacccaataatggaattgctgggtcaaatagtaattctattttaagttctttgaggaattgtcacattgctttccacaagagttgaactaatttacattcccaccaacagtatgtaagcgttcccttttctccacaacctcaccagcatctgttagt

SEQ ID NO: 954094 - DNA, 724 bp, Homo sapiens
acctccaacaagtggcagtcaacctaatcagaggaggccagtccacctcccgctggtcccacacccccatcacttctcatcaccagagagggcccctggcttgggcccacagcacagacctttcatcctgtgctgattctgctgagcaattgctgacctgcatctctctgggatggagcctcccaggagacaatcaaatgacccttgaccaaaaccactactaagatcccttcctctgctgcctccaagttggggaaggaacataaacaataagattgccccagagctgcagcaggcagctcaggagtgccaagtcacaatctacagccagcattcaaggggaagaggaacccatgctttcagagcattgagaggaaacatggctgcaactgtgaggaaacagggaagccacacaacaagcaagagtttaccaactgactaataagcctacgtgccacctgctggatcatactgtaaaggtttatcaccaaaaacacctcactaacatacctctgccgaaaccagagacaagaaggtagcttcaaataaagaccctgcacaaagcctaggcctggcaaaaaacatccagaaragaagtctattgactacccaatctacactgcagctaaaacaacagccacatgtagagataagaaagaatcaatgcaaaaacacaaagaaatccctgtttgagggtctggagtgaatctccaggaaactccaa

SEQ ID NO: 954095 - DNA, 631 bp, Homo sapiens
gatcttggacatcgaagccttcagaactgtgagaaataaatttcaattgtttaagctaccaagtctgtggtattttgtcatggaagacagagtgaattaatatatttatcttcaatgtttagaagagtttaagaaggattagtgtaaaatcttttaaaactctttggtgaccagtgaagccttctgatccaggacttctccttgttgggaagttgttttaaaattatttacttaatattcttagtagttataggtctaatcagattttctatttcttcatgattcagtctttgtaaaaattgtgtctacttcatctatgttatccaatttgtttgtagtagtctcttctattcatttctgaaaaattggttgtagtgtcctcattttcatttccaattttagtaatttgagcactctgtctttttttccataaccactctaactaaatttgccaatttcgttgatccttttaagtaatcaactttttggttcattaattttctctrttttatctctggtctaatctttattattttctttattttgatagctttgggttcatagtagtggcactttcccacttgagatctgaattaagtgaaatagagaccagttcttcatggactcctaa

SEQ ID NO: 954096 - DNA, 655 bp, Homo sapiens
gctttatcgcccaggctggagtgcagtggtgtgatctgggctcactacaacctccgcctcctgggttcaagtgattctcctgcctcagccttccaagtagctgagattacaggcacctgccaccacacccagctaatttttgtatctttagtagagatggggtttcaccatgttggccaggctggtctcaaactactaacctcaagtgatctgcccacctcagcctcccaaagtgctgggattacagatgtgagccactgtgcctggcctcagtattgagtcttctaataccataaaactaccactcagatcaaagactagaacattgcccgtacttcctgaaggcctcctgtgccacttcccaatcattacttcctctctcctccccaaagataaccactatcctgacttctagaaaaataggttagctttttccttttttatttttgaactttataaaaattgaattctttattcttttttctctcatgtctgatttattttgctcagtattatctttatgagattcatatatgtctttgaatttagatataatgcattctttttcattrcttcatagaatataaacgtatgaatatactagagtttatttatccagttgactattgatggacatgtgggttatttccagttt

SEQ ID NO: 954097 - DNA, 740 bp, Homo sapiens
ccaccacacctggctcattgttgtatttttastagagacagtatttcaccatgttggccagggtggtctcgaactcctgatctcaggagatctgcccgcctcagcatcccaaagtgctgggattacaggcatgagccaccactcctggcctcaattgctatgcattctaatgaaaacttggtattaacagtctaattttagtcctactgttggatgtgtcttattatgcttttattccacatctctgtaattattaaggaagttgaacaacttttcatatgtttattggccatattaaaattctttcttaaagtgcccatttaatctcttgcccatttccctttgaggtttagtctttcttttatggactagtatatgcttttcatatattttggatatgtgccctttggcagatatgttagcaaataccttcacccatctgtagcttgcctttggaatttctcagagatacctactgataaagagaaggtcttaattttgttgtagaccaatttagtctagtcctttttaagcattactggattttatttgctaatattttgttaagagtttggttttccacttatgtttctgagtgaaattggcctgtaattctcttgtataatgcctttttttttttaagaaggcactgcagtggctggtatatagcattcttgtgaatatatctaactgggatacaagttgaggtagaaatatttcaaatgtccttaaaaaaataa

SEQ ID NO: 954098 - DNA, 700 bp, Homo sapiens
catgccctcttccagtcctagtgaccacaggtgcctgaccctccagtcctgtcttcatcaacgccctgtcytgtaactcagcaaacccatcaccagtgacagagcagaagtcaaggccccaggggctgggtgggggttgcctaaaatctctctctctctctctctctctctctctctcacacacacacacacacacacgcgcacacacacacactgtcataggctgccaggcatatggcctctttgtgcccacacaatggaggccctgtctgtgccctttcccaagtctgggcacagtgtggagggtgctccgcttcctcattccacccacctcccttccctctccacccccagtgcaggccctgtcttctttgcctttgcttcttcctctttctggaaagccctttctaccacccagttcctttatctttctgctttcttcttgtgttctttcctgagcttttgacctctcattggatgaggattatgggcagaagaaagaggctcacagtgctgggatgtcagcgcagggaggagaagggagcaagcagagatgagcctgaaaggctgagagggagtggaagaagggaggcagtggtggcagtgcagcaacactgtgctagaggggagaaagcccacacccggcagccagaggtcccgtgtccctgctctgtctccacctttcccctttgtgccacag

SEQ ID NO: 954099 - DNA, 656 bp, Homo sapiens
ggcaccataatgctgattccctcaaatgccctcaccaagctctgtgggcccagctcctctgggttttcctcttatttctggcccttatctctcagctactgtctcagctccactttctctctgtcccttaggcagtgctattctccaagggtctcatttttacttttcttatgctcacatccactggatgagctgattcccttccatggcttcaactaccatatgggtaccatagctcatacggatacacagctcagtcatacatcttcaatccagaactctcaatcctgttgcctactattgaccttcacttaaatataccacagtcactacaaaaacatctacatagttgatgtttctcaacatctttctccccaaacctgcttccccaggatgccccatttcagtgaaacctcagaattaaaccgttaggaacccagcagctatcctagactcacctcctctcttgggcccatgtccagtcagtctccaagtcctgtcagtcctgccctgtgcacctttctcacatctgcacctgatyaccaccccctgtggcactgctgtagatctgttactcttcctcctggagatcacctcacctgcctcctagctgatccctcttgtctcactctcatcctatccagtctgctgccact

SEQ ID NO: 954100 - DNA, 656 bp, Homo sapiens
ggcaccataatgctgattccctcaaatgccctcaccaagctctgtgggcccagctcctctgggttttcctcttatttctggcccttatctctcagctactgtctcagctccactttctctctgtcccttaggcagtgctattctccaagggtctcatttttacttttcttatgctcacatccactggatgagctgattcccttccatggcttcaactaccatatgggtaccatagctcatacggatacacagctcagtcatacatcttcaatccagaactctcaatcctgttgcctactattgaccttcacttaaatataccacagtcactacaaaaacatctacatagttgatgtttctcaacatctttctccccaaacctgcttccccaggatgccccatttcagtgaaacctcagaattaaaccgttaggaacccagcagctatcctagactcacctcctctcttgggcccatgtccagtcagtctccaagtcctgtcagtcctgccctgtgcacctttctcacatctgcacctgatcrccaccccctgtggcactgctgtagatctgttactcttcctcctggagatcacctcacctgcctcctagctgatccctcttgtctcactctcatcctatccagtctgctgccact

SEQ ID NO: 954101 - DNA, 490 bp, Homo sapiens
ctaggaaacatctttatgtggtaggttttcttcaatatatggactttagcttttcaggacaaaaactctacacagtgtgggcaacccagatagcagttccttggtgaaaacacactaacaaagctcacgggagaacactttttccaggagcatgtaaatacatttggttacagtgaaaaataaatctgctcggaagatgaactgcttacattggctggtcagtttaggtgctctgcccttaaatatctatttgagccacctggatctacgttccagtaaaagatcatgtactatttggcagcccacaattaattcatatgttaaggagatgtcataatatctgccctgctaattcacagtacttctgtaaaggtaaaataagattaatcatattaaaatatacataatctttcaagagaagaaaagatcttaacctaaacaggaaaagaagcaaagggmtctatattgtaaattaaaaaattagatttta

SEQ ID NO: 954102 - DNA, 668 bp, Homo sapiens
ttgatcaaggagaagtaagaattagtaagcttagagagaaaatatttgaaaacacacagtcagaagaggaaaaaataatgaaaaggaatgacaaaaattatatgggatctatgcagtggcatcaaaagagcaaatgtatgccattaacatttcagagggagtaaggaatgataaaagggtagaaagcttattcaaggaaataatagcgtaaaactttccaaacttggagaaagttataaatatccagctacagaaagattgaagaccaccaattgggcttaaataagacttttccaaatacattataatcaaatcctcaaagatcaaagacaaagagattatcctgaaagcagcaagggggaaaaaagcaaatgacatataagggagttccaatacacttggcagcagactttgcagcagagaaggacttcacagtcctggagagaaagggattatatttttcaatgtgttcaaggaagaaaaacaaataaacaaacaaaaaacagccaacaagaatattataaccagcacaatcatcctcagacatgaaggaaaaataaaaactcccagacacaaarttgagagaattcatcaccaacagagtcgtattacaacaaatgataaaggatgttcttcaaactaaaagaaaagaatgctaatatgtaaca

SEQ ID NO: 954103 - DNA, 563 bp, Homo sapiens
tttgtatttttaatagagatggggtttcaccatgttgcccaggctggtctcaaactcctgacctcaagttatctgcccaggtaggcctctcaaagtgctgggattacaggcatgaaccatcgcayctggctgaaggcttcatttcatcattcattcattgattgctgaaggtaatcaaattgctgcatcatagttaagagtagattcaaaacacattagccataattttatcagtgaataattcagtctaatcctgggctctgatacttgatctaatttaatctctcagttaaaacagttcaagcagtccttagtcttaaaaagatgacattattaattcttaacctcagataaaacactctctagttagctcctttcaggtattgctaccttggttgttttacaaactccctttggtatctttcgctttcctctgtccaaatagaagtggattttaaaaggaagattttatgaagtattaaaaaaagagaatatgaattttaatctaccattccatggagaattgcacatttcaaagaattatttaaaacttggttagcaac

SEQ ID NO: 954104 - DNA, 646 bp, Homo sapiens
actgggtagtgagcagggtttggaacagtttggagggctcagaagaagacaggaaaatgtaggaaagtttggaacttcctggagacttgttaaaatagctttgcccaaaatgctgatagtgatatggacagtaaagtccaggctgaggtagtctcagatggatatgaggaacttgttgggaactggagcaaaggtgactcttgttatgttttagcaaagatgctagtggcatttttcccctgccctagagatttgtggaactttgaacttggtagagatgatttaaggtatctggtggaagacatttctaagcagaaaagcattcaagaggtgacttgggtactgttagaggcatccagttttataagggaaacagagtataaaagtttgaaaaatttgcagcctgacaatgtgatagaaaagaaaatcccattttctgaggagaaagtcaagctggctgcagaaatttgcataagtaacgaggagccaaatgttaatcaccaagacaatggrggaaatgtctccagggcatgtcagaggtcatcacagcatcccctcccatcacaggcctggaagcttaggaggaaaaaatggtttcatggaaggggcacagggtccctgtgttgtgtgcagcctagggacttgg

SEQ ID NO: 954105 - DNA, 580 bp, Homo sapiens
ttctccccagaaaatggggttttctttttcacctcacrgtcaggctgcaaattttccaaacctttatgctctgcttcccttttaataagttccaatttcaaaccatctctgtgaatgaatatgactgaatgctttcagaataagccaggtcacctcatgaatgctttgctccttagaaatttcttccaccagataccctaaatcacctctctcaagttcaaggctccacagatctctagggcaggggcaaaattccaccagtctctttgctaaaacgcagcaagagtgacctttgctccagttcccaataagttcctcatctccatctgaaaccatctcagcctggacttcattggtcaaaactattctacaagtttctaggcagttccaaactttcattcatcttcctgtcttcttctgagctctccaaactgttccaacctctgcctgttacccagttccaaagtcacttccacatatttgagtatcttttcagcaacaccccactcctggtaccaatgtaatgcattagtccatttttacgctgctgataaaggcatactcaagactgggaagcaaa

SEQ ID NO: 954106 - DNA, 600 bp, Homo sapiens
accatctgtgagcctgaatttttacagccatgggacagacaaggaccctgtctttatctaaactaagggaaagtcctgcaacatttgtggcacacaacgtggggctcgagaagtgttaaaattgatattttgggggtggagccaagatggctgaataggagcagctccagtctacagctctcagcgtaagcgatgcagaagacgggtgatttctgcatttccaactgaggtactgggttcatctcactggggagtgtcggacagtgggtacaggacagggggtgcagtgcaccaagcgtgagctgaagcagggagaggcattacctcacccaggaagcaggtcaggtaattcccttttctagtcaaagaaaggggtgacagacggcacctggaaaatcgagtcactcccaccataatactgcacttttccaatggtcttagcaaacggcacaccaggagattatatcccgtgcctggctcrgagggtcctacgcgcatggagccttgttcattgctagcacagcagtctgagattaaactgcaaggcggcagcgaggctgggggaggggcgcctcccattgccgaggcttgagtagataa

SEQ ID NO: 954107 - DNA, 603 bp, Homo sapiens
aaatgataaaaagtgaaaatcctaaaagcaccaagataaaaacatctagttacctataaagaaaaccccattgaactaacagtagattttacagcagaaacagtatgagaggtgacagygtgctggcaatcctcacagccctcgcttgctctcggcgcctcctctgcctgggctcccactttggcggcacttgaggagcccttcagcccgccactgcactgtgggaacccctttctgggttgatcaaggccggagccggctccctcagcttgccgggaggtgtggagagagaagtgcgggcgggaaccggggccgcgcgcattgcttgcgggccagcgcgagttccgggtgggcgtgggctcggcggaccctgaactcggagcagccagccagccccaccggccccaggcagtgaggggcttagcacctgggccagcagctgctgtgctcaatttctcgctgggccttagctgccttcccgcggggcagggctcaggacctgcagcccgccatgcctcagcctcccccccttctccatgggctcctgtgctaccccagcctccccgacgagtaccgccccctgttccacggtgcccagtcccg

SEQ ID NO: 954108 - DNA, 603 bp, Homo sapiens
aaatgataaaaagtgaaaatcctaaaagcaccaagataaaaacatctagttacctataaagaaaaccccattgaactaacagtagattttacagcagaaacagtatgagaggtgacagtgtgctggcartcctcacagccctcgcttgctctcggcgcctcctctgcctgggctcccactttggcggcacttgaggagcccttcagcccgccactgcactgtgggaacccctttctgggttgatcaaggccggagccggctccctcagcttgccgggaggtgtggagagagaagtgcgggcgggaaccggggccgcgcgcattgcttgcgggccagcgcgagttccgggtgggcgtgggctcggcggaccctgaactcggagcagccagccagccccaccggccccaggcagtgaggggcttagcacctgggccagcagctgctgtgctcaatttctcgctgggccttagctgccttcccgcggggcagggctcaggacctgcagcccgccatgcctcagcctcccccccttctccatgggctcctgtgctaccccagcctccccgacgagtaccgccccctgttccacggtgcccagtcccg

SEQ ID NO: 954109 - DNA, 601 bp, Homo sapiens
catgtatttattgcacttatttttgctctgacctttgttattttctttcttctgctatctttgggactagtctgttcttcttttactaattgcttaagatgtaatgttaagctgtttatctgagagctgycttcttttttgatgtagattttaattgttatacactcccttcttagaactacttttgctgcatcccataagccttggtatgttctgttttcattcttgttttctcaagatattatttaaatttcctgtttagtttattctttgactaaatagttgttgaggagtgtattagttatgtttcacttatttgtgaattttccatgactcttcctgttattgatttccagtttcacaccattacgatggaaaatgatacttgatatgatttctttttatttcaatgtgttaagaattgtgttgttgcctaaaatataatccatcctggagaacgtaccttgtgcacttgagaaaaacgtatatcctgttgctattgggtggaatgtcctgtatatatccgttaggtccatttgttcttacgtgtagtttaagtctgatgttttcttattgattttctgtctgaatgatctgtctg

SEQ ID NO: 954110 - DNA, 618 bp, Homo sapiens
agtagcaaacaatagttacggtttcagtcacagagtttataatctagggttggggaagagttaaagtaaaacacacagtgaatacaatatttgaggtggtgatgagtggcatactgaaaatttaaagagggtcrtttggagtgctgttttacataggatgataaggtaaagactctctgatacagaggtatttgcacagagacttggactaaatgaaggagttggtcatgctgatatttgggtaaagagtttttccagagagatggaatagcaagggcaaaggacttgagatagaagtatgtttgccgtttttatggaataccaatggggcattgtaacttgagaaaaataaagaagagaggagtaaaagacgaagtcggagaaatagtgggaacacagatctgtagggcattttaggacaaaatagggcttttttgcttatacttttatctaatttggaatccattgatgattctgagcacaagtatcatatgacttgacttatattttaagaatggttctgttttttgaacatggaggagtgcacattaagagtcaaggacaccaatggggagactgtgcggcaaagtgagagattatggaggtataaccacatct

SEQ ID NO: 954111 - DNA, 614 bp, Homo sapiens
gaggacaatgccaaactcagtggagccaaaagtaatctcagaatgtaagaaaacatcaatagtaggctttacttatgctcagggatcatttatgattctcccactaccaaatcaacagactttctccccgttattcctgcccataaccttctatactcttcctggagaaacattgccagttgtttccgtatgcaaggctgtcctcattcctcatttacctcttttgagtcctgatttattgtatactcacgactgtggatgttttccaaaaataagtctctcaccctttgatcttttccctttatatacttaataaaatattactaaaattaacatatactccaataaaaatgtcatgaggcacacaggagatgcacaaaataaaaagggtaaataactaataagcataaaatagtcaaatcacgaattatccaaaaaatgtaaataaaaaaaaaagccataccatttacacctatcacgttgtcaaagacaatatgtgaaacaaagttgtaatacagagtattgtgaagagtgtragaaattggtcactcatttattgagagtttttagcatgaagggttgttgaattttgtcaaaggccttttctgcatcta

SEQ ID NO: 954112 - DNA, 457 bp, Homo sapiens
gtgtaaacaagagcaaggcatgtatgagtagttgagaawggtgaataggagtatgactagacagaaaatagtagggatgacaattttttttttgggggggtggggcacaatctaagttggtctggtgtctggaatgagactggggcctaataaaaaggagcgtctatacaggagcttaaatgggctgtaccctgtagcattccgaggacaggcctgaattctgagaagggaaagtggtaaaagtattgtccagtcctttttaagttggtggctgagcttggtgaggtgtgtttttaaaagacctttagtccattctacttttcttaaagacggaggaccataagggatataaaggtttcactgaatactaagagcctgaaaaactgcttggctgatttgactaataaaggctcgtctgttatcagactgtattgaggtgggaaggctaaactgagta

SEQ ID NO: 954113 - DNA, 561 bp, Homo sapiens
gaccaaaactcagcaattggcacaaaagtaggttacaatctgtttacacctccctttagattatagttcactatgtacagagaaacctttaggctgaacagaaaatatgtaaggaggcagttaggctaaacttgattcaacagattcatagtgttgttgatgcctagggtcttattacaaacaaaaattcacaagttttctatatgtcataccaaattttggccctatagtttctgtccagcctcttggttaagttcaaacttaccatagatactttaatgtgattgcataaccaattaatctttttttattcattccaacaaacacaaatgttatccatttacatgtagacaggcaggctggactttcggcactggggcagggcatgttatcagttaagtgcaataaaatgttaaaagaatcaaatgatagaaatgtataacaggaacactgaatgggaagcacagagtaaataycagcgaattctaccctgttccagaaatgttaaaacttataaagtgctacccgttagtgtcttcatagtgctttcaggaaatgcat

SEQ ID NO: 954114 - DNA, 559 bp, Homo sapiens
tttgcagcttgcattatgttttatcattctaagtagataaaaactccaactgatcacatacaataatagaattaaggtaactcaatttctatttgttcttctttgctataattatctatttctaatctagtggggttttttatcgatttgggggtagaaatgtaattttgttacattgatataatgtgtaatggtgaagtctggaattttagtgtaaccatcatttgaatagtgtacactatacacattaggtgattaatatctcacccctcattctcctcccaccctttcacctttctgaatcttcagtgtttattattacattctgtatgcccatgtgtacatggacttgtgagaacatgcagtattggactttctgcttctgaattatttcacttaagacaatgacctccagtttcatccctgttgctgccatatatacatctatatatakagagagagatatatacacacatatatatacacacacacatatatacacacacatatatacacatatatagagagatatatgtatatatctctctatatatagaca

SEQ ID NO: 954115 - DNA, 584 bp, Homo sapiens
gtcactccattcctatatcatgatccaggtccctgggatctcagaattccctataaggctgatttaaatctgcttctaggttggctcttccctaggtctggcctcctgagatcagactgcttgtcagtattcacacctttgggtctgtccaggcagtggccaaaggagactatctgtgaggggcatggggagagcttagatgtgtgggctgggagacaccacacatggtgcatggccccttgcagtgtggacagggtaaggggcggagaggggaggtgggtgatttagtttttctgcacggccaggtgctgccacaatctgctctggaatctgagtagtctcagagctctaaattgatcctgacctctcaggtcatcatgaaagtatatttgtccatagggggctaaaaggtatttaatggcttgtttgcttgatgtagaacttgtcagtagttagacgtatggtttgtgggcctccactggtactcttgtcttggctctgaaaatgtcagggcaagtctgttttcttctctccacctattcaaatcycaccttctctcttcctgttcaggtcctgcttccttc

SEQ ID NO: 954116 - DNA, 634 bp, Homo sapiens
cacttaaagggtaactgactaattgctggagaaaaagcatggactatcttgagagacaaaaattgcaggcacagcctcagaggaccccacaaattcatgactttcacatccaggagcccaaactacatgctcagggtaaagatcagagaaagattccttttgtgcttctgacaggagcaagcagaaaataaccatttttaaacagtcccagagtgttctgttctctttaacacctaccctcaagggaaactatttatcacagactgatttgagttttactaaagcctaactgatctggaagatgacaaatactgaactgtagtttctctagtcttcctatctcatctaagagaaaaaaaacaaactcagaagctcttgtgaagatcccagcctaggatcccaataaaagactaaaacttaattacagaattagaggacattttccctctccccacaatttaccagcacaccaatcaggatcccgtaaaataacagggaattacatygtaagaactgcaaggctgagacccaatttaagaaggggtctctaaagaaattcaaagacaacagagaagaataaaacaaagacactagagaaaacttaagcctctggcacctgttattacagcaaaca

SEQ ID NO: 954117 - DNA, 490 bp, Homo sapiens
ggtaaaccccttgatgttttgcagatcctggtcagagtaaaacattccatgggaactcgggctgtgagaaacatcctaaccacctgactgcagaaacatccttatcacatcctgctgggcaagggcccaacagcctgacttcaggaacatccttatcatcttctactgagcagcaagctatactgtccagagccctccctcccagccccatgattaccccagcctgtaagtggcagtgggcgctgacactaagctggtttccccctccgcagggttttgctagtaataaacctgtgttgctgttgaagcggccaatctctgtgtgtgtgtgtgtgtgtgtgtgtgtgtgtgtgtgtgtgtgtgtgtstgtgtgtctgtgtgtgtgtgtgtgtgtctttaactcttgccttgccttcaaatccttacaataactccacttctccatttcaccatggaggatacgggactcaaggagagcaagtaacttacc

SEQ ID NO: 954118 - DNA, 595 bp, Homo sapiens
tttttaaaaatcaaagtaagaagtaatttgtttaaaaaatatgttgttatttcagtgctctttccccatggtacttttaggaattaaaatgtatttaagtgtcagttagatgcctrgaacggccctagacctgctgtgtatacagtattctacttaatgtaaggcctcatggattgtgtgatatcctactattttctacattaatgagatgatttttaaatgctaccaattatagttataaaaaattatgaattgtaaataccgctccaatatgagatatgctaaaatgtgacctaatctttaaatcatcctgcaaaatagcaataattgtatcattttacttaattaaaatgtttttgttaaatagtagtaatataattataacgtctggctgggtgcgtggctcacacctgtcattctagaactttggaaggctgaggtgggaagttcccatgatgctaggagtttgagaccagcctgggcaacaaggtgacattcctactctacaaaaaaaatttaaaaattagctgatcatgctggtgcactcctgtggtcccagctattcaggaggctggggcaggaggtttgtttgagc

SEQ ID NO: 954119 - DNA, 648 bp, Homo sapiens
aagtttattcatgaacataattttaccaacatgctttataccttaattttktttgcacattaatggttttttctttcagaatgaagaactccctttagcatttcttgtaagatgagtcaggtagtggtgaattctctcaggtttcctttgcctggaaaacattttatatcatcttcacaataagtttgctggatacactattcttgtatgacagttttgttttttaacttttattttaggtttgaggatacatgtgaaattcctgtcatgggattttgttgtacagattatttcatcactcaggtataaagcctagtacccagtagttattttttctgcccctttcccttcctcccaccctccacactccaataggccccagtgtctgttgttatcttctttgtgttcatgagttctcatcatttagctcccacttataagtgagaacatgcagtattttcttttctgttcctgtgttagtttactaaggataatagcttctagctccatccatgttcccacaaaagacatgatctcattgttttttatggctgcatagtatcccatggtatatatgtagcacaatttctttattcagtctgtcattgttgggcatttaggttgatttcatatctttgctatcatgaa

SEQ ID NO: 954120 - DNA, 545 bp, Homo sapiens
tttctcatctttgagtctgactcgtgataagatagcaggttttcttctgcctgtaatttgcatttttttgtatttatataaaaagctctcaccttaatgaagtgagagrgtccagtcttttcatttttttttcatttgttttttttttaagacggagtctcgctctgtcacccaggctggagtgcagtggcgcgatctcggctcactgcaagctccgcctcccgggttcacgccattctcctgcctcagcctcccgagtagctgggactacaggtgcccaccactacgcccggctaatttttttgtatttttagtagggacggggtttcaccatgttagccaggatggtctcgatctcctgacctcgtgatccacctgtctcggcctcccaaagtgctgggattacaggtgtgagccaccacgcttggcccgggtccagtcttttcaaagggaaactcagacttaatgttgaaataatatcagtttccaatatttttatagtgttctgtagcttgggaactaatttcacataaatcagctcattt

SEQ ID NO: 954121 - DNA, 821 bp, Homo sapiens
ttttagtagagacgaggtttcaccatattggcyaggatggtctagatctgttgacttcgtgatctgcccgcctcagcctcccaaagtgctgggattacaggcgtgaaccactgcgcccggccaagctaattctttaaaaaaattttttgtggagatcagtatctctttatgtttcccaggctggtctccagctcctgggctcaagtgatcctcctgcctgggcctcccaatgtgctgagattacaggcatgagccaccatgcctggcccttttatacatttttttttaacactctgagagagagttgagggcaggctgcttgtaaggataaggcagcctcttttatacattattaacctaagaaaaaatggggtgcccttgaaagagttttttaagattagaaaacaagggccaggtgcagtggctaatgcctgtaatcccagcattttgggaggctgaggcaggcagatcacctgagttcaggagttcaagaccagcctgaccaacatggtgataccctgtctctactaaaaatacaaaaaattagccaggtgtggtggcaggcacctgtaatcccagctacttaggaggctgaggcaggagcatcgcttgaactggagaggcagaggttgcagggagccgagatcgcaccattgcactccagcctgggcaacaaaagcaaaactctgtctccaaaaaaaaaaaaaaaaaaggcaaaaggaagtcagaaggagccagatcagtactgtaaggtggatgcctaatgatttcccatcaaaactcttgcaaaattgcccttgtttgctgagagaaatgagcag

SEQ ID NO: 954122 - DNA, 770 bp, Homo sapiens
catgactaaaaggggccaaggtacagctcaggctattgcttcagagggtgagagscccaagccttggcagcttccacatgttgagtctgcaggtatatggaagttcagaattgaggtttgggaacctccacctagatttcagaggatgtatgaaaactcctagaagttcaggcagaagttttctgcagggctggggcactcatggagaacctctgctagggaagtgtgaaagagaaatgtggggttggtgggcacccccacatagagtccccaatgagccactgcctagtggagctgcaagaagaggggcaacatcctccagaccccacaatggtagatccaccaacagcttgcaccgtgcacatggaaaagccacagacattcaatgccagctcatgaaagcagccaggagggaggctgtaccctgcaaagccatagggacaaagctgtccaagaccatgggaacccacctcttgcatcagtctgactcgaatgtgagacatggagtcaaaggagatctttttggaactttaagattgactgttctgctgaatttcgagcttgcatggggtttgtaggccctttgttttgtccatctcatttagaatggctgtatttacataatgcctgtacccccattgtatctaggaagtgactaacttgcttttgattttacagactcataggtagaagggagttgccttgtttcatctgaggctttgggctgtggactttgcgttagtgctgaaatgcgttaagactttgggggg

SEQ ID NO: 954123 - DNA, 562 bp, Homo sapiens
agttctaagagacttacaaggaaacacaaacttcacacaataataatgggagacttcagcactccactgacggtattagacatatatcatcgaggcagaaaattattgaagatattcaggacctgaattccacattggaccaaaaggatctgattgacctctacagaaccctccaccccaaaacaacagagtatacattcttctcattgccacaggcacatgctgtaaatttgaccacataattagacattaaacaatcctcagcaaatgtaaaagaaatgaaatcatactcaacagactttaagaccacggtgcaatataaatagtattcaagactaagaaaataactcaaaattatgcaattacatggtaattaatcaaaatgttcctgaataacttttgggtaaataatgaaattaaggtagaaatcaagaagttctttgaaatgaatgagaacaaagatacaacatattagaatctctgagacacagctaagagactgttaagaggaaaattcaaagtactaaatgcccacatcaaraagttaggaagatctcaaact

SEQ ID NO: 954124 - DNA, 593 bp, Homo sapiens
agtgcttttcaccccacgccatgattctcaggcctccccagccatgtggaactgtaagtccaattaaatatctttttcttggccgggcttggtagctcacacctgtaatcccagcactttgggaggccaaggcgggtggatcacgaggtcaggagatcgagaccatcctggctaacacggtgaaaccccgtctctactaaaaaatagaaaaaaatttgccgggcatggtggtgggtgcctgtattcccagctactcaggaggctgaggcaggagaatggcgtgaacccgggaggcggagcttgcagtgagcagagatgcgccactgcactccagcctgggccacagagcgagcctccgtctcaaaaaaaaaaaaaaaatctctttttcttccgggtctcgggtatgtctttatcagcagtgtgaaaatagactaatatagggacccaccaagggaagattctaggttctactacagagaaatggaaagtagarcaccgtttaaccaatcctagtcttaggggatgctaaatagttttgcaaatgcagctacacaatgagaaagttgatgatcaactcctacttcaattcagaa

SEQ ID NO: 954125 - DNA, 808 bp, Homo sapiens
cagctgggaaatatgtgtatgtctrtgtggggaagtttaaactttccctctgaagagttgatcttgagtctgctggaataagatgacagaagacagattaacaggagaaaaggcatacaagttattcatgtgcaagcgcatgggaattacacaaagtaggaaactcaaagaagtgcttgaataccctcttcacaggggagaggagaaagtgagggatgtaggcaattttggaggaagagtaaatcatctttaggggaggtgaataggtccagaaaatggacagtagtctggtacagagctcctcgtggcttgcagggaggtggcaacagactataggaaggtaaggggaagacatattctgggaacaaaagttgtcttatatgcagatgaagcctgtcagtaatagcactcagaatagatgaaaattctctctgggtgggtgtggtgatggccttcagattcttctttggtgattaattttccctggttgatgagatttctgacagggagctgaaggcaattttttttcttttgaaagaacttttctcagatgaggaaacttcagagagatcccctccatgggctaggttgaaaaacaagggaaggtcggactttgattctgaggcagtttctaaggtctcccaatttcccttaattcacagtgcttagcatgtgcaagtgctatactttggagtatcatttaatgattcaatggcatgtacacatacatttttatgtacacactccataaatacatacacttatagcagtgtttatgtctatgtttatatacatatatttgaggtgt

SEQ ID NO: 954126 - DNA, 618 bp, Homo sapiens
gtgtataaagtgatgcgtttcctaactaatacagcttgctttgtgtccccacccaaacctcatcttgaattgaaatcccttaactccataatcctcatttgtcatgggagggacatggtgggaggtaattgaataatggggtggtttcccccatgctgttcttgtgatagtgagtgagttctcacaagatctaatggttttataagcatctggcatttcctctgctggtactcattctgtctcctgctgccctgtgaagaggtgccttccaccatgattgtaagtttcctgaggcctccccagccatgtggaactgtgagtcaattaaacctcttttctttataaattatccagtctcaggtatttcttcatagcagcatgagaacagactaatacgtgaacatactctggttttgatctcagtgactgtgaaatatttgggaaattatttcaatcttgaatatgcaactgtgttaaatcacatgctctaatataacattttacccctcatttgaattatttatggaatctgtaattcaagctacaatgccaaaatattgttgtacaatgtttcatatttttaattmttgacctagactgttttcataaaaatataca

SEQ ID NO: 954127 - DNA, 601 bp, Homo sapiens
atctggtcctgggcttttttkttgttgttgttggtagcttattattgcctaatttcagaactcgttattggtctattcaggggttcaacttcctggttcagtcttgggagggtgtatgtgtccaggaatgtatccatttcttctatatttctagcttatttgcatagaagtgtttatagtagtctctgatggttggttgtatttctgtggggtcggggtgatatcccctttaccattttttattgtgtctatttgattcttctctcttttcttcattagtctagttagcaatctattttattagttttttcaaaaaccagctcctggattcattgatttttttgaagggttatttgtgtctctatccactctgatcttggttatttcttgtcttctgctagctttgggtttgtttgctcttggttctcatttttttagttgtgatgctgggtgtctatttgagatctttctagccttctgatgtgggtatttagtgctataaattttccttttaacattgctttagctgcatcacagagattctggtatgttgactctttgttctccttggtttcaaaaaacaatttgatttctgccttaa

SEQ ID NO: 954128 - DNA, 575 bp, Homo sapiens
caggcacataccacgcttggctaatttttgtatttttagtagagacggggtttttaccacattggccaggttggtattgaacacctgaccccaggtgatctgscaacctcggcctcccaaagtgctgggattacagacatgggccaccatacccggccggaagcccacttattaaagcaacaaatactgagtgcctgtgtcacgcttggtattgtttccagtgctgataccacagtgaacaaataaaactcttgactttgttgcacttagagggagtgggtacaggcaacaaacaagtatgaggggccagtcaaggaggctggggaaagagtactcctttattcttggggtttcgggggctaccctctttgaggtgacccctaggggccagaaggttatgagggagtgcatcgtgcagacatctgggggatgagtatttctgacaaagggaactgcaaggagaagagtgtagaggtggaattgttcttgggtttttgaggaaaactgtgtgcagtgctaatgcaggtttaacaggaacatgggaaaatgaaggtagttgtgttaggctgtgggaa

SEQ ID NO: 954129 - DNA, 630 bp, Homo sapiens
aatcacagctcactgcagcatcgaccttctgggctcatgtgatcctctcaccgcagcctcccgagtaactggtactacaggcacatgctagcaagccagctaatttgggtatcttttgtggagatggggtttcatcgtgttctcaggctggtcttgaattcctgagctcaagcgatcctcctacctcagcctcccaaagtgcaggaattacaggtatgaggcaccagcctttagcttagtcttaaagaagccatttcaaaattagtatgtcaacttctaggtgatatggtatatggtaagacctgtagatctcatgatctactcatgtgtatgatctcatgatcatacacacactgtcatacatccttcactgtaaaatgggtacattggtctgaagcaatgttttgcaggctcccacattcataaattagccactcagtaagctcctcaaatagtgatacagtcagtcactgaagaaggtgaaggtaaacccacctccagtgtagttgccagttccagcaagaacaaatcagtgcttcttcctaaataaaaagygtccattttaatcaacttgccaccatatggctggctgatctcctaaaggatgttaccacacagaggcttacagtc

SEQ ID NO: 954130 - DNA, 576 bp, Homo sapiens
accatcaacataaccctcctgcagaagagtaggaatgtcagcttcatcagtgctrctaacatgctttgcatcctgggaagatcccaaggagagtctccctctctgggctacctccaaatactgtccatcaggtctctcctgaaatttctaagagtattttttttccaaatctttgctaggagctgcaatgtatatgatttttgctaaatctttgctaaggaccacatgatgatatgtatatcttgcttataaacccaaccaaagcgcattagagaccatttgtcctgaagctacctaccaactagatttgcgagtccacccaaatgtgtatgacatatggtcagggaggatgatacatcacctgttgcatttcccatcatgaggactgcctaataggtctagtcttgttctaatctaatagtcctgtgagatccaacagcaatgagctgaaagctagggtttgtttgtttgtttgttgtttgttttaatgtaggtattgttactaaatgtaaattccatgaaggcagggacttttgtcttttttttcactgctttatcaacagctcagcaattgtt

SEQ ID NO: 954131 - DNA, 570 bp, Homo sapiens
catccctcaaagcctggtgacttgagctaatttataaggaaaccaaacggcattacactcyagacctggaggcttgaagagttcagagaaactaggacagagaaggccagccccgctgggagaggggcgcgtctctgtggcaacccttacacacacccacaccacaggaggacgtggtgggtgcattggatgagccggcccccgtgtggcagcacccagacgtggcctggctgcctagacactcacctttgtactgtggggtgaaccgcttcatggccagcggcagggattcatagaacctctgctcccgggagacgaggggcttgcacaccgtatgctcgtcatacttcatcacgctcatgtgccccccgacctggtgcaggaagggctccagctgcacgcctgccctcatgtccccggcgtctgcgctgttttgcacaaccatggcggcagatggtggtggtggggggtccctgcacagtctgctagaggaaggtttgaagtagaaagggcagctcccaacagcacacggggctgtcagcggtcctcaactttctccttcttggcctt

SEQ ID NO: 954132 - DNA, 561 bp, Homo sapiens
atggtttggcagtttccccttatagaactgaaaatgtccttgctacatgactcagcaatagcactcctgagtatttatcctagagaaataaagaaacttatgttcacataaaaccatgtgcaagaatattcatagcatctttattcacactagccctaaactggagaaagctgaaatgttcttcaatgggtaaatggatgaacaaattgttctacatccataccatggcacactactgaacaacaacaaaaaagaaacaaactatggatacatgcaatgtggtagacagaataatgctcccacctccccacaaaagatgtatactctctatccctattacatggcaaaagggtctttgctgattattctggacttttcaggttgattcagtctaagcacagaaactcttaaaagcaaaaaatgttctktggctagagtcggggagagatgcagcagaagttagagagatcccactcatgagacataccctatctgccattgctagaggtgcaccacattaagtataaaaaggatgtagacaagctctaggaacaaagatta

SEQ ID NO: 954133 - DNA, 561 bp, Homo sapiens
atggtttggcagtttccccttatagaactgaaaatgtccttgctacatgactcagcaatagcactcctgagtatttatcctagagaaataaagaaacttatgttcacataaaaccatgtgcaagaatattcatagcatctttattcacactagccctaaactggagaaagctgaaatgttcttcaatgggtaaatggatgaacaaattgttctacatccataccatggcacactactgaacaacaacaaaaaagaaacaaactatggatacatgcaatgtggtagacagaataatgctcccacctccccacaaaagatgtatactctctatccctattacatggcaaaagggtctttgctgattattctggacttttcaggttgattcagtctaagcacagaaactcttaaaagcaaaaaatgttctgtggctagagtyggggagagatgcagcagaagttagagagatcccactcatgagacataccctatctgccattgctagaggtgcaccacattaagtataaaaaggatgtagacaagctctaggaacaaagatta

SEQ ID NO: 954134 - DNA, 635 bp, Homo sapiens
aacccaacacaaattcgtaaactttcttaaaacattatgagatttttttttttttttagattttttttaaaaattcatcagctatcgttagtgttagtgtattttatgtgtggtccaagacrattcttcttccattgtggcccagggaagccaaaagattggctatccctgcacctagttagggaggctttctggggagaagacagccaggggtagtggtggaggaatgtgaaattcaaaccacaggccactcttctagtgtgacaaccttatctccttaagaactgctaagaatttagaaatggttatgttcttaaatgttgcattgctttactagtaaaagcttatgtgcaatgttcttaaaaaaaaacacagaacctcttgtcatatgagtggaagacactcacatgggtgtttcctgccaggctccttctgacagtcatcactgacccatatgaacactggctgctcagagagcaccggacagaacagagccttctttccaaacttcacctgcaggagtcccgtctcagccaaagaaaacaggtttcccaaacctggctgatcataagggccacctgaggggaaaggggaaaagagactggtgggctgtgctctagctccactaaatcaga

SEQ ID NO: 954135 - DNA, 635 bp, Homo sapiens
aacccaacacaaattcgtaaactttcttaaaacattatgagatttttttttttttttagattttttttaaaaattcatcagctatcgttagtgttagtgtattttatgtgtggtccaagacaattcttcttccaytgtggcccagggaagccaaaagattggctatccctgcacctagttagggaggctttctggggagaagacagccaggggtagtggtggaggaatgtgaaattcaaaccacaggccactcttctagtgtgacaaccttatctccttaagaactgctaagaatttagaaatggttatgttcttaaatgttgcattgctttactagtaaaagcttatgtgcaatgttcttaaaaaaaaacacagaacctcttgtcatatgagtggaagacactcacatgggtgtttcctgccaggctccttctgacagtcatcactgacccatatgaacactggctgctcagagagcaccggacagaacagagccttctttccaaacttcacctgcaggagtcccgtctcagccaaagaaaacaggtttcccaaacctggctgatcataagggccacctgaggggaaaggggaaaagagactggtgggctgtgctctagctccactaaatcaga

SEQ ID NO: 954136 - DNA, 576 bp, Homo sapiens
tgttacataggtatacacatgccatggtggtttgctgcatgcatcaactcgtcatctacattagatatttctcttaatgctattcttcccctagcactcccactccctgacaggccccrgtgtgtgatgttcccctccctgtgtccatgtgttctcattgttcagctcctacttgtgagtgagaacatgcagtgtctggttttctgttcctgtgttactttgctgagaatgatggtttccagcttcatccgtgtccctgcaaaggacatgaactcatcatttttatggctgcatagtattctatggtgtacatgtgccacattttctttatccagtctatcattgatgggcatttgggttggttccaagtctttgctattgtgaatagtgctgcaataagcatacatatgcatgtgtctttatagtagaatgatttataatcctttaggtatatacccagtgatgggattgctgggtcaaatgatatttctggttctagatccttgaggaatcaccacactgtattccacaatggttaaactgatttatagtcccatcaacagtgtaaaagcattc

SEQ ID NO: 954137 - DNA, 590 bp, Homo sapiens
tgttacataggtatacacatgccatggtggtttgctgcatgcatcaactcgtcatctacattagatatttctcttaatgctattcttcccctagcactcccactccctgacaggccccrgtgtgtgatgttcccctccctgtgtccatgtgttctcattgttcagctcctacttgtgagtgagaacatgcagtgtctggttttctgttcctgtgttactttgctgagaatgatggtttccagcttcatccgtgtccctgcaaaggacatgaactcatcatttttatggctgcatagtattctatggtgtacatgtgccacattttctttatccagtctatcattgatgggcatttgggttggttccaagtctttgctattgtgaatagtgctgcaataagcatacatatgcatgtgtctttatagtagaatgatttataatcctttaggtatatacccagtgatgggattgctgggtcaaatgatatttctggttctagatccttgaggaatcaccacactgtattccacaatggttaaactgatttatagtcccatcaacagtgtaaaagcattcctattcctccacat

SEQ ID NO: 954138 - DNA, 625 bp, Homo sapiens
gtggagctagagcacagcccaccagtctcttttcccctttcccctcaggtggcccttatgatcagccaggtttgggaaacctgttttctttggctgagacgggactcctgcaggtgaagtttggaaagaaggctctgttctgtccggtgctctctgagcagccagtgttcatatgggtcagtgatgactgtcagaaggagcctggcaggaaacacccatgtgagtgtcttccactcatatgacaagaggttctgtgtttttttttaagaacattgcacataagcttttactagtaaagcaatgcaacatttaagaacataaccatttctaaattcttagcagttcttaaggagataaggttgtcacactagaagagtggcctgtggtttgaatttcacattcctccaccactacccctggctgtcttctccccagaaagcctccctaactaggtgcagggatagccaatcttttggcttccctgggccacaatggaagaagaatygtcttggaccacacataaaatacactaacactaacgatagctgatgaatttttaaaaaaaatctaaaaaaaaaaaaaaatctcataatgttttaagaaagtttacgaatttgtgttgggt

SEQ ID NO: 954139 - DNA, 653 bp, Homo sapiens
acgcctgtgatctcagctacttggaaggctgaggcaggagaatcacttgaaccgaggggccggaggttgcagtgagccgagatcacaccactgcactgcagcctgggcaacagagcaagactccgtgtctcagaaaaataaaaaaagttaagggctaaaatattaagacagagcctacatatcacaggaaaactgccctcacttttcaagtgtgaaaaaaacccagaaaactgctctcactacttcattaagtaggttactaatagatggtttcaggggctcttcaacttacctaaaactgagctgtgagtacagacaaatgtttctgatgaagaaagtctacaacttttatcagattttcaaaaaggttagactaggaactactgcccttacagacaaccaatctctaaataaaactttttcaaataagcagtatgctgaacatagtcttttgaggattcaaaaagtactctaggatttaacagccatctgtgtgagcatcactgttatatgcagatgtgagctgggcatggtggctcacacctataatcccagcactttgggcggctgaggtrgacagatcacttgagcccgtaagttcaagaccagcctgggcaacatggtgaaaccccctccctacaacaaatataaaa

SEQ ID NO: 954140 - DNA, 693 bp, Homo sapiens
ggtgctattacgtcaaagggtatagtgtgagcacatgggaggaagcaagtcagttccatttgggagacagagcaggaaaagcttcagagaggaggcagagcttgagctgacaggcgtttgtgaggtgggaactgagtaactgagagaaagagttggggaagaacataccaagtaggagaagctgcatgagcaataacaggaaagcacagaaatgacataccatgcatagaggtaggaagtagaaccatggttagtagaggctgagaagggcagtgaggggaggatagggagaagttggtgaatggatacaaaatgacagctagatagaaggaataagtcccagtgttctgtaacactgcagggtaactagagttaaccataatttattggatattttcaaatagctagaagagaggattttgaatcctcccaacacaaagaactgatgaatgtctggagtgatagatttgctaattacactgatgtaatcatcacacattgtgcacatgcatggaagtactactctgtatcttataagtgtgtgtgtgtgtgtgtgtgtgtgtgtgtgtgtgtgtgtgtgtgtrtatatatatatatatttttttttttttttgagatagagtctctctctgtcgcccaggctggagtgcggtggtaagatcttggctcactgcaacttccgcctcttggatt

SEQ ID NO: 954141 - DNA, 555 bp, Homo sapiens
gagtactgaatgcgtgtgtgcttttttaatgtgtgtttcactctgaattccttctgaatctaaatgacattatgtatatgttaatgtagtaatatataaataacaatgataatggctattggacacatcatttttttttctaggaagaatagtggaatgattcaattatttcagattgcatttcagctttggagactgcatttattttgcaaaagctacttgtgttagtcccaaaattaatctgcctagcctggaggcaggtacctgctatgctgtctggagaagtcacatgaaaatagtcaagatatttttttccttcaaggagtgttttcttatgaaaccaatgcctctctctccctctccacgaagcggaaattaattttataactggtattcttgaaagtctgtataaatggaaggcactattttaaagtagggtttcatctgagtgcatgtgattaaaactactcttcatctagaaattakaaacatggcagatagcaaatttggattttcttatacatctacttaaacttaatttctccaaaaaagcta

SEQ ID NO: 954142 - DNA, 768 bp, Homo sapiens
gaaactaaagggtacgttgctttccttttgaggtaataaaatgttccaaaattgattgtcagtggtggttgcacatatctgtgaatatactaaagtgtattgaattgtacactttgatgggtgaactgcatggcatgtgagttatatctcaatacaattgtttgaaaaattgaatttatattgtgtattcttttgggaccaacttcttttactcataatgtctgtcatattcataaatatttttgtatgctatcagacgttcattctttttattgctttgtagtattccattgtatgaacataccacaatttatttaatctatcattctgctgatgaacagtaatgttgtttcaaatttttagttctatgaatagagctgtcttgaacattcttgtacatactgtggtgaagagatgtactcatttcacctgagtatatatctaaaagtgagatttgacggtcactgctgggatagaaacatgtttggttttagcagatactgccaaacagttttccaaagtggttgtaccaattacatttccactagttgtgtgccagaactccagttgcttcccaccctcattaacacttgattttttttttagtcatttcagtgagggtgcagcggcttctcaatgtgcattttcttgatgagtaatgatgctgagcatcttttcctttgcttgttgaccatttatacattttttttkggtgaaatttccattcaattcttttttttttttgagatggattttcactcttgttgc

SEQ ID NO: 954143 - DNA, 564 bp, Homo sapiens
tgggtgaaatttccattcaattcttttttttttttgagatggattttcactcttgttgcccaggctggagtgcaawggcgtgatttcagctgaccgtgacctccgcttcccgggttcaagcgattctcctgcctcagcctactgagtagctgggattacaggtatgtgccaccacgcccgcttaattttgtatttttagtagagatggggtttctccatgttggtcaggctggtctcgaactcccaacctcaggtgatccacccacctcagcctcccaaagtgctgggattacaggaacgagccactgtgcccagccattcaattcttttgtccatttttttattgggttatttatcttttcttgttgaattgtaagaattctttatatattctggaagttgtcaagcttatgtattggcatatcttcttcctatctgtggcttgtctttttcttttctcaacggtatcttttgacagaccaaagttctcacttgtaatgaagtccactttatcaatattttcttttatagttggtaaacttttgtctccacaaagtcatgaag

SEQ ID NO: 954144 - DNA, 587 bp, Homo sapiens
aaaagtaacaaggagatgaatattaatcaccaagacaagggggaacatttttccagrgcatgtccaagactttcatggcagcctctgccatcacaggcccaaaggcctaagagggaaaaatggttttccggattgggtccagggccccccctagctgtatgcagccttgggacttggtgccctgcatctaagctgctctagctgtggctaaaagaggccaacatacagctcaggccattgcttcagagggtgcaagccccacgccttcgcagattccttgtggtgttgggcctggggtgtgcagaaatcaagaattgaggtttgggaacctctgcttagattgcagaggatgtatgaaaactcctcaatgtccaggcagaagtctgctgcaggggtggaaccctcatggagaaccactggtagggcagtgaggaagggaaatgtggggttggagcccccacacagagtcttcaccgaagaactgcctagtggaactgtgggaagagggccaccatcctccagacctcagaatggtagatccaccaacagcttgtaccatgcacctagaaaagtcatagatgctgtac

SEQ ID NO: 954145 - DNA, 453 bp, Homo sapiens
cttgagaagatggatacaccatttaccctgatgtgattattacatattgcatacctgtgccaaaatatctcatgtaacccataagtatgtacaattattatgtacccacaaaaattaaaaattaataaaaaagatccatttgcacaagcaaaaaatgcataataaatgtaaagttcgtttagcattaaaaagtacatcattgatttcataaatgtaattacttattaggtaacaataacaaataatacaacttctgctaaataaaacatggttgaatttcaaaaatatatgtttgttaggcaaaagagtacagaacactctctctctctctctctttttttttttttttttttgagatagtctcgctctgttccccaggctggagtgaagyggcatgatctcggctcattgcaacctccgcctcccaggttcaaaggatccttctgcctcagc

SEQ ID NO: 954146 - DNA, 616 bp, Homo sapiens
tcagtattgaagaaagacctattagcatctttaaatttaaacattagagtcaattccagaaattccagaacaaattcagaaaactcatccttaacattctgtttttctataatcactctcagtactgaaatctatattaggattttccagaaaaacataatcaatagcatatttacattataaaccaatttattatgaggaattaattagctcatgcagatatggaggctgagaagtcccaagattttcagctggcaagctggagacccaagaaagctggcattatagttccagtctaagtctgaaggctggagaatagggaaagctgatgatgcaagctctagctggagtccaagtccaaaggcaggaaaagactactgtttcagcttgattctggtcagacagaaaaagtaaattctcccttactcagactttttgttttaatcagaccttcaacaaattggatgacacattagcagggcaatttgctttactgaatctactgattcaaataataatctcttccagaaacaccctctcagacatactyagaataatgtttagccaaatatctgggcacaccatagcccagtcatgttgacacataaaattaacc

SEQ ID NO: 954147 - DNA, 541 bp, Homo sapiens
ttcatatggaagtatcaaagtgaagtacagactggagtgggggaaaagcccctaataaaactgtcagatttcatgagaactcactcagtatcgcaagaacaatgtggggaaaacagcccccatrattcaattgtctccttctggtcctgcctttgacatgtggggattattacaattcaagatgagattttaagtgggacatagccaaaccatttcatgtatcattaatgactgttttctcattctatgataaacattgacatagctgctcaaaacagcacaatacatatagtagaatttaaaacttccttagagatatctctagaattataaacatttagcaatgagttgttcatattgtttaataaggatttaattacctatattcacgctcttttttttataatttaagcttaaaagtaaattttaaatataggcttcatcatagaaatatttaacttataaaggcgcttcagggttggattttcatagcttttttcatttctgacttttgtttaatgagcggactgtatttattttt

SEQ ID NO: 954148 - DNA, 632 bp, Homo sapiens
ccatgtagagaaatttggtttgaggtggagacttcaggaaagccccagctcctcagcctcctctcattcttttacccaggaccgtctgggggccccagctccccgacaacaggccccacctccacatctggtgagtccctgaggcttctgaactcaagggagtgcggcctcccccagggcagccctgggtctcccagagaatcccattcccctcaaagactcgagcttccctccagggagccgggcagagccagaggaggggccacagggtccccagggctctgaggctgggctggtgaggggtggggggtcaaggcagagagaaatgttggggcccagcctgggggaggagcagccgggctgatgtggggagcagggcagccccagccctcacctccccgtcctgacccagcaggccctgaggaccagcccctcacccccaccgggtcggatccccagagtggtgagtgacgggctctgagtgggaggtgggcagggtccaggggaggcaggggtgggttctgtcctaggttcagkctcctctggaggtggtgatatagacaggctcctcccctgcttgggcctcagtttctccaaatgtaaaggtgagaggcctgcgggtgggaaagttc

SEQ ID NO: 954149 - DNA, 632 bp, Homo sapiens
ccatgtagagaaatttggtttgaggtggagacttcaggaaagccccagctcctcagcctcctctcattcttttacccaggaccgtctgggggccccagctccccgacaacaggccccacctccacatctggtgagtccctgaggcttctgaactcaagggagtgcggcctcccccagggcagccctgggtctcccagagaatcccattcccctcaaagactcgagcttccctccagggagccgggcagagccagaggaggggccacagggtccccagggctctgaggctgggctggtgaggggtggggggtcaaggcagagagaaatgttggggcccagcctgggggaggagcagccgggctgatgtggggagcagggcagccccagccctcacctccccgtcctgacccagcaggccctgaggaccagcccctcacccccaccgggtcggatccccagagtggtgagtgacgggctctgagtgggaggtgggcagggtccaggggaggcaggggtgggttctgtcctaggttcagtctcctctggaggtggtgatatagacaggctcctcccctgcytgggcctcagtttctccaaatgtaaaggtgagaggcctgcgggtgggaaagttc

SEQ ID NO: 954150 - DNA, 161 bp, Homo sapiens
ccacccccaccacgttccttmcctctcactctcccccgctgcaggctgctgcatctgaagccccccaggatgtgacctacgcccagctgcacagcttgaccctcagacgggaggcaactgagcctcctccatcccaggaagggccctctccagctgtgccc

SEQ ID NO: 954151 - DNA, 811 bp, Homo sapiens
agcagctgcatgtactcctgatcctctggcagagtayatggccatcagagttcaagacccactaaccaatatgctgatcctacagattctgtaaacactctttgactttgaagacccatctttttttttaacttaatttttttaagttgacaaatacaaattatatatatttgtaatgtacaacatgatgttttgtaatatgtatacattgtagaatggttcaactgagctaactaacatatgctttacctcacatacttatcatttttggtggtgagaaacccatctggttttctaatgcattttcttccactgcatgttaaaggaatatgtttaactgaggcacgtaaagactttgaaaaccaaatgggagaggatgctgaaattgaaaaatgtttccaagatagtaagtcagaactacagaaataagcttggagcagaaggcaaccagctaattgtattattcagcaggagtttctagagggttctcagaaatcaccaaagagcttcaaagcaaaaagttaaagaaacttccaactcttgcataaaacgccaatttaaagataacacattagctgacagtctggtgagtgtcagagctagaaatattgatctatgaggttctatttcgaacagggaagtgcaaatacaattgaagtcaaattatgatcagggccatagatgcacacaccagcagcttccttatttctctccacagacctgtggaagactagaggcgtgcctgccttggttgggcagcctagagatccgtttcttcctacacactactgagcacaaaatgagttaataa

SEQ ID NO: 954152 - DNA, 473 bp, Homo sapiens
ttatttatgatgtcaagccatacctactgtcttctaaaagggtctacggctggagaagagactgcctagtgtcaaccaaataagatgatcatggcaagagaaaacctcattagaactcagcaatgkgactttttaaagaatgttctaaattgcctataacagtataagggtttcaaagttctggggtgaaaacactgtctccagcatgagctctcttcaactacttgagaagaaatgcacctcaccttgagttgactcaagtacctacagccactggtaacacgttaaatgagcccttgccttgaagagagcaaaagcctagagatagttcactaccaataagctacagtaggtgagcatatgaggattacttatgcagggtgaatacactaaaattaaaattgttctaaatggagtctgacatacatatgcaaaatgaaaggggaaagggagagcagaatcattaacattac

SEQ ID NO: 954153 - DNA, 410 bp, Homo sapiens
gattttttctcctccttccaaatttctgtctaggccaaacttgccatgcctaggtcagaaactgttgttggaaatggaagctgtcctggctttctctttgccaatgaaggactcatttttccaaaattcagttcattaagtcttcttttgactcctgatctttgttagccccatgggaaagtatgatttttattttctctgagtttttcttgacattaccatgggaacaaaatgctttcatgctcttatgaagtgaaagtctgaaccaaacatttaaacttaaaaaaaaaaaaaacccacataaaatcactagaagaaaatatgggagatttaaaaaaaaatcttrggacaaaaaaagtcatttcagagcaatacacaaacctcagaagctataaaaaaattaatcaacc

SEQ ID NO: 954154 - DNA, 593 bp, Homo sapiens
tcagcagatggaagccgatttcagagacatatataaccatatggaacaagaaggctttcaggtgtcatctagatcaatgcacccattgcagccactcctgtggcaatctggtcaggtagctgttttggtctctggttgaacaccccctgtaaccaaatgtacaacttaaaaatagatatattttttcaaaatagagacaaggctgggtgcagtggctcatgcctgtaatctcagcactttgagaggccgaggtggcagatcacttgaggtcaggagttcgagaccagcctggccaatatggtgaaaccctgtctctactaaaaatacaaaaattagctgggcatggtggtgcacacctgtagtcccagctactgaggaggctgaggcaggagaatcgcttgagtccaggaggtggagattgcagtgacacaagatcgtgtcactgtactctagcctggacgacagagctagacttcatctmaaaaaaataaatagccgggtgtagtggctcacgcctgtaatcccagcactttgggaggctgaggtgggtggatcacaatgtcaggagctcgagaccagcttggccaacaagg

SEQ ID NO: 954155 - DNA, 631 bp, Homo sapiens
ggtgttaactctaagctggtcaggcattcatagctggactgtggtgctctcctggtattcttttgtattctggtcacagaacatcaaatttttatagggtccatgattgatgaaggctagaaaaaaccactctgtaattatgtctgaacacaaaggaagcctggatatcatgcaaaccacaaaagtgaccagacagccctctatcctggctaaaatgaatgagtgcctgtagctttctccttctctatttttcttcatgccaattacatctttagcctcagtatagcctttcctcctactagataaaatttattaagataaccagtcatggctgggcacggtggctgatgcctgtaattccagcactgtgggaggccgaggtgggtaaatcacttgaggtcaggagttggacaccagcctggccaacatagtgaaaccttgcttctactaaaaatacaaaaattagcccagcatggtggtgtgtgcctgtagttccagctacttgagaggctaaggcaggagaattgcttgaacatgggaggtggaggctgcagtgagccaacrtcatgccactgtgcatcagcctgggcaatggagtgagattctgtctcaaaaaagaaaaaaaagaaaa

SEQ ID NO: 954156 - DNA, 626 bp, Homo sapiens
ccaaggtgcaggtgatcacaaagtgctgtgtaattaggatctggagtgcagggcagtatggagcagagtggctctaaggttcagggactacacaggattggggagagtggtgatcccagtggcaataaatttttataactctttattgcctaagtatccattttgactacaagtttaactttctcataccagaagtagagttctggcaccatttacaagagtccagttctacatctcacccaaatgactcaagtcagttgccagagataagaagttagagtcatctctcctgcctagcagattgggctccttgctttcccactgctatcctttaaatgaaccattcagctatttgccttttaacttaaagtgactcacatcctgtttctttatttgtactgctagttgccacatgcatctccctttctctgccaaactcttccttgatgacacacaagatccgaggatgaatgattgccctcttgaactcattacactttccttgcctagratctgtaagtaaaaatctttggatttattttctgttctggtagttacagaatttgcaccttccatctgaagaattagaggcttcctcaggccccactttccctgggatgccaggg

SEQ ID NO: 954157 - DNA, 596 bp, Homo sapiens
actacagacccatcagaatggctaaaattaaaaagatggtctataccaaatactggcaagattatggagcaactggagctcttataccctgatgctgggtatgtagattggtagaaccactttggaaaatgtttgacattatgtactaaagaagagtatgcatgtattgtataatccagtaacttcctgcctatctatatgtattaaataaatggttacacaagtataattaaagatatgaaagaggttcatggcagcattatttgtaataaacccaaactggaaacaacccaatattcaatgacagtgtaatggataaataaattatggcatattcatacactggaatattatacagcaatacaaatgtatgaacaatacagctacatacaataatatgggtaaatctggcatacatagtgttgaatgaatgcaggcacaataatgcatcctgtgtaattccatttataaagcgtttaaagctaagcaaaactaatctatggtttagggtccagccctacggggctttgagggtgttctccccgtgtgcrgagacgagagattgtaagaaataaagacacaagacaaagagataa

SEQ ID NO: 954158 - DNA, 692 bp, Homo sapiens
acttaaacaccccactttcagcattagatagatcttccatacagaaaatcaacaaagaaatactggacttaatctgcactatagactgcatggatctaatacatatttacaggacacttcatccartggctacagaatacacattcttttcctcagcacatggatcattctcaaggacagaccatatattaagtcacaagacaagtcttaaaacattaacaaaattgaaataatatcaagtatcttttctaaccacaacagaataaaactacaaataacaaaaggaattttggaaactatacaaatgtatggaaattaaataaaatgctcctgaatgaccagtgggtcaagaaagaaattaagaaagaaatttaaaaatttcttgaaacaaatgataatggaaacacaacctaccaaaatctaagagatacagcaaaagcagtactaaaagagaattttatagctttaactgcctacttcaaaaaaaaaggaaaaacttcaaataaacaatctaatgatacatcttatagaactagaaaagcaagagcaaacgaaacccaaaattagtagaaacataaataaagatcagagcagaaataaatgaaactgaaataaagaaaataatacaaaagatcaatgaaaaagttggtttttcaaaaagctaaaaaaaattgacaaaactttagccagag

SEQ ID NO: 954159 - DNA, 589 bp, Homo sapiens
gtttttaatacaattctttaataaaaagaaccagaggcgaggcacggtggctcatgcctgtaatcccagcactttgggaggctgaggcaggcggatcacctgaggtcagaagttcaagaccagcctggccarcatggcgaaaccccgtctctactaaaagtacaaaaattagccgggcatagtggcaggtgcctgtaattccagctactcaggaggttgaggcaggagaatagcttgaacctgggaggcagaggttggagtgagccgagagcatgcgattgcactccagcctgagtgacaaaagagaaactctgtctcaaaaaaaaaaaaaaaaaaaaaaaaaaagaaccagagatccttggagaaatggctaattctaaaattggagcagaaaataaatacaagataagcctggagtatcttgtactgtccatgaagcaagaaagttattacaagaaaaaagcatggggaaagtcaaaggggcataggagccaaatgaagagcagtgaatagtgaaagctagaacaaggtgtgctatacaatagacaaagtagtattggattataactcaaaatataaagtcaacatc

SEQ ID NO: 954160 - DNA, 591 bp, Homo sapiens
ccaccccagtgattgtagcttcagttcagcaaaccttgccaccatgggctaaagttctctggggtcctaaaaarctggaaaggcagtttgggccacaaggactgcaacttctaggcaagttctggtgctgtgctgggctcagagccagtgaacttaagggacatgtgatctagtgagacaccagccagggcagctaagggtatacttgcattacccctcccctaaccctaggcagtgcagctcaaagctcggaaagagactccttttctctgcttgaggagaggggaggaagaataaggaggactttgtcttgcaacttgaataccagctcagccacagtagaagagatcacaaggcagagttctgagaccccctttccagctctagctcccagataacatttctagacacaccctgagccagaagggagcctgctgacttgaagggaaggacccaggcctgggagaattcattacccactgactgaagagcccctgggccctaaataattggcagtggtacccaggcaagtactcattgtgggccttttgtgagactgagggccatgctgaatttaggtgtgtcccagca

SEQ ID NO: 954161 - DNA, 657 bp, Homo sapiens
ctaagagctctagacctggcttctgtgggactagaaaaagccaggactcacggccaaactcmtgtacagtaaagaaagatgttcaaatgctgtaatgggtgagaagagcgaactagaacacttggagctggcaccacaccttacttgcaagctgcacagacttgttgcacaagccttaccacctgtttgaggaacaagcatcttcctgatacagatggggaaactgaggcataaagtaattcaaaggctattaaaattgacaggatttgttgggaatggggattaggaaagctccaaatccatgctcctgccttctggatgcatttgacatcaaataccccacagaggttttcaaaggacattgagaaacagaatcttatcactgatcattccagattctaatgaaattatgcctttccctaaatcctttgggctgcgttttcagatcattttcttctgctttatcaagcaagccaagagaatagcaaaattaataaatcattgacaaaagaaagtaattagacttttgggatgaggcccaagaaatgcagcaaaagactgttttctcccctctttcaaaaggtgttatccacaggagagaaaagcgtaagagaaaactaacctccatcaaactcatgtttcatataaggcatctca

SEQ ID NO: 954162 - DNA, 640 bp, Homo sapiens
tagaatccttagaagatacatgtggggaaaagtagtctcctttcaaataaaagttaatttatttgaaaaaataaaataaaaagacccaaactactgaattgtctgtcacagaaaatatcatcagtaaacaggctaatgcaatctcaaactgcactagaaatgtccagaataaggagagtggggattatcatgttctatgctatactgatcaactgcatggttcatttcaaccaacattccctggacacctactatgtgccagaccacactgaaatattgttttcaatttcagttaatattacatattaacaaacaaaaacacattcaagagaaaataagaaaaatgtctaaaaggtttttattcataaagaatcaaagcaacttagaaaaatgtcatcaaggccgggcacagtggctcacgcctgtaatcccagcactgcaggaggccgacgcaggcggatcacgaggtcaggagatcaacaccatcctggctaacacggtgcccgactctatggactattcctttgaatgtattggtaatgtgaaggtcatgagagcagcacttgaggcgtgtcacaagggctggggcatcagcgtggtggytagagtagccgcttcaggtgaagaaactgccactcgt

SEQ ID NO: 954163 - DNA, 640 bp, Homo sapiens
tagaatccttagaagatacatgtggggaaaagtagtctcctttcaaataaaagttaatttatttgaaaaaataaaataaaaagacccaaactactgaattgtctgtcacagaaaatatcatcagtaaacaggctaatgcaatctcaaactgcactagaaatgtccagaataaggagagtggggattatcatgttctatgctatactgatcaactgcatggttcatttcaaccaacattccctggacacctactatgtgccagaccacactgaaatattgttttcaatttcagttaatattacatattaacaaacaaaaacacattcaagagaaaataagaaaaatgtctaaaaggtttttattcataaagaatcaaagcaacttagaaaaatgtcatcaaggccgggcacagtggctcacgcctgtaatcccagcactgcaggaggccgacgcaggcggatcacgaggtcaggagatcaacaccatcctggctaacacggtgcccgactctatggactattcctttgaatgtattggtaatgtgaaggtcatgagagcagcacttgaggcgtgtcacaagggctggggcatcagcgtggtggctrgagtagccgcttcaggtgaagaaactgccactcgt

SEQ ID NO: 954164 - DNA, 567 bp, Homo sapiens
caaggtgtcagctgattcagttcctggtgagggcccccttcctggcttacagattgcaaatggctgttgttgtcgtcgtcgtcgtcktcgtcgtcgtcgtcgtcgtcgtcgtcgtcgtcgtcgtcgtcttcttcttcttcttcttcttcttcttcttcttcttcttcttcttcttcttcttcttcttctctcttcttcttcttcttctctcttcttcttcctcttcttcttcctcttcttcttctattattatactttaagttctggagtacatgtgcagaatgtgcgggtttgttacataggtatacacatgccatggtggtttgctgcacccatcaacctgtcatctacattaggtatttctcctgatgctatccctccactagcacccccgacaggccccggtgtgtgatgttcccctccctatgtccatgtgttctcattgttcagctctcacttatgagtgagaacatgtggtgtttggttttctgttcttatgttagtttgctgagaatggatggtttccagcttcatccatgtccctgcaaaggccatgaactcattctt

SEQ ID NO: 954165 - DNA, 605 bp, Homo sapiens
ctcagttgctatatattaatgataatattacatgttcattttacctcatcatcttatttccaagacagaactacaggatgccctgtctacagacaaaaaggagcaacaacatgcttctaagttgtctgcagactcagagttctccttccatccatccccaggcctccccctaggcactactgtgtgacccactaattttaatgtcggatataaattaccggtgatgctgaacccattcttgaatccgtcctgctccactgcaaacatccatccaatgatgcctccaactggggccagtggaagcagagaatatccaacggtctcgggaatggtgctgatggctgtgtaggagcgcccgtggttcattactacgtaagagtggaggtcagtgttctcaaagacaatggggacctggctgctccccacaaagatccttcctttcaccttgccattgactcgctggggggaacctgagcaagaaaacaaagaaagaatatagagatcacttccaagccagtcttkcaaacacgagtaatatgtaggacctgtacctattggtgaagaaagcaaagaaacaaaacagcactggggtcaatggctttggg

SEQ ID NO: 954166 - DNA, 450 bp, Homo sapiens
gagaggaaactgtctcaaaaaaaaaaaaaaaaaaagaaaaragaaagaaagaaaagcaaagaaaacaggaaactgtgtgaaatgcttttcaaatgctttggtctcgaagaattaaaattttattgcaatgacaatgttttggcacttacaaggcatgaatgtgctgcaatcctgaatgcctctatggtctgataggctgagatttcagcagaggcagatttactacgaagccaaagaagcgtaaacttcaggcagcctctacttatacaggttgcttccaaaacttctggagggggcctggcaatgtgttcacatggacgtgtgtttttttgccaaagtaagattagccactgtcagttgataccattgtctctttccactgcaactgaccacatgttcccatgcattgggtgggcattttggggaccttgttgaaggaaattgagttgg

SEQ ID NO: 954167 - DNA, 679 bp, Homo sapiens
tgctttcaacttgtctttaacagaatttccaatccatataatttgtttctttatcaatcctttcctaaatttattttcttcccttgccmccatgttatcagtcttaaacttttttttttttttttttttttgccagtatcatctaattcctctcccagctttctttttatcaaaccagactgaaaaactctcaactctttatttttctagctgagcactactggcaaaaatcacacaagcagtaacaagcactgtcagtttattgttatcagcctcaaatggacccacacaattggtcgtaattctattatttctagttctctcatttttcgcagagattacttaaggcaaccagccactcttcttacatctccagttttccacgtttcttgtcgcattcagcagatgacttggtatttcatttcacagagaaaatggaaatcttcagatgagaactcccacagtgtccttccaacaaatctactcacatctgcactcattctggtttgtttgttcttagtgtttataatggaaagagtctcgccctcaagggatgggaaaatcatatgcctctagaaaccaggtggataatataaatttgtgaagccgtagggtaagattaggctgtggcctgtagcaaattgataagagctatctaaattattcaagttgttaatac

SEQ ID NO: 954168 - DNA, 648 bp, Homo sapiens
ctgtgaaatcactaaaaggtatatataggttcgactaaakcattcgtttgtttttcttttgcactgtaagaaaaaaaaagtctgtttcaaatcctatttgtcccttatctctgtttgttcagttgtttttaatatcacatactgaaagaatttcaatagcagtttcaccatgaagtcatttgttatccttcagcaggcttttgcctactgaattgtaaagcagttctgactatttgcatcctccagatggagcggcatataaacactcccagatatttctggtaagtatgaaaaaatatcttatttgtcctttctgtgaataaataagagaatgtcaaattttatagactaataaatttgtatgccggcactgacattgaatctcttgtggcctgcattgtcacagaccctgagaaacacattttttgttgttgttgttacagatgaatactaagtcaaatagaagctcaataaaaggcacggtttgattgcattgtttatgtctgtccaatattctaattcagttgcaatatgccatgaggaaatgcaatttacatgtttcccaggtttattgcacaacaatcactcactcatatatacttctatctgtcagagaaaaccccactaatgggttaaaatgccctttag

SEQ ID NO: 954169 - DNA, 754 bp, Homo sapiens
atcccagtactttgggaggctaaggtgggaggattgtttgaaccagaagttcgaggccagtgtgggcaacatggcaagacccccatctctaaaaacattattttttttttwaaaaaaaaaaaaaaggacagtagtgtgtgaggtgggcctggtggctcatgcctataattttagcactttgggaggccaaggcaggaggactgcttgagctcaggagtttaagatcaacctgggctacacagtgagaccttgtctccacaaaaaataaacaaaattagccacgatggtggtatacacctctggtcctctactcaagaggctgaggtgagagcatcacttgagccccagaagtcaaggctacagtgagctatgagccattattgtgccaccacactccagcctgggtgtcagagcgagagcttatctctacaaaaaaaaaaagaacaatagtgtgtggaagaagctcattgttctagggaagcacagagtgcaaggcaactccatcaccccatggagaggactttccacagcctatttctttgcactgaatgattccactcttaggatgaaatgtgcagtcttcttgatccaatattgtattgatttgaagtgtccattccaagtggcttccagaaggaagtaaaacaactcaaattaaaaaatatctccattctttcttgcttatgttctttgatcaagttgtctttgtgctcttatgaaatggctacagcccagtcctcacagcccaacataa

SEQ ID NO: 954170 - DNA, 465 bp, Homo sapiens
tcaaatgtcaatctcttctgccaacaccctcacagacactcccagaaacaatgcttcaccagccacctcggcatctgtattagtccattctcacactcctaatagacatacccaagactgggtaatttataaaggaaagaggtttgattgacttacagttcagcatggctggggaggcctcaggaaacttacaatcatggtggaaggggaagcgaacacatccttcttcacatggtggccacaaggggaagcgttgagcaaaagaggaaaaaaccccttataaaatctttagatctcatgagaactcactcattatcccaagaacagcatgagggtaaccgtccccatgattcaattacctcctactgggtccctcccacaacatgtggggattatgggaactatcrtttaagatgagatttgggtggggacacagacaaatcatatcagcattcttcaatgcaa

SEQ ID NO: 954171 - DNA, 598 bp, Homo sapiens
attcaattacctccacctggtctctcccttgacacctgggaattttggggatcacaattcaagataagatttgggtgggcacacaaagcctaatcacaccaggtygtcaggtgatgaatggagttttggcagaggtttggatcacagtggttatttcctcagttcctaaatataatttgagtagctgtacttggtaactgacagaacccctgtactgactctctgaaccaaggagtgaagactgtcacagtagggagagaaaagtcaacggcatgaaatgactctgctctaagtattgtacacagagagcagtactgtggctctggacaaaccacagagactgtgaccacagtgaagggttaaaaatgcaagagaatggtgattcatctcagaattctatttaattttcctgctttcctttgcagtaaataatgatcttagagattctaactgcacatataattaaagtaaccagagattattccaatattagttgttgtttcagatgtggtatcttaatggagaaaatcagcataggtccttaaccttgcatttaatctggaaaatattcatcttccccctgactaatttacaagaa

SEQ ID NO: 954172 - DNA, 661 bp, Homo sapiens
gaactttcacggtatgcagaggcacccatgggtgtctatggtctttctctcttccctggmcatatagagcaaatcagcataaccacctctctgatgtcaggggttgctcagagacccacttcatccagtaggatatgtggacaggcagtatccccagcttcagacaggagcttagatttgcgcttctacagcccaggtttcatctgctccgtggccggcactgtgcaggcagaggtgagccagtgagcctctgggtggctttgaaaatgatgtcacatatcacccaatcctagaattcagcctctacgaagcttctgcatttaacccgttggacaattagtcagtttcagaactacttctactgcttcattaagggtaataataagatgaatacgactgtctgggaaggagggggaagtggaaagaagagagacagagattgaaatagcctcagctttgtagagggaaagtaaacactgatggcatgtcatgctattttcctagctggggaaaaaaaaaaaaagcagttttagattcaacaaatatattttttaagtctctacaatgtgccaggccctgggttgggttataggaatataacagtgagatatagacgccatcggtttcctcacagagcacagagctcatgaggaaagatggg

SEQ ID NO: 954173 - DNA, 773 bp, Homo sapiens
atacttgtgtatgcttcacaaagttcttgtgctatgtttttcagcyccataaggtcatttatattcctctctaaactggttattctagttagcaattcctttaaccttttatcaaggttcttagcttatttgcattgggttagaacttgctcctttaggtcagtgtaattttttattgctcatcttctgaagcctacttctgccaatttgtccatctgattctccatccagttctgcacccttgatggaaagacactgtgataatttggagagaagagacactttgttcttttggattttcagcattttttcgttgattatttctcatcttcctgagtttttttttatttttggtctttgaggccgatgcttggatgaggtttttgttggggccttttttgctgttgttgatgatgctgttactgtagctttctgcttgtttcttttttcttgcaatagtcaagtccctcttctatagggctgctgcagtttgctggggcttcacttcaggccctattcatctgatttgctcctgagcctggagatgtcactcaaggaggctggagaacagcaaagatggttgcctgctccttcttctgggacctctgacctcgaggggcaccaaccttatgccagtaggattgctcatgtgtagagtgtctacaacctctgttggaagatctcagccagtttgatggcatggggagcaggacccatttaacaaagcactttgtctcttggtggagagtgtgcacttcactggggagtaaccc

SEQ ID NO: 954174 - DNA, 555 bp, Homo sapiens
caggtggatcaccagatcaggagattgagaccatcctggctaacatggtgaaaccccgtctctactaaaaatacaaaacattagccaggcgtggtggtgggygcctgtagtcccagctactcgggaggctgaggcaggagaatggcatgaacctgggaggcggagcttgcagtgagccgagaactcgccactgcactccagcctgggtgacagatcaagactccatctcaaataaacaaacaaacaaacaaataaataaataaataaataaataaataaataagaaatagagatcctgaacagaccaataagaaataagccatttggatcagtaatccaaaacctctcaacaaagaaaggcccaggaccagatagcttcactgctaaattctatcaaacattcaagaataccaatactgtgatggctgatactgtcaacttgattggattgaaggatgcaaattattgatcctgggtatgtctgtgaggatgttgccaaaggagattaacatttgagtcagtgggctgggaaaggcagacccacccttaatctgg

SEQ ID NO: 954175 - DNA, 543 bp, Homo sapiens
aaatctttggcctcctttgttatgtttatccctaagtatttcattatttttgatgctattgtaaatgcaatctttttcttaatttcctttttggaaattcattgttagaaatgcaactaatttgtgttgttgattttctgtcctgcaactttgcagaattttttagttgtgtgtgtgtgtatgtgtaatttttacagttttctgcatatagatcacatcagagagaactttacttcttcctttccgatctgggtgccttttatttattttgagacagagtctcagtctgttcctcaagctggagtacaatggcgctctctctgctcactgcaaccctctgcctgccaggttcaagtgattctcctgcctcagactcccaagtagctgggattacaggcacctgccacgacggctggctagtttttttgtatttttagtagagacggggtttcaccrtttggccaggctggtctcgaactcctgacctcaagtgatccgcctgccttggcctcccaaagagctaggattaaaggcataagccac

SEQ ID NO: 954176 - DNA, 543 bp, Homo sapiens
aaatctttggcctcctttgttatgtttatccctaagtatttcattatttttgatgctattgtaaatgcaatctttttcttaatttcctttttggaaattcattgttagaaatgcaactaatttgtgttgttgattttctgtcctgcaactttgcagaattttttagttgtgtgtgtgtgtatgtgtaatttttacagttttctgcatatagatcacatcagagagaactttacttcttcctttccgatctgggtgccttttatttattttgagacagagtctcagtctgttcctcaagctggagtacaatggcgctctctctgctcactgcaaccctctgcctgccaggttcaagtgattctcctgcctcagactcccaagtagctgggattacaggcacctgccacgacggctggctagtttttttgtatttttagtagagacggggtttcaccatttggccaggctggtctcraactcctgacctcaagtgatccgcctgccttggcctcccaaagagctaggattaaaggcataagccac

SEQ ID NO: 954177 - DNA, 619 bp, Homo sapiens
ggctgaaccttgcagagccacagtggcagagctgcccaagaccttaggaacccaccctttgtatccatattccctagatgtgggacatggactcaaaggataattattttggagctttaagatttaaaaactgcattgctgggttttgaacttgtgtggggcctgtagcccttattttggctgatttttccctttggggatgggagtatttacccaatgcttatactcccattgtgtcttggaagtaactaacttgtatttttattttacgggctcataggcagaaaggactagtcctgtctcagatgagatcttggactttggacttttgagtcaatgctggaatgagttaagactttgggagactgttgagaagggattattgtattttgcaatgtgagaaccatatgagatttgggagtccaggagtggaatgatatggtttggatctgtattcccaccaaatctcatgttgaactgtagtcctcaatgttggaggtggggccttatgggaggtggttggatcatgagggtaggtttctcatgaatrgtttagcaccatccctttggtggtgttctcctgacagtgagtgagttcttatgagatctggttgtttga

SEQ ID NO: 954178 - DNA, 648 bp, Homo sapiens
ctaagtcctagacttttctaaaaagattattacttgccacatttgggaattgtgtctgtatctaatcttatctgactatcaaaatgtgaaaccacatttagcctttgaatagcaagttcactaatgttgatagctaaaatcacagtgaggaaaacctaaaatctgccctctgacttgatacaagagcatcacaccctttcacctaataagggataaggtacatgaatactcttgagagttccatgacgttatccctccgaagtgaccaaaggtgacctttaggttcctctggattgtaagggcattagtcttctcttcacaatatattctgtataaagtgacttctcttcaaagtcttcttcttacaagaaaagactttccaaatctcctctcccctaggaatatatttctctcttcttccccaaatcaagacatgaaaaatacttttaaagtgttccccaagttctaaaaaaaaaaaagaatgtttttatttgctttcaaatagagaaactgtaaaatgtttagamattgtattacatgtgcttattttcaatttcttttttttaattctagaattcttttctatttttttgaatgaaaagtactctcaaaggaaaaaagtaaataagatgttatataacatagggc

SEQ ID NO: 954179 - DNA, 552 bp, Homo sapiens
cttctgtgccagcccagtgatatcagggactcatcacagaggccacgttgtgacctactccaccaaggcccctccttcaccttggcattcagcccagtgcccagatgaccagggaggtgtggtagtcaagggtccaggggacaggagggcacagagggagaggttgtatccaggctggggtgggtgagcaggaggcaaagagggaaacagaagggccaccttggcgatggctcacacctgtaatctcagagctttgggaggccaaggcaggaggatcacttgagcccgtgagttcaagaagggccacctggaatcttctgaagagaatttactatactgatgaaagagaatatttgatacctttagcccttaacacctctcaggggtcgactttttctttttaagaactgtttttttgtgktttttgtttgtttgtttttttgagatggaatcttgctctgttgcccagatcttggctcactgcaacccccgcctcctgggttcaaatggttctcttgcttcagtctcccaagtagctgggactgcaggtgc

SEQ ID NO: 954180 - DNA, 709 bp, Homo sapiens
tatgaatcgtcttcaataaatctatrcttttgttattccgttcttctgttgctgtttgtctttcgttgcccttctgttactttatgtgttttgttcaacacgccaagaacctggacaactctatgctggtaacaactgcaggtaacctggtaacaactgcagtttcaaactctcctgggctcaaccccagcctcccaggtagctgagactatagacgcatgccaccacacctggctaatttttttatttttatttttatttttggagacagaatctcactctgtcgcccaggctggaatgcaatggcatgatctcggctcactgcaacctccgcctcccaggttcaagcgattctcctgcctcggactcacaagtagctgggtttacaggagcacactaccacgcctggctaatttttgtatttttagtagagatggggtttcaccatgttgaccaggctggtctcaaactcctgaactcaagtgatgcttcctggctcggcctcctgaagtgctagggttacagatgtagtttttaaagtttttgtagagtggggtcttgctgtgttgcccaggctggtcttagactcctggcctcatgtgatcctcctcggtctcccaaagtgctgtgattacaggtgtgagccattgtgcccagcccaatttttaattaaaaaatggaatgatggaatgcacattactttgcatct

SEQ ID NO: 954181 - DNA, 719 bp, Homo sapiens
ataagaaaatctagtaagtgtaacctggaagccaagtgaaaaaaaaagggtcactgtgaggaagtgatcaactaatgtatcaaataatgttgaaaagacaagtaaaagtgaggtaagagaccagcaggacttattttccagtcccaacaggataaagagaagaaatggtgggaaccagcagacagtgctgaaagcaacctctagcttccttcgttgctcattagcgtaagaccctcccaccagcaccatgacatttacaaataccatggcaatggccaagaagttaccacccctttccatgacaataatccaaaaattaccaccccttttccagagatttctgcataaccctccccttgatttgcatgtaattaaaaatgggtataaatatagctagccaactgtccacaagtgctcacttggggtgcactgcctaggagttggatgtgcttcacaggagcaattccagttcagtaaaacttgctaacaccactggcttgcctttgaattctttcctgggagaagccaagcacctgtatgagctcatctgcctgcatcaataggactgaaaaagaccactggatttagccacatggaatccatcagggatctytgatgagagcagacacaaagacctgattggagtgggtacaagagcgaatggaagaagaggaattagagatgagtattccacacctctactgaggaatcttactatt

SEQ ID NO: 954182 - DNA, 465 bp, Homo sapiens
gttttctcaccaggaggcttgaggagtgtggggtgggaggcacagcttttgaggatgccccctggtgctctgggataggaactgcttcggttcagacatcactttctcttcagtatttggcataaggcccaccatgtgtaaagtgctcattcattcaacatgtattgaacacctcagggttaagctctgtcttagtacatctgactctgatgtgctacagaatgacaccacagccttagacacctgccctcacagcacttacgatctcccagggacaaccagtaaattggtaattacaagaatgcttaataaatacttttcagttaaaatttctgtgtcctttaagtaggaatgtagaaatttacaatatattyctccttatttcaactgctgacaaagttatcagagtagaaaatttttatctacacaatgtaattttatgtctccatataatataaagtatat

SEQ ID NO: 954183 - DNA, 622 bp, Homo sapiens
cgatatttacaatctgacagagtaccaaccctgtttttgcaaagtctcaggctgtggatgatgtaataatagtaacatgcaacagcttttagcagatattatcccacagaataaaaggcaacatccttacgatttcctacgatgatctacaacaacctgctactccactctctgccttccttaatatgtctctgacttcatcgcttctaactcccccatcacctactccttgtcagctttcttattcttcttcaaaaatttagacacacttcctttttgggacctttctttggagatatcctctgtctagaattttcttccttcaaacgttcccaagggtcatccctcatttccttccttttttttttttttttttttgctcaaatctctccacccaactccacattttaggaaaaaaacaatgtggaggtgcttctcgtctccccaagatcctcttctgttcagccagatgtttcctgtataaatgtttggatctgcctgttcattttggtgggtgttcttgcttcttctcccaccacccatgccaccttctcactctgcycctggcctccagcccacggaggactacctgggggtgaggttcctgggccttccctctcct

SEQ ID NO: 954184 - DNA, 715 bp, Homo sapiens
atctcacgatgtgtttccataaatctgctcaatttataatctcttgcgtgtgagtttgcgcctctttccatgtatgtttccagtctgcacacatggatggcgctgcacacatagatgtgtggtggcctcattagccagtagctactctgagaccctggacatgcccgcctgcattgggatattgctatcgtattgaactgcttgctagaaaatggtcttggaatctcacaagggacatctattcctgatggagtgtgcagttttaataatgacttaagtcaatacaatgttgacagggtagaaatgacttatcaaagacacatacctcttaagtgcccgttctgtgcaggcacccagcaagggctgaatttgcaagggcaactaaacagaaagggtcctgccttaagaaacttatagtccagagcaggggccaccaagcttttttccatcaagggccagacaggggcttttgggggctctgtgaaagctgccatagatagtacatagaggagtggggttggctggttccacgaaaactttatttatgaaaacaagtgctgtgtgcagtggctcacacctgtaatcccagcactttgggaggctcaggcaggtggatcacttgagttcrgtagttcgagaccagcctgggtaacatggcgaaaccccatatctacaaaaaaatacaaaaattagctgggtgcggtggtgcacgcct

SEQ ID NO: 954185 - DNA, 677 bp, Homo sapiens
gtcttttaaaaataataataggctggcatggtggttcatgcctataatcccagtactttgggaggctgaggcaggcagattccttgagcttaggagttcgagaccagcctgggcaatgccatctctactaaaaatacaaaaaattagccatgggtggtggtgaatgcctgtggtcccagctacttggaaggctgagatgggaggatcacttgagcccaggggcggagcttgcagtcagccgagattgcgccactgtactacagcctgggtgacagaaccagatcttgtccaaaaaaaaaaaaaaaagtaataataatacccctctccctccccctctcccctttgcacggtctctccctctgatacctagccgaggctggactgtactgccgccatctcggctcactgcaacctccctgcctgattctcctgcctcagcctgccgagtgcctgggattgcaggcgcgtgccaccatgcctgactggttttcgtattttttggtggagacggggtttcgccgtgttggccaggctggtctccagctcctgaccgtgagtgatctgccagcctcagcctcccraggtgccggattgcagacggagtctcgctcactcagtgctcaatgttgcccaggctggagtgcagtggcgtgatctcggctcgctacaatctccac

SEQ ID NO: 954186 - DNA, 426 bp, Homo sapiens
ggagtgagaaatatcagtccagcgaaacctctgggactgcactccttggggaaagcctctaccacagctctgggctataaaggctgagcaaggctcttagagacaaaagagctcaggtccaccccagccctgcctggcctcctagctggtaggcaaatgcagtcgtgtgctccacccaagctgtgttttcttcaactgtaagaccaggataataacatggcatctacccctgccgcctccaccactaggttgtccagtgcctttcctctagggctgcagatctaaccccggtgcacattagaatttcctggggaactataaaataataatgtctgcacaaccagcatcttgggacagagggtggcagtgggtgcatatartgactctaatgcagtcaaggttgagaatcactgctctggcctgtgt

SEQ ID NO: 954187 - DNA, 604 bp, Homo sapiens
gaagagatttggaatctgatctcactttactctgacatctaagaccttggaagagctgagaccccagcaggaccaaggttcyggtcaggcctggactgtggcaagtggtgcactggttgtgatgggacctgggttccagtcctaatgctcccattgatttgggaggggtctctgtacttctctgggccttagttccccacccaaagctgggcagtggccttccagatccagtgtggagctcacatacacgtggatgccccatagcacttttgcttcttccttccttattcagaatgtccagaaagccatccccttattcactggtttggagcgctatagactgttaagcatcttcacaggcatagcttcatttgaactctaccacaaggctgtgaggttggcatgaccactatcctgtgtcagatagtaaatagaggctgagagagtggaaggagcttgcttcaagtcatgcaatctttgggacatccttgcaatcccttcatttttaacctacaaataaaaatatatatgatgctgaatatcggaattaagagacagctcagagatcatcccaacctatctgtttgtttgactgatagggagc

SEQ ID NO: 954188 - DNA, 605 bp, Homo sapiens
tataacaaaaataccataggctaggtggcttataaacaacagaaaattatttctcacagttctgraggctggaaagtctaagaccaagttgccagcagactcagtgtctggtgagggcccacttcctggtttatggaccgccatcttcttgctgtatcctcacatgatggaagggataagggacctctctggggtcttttttataagggcactaatcccactcatgaggattattccctcatgagggtcatgccctcttgacctaactaccttccaaagaccccacctcctgataccattaccttggagttaggttttaacacatggattttggagggacacagacattcagtctacagcaaaagcctaagcaattgcagcttaatagctagagtcaggtctgagttccaatattcttctgcctcttcccacttactaaattatacctgtaagtataataataataatactgacttcttaggattgttgtgatttttagcatgaaataatatatgtgatatgcctggcccagagaagacaagcaataaagagcagtgtgtgtgtgtgtgtgtgtgtgtgtgtgtgcgtgtttgtttgtgtgtctt

SEQ ID NO: 954189 - DNA, 566 bp, Homo sapiens
agcactgcccctagtttagggaccttgggcaagtcacataatgtcagcaagcctccaagtggaggaactggtacccctgcctcacaggctgctatgaggattagttaattgagttcatacaaggcccttakcctacttcttggcaaacagagagaggtccaaacatattagctttatttcttccttaattctccaaacatgtattagatagtaaaatgggcattttacaatatttcattcaatattcacaacaagactctaaggaattaagatatccactgaatagatgagtaaacacaatgtttgaaaggttgagtgactcctccaaggtcttttagttagtaattggaggtctgaattctctgactcgagtccttattttctatgctagttcatggaggcattttgtgttgtttcattgttttgttttgttttaacacaaggttggggtagatgaactaatattatcttgcaagttgacataaaatgcccatgtgtgagattcctgttattaactcccatagtgcctgccttctatctctccaagcttggtgcacttagcatct

SEQ ID NO: 954190 - DNA, 773 bp, Homo sapiens
ccccactccacccagacccattcctcctccctcgtttcctgttcccaygagtggcacagtcacccttccagggtaatggccagaaacataggcctgattctcaatgcccatttctctctctaacttcaggctgaattggtcgattccacctcctgtcatctgaatccatccaattctgtccttttgtctccatcctcctactcttaccattgtccaggccccttttatttcttgcttaggttacctacacagcttccttactagtaaccttgcctgcattctttctaatttccaatctattctccatactacaaataacatttaattaaaaattgaatcacagcatcttttcttcagtggttccccaaggcccctgagtgaaagtcaaaactcctcaacatggtttatgaggccttaacattgcttacttcatccatctcacttcttgcaacttccctcttccacttcgtccttatcttctttaaaaaaaatttttttaagagatggggtctcaccctgttgcttaggctggaatgcagtggtggaatcatagctcattgccgccttcaacatctggactcaaaggatccttcagccttagcctgctgagtaactgggactacaggtgcacacaaccacacctggctgattttcaagtttttttttgtagacaaggggtctcaatatgttgcccatgctggtcttgaacgcctggcctcaaacaatcctccttccttgtcatttcaacgtgttaggattacaggcatgagcca

SEQ ID NO: 954191 - DNA, 832 bp, Homo sapiens
aactctttatctacttttcagtgggtattttcagtaaacttttgctggagaggaagaaagttccttataagcaaatgaatctttgggaagatatagtttattgcatatcaagtatttgaacagtgcagtcatgaactggaatgaaattttagtttcaaagcaattttaaaggtttatataaaaagggctttcattagatttgattgtattaaatcttaaatcactgaatgatttaaaatggatagttatagaaactgatattaatacaatttactgacagtaactaagttgaatataacagttaccttgttttactattttttactcaatttagaataaaattcacctaaattcctctgtctttgccccatagcttgctcagtatgaaccacctcaggaggagaagcgtgctgaataggattcttctcagtttgaaagacaatgaaaaatggttttgtatgacttgaatagtttgtatagtatataatcttttctgaacagatgctatagaactcttttaatatgtttaattcacctatcacactctgttaaaaacacatagaatcatcaataaaaactcaatataactttctttgggtcttaaagcaggagaatccaaagtaaatcctgaacaaaacctaaacacagccatctaactcattaccttaaaagacattctgtttattagtctgattaggaatgatggcactggttgtattttagccaagacagtttagcatggagctaktccttggtgcagttcaggatatgaacacaggtacagtcattctttgaaggtgacactgttctgtatattccctataggcagctg

SEQ ID NO: 954192 - DNA, 774 bp, Homo sapiens
aaacagcgtggaggatcttcaagaaatcaaacatagatttaccatatgatccagcaattctacttctgggtatatacccacaagaagtgaaagcagagacttgaacaaatatttgtacacccatgctcataayagcattattcacaatagccaaaaggtgaaaacaacccaaatatccattgatgtctgaataaagaaaatgtggcatatataaacaatggggatattatacagccttaaaagaggttctgacacatgctataacatgagtacaccatgctacatggaataagccagacacaaaaagacaagtactgtattgacatggtttggctgtgtccccacccaaatctcatcttgaattgtagctcccataatccccacatgttgtgggaggggcctggtgggaagtaactgaatcatgggagcagttaccctcatgctgttcttgtgatagtgagggagttctcaagagatctgatggttttataaggggctttccccgcctttgcttgcacttctccttcctgccaccatgtgaagaaggacgtgtttgcttccctttctaccacgattgtaagtttcctgaggcctcccagacatactgactataagtcaatatataacccagtcttgggtatgtctttagcaatgtgagaacgaactaataaatgtatgatgccatttctatgaggtacctacaatagtcaaactcactgagacagaaagtagaatggtggttgccagtggccaggggagagaggtttaatgggt

SEQ ID NO: 954193 - DNA, 559 bp, Homo sapiens
gggcttttatttatttatttatttattttgagatggcgtcttgttctgtcgcccaggctggagtgcggtggtgcgatctcggcttactacaatctccacctcccaggttaaagcrattctcctgcctcaacctcctgagtagctggaattacaggtgcctgccaccacacctggataatttttgtatttttagtagacacggggtttcgccatgttggccagggtggtcttgaactcctgaccttgcaatttgcctgcctcggcctcccaaagtgctggaattacaggcgtgagccaccctgcctggccgacaggctttttatgtagtatcccagggctcccaaagagagcatgccaggagatgggagtggcaacatcttttaaggcgtgggccaaagcatcattcctgccacattctactggtcaaagcagacccagagcttgcttggattcaaggcgagatgactgagacccccacctctccatggcaggagtataaagaatttgtggccattcttgaagccaccacaggtaaagattaaatgagttaatacataaa

SEQ ID NO: 954194 - DNA, 638 bp, Homo sapiens
tggcagtttggctcctgtcttagtctggttagtgttgctatgaataaacacctgaggctggatatttataaagaaaaaakgcttatttggcttatgattctgatgtctggaaaaatttaggattgggaatctgcatctgggatgaaccacagacttcctccacttagggaaagggagccagctgtgcagagatcacatggtgagagaagaagccagggaaagaaggaagtgccatgctcttttcaacaaccagctctcagggaaacaaatagagtgataactcactcattaccatcaggaaggcaccaagccattcatgagggatctgcctccatgacgcaaacatctcccattatgccccacctccaacactgggaaccaaatttcagcatgaggttttaggagacaaacatctaaactatagcattcttcttctagcctcccaaatctcatgtcctcacatacaaaatacaatcgttctatcccagtagtccccaaaagtcttgttccagcatcaattcaaaagtccgaagtctcatttgagactcaaggcaagtttcttacagctatgagactgtaaaataccaaacaagttatttacttccttccaagatataatggtgggacaggcattaggt

SEQ ID NO: 954195 - DNA, 600 bp, Homo sapiens
cacatggtgagagaagaagccagggaaagaaggaagtgccatgctcttttcaacaaccagctctcagggaaacaaatagagtgataactcactcattaccatcaggaagscaccaagccattcatgagggatctgcctccatgacgcaaacatctcccattatgccccacctccaacactgggaaccaaatttcagcatgaggttttaggagacaaacatctaaactatagcattcttcttctagcctcccaaatctcatgtcctcacatacaaaatacaatcgttctatcccagtagtccccaaaagtcttgttccagcatcaattcaaaagtccgaagtctcatttgagactcaaggcaagtttcttacagctatgagactgtaaaataccaaacaagttatttacttccttccaagatataatggtgggacaggcattaggtaagcactcccatttcaaaagggagaaatcagccaaaaggaatgggtgcaaggtcccaggccagtgcaaaagccagcagggaagacattaaactttagaactccaaaataatcctcaactccatgtcctgcattctgggaacattggtttaagggg

SEQ ID NO: 954196 - DNA, 612 bp, Homo sapiens
actattattaattacaaagaaaaaatagtaagagtggataaacttggaatatatcttattccataagtatatcttatgaatacatcaccttaaacaaatgatcaaagttaacatcaccagtaataagacaaactgacatcgggtgcctctgatattatgcagcaagaacacagcatcatgtctttatattactgtcaaaaacatacagtctgattctacccatgacaccacactaaactcaaagtgaggaacactctacaaaacatactggcctgtactcctcaaaaatattgcagtcatggaagacaaacacaggctgaggaactcttccatattaaaagagaattaagagacataacaacaaaatgttgtgtatgatcctgacttgaaccctagattgagaacaggggagagggtgtggttgtggctataatattagtgagacaattgctgaaattgctgaaatttgaatgtggattaggaattagaaaatagggattagaaataggaattaagacatagtattaagtcaatgctaagtttcctgattttgatattgtrcagtggttatgtaagaatatgtcattgttattagaaaacacgcgttaacct

SEQ ID NO: 954197 - DNA, 613 bp, Homo sapiens
cccgtctttactaaaaatacaaaaaattagccgggcctggttgtgggtgcctgtaatcccagctactcggaggctgaggcaggagaattgcttgaagccaggaggcggaggttgcagtgagccgagatcgtgccattgcactccagcttgtacaagagcaaaactccgtctcaaaaaaaaaaaaaaaaaaaattaaacaaaaaaatagactacattaaactagaaaatatcagtatacaccacatgaagcaaggcatatcatttctgtgaaacttttgctgtgtgtgtgtatgtctgtgtgtgtttggttttgatgtgaaatgttgttcttacatgtattacattcagtttgaaagcctctgttgtagttacaggataagtaatctgaaaatgtggtggaaagggaatttgtaaataaagaagagttgggagagacattgcagacagaatggacatgccttggtgactaactggattgtagggagggatcattaaggtgaaaaaaggaggaactgaacatcatcatgagcttcmactgggtaatatgatgataattattctttttacaaaaatgggactatatggttgcattccactcagatggctctcagaa

SEQ ID NO: 954198 - DNA, 575 bp, Homo sapiens
ctcccacccaaatactgtgcttttccaaccatcttagcaaacagcacaccaggagattatatcccgtgcmtggctcagagggtcccacacccacggagccccactcattgctagcacagcagtctgagatcaaactgaaaggtggcagcgaggctgggggaggggtgcccgccattgctgaggcttgagtaggtaaacaaagcagccaggaagctagaacttggtggagcccaccgcagctcaaggaggcctgcctacctctgtagactccacctctgggggcagggcatagctgaacaaaaggcagcacaaacctctgcagacttaaatgtccctgtctgacagctttgaagtgagtagtggttttcccaggatggagcctgagatctgagaacagacaaatggccccctcaagtgggtccctgatccctgagtaacctaactgggagccaccctccagtatgggcagactgacacctcacatggccaggtacccctctgagatgaagcttccagaggaatgatcaggcagcaacatttgctgttcagcaatatccgctgttctgcagcctcca

SEQ ID NO: 954199 - DNA, 638 bp, Homo sapiens
agaacatctttatttctgccttcattttgttatttacccagtagtcattcaggagcaggtggttcagtttccaygtagctgtgcagtgtggaatgagtttctgaatcttgagttctaatttgattgcactgtggtttgagagactgttatgatttctgttgttttccatttgctgaggagtgcttacttacaattttgtggtcaattttagaatgagtgtgatgtggtgctgaaaagaatgtatattctgttgatttaggatggagagttcagtagatgtctgttaggtttgcttggtccggggctgagttcaagtcctgaatatcctttttaattttctgtttcattgatctgccttatattgaccgtggggtgttaaagtctcccactattattgtgtgggagtctaagcctccttgttggtctctaagaactacgcaaataaactagtaaatgtagaagaaatggataaatttctggacacataaaacctcccaaaactaaatcaggaagaaattgaatccctgaatagaccaataagtagttctgaaattgggtcccttccaagatggccaaataggagcagctccagtgtgcagcccccagtgtgatcaatgcagaagatgggtgatttctgc

SEQ ID NO: 954200 - DNA, 786 bp, Homo sapiens
agggaagcccatcagactgatagtggatctctcagcagaaactccacaagcaagaagagagtgggggccaatattcaacattcttaagaaaagaattttcaacccagaatttcatatccagccaaactatgctacataagtgaaggagaaataaaatcctttacagaaaagcaaaggctgagagattttgtcaccaccaggcctgccttacaagagctcctgaaggaagcattaaacatggaaaggaacaactggtaggagccactgcaaaaacatgtcaaaatagcaaacatgatgctattaagaaactgcattgggaaggagccaagatggccgaataggaacagctccggtctacagctcccagcgtgagtgacacagaggacgggtgatttctgcatttccatctgaggtaccgggttcatctcactaggcagtgccagacagtgggcgcaggtcagtgggtgtgtgcaccttgcgcaagacaaaccagggcgaggcattgcctcactcaagaagtgcaaggggtcagggagtcccctttcctagtaaaagaaaggggtgacagatggcacctggaaaattgggtcactcccacccaaatactgcgcttttccgacaggcttcaaaaatggcacaccaggagattatatcccgcacatggctcggagggtcctatgcccacggagtctcgctgattgctagcacagcagtctgagatcaaaccgcaaggyggcagcgaggctgggggaggggcgcccgccattgcacaggcttgcttaggta

SEQ ID NO: 954201 - DNA, 615 bp, Homo sapiens
aacaaaattctgaactgcatttcctaatccttctcatcccatagattccctcatttcagtaaatggcaattactgatttcaattgaattatagtaattcaattaacaattactcagattgacaactttggagccatccttaattttttcagtctccagtattcaaattattgggcaaatgttttggcttgactttcaggacatatgcagaatttgactgcttctcactacctttcttgctacagatctgatagaagctattattgtctctcatctgggttatagaactacctatctaaatggtcctcttgcttccgctctttcccccctactggataattctccacacaagagccgaaaagattcttttaaaacataattgggatcatatcactcctctgctcaaaatcttctggtggctcttcatcacagagttcaatcacagccaatttcaaaagcctacatgaaaaataattattcttgcaacactttayacaaataatcaggccaagtataataaagcaaatcagtcctatgatgatccatctttagtaaaaatgggagactggagagagaaaaaaattatgttttaagaactatggtacacctgttatta

SEQ ID NO: 954202 - DNA, 568 bp, Homo sapiens
aagacagaaagatgtaagaaagtttgaaacttcctagagacttgttgaatagctttgaccaaaattccagtgatatggacaatgaagtccaggctgaagtggtcacagrtggagatgaggagcttgttgggagctggagtaaaggtcactgttgctatgcaaagagactggcagcattttgcccttgccctagagatctatagaactttgaacttgagagagatgatttagggtatctggtggaagacatttctaagcagcaaagtgttcaaaagaaagcagagcataaaagtttggaaaattttcagcctgacaatgggataggaaagaaaaacccattttcttgggagaaattcaagtctgctgcagaaatttgcatacataacaaagagccaaatgttattcaccaagacagtggggaaaatgtctccagtgcatgtcagagacctttgtgtcagcgccctgccatcacaggcccagaggcctaggaggaaaaaatggtttcctgggccaggcccaggggctcctttctgtatgcagccaagggacttggtgccctgtcttccaa

SEQ ID NO: 954203 - DNA, 351 bp, Homo sapiens
tgagttgtgtgattgtaccactgcactccagcctgggcaacagagtgagacgctgtctcaaaaaaaaaaaaaaaaaaaaaaaaaaagaaataagagaaataagctattcacagaaggacagatactatctgattctatttatacaaagtacccagaagtcgaatccacagagacagaaagtagaagggtggttgccaggggctgcggggagaggggtacggggtactactgcttaacaggyacagttgcagttttgcaagatgaaagagttctggagatggatggaggtgatggttgcacagcagtgtgaatgcacttaatgccactttaaaaatggttaagatggtaaat

SEQ ID NO: 954204 - DNA, 560 bp, Homo sapiens
tgagcagctccgggggtgaggcttgggaggggcttccgtttaaggaaataacaggatgtgaaaattgagaggagcccaggagcccctcagcgctgccgttccctcctcccttccactaacctctttcaacaaccagacggcgcagacctgctgtccacagggtactagtcgggcactggggcatcttcagacatgacagtcatgtggtccccgcccaggatcattgggaaggtattgtgaacaggtagggataagcccaggaccaggagatggggctggggacagaaatgagttgatacctgcctcggtttccctaaagtgcatgtcctcaaaaggtcaaagatataacgaaccgtgaggctgccgagagaaaaatcctcaaggttatatctacttcaataccagggctacaaggaaaacagttttttgttctatccttggggatctcaggtcaccaggatctgatacttaaaggataattactcctcaaaaagccacaattagaactaccakaagatccagcaatcccactgctgggtatatatccaaaggatatgaaa

SEQ ID NO: 954205 - DNA, 596 bp, Homo sapiens
agcctcttatttggcctgtgcccctggactgtgaccttcacaggtgtttcctagctgcttttgtctccttaaggctagaggtggctgaagtggagggaatacctttctcgaaaggaaaataaatctgaaaggaaaataaatcttggtgccccagaatcactaagctaaagagaaaagtcaagctgggaactgcttagggcaaacctacctctcattctattcaaagtcacccctctgctccctgagataaatgcatatctgatggcctcatttggagaggctaatcagaaactcaaaagaatgcaaccatttgtctcttatctacctatgacctagaagcgccctccctgcttcaaattgtcctgcctttgcctcgagttgtcccacctttccggactgaaccaatgtacatattacacataatgattgatgtctcatatttccctaaaatgtataaaaccaagctgtgctgagaccaccttgggcacatrtcgtcaggacctcctgaggctgtgtcacagatgcacatcctcaaccttggcaaaataaactctctaaactaattgagacctgtctcagacatttgggggtcacac

SEQ ID NO: 954206 - DNA, 623 bp, Homo sapiens
ccggggatacaggggtgcggggcgcagggataacgggcgcaggggacggtcacgggtgctttctagtgggttgtgcaggctcaggttcccagcgctgggtggttgcgactctgcataaaacgctaagcytttgaggcccttattcaagctcggggacgtctcccagttggtcagttcaaaacctctgggccaggttgcgttggtggcagattccgcccgctaagtctccgcacgctgccgcgggtctgctcctcccccggggtcagaacctctgacgctctcctgcttttacacgcgttaagtcactggtttcttgcagcatcacgtgttccctagatacatgggctgaggcttattcttcctgaaagtgagggttttttcctttgggctttccagagccagcccgcgtggagagtgacgagtgacaggcgcctttgttccgggcttgcatgggtgggacgcgccccctcctcagcactcagcccggcgagcctggccctcccgtcgccccttcttaagtgcatttgtcccgggctctcgattttgtttactctttcctgcttacacaggtacacacacacacccagacctaaactttatataaacagacatgaacttaaaga

SEQ ID NO: 954207 - DNA, 659 bp, Homo sapiens
tggcattaagcacatgtccatttattcacacatatatttgaatttaataaatatgctattcatcccatamagtgtacacttgcacagaagaaaaacacacttagcccctctttctcgaagattctatatactgcaggctggttgctccctagttttgccgtatttcctaggggtaataacccctgtttgggatatttcctctccacttccattccagacccaaacaataaaatacaatcctggaatgaaaagcatgctcatatctctagtgtctattttctagagttttggtttatattgataatctgaactgtgaatattacataaaccttcaggctaatagtggacagtcttggcaggtaacatgaacccaggcaattttaaaagctgtgatagatatatttaatgctttataataaaaatactaaacatgtattgagtctatcattttcctgatgggactggccatgaaacaggcagctcccaaatggatgtagaaaaaaggcttctaactccacctccctaaaaagatggtcagaagtacaaaagacaacatccatggggaaactgaagcctgagatgggcgtatcagacaggaatttcttggtagtgacagcattttgatgggaaataccaacaggctaaaaagaaacacagcc

SEQ ID NO: 954208 - DNA, 659 bp, Homo sapiens
tggcattaagcacatgtccatttattcacacatatatttgaatttaataaatatgctattcatcccataaagtgtacamttgcacagaagaaaaacacacttagcccctctttctcgaagattctatatactgcaggctggttgctccctagttttgccgtatttcctaggggtaataacccctgtttgggatatttcctctccacttccattccagacccaaacaataaaatacaatcctggaatgaaaagcatgctcatatctctagtgtctattttctagagttttggtttatattgataatctgaactgtgaatattacataaaccttcaggctaatagtggacagtcttggcaggtaacatgaacccaggcaattttaaaagctgtgatagatatatttaatgctttataataaaaatactaaacatgtattgagtctatcattttcctgatgggactggccatgaaacaggcagctcccaaatggatgtagaaaaaaggcttctaactccacctccctaaaaagatggtcagaagtacaaaagacaacatccatggggaaactgaagcctgagatgggcgtatcagacaggaatttcttggtagtgacagcattttgatgggaaataccaacaggctaaaaagaaacacagcc

SEQ ID NO: 954209 - DNA, 659 bp, Homo sapiens
tggcattaagcacatgtccatttattcacacatatatttgaatttaataaatatgctattcatcccataaagtgtacacttgcacmgaagaaaaacacacttagcccctctttctcgaagattctatatactgcaggctggttgctccctagttttgccgtatttcctaggggtaataacccctgtttgggatatttcctctccacttccattccagacccaaacaataaaatacaatcctggaatgaaaagcatgctcatatctctagtgtctattttctagagttttggtttatattgataatctgaactgtgaatattacataaaccttcaggctaatagtggacagtcttggcaggtaacatgaacccaggcaattttaaaagctgtgatagatatatttaatgctttataataaaaatactaaacatgtattgagtctatcattttcctgatgggactggccatgaaacaggcagctcccaaatggatgtagaaaaaaggcttctaactccacctccctaaaaagatggtcagaagtacaaaagacaacatccatggggaaactgaagcctgagatgggcgtatcagacaggaatttcttggtagtgacagcattttgatgggaaataccaacaggctaaaaagaaacacagcc

SEQ ID NO: 954210 - DNA, 659 bp, Homo sapiens
tggcattaagcacatgtccatttattcacacatatatttgaatttaataaatatgctattcatcccataaagtgtacacttgcacagaagaaaamcacacttagcccctctttctcgaagattctatatactgcaggctggttgctccctagttttgccgtatttcctaggggtaataacccctgtttgggatatttcctctccacttccattccagacccaaacaataaaatacaatcctggaatgaaaagcatgctcatatctctagtgtctattttctagagttttggtttatattgataatctgaactgtgaatattacataaaccttcaggctaatagtggacagtcttggcaggtaacatgaacccaggcaattttaaaagctgtgatagatatatttaatgctttataataaaaatactaaacatgtattgagtctatcattttcctgatgggactggccatgaaacaggcagctcccaaatggatgtagaaaaaaggcttctaactccacctccctaaaaagatggtcagaagtacaaaagacaacatccatggggaaactgaagcctgagatgggcgtatcagacaggaatttcttggtagtgacagcattttgatgggaaataccaacaggctaaaaagaaacacagcc

SEQ ID NO: 954211 - DNA, 609 bp, Homo sapiens
acttccaattaagaaatgtataaggaaatgtttctaaagattaaaacatggttttaaaatacatgaaatacttataatattttatcttaaaatactgatatattgcagacaattcaagatttcttacttcctargttcttccctaaaatccctaaaataaggattactaagagttaatattgtaacttatataagtaattgaaactactagatacaagagaaacaattctatttgcagaatgtatacgaaaaataggatgtgtttttggtaaacacacaagaagacaggaatatggttttcgtttaagggcaagtaattttgcctagtttagaggttctaaaggattgttttaaattgaaggaattaaaaaagtgtagataaaactaaataaatatagaaagttgagaaagaatgaaaataaaacaaattgtaagaggttataaaaggtttatggaaatcttaccttgcagtcaaaacaaattgagattgaatagatttgtttataaggtcttattaaaattagctgtaatattaaaaatgcgctaatacaaaactaaaaattttggttaaagcaacaaaattttttgaagtattgatttgctctcaat

SEQ ID NO: 954212 - DNA, 584 bp, Homo sapiens
gatcaatggaacaacggccatttggtgattgtttcttgtcactctgtgggggtggggctggggatggctgagaaactgcaagctatctgaagaaaacttctgcatttgctccctcatggaaaagctaatgggaattctgtttaaacagcatggtgtttactatcaggacattgtcccaaagcattctcctagcatgcatagactgacggagaattagctctgcctgccatgcacggtgggggctggccgggtcttgggccttgggaagctctcccaggcttccttccttggcagctactgcaggaatcctgaattgtttacagtgaagccaggagataagaccctcaccgcaaggagttcagattcttttgctaagttagaagacacagatgagacaaagcttgcaaaggggctctgctgttctaagcaagtcatgggctgcctttgaggaycctttagagagctgtggacaccatgcagaggttctcacagatgtttacctcagttggagcaaaagcattctccagaagaagctctgagagatgcccatgaaggtggtatcctacatgtctggacccactgaa

SEQ ID NO: 954213 - DNA, 490 bp, Homo sapiens
ttattatttctttccttctacttactttgggtttatatcattatgagatgatcttgtttatctctagcaccacttttytcttaaaatctctttgtgataatgcagctacttcagctttctgatgctttcttatgtttccatggtatgcgttttttcattcttttactttcgactcatttgtacttttgcatttaaatagcatcttttgtagacagcacatacgttcctgtttttattaatatattccacctgctaatctctgtcttttggttcgactgtttcatctatttatatttacttttttttcagggatggagtttctctgttgcccaggctggagtgctgttcacaggtctcctaacattctccatttgtctttttttgtttgtttttgagacagggtctcattttgtggagtgcagtggtacagtcacagctcgctgcaacctcaacctcctgggctcaagcgatcttccctcctcaaccactg

SEQ ID NO: 954214 - DNA, 490 bp, Homo sapiens
ttattatttctttccttctacttactttgggtttatatcattatgagatgatcttgtttatctctagcaccacttttctcttaaaatctctttgtgrtaatgcagctacttcagctttctgatgctttcttatgtttccatggtatgcgttttttcattcttttactttcgactcatttgtacttttgcatttaaatagcatcttttgtagacagcacatacgttcctgtttttattaatatattccacctgctaatctctgtcttttggttcgactgtttcatctatttatatttacttttttttcagggatggagtttctctgttgcccaggctggagtgctgttcacaggtctcctaacattctccatttgtctttttttgtttgtttttgagacagggtctcattttgtggagtgcagtggtacagtcacagctcgctgcaacctcaacctcctgggctcaagcgatcttccctcctcaaccactg

SEQ ID NO: 954215 - DNA, 592 bp, Homo sapiens
gggagccgagtaagttctctatcagccagtggagaccccctagggcaatagaatagaaaggcacctttttgcaaatgcagtcctcttgcaggccrtgagtgacaccagctcttgccacctgacaaagggcacagacaccaaaccctgccccgcccacaggagtccatttcaactctaccccatgggcaggtaaggaaactgggctctgcaagtcacaaacaagtcagcagagtcaaggagggcaggcctgaccttggccacaggtgctgcagatcagaccacattaaccaggaacttgagttgaagtccaggcggagcttgcggggagaatggctagctctctgtggagttgaaggtggttggaggtttgttgggtttccctaagtttccaagcctgttctcctccatcatttgctcagagaataatattacaggtgttgggagagctggttttgtaacattaatcagagtggattaaaaggttactttcttctgatttgccctgagaggattgcttggcaaatcaaggggagtcacttttcagacagaaagactgcacttgctggtttgaaacacactgcgctcagccaca

SEQ ID NO: 954216 - DNA, 198 bp, Homo sapiens
atgatcctagattatctagaaagcccagtgtaataacaagggtccttaaaagtggaagagggaggctggacaggaggccagagagatgcagtgtgagaacccgatctgacattgctggctttgaaggtggaggccatgagccaaggaatgtgggygcctctcaaagctgggaaattgatactccctgagaagcctcca

SEQ ID NO: 954217 - DNA, 725 bp, Homo sapiens
ccattgggagtaaaatccaacctaaatggaagtgggactaaaagcttttctttatcccacttattgtaaaagtttacatgtttgctgcagaaatactaagactcaccacagcgtgcttccccagagccctctggggttgtttttttatctacaatgtaattgatatatctaaattccacagcacaactggccgcaaggattttgaacaagggatagttagtctcagaaacacagggtagaaaggaacctacggatcttctaggtcaatctattaattgcctggagatatgtggcagaagcagcaaacatgttcagaatcatatactttttaggcgaggtgcagtggctcacgcctgtaataccagcacttttggaggctgaggtggacggatcacctgaggtcaggagctcgagaccaggctggccaatatggtgaaaccccgtctctactaaaaatacaaaaattagacacgcatggtgatgggcacctgtagtcccagctacttgggaggctgaagcaggagaatcgcttgaacctgggagtcagaggttgcagtgagccgagattacaccactgcactctggcctgggtgacaaagtgagactctgtctccaaaaaaaaaaaaaaaaaaaaaaawatatatatatatatatatatatatatatatatatatatatacacatacacttttgggatctcagccaagaagacagtgcaatttctc

SEQ ID NO: 954218 - DNA, 613 bp, Homo sapiens
atgcagattccaggatgtttcaggcaggggttctgataagcgytgaaaagctacattttcacgactgcttggtgacagggacacccagttctgggcctcctggagcagcagtgcccatgcctggcttcgtctttgctgactcctgcgggcctcagctccacgtgcccagttctttgggttgtgtttgctgtggtcacctgtgtttctccaagtgaccaggcggcttcttccctgggctgaaagctctgcttgtctgcatctgccatgcttgggaatccttagtaatgtgtaccccacctgcaggaagaccgctttcccctcctgcacggatggttttcctgcgtccctttcctccacctcctcctgactgggttttgcacttccctaccttcctggagttttgtgcttcctggttcatctttgtcgccatcttcaggcatgtggccagcctgtgttttacaccaagcaagggaacatggacactgctcagtgctccttggttcatttgggactttcatcagagtatgcttgtttggagtgaaaactggagcatttcaaagtcagttcgcagtatggcttggtagagagcgtggctaggtagctggttgccttt

SEQ ID NO: 954219 - DNA, 582 bp, Homo sapiens
gggtgtggtggcacacgcctgtagtcccaactacttgggaggctgaggcaggagtatcgcttgaatgtggaggttacagtgagccgagattstgccactgaactccagcctggtgacagagcgaaactctatctcaaaaaaaagaggctgggtgtggtggctcatgcctataatcccagcactttgggaggccgaggcgggcggatcacgaggtcaggagatcaagaccatcctggctaacatggtgaaaccccgtctctactaaaaatacaaaaattagccgggcgtggtggcgggcacctatagtcccagctacttgggaggctgaggcaggagaatggcgtgaacctgggaggcggagcttgcagtgaggcaagatcgcaccactgcactccagcctgggctacagagcgagactccgtctcaaaaaaaaaaaaaaaaaaagaaatttatatttgaaaaccaaaagccatcatttatccatgcagcagatatactatattgagcatctcaaagtcacagggtctggaaacacaagggtgaataggcttccccaatgaagctaacattccagtgcaaaaa

SEQ ID NO: 954220 - DNA, 746 bp, Homo sapiens
ggtcttctggagtttgctggaggtccactccagacgctgtttgcctggatatcaccagcggargccgcagaacagcaaattttgctgcctaatccttcctctggaatctttctcccagaggtgcacctgcctgtatgaggcatctgtcggtccctactgggaggtgttttccagtcaggctacaaaggggtcagggacccacttgcagaggcaatctgtccgttctcagagcttgaatgccattctgggagaatgactgctctcttcagagctgtcagacagggacatttaagtctgcagaagttgtctgctgccttttgttcagctatgccctgcccacctttttttcttttctttttttgagatggagtctcactctgttgcctgggctggagtgcagtggcactatctcagctcactacaacctctgcctcccagatgcaggcaattctcccacctcagcctcccaagtagctgggattacacacctgcgccaacacacctggctaattttgtatttttagaagagaagggatttcaccatgttgatcaagctgacctcgaactcctgatctcaagtgatccatccgcctcagcctcccaaacttctcactcatctttaatcaaacaccaattcctaccactttgacatcctaactctctatcaaaccctctccctttttcctcgccttggtcaatgacctgcgtcattttccccatccccttcatgctgtctggcctggaat

SEQ ID NO: 954221 - DNA, 642 bp, Homo sapiens
gagtttgctggaggtccactccagacgctgtttgcctggatatcaccagcggaagccgcagaacagcaaattttgctgcctaatccttcctctggaatcttyctcccagaggtgcacctgcctgtatgaggcatctgtcggtccctactgggaggtgttttccagtcaggctacaaaggggtcagggacccacttgcagaggcaatctgtccgttctcagagcttgaatgccattctgggagaatgactgctctcttcagagctgtcagacagggacatttaagtctgcagaagttgtctgctgccttttgttcagctatgccctgcccacctttttttcttttctttttttgagatggagtctcactctgttgcctgggctggagtgcagtggcactatctcagctcactacaacctctgcctcccagatgcaggcaattctcccacctcagcctcccaagtagctgggattacacacctgcgccaacacacctggctaattttgtatttttagaagagaagggatttcaccatgttgatcaagctgacctcgaactcctgatctcaagtgatccatccgcctcagcctcccaaacttctcactcatctttaatcaaacaccaattcctaccactttgaca

SEQ ID NO: 954222 - DNA, 667 bp, Homo sapiens
aattctcccacctcagcctcccaagtagctgggattacacacctgcgccaacacacctggctaattttgtatttttagaagagaagggatttcaccatgttgatcargctgacctcgaactcctgatctcaagtgatccatccgcctcagcctcccaaacttctcactcatctttaatcaaacaccaattcctaccactttgacatcctaactctctatcaaaccctctccctttttcctcgccttggtcaatgacctgcgtcattttccccatccccttcatgctgtctggcctggaatgctcaccatcagaaccaagcctacttgttctctggtctcagtgtaatgtcacttcctctggtacatactccaaaaccccacccacaagtctgggttctatgcaaaggtactctcgtatcatcccaagctaatcgtatcatacaacttttataaaaacctgtttatttgtctagagcctttagctgcagtttccttgagaaaaggaactgtgtacttgctgttcttcccgttcactattctatgtccaagcctagcagagttcctcgaatatacaggtattcataaacgctcaccaaattaacttcactctactgggatgtgctcattatcttcccaccagatatatgttcttcctttaacttccttc

SEQ ID NO: 954223 - DNA, 619 bp, Homo sapiens
acaacacacaaaaagcaggaataacagcactcaggggaaaaaaatcagaattatatttgctacaatatattatctaagatgtctggttcttgacaaaaatttacaagacagaaaaaaaaggaaagtgtgacctatattcagggaactaaactgtcaataaaaattaactctgagtggataaggaagttgcgtttagcggacaaagacttcaaagcatttattataactatgttcaaagaattaaaataagccacatttaaagaattaaagaaaaatatctgacagaattaaaataaaatatgataaagaaaaaatataattttcaaaataagaaatttcaaaaaaaatcaacactcatacacaaaaattaaccccaaatgggtcatagtcctaaatgtaaaagctaaaactattaaaattctaggtgaaagtttctgtgactttggcagtcttattcacaattaattataagaacaaaggtacaaaccctaaaagaaaaaaatggaaaaaagcaaccttcaaaattaaaaacatattattacaagtttagctgctcaaaacacccaatttattgcttcacartgctatagttcaaaagtctgccagggcatggctggtt

SEQ ID NO: 954224 - DNA, 557 bp, Homo sapiens
gtttgctggaggtccattccagaccctgtttgcctgggtatcagcagcggtggctgcagaagagtggatattggtgaaccgcaaatgctgctgcctgatcgttcctctggaagttttgtctcagaggagtacccggccatgtgaggtgtcagtccgcccctactggggggtgcctcccagttaggctactcgggggtcagggacccacttgaggaggcagtctgcccattctcagatctcaaactgcatgctgggagaaccactgctctcttcgaagctgtcagacagggtcatttaagtctgcagaggttattgctgtcttttgtttgtctgtgccctgcccccggaggtggagcctacagaggcaggcaggcctccttgatctgtggtgggctccacccagttcgagcttcctggctgctttgtttacctaagcaagcctgggcaatggcaggtgcccctcccccagccttgctgctgccttgcagcttgatctcagactgctgtgctagcaatgagygaggctgcatgggcgtaggaccctccgagccacgtgt

SEQ ID NO: 954225 - DNA, 673 bp, Homo sapiens
ccaaagatggaataatttgaacatcaataagaataatcactgcaatgtatttaaaccatcaaatgtattaaaaatccatgaatttatttcaatgcaattaaagtttcattggccaaaaaaaaaaaaaaaaatgcattggttacattcggaggatcctagggaaacaccttattattttgaatattggtaaataaaggaaaacaatcaagcacttagtctcattcctgtgcaatctatatttcagccaaatagtgaataaagagaaagctttttttacagagtatttttgctaaataaattataaaggaatgatataatttgactatcatcaatttgcatttcctaatggatatgggtaggaatcattgatagctgctattaataatatcacacaagaaaggagacaatcaaacattatgtatgtacctcctgatggaagtacacagcatctatggagtattctcaccaaaaaagcttaaattgaaatctgatcaagcctctagatctatttaaaaatttataggacatgcaggggtcagaggaagatgaaatcagcaaaagacagactatatggaaaacactatgacattggtccagtttctccaatgaataggttgcaaggaaagaaamaaaaaaagaaaatagttgaagcctgtaaattaaaacagactta

SEQ ID NO: 954226 - DNA, 569 bp, Homo sapiens
acatgcattttatttgggtcctgattctaactaaaaatagtaaaacaattatgagactttcttgtattcaggaaagctaaatacaggctggatatataacaatattaaggactgttcattgtttggttggtttgttcgttggttttgttttgttttcagacagggtcttgctttgttgcccaggctggaatgcaatctgtgatctcggctcactgcagcctcaacctcctaagctcaagcgatcatcccacctcagcctcccgagtagctgggactacagcatgaaccactacactcagctaagtttttgtagagactgggtcttgctatgttgctggtctcaaactcctgggttcaaacgatctgcccgccttggcctcccaaagtctcccaaagtgctggcattacaggtgtgaaccaccgcaccagttttttttgtttgcttgcttgtttttgtttttgttttttagaaacaggttctccctctgtaactcaagatggagtgcagtggcrcaatcatgactcactgcagcctcaactttctgagctcaagcgatccaccctgcctc

SEQ ID NO: 954227 - DNA, 835 bp, Homo sapiens
acccgacctttctctctggttgctcttaacattttttccttcatttcaaccttcatgaatctgacaattatgtttcttggggttgctcttctggaggagtatctttgtggtgttctctgtatttcctgaatttgaatgttggtctgcctcactaggttggggaagttcccctggaaaatatcctgaagagtattttccagcttagtcctattctccccgtcactttcaggtacatcaatgaaacgtagatttggtcttttcacatactcccgtatttcttggaggctttgttcatttctttttaatgttttttctctaaactactcttcttgcttcatttcattcatttgatcttcaatcactgataccctctcttccacttgattgaatcagctactgaagcttgtgcatgcatcatatagttctcgtgccatgattttcagctccatcaggtcatttaaggtcttctctacacgtttattctagttagccattcttctaatctttttttcaaggtttttagcttctctgcaatgggttcgaacatcctcctttagctcagagaactttgttattactgactttctgaagcctacttctgtcaactcatcatagtcattctctgtccagcttcgttccattgctggtgaggagttgcgttcctttggaggaaaagaggcgctcggatttttagaattttcagcttttctgctctkgtttctccccatctttgtggttttatctacctttggtcttcgatggtggtgacatacagatggggttttggtgtggatgtcctttctgtttgttagttttcctgctaagagtcaggtcc

SEQ ID NO: 954228 - DNA, 712 bp, Homo sapiens
ttttcaattcctaccagcagcgcaggagggctctaatttatccgtatcctctgagagccgatgcttgttgccattggactagattctagccrtgctagtgggtgtgacatggtgtctcattgtagttttgatttgcagttccctaaacaatggtgagcatcttttcctatgcttattggccatttatagatcttctttagagatatgtctattcagatcctctgctccttttaaaattggattgccttttttattattgggttgtacgagttatttatatgttctggatacaagtcttttatcagacatatcatttgcaaacagttcctcccatttactgtgtcatcttttcaatttcttaatagggtcctttgaagcacaaaaacttttagttttgaagaagtccagtttatctattttttattttattgctcatgcttttgatgtagtatctaagaatcctttgccaaacccaggttatgaagaattcctcctatgttttcccctaagagttttatagtcgtagctcctacatttagctctttgatctattttgaatcaacttcctgtacggcatgaggtaggaggttctacttcattcttctgcatgtggatgtccagttgttccattaccatttgctgaagagactattcttttcccccattgaatggttttgacactcttgtcaaatggcagattttttaaaggtca

SEQ ID NO: 954229 - DNA, 739 bp, Homo sapiens
ggaatatttaacctatagcatttatatattaagtatactactatgtatggcttgtaatattcactgatttgcggatcgtcttgaatgtgtgtgcccatggctttgatgaccaagtgaacggagggttggggtactaagaagaattgtctccttggaaactccatgtaatttctggcttttatggttgaaataggatcaataaaagtctgaccttgtggaaagatacaaacgtgcattgacctggttatgtctgaccttgtgccactcatgacaaacgaatacagaaaatgtggtatatacgtacaatgaaccattattcagtctcaaaaaaagaggaaattctgacccatgctatgacatggatgagccttgatgacataatgctaaagaaaagaaatcagttatgaaggaacaaatgtagacgctcctcaacttacaatggatttacgtcctggtaaacccatcatacattgaaaatgtcataggccaaaaacgcatttgatacacctaagttgcagaacatcatagcttagcccagcctaccttattcggaacacttacattagcctaattttgggtaaaatcatctaacacaaagtctattttataataaaatgttgactatcttatgtgatttattgaatattgtactgaaagtgaaaaacagaatggttgtatgggaactcgaagtggggttctgctgcataygtgtcactttcacaccattgtaaagttgaaa

SEQ ID NO: 954230 - DNA, 605 bp, Homo sapiens
gtatatatgcaaaggattataaatcattctactataaagacacatgcacacatatgtttactgccacactatttacaatagcaaagacttgcaagcaacmcaaatgcccatcaatgatagaatgaataaagaaaatgtgggttccaagatggccgaataggaacagctccagtctacagctcccagcgtgagcgacacagaagttgggtgatttctgcgtttccaactgagataccgggttcatctcactgggacttctcagacagtgggtgcaggacagtcagtgcagcccaccgagcgtgagccaaagcatggcgaggcatcacctcacccaggaatcgcaagtggtcagggaattcccattcctagccaagagaagctgtgacagatggcaactggaaaatcgggtcactcccaccctaatactgtgcttgttcaacggtcttagcaaacagcacaccaggagattatattccgcacatggctcggagggtcccacgcccatggagactcactcattgctagcacagcagtctgagatcaaactgcaaggcagcagtgaggctgggggaggggcacccaccattgctgaggcttgagtaggt

SEQ ID NO: 954231 - DNA, 808 bp, Homo sapiens
ttcatttgataccagcagagaaaaatattggctactgagatattctttgttcayggttatttacggttagctagaatccatgtacaattcagccagccagaaggccccagatgattcccttccctggaggaccttgtgtggaaggtcttacatgaaaactggctcaccttcatttggcaaaatacgaggaccgctcttctcacacctggtccaccataatacaaggaaatgtctggtgattaaatttcttggggtaagaaagatgtcaacagatgtttgagagatgtgcagtacctccctctccacctccaacccatcaccaggcgatcctgtaaatgttggaaatggtcgactaaattatcaggaaatttccccaaaccatggtcctggtgatttctttaatgtaaatatttcaaaggtgcatgtaccaccgctaagaattatgtatcgatattttgttatgtttccttcagatctttgacttttaagaaatatcacacgcagttgaggcttcccacttggctctttccctctccggtaaaaccactgtcttgcaactgtgtacaccctggccattcatgagttatactttcaatacatatgcatgtatcataaacaatcttagttatcttaaaatatatatacctttctacaaatttctttctccactccacgttatggatttttaatgtttttattgtaaatatacataagatgcctattttaactatttttatgcatccaatttagtaacatcaagtatatccacaatgttctgtagccatcacatccatttctagaacttttt

SEQ ID NO: 954232 - DNA, 578 bp, Homo sapiens
attcggtaaataaaatgtggcatatccaaaaactgkaatattactctgtcacagaaaggaataaggaattcgtatatgttccaacatggatgaaccatgaaaatgttatattaagcagcagaaggtaaacacccaaattcacatattgtatgctcccatttacagttggaaatgtgccacataacatttcagtcagcaatggactgcatatatgacagtattcctgtaagattataatactgtatttgtactgtaccttttctatgtttagatacacaaatacttaccattgtgttacaattgtcagagtgttccctacagtaatatgctgtacaggtttgtaacttaggagcaagaggctataccatatagctaggtgtgaagtaggatctaccatctaggtttttgtaagcgcactctgatgtttgcacaatgacaaaattgccttatgacacacttctcacaacatgtccccatcattaagggacacatgactgactgtatatgaaataacaagaccagagaaaaccataaaaacagaaagcagattagtaattgccaggagtttagtggaaggg

SEQ ID NO: 954233 - DNA, 551 bp, Homo sapiens
actcttttcttgcttgcatggtttctgaagataagtctgatgtaattcttaaccttgttcttctataggtgtccactttctgttgctataacagaatacctgagactgagtaatttataaagaaaagaggtttatttagctcatgattctggaggctgggaggtccaagattgggcatctacatctgctcagtttctgaagagggcttcatgctgtgtaataacatggtggaccatgggtgcatgcaaagagaaagatgaagctggctgacctgttttgtaacaacctgctcttgaaagaactaatccagtctcttaagaaccgcattaatcccttcatgagggcagagcccccatgactcaaacacctcttaacggctccattacctctcagtactgttatgttgggaatttaatttcagcattaattttagaggggacaaaccacttccatagtattctgcccctggacccccaaaactcacatacttctcacrtgcaaaatacaatcattccatctcaatagtaccataaatcttaatgtgttccagc

SEQ ID NO: 954234 - DNA, 729 bp, Homo sapiens
aatttacaaagaggggcgtatcctttgctgtaaatgtttaaattgcctgaagcaaaattcccataactacttaaaggagttgaaaatactcctaagtgtttatacttattcttacacagtaccatctctcctgagtggccctagtttactgagattgagccagctctgagacatctccctcctccttaagtttggcaaatatcctaaaacgtttgaaaagatgtttaaaagatctgaaggaagctggtctcaatggaccagagacaaagtctgcacagccaggctcctgggaattgcacttcttggatgttgagttcaggagaggcagtactagagaccacagttacacaatcacattgatcttttgtgtactttgtttcctgcagaagaaattgtgtaatcccagcatttttttatgagttaaatagaagttgaaatttaaaaaaaaaaatcacattggttgttttcctgtctgtttaaatgtactctgacagcaaagatgaaaagttaatgcagtctaaatagaaaaataccacaatgagaagattttaaaaaaatattgtgaaatatcctcatctctattgtttttagacgttggggtttcaaatctgcaaaggctgactgcsgcgttgtcaggattgtcaatgttggacagcgtccactaggtggcagtatctcagaaggtttcttttatccttgaatgggcagagatttctttggttgctctct

SEQ ID NO: 954235 - DNA, 610 bp, Homo sapiens
ctggcaggtgcctctctgggatgagtcttccagaggaagacaggcagcmatctttgctgttctgcaggctctgctggtgatacccaggcaaagagggtctggagtggacctccagtaaactccagcagacctgcagcagagaggcctgaattttagaaggaaaagtaacaaatagaaaagaatagcatcaacatcaacataaaggacgtccacacaaaaaccccatccgaaggtaaccaaggtcaaagaccaaaggtaggcaaatccacaaagatgaggaaaaaccattgcagaaagactgaaaattccaaaaaccagaacacctcttctcctccaaaggatcacaacttctcaccagcaagggaacaaaactggatggagaatgagtgtgacaaattgacagaagtaggcttcagaaggtggctaataacaaactactccaagctaaaggagcatgttctaacccaatgcaaggaagctaagaaccttgaaaaaaggttagaggaattgctgactagaataaccagtttggagaagaatataagtcacctggtggagctgaaaaacacagcatgagaactttgtgaagcatacacatgtatcagtagcc

SEQ ID NO: 954236 - DNA, 610 bp, Homo sapiens
ctggcaggtgcctctctgggatgagtcttccagaggaagacaggcagcaatctttgctgttctgcaggctctgctggtgatacccaggcaaagagggtctggagtggacctccagtaaactccagcagacctgcagcagagaggcctgaattttagaaggaaaagtaacaaatagaaaagaatagcatcaacatcaacataaaggacgtccacacaaaaaccccatccgaaggtaaccaaggtcaaagaccaaaggtaggcaaatccacaaagatgaggaaaaaccattgcagaaagactgaaaattccaaaaaccagaacacctcttctcctccaaaggatcacaacttctcaccagcaagggaacaaaactggatggagaatgagtgtgacaaattgacagaagtaggcttcagaaggtggctaataacaaactactccaagctaaaggagcatgttctaacccaatgcaaggaagctaagaaccttgaaaaaaggttagaggaattgctgactagaataaccagtttggagaagaatataagtsacctggtggagctgaaaaacacagcatgagaactttgtgaagcatacacatgtatcagtagcc

SEQ ID NO: 954237 - DNA, 615 bp, Homo sapiens
accttgatagacacagtggtcaagaaaggcctttgtgaggaggtgactgttaaaacctaagtcagacaatgtcattgccctgctcaaacctctgcaagttctccagttttggggttcaccctstgatgcctttattatttgtccctaacccagccctcacctttgaagtctcttcaacttggctcatctggtgtgaattctgtttctagcctagaacctgagtgttacaaaaaggagatccacgtgaaggagttggaaggagccgtacaaaagaggaaacagcatgtgtatgaaggtcccaatacaggaaaagcctggagtgtttgtgaagttaggagggctgtgtggctgaagtcccactagtaaggggaaaatggcttgagatggttatggagatgcaggcagggtcaggcagttagagccttgaggctacctaagaagcttgggttttactttatgagtgaactcacaagttctcactcttataaagaaggcaagttacttgctaattcaaattgctctttatttaagcaggaggacagaaagccaggaatgaatgagaagcttttgcttctcaagaggagaattatacatatagatatagatatatataat

SEQ ID NO: 954238 - DNA, 621 bp, Homo sapiens
accccatctctactaaaaatacaaaaaaaaaaaaaaaaaacagtagctgggcatggtrgtgggcacctgtaatgccagctacttgtgaggctgaggcaggagaatcacttgaacccaggaggtggaggttgcagttgagccgagatcgcaccactgcattccagcctgggtgacagagcaagactgtctcaaaataaataaataaataaataacgatctgaagtcttgatgcagcctttttgtgaataaacagtcataactgctttactaaagaggcaaagagatgctgtcaatttgctcttcaaatgcactttttgtttattttataataaatgtgctgcatcctattgtgccttcataacattaaaaattactgcaaatcatttattccaagaaaattgaaggccctgaaaccacctgtgactataggtatttattttatggtgatttttcactagctctttttcagtcattttcatgccaaagacaattaacaggatgtaggcattaatagaggccattattaccaaacaagtaataattagaccaccaaaaagaatgaagtgatacagacaggttctagccaacaagctggctggcatagccagatgaatgcaatct

SEQ ID NO: 954239 - DNA, 621 bp, Homo sapiens
accccatctctactaaaaatacaaaaaaaaaaaaaaaaaacagtagctgggcatggtagtgggcacctgtaatgccagctacttgtgaggctgaggcaggagaatcacttgaacccaggaggtggaggttgcagttgagccgagatcgcaccactgcattccagcctgggtgacagagcaagactgtctcaaaataaataaataaataaataacgatctgaagtcttgatgcagcctttttgtgaataaacagtcataactgctttactaaagaggcaaagagatgctgtcaatttgctcttcaaatgcactttttgtttattttataataaatgtgctgcatcctattgtgccttcataacattaaaaattactgcaaatcatttattccaagaaaattgaaggccctgaaaccacctgtgactataggtatttattttatggtgatttttcactagctctttttcagtcattttcatgccaaagacaattaacaggatgtaggcattaatagaggccattattaccaaacaagtaataattagaccaccaaaaagaatgaagtgatrcagacaggttctagccaacaagctggctggcatagccagatgaatgcaatct

SEQ ID NO: 954240 - DNA, 594 bp, Homo sapiens
aataattaaaaaaaaaacaaactgggcatggtggtctgcacctgtagtctcagctactggggaggccaaaacgagagaatcacttgagcccagcaggtcgaggctgcagtgaatcatgatcatgccactgcactttagcctgagccacagagcaagatcctgtctcaatcaatcaatcaaccagtcaacgacatctcatttttcatgctgtagtgtccttaattatccttccaaaactaatagttttgaaggtgttccttcccatgaaactttgatgtgagtgaatcacagttttcctggaggattctgtgattctagtatgtgtatttaaggcagttttctgtcccgactattttggctttgaggaacagaagcatcctcgaaccaactcaggaaaaacagggcttttcataaggacacaagaggaatggaagtggaacctgacagaaggcaggtcaggggctgatgcttggcctcatgaaggctcggcccctccttgccatccctgccttcccttgtctctcctggtgagcttcytccacctcatcacagccttatggtctcacagcgcatggcccaaactctcattcccga

SEQ ID NO: 954241 - DNA, 673 bp, Homo sapiens
gagaaaattcagtatttggatttctcttcctgtgttcactgaaaataatgatctccaactccattgactatttgggcactttttttttttggttcaatatggattttggaatagttttttctaattctttgaaaaatgtcttttgtagtttgataggaatagcactgaaactgtcaattgtgtttgacagaatggccattttaacaatatagatttttcctgtcagttagtatggagtttttgtgtgatcttctttttatttcatcagtgttctataattctcattgtagagatttttcacctccctgattagctgtactcctgggtttttttttttgtggctattgtgaatggggctgtgttttgattagacgattggcttgtacattgtggtgtacagaaatgcaacagatttttgtacattgattttgtatcctgaaactctgccaaagatgtttgtcaggtctaggaggttttgagccgagactatggggttttcaaggtataaaataatatcatctacaaacagaaatagtttgactttctctctttctgtttatatgccttttatttttttccctttcctgatttttctggctaggacttcmagtaccatgttgaattggagtggtgagaaatggcatccttgtcttattctggttctcaagggaaa

SEQ ID NO: 954242 - DNA, 593 bp, Homo sapiens
ggtctattcagagattcaacttcttcctggtttagtcttgggagggtgtatgtgtcgaggaatttatccatttcttctagattttctagtttatttgcrtagaggtgtttatagtattctctgatggtagtttgtatttctgtgggatcggcggtgatatctcctttatcattttttattgcgtccagtctatttgattcttctctcttttcttctttattagtcttgctagcggtctatgaattttgttgatcttttcaaaaaaccagctcctggattcattgatttttttgaagggttttttgtgtctctatttccttcatttctgctctgatcttagttatttcttgccttctgctagcttttgaatgtgtttgctcttgcttctctagttcttttaattttgatgttggggtgccaattttagatctttcctgctttctcttgtgggcatttagtgctataaatttccctctacacactgctttgaatgtgtcccagaaattctggtatgttgtgtctttgttctcattggtttcaaagaacatctttatttctgccttcattttgttatgtacccagtagtcagtcat

SEQ ID NO: 954243 - DNA, 579 bp, Homo sapiens
gcacggtgactcatgcctgtaatyccagcactttgggaggccaaggtgggtggatcacttgagatcaggagtttgagaccaccctggccaacatggtgaaaccccgtctctaccaaaaaatacaaaaactagctggtcgtggtggcacgtggctggaatcccagctacttgggaggctgagtcatgagattcacttgaattcgggaggtggaggttgcagtgagccaagatcacgccactgccctccagcctgggcaacagagcaaggctctgtctcaccaaaaaaaaaaagaaaaaaaaagaaaaagaagcaaggagaggaaataattgagagttgttgtaaaaccctagaatgtcagtcaacttactgctatggactgaattgtgtccattcaaaattcacatgtggaagtcctaacccccagtacctttaaagatatgactaagataaggtctttagggtggggccctaattcaatataagtggtgtccctataacaagaagaagagacaccaaatatgtgggtgcaggtgagggcacagcaagaaggcaactatctacaagccaagaagagagac

SEQ ID NO: 954244 - DNA, 579 bp, Homo sapiens
gcacggtgactcatgcctgtaattccagcactttgggaggccaaggtgggtggatcacttgagatcaggagtttgagaccaccctggccaacatggtgaaaccccgtctctaccaaaaaatacaaaaactagctggtcgtggtggcacgtggctggaatcccagctacttgggaggctgagtcatgagattcacttgaattcgggaggtggaggttgcagtgagccaagatcacgccactgccctccagcctgggcaacagagcaaggctctgtctcaccaaaaaaaaaaagaaaaaaaaagaaaaagaagcaaggagaggaaataattgagagttgttgtaaaaccctagaatgtcagtcaacttactgctatggactgaattgtgtccattcaaaattcacatgtggaagtcctaacccccagtacctttaaagatatgactaagataaggtctttagggtggggccctaattcaatataagtggtgtccctataasaagaagaagagacaccaaatatgtgggtgcaggtgagggcacagcaagaaggcaactatctacaagccaagaagagagac

SEQ ID NO: 954245 - DNA, 566 bp, Homo sapiens
attatttctattaggtcatctctttgtttmccctctgcatgattttaagaccttttcttcgtctttggtgcacacagtgggtataactgtgggtttctttttacttaagttgccagatattttactgaggtttctgaatctagaaatatctttcactattccaaaaaaaatgtaatttatattgttttcaagcattgcctctccttattcgcttcttctaaaactctaatgaaatatatgttagatcttctaacactagcctccctatctcttaattgtgtatattttccatttctttatctattctgggtatattaatcagacattaatttctattcactaattcttttcttcagcacaatctaatctacgttaaagccatccatttttggtttctgttttttgacatagactttacgttttagaccagtattagattcacagcaaaattgagcagaatgtattgggagttcccatttttcccatccccacacatgcacagcctcctccactaccaaaatgctacaaaaatcatactgaaacaattgagcaacctacattggcac

SEQ ID NO: 954246 - DNA, 566 bp, Homo sapiens
attatttctattaggtcatctctttgtttaccctctgcatgattttaagaccttttcttcgtctttggtgcayacagtgggtataactgtgggtttctttttacttaagttgccagatattttactgaggtttctgaatctagaaatatctttcactattccaaaaaaaatgtaatttatattgttttcaagcattgcctctccttattcgcttcttctaaaactctaatgaaatatatgttagatcttctaacactagcctccctatctcttaattgtgtatattttccatttctttatctattctgggtatattaatcagacattaatttctattcactaattcttttcttcagcacaatctaatctacgttaaagccatccatttttggtttctgttttttgacatagactttacgttttagaccagtattagattcacagcaaaattgagcagaatgtattgggagttcccatttttcccatccccacacatgcacagcctcctccactaccaaaatgctacaaaaatcatactgaaacaattgagcaacctacattggcac

SEQ ID NO: 954247 - DNA, 611 bp, Homo sapiens
agtataccaaacttatatgaagtgggatttatccyatgaaagcaagtatggtttaacatgtgaaaatcaattaatataaaacaccatgtcaacagaatgaaggacaaaaaccatataatcatctcaatatacacaggaaaagcatttgataaaatttgataccgcttcctgataaacacagtcaacacactgagaacaaaagggaacattctcaactttataatgtcctatgaagttttattttgatataattttagacttcagaaaagtggcaaaatagtacaaagtttctgtacagtcttcccctcagttccccatatgttatcattttaaatttattttctttctgtctgaactattcaagggttagtgacagacataatggctttttatacctaaaaacttcagtgtgtgtttcttaaaaaagagaaattattttacagagccacagtatatttgtgtaaagtccttcttaggccatagactttttttctagttttttatttatttatttttttatacttcaactcttaagttcaggggtacatgtgcaggatgtgcaggtttgttacacaggtaaatgtgtgccatggtggtttgctgcacagatc

SEQ ID NO: 954248 - DNA, 613 bp, Homo sapiens
  misc_feature 592, 593, 594, 595, 596, 597, 598, 599, 600, 601, 602, 603,604, 605, 606, 607, 608, 609, 610, 611, 612, 613: n = A,T,C or G
ggatcacaaggtcaggagttcgagagcagcctgaccaacatggtgaaaccccatctgtactaaaaatacaaaaattagctgggtgtggtggtgtgtgcctataatcccagctacttaggaggctgaggcaggagaattgcttgaacccaggaggtggaggttgcagtgagccgagatcgcaccactgcactccagcctgggcaacagagagagacactgtctcacaaaaaaaaggaatgctggagagaaactgtatgaagatataaaggtatctggtagacatgcacaggtacataaaagccagcattattgtaattttagcttgtaactccactttttattttctacaagatttaaaatgcaaatgtatacaatacaattacaaatatatgttagtgaacatacagtgtataaagatgtaatttgtgaactcaacataaaaagaagatggggtggttgtatgagttaatttttctatgcagttggaattgttggtgttaatgctaattagattagtataactttaagatattatatacrgtcttcactgtaaccacaaaataaatattttagaatacacacgacagaaaannnnnnnnnnnnnnnnnnnnnn

SEQ ID NO: 954249 - DNA, 603 bp, Homo sapiens
aatgtgggaaagtttggaacttcctagagaattggagggctcagaggacagaaagatgcgggaaagtatggaacttcctagagacttgttgaatggcttggagcaaaatgctgatagtgatgtggacaatgaaatccaggctgacatggtctcagatggagataaggaacttgttgagaactggaacaaaggtgacttttgctgtgctttagcaaagagactgacggcttttagcctctgccctagatatatgtggaactttgaacttgagagagatgctttgggatatctggtggaagaaatttctaggtagcaaaatgttcaagaggaagtgaaacattaaagtttggaaaatttgcagcctgaccatgcaatagaaaagaaaaacccattttctggggagaaattcaagcctgcatcagaaatttgcataagtaaccaggagcccaatgtgaatcaccaagaaaatggaaaawatgtctccagggcatgttggagaccttcctggtagcccctccatcgcaggcttggaggcttaggagagaaaaagtggattcctgggtccccctgctgtgtgcaggccaggggcttggcaccctgcag

SEQ ID NO: 954250 - DNA, 599 bp, Homo sapiens
catggctagagggagccaaggtaccgttcaggcagtggcttcggagggcgcaggccctgggccttggcagcttccacacggtgttgggcctgcaggtacacaaaggccaggaattgaagtttgggcccctcttcctggatttcagaggatgtgtgcagatgcctggatatccagagattggctgcagggtcagggccctcatggagagcctctgctagggcagtacggaggggagatgtgaggttggaacccccatgcagagtccccactgagacactgcctagtagagccatcagaggagggctcccatcctgcagaccccagaatgtggatctcccaaaggcttgtgcggtgtgcctggaaaagccttagatactcaatgccagcccatgaaatcagtcaggaggggggatgtaccctgcaaagccagagggacagagctgtctcagattatgagaacccaccttttgcattggcgtgacctggatgtgagacatggagtcaaaggagatcattttggagctttaagctttgactgcctcactgaaattcataattgggtggggcctgyagccccttcattttggccaattgctacc

SEQ ID NO: 954251 - DNA, 599 bp, Homo sapiens
catggctagagggagccaaggtaccgttcaggcagtggcttcggagggcgcaggccctgggccttggcagcttccacacggtgttgggcctgcaggtacacaaaggccaggaattgaagtttgggcccctcttcctggatttcagaggatgtgtgcagatgcctggatatccagagattggctgcagggtcagggccctcatggagagcctctgctagggcagtacggaggggagatgtgaggttggaacccccatgcagagtccccactgagacactgcctagtagagccatcagaggagggctcccatcctgcagaccccagaatgtggatctcccaaaggcttgtgcggtgtgcctggaaaagccttagatactcaatgccagcccatgaaatcagtcaggaggggggatgtaccctgcaaagccagagggacagagctgtctcagattatgagaacccaccttttgcattggcgtgacctggatgtgagacatggagtcaaaggagatcattttggagctttaagctttgactgcctcactgaaattcataattgggtggggcctgtakccccttcattttggccaattgctacc

SEQ ID NO: 954252 - DNA, 587 bp, Homo sapiens
actattccagccatcaaatgctagtgcagaccagagccctaaagggagcagaggaagctcagaaatcgtattgtgagaagaaggctaggaacacaggttcatctctcaggtggtctgacaaggtcagacttcactttttaaaacgtattcattccacaaaaattttttggcattgggtacacatggacacaaagatgagaacaacagacactgaggactttaaaaatgaaggagggaggcagggggcaagggtctaaaaactacctattgggtcctatgttcactatttgggtgacaagttcaattgaagcccaaatctcgctatcacacaatatatccatgtaacaaacctgcatatgtacccctgaacctataataaagaaatttaagctgggcacagtggctcacacctgtaatcccagcactttgggaggccgaggtgggcagatcacgaggtcaagagatcgagaccatcctggccaacatggtgaaaccccgtctctacaaaaaatacaaaacttagctcagcatggtggcatgcacctgtagycccagctactccggaggctgagggaggagaatcgctc

SEQ ID NO: 954253 - DNA, 711 bp, Homo sapiens
tcctctgtactgtggaccacaggaattaggcagagggggtatttttggcagttagcttaatgctttttagcatcagaagctttcatgggaccagcggtttgactgattgtgggcctctcattctctcctggacccaagcccaaattcattggatttcatgcctttggtttttcagaattagtttggggtgagacccattactctcctttttagaggatcaaacctggaggatagttgtatccccatgcttagatctcagtgtacacattacacacacacaatgtatatttatggtactccaactcttttgtaaaatacaataggcactaatttttaacatattaggcacagctatttaaagtatgattctgaataaatgtacatttgtatgcatgtgagaaatacatgtatgtgtgtatatatgtgtgtgtgtatatgtatatacacacacataaatatgtgtctccgtggcaacccatacaacactttttgggtttacatagagtctgaacgtagtttgaaatggagctatgaggttttagaagacaaaattatttcattctccttgcaaacctgttcgtctcttagctttgccatgtcaatamttgtcaccaccatgcactgagctgcacaggctggaatcctagaaatcaaccttgatttctctctgtagccccacccatcagcaaggtctggccactttcaacctgg

SEQ ID NO: 954254 - DNA, 601 bp, Homo sapiens
tcaaccttgtaaacaggtgactggtacatcaaagaatggttactgaggacaggtgactctatagatgtaacgtggattgcaacattcactagatattagagcagtgattmccaaactttcatgtacctggctcacctgggcatcttgtcaaaatacagatttttaaattaatttgtcttgggtgaagcccgaggctctgtatttctaacatgttgcaaggtgatgtaggttcatggactacatcaagatatgctatttatggaattttggttggggagactatggtggattaaatgtgtctactaaccatctcattattaagaagacaataaccagcctggccaatatggtgaaagtcttactaaaaatacaaaaattagccaggcatggtggtatgtgcctgtaatcccagcgacttgggagtctgaggcactagaatcacttgaactcacgaggcagaggatgcagtgagccaagatcgtgccactgtactccagcctgggtgacagagtgcgactctgtcttaaaaataacacatgaaaaataaaaactataaatgaatgtgacatatgtgtaatatctggaatttcttgcactactt

SEQ ID NO: 954255 - DNA, 651 bp, Homo sapiens
taccaggccaattgtggacatcaggcctgagaagggtcctcaggctccaggtggacatcaggcgccaggtgaacatccagcactcagatgaacgttaagcttcaggtagacatcatgcctcaggtgaactccaggccccagctaaacatcaggccccaggtggatgcccaggttccgggtgcacatctggccacagttggacattcaaccccaggtgaccatcaggccatgggtgaatacacggtttccaggtggacatcagatcaaaggggaacatcagtcctccagtggacatcaggcccaaggtgaacactgaactagaggtttacatcaggccacacgttgacacctagtcccaggtggacatcaggccccaggtggatacctaggctcccagtgaatttgacaccaggttgacattcaggcccccagtggtcatctggcctcatgtgaacactcagtccccaggtgcacatgatgtctcaactggacaccaaatccctagtttgatacccaaggcccaggtggacaccaggtccaaggctgacactcaagccttaaatgaataccaaagtctaggtgaataattcaacccaggtgktcattaggaccgagctgaataccagtccccaggttaacacaaggcccccg

SEQ ID NO: 954256 - DNA, 662 bp, Homo sapiens
gacattagcctgcaggtcaaccacagtccccaggttgatacctgatctccaagtggctacccaatctgcagggtaacattaggcccctgtaggatcccaggctgcaagtggattcctaggcccctggtgaacatcaggtgcaggtgtccaagcaggtcctgggtggacataactgtgtacaggtaaggagttgacctgtggggagggtgagcagtcagcagcccactggggtcctgagaaggttttctggaaggaggaggctgagggcatggaaacttaaagaagcgacctcacttccttgccaacagaccctaacagaaataagaattctggtaaccaggccaggcacggtggctcacacctgtaatcccagcactttgggaggctgaggcaggaggatcatgaaatcagaagatcgagaccagcctgaccaacatggtaaaaccacatgtctactaaaaatacaaaaaacaaacaaggtcagcaaatcaagtccatcctggctaacacagtgaaaccccgtctctactaaaaatacaaaaaktatccgggcgtagtggtgggtgccagtagtcccagctactcaggaggctgaggcaggagaatggcatgaactcgggatgcagagcttgcagtgagccaagatctcgccactgcactcc

SEQ ID NO: 954257 - DNA, 564 bp, Homo sapiens
ctggaatgtgtgatacaaagaacaatgtatagccaaccaatagctcgttattgtaacatgaatgcttgataaacaacttaggaactgcctcttcctttttcctttaaaaacccatttgtaactgctgctaataggagcatctactcagggcaacttgaatctatgctcctgggttgcagtcctcaaacttgagccaaacggactctctacatatatatagatatagatatagatatagatatagatatagatatagatatagatatagatatatagatatagatatagatatatgtttttttaaagaactctttcactgaaacatgaaagtagtcttcagtgaccaccacccatacgcaagccctttacacatacacagatacacagatatatgtattcataagtatagcagaaggtcacaaacaacacaaaaaaaatgcttttgaggagctaactggagaaatgtattgcaatgtagttgagaattacatsactgtaaaatcacaccagggaaacaagaaggatatttaaatacatctccaagtcaacacatctcggtggaag

SEQ ID NO: 954258 - DNA, 655 bp, Homo sapiens
gtttatctacttgattatcctactaccacacactctcaaaggatttctcagagagttggcaagaaataacaagatctatccttactctacaatcccaaatagactctttggcagcagtgactctccaaaaccgccaaggcctagacctcctcactgctgagaaaggaagactctgcaccttcttaggggaagaatgttatttttactctaaccagtcagggatagtacaagacactgcccagagtttacaggaaaaggcttctgaaatcagacaatgcctttcaaactcttatacccacctctggagttggacgacatggcttctcccctttctaggtcccatgacagccatcttgctattattcgcttttgggtcctgtatttttaacctccttgtcaaatttgtttcctccaggattgaggccatcaagctacagatggtcttacaaatgaaatcccaaatgagctcaactcacaacttctaccgaggacccctggactgacccacaggctctctgactggcctagagagttcccctctgaaggacactacaactgcaagtccccttcttcgcccctatccagcaataattagctagagtggtcatcrcccagttcccaatagcaatgtcctatttagtggggggattgagag

SEQ ID NO: 954259 - DNA, 770 bp, Homo sapiens
aactcaacaaaaagataataaacaacccaattcataaggacagaagatctgaaaacctccccaaagaaaacccaaactctttatggattgtacataagcatatgaaagatgctcaacattacatgttattaaggaattgcaaattaaaataacaacgggctatcactatatcactattagaatggctaaaatacaaaaacaatactagcaataccaaatgctggtgagggtgcagaacagtagaaactctcattcatttattgctggtggacatgcaaaatggtgcagccactttggaagacagttcaaaagtttcttacaaagctaagcatgctcttaccgtaagatttggcaatagttcctctaggtatttacttgattgagctgaaaacttatgtccacacaaaactaaatgtagtctcaccataggatctagccattatgctcattggtatttacccaaataagttgaagaagttatgtccacacacacaaaaaaaactgcatatgaatgttttagcagctctattcataattgccaaaatttggaagcaacacagatgtcctccaataggccaatagataaactgtggtatgttcttacagtggaatactactcaatgataaaaagaaatgagctatcaagccatacaaaggcatagaggaaccttaaatgmaaattgctaagtaaaagaggtcagtctgaaaaggctacatactgtctgatttcaactatatagcattctagaaaaggcaaaactatagagaca

SEQ ID NO: 954260 - DNA, 697 bp, Homo sapiens
tgtctgaacccacccagccctttggttgttgtcsttattgttgtttttgagaaacaaggtcttgctctgtcccccatgctggagaacagtggtgcagtcttggctcactgcaggcccaacctcctggcctcaagtgatcctcccttctcagccacccttagtgctgggatcacaggagccagccaccacacccagccacagtggggtttttatggaggcttcatcacagaggcatgatcatcattggcccttggtgatcaactcaaccttcatctcctctcccctcccaggagttttgaggatggagatgaaattcccaaccttctaatcctgtctggttttctggtgaccagcttccatccagaagctacctaggggcagccagctaacagtcatctcattagcatataaaagatactttgatcacttcagaggctattccaagggttgcaggagcttcttgccaggagacaggacaaaaaccaaatatatatttcacaatatcaaaccaggtgacattactccagataaaattgactctggattggtaaacaaactgcatctggactggaggactgagtaaactatgactggctggtaggaagccatggattggggttttctgagcacattgccactcagtgataagtaactgggcccatcttttgctgggatcctcgaagccatgccactggga

SEQ ID NO: 954261 - DNA, 481 bp, Homo sapiens
gctgtctgaacccacccagccctttggttgttgtcgttrttgttgtttttgagaaacaaggtcttgctctgtcccccatgctggagaacagtggtgcagtcttggctcactgcaggcccaacctcctggcctcaagtgatcctcccttctcagccacccttagtgctgggatcacaggagccagccaccacacccagccacagtggggtttttatggaggcttcatcacagaggcatgatcatcattggcccttggtgatcaactcaaccttcatctcctctcccctcccaggagttttgaggatggagatgaaattcccaaccttctaatcctgtctggttttctggtgaccagcttccatccagaagctacctaggggcagccagctaacagtcatctcattagcatataaaagatactttgatcacttcagaggctattccaagggttgcaggagcttcttgccaggagacaggacaa

SEQ ID NO: 954262 - DNA, 618 bp, Homo sapiens
cctctcccctcccaggagttttgaggatggagatgaaattcccaaccttctaatcctgtctggttttctggtgaccagcttccatccagaagctacctaggggcagccagctaacagtcatctcattagcatataaaagatactttgatcacttcagaggctattccaagggttgcaggagcttcttgccaggagacaggacaaaaaccaaatatatatttcacaatatcaaaccaggtgacattactccagataaaattgactctggattggtaaacaaactgcatctggactggaggactgagtaaactatgactggctggtaggaagccatggattggggttttctgagcacattgccactcagtgataagtaactgggcccatcttttgctgggatcctcgaagccatgccactgggaccattacaagagatactggtctatggaacaggttagggcttccaagcaacatcatcctagcactcagcagtgtggttttgttccccagcaccggagctatcacgagggaggggcagattgggctaacagctcctggattgctctgagaagccctcctgctggagaarcctgcctgtccccaccctctggcacgctg

SEQ ID NO: 954263 - DNA, 665 bp, Homo sapiens
cctgtgctttacagaacagtgagtcacttacttgcttttggatggaacgctgcagagtgtgctgtcattgtgatatctttttttccctcatgcattctcagcattgccagccttggctttgttcattagataaataatagagtaaaattcatgcagtggccccacaatcactactccagggagaaatggaggcggggaggggagatggtggtccataaagacctgggctagtgaatttggtgtttttgtttgttggtctttaaataaatgaacttaaaataagattttccaaatttgaaaatagatgccttatagagtagatttcttatgcaacaatataaaaataagaaattaaatctgggaacgagacttaattctccaacatgattttgttttgaagttcagcctcttcaatgagatgcaggtatgggggaagggctccatttaaagagcccaaattcctatctgttacttcagatatcaggtcagattagtacttttagaaagtttaacagacccctttgatgcaacaggaaagaaaaacaagctctctaagcaggaaaattcaggacatcctttttyttagttttacgtgatgcagtgagtcacttagagactctcaggaaaataagcccaggatggccatcaagattagggaacatact

SEQ ID NO: 954264 - DNA, 642 bp, Homo sapiens
gataataaatgtatgttgttttaagtcayccaatttgtggtcatttgttacagcagccctgggaagctaatccaccaggctgttcagtgcaaaccagtaactccccagtgaacctccaaatcacagcagttcaacacagaacggttttggtggtttgttttatcattcagaggccgctcgacatctggcagtggctcaggctgcctccttctaggccatgatgagcactggttcaccttgcagcttcactacctccacacatgacccagagtccagcacatcaggggaaaaaggggagtaaggagcccacagatgcggtcagtggctccacgcagaagcagcacatgttggctcctcagtgtacttattgaccagagctcctcacactccctggcaggatccttgtgggcttcaggaaactgcatgcccagccccgccccaccaccccccaacctgatcttctctccttcaccgacaccaccaagaagtccttgggagctggattttagaaacaggctagtcctcccctccgttcacagatgatgacatttctacccaaccatttaaatgactgtgtgaaattcacacatggaattaatgtcatgccgccacgttttcacaatgtgtggtgttctcctagtg

SEQ ID NO: 954265 - DNA, 642 bp, Homo sapiens
gataataaatgtatgttgttttaagtcacccaatttgtggtcatttgttacagcagccctgggaagctaatccaccaggctgttcartgcaaaccagtaactccccagtgaacctccaaatcacagcagttcaacacagaacggttttggtggtttgttttatcattcagaggccgctcgacatctggcagtggctcaggctgcctccttctaggccatgatgagcactggttcaccttgcagcttcactacctccacacatgacccagagtccagcacatcaggggaaaaaggggagtaaggagcccacagatgcggtcagtggctccacgcagaagcagcacatgttggctcctcagtgtacttattgaccagagctcctcacactccctggcaggatccttgtgggcttcaggaaactgcatgcccagccccgccccaccaccccccaacctgatcttctctccttcaccgacaccaccaagaagtccttgggagctggattttagaaacaggctagtcctcccctccgttcacagatgatgacatttctacccaaccatttaaatgactgtgtgaaattcacacatggaattaatgtcatgccgccacgttttcacaatgtgtggtgttctcctagtg

SEQ ID NO: 954266 - DNA, 780 bp, Homo sapiens
agagtgggtacctggagaggacagagctgcccgcagccgtatctcagtcagcagacagcagcagggagccagccatctgccattgtgtgtccccagcagtgggctggttgagcatgacattagggaatttgattagaaacaattttagaaaatccaggcaagcagggactaggactcagagtcctgtccccaagctcaggtaggtccctagaagtccctcagagcctgaatttctgtatgtttaaggtgatcatttgtcccagtttgcaagttgcagaggggttccctgggacatgtgccatcctgcagaatattcagtgctaagctgggaaagtcctgggcaaacagggaccagttggccactccaccaatatccagagtggtattcctcaaaggctgatgcgcagaccatctgcatctgctcattaaaaacccagacacctgtgccttcacctgagacctactgattcctaattgcatgggtgaagaatccaatagagtgcatttaaccagtgctttggttgactcatatatgcaaactacttcttagcaccattttcctagaggagctaaaagaagcagcaagcattttatcaagaaggtaatgctgaattttccctgagtagaggcagattcccaggccagacagagctgaaccctctcaatggggtcaawtggtcccaaccagcaaggagaggagggctggagggttggagaactgggcccatcctgattccgtatgatgcttaagtaggccagatatcacactgtttcttcctc

SEQ ID NO: 954267 - DNA, 719 bp, Homo sapiens
gcagcaagcattttatcaagaaggtaatgctgaattttccctgagtagaggcagattcccaggccagacagagctgaaccctctcaatggggtcaaatggtcccaaccagcaaggasaggagggctggagggttggagaactgggcccatcctgattccgtatgatgcttaagtaggccagatatcacactgtttcttcctcaagagtggatagggcaaagctaccctaagacaaagcacatgggcaattctcctctatttccagcatcttgcaaagcctttggaaagtgagggtgagctctgcaaaggaggagggatggagcccagtgcatcctgtgcagatgacctcccggggatgagaagttccatcagggaatgaccacttggaaagaatgaaactaacttttgctgatttctgccttggtgagaaactgtcatctttatcatgatcaaaacttgctactaccactcaactaggtagataatactgggtccattattaagatatgacaactgaagctaggaaaagtgacttgcccaaggtcacatgtcaaataataaataaagccaagaatagcagactccacagcccaggtctttcctagtgtaccccccccaccccccaccatcctttaaatcttacagttctaaggctcctgtttgcaaaacctcatgggaaagatactgccttcagacttatgtcaatgtttgtccaactt

SEQ ID NO: 954268 - DNA, 618 bp, Homo sapiens
gggatgacctgactacagagaggagctacccactgcaggtctcccctgagctgttctaacactcaataaatctcctctttgtcttgctcaccctcygcttgtctgcatacttcattcttcctggatgcaggacaagaattcaggcaaaagcgccatcaggcacagaggtttctggccagaaaagcaacaccccaaaaatcctgtacgatttgtggggggctcgtctgggatctgcagaaggttgagtaaaagcagatctttctgtccttttttttttttttggagtctctaaactacacagcagtcaaaatgaaagaaaaataccaggcctctgttagccagttaaaagtgactagcgtgggtgctgcacaagacacagaatacaggcttgctggggaggacactgtcaatcccccatccccctcacgggctggaaacattggctttgttccaacccagtttttcttcacaagggtctggccgtagcatgggaccagaaagaggtcctgggtagggcaactgagggtatttgactgaggctacacctcagtgttatccaaaggcccctggactaactcctgtccccagccaccgattaggatgtcagcactaggagct

SEQ ID NO: 954269 - DNA, 556 bp, Homo sapiens
gctgttctaacactcaataaatctcctctttgtcttgctcaccctctgcttgtctgcatacttcattcttcctggatgcaggacaagaattcaggcaaaagcgccatcaggcacagaggtttctggccagaaaagcaacaccccaaaaatcctgtacgatttgtggggggctcgtctgggatctgcagaaggttgagtaaaagcagatctttctgtccttttttttttttttggagtctctaaactacacagcagtcaaaatgaaagaaaaataccaggcctctgttagccagttaaaagtgactagcgtgggtgctgcacaagacacagaatacaggcttgctggggaggacactgtcaatcccccatccccctcacgggctggaaacattggctttgttccaacccagtttttcttcacaagggtctggccrtagcatgggaccagaaagaggtcctgggtagggcaactgagggtatttgactgaggctacacctcagtgttatccaaaggcccctggactaactcctgtccccagccaccgattaggatgtc

SEQ ID NO: 954270 - DNA, 575 bp, Homo sapiens
agctgaggaggggctgagggcagctcagcactgtcctgcaggtgccccttggcacaaagagcctaagcaccatgaacaacaggggaggcagacaggctcctgggcagaaggaaaggggtctccagtgaagacccaccttcaggctggagaaggcctggagcctgggggccaggctgccagtcctgcagactggagggggaactcatggtgctttttcctgcccatgatccaatcaccaaacacttcctgcctctgaagacgttgaaaccctggactcggccagagcagagcagacatcaggatgaccagctgcagagaggagctactcactccaggacctcctctctgctgagagctgcaaacaatgggatgaccagctgcagagaggagctaccctctctgctgagaggtgaacactcatcaggatgacctgccaacagagaggagctacccactgcargtctcctctgagctgttctaacactcaataaagcttctcttagttttgcccaccctccacttgtgtgcgttcctcattcttcctggatgcgggacaagaatgaaggcaaaggcac

SEQ ID NO: 954271 - DNA, 564 bp, Homo sapiens
cagtgctctgtttttcagcagcagttgaggtaccttgaaccatgaagaacccttggtatcagaacatcatgacttttcaaacaaaatacagaaacagaagctaccaaacattcaccttttcagttcatctgaaaagctaccaagtgagattgtttttaatggcacatttataccaggtaattgtctggcattatttaaaaaatgggatgaatctgtttgttgacacagaaagggcaacaggattacatagttaccagggacacagactttgaagtcagataaacctgagttcagatcccagctctgttacttgtaacctgtgtgatcttgggcaagttattcaatgtccctaccctaagcccaaatatcttcatctgtaaaacatgataaaagtattactgcccatagggtcattttatgacactactttcttttgtttttaagtgcgcgtgtgtgtgtatatacgtatacatatatatacacaaacacacatatatacctgtrtatatatgtacacacatacacaaggcaaaatgttggaaatatattttttaaggtttctgt

SEQ ID NO: 954272 - DNA, 621 bp, Homo sapiens
caggcatgtgccaggaggagattcctttattccaggaagtgttttcctacctctgaagaccccaattaaccccagtgtgaattcttgctagtgcctctaattcttggtggaaaagttttagggtgctgcgtcttgtaccatggcaggttttcatcaactgcaagacaaactgctctcaatagctatttaataacagtcacctgcttgctttttaatgtattggggtaatccactttaccttccaaagccagaaaggtataaccagtttggagaaacagaggagaagagtattagtgcctaaatagtatccctggtgattgccaggaaaacgaaagaaatatacatgtatgtttagaataaattttttgtataattgcaccagaagaaccatgtggacttggccaaaatatggcccagagcttataattaagtactgagaaatgtggtggatttgtacagcttccttttggaaatgctatttaaattagcttaagtcacaaaggaacatgaaggctcttatatctaggaagattgctggaaagtcatggacttatgataagactgtttctccyaacattgtcaatcttctctttgcctcatcctcttctcgtgcagaaaggc

SEQ ID NO: 954273 - DNA, 563 bp, Homo sapiens
ggaatacttctaatgtttcacaattaagtttgatggttttggtagatatcctttatcaggttagggaaattctttttaattccacatttgctaagagcttttattatttattttattttatttatttatttatttatttatttatttttatttttatttgtttttttttgagttggagtctcgttctgtcgccgaggctggagtgcagtggtgcaatctcggctgactgcaagctctgcctcctgggttcatgccattctcctgcctcagcctcccaagtagctgggactacaggtgctcaccaccacacccagctaattttttgtattttttagtagagacggggtttcaccgtgttagccaggatggtctcaatctcctgacctcatgatgcccctgcctcagcctcccaaagtgctgggattacaggcgtgagccaccgygcccggcctatttatttattttttaagacagggtctcactctgtcacccaggctggggtgcagtggtgtgatctcagctcactgcagccttgacctcctgggctccagtgatcctccggc

SEQ ID NO: 954274 - DNA, 563 bp, Homo sapiens
ggaatacttctaatgtttcacaattaagtttgatggttttggtagatatcctttatcaggttagggaaattctttttaattccacatttgctaagagcttttattatttattttattttatttatttatttatttatttatttatttttatttttatttgtttttttttgagttggagtctcgttctgtcgccgaggctggagtgcagtggtgcaatctcggctgactgcaagctctgcctcctgggttcatgccattctcctgcctcagcctcccaagtagctgggactacaggtgctcaccaccacacccagctaattttttgtattttttagtagagacggggtttcaccgtgttagccaggatggtctcaatctcctgacctcatgatgcccctgcctcagcctcccaaagtgctgggattacaggcgtgagccaccgcgccyggcctatttatttattttttaagacagggtctcactctgtcacccaggctggggtgcagtggtgtgatctcagctcactgcagccttgacctcctgggctccagtgatcctccggc

SEQ ID NO: 954275 - DNA, 787 bp, Homo sapiens
ggcaggaggatcgcttgagaccaggagttcaagaccagcatgggcaacataargagatcctgtctcaaaaaaagtatatgtatataaaatataatatatattagcacagtatatatatatacacacacatatgataaggtatatatataccttatatattatttattaaatataaataatttgtttggatgatttgtatcatgcagcacccccaagactacttgtaaatgtttggtaagctggtatttattaagccttcaaagtgcttttgtgaggtgttatgcaggggctgggggtgagcttttaatagttgaagcattatgatctaaagaggccaggaaaaaaaactaagcttaggtgttagcttttcccaggagagccctttgtaaggacaaagattgttgtcagccatgtgtcattaaaagctgtcacaaggctgggtgtgatggctcatgcctgtaatctcagcactttgggaggtcgaggcaggcagatcacctgaggtcagaagttcaagaccaggctggccaacatggcaaaactctgtctctatgaaaaatacaaaagaaaaaaattagctgggtgtggaggtgcatgcatgtaatcccagctacttgggaggctgaggcaagagaattgcttgaacctgggaggcggaggttgcagtgagccaagatcattccattgcactccagcctgggtgatggagtgagactctgtctcaaaaaaaaaaaaaaaaaaaaaaaaaaaaaagctgtcccagaaggcctagaatgtttttaaggat

SEQ ID NO: 954276 - DNA, 602 bp, Homo sapiens
cacagtgtctttaagatcttgctcctgtctaaagaaactgaaactggaaatcataggtaattcataatgagtatggtttatgaaagagagatgatwtgaataattagtggacccattttggaagaaaatgtcttgatcctaaaggattggttaatagaatgcacattggagttttattttaaaagatgtgtctatattgtttttatgattctacaccttaaccagcttctttagattaaccaagcaactactgattctgagcacaagatgtaagaaggctactcccaagaagcctactcacaagaaggctactcccaaaaacaaatcaacagagctattaaaagagattatggtttggctgggcacagtggctcatgcctgtaatcccagcattttgggaggccaaggcaggtggatcacttgaggtcaggagttccagaccagcctggccaacatgataaaaccccatttctactaaaaatacaaaaactagttgggtgtggtggcacatgcctgtaatcccagcttcttgggaggctgaggcgctgcaatcgcttaaacctgggaggcagaagctgtaatgagcccagatcgtgtgactg

SEQ ID NO: 954277 - DNA, 720 bp, Homo sapiens
tgccagtttgcctgtctatccagaaaaagaaggaaaaggctgacattcccaacccctgggagcaacagtggttggggggggagggaggcatagttttctctaccttcagaagttcgaggacaaaaaggcttagaagcaaaaggaaaaaagtttttggtttgcatcttactcttcctcaagtcctacatctgggtgccaaaatgtagcagaattttgctccttagttcagctaaaaccagaatcttgtcacacgatcaggaaaatttaggcacgtggacacattgaagggtgagtagagcaggattttattgggtgaaagggaaaaaaagaataaaactcagcaaagcaaaatgtagtcctgctaacaggccccccccacctcacagattgattcccaggtcaccacacaagctgaagagggcaggctcctcccttgcataaggggtgaattccctctggctccacccacttccccccatgtgcatatcaggatccagtcagttatgggcatgcccagacaagccctgggcaggttccctctgtgcaaaagtatctgatgtaaacacttgtggggcaggttggagattctctggggacccctttttatctgcctaggcatttggctgtctcaataaggtttgtctttatttgacctsactgagcgctctctcattgtgaacagtcttttctctggatgcatttgtcaaaaacaatcagtga

SEQ ID NO: 954278 - DNA, 617 bp, Homo sapiens
gagaaaggacacttacttctacacttcacacctgtaaggtgaatttaaatttgttttgtaaccacttgttgtgggacttggagtcttaatcatttcttctgagcttcaaccttgtcttccaaaggtactttagattttctacatctaatggtggcaaataaatccactagctgccaaatacatgggaaatgacctgtgaaaaccacaagtggcccaacaaactgtacgtcttcaatttgacagcacaaaggaattattggttagtatttcattggttgaatcttttgtttaatctggcctggaatattagtattaaaagacttaaaaatttatttggaaataattccaaacttactagaagttgctaaaataaaaatagtacaaggaatagtcatgtatccttcacccaaatttgcctgttcttaacatttcactccatttgcttaatcttttgctctctctttctctttctttcttcatgatgttttttgaaccaattgagagtamgctacatatatcatggctctttctccctaaatgctttgagtatttcttaaggataagaatattctcttctattgttttatccacagaacagaagctgaaaaagcatactg

SEQ ID NO: 954279 - DNA, 648 bp, Homo sapiens
aacatcccttctccccagaggccagggcctgcaagaggagccgagaggraggggagaccgtctgagggaggagacatggccctgccccgagggagccccagtctgagggaggaatagatgaaactgcctttgcaaaaattttagtaagggaaatctgatgtaaccgactccatcttgtttctaccaggttttctaccagctttagctcattcttgtgtggaggccataatagtcctttccttgaactgatcccctacctgttcaaaaattgaaaccacatttgtaaaggctaatgaaaggtcaagaagttagaattatggtaggggcttgaaccatcacttagcttgtttttccataacttagcttagtcacttaagctaagctaagttagctaagctaatatcacttagcttgttgactgccccagagtcacataactagaggtttcaagatttataacttccccaactacttctatagataacatcgctattgtgaaacctaaagaataaagaaactaaaaggtaattccacaaagagttgtttagctcctgtgtgtgcccaaggccaggcagggagtcccagcccctatcagccagaagtcgctgggtctttgatatggttttcagatgtagcatttccacagac

SEQ ID NO: 954280 - DNA, 591 bp, Homo sapiens
tctttcaacactgagtcccaccttccttcattgcccaccccagtgctcagagccacgcagtgatttttctcctttaatgtccctttcccccttccaccatcctcattcgtttgttygtttgtttgtttgtttattatttaagacaggatctcactctgtcacccaggctggagtgcagtggcatgatctttgctcactgcaacctccgcctcctgggttcaagcagctttcatgcttcagcctcctgagtagctgggattacaggcacgcaccaccacgcctgcctaatttttatatttttagtagagatggggtttcaccatgttggccaggctggtctcaaactcctggcctcatgtgatctgtctgccttggcctcccaaagtgccgggattacagacgtgagccaccgctcctggctcatttgttcattaatttgatttgttttgtttctttccctccctccctcccttctttctttcctttcctcctcctttcttcctttctttttctttctttcttttttgagatagggtcttgctctgtagtgatcatagctcactacagcctcaacctcctggactcaaatga

SEQ ID NO: 954281 - DNA, 639 bp, Homo sapiens
gtgatttaaactatatgatattctggaaatggcaaagctatgcagaaagtaaaagtatcagtgactgccaggtgcttagtggaggaaatacataggtggggcacacaggattttaaggcagtgaaactattctggataatactgtaatggtgcatacatgtcactgtacatttgctcaaatccttaccatgcaggacaccaaaagtgaccctaaagtaagccatgagagctacctcccccattcagtatcccacttgtaaatcaggagtgctactctaagataagggtgccattgtctctacctctagcacgagagctgtggtgcagaggtttcattcaggggatggggaggcctaagaacagacatggggaggttcaaacctaagggtgatgtttaaattaatggtgattttggtggtaatcaattaagaggagagcttcatgatagcaacaagctaaactgaagaccagctagaagtttaacagagagaaccagggaaagaaacagctaagaagagcccttctggggtcggaaaaaaatctcactgcctagcctcaaagactatttctgcaaaggggcctgaatcagactgtggagaartgtatgatgcatgattttatggaatacaatagagaaat

SEQ ID NO: 954282 - DNA, 596 bp, Homo sapiens
ggccaacatagagctcaagctgtggcttcagagggtgtaagccccaagccttggcagcttccatgtggtgttgagcctgcaagtgcacagaagtcaaggattggggtttgggaacctctgcctagatttcagragatgtatggaaacacctggatgcccaggcagaagtttgcctgtacccccatcgtatctaggaagtaactaacttgcttttgattttacaggctcataggtggaacggacttgccttgtcttggatgagactttgaactgtggacttttgagttaatgctgaaatgagttaagactttgggtgactcttgggaaggcatgattgtttttgaaatatgaggacatgagatttgggagggaccggggcggaatgatatggtttggctctgtgtccccacccaaatctcatcttgaattgtactcccacgtgttgtgggagggacctggtgggagataaatgaatcatggggcagttttccccatactattctcttggtagtaaataagtctcatgagatctgatggttttttaaaggatttctgcttttgcttcctcctcattctcttctcttgtctgccgccat

SEQ ID NO: 954283 - DNA, 558 bp, Homo sapiens
ccagatggacttctgggttgggtggggacttggagaacttttctgtcttataagaggattgtaaaatgcaccaatcagcactctgtagctaggattgtaaaatgcaccaatcagctctctgtggctagctagaggtttgtaaaatgcgccagtgctctgtaaaaatgcaccaatcagtgctctgtggctagctagaggtttgtaaaatggaccaatcagcactctgtaaaatggaccaatcagtgctctgtaaaatggaccaatcagcgttctgtaaaatggactaatcagcactctgtataatggaccaatcagcaggacatgggtgggggataaataagggaataaaagctggccccctcagtctgcaggggtaacctgctcagttcccttcaccctgtgaaagctttgttctttctctcttcacaataaatcttgctgctgctcactytttgggtctgtgccatctttaagagctgtaaagctcaccgcaaaggtccatggctcccttcttgaagtcagcaagatcaggaacccaccggaaggaaccaactctgg

SEQ ID NO: 954284 - DNA, 538 bp, Homo sapiens
aaaatgggtcaccctaagctcactgctttccttgtagaacccctaagtggagggtattttctctctaaaaccctcttgctgctggtctctgaaggarattgttatatgccttccttgtcatcaccacttcagaccacttctctttcccatttcctgacttcccctttcctgctactgctacacacacacagagctttacacaacaggtcatccaactagaacaccgactggtccttctagttgtgctcctcttcagatccccagattactctctcactgcctaaagcttttagagcctggctcaatgaactctttccaattctattattgccatcatttttggtggtttttaatattcatgtcgatgatcctttcaatgtcttaatctctaagttccttgacactctatctttcaagaatctatctctcaaccatagtttacccatttacctccaaggtcacacttttggctttattattaccataaactacaaataatctagtctcatggttacgaaggatttgtactctgatgacc

SEQ ID NO: 954285 - DNA, 606 bp, Homo sapiens
ccattccaccatgattataagtttcctgaggcctccccagccatatggaactgtgaatcaattaaacctcttttccttatgaatactyagtctcaggtatttcttcaaagcagcatgagaacagagtaatatagcaaattggtaccaggagttgggtactgctataggaatacctgaaaatgtggaagcaactttggaactgggtaacatgaagaggttggaacagtttggagggctcagaagaagaccagaagttgtgggaaagtttgggacttcccagagacttttaaatgtctttgaccaaaatgctgatagtgatatgaacaatgaagtccaggctgaggtggtctcaaatgaagatgagaaacattttagaaactggagtaaaggtcacatttgctatgttttagtaaagagactggaggttttttgcccttgccctagagatctgtggaaatttgaacttgagagaaatgatttagggtatgtagcagaaaaaatttctaagcagcaaagcattcaagagaggacacagcataaaatttgggaaaatttgcagcctggaaaatgcagtaaaaaagaaaaaccaattttctggggagaaac

SEQ ID NO: 954286 - DNA, 574 bp, Homo sapiens
ttctagtcctgggcttttcttcgttagtaagatattaattactgcctcaatttcmaaacttgttattggtctattcagggatttgacttcttcctggttaatcttcggagagtgtatgcatccaggaatttatccatttcttctagattttctagtctatttgcatggaggtgtttatattattctctgatggtagtttgtatttctgtggggtcagtggtgatatctcctttatcattttttattgtgtctatttgattcttccctctattctttattagtctagctagtggtctatctatttcgttaattttttcaaaaaaccagcgttcgaattcattgatgttttagagggttttttgtttctctatctccttcaattcttctctgattttagttatttcttgtcttctgctagcttttggattgatttggttctcaactctctagctttttaaattgtgatgttagggtattgatttgagatgtttcaagctttctgatgtgtgcatttagtgatataaatttccctttaacactgctttggctatcttccagagattcttgtatgttg

SEQ ID NO: 954287 - DNA, 492 bp, Homo sapiens
tggaagatttgtggcaaccctgtgttgagcaagcccatagatgccatttttccaatagtatgtactcactttgtttctctgtgtcacattttggtacttcycatgacatttcaaacatgattattattattatatctgttttggtgatcgctgagcagtgatatttgatgttactattataattgtttagtagcaacacaaaccatgcccattcaagagggcaaacttaatcagtaaatgctggatctgttctgactgctctgccaattgtttttcccccatctctctccctctccttagttctcttaattcccagagacacacaaatattgaaattaggccaattaataaccctacaatgacttctaagtgttcaagtaaaagaagagtcacatgtctctcacttgaaatcaaaagctagaaatgattaagcttagtgaagaaggcatactgaaagccaaaataggctgaaagctgggcgtcttgtgccaa

SEQ ID NO: 954288 - DNA, 626 bp, Homo sapiens
tctctcacttgaaatcaaaagctagaaatgattaagcttagtgaagaaggcatactgaaagccaaaataggctgaaagctgggcgtcttgtgccaaatagttaggcaagttgtaaatgcaaaagaaaagttattgatagagatcaaaatcctacagcagtgaacacgcaagtgataagaaagcaaaccaccctcattgctgatatggagaaagttttattggtctggatgaaatatcaaaccaaccacaaaacttcattaagctgaagcataatccagagcaatgccccaactctcttcaattctatgaaagctgagagaagtgaagaaacttcagaagataagttggaaattagcagaggttgattcatgacgtttaagtaaagaagccatctccataacataaatgtacaaggtgaagaaacaagtggtgattgagaagctgcagcaagttatctagaaggtctagctaagataattgatgaatgtggctacactaaatgacagattttcaatgtagatgaaacagccttctattagaagatgycatctaagactttcctagctaaagagaagaagccaatgactagcttcaaatcttcaaaaagcaagctgactctcttgtta

SEQ ID NO: 954289 - DNA, 620 bp, Homo sapiens
ctgaattataccagtggtagaaagatgagctgataccytttcttctgaaactatttcaaacaactaaaaaggaaggactcctccctaactcattttatgaggccagaattatcctgatatgaaaacctagcagagatgcaatgaaatgaaaaacaaaaaacaaacaaacaaacaaataactgcaggccaatatccccaatgaacatcaatgcaaaaattctcaataaaatactggcaaaccaaatccagcaacacatcaaaaagcttttccaccatgatcatgttggctttacctccaggatgcaatgctggttcaacatacacaaatcaataaacgtaattcatcacaaaaacagaacgaaagacaaaaaacacatgattatatcgatagatacagaaaaggccttcaatacaattcaacaccccttcatgttaaaaactctcaataaactaggtattgaaggaacatacttcaaaataataagagccatttatagcaaacccagagccagtatcatgctgaatgggcaaaagctgtaagcattccccttgaaaactggcagaagacaaggactcctattcaccactcctattcaacataatattggaagttctggcca

SEQ ID NO: 954290 - DNA, 495 bp, Homo sapiens
gatagcactactgcactccagcctgggtgacagagtgggaccctgtctcaaaaaaaaattatggcagaggcaaagggagagcagcacttcagatgtctggagacagatatggagmaagagaaagagggggaggtgtcatacacctttaaacaaccagatacaacaccaccaaggggcatgatgatgctaaaccattcatgagacccacccccgtgatccagtcacctcccaccaggccccgcctcgagcactgagaattacacttcaacatgagatttgtgcagggacacagatccaaaccatatcacagtgttcttaggggagaggtagaggaatgccttgagagcttgttgcaaagaatctaaccagctcgctaaaaatacagaccaggcacctcccagccctttctctagcctaccctcttcatctaggttgacaatccaagaggaaatcctgagtccccagggattttcgtggctgtgcaagagtaaggct

SEQ ID NO: 954291 - DNA, 823 bp, Homo sapiens
tttttttctgattcaattttgctgcttgttattrgtctgctcagggtttctatttcttcttgattaatttagaagggttatgtttttaggaattttttcatttcctctagactttctactttgtgtgcatagaggtatttttagtagtcccaaattaccttttgtatttctgtggtgtcaggtgtaatgtctccagtttcatttctaattgactttatttgaatctacttcttttcttagttaatctagctaatagcctatcaattttgtttatcttttcaaagaaccagctttttgtttcattggtatttggtattttttgttgttattgtttcaatttcatttagttctgctctgatctttgttatctcttttcttctgctagctttggatttagtttgttcttttttctctagtcccttgaggcatgacattaggttatcaatgtgtgatctttaagactttttgatgtaggcatttagtgcttaactttcctcttagcactgctttcgctgtatcccagaggttttgataacttgtgtcactattttcattcatttcaagggatttttaaatgtccacctggatttcattattaacccccaaaacattcaggagcagatcatttaatttccatgtatttgtatgcttttgagagatcctttggtagttggtttctagtttattccactgtggtctgaaaagatacttgatatgatttcgacatttttaaatttactgagacttgttttgtggcctgtcacgtggtctgtcttggagaatgtcctatgtgctgatgagaagaatatatgctctgtagttc

SEQ ID NO: 954292 - DNA, 581 bp, Homo sapiens
ttacctctcttagccttcacagaattgaagagagttaagttcttgctctggattagggtttagtttaagggagagttgtggatggtttgatctgctatctagaacactaaagctttcttcatatgtgcaataaggctgtttcactttcttatttgtgtgttcactagagtagcacttttaatttccttaaactacttttcctttacattcacaacttagctaactaaatatagcccaagagatctatattttggcctatctggacttttgacatgccttcctcactaagcttaaccatttctaccttttgatttaaagtgagagatgtgtgtctctccctttcacttgaacacttataggccattgtaattttattaattggcctaatttcaatattgatgtatctcagggaatagggaggtctgaggagagggagagagatggagtaacggtcagttggtggagcagtcagaatgcatacaacatttattgactaacttcaccgtcttatgtggatgtagtttgtgtcrccccaaaataaaagcaacagtaacatcaaagatcactgatcacagattagc

SEQ ID NO: 954293 - DNA, 546 bp, Homo sapiens
tcaaggcttgtggaattagattgcggagtcccatcctcagagtttctgagctcgtaagtctcaggcggggatccttagtttgcatttctttctttcttttttgagatggagtcttgctctgttgcccaggctggagtgtagtggtgtgatcttggctcactgcagcctcaacctcctcaaggctccaaagtagctgggactactcctttgtatttttgtattttgtgtgtgtagagatgaggtcttgttatgttgcctaggctggtctccaactgctaccatcctcctgcctcagccttccaaagtgctgggatgacaggtgtgagccacctagcctggccgttagtttgcttttttttctgagacagggtcccacgatgtcgctctgtcgcccaggctggagtgcgatggcaygacctcggccactgcaacctctgcctcccaggtttcagtgattctcctgcctcagcctccctagtagctgggattacaggcacatgtcaccacacccagctaattttgtatttttagtagagacggggcttc

SEQ ID NO: 954294 - DNA, 546 bp, Homo sapiens
tcaaggcttgtggaattagattgcggagtcccatcctcagagtttctgagctcgtaagtctcaggcggggatccttagtttgcatttctttctttcttttttgagatggagtcttgctctgttgcccaggctggagtgtagtggtgtgatcttggctcactgcagcctcaacctcctcaaggctccaaagtagctgggactactcctttgtatttttgtattttgtgtgtgtagagatgaggtcttgttatgttgcctaggctggtctccaactgctaccatcctcctgcctcagccttccaaagtgctgggatgacaggtgtgagccacctagcctggccgttagtttgcttttttttctgagacagggtcccacgatgtcgctctgtcgcccaggctggagtgcgatggcacgacctcggccactgcaacctctgcctcccaggtttmagtgattctcctgcctcagcctccctagtagctgggattacaggcacatgtcaccacacccagctaattttgtatttttagtagagacggggcttc

SEQ ID NO: 954295 - DNA, 595 bp, Homo sapiens
atgacgcatgaatgcccgggctgagctccctggggcccttcttatcctcatcttcccagtcctgtycacacagggcctcatgggggaatggcaggcattgaccttaaccaagtgcccacagcctacctgctctgaatgcgtagtcaggaatggaaggctttccaggaggatggaatgttctggaatttgggcttggttaatatgaaccatgaagcaacaaaagccccataggaatgcttggagaacaacagcaaaccagctaccagaattagacaggcgctccctccttttttgaaatcttaggtgtttttgtttttgtttttgagacgcagtctcccttgtcactcaggctggagtgctgtggagcgatcttggctcaccgcaacctctgcctcccagtttaaagcaattcttgtgcctcagcctcctgagtagctgggattacaggtgtgtgtcaccacaccttgctaatttttgtatttttagtagagatggggttttgcatgttggccaggctggtctcaaactccgggcctcaggtcatctgcccacccctgcctcccaaagtgctgggattacaggcgtgagccaccgc

SEQ ID NO: 954296 - DNA, 614 bp, Homo sapiens
gccaaggagggactgtagccagccctgtctggcccctgcatcccagagcctatgcatacatcctcactttggacaggctycacggctgaacctggccaagctcttcaagaaaggtggccaccagtggggggctcaagcacttcctctagacccacagagccttggacctctctgactggcacctaggatgtcagtctgttgtactgacaaactctgggcagagttttcagtggccggcaacaattgtgataaaggcctgccacatgcagacacccgtctctcaggatagggcctcgggtctgggagcaccactccttccatccctcctgaatctgcagaaaactccctccttcctccatggggccagcaagcaacagtctcccctggttccctctaccctcagcctctctgggtctcagtttcctcatctcaggctagtactctctgggccaatgaaacatcctcttccaggtcacttgaggacttttgttcctggactgtgccttaaagggtccctgagaacactcaaaatagtaacaaggccaaggtttcctgacacttactctgaaccatgagcactaaaggacacacccatgcctggacacccacagcaa

SEQ ID NO: 954297 - DNA, 255 bp, Homo sapiens
caggagtcaataagaattgggtttcctctgtctggcagctgtgttcttctcatgacatagcaaatggctgacaaaaggcagatatctgccttgctgagccacaaagacaggttccaaataagggaatgtcttggttgtttcsgggggggcttttagctgtggctggagaacacagactcaaggcctctggactttttgagaagcagaggccagtggaaggctgaggtctggtagtgtggagcccccactgcagcc

SEQ ID NO: 954298 - DNA, 607 bp, Homo sapiens
ccgtcctgaaactgacgcctgtcgcttatggtgagtagcaacccctgccaagccctgtccccctgaaggtggccacagtagcttcttgtggccgtgggctgtaagcggtgctgtccctttaacagcagcttcctctgcccccatcccacgccctccaggctgccgtgtggaatccatctacctgaacgtggagtccgtctgcacacaccgggagaggtcagaggtgagtggaggccccaagcctcatcctggccatcatcacacgatagccctagtgggtgatgggcgctcaggaggccccggggccgcttgcctgcaggtgctggcctgtctggggccatgggcctgctggctgccttcctcagcacctctttgttcctgcctgtctgttctgtggcttctggggccttctcattttctttcttcctgtgtcctcttcctcccatttctgctgagctcgagatatgaatattagtgaggaagatacattctctctttttttttatttgagacagggtctcagtctgttccccaggctggagtgcgktggcgcagtcacggctcactgcagcctcaacctcctgggttcaagtgatcctcccgcctc

SEQ ID NO: 954299 - DNA, 716 bp, Homo sapiens
gccccttttcaatactataggaaatgtaaaaatgagcgacatagtcctgatccttaagagagtcataagttggtgaggaggagaaaggcatagatatagtcatggtaacacaagtcrtatgtggtaagatctactgagcatggggctatcagagaaagcttcatgagggtgacatggaaagggagccctgagggactggtaaatttccatcaatgacattccagggagagaggccccaagacacaggggcagcaggtggtccactgtgctcctgccctggacagggagggcggggtcctctgctgtttgtttgcttgtgtaggaattttcccctcaagcaatgtccttgtctcccatgggagaagttttacatgagtgggaacctgtttctcttctctatcccaggccattccctgagagaagagaaaggggaatcttttttttttttggacagtttcgctctgtcgcccaggctagagcacagtggtgcaatctcaactcactgcaaccttcagctcctgggttcaagtgattctcctgcctctgtctcctgagtagctgggattacaggtgtgcaccaccatgcctggctccttttttgtaattttagtagagagggggtttttgctatgttgcgtaggctggtcttgaactccgagcctcaagccatccatctgcatgggccttccaaagtgctgggattacaggcatgagcc

SEQ ID NO: 954300 - DNA, 622 bp, Homo sapiens
gcatgtaacttttccaccttagtttgtccgtctgtaaagtgggcatattcatacttcacattaggtctatagaatagacatttcatcagggttgaattttttatgtgcttatataaatgaatttctttctttgtaggggtaaatgggctcagatggctcagaaaaaaaatacgcactcgcacatgatacacacacacagaatgatttagcaaatacatagacaactggtgaggaacaattggtcagtgtgggagaagaggatagaggtgtttttcagtttgaaattgtttcaaaataaatgctttcagggccggcatggtggctcatgtctgtaatcccagcactttgggaggccaaggcaggcagatcaccagaggtcaggagatcgagaccatcctggctaacacggtggaaccccatctctactaaaaatacaaaaattagccgggcatggtggtacacgcctgtagtcccagctactcaggaggctgaggcaggagaatcatttgaaccagggaggtggaggttgccgtgagctgagatcgcaccactgcactccagcctgmgcaacagagtgagactgtgtttctaaaacaaaacaaaacaaaaaaaatgctttcag

SEQ ID NO: 954301 - DNA, 784 bp, Homo sapiens
catttgctcacggaaagaatcttttttattttccctgactattaaaatggcgatagaactatgaattctgcawagcacaccccaaacaggtagaaatggctttaattcattcagatcgtggctctcgagctagctgaggccagggaaagtacaggccgttctagtcttcagcatggtgcctatgacgcccgcaagagaatattgccaacatgttcttgccttgctagtgccagtacacaaggtatttgatttctccttcacatttctatgtgtaaaatggggcaggctgatgcggttgatatgaaaaagcataaataaaattatcatacgctttggaaagagatgttctgaataataacaagattttgttatttatgctgagcaatatgttttgtcatttctacagtatattctagtattaaaatttatacttgtgcaaatttggctaacaagttttccactcattcatttgggttaaagcattgatttctgtctggtttagagtacaggcagttctattcctcaaagcagtgaatccatctctgctaggatagaaggacattgccgttcaaagccttataatatgcaaaacaaaatgtctgagtaatgcccacagatgctgaaattactggataaatcccaaggatttcccttatttaaaaaaattaaaatttttaatgtgtgtattttctttagagaatgaaaaaaatacaagaactacattgtctccccaaaatgtaaaaagaatatctgataggtaacaatctttttgtgtgtgtgtcca

SEQ ID NO: 954302 - DNA, 653 bp, Homo sapiens
tatgagttaaatgacagcgcatcacattagataattatgtagctattactaacattcagtagtgcttttgaaaatattattcttcatctctttaatgcacagactttcatctatataataagaaaaagataaatgcaagccagtttgcaagcttttgataccttacctcagaaataaaagcaccgatattttttacatggtttagcataggactgtcagtcacaaatgtacacttatccttggactttttaaactcttctttataacggatctaaaaaagagaatgatttacataagaagagaaaaagaaaaacaattctaatggccttttttgaatgataattaggttgataaagtccatttactgaagtaaatactcaagtgtgaaagggacctcaaaacaagccaagttaaataaacggctatccagcacaggattgcaaagatgatgaggcatagtgaggaaagaccattctttagataagcgagggtccagttaagcatcaacaccaggcgtgctggctacgggtgatgggtcctgtttacccagccagcccagtgcaattagcaagcaygtgccatctcgctcctacaagtgtcctggtgttttgttgcttttaagccttgacacataagcctttggccaaacagaa

SEQ ID NO: 954303 - DNA, 456 bp, Homo sapiens
caatggacacaattcaacatccattcataatttaaaacacttagaaaaatgagagcaaaggaaaaggtgttcaacttgataaggagcgtctacaaaaaacctaaagctaatatacttaatggagaaaaactgaatgctttcactgtaaaataaaaaacaaggcaagggtgtccgctcttattcaacacagtgatgaaagttctagccaaagcaagaaagcaagaaatggaaacaaaatgcaaacagattgaaaagaattattttagatcatctgtactagcaaatgacatgattgggtacacagacaatcccaaggaatctacaaaaacacatatgactaataagctcagaaagttcttaggatacaaaataaacatacagaaatcatttgtatttctacrtactaataatgagcaccctatgttcatggactggaagactcaacatagcaaagat

SEQ ID NO: 954304 - DNA, 595 bp, Homo sapiens
ttgttatgcacacaagaaagcatcagtaacgggaaatcttttccaactggtttgataggcactttgtgccagcagcatgagctcattgcaaactggactggaagacaaytgcaaaattttgttgtttctagataactgttctgcacaaccccctcctgaacatcttgcgaagagcaatgcttttggcattgactttccccccagtgtgacgtctgtaatacaaccttgtgaccaaggaattctacacgccgtgaagagcaagtataaacagttttttgaaaagcatccttgcttcagttaacagaggcctgaaaatccaggacatccttaaagaatttaatcttaaggatgccatcttcacagttgctaatgcttggaacgacgttgataagtcaacattaacaaatgcttggcatagactttgggctacaattatgtttgaaagtgacctagctgatgaagattttgaaagagttcatgactctaatgagaaaacaatggtagcataattcattacctatgccaaaagtttatcagccaaaagtgtaaataagttagaagaagctaacattgaagaaagggttaacattgataa

SEQ ID NO: 954305 - DNA, 481 bp, Homo sapiens
acagcgatgtagacatagacatatgtatgtatctttctggtgaaatgatttataaagcttaagttttcaaaaccttatactttcagaatatagtgtatacagagcaaaaccaaaaagtggacttaaaaaatttayatttccacttcattatcacctcatttagtagggaaaaaacacgtctctagttctggataaataaaatgaccatagggagaaaaattttagcaattacatggtataagtggaagaagatatatttaataatctttcatataatatggtacaggtcctccaaagtaatatggtttcaggatatagatatatcctgatattcatctagatatttgcgcatttatagagctttataaagaagcctaaatatctagatgaataagtgattttttagtcatctgggaatttcgacatttcagaacctgaagaatttaaaataacccctctcctattttcaattcaattcatg

SEQ ID NO: 954306 - DNA, 596 bp, Homo sapiens
gggaactataataattactacaaaattagtggtttaaaacaacagaaatatattctctcacagttccagaagccagragtctgaaatcaatattactgggcccaaatcaaaatgtcagtaggtctatactgcccttgtcggttataagaaaggatgcattccttgcttcttccagtttctggtggctaccagagttctatagcttgtggttatatcattccaatctctgcctccacagtcacattgcctttccctcttccatcgggactgaatcatcctctacctctctcttataaggatacttgtgattgcacttagggcccatcccaataatccaagataaccttttcaattcaagatctttaacctgctgggcatggtggttcatgcctgtaatcgcagtactttgggaggctgaggcaggaggatcacttgagcccaggagttcgagaccagcctgggcaacatagcaagacccagtctctacaaaaaaattttaaaattttagccaggcatggtggtgcccacctgtagtcccaactactcaggaggctggcgtgagaggaacgcataagcctgaggttgaggctgcagtg

SEQ ID NO: 954307 - DNA, 596 bp, Homo sapiens
gggaactataataattactacaaaattagtggtttaaaacaacagaaatatattctctcacagttccagaagccaggagtctgaaatcaatattactgggcccaaatcaaaatgtcagtaggtctatactgcccttgtcggttataagaaaggatgcattccttgcttcttccagtttctggtggctaccagagttctatagcttgtggttatatcattccaatctctgcctccacagtcacattgcctttccctcttccatcgggactgaatcatcctctacctctctcttataaggatacttgtgattgcacttagggcccatcccaataatccaagataaccttttcaattcaagatctttaacctgctgggcatggtggttcatgcctgtaatcgcagtactttgggaggctgaggcaggaggatcacttgagcccaggagttcgagaccagcctgggcaacatagcaagacccagtctctacaaaaaaawtttaaaattttagccaggcatggtggtgcccacctgtagtcccaactactcaggaggctggcgtgagaggaacgcataagcctgaggttgaggctgcagtg

SEQ ID NO: 954308 - DNA, 520 bp, Homo sapiens
gggctctttttccaagcctcaaatctagctcttgtgatgatgtcactctggccacaatgattattgaagaggtgggcactacactaaattgggccaatcatggcctcttcctgggggaaggatgtgagggaaagaatgtcctctctcctttggattgctaccagtgaatgaccaaagttgtgtctcacacagaagccctcctagcatgcaagagagtgcaagatctcccaagaaagagagatggagcatcaatggcatctagaagccaggggacattatatgagttttggcatttacccctgtatgatccagtgctgtgaactcttttctcttattttatttttcttttttagggacagggtcttgctgtattgcctaggctgaagtacagtgcctagccataggtgagatcatagcacaatacagtcttgaactcttgtgctcaggtgatcctcccagctcagcctcctgagaagctgggactatagatgtgcatcatygcacccagcttctctctctt

SEQ ID NO: 954309 - DNA, 548 bp, Homo sapiens
gaatgacctttgatttttagtattatgatagggcttagcatggcatgttgcatttaggacctaattttcttatattaaaaaaatgttaatttgtgcaattataagaaaaatgggaaatacattcaacttcaactaaagtctgaacgcactagaatatccccaagtcagtaacaatccttagacctatgttaccattctcctaaacattctagcccattaatggcttattaatcccctagctaaacatttaataactaacaaatttgcttgtgccacatggtttgtgtgaatttaaaaatcctatgatttttccctttcttctaaactgcttttccgaaaaccattcaagaaaccaataaggagttaggtgaactctgccctttatgatcttatcatagaaatgaataagggtggctaatttaatgacaactttaacctccttttcaaattatttctgcccataaaaatgttttyatatggtaccagataactcccagctgctctatgtgctgagacatgccttttctggtaataccataggactccaa

SEQ ID NO: 954310 - DNA, 559 bp, Homo sapiens
gaatggtttgtgtattcattatctattactgtgtgacaatttacttcaaatgtagcggcttaaaaatataatcagcatttgggttttttttaacacagtttctgtggattgagtatgcaaggaagaattagctgggtggttctgctcaaaacctgttctcagaacagttttgtggttgcgaatagctgggtggttctgctcaaaacctgtcatgatactgtagcctagggttgcagtcacctgaaagtatgacggaggctagggaatcttatttgtaaatggctcactcacacagatagggagctggtattggctatttgtagaagacctgagttccttaccacaaggaccgatcatcggactgcatgacacagcagttggctttcctcagagtggtctaaaagacagcaaaacaaaagctgcaatggcttttaatgcttaccctatgaggtcacaygctgttatttctgttatatcttgttggtcacacagttcagtcctattcagtgtgaatacaagaaggtaggaattattatggccactttaaagtctggctacc

SEQ ID NO: 954311 - DNA, 629 bp, Homo sapiens
agaatgtaagctccatgagggcagagatttgtatttttatttttgttcactgttgtattccaggtacctagaacagtaccagcttatagtaaatattgctgtcgaattaccccattaccrcagggtgcattttcttttcttttttgagacagagtctcactctgtcacccaggctggtgtgcagtggcgcaatctcggctcactgcaacctccacctcccgggttcaagtgattctcctgcctcagcctccagattagctgggactacaggtgcctgccaccatgcccagctaacttttgtatttttaatagagacagggtatcagcatattggttagggtggtctcgaactcctgacctcaggtgatccgcccacctcggcctcccaaagtgctgggattacaggcgtgaccgtagggtgcattttctatgggcctcttagcggcccatcaatccagtattgatcctggttcttccggtaaactaggaaagagatgataacagcttaagttgatcgagtgctcactctgtgccagacaccgttctaacagcatcacatgtacgtatatcatttaattctcacagtaaccctctgagatgagtgttatcatttgcctcatcatagggga

SEQ ID NO: 954312 - DNA, 540 bp, Homo sapiens
tttgatttttagtattatgatagggcttagcatggcatgttgcatttaggacctaattttcttatattaaaaaaatgttaatttgtgcaattataagaaaaatgggaaatacattcaacttcaactaaagtctgaacgcactagaatatccccaagtcagtaacaatccttagacctatgttaccattctcctaaacattctagcccattaatggcttattaatcccctagctaaacatttaataactaacaaatttgcttgtgccacatggtttgtgtgaatttaaaaatcctatgatttttccctttcttctaaactgcttttccgaaaaccattcaagaaaccaataaggagttaggtgaactctgccctttatgatcttatcatagaaatgaataagggtggctaatttaatgacaactttaacctccttttcaaattatttctgcccataaaaatgttttyatatggtaccagataactcccagctgctctatgtgctgagacatgccttttctggtaataccataggactccaa

SEQ ID NO: 954313 - DNA, 610 bp, Homo sapiens
ttacatttcattctacaatccatttgagttaatttttgtatatggtacaaggtgtggattgaagttcattttttgtatatgaatatctaattgttccagcattagttgttgaaaagactaccctttcccccatggaattacttatgcacctttgtagaaaatcagttatttacataaatgtgggtctatttctgtattctctattttttcccattgatttatttgtctgtgttttgtaccaatcacacctgtcttgattacagtagctttataataagtcttaagattagtgagttttggtctttcaactattttcttccttccaaaaaaagttattttggctattctaggtcccttgcacttccatattaattttagaatcagtttgtcaatttccaaaataaaaatgctgggattttgatgtcttagtgacaataatgagacttcttccaagggtaagtgactcaatccagttaccatttcatgacaatggaaggtatgcaaacatatacacaaacaaaatcagcagaacatgatcacactaattttgctatcattaccaggaaacaatgaaacaaaaytaatttcccatcttaatactctagcttta

SEQ ID NO: 954314 - DNA, 587 bp, Homo sapiens
agtggcatacccaaggctagaacccatgctcttaactactacatgaaactactgattgcttttctgatgagcttcaactggtagaagccactcgcgtctactcamaagcttgttactgaacccattggggtcaaaagcacatgtgtgtttctgaacagagaggtgaagtgagtgggctcatcttaaaagcttgtttccattgctttagaatcaagtgcaaatgctttagtaaagccttctagcacttttctcaacatttctgaggttctctcccaagcctccctccctaaccacataagcttgcccaaagcatgctgggggcatgatgctctagaccattgctcataggtctcttcatctagagctggctcctgtctcgcactctatttgcacacctttgctggggtgaatcatgttctagagtgtcccaatttgaatgtcagatctggttacagatacattgagataatggtccctgaaccctgggcaactgggcatgttctggggttgctggagtccttgttctggtcacttccagccatataaacatacttttttctttgctgaggaactgatctgtgctgagg

SEQ ID NO: 954315 - DNA, 708 bp, Homo sapiens
gtgctggcaggagcaaccccagagccatcttttccccyggcagcccagcagctcaccactggggaggaggatgtgttcactgattaaagtttaaaaggcaggtgaggaagtgggactaattagccccatgaaggcccattaaagtgtttgaaaagttactagcatctctgagagtctacccatgaggaaacaagtggctgggaaactgggaatgaggggactagatccacacagatccctgcaaatatgctgctcattcgccccaaaacactactccaccttcactctaaacttaactcttacgtgattatctgtatttcctcgacactggaaaaccaggtttttctttcttctatgccagttacccaatgtacatttgtgctgtagatgagagctgaggaccttcctgcccttcagggttatagtaaagttagaggcatgttatgtggttcccaaatatttgggaattttctaggtatctttctgttattgatttctgatttaaaagcatatggtcagagaatacattttgtatgacttgatacttttgaatttattgagacttactttaaggcccagaataggacctatcttgggaaatgttctatgtccacttgaaaggaatatatattctgttttgttgagtggagtgttctatctgtaactgccaattaggtcaagttggttgatattgttgtttgagtcttt

SEQ ID NO: 954316 - DNA, 700 bp, Homo sapiens
cgctagagcgacatgatggtggaatctgcctcggagacaatcaggtcggctccatctggtcagaatggcgtgggcagcctctctgggcaagcmgatggcagcagcggcggggccacagggacaactgcaagtggcacgggcagggaagtgaccacgggtgcagacagcaatggtgagatgagtcccgcagagctgctgcacttccagcagcaacaggtaggaactggtgcgccttggggtatctgggagcgggagaggggcactaggctgcattccacttcatcctggctgctggagcaccactccctgccaggcagcctcactttaccattcttaagacagtccagcctccaaggactccctgtccacccacccattctggtggccaccttgagcctaggctaccacagcattttcaagagatagaagtgggactcggaggtctgagatcatgaagcttgaaactgtcccagaaatgccaataagaagagacagacacacaactgggcagcaggcttgagattggcatgttggattggtgggcactccactcttcacctgcacactggctaggaaactggctaaatgaacagggttaagagggtgctgtgcacacagggggatcttcacattatttctgttgcaaaacattatctgcctccgagtcagcttgggcctccatttccagcagtgaagagag

SEQ ID NO: 954317 - DNA, 690 bp, Homo sapiens
gaagtaatcaaagcgtccactggtagatgaatggataaactaaatgtagtatatatgcaatggagtattattcaactataaaaagaaagaaattctggagcatgctacaatgtggatgatctgtgaagacawtatgctaagtgaaataagccagacacaaaggaaataacatatattgtataattccacttatacgagttgtctacaatagtcaatgcaagaagataaggtagattccaaagcccagcactaccttcaaacgtgtcactgttgagacaagtgctgacatttattgtcactccatttgctaagaaataagaacaaaaaaccattcaaaacatcaataaatacaggagctttttttggtaaaaaataatgaaatagactgctagatagactagtaaagacgaaaagagagaagattcaaataaacacaatcagaaacaacctggggaatataaccctgacccccacagaaatataaacaaccaacagagaatattataaacttatctatgaatatatactagaaaatctaaaagaaatggatacatttcaggacacataaccctcccaagactgaaccagaaagaaattgaatctctgaacagatcaataacaagttctgaaattgatgaagtaataaatagcttaccaaccaaagaaaaaaaaaaagaaaaagcccaggac

SEQ ID NO: 954318 - DNA, 740 bp, Homo sapiens
tttgtacagtatattcatagcagcattattcataatagccaaaagatggaagtaatcaaagcgtccactggtagatgaatggataaactaaatgtagtatatatgcaatggagtattattcaactataaaaagaaagaaattctggagcatgctacaatgtggatgatctgtgaagacattatgctaagtgaaataagccagacacaaaggaaataacatatattgtataattccacttatacgagttgtctacaatagtcaatgcaagaagataaggtagattccaaagcccagcactaccttcaaacgtgtcactgttgagacaagtgctgacatttattgtcactccatttgctaagaaataagaacaaaaaaccattcaaaacatcaataaatacaggagctttttttggtaaaaaataatgaaatagactgctagatagactagtaaagacgaaaagagagaagattcaaataaacacaatcagaaacaacctggggaatataaccctgacccccacagaaatataaacaaccaacagagaatattataaacttatctatgaatatatactagaaaatctaaaagaaatggatacatttcaggacacataaccctcccaagactgaaccagaaagaaattgaatctctgaacagatcaataacaagttctgaaattgatgaagtaataaatagcttaccaaccaaagaaaaaraaaaagaaaaagcccaggacca

SEQ ID NO: 954319 - DNA, 618 bp, Homo sapiens
ctgaggggcagggtggggtcagtggatggaaaattaccaagaggaaaccttcagggtgagggggattctggctaaacctayttaacaggattctggggattgtcattgaaggcaggccagggagatcagacatctgctgggggatggtggtggatgaggaacctgatcagatatggaggatgatcagatgtcaaggacgggggtttctggttacactgacttagcagggttctttttctaaaactggacttcataaggaagtgcacagatgggcctaagagaaggttcaggagtctgactaaagtttggccaagccaagaatccttgtcacaggtgactccagtaccataaatagaggaactcttccgtagggatgggtttagaaagatggcatcacactgatctgagtcaccttgaaggggcacgtgaccagggcatcagttctgagccccttggtgttatggctttccccaggctggtgccaagggaagaactgggaggtggaggcagccataccctgaacacatgtgccagcagggataggcacattgtaccctatgcctaagagaaacagaattagcaaaccgctggccctgcaggggattaaaggaaagatgg

SEQ ID NO: 954320 - DNA, 499 bp, Homo sapiens
actatggcacatagtaagtgcttaaaaaacgtttgttaaatgaattgataaayacatttaatatcaaggggcctccaattcctcattagtaaataggaaagttacactaggtcccttcaaaaatctccagctctgagactttaaaatgtcagtagcatcacacttttaggctagctttcaggatagtataattatattaattaagataaggcagtgttccccttctgacatgatggagtaaactgatagatcaactctcacacagataacgactacttagaggctctgcagagtgaacaaagcaaatggctgtgtgtttgggtgcaaaatggtacgatcacttaggaaaacactttggcagttacttacgaatgcaaacgtatatttaccatagcatgcatcagatctactcctaggtatttacccaagagaaatgaaaacatacgctcacctaaaaaacttaaactgcatgtttattatggctttacccttaatcatt

SEQ ID NO: 954321 - DNA, 641 bp, Homo sapiens
gagcgccaaaatgtccctgattatggtatgactcaagagtgggggcaggggagagagcagaaggggagctgacatgtggcagggagagggaggaagccggggagagctcctcaggcttgrctcagctttaccctaactcactgccacacttggcactaaccttatggctcatgctaggtgcacatgtgccaagacccacgtgaggcactccacacacagtatcttatctgatctttacaacccaagggggtggaggtgctattatcatgcccattacacagataaggaaattgaggcttagtgagattagaaaaggcccaagctattaaacagtagagctgtacctggaactcagtccaatcttaaatcttctgccaacataactcacatgagttacctggaatataaaattcagggagctggactggctgagcccaagatactttcaaattcctaacagccagtgagataagattcctagcaacttcataagatatctgcctgaaatttaagtcttcattgtgttcaaaaaaacttctaaaagattccttatttaaaaaaaaaaaagtaattaagtacatgtttagggcagatgataaaatacacacttaactgaatatgtaccatgggctactacaatt

SEQ ID NO: 954322 - DNA, 568 bp, Homo sapiens
tgaggcaagtcacagagcatctctaaatgtcagttttatagagaaaagggaaatagtacctatagtttactggattgtgaggattaaatgtaaggcaattaatacaatgctaagaggcactgtgagtatccaataaatgcttattataatgattatcagtgtcttggaaggagacattgctatgaattaaactttataaaatcatacaattatttttaaaaatagagctgagaggccctttgagagcaaaaaagtactcatctctctctatataacactaaaaaaaatttattagtaatttaaatcccctgcatttcccccacagcctgcctttggctgcatgcaaatttaagacatgagacaaagttcgattcctctatataagaaagggatggattgtaaagtccattgattgttgtatctgccagcaccaagaatattcctgggaaatggtagatacattaaaaatatttggttttttaaaattaattttttatctttttagattaaaaaawttttttttttagagatagggtcttgctgtgttgcccaggctggtctcaaactt

SEQ ID NO: 954323 - DNA, 640 bp, Homo sapiens
aggctgagataggagaatttcttgaacccaggaggcagagattgcagtaagccaagatggtgccactgcactctaccctgggygacagagtgagactccatctcaaaacaaacaagcaaacaaaatatttagtatgtgggatgggatatgtatatatatatcctaggaggaactttatttggtagaaatatagtacatactttaaaaatgcacattctgaaaatctactggacaaaatccaatgataatgctggacagttaatcagaagtcaactcatgtagaccataaagaccttgtcaataaggactttaaagtttattttaagagcaatagggagttgtggatagttctaatctggggttaaactatcgaactgcatgaaccatcctttcctccttttttttacttttttgtaatgccctagtaccttcctgctgttgttttccttggatttccaaccaagaatcaaccaccccctgctgtgtgactcgtataacaatactctaccattaaaattatttttcttaggtgtgtgtactataagattctgagcaacaagagagtaatgatcattttattccctgtgtcacacatagtgcctgctcaagagctggtgctcagtatttacaaaatgatgaa

SEQ ID NO: 954324 - DNA, 742 bp, Homo sapiens
tctggaggctcgattcctactctaaggggcctcatgccaggtgagaggcctggatcgcctgcagaggagatgggagaatccctgaggtttgggcatctttgaagcagttcacgctgtgatccagaggccactttattagaaaccagactgctatctatctgcaggagcggaagggtggagacaggcatggggccttggggaggagagtgggtagggatctcagacagacccaggtgagagggaccgagagcttacaaggagacacaaagtgaactggatctagcagcagggcttctgcccagaggcccgagttgttcagaagtggcccaggtagaagtgggtcaagatggtgcagatcttagagccagtctgtcagcggggaaggctcgctattccctaaggcacgtgcatagacagatcctgaggagcaaacgtgacttatccttgctaagcccgggaaatgaaaaatgagattataatgggatttatccaaagcacaaatgaaaacaacatcaccgaggcgcataattctaaattttaataataaaataggtatcggaaaactctgtcttgctccaacaagaagatgctgctttttcttgatttcttacaccttatcttggcarctgcctgtttctacctctctcctatttgcctcatctgtatttccttaagggccatgtgagaactcccaagtcacccttccctccaggttcccgctggtaactgccgtagtcttgac

SEQ ID NO: 954325 - DNA, 522 bp, Homo sapiens
taaagttaataatgctagattcarttatatctgcagtgttccatattctctatttcccccctccccccaccgctttcgcaactgctgtttcagggagagattaattctttccactatggcttgtccttgagaattgtatgggataccagtaatgtgtttaatattccacatagagaaaaatgtagctagagcttggctagtatagcctggggcattatctgttttaatagaagctgggatgcccatcaccacaaaacactgcaaaagtgacgtttaacacaggcagaagactctcctgattggcatgtagcccaaagtgagaaaaggtgtccacacatgtacataagctagtctcccaaacgagggaacacgtgtgacatccatttgccaaagagaattaggttccaatcctcctgtaaaagatgaggaatgtaccatttggcaagttggacattgctggataatagctgtagcttctctccaggttatgctgtatctgcgtttgagaccagaggcgttaac

SEQ ID NO: 954326 - DNA, 522 bp, Homo sapiens
taaagttaataatgctagattcaattatatctgcagtgttccatattctctatttcccccctccccccaccgctttcrcaactgctgtttcagggagagattaattctttccactatggcttgtccttgagaattgtatgggataccagtaatgtgtttaatattccacatagagaaaaatgtagctagagcttggctagtatagcctggggcattatctgttttaatagaagctgggatgcccatcaccacaaaacactgcaaaagtgacgtttaacacaggcagaagactctcctgattggcatgtagcccaaagtgagaaaaggtgtccacacatgtacataagctagtctcccaaacgagggaacacgtgtgacatccatttgccaaagagaattaggttccaatcctcctgtaaaagatgaggaatgtaccatttggcaagttggacattgctggataatagctgtagcttctctccaggttatgctgtatctgcgtttgagaccagaggcgttaac

SEQ ID NO: 954327 - DNA, 562 bp, Homo sapiens
cttttaaactttgtgaggtaaaaccaggactacatttattctaaggttgattttttccccctcattattgaggctagacctttctgtgtactctgccttaccttgtgaattaagagatctttcactctggctggtgggaacagacactattgctggccctgtgtgagtgtcaagggttattctttctttttcttttttttcttttttttttgagttggagtcttgctttatcgcccaggctgaagtgcaatggcacgatctcagctcactacaacctccacctcccaggttcaaggaattctcatgcctcagcttcctgagtagctgggattacaaacatgcaccaccaagctgggctaatttttatatttttagtagagacgagttttcactatgttggccagactggtcttgaactcctaacctcaagtgatccacctgcctcrgcctcccaaagtacagggattgcaggtgtgagccactgtgcctggccaagcattattctttctaatcctttcaggaagttttttcctcactctgaggaaatttcctcacgtacatt

SEQ ID NO: 954328 - DNA, 641 bp, Homo sapiens
gctcacgcctgtaatcccagcactttgagaggctgaggtggatggattgcttgagcccaggaaktctagaccagcctgggaaacatggcaaaaccctgtctctacgaaaaatacaaaattagtcaagtgtggtggcacacaactgtagtcccagctactccagaggctgaggtgggagaatcacctgagcctgggaagttgaggctgcaatgagctgtgactatgctactgcattccagcctgggtgatggagtgaggccctgtctcaaagaaaaataaaatacaaatcagagacagtattgctaatctgtcatggggcttcaatagcttcagctccctagatcttgctatcttccttcttggaaagcctgtttcaaatgtctctactccccaaattgtagagggtgaaaggtctaaaaaatgtctatgtgaagtcttgatccacgcggcttgctgcgtcacttggccacttgccttcaaccccgttttcccagcttagagccaccactcttctgtgcagaaacaggctacgatgggttctctctgagataggttcttttgctgttgccctagtaacagaattattaaaccaagttccagcctcgagagtatttgtgcctggtgaggtaatgtctgtcgca

SEQ ID NO: 954329 - DNA, 641 bp, Homo sapiens
gctcacgcctgtaatcccagcactttgagaggctgaggtggatggattgcttgagcccaggaattctagaccagcctgggaaacatggcaaaaccctgtctctacgaaaaatacaaaattagtmaagtgtggtggcacacaactgtagtcccagctactccagaggctgaggtgggagaatcacctgagcctgggaagttgaggctgcaatgagctgtgactatgctactgcattccagcctgggtgatggagtgaggccctgtctcaaagaaaaataaaatacaaatcagagacagtattgctaatctgtcatggggcttcaatagcttcagctccctagatcttgctatcttccttcttggaaagcctgtttcaaatgtctctactccccaaattgtagagggtgaaaggtctaaaaaatgtctatgtgaagtcttgatccacgcggcttgctgcgtcacttggccacttgccttcaaccccgttttcccagcttagagccaccactcttctgtgcagaaacaggctacgatgggttctctctgagataggttcttttgctgttgccctagtaacagaattattaaaccaagttccagcctcgagagtatttgtgcctggtgaggtaatgtctgtcgca

SEQ ID NO: 954330 - DNA, 578 bp, Homo sapiens
agaagatgttcaattactttatcagtgtctgtaattgtgactaaacatttctgaagttttacacamacatgcacacacacacgcacacacacttttttggggggggacagggtcctgctctgttgcccaagcttaagttcagtgtcatgatcctcccaccttagtctctcaattagctggggtcacaggcacatgccatcatgctcggctaatttttaaaaaaaattttggtagagacaaggtctccctgtgttgcccaggccagtatccgactcctaggctcaagcaattctccctcctcgggctctgaaagtgttgggattacaggcatgagccattgtgcctagcctatatatttttttaaactttcaaatttattggcataaaattaaccaaagtattattttaaattttaaaaatcttgctggatatgaagttattttcctttttcattgctaaaattatttatttgtgccatatctcattttcttttttaatattgctagtggtttttctattttattttatttttcaacttttattttcgattcaggggatacacatgcagatttgttacc

SEQ ID NO: 954331 - DNA, 605 bp, Homo sapiens
acttataaagaaaagaagtttaattggctcatggttctgcaggccgtacaaacatggctccagcatctgctgctggtggggcctcagaaagcttactaggaggaggtrtgctgaagtaaaagtgctaattcatttattcatccaacagttacttgattacctgttctaaagctggtattgcagcagtgggcaaaaatatttccaaaagctttgttagtacaagtagaataatgtggggtgtgggtgtatgtgtgtaaaatagtgtttccaaatatgtggggtttgtaatatagccaaacatgattatattgcacactaagcttacgaaaggcttgtgttaagaatgaaatcatgttataaacatcaaaacaactcattcacaagggataaaaaagaagcctttcacatttagtcaaattaaccaaggcttggactgtctttagtaggtgtgatgttgggaaaatttgttgaattcaggagagaaactcatatctagaaagagtttatgaccctaaataattgtacttttagcttttgtccaacttgctttgcaaaattggagacttgaggaaggctgttctcaagtattttcagagaggttttta

SEQ ID NO: 954332 - DNA, 561 bp, Homo sapiens
actgtgtttttactgacttcctgctgaatctttccatttatgatggaagggtgtgaaatcctcaaccataagagtgaatttctctttgcaattttatcggtttttgcctcaggtattttgatgctttgatggtagggtcatacacataagaaatgttatgtattttttgcagactggaacgtctgtatcattatgcagggctctctttttgtctctgataacttacctgctctagagtctactctgtctgaaattaatatacctactcatactcttttttgattagtgttagcagtatacctttcttcattcctttacttttaatctattaatatatgtgtttatatgtgggtttcttgtagacaacataccattgggtcttgtttttccatccactccgagaatatctgtgttttaattggtgtatttagaccattgatgtttaaagtrattgttgatgtagttgaattaatatctacaacattcgttactgttttctcttcattgccattgttctttgttcctgtttttgttctcacttgttttgtgccttttttggtt

SEQ ID NO: 954333 - DNA, 451 bp, Homo sapiens
aatgcatgtctgaatgctagtgattctcattagaggatgggaaggtggaggtaacaaaaaaatggatatttaacttgtaaaaaccaaaaatatgaataatatcagtataatatttctctttgtgataattttactataccataactgagatttgctaatttaaaaaataaactattttatcatattgggttatttgtttttgacattacatttctgataggaaattgtaggttttgatcactatcttgaagttttaaagtttaaaaagggcttcaagaacatttttattttgacgatgataggacactcccatctgaataatgtacatgaggttcacacagagcctggggtctgccrttccagggcacgggcatgttctgtgagtgtgtgaatgttgtctttcacaatcttgctgatggatgttaaactaaaaggagttttacagggttca

SEQ ID NO: 954334 - DNA, 710 bp, Homo sapiens
tttatgttgcagaaaaagaaatgaggtggctgtaggtggggccacatggctgctgagcctcctgggggctcctggatactcacatgtgtgagtgctcccatttcaacacttacaacttcctcctctccaccttgtctttctccaaagagggtgtgagaaatgaatatttgcacataaaatggaagacgctgtacatgtgacacacgcaaacattaaaaatatgggtcctggtgccaggcaggcttgctggcaatcctggctctccactgtatgacattaagcaacttactttgcctctctaagacttcctcatctgctaggtgggatgatactcacctcatggtttttgggtgggatttatgagattttgtatgcaatgagaaatggccggaacactgtaaaccctcaataaactctggttattaattgctgtgtgcatatgtgtgtgtgtgtgtgtgtgtgtgtgtgtgtgtgtgtatttttttttctacaaaggaaaaaaagtgcttaatttatgcattcataggaagtcatgtggcagggttttttaaagtcaagggtgaggacaaaggtggagtattgacagattcaggggacaargaggcattttcaacgagagctaatcctttttactagaaagggtgaaatgacacagaccaccctagactttattactccttaaaagaaaacaaaaatctcccctgggcatg

SEQ ID NO: 954335 - DNA, 753 bp, Homo sapiens
ccagtatgctagcagcagtgaatggaggctatgcgtgtggaaggttttcaacgtggttttgtcatgacaggtaccatatatgctgttgtgttctcttgaaacacagaactaaggccacagtggtacacgcctggcacagcctctggcctgtgactacattcaatgaaggtgacgaacaagatggagacttcgaaggattccacatgtcaaatgagaaaaaaaaaagtctgacctccttatatatgcaaaaaaaattatttcagagtctatcaataaacgggaagaaattgatattaaagaagtttgtaccttcaataatgaggctccagttgtttattcattggtggattgtgaaatagccaaaatgattttgaatcaaggtgatcgtgatattagtgatgatgaagatgatgttaatactgcaaaaaagtgcctctagacaacatgatgaaaatgtgtgatgggcttagtgaaggagtagagcagcatgcatttataacagaacaggaaataatgtaagtttataaaatccaagagagacatctaagacaaaaactgttgttaatgaggcagatgactctggaggaaatcgtttaaaaggccttccagcagtatgtctcctcatccctagagggcccatgcttctgatgtttcttcccacctaaaaaaaataaaatacagtctattgtagccttttaatcgaaacacaaacrcagcatcatagctagaggctgaaagcctgccgttgtttgc

SEQ ID NO: 954336 - DNA, 610 bp, Homo sapiens
atcactcgaacccgggaggcggaagttgcagtgatcgtgccactccactccagcctgggagacaagagcgaaactccatctcaaaaaaataaaataaaataaaaagttgaaagacatataccagtgggtgagatagacaaaataaaatagagaggcatatagagggttctatgtaaagaaaaaacagagcaattcaaaagtatgttaaaataagtgctcatcccaccactgcacagtcaagggcagagatgaaattttcctgcaaagataagttgtgctcaagcgctgtgatttaagtgaagggagcaagagcatgggccatggggcacagcaggaagactgatgtgattagaagaatgtgtgtaggatgggtatctgtgggtggatgagccaggacaagtggttagaaacttctttgtattttatactacaaatatcacaggccatattaaaaagagacagtaacaacaatttttagcaagrgagcatccatgagaattatattttaagaacattattctatgagatgaaagagatagaacttgtgtaagtatagcagccagaagattaatgatgaagataaagtccagatcacagccgtggtgatgag

SEQ ID NO: 954337 - DNA, 780 bp, Homo sapiens
taccaaagaggctggcagcatttggcccctgccttagagatctgtggaactttgaacttgagagagatgatttaaggtatctggcagaagaaatctctacatggcaaagcgttcaagaggaagcagagcataaaagtttggaaaattttcagtttgacaatgtaacagaaaagaaaaacccattttctggggagaaatccaagcttgctacagaaatttgcataaacaaaaagcccaatgttaatcattaagacaatggggaaatgtctccagggcatgtcagagactttcaaggcagcctctcctatcacaggcccagaggcctaggagggaaaaatggttttggggccaggcccagggccccctgctgtgtgcagcctagggacttggtggcttgtgtcctagccactctagctgtggctgaaaggaaccaaggtacagcttgggccatggcttcagagggtgcaagccccaagccttggcagcttacatatggtgttgagcctgcgggtatgcagaagtcaataattgaagtttgggaacctctgcttagattttagaggatgtacggaaacacctggatgttcaggctggtttgctgcgggggcacagccctcactgctagggcagtgtggaagggaaatgtggggttgggccccacacaagagtccccactggggtagtgccaagtggagctgaagaggggcactgtcctccagatccagaatgagagatccaccaacagcttgcagcttgcacctrgaaaagccgcagacactc

SEQ ID NO: 954338 - DNA, 633 bp, Homo sapiens
cccaagtctagtgcagtggaaacacacagatcgaatgagctccctaccctttgtcctgtctcttcactttyggctctagtttcagggatgtacagaacagtagacatgacattggcctctgagggaagactatttggatgtgaataccaattctgctacttactagctgtctaggcaaataactttatctctctgtgcctcggttatctcatctgtggaatgggaataatactaaaaacaactgtttcgttcacaggactttttgtgagggttaactcatttaattgagttaatagattgaaagtggttatacaatgttagtaagctatctctaattccctaagtcccattgtgtaaggtaaagtacatggtgcatgcttaataaacgcttgatgttattatttttactgttgtcccttagcttcccatgcttatagtgcttactggacaatttaaaatcattatattttatttcccctttcataaaagcagtcttcatataacttcagaagaaataatcatagctgttgcctgagatttactatagagtaatatataaacacaacattttcatttaaaacaataagtatttcatgtatgccaaagcattaagtgttactttctgaaatttag

SEQ ID NO: 954339 - DNA, 633 bp, Homo sapiens
cccaagtctagtgcagtggaaacacacagatcgaatgagctccctaccctttgtcctgtctcttcacttttggctctagtttcagggatgtacagaacagtagacatgacattggcctctgarggaagactatttggatgtgaataccaattctgctacttactagctgtctaggcaaataactttatctctctgtgcctcggttatctcatctgtggaatgggaataatactaaaaacaactgtttcgttcacaggactttttgtgagggttaactcatttaattgagttaatagattgaaagtggttatacaatgttagtaagctatctctaattccctaagtcccattgtgtaaggtaaagtacatggtgcatgcttaataaacgcttgatgttattatttttactgttgtcccttagcttcccatgcttatagtgcttactggacaatttaaaatcattatattttatttcccctttcataaaagcagtcttcatataacttcagaagaaataatcatagctgttgcctgagatttactatagagtaatatataaacacaacattttcatttaaaacaataagtatttcatgtatgccaaagcattaagtgttactttctgaaatttag

SEQ ID NO: 954340 - DNA, 682 bp, Homo sapiens
acaatacttctaaaactatactgtaagggccatttacctgattgcctccttctctcagtgagcgcaagaagaaactatgtattcccagcagagtttatttgaagatattttattccagaaatgtttaacttggtaatttttaccaaccctcctggagaaaacaattggaataaagaaaaataccccctagtaataaaagactaatttcaccagtaaattacaacttttaagcatttatgtacctaccattatagcttaaaaatatatactgcaaaaatcaacagaactacaaggacaaatggatatacctataatacttgtagtaaagccaacacaactgttgctaaaaaaaaaaatacaataatgatacagcagttttgaataatgcaatttgcatatttgacataacaggcatagatggaaaactagacccacaaagaatgcgcattcttttaaaccttgcacaagacatttaaaaaaactgatcatatgatgatgataaagcagtttaacaaatttttaaaaattggaattatacagcatttgttttctgactatagttccatcaaaatttacaattcataataaaaaaatttcaaaagtragctatattaaagatctttccaattatcaaagaataccattaagaaagtaaaaaagcagccagatgtggtggctcatt

SEQ ID NO: 954341 - DNA, 580 bp, Homo sapiens
gtgagttttattgtttcctctccttttgtctgacaaagatttgtcaacatctatcttgagtacaccaatatcagtwccattatgaatatttagtaggtacaactccacacccacatagaggccagtagtcacttaattttaggcaagatgagggctgactaatcttccaatacttcctcaagctttttgttaactcctttgttttcctgtgccagataactggaaaagaaagagttaaaaatggtgctttaccaaatcaaatattgctaggaatgttccactttaagtcagctattgatttaagaaaagttaggtgataacacaccttggcacagattgtactattgactgttttctaacaagtacagtcaaattttatttatccaaatagaattaatttgattacactaatggtcagatgacagagaaaataagaagcatttcagattaatattcatgtcttgcaaaaagacctcatttagttgacaggtttgaggtaagaaagactgtggtgaaggaagttcaactgtagatttcagttcaaaagaagagaggaaacttttctaactgcatttgcatc

SEQ ID NO: 954342 - DNA, 679 bp, Homo sapiens
atcacattctatacatctagtgtatgcaagtttctcagaggacagatatgcttggcaaaacttgtgcaagtgaaggtgggcctggtcctcccttccctcgtgtcataagccccttctccttacccctaacacaacagcccatgcactcttcttgcctttcccaggcactggtcctgcattctatttctgctgtcacagaaagcaatctccacttgaatagtgagggccaggtgccttggcatatgggaagagcacacaacctgctatgggaagacttgtcctttagttcccgctctgaaactgcccatcttggtggtctgggtgagccatataactgcttgagatttatcttccaaaaagataggtggaagtagtagtagtaataataataataacaataataatactttctcttctgtatgagctcctggttgagggtcaaatcaggtaacacatggaagtgtgttatgaacagcaaattaacatgaaaaataagatgttaaaaaacagatgaatatatgactttacttgggaaattccacacgttaaaagggggtctttgaagagggaagccccttgattccttatacggatgaagttatcgccstgaaagaaaagccttagcaagggttgatattttgaggttaaaaggtcctttttcactgtccagttattcctt

SEQ ID NO: 954343 - DNA, 632 bp, Homo sapiens
aaaaaaaaaaaagaatataaaaacctgaacatcaacaaaatgtcaattaacagtagagtagttaagcattgtttgtattctctaagtgaaatactttatagtagtgaaaataacctaaagctatactcagtaacatgaatgaatttaaaatacaattttgagcaggtataaaagaattcaaatttttatgtgtcatttatttgtagtttaaaacaacctaattaacatactggttatttgtgtgtaaatatatggcaaaactatgaaaaaagcaagagaatgacaatcccaaattgcagaaaaattcaggaaagagagcgaaatatgaatgttctgtttcttaatttgtgttgtaagcacataaatgtttatttcttcctttcttcttcccttcctcttcatctttgtcttcaaaattgcttgtgtcacccttttgtatatgtcacatatttcacaataaagggaaaagtttaaagtatgaaacaatcaagttttgggtgaatgtggagaaacagacattcatgtttctggtgagagtagaagttggtatgatcacatttcaaaacaacttgtcaatatttgatatgtttgaccctgcaaattgtctctgatccygaaatttagtagagaat

SEQ ID NO: 954344 - DNA, 521 bp, Homo sapiens
tctttcttctgtttctcctcttcctctttcccttccccttcccctttccctttcccttcccttccttccttcctttcttttctcactctgttgcccaggctggaatgcagtggtayaatcatagctcactgcagtccccatctcctgggcacaagtgatcctcccacctcaggcctctgagtagctaggactacaggcatgtgccaccatggctggctaatatttttttaagttattttcagtagagatgaggtcttgctatgtttcccaggctggtcttgaactcctgaactcaagcaatcttcccacctcagcctcccaaagtgctgggattgcagatgtgagccaccatgcctggcctctagctttgtttcttgtgacccatgtccaccttgtacacccattgcttcagaacagaaggtcccctatttggtaccacaattattccaggtgtctttggccaaattcctactcctggacattgctgaggatggcctctgcccacccaggctatcccttgt

SEQ ID NO: 954345 - DNA, 616 bp, Homo sapiens
tctatgtctataaaattcttgctggggtttagaaaggaaactgtatataaatytgaggagaattgacatctttattttgttgagttttccaatccatttacatagtatatctctccatttatttagacatccttagatttctttcatcagtattttgtagttttcagtatggaagttctgtttatgttttgttaaatttacactgaagtattttactttctgagcaattttaaatggtactgtattttaaattttcgggtctacatgtttattgttagtatatagaaatacacttgattcctgtatgtttatctcatgtccagtaacactgctggactcacttattagttctaggaattttctgtagattcgtttggaatctacacctgcacatagagacagttctagatccttttccctctgtatgccttttgtttccgttttgttgcactggctagaacttctttcactatgttgaataaaagttgtgagagtgaatacctttgctttgttcccagtcttagtgagaaagcatccagtctctcaccattaagtataatgttagctgtaggtttttgtaggtgtttttatcaagcaggagaagttcccactattc

SEQ ID NO: 954346 - DNA, 616 bp, Homo sapiens
tctatgtctataaaattcttgctggggtttagaaaggaaactgtatataaatctgaggagaattgacatctttattktgttgagttttccaatccatttacatagtatatctctccatttatttagacatccttagatttctttcatcagtattttgtagttttcagtatggaagttctgtttatgttttgttaaatttacactgaagtattttactttctgagcaattttaaatggtactgtattttaaattttcgggtctacatgtttattgttagtatatagaaatacacttgattcctgtatgtttatctcatgtccagtaacactgctggactcacttattagttctaggaattttctgtagattcgtttggaatctacacctgcacatagagacagttctagatccttttccctctgtatgccttttgtttccgttttgttgcactggctagaacttctttcactatgttgaataaaagttgtgagagtgaatacctttgctttgttcccagtcttagtgagaaagcatccagtctctcaccattaagtataatgttagctgtaggtttttgtaggtgtttttatcaagcaggagaagttcccactattc

SEQ ID NO: 954347 - DNA, 568 bp, Homo sapiens
ataggggaaattgcagcactgccttcttactgacagatgggagtggaaatccaggttttccacttagcatctgttgacatctgaggtggagggttccttattactgatggatgggagatctagtactccatctggtcgtcactggtgggcagaggtgagggctcattaccacctggtagggatggataaaagtcttggctccctagttggcctcctgtggtaccacttgggctggggtaatgggacacctcactgcagcctaatgaaagtggaaattcaggttccccggttggcctttgctgacattataggggtgggaccaccatttttactatggtatggagtagtgtggctattggctacaagttttttgtcttgctggatgggttctttcatggcctttggctagagagagtgggcttttgttgggactttttgtttgtttgcatttgttggcacttctgtgttgctggctgcttccacttcaaggatggaatgtatgaggcaaaaagaaaacccaagaaactcaccacygtgtagtttcttggattctggggtccctagctag

SEQ ID NO: 954348 - DNA, 545 bp, Homo sapiens
attaatgttgtcacgaaaaaaatttttaatcacactttttcctccataataaatttgttaattatgcaggggctrgggaagagaacagaaaaatgacataaaagtctgaagaactgccactggggtaaaatgagagaggggtacatgggacctctgtactagttttagaacttcctatgatgccatatttcaaaataaaaaggttttttttaggtcaaaggaattggtgtgagaatacattaaggggctatagtgaaactaaatttggccacttttgccaacttcagagcacaaccatcaatggcaataataatttgaatggctaacattaaaagtactgtaaccatctgaacctctgacaaaagcaaaagaagtatcctgaagtatttatagaacacttgttcttcaaactagtcattcatccatttgattagcttacagtacagggaaaaacaggcattgaaatgattatgatgtaattttgaaaatggctataataaagatatgtataatacacaaaaaaaagggaggaggctgtaagtgtg

SEQ ID NO: 954349 - DNA, 588 bp, Homo sapiens
tagtcatataaattgtgcaagcatcatttgtgttgtttaattgttcttgttgttgttgttgatttgtttctggtttttttgtttttgttttttcagtctttttcccattgggtttgaccaactctacctgacttgatcaaatgcaaaggaacattccaaattaggaggagtaaggcctctgaattggttagattcccacagctggggaaaaaaaagaaaaagaaaaaaaaaaacagccagcaaaagaaaaaagattgactacacagggactttatttatgtaacaaggccaccttttgctagccaagcgaaaccgaaagagcttcggccatcgccccacagtgtggttcattcttttgcccttttttcaccatgacagctgggattggtccttaaatcaagtcctttctggctttatattttcatatttatgttactttttaaatataagcaatttgtcccagctaaaatatggtaatgagmtataaaaggatgttttaaacagtttgatggttgaaagtcaccttaaaagctgctatcaagatgtgtgtgtgtgtatttaaaaggcctttatgctttctttctctcc

SEQ ID NO: 954350 - DNA, 669 bp, Homo sapiens
atacattcttctcactggcatagaatattctccaggttacaccatatgttaggccacaaatttaaaatacttgaaactataccaaatatcttaycagaacacaatggaataaaactagaaatcaataatactttggaaactatacaaatacatggaaattaaaaaggaactctggaaactatacaaatacatggaaattaaatgacatgttcctaaatgacagaccactgggacaaagtagaaattaagaaggaaataaagaagttttcttgaaacaagtgaaaacacaaacacaacacaccaaaccccatgtaatacaacaaaagcagtgctgagagggaattttatagcaacagacatctatataaaagtagtaggaaaatttcacacaatctaacaatgcacctcaaggaaacagaaaagcaagaacaaaccaaacccaaaattagaaggaaataaataataaagatcagagcagaactaaacaaaatagagactagaaaaacaatacaaagattagtgaagcaaaaagttgggtatttgtaaagataagcaaaatggataaactactagctagactaaccaagaaaaaaaggaagacccaaataaagaaaatcagaaatgaaaaaggagaaattacaactgatagcacagaaatataaaagatcg

SEQ ID NO: 954351 - DNA, 593 bp, Homo sapiens
tcataactcatccaggatggtgcaaggtagttcataaaatctgtgcactaaaatctcttgatgatgtaattttattctgttctttcaaggattttattcagatcccctagagctgtgtttgggaagcaaacactgtaaaagcccatacatcaccttcctagccggtcctctttgcctgtcctggggcaggcctagaatctcctgtacctctcctttcacttagactccattttcggtccttaggtgtgtcttctggggaactactgccatctcatattacttcagtctagcagtttccaatcacaggtgtttaggctccttggcaactgctaccaataccacttaatttgtcctcctatagagtctggaagtacctaggcaaatcaagtctctagaatagctgagaatatttcagcctcctccaaggtaaatgtgccaagctaagccaactaaagatcctggctttcctaatctaggtaacagcaaacacatggtgatggatggtaagaagcaagttctgaagaaaataaagttgcttttggttgctatttttrtgtaaagaaagataaagacacctgtgccttagagctctg

SEQ ID NO: 954352 - DNA, 422 bp, Homo sapiens
actgagaaaacagggactgtgtaaattgttttattactcaatgcataaagaattatgcctctggaaaagtgtggtttcattctgtactataaagatgaaagtcttggctatcaygtgggaaggcaagttcttgaatggaaatatgtgctaaggtagatggcccaacatgatggtttcttgcctgggagcttcttgttcctagtgctgctgttgcataactgagtgactttggctgaagatctgttccttttcttctttttccagagatagggtcttgctctgttgcccaggctggagtgcagtggtacagtcttggttcactgcagcctctacctccttggcacaagcaactctcccaactcagtgtcctgagaagttgggactataggcgcttgcctccacacaggataattgtttttttt

SEQ ID NO: 954353 - DNA, 614 bp, Homo sapiens
tcaaatctgactcccagccaacatggagtaatagggactacgtataccttcccacctgaaacaacttaaaaatagarcaacatatatctgaagcattttccaaacattaaacaaagagcagtccaggccagtgatccctgaaaggggatgcaaatcaaatgcccggagagacctgtgattgacctgcttactccctcaagggagttgcagtgaggggaacacaggcagagtccagcagtctccataagttgaaaagatacagctggaaatctgaggacaccaaagagactagtgttcctagggcagagtacagagaggtgagagctagcccagaggaacccttccagagatgtgaagtcttccactgagtactggatagcacatgtatgtaagtaaactattaatacttgagactgggaaaagaactaacctaaaggacaaaggggaaaacaaagcaaaacaaaacaaaaaaaacaggtctctggagcttaaaaaagaccaggaagagtttgtgttccaccagtcagagtggaaaaccttacaattcacagggcatctggtagagtactcagaagagcattagctcagtagaggaaaataattagccctaggct

SEQ ID NO: 954354 - DNA, 500 bp, Homo sapiens
  misc_feature 467, 471, 472, 473, 474, 475, 476, 477, 478, 479, 480, 481,482, 483, 484, 485, 486, 487, 488, 489, 490, 491, 492, 493,494, 495, 496, 497, 498, 499, 500: n = A,T,C or G
aaatctattaaaatcattgcatgtcacaatcagatcaagaaataattcgtccttgttgcayagaataagagaaggcatttcaaaacaatgattttttggattttcactcagctcatgaagcacccacttatcgagttttttcacctttccaattcacttcaaatgccacgtgaccatagaatggtcgacgttgagttctttggcaacttctcatgtagttgtaagaggatcagcttcgatgaatgctttcaatgggtcattgtcaatttccgacggccggtcactgtgctcctcatcttcaaggccttcgtctcctttgtgaaacttcttgaaccacactgtatgttcgttagcagtttctgggccaaatgcgttgttgatgttgcaagttgtctctgctgctttatgacccattttgaactcaaataagaaaatcgctctaatttgctttttgtctaacataattnccannnnnnnnnnnnnnnnnnnnnnnnnnnnnn

SEQ ID NO: 954355 - DNA, 739 bp, Homo sapiens
agcggccaacttacttggtaaatataaggcctccctgtttgctgagacaccacaatattgaaatcaggcctattaataaccctacaatttcctctaagtgttcaaatgcaaggaaatgtcacacatctctcactttaaatcataagctagaaatgattaagtttagtgaggaaggtatgtggaaagccaagactgatgaaaagctgggcctcttgcaccagttaggcaagatgtgaatgcaaagaaaaagttcttaaaggaaattagaagtgctacttctgtgaacacacaaatgataagaaagtgaaacagctttatttctgttatggagaatgttttagaggtgtggataaattaaaccagctacaatattcccttaaacccaaactaggacaaggtcctaattctcttcaattctatgaaggctgagagaggtgaggaagctgtggaaggaaagtttaagcagagattgattcataagttttaagaaaaggagccatctctgtatcataaaagtgcaaggagaagcagcaagtgctgatatattaatagaagctgcagcaagttatcaaaaacatctagttaacataattaatgaaggtgactatgtccaacaacmgattttcaatgtagatgaaacagccttgtattggaagaagatgccatctaggtctttcattgctagagaggagaagcctggcttcaaaaattcaaaggacaggctgtctctctcattagg

SEQ ID NO: 954356 - DNA, 559 bp, Homo sapiens
caaggatttacatatatatgatctttatggtagatatcctgtagmgattgtattaactctcagttcctgttgttactctatcatgcagaaaagttctacttggaacttattggagtagtgagttgaaattcaccatgcaacaacttttaggaacctagaaatgtgcaaaattggccagtttttatgatataaatatgtgctaatgtgcaatttatttgtactgtattaattttttggaaatattttatacctattgttggatctattttatgaaatgtaaaatgtatataaacatgtctcttcaaaaaatgctggtcaaattttcgctttttattttacctattactttaaggtcagctttccctaatgtacgtaggatatcactggagtggtttataattacttgaaaatttgtcagaatatcctggccccaaagtgaaaatctactttgatcagtaatgaaatattgatgtgttttgtgtcataacaaaagtgaaatttctgatccaaaagtgaaaatccactttgtgcaataagaaaatgttggcctcatagagac

SEQ ID NO: 954357 - DNA, 625 bp, Homo sapiens
aggccagggcaagagaaagaaataaaccatattcaaataggaaaagaagtagtcaaattgtctctgcagatgacatgattgtacatttagaaaaccccactgtctcagccccaaatctccttaagctcataaccaacttcagcaaagtttcaggatacaaaatcaatgtgcaaaaattagaagctttcctatacaccaataatacacagagagccaaatcatgaatggactcccattcacaattgctactaagagatcaaaatacctacaatacaacttacaagggaatttaaagacctcttcaaggagaactacaaaccagtactcaaggaaataagagaggacaaaaacaaatggaaaatcattccatgctcatggataggaagaatgaatatcgtgaaaatgaccatactgcccaaggtaatttatagattcaatgctatgtccatcatactagcaatgactttcttcacagaattagaataaactactttaaactttatatggaaccagaaaagagcctgcatagccaggtcaatcctaagcaaaaagaacaaagttggaggcatcatgstacctgacttcaaactacactacaaggcaacagtaaccaaaacagcatggt

SEQ ID NO: 954358 - DNA, 589 bp, Homo sapiens
agaaaaataattaaattacataaagaccttgaattacttatagtttcaggataaagactgtcaaacctgtaggaaggtagacacttgtgaaatggaaccaacagtaacagttacaaatacctaaagccatgtgcaaagtgcaggtagaagatagctttctaattttacagaaatagaaagatgaaatctattgcattacatgtatagttggtagcaatgactgttccaagaaaccacccattttctctttggttgagagtttattatgtttatgattagcattcttagtagtagaattagtgataaaatacaacaggtactgtagattgaaaatgtattggattactctgcattgctactgttttattactatattctccaatattgtattatacttcctcaatagactacaagcttttgcagtacatgtggaccatctttatattgtaggtgtctcatacagaatctgacacctaayatatattaaatatttctttgctgatctttgtaataaatgaataaatgtttaatttggctcttgagaactcttgttttgaaagaaaaaaagaccataaaacaaaataaattg

SEQ ID NO: 954359 - DNA, 654 bp, Homo sapiens
ctgagtcctgggtacgtttaatcattgagggccaggaaattgacttcctcctggacactggtgtggccttctcagtgttaatcttctgtcccagatggctgtccccaaggtccgttaccatccgaggaatcctgggacagcctgtaaccaagtatttctcccacctcctcagttgtaattgggagactttgctctttttacatggctttcttgttatgcctaaaagtcccacaccctgaatagggagggacatatttgccaaagctagagctattatctacatgaatatggggaacaagttgcccatttgttgtcccctacttgaggagggaatcaaccctgaagtctgggcattggacaatttggaagggcaaaaatgcccacccagtccaaatcaggctaaaagaccccaccgcttttccttatcaaaggcaatatcctttaaggcctgaggcgcatcaaggattacaggatattgttagacattcaaaagctcaaggcttagtaagaaaatgcagcagtccctgcaacaccccaattctagaagtacaaaaactgaatggtcagtggagactagtgcaagatcttagactcatcaaagargcaataattcctctatatccagctgtacccaacccctataccctgctctct

SEQ ID NO: 954360 - DNA, 737 bp, Homo sapiens
tgcaggtctgctggtgtttgctggaggtccactccagaccctgttttcctgggtatcaccggcagcggctgcagaacagcaaagattgctgcctgttctttcctctggaagctttgtccgagaggggcacctgccagatgccagccagagctctcctatatgaggtgtatgttaggccctactgggaggtgtcttcctgtcaggatacacgggggtgagcgacccacttgaggaggcagtctgacccttagcagagcttgaacactgtgccaggacatctgctgctgtcttcagagccatcaggcagggacatttaactctgctgaagttgtgcccacagccaccccttccccccaggtactctgtcagcccctgacttcgactgctgccttattttcagagatgccctgcccagagagaaggaatctagagaggcagtctggccacagtggacttgctgagctgtggtgggctccgcccatttctaacttcccagtggctttctttacactgtgagggtaaaactgcctacccatgcttcaccaatggcagacatccctcccctcaccaaacttgagcttcccaggtcaacctcagactgctgtgcctacagcgagaatttcatgccagtggatcttagcttgctrggctccattcaagtgggacccaccaagctataccacttggctccctggcttcagtcccctttccaggggagtgaatggttctgtctcagt

SEQ ID NO: 954361 - DNA, 630 bp, Homo sapiens
tgttgctgcaaaagatataatttctgtwttttatggctgtgtagtattccactgtgcatatgcaccacattttctttatctagtccagcattgatgggcatctgggttgactgcatgtctttgctatcgtgaatagtgctgcaatgcataaaatgcatgcatgttttagagagaacaatttattttcctttgggtatatatccagtaatggaattcctgggttgaatggttgttcaaagttccttgggaaatttctacactgcttttcaaactggctgagctagtttatatttccaccaacagtatataaacattcccttttgtccacatcttcaccagcatcccttggttttgactttttagtaggagccattttaactggtgtgagatggtatctcattgtagttttgatttgcatttctgtaataattaataatgatgaggaatttttcatatatttgttggctgtatctatgtcttctcttgagaagtatttatgtctttgcccattttatttttaaattatttatttttaattaaataagaattagacatatttatagggtacaacatgttttcatatatgcatacaatgcagaatgatgaaatcaagcaaattagcatctccat

SEQ ID NO: 954362 - DNA, 630 bp, Homo sapiens
tgttgctgcaaaagatataatttctgttttttatggctgtgtagtattccactgtgcatatgcaccacattttctttatctagtccagcattgatgggcatctgggttgaytgcatgtctttgctatcgtgaatagtgctgcaatgcataaaatgcatgcatgttttagagagaacaatttattttcctttgggtatatatccagtaatggaattcctgggttgaatggttgttcaaagttccttgggaaatttctacactgcttttcaaactggctgagctagtttatatttccaccaacagtatataaacattcccttttgtccacatcttcaccagcatcccttggttttgactttttagtaggagccattttaactggtgtgagatggtatctcattgtagttttgatttgcatttctgtaataattaataatgatgaggaatttttcatatatttgttggctgtatctatgtcttctcttgagaagtatttatgtctttgcccattttatttttaaattatttatttttaattaaataagaattagacatatttatagggtacaacatgttttcatatatgcatacaatgcagaatgatgaaatcaagcaaattagcatctccat

SEQ ID NO: 954363 - DNA, 643 bp, Homo sapiens
tggtagaccggtcatccattcctcttgtagggacactgtgaccagtgccataagtagataagagtcagattattctgattattgctttaactccactgtccattatgataactacgaacgtttygtctttggtggctaagtgctacaatttggcccttgttaacctgggattcaattatcctcattgcattgaaggattctggttcagttcgcattgtaatttctgacttatagagaagaaaaaccacagagttcttcaaggatgctggggatcgctttacaaatttatttctcatagctgtgctgaatggtgatccactggaccccactagggatgtgtgagcagttctgataagataaattcactctgacatttgagtctaagtctttgaatcccttcctctacagtgtaccaagcagttctggcacattaactttgtttagtttaggccattttttattctgtgtttcagccaagcaaccaccaaccaaacaaactgttaggctttttctagcccatcaagctacaacattgaatttggaatttctgcttagtgaactcatgtcaataaactggcctgatctaactttgtattccattcaccattatcccacactcttagtttccactcttacacatatt

SEQ ID NO: 954364 - DNA, 571 bp, Homo sapiens
ggaacctggacaactcgcagtcaagaccttccattcagtaacagtagtttcttaaaggctagttgcaatgttgaatcaggatccacatcagtgagcttcttgtatcgttcctgtagagtccatctttcacttagaatggacctttaacccatgcataattttttatgcattacttgggaaatattttttaattgagttctgcaagtctttcaaatgttgaaacttttcattaatattaaaacattgataaccagccaggtgcggtggctcacgcccgtaatcccagcactttgggaggccgaggcaggtggatcatgaggtcaggagatagagaccatgctggctaacaaggtgaaaccccatctctactaaaaatacaaaaaaaaaaaaatagctgggtgtggtggcacgcacctgtaatcccagctacttgggaggctgaggcaggagaatcgcttgaacctgggaggcagaggttgcagtgagccgagatcacgccactgcaytccaacctgggcaacagagcaagactctgtctcaaaaaaataaaacattgatcaccaataatctc

SEQ ID NO: 954365 - DNA, 617 bp, Homo sapiens
cccccagattggagaaacggactgatggatatagggaataagaattgaccagagcagaagcccaggagcagaaaaagrgaacaagtattgaggtaggagatactaaatgtcattgacacattgctggaggttcagtgtggacaagtttgaaaattaaaaactgttggcagaggagtgcatggggaggcagtcctagagagactgcagagttttttgagttttccttccatgagtcctaccagattcttacagtgcagactggagaaaaatttcctcttgcttccaacaggagaggtgggaaaagagccattttaaaatacgacagagcattcattctgttcttaataagaccagcactcaagagcaacaagtttaccagtgcctaactaactgcggtttcaccacacgttaactaacctaggagaaaagaaatactcaactccagcctctctagctttcctgtctcacccaaaatgaaaaagcaacaaaacaaaaccgagaagcactttcgaaggtcacagcacagattccctaaaagtcagagtccccatcataggactacgaaatacttcccctccccaatatcttaccaccatatccttggggctcccgtatga

SEQ ID NO: 954366 - DNA, 622 bp, Homo sapiens
acttgtgtcattgttacttaaaaatacctaccatgaacacacaaacattctaatatcagcattgtgttgtcacttgcgctttggactttgaaaagtttcatacaataaaagtctaggttttatctaggccactgaagacacttgtgcaagttgcaccctgcccaagggctccattctgtgcgcccctatctgggtcgtggctgcctacaaccaaaactttttctaattcataaaaagtcaccgtatggattagcagctgtcccgattctgtaaataagataatctgatttatataataactatgggacaaaggactcttaacccagacagttctgaaaaaataaaaactgtcaaaacaagaatcattaggctgttgatatggtttggctctgtgtccccacccaaatctcacctggaattgtaataattcccatgtattaagggtgggactaggtgaaggtaattgaatcatgggggaggtttctcccattctgttctcctgatagtgaatgagatgagttcttacaagagctgatggttttatctyttaatgctttgctttgcacttctctctcctgccaccatgtgaagaaggacatgtttgcttccccttccaccatga

SEQ ID NO: 954367 - DNA, 590 bp, Homo sapiens
tcctcaaaaattaaaaatagaattgtcatacgatctagcaattccacttctagatatatacaagataactgaagacaggtgtccaaacaaaaacacctacatgagtgttcataatagcattattagtaacatccaaaagcaacccaaatgtccagcaactgataaataaagacacgatggtatatccatacaatagaatatgactcagtcataaaaggtacttctatatggatggaccttggaaacatgctaagtgaaagaagctagacatataaagccacaccttgatcaagctcatttacatgaaatatccagagtgggcaaatctatagaggtaaaaagcagattagtggtttctggggcctgagagggagggaggaaacagggaatggttgcttaatgggcacagggttttttttgtggggttacaaaaatgtttcggaattagatagtggtgatgtttgcatcacayagtaaatgcactaaatgtcactgaattgtacactttaaaaataaattttactctgcatttttcaagtatacaacatgatggtaagggatacatgtagatagtaaaatgcttactatag

SEQ ID NO: 954368 - DNA, 598 bp, Homo sapiens
tagacttaagcaccatctaccggatcacagtccaaaactttaacaccaaaaatattttgctaatatgccccmctgtgaaaccaaggacaagaattatgctacagataaagacactacacaaagtcttggctctctgaaaacttccagaaaagaaggctactgactgtactcgatttacaatgcagttaaaggaaaaccagcccacacagattagaaagaacaagcagaaaaactttggcaactcaaaaaaacagagtgtctttttttccccaaacagttgcactagttccccagcaagggttcttaactgggctgaaatggctgaaatgacagaaatagaattcataatatggataggaatgaagatcattgagattcagaaacatgttaaaacccaatctaaggaatctaagaatcataataaaacaatacaggagctgacagatgaaacagccattataaaaaagaatcaaactgagctgatagggctgaaaaaacacaagaatttcataatgcaattgcaaatattaacggaagaagagaccaagctgaggaaagaatttcagagcttgaagatgggtgccctgaaataaatcag

SEQ ID NO: 954369 - DNA, 598 bp, Homo sapiens
catcacaacattattacaatagccaagatatgaaaactgtctgcctgttgatagatgaatacagaaaatgtgcacccacasatacacacgcatatatacacatacatatatacacacacaagggtatattattcagccatttagccataaaaatcataaaattctgccatttatgacaacatgaatgaacctggaagatattattctgtgaaataagccagacacaaaagacaaatactgcataatcttatttctatgtggaatctaaaaatgtctaacttatagaaacagcatagaatggtggttaccagggtttgggggatagggtaaagagggagatgttagtcaaagagcataaactttcagttacaagatgagtaagttctggatatcaaatgcctaccttgctgaatatagttagtgataatgcatacttgaaatttgctgagagagttgatcttcagagttctcaccacaaaaaagagtatctgtgtaaggtgatggatatgtttattagcttgattttagtaatcattttataatatatgtatatcaaataatcacattttgtatcttaaataaatataatttttatttg

SEQ ID NO: 954370 - DNA, 583 bp, Homo sapiens
atgtataggaatgaagatcattgagattcaggaggacagcaaaacccaatccaaagaaaccacaaatcacaataaagtgatacaggagctgaaagacaaaatagccagtataataaagaacctaatgggtccgacatagctgaataacacagtacaagaatttcacaatgcaatcacaagtattaacagtagaataaaccaagctgaggaaagaatctcagaactcgaaagctggctttctgaaataagacagtcagacaaaaataaagaaaaaagaataaaaaggaatgaacaaaacctccaagaagtaggggattatgtaaagaagccaaatctacaaatcactggcatccctgaaaggaagggggagaaagcaaacagtttggaaaacatatttcaatatattgtccatgaaaacttccacaaccttgctagagaggacaacagtcaaatacaggaaatacagacaactccygcaagattctacacaggaagatcatccccaagacacataattgtcagattttccaaggtgaaaatgaaagaaagaatgttaaaggcagccagaaagaaaaggcaggtt

SEQ ID NO: 954371 - DNA, 583 bp, Homo sapiens
atgtataggaatgaagatcattgagattcaggaggacagcaaaacccaatccaaagaaaccacaaatcacaataaagtgatacaggagctgaaagacaaaatagccagtataataaagaacctaatgggtccgacatagctgaataacacagtacaagaatttcacaatgcaatcacaagtattaacagtagaataaaccaagctgaggaaagaatctcagaactcgaaagctggctttctgaaataagacagtcagacaaaaataaagaaaaaagaataaaaaggaatgaacaaaacctccaagaagtaggggattatgtaaagaagccaaatctacaaatcactggcatccctgaaaggaagggggagaaagcaaacagtttggaaaacatatttcaatatattgtccatgaaaacttccacaaccttgctagagaggacaacagtcaaatacaggaaatacagacaactcctgcaagattctacacaggaagatcatccccaagacacataattgtcagattttccaaggtraaaatgaaagaaagaatgttaaaggcagccagaaagaaaaggcaggtt

SEQ ID NO: 954372 - DNA, 613 bp, Homo sapiens
atctgtgttttagcaaagtccccaggtgattcatatgtacattacagggataaagtacatgacagggtgaggcayactgatctaggttacagcagggtaagatcacacccagaaaactgctcttaaatcccattgctttccagtcagggaggagagcaaagctgctctctgacagccagccaagatgcccacacctcagtgccatgtgaagggacatcagccaggagacaggctttgcagctagcaggttgtgtgctggttaaggcaagagtagctgctgtaacagacaggccccctgggtctcagtgtctgcatgtcatagatgtttatttctcactcacgtaaaatcaaagcagcagggagggctctgctccccaaaaaactagaagtgatcccaggttttccccctcaccctccactaactgcaaggaaaggtggaaaatgcatgctcaggaagaaggtttggggaacagccaccagtctctaccatagttctctggaaacgtttagctcacattgttcatttattcattcaacgaattaataatctactgagtagtgaataagattgatttatacatccatgtgttcatttattcattcagcaaacatt

SEQ ID NO: 954373 - DNA, 613 bp, Homo sapiens
atctgtgttttagcaaagtccccaggtgattcatatgtacattacagggataaagtacatgacagggtgaggcatactgatctaggttacagcagggtaagatcacacccagaaaactgctcttaaatcccattgctttccagtcagggaggagagcaaagctgctctctgacagccagccaagatgcccacacctcagtgccatgtgaagggacatcagccaggagacaggctttgcagctagcaggttgtgtgctggttaaggcaagagtagctgctgtaacagacaggccccctgggtctcagtgtctgcatgtcatagatgtttatttctcactcacgtaaaatcaaagcagcagggagggctctgctccccaaaaaactagaagtgatcccaggttttccccctcaccctccactaactgcaaggaaaggtggaaaatgcatgctcaggaagaaggtttggggaacagccaccagtctctaccatagttctctggaaacrtttagctcacattgttcatttattcattcaacgaattaataatctactgagtagtgaataagattgatttatacatccatgtgttcatttattcattcagcaaacatt

SEQ ID NO: 954374 - DNA, 683 bp, Homo sapiens
gaacaacatagtcctggtggcttaaacaacaatttatttytcatagttctggaaaactgtgaaggaggctgggaagtctaagctcaaggtgctggcagattctttgtctggtgcgggttctcttccttgtttgcagatggctgtcttcttattgtatccttacataatcaagagaaaaataatctgtctcatgtttcttctcaaaagggcactaattccattcatgagggctctaccttcatgacctcatcacctcccaaaggccccacctcctaacaccatcacattgcaggtgaggatttcaacatatgaactttagagggaggctgggtggggtggctcacatctgtaatcccagcactttgggaggctgaggtgggtggatcacctaaggtcaggagttcaagaccagcctgggcaacatggtgaaaccccatctctgctaaaaatacaaaacttagctgggcatggtggcaggctcctgtaatcccagctactcaggaggctgaggcaggagaatcacttgaacccgggaggtggaggttgcagtgagccaagattgtgccgttgcattccagcctaggtgacaaaagcaaaactccatctcagaaaaaaacaaaacaaaacaaaactgtagagggtcacagttgtagtgaccctcacagtttcagggtcacaacatt

SEQ ID NO: 954375 - DNA, 646 bp, Homo sapiens
aacaacatagtcctggtggcttaaacaacaatttatttctcatagttctggaraactgtgaaggaggctgggaagtctaagctcaaggtgctggcagattctttgtctggtgcgggttctcttccttgtttgcagatggctgtcttcttattgtatccttacataatcaagagaaaaataatctgtctcatgtttcttctcaaaagggcactaattccattcatgagggctctaccttcatgacctcatcacctcccaaaggccccacctcctaacaccatcacattgcaggtgaggatttcaacatatgaactttagagggaggctgggtggggtggctcacatctgtaatcccagcactttgggaggctgaggtgggtggatcacctaaggtcaggagttcaagaccagcctgggcaacatggtgaaaccccatctctgctaaaaatacaaaacttagctgggcatggtggcaggctcctgtaatcccagctactcaggaggctgaggcaggagaatcacttgaacccgggaggtggaggttgcagtgagccaagattgtgccgttgcattccagcctaggtgacaaaagcaaaactccatctcagaaaaaaacaaaacaaaacaaaactgtagagggtcacag

SEQ ID NO: 954376 - DNA, 646 bp, Homo sapiens
aacaacatagtcctggtggcttaaacaacaatttatttctcatagttctggaaaactgtgaaggaggctgggaagtcyaagctcaaggtgctggcagattctttgtctggtgcgggttctcttccttgtttgcagatggctgtcttcttattgtatccttacataatcaagagaaaaataatctgtctcatgtttcttctcaaaagggcactaattccattcatgagggctctaccttcatgacctcatcacctcccaaaggccccacctcctaacaccatcacattgcaggtgaggatttcaacatatgaactttagagggaggctgggtggggtggctcacatctgtaatcccagcactttgggaggctgaggtgggtggatcacctaaggtcaggagttcaagaccagcctgggcaacatggtgaaaccccatctctgctaaaaatacaaaacttagctgggcatggtggcaggctcctgtaatcccagctactcaggaggctgaggcaggagaatcacttgaacccgggaggtggaggttgcagtgagccaagattgtgccgttgcattccagcctaggtgacaaaagcaaaactccatctcagaaaaaaacaaaacaaaacaaaactgtagagggtcacag

SEQ ID NO: 954377 - DNA, 570 bp, Homo sapiens
aggaggaatgaacccaaagaagtaaactgcccagcattccaggctaccttgacctgaaggcgtttgttaataaggaagaaacatccaggacactgagttcctcaactgtgcctggaggggagcatcgaaatcagccacccacctgcactcccagtccttttaggctcaccttcaattcatatgtctatgggatgctctaggaagaggaacaaggcagagcctctgccttataatctgctgggtttgaggaaggagaagccaggcagttgtccctggagattgggttgtttgttttatcttatccgccttaggaagcagaaagcagtatggtaaaaggagaggacccccgatgaggaaggaaaagaaggctgtgtatggtagctcacgcctgtaactcagcacttcaggaggctgtggtgggaggactgcttgaggccaggagtttgagaccagcctggacarcatagtgagaccctgattctacaaaaaataataaattagccaagcgtggtggctcacacctatagtcctagctactccgaaggccgaggcaggagaattgcttgagct

SEQ ID NO: 954378 - DNA, 670 bp, Homo sapiens
ggctgaggcatgagaatcgcttgaacccagaaggtggaggttgcagcaaacagagatcgtgccatggcactccagcctgggagataagagtgagagtctcaaaaaataaaaataaaaaaawaaataaataaataaataaataaataatacaattctttagagatgaatatttatcttgaaagttcatataaaacactctacactcatcactcatcccaaaaatcagccacaaaagagcagtgaacaaaggataaaaaaccatagcttttcacctagtcttcatctcccaatgccaaagggctcatggacccatcgtgggatcacaatgagaaaattagaagaatccttaataatcaagcagaacagagtcagcagatgcctttatttttacaaataaagttttattagaacatagccacagtcatttgtttacatatcatgtgcagtgactttgatgccacagtgacaaaattaaatagttgcactacttaaactctgtataacactcggagcctaaaatatttaccatctggccctttaaaaaaaagtatgccatatgacccttggttttcagatggggaaacaggggcccgtacagcaagcagatgagccatccccaaggtcatccagcaatttgaggctctggatctttgagactagtgcctcccac

SEQ ID NO: 954379 - DNA, 685 bp, Homo sapiens
atgaatctgggtgctcctgtattgggtgcatatatatttaggacagtttgctcttcttgttgcattgatccctttaccattatgtaatacccttctttgtcttttttgatctttgctggtgtaaagcctcttttatcagagactaggattgcaaatcctgcttcttttttactttccatttgcttggtaaatattcctccatccctttattttgagcctatgtgtgtctttgcacgtgagaggggtctcctgaatacagaacagcaatgggtctttactctttatccaatttgccagtctgtgccttttaattggggcatttagcccatttacatttaaggttaatattgttatgtgtgaatttgatcctgtcatcatgatgctagctggttattttgcacattaatttatgcagtttcttcatggtgtcattggtctttatattttgttatgtttttgctgtggatggtactggtttttcctttctctatttagtgcttcctcttgtaaggcaggcctggtggtgacaaaatccctcaacgtttgcttgtctgtaaaggattttatttctccttcgcttatgaagcttagttyggctggatacaaaattctgagttgaaaattcttttctttaagaatgttgaatattggccctcactctcttctggcttgtagggtttctgca

SEQ ID NO: 954380 - DNA, 609 bp, Homo sapiens
actatcttttaattaagctgccttttaactgttgaggtcttaaaaaatccttttaaatattattaccatattttagctgggaaaagctgctgatatttcaaaggtaaaataaatctcaaaccagaaaggacttgattcataaccaaccaacccaggctgtcatgctaaaaaaaagggcagaatctttgctgctgaactactgcatagggtgactaccattgctcctttagtttagtttggctagcagaaggtggtcttgccatgtaaataaagcctctcaggtaatcaaaatgtttctttttttacttttgctggtgtttttttcttttcttttttttttcagctacaggaatttagccaattcagaggaaatcttccccataattatggaactttcttacagattttaccaagtctggtcaacccaataagaaaaagactgaaataacaacaacaacttcaacaaataaaaaaaaacagttaagctaaataaacagatgattgcagaatttatgtgattactgggtactctaatggtaaggagaaattaagaccagctagttgttaatcttaacttttagtcattmaggagaatttccaagacaaaac

SEQ ID NO: 954381 - DNA, 624 bp, Homo sapiens
atacggcttaggctgaaaacttctatcgtcttagaaatgggaataaacctcacactcacygtccctgttggaagcaagctgaaactccaaaaaaaaagttgcctgttgtccatcatcatggtgaagcggcgtcgttgtctggggtaagtacctggggttcattgtctcgtaccaagattaaggacagagttccctccattgttcattgatttgtaaaccaaaatgtatctgtgacaggtattaatcaattgagaagagttttttatttttatttatttatttattttttgccaaggttcaggacagatccaggtgtctttctccaaagatgattatgatggtgttaatatttaaaggggaaagtggcctagaggggaacaagggagggtatgatcatattactgtatccacatgttgcaggagaaatggagcaggtacaggaatagtcaattatgtgttcttctcatgctcagtaaatcagaactttacataagttcaggtgaacatagagtagctacctggggagatatttcacctttttatctgtagtgctctgcttaagaacaaaggaaaaaacagcttcttgcatgattcagcttttagcttaatttttttcctttaggc

SEQ ID NO: 954382 - DNA, 632 bp, Homo sapiens
taggaatacggcttaggctgaaaacttctatcgtcttagaaatgggaataaacctcacactcaccgtccctgttggaagcaagctgaaactccaaaaaaaaagttgcytgttgtccatcatcatggtgaagcggcgtcgttgtctggggtaagtacctggggttcattgtctcgtaccaagattaaggacagagttccctccattgttcattgatttgtaaaccaaaatgtatctgtgacaggtattaatcaattgagaagagttttttatttttatttatttatttattttttgccaaggttcaggacagatccaggtgtctttctccaaagatgattatgatggtgttaatatttaaaggggaaagtggcctagaggggaacaagggagggtatgatcatattactgtatccacatgttgcaggagaaatggagcaggtacaggaatagtcaattatgtgttcttctcatgctcagtaaatcagaactttacataagttcaggtgaacatagagtagctacctggggagatatttcacctttttatctgtagtgctctgcttaagaacaaaggaaaaaacagcttcttgcatgattcagcttttagcttaatttttttcctttaggcata

SEQ ID NO: 954383 - DNA, 624 bp, Homo sapiens
atacggcttaggctgaaaacttctatcgtcttagaaatgggaataaacctcacactcaccgtccctgttggaagcaagctgaaactccaaaaaaaaagttgcctgttgtccatcatcatggtgaagcggcgtcgttgtctggggtaagtacctggggttcattgtctcgtaccaagattaaggacagagttccctccattgttcattgatttgtaaaccaaaatgtatctgtgacaggtattaatcaattgagaagagttttttatttttatttatttatttattttttgccaaggttcaggacagatccaggtgtctttctccaaagatgattatgatggtgttaatatttaaaggggaaagtggcctagaggggaacaagggagggtatgatcatattactgtatccacatgttgcaggagaaatggagcaggtacaggaatagtcaattatgtgttcttctcatgctcagtaaatcagaactttacataagttcaggtgaacatagagtagctacctggggagatatttcacctttttatctgtagygctctgcttaagaacaaaggaaaaaacagcttcttgcatgattcagcttttagcttaatttttttcctttaggc

SEQ ID NO: 954384 - DNA, 572 bp, Homo sapiens
tagagatggagttttgccacattacacatgctggtctcaaactcctagactcaagtgatctgcmcacgttggcctcccaaagtgctgagattacaggcatgagccatagtgcctggtcccttttgtgttttgtaaattaggtttaacagttgaagaaaaattataataatgcctaatgtggttattaatagatgtagaggaaatatttaagataattttattataaatgagggagggtgaggagatataagggaggttaggtttctacactcctctccaactagtaacatgtcgacaccaatgatgttgtatacatatgatgtgataccattatatatatataatgtgatttctttgagtacatttttcagtggccactaaaaaaggtatacaaaggaacacactttaaagcacaataaataaagtggaattctaaaaacttttaaagtaacccataggcaggcaggataaaagaatacagagaaactaaaaacagaaaacaaacaggaaacaaaaataaaattgccctaatgtatcaatgattacatcaaatgtaaacgatctaaatatat

SEQ ID NO: 954385 - DNA, 642 bp, Homo sapiens
ccctggggcagtggctgagtcctcgttaggccccctgccaagagagtgatgtgggcatctcacagggcccataagaggtggcatttctaggggcagggtctggatcagggcagtcttttgggtgccaccagaagactcaggtgggaagagctgagtagagaagagccagatgggtgggggggaccaggtgagtgttgcttatgcacctccaatgatggagacctcacagaatctcagaagaatgcagctcctctctagggagcttggactttgaaaagtgcttcttgggccagccacagtggctcacgcctgtaattccagcactttaggaggccgaggcgggtagatcacgaggtcaggagatcgagaccattctggccaacatggtgaaaccccatctctactaaaaatacaaaaattagttgggcgtggtggtgagcgcctgtaatcccagctacttgggaggctgaggcaggagaattgcttgaaccagtgagttggaggttgcagtgagcttgagattgtgccactgcactctggcctggtgacagagtgagactctgtctcaaaaaaataaaaaatwaaaaaataaaaataaaataaaaatacaaaaattagctaggcatagtggcgcatgcctgt

SEQ ID NO: 954386 - DNA, 588 bp, Homo sapiens
gcatttatcaaaacccatagaactttacagtacagagtgaaacttaatgtatgaaaattgtaaaaaaaattatttctgaggtcagagggtcacagggtggaatatagaacatgactaaacaattaacaatgytacaaacatatgataaaacctcactgaagggactggcagaaaaagttgctagcctgaataactttagaaatgagcagagattgtaagactaaagggaaaaataattgtatgtaagcacggtaatctagttgataaagtctcccatgggggaacaggttaacaattctgaaaccatcatacatctaatctggaactgaagaattaagtaaatggaatgtggatagcaggaagcacgagccaggtttctcactgttgaagtgggagcttacaggaaagcatggggagaaggcaagaatgattcatatggttatggattagagttagagacatcagtatgaactcatgcttacattattataggtacagacgtttacatatagaaatatttatagatacgtatatatactgaagttagctacacacacacacacacacacacacacacacacacacatt

SEQ ID NO: 954387 - DNA, 588 bp, Homo sapiens
gcatttatcaaaacccatagaactttacagtacagagtgaaacttaatgtatgaaaattgtaaaaaaaattatttctgaggtcagagggtcacagggtggaatatagaacatgactaaacaattaacaatgctacaaacatatgataaaacctcactgaagggactggcagaaaaagttgctagcctgaataactttagaaatgagcagagattgtaagactaaagggaaaaataattgtatgtaagcacggtaatctagttgataaagtctcccatgggggaacaggttaacaattctgaaaccatcatacatctaatctggaactgaagaattaagtaaatggaatgtggatagcaggaagcacgagccaggtttctcactgttgaagtgggagcttacaggaaagcatggggagaaggcaagaatgattcatatggttatggattagagttagagacatcagtatgaactcatgcttacattattataggtacagaygtttacatatagaaatatttatagatacgtatatatactgaagttagctacacacacacacacacacacacacacacacacacacatt

SEQ ID NO: 954388 - DNA, 568 bp, Homo sapiens
ggagtcagtgatgtgaatatttgggacaagcatatttcatgcataggagaccccccagtaatagagatgtagaaaaagagcttgttttgtgtgtttgaggaccagccaaaggcaagaatagctggagtgcagtggctaatgtgtaaagactagagagtaagctgcaggacacagtgacagcaaggagaatggtgggaggatcttttaatactccaggggaaagtatgttgcttggactctggtggtaatcatgggtgcaataagaattaatgctgatttagaaaatattttcaagtagagtcaaaaaagtcttatacagtgtgaaaagagaaagaggaacagtggtgccattaactgagataaggaagaccatggatgtattaggccattcttgtgttactataaaggaatacctaagactaggtaatttataaagcaaaggggtttaattrgatcacagttctgcaggctgtaaaagcatggcattaatatctgatttgcttcctggcacgcttgaaggtatttcctgaggcccaggcagaaaatgaagcaggagcacacacatcac

SEQ ID NO: 954389 - DNA, 568 bp, Homo sapiens
ggagtcagtgatgtgaatatttgggacaagcatatttcatgcataggagaccccccagtaatagagatgtagaaaaagagcttgttttgtgtgtttgaggaccagccaaaggcaagaatagctggagtgcagtggctaatgtgtaaagactagagagtaagctgcaggacacagtgacagcaaggagaatggtgggaggatcttttaatactccaggggaaagtatgttgcttggactctggtggtaatcatgggtgcaataagaattaatgctgatttagaaaatattttcaagtagagtcaaaaaagtcttatacagtgtgaaaagagaaagaggaacagtggtgccattaactgagataaggaagaccatggatgtattaggccattcttgtgttactataaaggaatacctaagactaggtaatttataaagcaaaggggtttaattggatcacagttctgcaggctgtaaaagcatggcattaatatctgatttgcttcctggcamgcttgaaggtatttcctgaggcccaggcagaaaatgaagcaggagcacacacatcac

SEQ ID NO: 954390 - DNA, 458 bp, Homo sapiens
aaaaaacctgacttaaaattccagcttggccaattacactttccataaattattttctctctgccttggtttcttcacttgtaaaaagaaaataagattattatgaggatgaaataaaatagtatatgtaagcaggaccggttatataattagttgggcctgatgcaaaatgaaaaagtgggctccttgatcaacaactattaagaattacaagatggtgacagcagggcattaatccaaatgtggggcccttttaagtgcaggaccttatgcaactctacaggtcacatgcctctgatgccagacctgtgtgtgagaaatagagtgtaaaacacatagcasgtgcttaatatatggtaactgctgtccctttctttgctattttcattcagatttccttttcctgaatgaaaaaatatgtattcactgtaatcagattttgttttacctgtagtatt

SEQ ID NO: 954391 - DNA, 595 bp, Homo sapiens
ggggtactgcctagtggagctgtgagaagagggccaccatcctccagaccccagaatagcagatccactgacagcttgcaccatgcacctggaaaacccacagatactcaatgccagcctatgacggcagccaggagggaggctgtaacctgcaaacccacaggggcagagctgcccaagaccatgggaacccacctcttggatcagcatgacccagatgcaagtcatggagtcaaacagatcattttggaactttaagatttgactgccctgctggatttcggacttgcatggggcctgtagcccctttgttttggctaatttctcccatttggaatggctgtatttacccaatgcctgtacccctattgtatctaagaagtaactaacctgctgttgattttacaggctcatagggagaagggacttgtcttgtctcagataagacactggactgtggacttctgagttaatgatgaaatgagttaagactttgtggggactgttrggaaggcatgactggttttgaaatgtgaggacatgagatttcggaggggccagggcagaatgatatggtttggttgtgcccccacca

SEQ ID NO: 954392 - DNA, 442 bp, Homo sapiens
ttgcagacagcctattgtgggaccttgtgatcatgtaagttaatacttaataaactcctatatatataatatatatatggatatatataaamatatatgatatatataaatatatatggagatatatatttatatatatcacctattagttctgtgtctctaagagaaccctgactgcagcactgcaacccctttctaggacatccctgaaggacagtggtgaagtgaagggaaatcttctctgtgggcagaactttgagcagtgcacctagttgtgcactttccatggaaggagaaatggccagatgtgtgattatatactgattcatgggctgtagccaatggttaggctggatggtcagggatttggaagaagcatgattggaaaattggtgacaaagaaatctggggaagaggtatgtggatggacctctctgaatgg

SEQ ID NO: 954393 - DNA, 634 bp, Homo sapiens
atgatttaatttttttaaaatttttttgtgtgtatttgttttgttttttgatttgaagttaccatgatgcttgtaaatactaccttataacttgttattttaagccaataacaacttaacactgtttgcataaacgaacaagcaaaggaaaactaataaaaactctacactctgtcaagttaaactctagtttaacttcatctcctgctttttaactttttattgcttctatttatatcttattgtaccatctgtgtcttgaaaaattgttgtggttattatttttgattggtccattgtttagtctttctacttaagagtaggttacacagcacagttaagcattatattctgtgttttacagtgtacttaccattagcaatgagttttgtacttttagatgaatttttattgctcattagtgtccttttcttcctgattgaagcattctctttagcatttcttgtaggacagatccggtgttgatgaaattcctcagattttgtttgtctggggaagtttttatttctccttcatatttgaaggatattttcaccagttatactattctagggtaaaargtttttttttttaatttagcactttaaatatgtcatgttattgtcctgtaagg

SEQ ID NO: 954394 - DNA, 716 bp, Homo sapiens
tgcagatggagacagccttcctgaggggccagggggaacagcccttgtaaaaactgaagccaagtcacagaggcccagggatcctcaggaacwgctccctgctgtacaaatgggagtctggccctggtgcagaagtcccttctgctgccctgcccataggctttcgggggactctcctgccagtgacgtaactgttaatacccagcctggggcttttgctgattcctccagggcctggctaaaggctgacagccttatctcctagggaaaaaactgggtggcacagaaaatgggctttgggagaggtaggtttggaggagagcaagcaagaggagagagcctgactcaggagaagcaagcaccagagccctccaaggctgagggtgaaaatagatggagagtggaaatggggctcagcgcgccaggagggagccctgagtaggcggtgggtggtgggctgtgctccctgagaggacggaggggtggatgggggaatggaggctgcagccaaggtcttttacagtgacttgctcctaagcccagaccaagctggacattgtagccaaggtgtattctctgcagccagctagggctttgctccaggctcctcaggcccaggggtcagaagttctgggtaactccagatcagcagccccacggcaaagtggggctgagggcagaaatggttgcgtccaggagaggctagtggtgtgctg

SEQ ID NO: 954395 - DNA, 759 bp, Homo sapiens
gtaaagaattaggcggcctttgtctttggtttctgggaagtaacctctaattctctggaatttcctgagtgataggagtattcattattcacggtggactcctgggatcccacttgatagtttctgctaacacagtgactcacggaagacccctggatagtttatgtttgcaagatgactcaggctgggagctggccacccggaaaagccaaccatgtagttagagttggggctttgagtcatgtgataccagtccaacctccaggaaggaaaagggggctagagattgagttcaaccacatagccaatgattcaatcatacctaaataacgaagcctcaataaaaactccggataccaaaactcaggagaacgtccctggtcagagtattttcatgcttcaatgctgggagggcaatgtgtccctgagaatgagggaagcttcacatttgggactctctcagactttgccccaggcacctcttcttctgtttctggtctgtcctttttgctataatagaactgcaatcataacatagttttttctggagttctgtgagttgttttagcaaattactgaccagagagtggctgtgggaaactccaaatttgcagccagctagtcagaagaaaggatgrcctggtaattcctgaacttgctgctggtgtctggagagcagttttgtggaggaatgtgcccttaatgttgagttcccattttttaagtgtacaattcaatagcttttggtaggttcacaga

SEQ ID NO: 954396 - DNA, 548 bp, Homo sapiens
taataaaatacttagagatatatttagccaaagaggtaaaagatctctatgagaactacaaaacactcctaaaagaaatcagatacgacacaaacgaatgaaaacacatgctcatgtgaggaagaacaaatattgggaaaaggatcatagtgcccaaagcaatctgcagattaaatgcaattcctgtcaaaataccaacatcatttttcacgaaattagaaaaaactatcctaaaacccatatggaaccaaaaaagagctcaaatactcaacgcaaacctaagctaaaagagcaaatctggaggtatctcattaccggatttcaaattatactaaggctatagttaccaacacagtatggtagtgatgtaaaaggagacacatagaccaatggaacagaatagagaaccaataaataaagccagatacatacagccaactgatctttgacaaagcatacaaaaacataaatgggtaatagatcctctatttaataartggttctgggaatgctggcaaaccacatgtaaaataaggaaactggatccc

SEQ ID NO: 954397 - DNA, 604 bp, Homo sapiens
agtgcgctgcatccactgtcctgtgcccactgtctggcactccctagtgagatgaacccrgtacctcagatggaaatgcagaaatcacccatcttctgcgtcgctcacgctgggagctgtagaccagagctgttcctattgggccatcttggctgcccttaatattttctagcaaatttggaagatttttctaccatgttttcttcaaataatttttctaccctttctttgtctgttgaactccaatcatatgtatgtttagatatttagtattgtccttcatgtttcaaatactgtgttcatttttcttcaatatattttgtctgttatttggactgtatgatttttgttattctatactcaagctcttgattttttgctatgtcaggtctgctcttgcactcatctaatacatttcttgaaatttttattattgttctttttagatctaattttttgtttattttttatagtttccacttctctgtgacaagttctcatttattaacttatcattgtcataatctctttaattatttgaacatatttttctttaattctctgtacataattttaatgtgtgcattgaagtgttcatctgcac

SEQ ID NO: 954398 - DNA, 576 bp, Homo sapiens
gggctggcattgagtgcctgtggcttttctaggagcaagttgcaagctattggtggatctacttttctggggtctggcraactgtgaccctcttctcacagctccactaggtggtgcccatatgtggactctgtgtgaggactccaaccccacatttccctttcacactgccctaggagaggttctccatgagggctctggccctgcagcagacttctgcctggacatccaagagaatccatacatcttctgaaatctaggcagaggttcccaaacctcaactcttgtcttctgtacacccacaggcccaacaccacatggaagccaccaaggcttggggcttgcaccctctgaagaaataacctgagatgtgccttggcccctttagcttgggctggagctggagtggctgggacacagggtaccaagtcccaaagctgcacagagcagtggggccctgagctgggcccaggaagccatttttccctcctaggcctccaggcctatgatgggaggggctgccctgaagttctctgacatgccctgaagacattttccccaatgtcacggctatta

SEQ ID NO: 954399 - DNA, 576 bp, Homo sapiens
gggctggcattgagtgcctgtggcttttctaggagcaagttgcaagctattggtggatctacttttctggggtctggcaaactgtgaccctcttctcacagctccactaggtggtgcycatatgtggactctgtgtgaggactccaaccccacatttccctttcacactgccctaggagaggttctccatgagggctctggccctgcagcagacttctgcctggacatccaagagaatccatacatcttctgaaatctaggcagaggttcccaaacctcaactcttgtcttctgtacacccacaggcccaacaccacatggaagccaccaaggcttggggcttgcaccctctgaagaaataacctgagatgtgccttggcccctttagcttgggctggagctggagtggctgggacacagggtaccaagtcccaaagctgcacagagcagtggggccctgagctgggcccaggaagccatttttccctcctaggcctccaggcctatgatgggaggggctgccctgaagttctctgacatgccctgaagacattttccccaatgtcacggctatta

SEQ ID NO: 954400 - DNA, 576 bp, Homo sapiens
gggctggcattgagtgcctgtggcttttctaggagcaagttgcaagctattggtggatctacttttctggggtctggcaaactgtgaccctcttctcacagctccactaggtggtgcccayatgtggactctgtgtgaggactccaaccccacatttccctttcacactgccctaggagaggttctccatgagggctctggccctgcagcagacttctgcctggacatccaagagaatccatacatcttctgaaatctaggcagaggttcccaaacctcaactcttgtcttctgtacacccacaggcccaacaccacatggaagccaccaaggcttggggcttgcaccctctgaagaaataacctgagatgtgccttggcccctttagcttgggctggagctggagtggctgggacacagggtaccaagtcccaaagctgcacagagcagtggggccctgagctgggcccaggaagccatttttccctcctaggcctccaggcctatgatgggaggggctgccctgaagttctctgacatgccctgaagacattttccccaatgtcacggctatta

SEQ ID NO: 954401 - DNA, 502 bp, Homo sapiens
cactattctgactcctagcacctaagactagttacaaatcataatgtatgtgctcttttgtgtctgtctttttttgctgtgtgtgtgtgtgtgtgtgtgtgtgagcgcgcgtgcatgtttgtaattcatccatttttgtagcattttactgtagattattcattctcattgctagatggtattttattataggaatacatcacagattgtttattccattccataatgttttatccattgcaggtgtttgggttgtttccaggtctggctgttatgattaatgctccatggacatttttgaacatgtcgttggtgagcaagtgtgcatatatctgctagttatgtacctaggagtaaaatggttgggtcacaggataggcaygtgctcagttttaatcaatactgccagtttaccagggtggttgcacagatttacagtctcatcagcacaggatgaagcttctatttgctcttatttctaaccaacacttggcatagactc

SEQ ID NO: 954402 - DNA, 559 bp, Homo sapiens
catttagattgtttctactttttggctattgtgaataatgctgccatgatcacccatttacaggattttatgtgaacagaagctttcgcttctgccaaactcttccagagcagctataccattttacagtcctaccagcaatgttgaactatagttttatttgtttttaatttttttacttttagagacatggtctcactgtgttgcccaggctgctgtcaaactcctgggctcaagtgatcctcctgcctcagcctcccaaagtgctaggattgcaggtgtgagccacagcaccctgcctaaccatacagtttgaaataagtagggcagtgtattattagggaatgcaaaagacaggaaacccacatttgcctgtgccaaaggaaaaacgaagggatatttgtagtgcacatgactgaaaggagcagacgctagcttccagggcagcgggaccgggtgtgaacagccttccctgggcttccgctctgtctctggctcctgtgctggctctctacatttacattcttgrgcactctaggtttacatcttacccttcagc

SEQ ID NO: 954403 - DNA, 633 bp, Homo sapiens
ccactttatgaggctcagcattctctactacaaagtgaaactatagaaggtaccraaaagctcaggatgaggggagaactgcaccctgaatgcaggactgccaggcaggtggtaagcactcattagcttttgtttcaagcacacaaatcatatgttatttttcatcatgtctccccatggtgtctagtctatggctccagaaccaggaggcttctgatcaatccttatgctaaatgatggacagatagatggatgggtggttggacaaataaatggatggatgcatggattgatagattgatgctgggatgaatggatggatgaatagatggatgaatggataaatgaatggacgggtgctcagaagagaataccgaataaaacagggagtcaaaatgaaaataacaagatgattgaaggatggggctgatacatggaagagaggaacaagatccagcccttctggctccactcacacccacaaccacataccttggggtagcactggcacatgccccagattaaacccctggacaccatgatgctgccacagagtttcactgaactggagcccatcatgactcaggaggaatgtactgagagccaggagaagacccatacattgaagctgaa

SEQ ID NO: 954404 - DNA, 580 bp, Homo sapiens
atacatggaagagaggaacaagatccagcccttctggctccactcacacccacaaccacataccttggggtagcactggcacatgccccagattaaacccctggacaccatgatgctgccacagagtttcactgaactggagcccatcatgactcaggaggaatgtactgagagccaggagaagacccatacattgaagctgaagtagaaggtcttctcatctgccaaagtctcctcatctgccatggctgccggtcaggcccttgcctgtgcacccctgaaagaaggggcccaagccatccagcataaacatccagacaggctcacaggaagagatgaagctcttggatcactgcaagtcaaggtttaaagttaaagggagggcaagagcccttcagctccaggcccattccctggacccaccagtgcagcagggctggaggcagcatgcttyggtggaccagtgaacccacttcccaccttctctccttcccttggggcccagaaggcctggagttcatgtgtgaatatgggtgaggaagcatgcaagggagggacaaggggaggttacaggggctgg

SEQ ID NO: 954405 - DNA, 580 bp, Homo sapiens
atacatggaagagaggaacaagatccagcccttctggctccactcacacccacaaccacataccttggggtagcactggcacatgccccagattaaacccctggacaccatgatgctgccacagagtttcactgaactggagcccatcatgactcaggaggaatgtactgagagccaggagaagacccatacattgaagctgaagtagaaggtcttctcatctgccaaagtctcctcatctgccatggctgccggtcaggcccttgcctgtgcacccctgaaagaaggggcccaagccatccagcataaacatccagacaggctcacaggaagagatgaagctcttggatcactgcaagtcaaggtttaaagttaaagggagggcaagagcccttcagctccaggcccattccctggacccaccagtgcagcagggctggaggcagcatgcttcggtggaccagtgaacccacttcccaccttctctccttcccttggggcccagaagscctggagttcatgtgtgaatatgggtgaggaagcatgcaagggagggacaaggggaggttacaggggctgg

SEQ ID NO: 954406 - DNA, 572 bp, Homo sapiens
agatctcatgagacttattcactaccatgagaacagtatgggggaaatcacccccatgattcagttatctcccacaagtgaggattatgggaggtataattcaagataagatgtgggtggggacacagccaaaccatatcattcagcccctggcgccctcctaaatctcatgtcctcacatttcaaaactaatcatgccctcccaacagtccgccaaaggtttaactcatttcagcattaactcaaaagtctacaaaacaaagtctaatctgagacaaggcaagtcccttccatctatgcccttgtaaaatcaaaagcaagttagttacttcctagatacagtggaggtgcaggcattggatcaatacactcattctaaatgggagaaattggccaaaatgaaggggctaaaggccccatgcaaatccaaaatccagtggggcagtcaaatcttaagctccgaaatgatctcctttgactccctgtctcatgtccaggtcacgctgatgcasaaggtgggttcccatggtcttgggcggctgacccctgtggctttgcagggtacagcctcc

SEQ ID NO: 954407 - DNA, 595 bp, Homo sapiens
aggtaagggtatgtgtggtcagtgcaatttatccttactactgaaaaaaaggaaagctggggcaarcctcagagcccatgcgttgttgggaatgtgtgtgtgtgaaagtctcctcttcatataacaagaatattatattaaataatgaaatttctttttccttctcaagaaatagggtggatgtagttcttttattaataaaatatttatttgtaaattaatattttattagtaaaatagtacttctatgataggagcattcaaatgtgagttgccattgttttacttatctaattttgctgtgttaatttaagaagggaacaaaacttaagcttcttaagcctttaaaaaaaataagaaaacctcaaaaataaggaatcttctattacataaatgtttggtcaaaggaatgtttgagcttggtggagagagaacatttagaagaagtattaatagaagttttatttaagcccactcatcttttgaatttgtctaaaatacattttggacattaaaaatgatacattctcatagaaaatctggaaaatataaaaactccaagaaagcaaaaggaaggtcaatttttacctcccag

SEQ ID NO: 954408 - DNA, 643 bp, Homo sapiens
ttgtgtaaaaaaagaggtaactttgtagattagggattaaaaatctgagcacaattcagattgtttcttatagaacaaattgaggctgatggttgcaaaggggaggcgtagagaggagaaatgtggaaggctcggcaatgatgagagtttggaatagcccttgtgaggacaggagaggaaggggctcaaggaagacaagacaaagcactagggtggggcccagtggcttgcggaaaataccaagcgccctgcacggtggattcttccagcagactgagcacagggggttcagaggagctggtaatgcagtcatactgtggctggggtttacaaaaggttaagtgactcactaaaggtcacacagggacatttacacaaacatcctggccccaagtccagtgctctaatctgtaacagggtctatccttttttttttttttttgagacagggtcttggtcagtcacacaggctggagtgcaatgatgtgaacaccgcacactgcagcctcgcccttccaggctctagtgatcctcctgcctcggcctsccagtgttgggattataggcatgagccaccatactcagccaagtctgtccttaatcagggttcttttgggtctcattttcttaagctgcaaaagcc

SEQ ID NO: 954409 - DNA, 501 bp, Homo sapiens
acaagtcaatgaaatcaggaaaacatgatttgaatgagaaattcagtaaagatagagatatcataaaaagaaccaaacaagccctaagaactaaacagttcaataraagaaataaaaaatgaaatcaatgactttacagacaagaacaagcagaagaagtaatttctgaacttgaagagaagtcttttgaaataacacaggcagagaaaaaagaataaaaaataatgaaaaaagcctacaggatttattggacactgttaatttgaacaaatattcctattatgggcattccagaaggaaaagtgaagagaaatgtgaggaaaacatatttaataaagtgatagcataaaacttcccaactcaagagagagagatagacatctagttctaggaagatcaaagaaccccaaatacattcaacccagacacaaagacaaagattttttaagatagcaagagaaaagcctgaaagcgcttataatggaattctcgttagacgaa

SEQ ID NO: 954410 - DNA, 501 bp, Homo sapiens
acaagtcaatgaaatcaggaaaacatgatttgaatgagaaattcagtaaagatagagatatcataaaaagaaccaaacaagccctaagaactaaacagttcaatagaagaaataaaaaatgaaatcaatgactttacagacaagaacaagcagaagaagtaatttctgaacttgaagagaagtcttttgaaataacacaggcagagaaaaaagaataaaaaataatgaaaaaagcctacaggatttattggacactgttaatttgaacaaatattcctattatgggcattccagaaggaaaagtgaagagaaatgtgaggaaaacatatttaataaagtgatagcataaaacttcccaactcaagagagagagatagacatctagttctaggaagatcaaagaaccccaaatacattcaacccagacacaaagacaaagattttttaagatagcaagagaaaagcctgaaarcgcttataatggaattctcgttagacgaa

SEQ ID NO: 954411 - DNA, 577 bp, Homo sapiens
ctccattctaggtagctgtctcctacacatkctattcaggcctcactgtgcaatcttcctttttcattgttacaactctcaatctctttctttcatgttttccatttttctttatgtctccttattttcccttatgctcccttttcctgaggtgcttcttcactttactgatgcatagctgccaataggttcctgaaaaagagtacacaataagtatgttttgagagcttttatgtgtaaaacatctttattttaccttaatatttaattgacaatttggtttataagagtaggtcagggaaagataagcacgcctggccagtgtcttagtatcagggaggaggtttacttgttcctgtggtaacaggaagtgatttgggcccgaggggttccgccatacacaggcttaaagtccttggggagcatgtctagcacttccggggttggagtgttgaagtactctttgttgatcttaactcgattgtcatctcaatcttttagttcctgctttaaaaaaattagaatattattatttgcctcatatggttgtgattattataaaataagattacatgtg

SEQ ID NO: 954412 - DNA, 646 bp, Homo sapiens
taagccttcacctaaaatctattacataaagttaacaacactgaaatgctgatacgagtcaataaatcttatgtcccatgataaaggaaaaataaaggaaaaaaataaacatyttcttagtataagtgtataaagcacaaacatgttcttaacaaaatgaggagaaaatactcatgacaattacagtccttgtttttgtaactggtcacatggtcgtagctggtattgataactaccttcttctactatccattctgtattccctttccttcagcaagcacctcagcaggtggtggttttttatctggtggagtggcccaaacattaattcctgaaaggtctgggccatttgtagtcctgcctggattgggctattgtagtttcccaatgacctgaatctacagggcatggtaatgctaaaagactccctaatgatctcctgtattgcatgtatactcttccttacctccattgtggagtagtagactgatttcatcattatagtctgggtcagtcaccccagccaacactgtaactccatccttagcctgttgacttaaaggtaggaggagcacaaagtaaccaggtggtaattttaaactccaggttaatgaaatcattgtagtgtctcctggtggcaacattc

SEQ ID NO: 954413 - DNA, 618 bp, Homo sapiens
ctccagtggggaagctttatgtatatgtaacccaggcataacttggcatttcartaagcttggctgaagactccaatttgaaaatgttctacagccacaaccagtaacatactctctaaaataaaaaaggaaacaaattacctacctcttgactcctttaccacttagaaaataacttgtctaccaaggaggggaaaaagaagtcttgaaataagatttagaagcctgaagagtatagacccttcatctacaaggatttttgttttcagaccacttttaagttggttgcttggtttgcattatcaaagcagaacaccttacagtcaagaaacaaaagctaggttcttctttccccccaattttttcctttacagcaggttttctttcttgtgtcataaggagtttgtttacacaggaattcaaattactattaaaggaggtaatcagcacagtgacaaataaaagttaaaaagatgtttgtcttctatgataaagctcaaataatcccagacttcaaacaatcaaggtaacatacatatttctgtttttattacattaaaaagtagaaaaaaatgatgtcccccagaatagtttaatggattttctaaaaagttcttt

SEQ ID NO: 954414 - DNA, 619 bp, Homo sapiens
ctccagtggggaagctttatgtatatgtaacccaggcataacttggcatttcagtaagcttggctgaagactccaatttgaaaatgttctacagccacaaccagtaacayactctctaaaataaaaaaggaaacaaattacctacctcttgactcctttaccacttagaaaataacttgtctaccaaggaggggaaaaagaagtcttgaaataagatttagaagcctgaagagtatagacccttcatctacaaggatttttgttttcagaccacttttaagttggttgcttggtttgcattatcaaagcagaacaccttacagtcaagaaacaaaagctaggttcttctttccccccaattttttcctttacagcaggttttctttcttgtgtcataaggagtttgtttacacaggaattcaaattactattaaaggaggtaatcagcacagtgacaaataaaagttaaaaagatgtttgtcttctatgataaagctcaaataatcccagacttcaaacaatcaaggtaacatacatatttctgtttttattacattaaaaagtagaaaaaaatgatgtcccccagaatagtttaatggattttctaaaaagttctttc

SEQ ID NO: 954415 - DNA, 597 bp, Homo sapiens
acaacactacagaccaaatggacctaactgatatatatacagaactttccacccaattgtagcagaatacacatttttttcaagtgcacaggaaacattctcsagtatagatcacatgttaggtatccactggatgtcttgaaacatattcctcatgaataagggggactactgtgccatatggtttcagcaatcctacttttaggtatatatccgaagtaattgaaagcagcatcatgagatctatgctcccatgttctgcacttttatgtacattgcagcattagtcacaatagccaagatacagaaacaacctaagtgtctgtcaacagatgaatggatgaagaaaatgtggcatagacataacgaatgaatagaatacaacagaatgttattcagccttagaagggaatcctgccatttgcagtaacatggatggagctagaggaaatgctaagcaaaataagcaaggcagaaaaagaaatactgcatgatctcactttttgtggaatctaaaatagtcaagtgcatagatgcagagagtaggatggtggttgccagaggctggggagaggggatgatgtcagtttaagggta

SEQ ID NO: 954416 - DNA, 607 bp, Homo sapiens
agccgagagacttttccgggaggctgaaggcacaccttccttgtgaagaatgctgagcagttgtagagtttgtttcttttaaacaygaaattgctgaggataaacatgaaatgttttatttatttaaaaaaatgtttttccttgttgcggttcctatttttccttgttgtggttcctattacccaaaggattgggtttgcttttttttttttttttttttgctggcatttcagggaactctcatttacaagcaaaactcatgctttaagttttagaacaaatccagacagactgccattggggtttaccggtctttaaaaaccagtgatttatttaatgttgttgatgaaaacctagcttccaaaatgttttcttgtgagatgattgcttggtcttagtttctagaaggctgagtttctccaccactcaatcatgtgcaatgacctcaccctttcatctgcccaggaagggaaaccgactccagtgtccatagagacaagcaagggagtctggctctcatttcctgacttgcagagaatccggctggctgcccctggtttcagtgggactgctcaaagctgagagctcaatttcagcaggaaatgca

SEQ ID NO: 954417 - DNA, 661 bp, Homo sapiens
ttactgtgtgctctgagtgccactttggatgaaagcttccctcgaggcagattttccagtattccaaaaccagggttctcttaccctaggaggagcctcaggcagccagaaatttcccaaaccaatggctggacctttttaggaatctcgcataaggatagagggtcttgctctgtagctcaggctggagtgcagtgacatgaccagggctcactgcagccttgacctcccgggcttaagcaatcctcctgccacagtgtcccaagtagctgagacttcaggtatgcaccaccacacccagctaattttcgtatttttttgtagagacaggggttttgccatgtggcccaggctggtgtcaaactactgggctcaagcagttcgcccgccttggccttccaaagtgttgggattacaggcatgagccactatgtccagcctggtaatcacggttctgactgttgtcaccttagattagttttgcctgcttttaaattccatataaatggaattgcacttatgttttatgacattgattcatgttgttgyatgtaaaagttgttcgttttttccccattgctctgtaattccatcatataaagtttaggttcctttctgtagttgatggacatttggttgtttccagtttgggacaatatga

SEQ ID NO: 954418 - DNA, 539 bp, Homo sapiens
attattttttaaaatttgagatggattctccctctgtcgcctaggttggagtgcagtggcacgttctcagctcactgcaacctccccctcccgggttcaagcaattctcctgcctcagcctcctgagtagctgggattacagacacacatcaccatgcctggttagttttttgtattcttagtagagatggggtttctccatgttggtcaggctggtctcaaactcccaacctcaggtgatccgccctcctcggcctcccaaagtgctgggattacagacgtgagccaccgcacccggtcacctccttactgattttaaacgtaatgttccttggtgaatctccacgtaaactatttctactgttggtgtcggggactgggagaaaagcagcttacatggtaagggtgaagtttggtgtggtggatgcagagatcccttgtgagatatgaagtccctcttggagcagactagggcrtgtctcagggagggagcaaaagggcctctgaggagttgggagtgaagattcttgaggattggg

SEQ ID NO: 954419 - DNA, 602 bp, Homo sapiens
aaaatatgtaaaaatctaacatatatgtatatattttaaattcattattacaatgaaggactacctagattgatgtcaaaggtaggagctttactttttttcttcatctggtatttcttttgaaggtcttgagcaaaataaaatgagaaatgtaggcctgaaccaaattaagtgggaaaggattttgtcacactatttaaaaatttaaggtttcctccttcaatttaagccttcttcctctccagattcccctacagcctgtctttgtggaaacaggatgagcactgggctggagggggctaaactagaccatctgcacaattatccccatcatggccattctttctgcctcacaaatgcccaataacaaaccttaaatatttgcttaaaggaagtattatgtacaaagttatgcctggcaaataccctaactctttatttcgccttatgtagagtcaaaccaaacttcattgcagaaatggtttttattatgaaaatgttctttcattgcaatcttgattttccttgccaaaaaaacaaacaaaaacctaatgcctacaccaatactrtatacatcattttctatgtttattaccttgtca

SEQ ID NO: 954420 - DNA, 382 bp, Homo sapiens
gtaaccgtgcagtacatcacacrtgatcatgatatgaaaggactatgttactgctgtatgtagtcactataattttaatgattattttagagtgtactcctacttattaaaaaaaagttaactgtaaagcagcctccagcaggtccctcagaaggaatccagaaggcactgttctcataggagatgacagctctacgcatgttactgcccctgaagatcttccagtgggacaagctgtggaggaggaagatgacagtgattgatggttctgaccctgtgcaggcctaggctaatgcggcatttgtgttttaatttttaataaaacatttaaaaagttaaaaaattgaaaaatataaaaagcttgtagaataagggtaaagag

SEQ ID NO: 954421 - DNA, 381 bp, Homo sapiens
ctctttacccttattctacaagctttttatatttttcaattttttaactttttaaatgttttattaaaaattaaaacacaaatgccgcattagcctaggcctgcacagggtcagaaccatcaatcactgtcatcttcctcctccacagcttgtcccactggaagatcttcaggggcagtaacatgcgtagagctgtcatctcctatgagaacagtgccttctggattccttctgagggacctgctggaggctgctttacagttaacttttttttaataagtaggagtacactctaaaataatcattaaaattatagtgactacatacagcagtaacatagtcctttcatatcatgatcaygtgtgatgtactgcacggtta

SEQ ID NO: 954422 - DNA, 558 bp, Homo sapiens
ccggttccacagtcaagtttgcagacagtgggcctgttactatggttatagatgagtgtggctgaagcatagtttctgagtgggctcccactgggtctctgggaaggtctctgggtgggcaggactgcctccatgacaatggtagagagggactggagagggacagcctcagtgtgttcagttgggtctaggttggcagacctgttaccaggagcatggacaggtattgctccttgatggatgggtttcaggactgtgaccaaagatggctagagttgggtccatagggatatggggctgctttcagtctgcaattgggatcatgttcgcaaacctgccactagggtgggggtctgccttctcaaagtggctctccgtggtctggggcctcactggtgcttctcctacctggatccgaaaacaccacagaggcacttgtccatgggtgccagatcattatttgtgtgagggatgtgagttggataccttctcttcttccactttgctastgtcactctcccacagatgtatttttgaggaataaaaatagggtcaatg

SEQ ID NO: 954423 - DNA, 501 bp, Homo sapiens
tcagaagcaagcttcagaatcaggctataggaccagatggcacgttagaaaacctcctaagggtagccactwcagtcttttataataggaaccaggaggaggccctggaaagggagaggaaacacataaaaaaggcagaaagagggataccttggaatggaatgcaggtctggaactccatgtaagccctcacttcaagacagcctggtaaagttgtcagtaacaacctttgctgcaggcctccgtcttgttttacatacttgagtgtgacctgtaaccatgtcacagtactttttttagcctttgccattttacaatggcgcacgggttcaatcctggcttggggaatgaatactttcaaattaatagctatgtgacttttaccatttgctaattctcttccccctccatgaacaactgctaacttcctttcttaaatctttctttctctaagttgcctttaaaacttctggattttttttttttttttttttttttttt

SEQ ID NO: 954424 - DNA, 603 bp, Homo sapiens
attagtgaagaaggcatgtcaaaagttgagataggctgaaagataggcctcttgtgcaaacagttagccaacactatgtatgcaaagaaaaagttcttaaggaaaattaaaagtgcttctccaatgataagaaaacaaaacttaagccttactgctgagatggagaaagttttagtggtctgagtagaaaatcaaaacagccacaatattcccttaacctaaagcctaatccatagcaatgctgtagctctcttcaattttatgaagactgagggaggtgaggaagctgcagaagaaaagttgggaattaacagaggttggttcatgaggtttaaggacagaagccatcttcataacataaaagttcaagtgaagcagcaaatgctgatggagttgctgcagcaagttatccagaatatctggctaagatcattgatgaaggtggctatgctaaacaacagatttgcaatgtacacaaaagagmcttcttttggaagaagatgccatctagaattttcatagctaaagagaagtcaatgtctggcttcaaagtttcaaagtacagcctgattcttttgttaggggttaatgcagctggtaact

SEQ ID NO: 954425 - DNA, 668 bp, Homo sapiens
ccagcaatatgcttttactgtcctacctcagggatatatcaactctctggctttgtggtatartctttttcggagagaccttgattgcttttcgcttccacaagatatcacactggtctattacattgatgccattatgccgtttggatccagtgagcaagaagtagtaaactcactggacttattggtgagacatttgtgtgccataggatgggaaataaatctgggtaaaattcagggaacttccacctcagtaaaatttctaggagtccagtggtgtggggtctgtcgagacattccttctaaggtgagggttacgttgctgcatttggccccttctacaacccaggaaggggcacaatgcctagtgggcctatttggattttgcaggcaacacattcctcatttggatgtgttactccggcccatttgtcaagtgacccaaaatgctgccagttttgagtggggtccagaacagaaggctctacaacagatccaggctgctgtacaaactgctctgctacttgggccatatgacccagcagatccaatggtgcttgaggtgtcagtggcagatagggatgctgtttggagcctttggtaggcccccataagtgaatcacagaagaggcctctaggattttggagcaaggccctgccatcttctg

SEQ ID NO: 954426 - DNA, 572 bp, Homo sapiens
caagagatccccctcctcctgcaacgtccctccagctccctctactgagaaagtttaagagtgtgctcactataaaggaaagatgcttaaagaaaatctgtccattatcacagagcaggtattgagaggcttggaattgattggcaataaattgataacacacaggggtagcctataagcttcattttgactattggaattctagatagtttattggagacatgactcatactaagttggtcttctttgtagatatgcaggttggccttactggtaaagaagtatgaaaaaagatagatacatatttaacctttctgagactcactttcttcattgagacaatggatattaaaaatcctacctcacaggtttgctgtgagaattaaggaagaaagcatatgtaaaaccctcagtgcaggcatgggccataggaagtgcagtcatgcaccacaaaacaatgttttagtaaacaatgaaccgcatatacaatgacagtcctataagattataatacagkatttttatatgtatgctttatatgtttagataaacaaatacttaccattgggtta

SEQ ID NO: 954427 - DNA, 574 bp, Homo sapiens
caaagaggaccagtaccattccttctgaaagtattccaaacaattgaaaaagagggaatcctccctaactcattttatgaggccagcatcatcctgataccaaaacctggcagagacacaacaaaaaaagagaattttaggccgatatccctgataaacactgatgcgaaaatcctcaataaaatactggcaaactgaatccagcagcacatcaaaaagcttatccaccatgatcaagtcggcttcattcctaggatgcaaagctagttcaacatactcaaatcaataaacgtaatccatcacataaacagaaacaatgagaaaaacaacatgattatctcaatagatgcagaaaaggcctttgacaaaattctacagcccttcatgctaaaaagtctcaataaactaggtactgatggaacatatctcaaaatcataagagctatttatgacaaactcacagcaaatataatactgaacgggcaaaaactggaagcattccctttgaaaactggcacaagacarggatgccttctctcaccagtcctattcaacatactattggaagttctgg

SEQ ID NO: 954428 - DNA, 547 bp, Homo sapiens
atttatattcttctctaaactggttattctagttagcagttcctgtaaccttttatcaaggttcttagcttccttgcaattgggtaggaacatgctcctttgtcttggaagagtttgttattaytcaccttctgaagcctacttctgtcaattcgtcaaactcattctctgtctagttttgttcctttactggtgaggagttgtgatcctttgggggagaagaggcattctggtttttggaattttcagcctttttgcactgtttcctccttaccttcgtggatttatctacctttaatctttgatgttggtgacctttggatggagtttttatgtgggcatgctttttgttgatattgatgctattgctttctgtttgttagttttccttctaatagtcaagcccctcttctgcaggtctgctagagtttgatggaggtgcattccagaccctgtttgcctgggtatcaacagaggaggctgcagaacagcaaagattgctgcctgctccttcctcgggaagcttcatcccagaggggcacctgcc

SEQ ID NO: 954429 - DNA, 605 bp, Homo sapiens
tttcactcacttgatggtgtcttatgatgtgtcaaagatttaaattttgatggaatccacttkattttttcatttgttgcctatattttagtgtcatatctaagaaatcattgccaaacccaatgtcattaaagttttcccctgcgattttttttaagagttttatgctttcagctcttaggtttaggtctttcatccattttgagttaatttttatatatagtgtaagtcatttgttcacatatggatatccattttcccagaaccatttgttggcaagactgtcctttccccattgaatggtcttagcaaccttgtcaaaaatcatttgactacatatttaaaagtctgtttccggtctctattctgttcttttgttctctgtgtctgttttatgccagtacagtactgttttgattactatcactttgtattaagttttgaaatcaggaactatgaatcctctttgttcttctttttcaaggttgtttagttattctgggtttttgatattccatataaattttagcatgagattctctatttgcaaaatatatcattgggatttgatggggattgcattcaatctgtagatcactatgagt

SEQ ID NO: 954430 - DNA, 605 bp, Homo sapiens
tttcactcacttgatggtgtcttatgatgtgtcaaagatttaaattttgatggaatccactttattttttcatttgttgcctatattttagtgtcatatctaagaaatcattgccaaacccaatgtcattaaagttttcccctgcgattttttttaagagttttatgctttcagctcttaggtttaggtctttcatccattttgagttaatttttatatatagtgtaagtcatttgttcacatatggatatccattttcccagaaccatttgttggcaagactgtcctttccccattgaatggtcttagcaaccttgtcaaaaatcatttgactacatatttaaaagtctgtttccggtctctattctgttcttttgttctctgtgtctgttttatgccagtacagtactgttttgattactatcactttgtattaagttttgaaatcaggaactatgaatcctctttgttcttctttttcaaggttgtttagttattctgggtttttgatattccatataaattttagcatgagattctctatttgcaaaatatatcattgggatttgatggggattgcattsaatctgtagatcactatgagt

SEQ ID NO: 954431 - DNA, 664 bp, Homo sapiens
acaagtagcaggtatgggggaaagaacacggtccaggcgtcggatagaaggcctgccgcacaatctcaggaaggtctcctaacctctctaggcctctgtttcttcctctagtggtgaactagatgatttctagggattcccaatcttgtgtaaattttaacagttctatctctggattcaaaaacaagaaatgctaggccaggtgtggtggctcacttctgtaatccttgcactttgagaggctgaggcgagcagatcacttgaggccaggagttcaagaacagcctggccaacatggtgaaaccttgtctctacttaaaaatatgtatgtgtatatatacatgtgagtgtgtatgtgtatatatatatatatatatatatatatatatatatatatatatatacacacacatacatatacatacatacaagtatatacatacatacacacacacagaaattatctggacatggtggtgcacacctgtaattgtagctacttgggagttggaggttgctgtgagctacgattgcaccactgcactccagcttgggtgaccgagygagaccctgtcaacaaagaaatgaaacattagaaaaaatcccttctctctatagttgcataggcacccacacatccacagagggtagccgcctgtcttag

SEQ ID NO: 954432 - DNA, 457 bp, Homo sapiens; identical to SEQ ID NO: 953767

SEQ ID NO: 954433 - DNA, 647 bp, Homo sapiens
aagcacaggatacagacagggacgatcgttcttttggccgtgatagaaatcgggattctgacaaaacagatacagactggagggctcgttctgccacagacagctttgatgactacccgcctagaaggggtgatgataggtttggagacaagtatcgagatcgttatgattcagaccagtatggccgtgggtattggtatgagtatcgggatggcccatgccgggatatggatcgatatggctggcggtagggatcgctatgatgaccgaggcagcagagactatgctagaggctatcattcctggataggcagtggcagaagggcatttggcagtgggtacccagggacaatgactacagaggaggcagggaccgctatgaagaccgatacaacagatgggatgatgggtcgtgcagctccagagatgatttctctcgggatgattgtaggtataatgatagacgtccccctcaaagacccaaactgaatctaaagcctcataatactcctaagggagatgattcttctgctagtacctcccagtccrgtcgagcttcttttgtctttggaggggcaaagcccgttgatagagctgctagagaaacaaaagtagaagaatggctacagaaggaacaagataagttg

SEQ ID NO: 954434 - DNA, 647 bp, Homo sapiens
aagcacaggatacagacagggacgatcgttcttttggccgtgatagaaatcgggattctgacaaaacagatacagactggagggctcgttctgccacagacagctttgatgactacccgcctagaaggggtgatgataggtttggagacaagtatcgagatcgttatgattcagaccagtatggccgtgggtattggtatgagtatcgggatggcccatgccgggatatggatcgatatggctggcggtagggatcgctatgatgaccgaggcagcagagactatgctagaggctatcattcctggataggcagtggcagaagggcatttggcagtgggtacccagggacaatgactacagaggaggcagggaccgctatgaagaccgatacaacagatgggatgatgggtcgtgcagctccagagatgatttctctcgggatgattgtaggtataatgatagacgtccccctcaaagacccaaactgaatctaaagcctcataatactcctaagggagatgattcttctgctagtacctcccagtccagtcgagcttmttttgtctttggaggggcaaagcccgttgatagagctgctagagaaacaaaagtagaagaatggctacagaaggaacaagataagttg

SEQ ID NO: 954435 - DNA, 734 bp, Homo sapiens
cactcaccaagactaaaaagcttacacttacttccctggaaagtgcttatttatttggcaactccagcatttwaaaaaaaaaaaaaaaaaaaaaaggtaaatcactccttgcctgaaatctcctcccttcccccaatataatgtcatctacttcctgtgcaggagagagcatttgctaaatccaggttgtctcatacttaactgccaataaaccaacttccacataacttccagacagctgggggaaaggtcctcggagttttagtcatggtccagaaacacgcgtccacacaaaaatttgcagctgtcctttctctacagtgcatttttaatgtgattcaggggggcctgttgtgaaacatctgacaaaatgtaaaatcctcttagataccttctagtttacccactgcacgtgtgtaagagaagttgcaccaggatttctccaccgagaaatctaggcactttttgcacacagccaggggcacctcgtgggatgtaaggaggcattcgaaacctggaaagacttctactgtaatctttaaaagcacagcctctggtgcaactattaaaatgctagttttctaaagcaaatatttttttcaatggcgtgcagaactgcagcgatccagcacggcaaacagaacagcattcttgatctgcaagcccctggaaaccttccggtaactttttcacagcttgctaagaaacagaaagctgaccaacttccagcaatg

SEQ ID NO: 954436 - DNA, 734 bp, Homo sapiens
cactcaccaagactaaaaagcttacacttacttccctggaaagtgcttatttatttggcaactccagcatttaaaaaaaaaaaaaaaaaaaaaaaggtaaatcactccttgcctgaaatctcctcccttcccccaatataatgtcatctacttcctgtgcaggagagagcatttgctaaatccaggttgtctcatacttaactgccaataaaccaacttccacataacttccagacagctgggggaaaggtcctcggagttttagtcatggtccagaaacacgcgtccacacaaaaatttgcagctgtcctttctctacagtgcatttttaatgtgattcaggggggcctgttgtgaaacatctgacaaaatgtaaaatcctcttagataccttctagtttacccactgcacgtgtgtaagagaagttgcaccaggatttctccaccgagaaatctaggcactttttgcacacagccaggggcacctcgtgggatgtaaggaggcattcgaaacctggaaagacttctactgtaatctttaaaagcacagcctctggtgcaactattaaaatgctagttttctaaagcaaatatttttttyaatggcgtgcagaactgcagcgatccagcacggcaaacagaacagcattcttgatctgcaagcccctggaaaccttccggtaactttttcacagcttgctaagaaacagaaagctgaccaacttccagcaatg

SEQ ID NO: 954437 - DNA, 626 bp, Homo sapiens
tcacaaagcaagagaggcagaaaagagctacgaaacagaaaacaagaaaatgctaatagtaagtctttacctatcaataagtaccttaaatataaatggagtaaattctcaaaattaaaacaaacatagtggctgaatggattaaaagaaaaacaagactcaccaatatgctgcctacaagagactcagtttatcactttagatttaaggacacatacatgctgaaagtgaaaaatggaaacattccacgcaaatagtaactaaaagagaacggggtggctatacttatatcagacaaaatagactttaactcaaaatccatcacaagatacaaagaaggtcactaatgatacagggtcaatttatcaagagggtataacaatagtaactctatatgcactcaacatcagagcatctaaatatataaagaaatatgaagaacctggaagggaaaaaaacacagcaatgcaataatagtagtggacttcaatacttcaccttcaaaaayggatagattttttagacagaaaatcagtaagaaatagctgacttgaacactactatagatcacatagaactaacagatatatatagaacattccatccaacagcagcagaacatatat

SEQ ID NO: 954438 - DNA, 765 bp, Homo sapiens
tactttaatgtcttaatcctgttatcttcgtaagttgaggatgtacgtcaccacaggtccactgtgatcattgtgttaactgtaaaagttgatcgtaaaacatgtgtttgaacaatgtgaaatcagtgcaccttgaaaacaaacagaataacagcgattttagggaacaagggaagacaaccatatggtctgactgcctgtggggtcgggcaaaaaaaaccatatttttcttcttgcagagagcctacaaatggacgtgcaagtagaagagatatcgctaaattcttttcctagcaaggaatattaacattaagaccgtaggaaaagaattgcattcctggggggaggtctataaacggtcactctgggagtgtctgtcctatgcggttgagataaggactgatatatgccctggtctcctgcagtaccctcaggcttactgggattgggaaaccccaccctggtaaatttaagatcagactagatctctgctctcgaaccctgttttctgttgtttgagatgtttatcaagacaatacgtgcacagctaaacatagacccttctcaggagttcctgattttgtccttaccctgtttcctcagaagcatgtgatctttgttctcctttttgccctttgaagcatgtgatcttgtgacctactccctgttyttgcaccccctccccttttaaaatccctaataaaacttgctggctttcaggctcaggtgggcattacagtcctactgatacgtgatgtcacccac

SEQ ID NO: 954439 - DNA, 633 bp, Homo sapiens
gccaaggagggactgcagccagccccgtctggcccctgcatcccagagcctatgcatgcatcctcactttggacaggctycacggctgaacctggccaagctcttcaagaaaggtggccaccagtggggggctcaagcacttcctctagacccacagagccttggacctctctgactggcacctaggatgtcagtctgttgtactgacaaacgctgggcagagttttcagtggccggcaacaattgtgataaaggcctgccacatgcagacacccgtctctcaggatagggcctcgggtctgggagcaccactccttccatccctcctgaatctgtagaaaactccctccttcctccgtggggccagcgagcaacagtctcccctggttccctctaccctcagcctctctgggtctcagtttcctcatctcaggctagtactctctgggccaatgaaacatcctcttccaggtcacttgaggactttcgttcctggactgtgccttaaagggtccctgagaacactcaaaatagtaacaaggccaaggtttcctgacgcttactctgaaccatgagcactaaaggacacacccatgcctggacacccacagcaaccagaggggaggcagaccg

SEQ ID NO: 954440 - DNA, 254 bp, Homo sapiens
cctcccaggagtcaataagaattgggtttcctctgtctggcagctgtgttcttctcatgacatagcaaatggctgacaaaaggcagatatctgccttgctgagccacaaagacaggttccaaataagggaatgtcttggttgtttcrgggggggcttttagctgtggctggagaacacagactcaaggcctctggtctttttgagaagcagaggccagtggaaggctgaggtctggtagtgtggagcccccact

SEQ ID NO: 954441 - DNA, 557 bp, Homo sapiens
agattatatcccgtgtcaggctcggcaggtctcacacccatggagacttgctcactgcyagcgcagcagtctcagatcgacctgagaggcagcagcctggcagggggaggggcatccgccattgctgaggcttgagcaggtaaacaaagtggctggggaagttcaaactgggcggagcccaccacagctcagcaaggcctgttgcctctgtagattccacttcttagggcagggcatagctgaacaaaaggcagcagaaacttctgcagacttaaacgtccgtgtctgacagctctgaagagagcagagttctcccagcatggtgtttgagctctgagaaaggacagactgcttcctcaggtgggtctctgacccccgtgtagcctaaatgggagacgccttccagtaggggccaattgacatctcatacaggcagatgcccctctgggatgaagcttccagaggaagaatcagccagcaatatttgctgttttgcagcctccccgctggtgatacccaggcaaacagggtctggggtggaactcagcaaactcaaa

SEQ ID NO: 954442 - DNA, 750 bp, Homo sapiens
ctcggagcagccggccagccctgctggccccgggaaatgagggacttagcacctgggccagtggctgcggagggtgtactgggtcccccagcagtgccagcccaccggtgctgcgctygatttctgcccgggccttagctgccttcccgcggggcagggctggggacctgcagcccgccatgcctgagcctcccacccactccatgggctcctgtgccgccggagcctccccaacaagcaccaccccctactccacagcgcccagtcccatcgaccacccaagggctgaggaatgcgagcgcacggcgcaggcctggcaggcagctccacctgcagccctggtgtgggatccgctggtggggacgtggagagcctttatgtctagctcagggattgtaaatacaccaatcagcaccctgtgtttagctcaaggtttgtgagtgcaccaatcgacactctgtatctagctgctctggtggggccttggagagcctttgtgtctagctcagggattgtaaatacaccggtgggcactctgtatctagctcaaggtttgtaaacacagcaatcagcaccctgtgtttagctcaaggtttgtgaatgcaccaatcgacactctgcatctagctgctctagtggggccttggagaacctttatgtctagctcagggattgtaaatacaccaatcagcactctgtatctagctcaaggtttgtaaacacaccaatcagcaccctgtgtttagctca

SEQ ID NO: 954443 - DNA, 675 bp, Homo sapiens
cgatgtgctgcgcccactcmtcagcacctccactggcctagccaccaggctgctcacccggattagtgctgcggccccttcactggtctccccatttccactgttgctccccacagcctattctcaaaacagcaatcattctcttaaaatctgagttggatcatgtctctcttctgcttgaaatcctctaatggcttccatctcacgcaaagcaaaatcaaatcgccttatcgcagcctaggagggcctgaaggattcgacccccattatgcttctgtcttcaatgtctgccaccatgctccccatcactcacttggctccacgctccaaacagagctactattgctattctctcaatacagcacacactctggcgcatttgtacttgctgtttcttgctcttcccccagaaatctccatggctcctgccttcatctcctttacctggaggttaccttttcaatgacatcttctgtaaccacctttccaagaattgcacccccagcactccctattctcttccctgttttatttctctattttaaaatgatagttcttttaatcatctaatgtgtcatgattttcctgatttagcgtctttaccatcccttccccactaccactaacagaatgttagcttcattttttttccactttctatatttaggcagaaaa

SEQ ID NO: 954444 - DNA, 601 bp, Homo sapiens
gcccctagaggtagttgttaataattttgaaatattaaggtcttgccaagcttctgatgattcaaacctgtactactgattattaagcaggacagactgagctttctgctgcaaataccttggaggagaaagtaatttctaaatatacagagaggtaacttgactatatatgttgcatcctgtgcctcccttcatattaatatttgataaagattttaattcatataaaacttctaaagcagaatcaaagctcctcttggggaaatggcaagtctttaggacaggcgagaccctgtatgcatagtaccaaagcattaccacatggtagagaacacactcgattaaaaatgttaagctatctgaaaaataaaatatgcaagtcttcaggatggcacaaaacaaaggttaatactttttgggacacatttcttagcgggcttgctgagtgtgtaaatataatcaacttttgtttgtgttacatgactttgatgacttcattgaaaatctkcacaattcagtttcagctctggataacttcagttgacctttgtgaaggtttttatctgtgtagaatgggtgtttgacttgttttagcctatta

SEQ ID NO: 954445 - DNA, 456 bp, Homo sapiens
taactccttgaggagcctctttctcttctcatctgaacccagttttgcaaccagatctccatctttttcagtaactctcccatttcagagctttcctgcactaagtgaagtgtcttgtccagatacaaggttaaggatgagtaactgtcacatctctttgagtctgtgtccacattttgggtattgtttaaagtgctcacattatctggaaatttatctttcaccgtgaaattatctataaataattactctgtagccgggcgtggtggctcacgcctgtaatcccagcactttgggaggccaaggcaggcggatcacctgaggtcaggagttcgagaccagcctggccaacatggcgaaacccgtctctactaaaaatacaaaagttagccargcgtgatggtgcgtgcctgtaatcccagctacttgggaggctgaggcaggagaatcacttga

SEQ ID NO: 954446 - DNA, 575 bp, Homo sapiens
tctggtcctgggctttttttggttggtagacaatttattactgcttcaatttgagaattcwttattggtctattcagggattcagtttctccctggttcagtcttgggggtggtgtgtgtgtccacaaatgtatccatttcttctagattttccagtttatgtgcataaaagtgtttatagtattctctaatgtttgtttgcatttctgtgggatcagtggcgatatcccccttatcatttctgattgtgtctatttgattcttctctcttttcttctttgttagtcaagctagtggtctattaatttttaaaaaagaaagctcctggatttgttgaatttttgaagggtttttcgtgtctctatctccttcagttctgctctgatcttggttatttcttgtcttctgctagccttggggtttgtttgctcttggttctctagttcttttagtagtaatgttaggttgttgatttgagatctttctagctttttcacatgggcatttagtgctataaattaccttcttaacactgctttagctgggtcccagagatcctggaatgttgtcttttt

SEQ ID NO: 954447 - DNA, 621 bp, Homo sapiens
gaagaagggtttcctttttgctcatatgcttgctatgcctcccaacaatacaatatattcctcaactttccccaagtcccacgtcccatcacatygggcagttccaagccatgggagtctgggcagacacaggagaatgcatgcttttttctctcgaagccttcatgggaaattcccagaattctatggcataaagctgtctattttgttcactctctatttccggagcctacgcagtacctggtacgtggtagacactcaatagcatttcttgaaggaataaatggaggactaaatgaagttttccagaggagacactcacatgccaaacatcctatgtccatgtccagatgcttccatttacctctgaagaaatttctcctgtttgtttttgtatctttcttccttgaagtggaaaaaaagtcaaaatggagaaatgacatttttgtcaaatcatgaggcatgaaagtaaaaggcccagagtgtgggaaatctgggaaggtgacgacgtttgatgcctgactcccctgccagggtctcatccgcagtgcctggctcctgaccacctctccatttttctttcctcctgcctgtctcttgcttccccatcccactcccctg

SEQ ID NO: 954448 - DNA, 593 bp, Homo sapiens
ggttgtacaacaagaaggcctggacaacgagaactctttgtctggattagttccaacgatgctttgttcctgaagtcaggaaataccttgccagtaagggagtgcctttcaaagttcctttgataatggacaatgcccctggccactcagagcctcatgccttcaacattgaaggtgttgagtggtctacttgccccgaagcacaatgtctctaattcagtctctagatcaaggagtcataggacctttaagcctcattacacatggtaccctttgcaaaggactgtcaatactgtggaagagagcccaagagaacatcatgaaggtctggaaggattacaacattgcagatgccattgttgttatagaagaagccatgaaagccatcaagcttgaaacaataagtttctgctggagaaaactgtgtccagatgttgtgcatgacttcacaggatttatgatggaaccaacccaggaaatcrtaaaagagactgtggataaggcaaaaaaggtggaagatgaagggtttcaagatatggatcttgtttctccaattatccaattctatagctaatagacaccacatcagagaa

SEQ ID NO: 954449 - DNA, 574 bp, Homo sapiens
agttattttcagatataggccatttttatgccccagttctgtacagccccaatttctcctccttccatcctcttttgaacccacgtctcagggttttgccttcaccactcaactgacactgctcttatcaaagtctccaataatttgctctatctagaggtcaattctcagcctatcacttgcttgacctgtcacactgtattagtcaatgttctctaaagggacagaactaattggacagatgaatgtatgaaggggagtttgttaggagaactgactcacatgatcacaaggttaaagtctcacaataggccatctgcaagctaagaagccaggaagccagtctgagtcccaaaacctcaaaagcaggaaagctgacagtgcagccttcagtctgtggccaaaggcccaagagcccctggcaaaccactggtgtaagtccaagagtccaagaacttggagtctgatgtttgagggcaggaagcattcagcacaagagaaagatggagaccagaagactcagccagtctagtccttccacrttcttctgcctgcttttatcctagccgtgctg

SEQ ID NO: 954450 - DNA, 721 bp, Homo sapiens
aactcttgtcactgattgtttttgacaaatgcatccagagaaaagactgttcacaatgagagagcgctcagtsaggtcaaataaagacaaaccttattgagacagccaaatgcctaggcagataaaaaggggtccccagagaatctccaacctgccccacaagtgtttacatcagatacttttgcacagagggaacctgcccagggcttgtctgggcatgcccataactgactggatcctgatatgcacatggggggaagtgggtggagccagagggaattcaccccttatgcaagggaggagcctgccctcttcagcttgtgtggtgacctgggaatcaatctgtgaggtggggggggcctgttagcaggactacattttgctttgctgagttttattctttttttccctttcacccaataaaatcctgctctactcacccttcaatgtgtccacgtgcctaaattttcctgatcgtgtgacaagattctggttttagctgaactaaggagcaaaattctgctacattttggcacccagatgtaggacttgaggaagagtaagatgcaaaccaaaaacttttttccttttgcttctaagcctttttgtcctcgaacttctgaaggtagagaaaactatgcctccctccccccccaaccactgttgctcccaggggttgggaatgtcagccttttccttctttttctggatagacaggcaa

SEQ ID NO: 954451 - DNA, 626 bp, Homo sapiens
ctgggctcaggagttaagctgcagatcctcacggtgagttttaccgctcataaaagcaacatggacccaaacagtgagcagtaccaagagcaaaagaacaaaccttccacaccctagaagrggacccgagcaggttgccaatgctcgctggggcagcctgcttttattctcttatctggccccacccacatcctgctgattggtagagcccagtggcctgttttgtcagggcactgattggtgcgtttacaatccctgagctagatacaaaggttctccacgtccccatcagattagttagatacagagtttggacacacaggttctccaaggccccaccagagcagctagatacagagtgtcgattggtgcattcacaaaccttgagctaaacacagggtgctgattggtgtgtttacaaaccttgagctagatacagagtgccgattggtgtatttacaatccctgagctagacataaaggttctccaaggccccaccagagcagctagatacagagtgtcgattggtgcactcacaaaccttgagctaaacacagggtgctgattggtgtatttacaatccctgagctagatataaggactctccacgtccccaccagactca

SEQ ID NO: 954452 - DNA, 455 bp, Homo sapiens
ggtatatgagagcagacggagctttgtttaaaaggaaaaaaaaatcaacactcagatatgagttgctggaaaacagaagtaggtcagtttgggaagtatttctggagcaagtgcctcaraccctttataattttcacaaagctatgccttttagacttcaaagaatagtcctcacataggccatatatatatatgtgtgtgtgtgtgcgtgtgtatatatatttattataaatatattaatttatataatcatatataaatatatttatatatgtaaagttttatatgtacatatattagccttacacaggtttatatatacatatattacacagtttttatatatatatataacacaggtttgatatatacatatgtatatatgtatatgtaaaatatatacatgtattagccttacacaggtttttttctccctaacaaaacacagttcataa

SEQ ID NO: 954453 - DNA, 471 bp, Homo sapiens
taaatatatctatgatttgaactgggtgtgtgttttgttataaatatggttcccatcattgcactaataattttgaattccactagcattaccttatgcttaagtaggtgtttagctgctggcactacgtttgcaacatttctattctaccatcatcttcacagtttaacatctcttatttcctgttagacacagagaactgaaaggacattgctcctgatcttacaataagaacaaaaattggacatacttcaaactcattaactcttagaatccagatgctgacctggattaatatattacctacctgatcttgcttatttaccctttccattaaagatttcttaaatgtattaatagtattaatttcaattacctatctaatagttctgatatctgtgtcatagctaaatctgctatgaaatcayttagaaattcatagacttgtatgaacctccccagagaacttag

SEQ ID NO: 954454 - DNA, 606 bp, Homo sapiens
ggcacagtatgaaattaatttaaagatcagagtctgtgattagatctgtttctccaggaaaagtcaaagttgggaataattttaaatgagcacatagaaatatgtattatgtgtagaagcggatgaaaaaccagcgtagggccaggcgcagtggctcacgcctgtaatccctgcactttgagaggctgaggcaggtggatcacgaggtcaagagatcgagaccgttctggccaacatggtgaaaccccgtgtctaataaaaatacaaaaattagctgggtgtggtggcgtgtgcctgtagtcccagctactcgggaggctgaggcaggagaatcacttgaacctgggaggcggaggtggcagtgagccgagatcgcaccactgcactccagcctgttgacaaagcgagactctgtctcaaaaaaaaaaaaacaaaaacaaaacaaaccagcatgggagaaatatgtattaaatgtagaagcagattaaaaaccagcrtggggccagatgcagtcactgacacctgtaaatccagcactttgggaggccgaggcaggagaatcatttgagcctaggagtttgagaccggcctggacaacacagcaag

SEQ ID NO: 954455 - DNA, 602 bp, Homo sapiens
gatcagagtctgtgattagatctgtttctccaggaaaagtcaaagttgggaataattttaaatgagcacatagaaatatgtattatgtgtagaagcggatgaaaaaccagcgtagggccaggcgcagtggctcacgcctgtaatccctgcactttgagaggctgaggcaggtggatcacgaggtcaagagatcgagaccgttctggccaacatggtgaaaccccgtgtctaataaaaatacaaaaattagctgggtgtggtggcgtgtgcctgtagtcccagctactcgggaggctgaggcaggagaatcacttgaacctgggaggcggaggtggcagtgagccgagatcgcaccactgcactccagcctgttgacaaagcgagactctgtctcaaaaaaaaaaaaacaaaaacaaaacaaaccagcatgggagaaatatgtattaaatgtagaagcagattaaaaaccagcgtggggccagaygcagtcactgacacctgtaaatccagcactttgggaggccgaggcaggagaatcatttgagcctaggagtttgagaccggcctggacaacacagcaagaccccgcctctacaaaaact

SEQ ID NO: 954456 - DNA, 584 bp, Homo sapiens
caattttgcccattcttgaacttcatataaatggaatcttgcagtatatgctcatgggtgtggcttcttctgctctacattgtgttggtagaattcatctgtgttgttgtatgtaattgtagttcattgtttttcattgctgcgtagtacgattcccatttttggctattatgaataaagttgttatgaatattcttatagatgtcttacagttaacaaaagtgttcctttctgttaggtttatacccaggattggaattgcttgttcaaaatttataaatatgtttagctttagtagattctgacagttttccaaattgtgtgccaattcatacctcatcagctatatatgacagttccacttgtttcatatccaacactttatattgttagtcttttttagccatattattagccattaatgtcatgttttcgtagctcattgtggttttaatctgcatttccctgatgactgattactcatgttaagcaccttttcatatgcttcttggccatttrgatatcttcttttgtgaggtacctattcaggtcttttcctgtttttcactatgttctctgttctt

SEQ ID NO: 954457 - DNA, 621 bp, Homo sapiens
ctgcagttctgcacgccattgaaaaaaatatttgctttagaaaactagcattttaatagttgcaccagaggctgtgcttttaaagattacagtagaagtctttccaggtttcgaatgcctccttacatcccacgaggtgcccctggctgtgtgcaaaaagtgcctagatttctcggtggagaaatcctggtgcaacttctcttacacacgtgcagtgggtaaactagaaggtatctaagaggattttacattttgtcagatgtttcacaacaggcccccctgaatcacattaaaaatgcactgtagagaaaggacagctgcaaatttttgtgtggacgcgtgtttctggaccatgactaaaactccgaggacctttcccccagctgtctggaagttatgtggaagttggtttattggcagttaagtatgagacaacctggatttagcaaatgctctctcctgcacaggaagtagatgacattatattgggggaagggaggagatttcaggcaaggagtgatttaccttttttttttttttttttttttwaaatgctggagttgccaaataaataagcactttccagggaagtaagtgtaagctttttagtcttggtgagtg

SEQ ID NO: 954458 - DNA, 582 bp, Homo sapiens
taaccttccaaaacagaaaacaccaggcccagatgcattcacggatgaattcttccaaacatttaaggaagaaattatgccaattstctacaatctcttccagaaaatagaaggagaatgaaatagaatgcaacaatgtataaaaataattatacaccatgaccaagtaggatttatcccagatatgtaaggctggttcaacatttgaaaataatttatgcaatccattccatcaacaagccaaagaagaaaaatcacacgaaaatatcagaagatgcagaaaaagcatttgacaaaattcaacaccattcatgataaaaactctcagcaaattaggaatagaagaaaacttcctcaaattcataagcaaaatatattttgaaaacctacagctaacattatacttaaactaatataatttaatgggaaacttgaagcttttccgctaaaatcaggaataaggcaaagaagttccctctaagcactgcttttcaacattgtactggaaggaagtcttagttaatacaatatgacaagaaaaggaaattaaaggtatacagattgggaaggaagaaataaaac

SEQ ID NO: 954459 - DNA, 574 bp, Homo sapiens
atgtcattaacaacagtggcaggggctcaggggcatctgctcagcccactggaatagcaataaagcatcacctagccctggcccacaaaatcacaaaaccatgtgctagatgagctcgtccatgaccaaggtggccaccttaggagtggagaacacaaattgcagggccttttggaatggaggaggcccaggggaggggtgcccaagacaagccattttagcacctcctcccaacagtacccctgccacttgctggcctcacggcacacctgcctctgggcacccagaggagggcagcgccagccgcagtgagcctgttgctttggccaccagctccagcagcgaggctgcgaggaaatgactcctccttccttttgtctgcaaaccactgggcaagcgtcccagattccagcggccacaggtcccatggagagagtgagggcgatctggcctggtggaagtcgttggaaacccacctggctaggcacagcccagcagctccagttacctgggcacctgggagcgcggraggccatcacgcaggtcgccactaggtggcaggcccagggaaagg

SEQ ID NO: 954460 - DNA, 389 bp, Homo sapiens
atggttgcctggctttgcgttctgtgtgcatcctgcgtgacaaccaaaagctaacccctaggagaaacccctgagacacattccatctcttcactccctgcatgcccgaatttccagccaggcycttcatcacacagacagatgtgtgttttcatcccatctgtccctgactaatgaggccaggggctttgtcttcccggctctgtatgcccagagcctgactccagtaaacgtctgctgaatgagtggggtatggaatcccagggacttgtccactctgcctatagctcattgcatgtgaccctagacaaaactcccctctgagcattcccaagcctgtctggcaagtggacctaacctgccctaccagcctgaggccatgagtgaag

SEQ ID NO: 954461 - DNA, 658 bp, Homo sapiens
ataaagaatcatgggacttttgctcatggcagagcttactcttgggtctgcactaggtaatgatcaggcagtactgtgtctggaatttattccttccagtgggttcttgatctcgctgacttcaagaatgaagccgcggaccttcgcggtgagtgttacagctcttaaaggtggcgtgtccagagtttgttccttcagatgttcagatgtgtccggagtttcttccttccagtgggtttgtggtcttgctgacttcaggaatgaagccacggaccttcacggcgagtgttacagctcttaaaggtggtacagacccaaagagtgagcgagcagcaagatttattatgaagagcgaaagaacaaagcttccatgctgtggaaggggacccgagtgggttgctgctgctggctcaggtggccagcttttattcccttatttggccccacccacatcctgctgattgttgtgcttacagtcctttagctagacacagagcactgattcgtgcatttttacagagtgctgattggtgygtttacaatcctttagctagacacagagcactgattggtgcgtttttacagaatgctgattggtgcatttacaatcctttagctagacacagaaaagttctccaacttcccactcgacccagga

SEQ ID NO: 954462 - DNA, 562 bp, Homo sapiens
  misc_feature 90: n = A,T,C or G
atttcaatacatgtaaaaattgtgggatgatcacatcagagtaattagcatatccaccatctcaaatatttattgtttctctgtggtganracattaaaaaccctctcttttagctcttttgaagtatacaacacattattattagctttagtcaccttgccgtgcagtagaacaccaggacttactcctcctatctagctgtaacttcgtacccattgataaattatccctcctttctggttcaccccccgccccttccccaagactgtggtaaccacgattttaccctctacttctagaagttcaacttttttagattccacatataagtggatcatactgtatttgtctctctgtgcctggcttatttcacttaacataatatctgctaggttcatccttgtcacaaatgatagaattccctatttttttaaaggctgaatagtactccattgtgtatatacatcaaattttaaaaacccattcatctgttgatgaacatttagattgtttctataccttggctaacatgcatactgctgcaatggacgtgggagtata

SEQ ID NO: 954463 - DNA, 635 bp, Homo sapiens
tttacatttaccaaactcatcaaattgtccactgggggggaaaaactattattttcactgtatacgaaaacttcgcctcaacaaaaaatgaactaaaaaagaaaaaaaaggggaggggggctggcgacgttgaaaagtaacgctaaactatgtaaggatttgataattggggtaagccttttctttaaaacgtctagtaaagaaaacattccaagaaggtctgctagattctgtgactaaacaaggacattaaaaagccctgaatccagcttggtcaacgtagtgaggccctgtctctacggaatttttttaaagttagccaggcgtagtggtgcgcgcctatagtcccagctactcgggaggctgaggtgggaggatggtttgaacacagcagctcaaggctgcagttagcagtggtcggtgcccactatactccagcctaagggacagaaaccttgtctcaaaaaaaagaaaaaagaaaaaaaaaaaaagccttgcgagctctgggggagatttcccgcagcccagctttgccagggacccagcctcacccctcgggctccaccgcccactcccgcccttcacctgacgtgagcrccccgactgctccactccttctcatcccgcgtcgcggt

SEQ ID NO: 954464 - DNA, 666 bp, Homo sapiens
tggcattaagcacatgtccatttattcacacatatatttgaatttaataaatatgctattcatcccatamagtgtacacttgcacagaagaaaaacacacttagcccctctttctcgaagattctatatactgcaggctggttgctccctagttttgccgtatttcctaggggtaataacccctgtttgggatatttcctctccacttccattccagacccaaacaataaaatacaatcctggaatgaaaagcatgctcatatctctagtgtctattttctagagttttggtttatattgataatctgaactgtgaatattacataaaccttcaggctaatagtggacagtcttggcaggtaacatgaacccaggcaattttaaaagctgtgatagatatatttaatgctttataataaaaatactaaacatgtattgagtctatcattttcctgatgggactggccatgaaacaggcagctcccaaatggatgtagaaaaaaggcttctaactccacctccctaaaaagatggtcagaagtacaaaagacaacatccatggggaaactgaagcctgagatgggcgtatcagacaggaatttcttggtagtgacagcattttgatgggaaataccaacaggctaaaaagaaacacagccaatttct

SEQ ID NO: 954465 - DNA, 666 bp, Homo sapiens
tggcattaagcacatgtccatttattcacacatatatttgaatttaataaatatgctattcatcccataaagtgtacamttgcacagaagaaaaacacacttagcccctctttctcgaagattctatatactgcaggctggttgctccctagttttgccgtatttcctaggggtaataacccctgtttgggatatttcctctccacttccattccagacccaaacaataaaatacaatcctggaatgaaaagcatgctcatatctctagtgtctattttctagagttttggtttatattgataatctgaactgtgaatattacataaaccttcaggctaatagtggacagtcttggcaggtaacatgaacccaggcaattttaaaagctgtgatagatatatttaatgctttataataaaaatactaaacatgtattgagtctatcattttcctgatgggactggccatgaaacaggcagctcccaaatggatgtagaaaaaaggcttctaactccacctccctaaaaagatggtcagaagtacaaaagacaacatccatggggaaactgaagcctgagatgggcgtatcagacaggaatttcttggtagtgacagcattttgatgggaaataccaacaggctaaaaagaaacacagccaatttct

SEQ ID NO: 954466 - DNA, 666 bp, Homo sapiens
tggcattaagcacatgtccatttattcacacatatatttgaatttaataaatatgctattcatcccataaagtgtacacttgcacmgaagaaaaacacacttagcccctctttctcgaagattctatatactgcaggctggttgctccctagttttgccgtatttcctaggggtaataacccctgtttgggatatttcctctccacttccattccagacccaaacaataaaatacaatcctggaatgaaaagcatgctcatatctctagtgtctattttctagagttttggtttatattgataatctgaactgtgaatattacataaaccttcaggctaatagtggacagtcttggcaggtaacatgaacccaggcaattttaaaagctgtgatagatatatttaatgctttataataaaaatactaaacatgtattgagtctatcattttcctgatgggactggccatgaaacaggcagctcccaaatggatgtagaaaaaaggcttctaactccacctccctaaaaagatggtcagaagtacaaaagacaacatccatggggaaactgaagcctgagatgggcgtatcagacaggaatttcttggtagtgacagcattttgatgggaaataccaacaggctaaaaagaaacacagccaatttct

SEQ ID NO: 954467 - DNA, 666 bp, Homo sapiens
tggcattaagcacatgtccatttattcacacatatatttgaatttaataaatatgctattcatcccataaagtgtacacttgcacagaagaaaamcacacttagcccctctttctcgaagattctatatactgcaggctggttgctccctagttttgccgtatttcctaggggtaataacccctgtttgggatatttcctctccacttccattccagacccaaacaataaaatacaatcctggaatgaaaagcatgctcatatctctagtgtctattttctagagttttggtttatattgataatctgaactgtgaatattacataaaccttcaggctaatagtggacagtcttggcaggtaacatgaacccaggcaattttaaaagctgtgatagatatatttaatgctttataataaaaatactaaacatgtattgagtctatcattttcctgatgggactggccatgaaacaggcagctcccaaatggatgtagaaaaaaggcttctaactccacctccctaaaaagatggtcagaagtacaaaagacaacatccatggggaaactgaagcctgagatgggcgtatcagacaggaatttcttggtagtgacagcattttgatgggaaataccaacaggctaaaaagaaacacagccaatttct

SEQ ID NO: 954468 - DNA, 711 bp, Homo sapiens
atgtagtctcatacatttcctgaaaaataaartggactgtattagtctgttcttgcactgctgtaaagaaatacctgaagctggtaattcataaagaaaagaggtttaattggtccacagttccacagactgtttaggaggcatggctggggaggcctcaggaaactttcaatcatggtagaaggcgaaggagaaggaggcacatcttatatggctgaaaccagaggaagagagagtggagagggaggagctacacatgtttaaacaaccacatcttgtgagaactcactcattatcaggagaacagcaagggcgaaacctgcccaatgatccagtcacctcccaccaggccccttttccaacactgaggattacaattcgacatgagatttggatggggagacaaattgaaaccataccatgggtgtaagtgaattggtggcccatccttctccgtgtatctgttagtatggaaactgcctatacacaaatacgttatttcaaaagtaatatcctctgaggggctagttcaaattccctgggctgtgcaagtaagcagattgcctctgccctgtggatctcactaaaggtctaaagccatatggatggacaaaagaatgctcttaagcagagataggttaaagcatagtaaatccatagaatggattacaatgcagctataaaaattcacgaggtagaagaatatgtatt

SEQ ID NO: 954469 - DNA, 609 bp, Homo sapiens
tttcttgaagcaagacctgactagatctgttcccacatgaaccagagagcaccagcggggagggggagaaggaggtctgagtgccttgctaatattaagatggagttgattttaaaatggagtcaccctggctcttctaggctcccgtttacctaacacttctagcaaaacctagcccggtgaatatcatgatctcgagataggagccatgataagatgagcagctcaccatcccttagggagaagcctaaaggggaaatggtgaagccgacctgccacctcatgaagttcagtgacaatcccctcctctaacaaagctaaagtcttttctcagttaggaaaaattgctcttgggcaggctggagagatttacgggaaatcagagactcaacctatcttcataacagcaaagattttaatttagtttcacagggcatgggtatctatgtcaaaatacagacaacacccatcattcattggatatacaaccagttgtaagatcctatcatataaaatgtctatgagtaatttaatgtcaatttggaggggcatcaagaaaatactattacacagtrctcatttctgtgctctgtctcttccaagtcttaa

SEQ ID NO: 954470 - DNA, 813 bp, Homo sapiens
tctaggcaagaggaaatgaatttggttaaaacatttaatgggaactgcagggggtggatacctatgctgttagaaatgtttgttatattgaccaggcgcagtggcttacgyctgtaatcccagcactttgggaggccgaggcaggcagatcacgaggtcaggagttcaggatcagcctggccaacatagtgaaaccctgtctctactaaatacaaaaaaattagccgggcggggtggtgcatgcctgtaatcctagctactcaggaggctgaggcaggaatgttgcttgaacctgggaggtggaggttgcaataagctgagattgagccactgcactccagtctgggggcgagggagtgagactccgtctcagaaaaaaaaaaaaagaaaggtttgtcatagagatttgcaggagaaaaaaaacttggtctgttttagaatctatgtgtttccttaaagtcctagcatgagcgactccattttggtttggtttgttgaggcctagtgcatgagcctagtccaaaacaatggccttccataattttgtttaaaaaattaccctttttggttaggctgtcatttaagtgagagtgtgaccaaaccttagggacttagcgccactctcagttaccatcattttgggtttcctatctcagcacatcatttatagcttatagtgtccttatggttgcacatttttttagctcctgttattccagttgaagagagaccatttgacattctagagatggctgcacgcaagcatttaaaacctttgagagaatagagcgcaccagggagactattattatg

SEQ ID NO: 954471 - DNA, 580 bp, Homo sapiens
ccttgggtatcataaactgattgtgtgatgcttatgcaagggattttctcctccctgagactctgggtcatcatctgttaaatgggtataataagtactgaagtgagtcaaatagtgccccgccccaaaattcatgtccacccggaacctcagaatgtaacacttggaaataggatctttgcggatataatttgttaagatgagatcatactgggtgagagtgggccccaaatccagtgactggtgtctttataagggaaagagagggcatgcagatatacacacagaggaaactccatgtgaatctggaggcagaatttggaatgattcatttacaagtcaagaaatgttacacattgctagcaaccacgagaagctaggagaaaggcatggaacggattctccctcaaagcctccagaaggaaccaaccctgccatctgtaatttcagacktcaggactcctgaactgtgagagaacaaattgctattgttttcaaccacgtaatttgtgagaatttgttatagctgccctaggaaatcaatacacctaccttctgaggctgttatgaggatttccaa

SEQ ID NO: 954472 - DNA, 635 bp, Homo sapiens
atgactcggaatgatgggctattcggaaatggctagggaaacaactgtttccctactgtcctggtgggacccaccctgggctaacgggcttcccaaggaagtcctagtggctctggggtcctgaagtccccaaatgggaacctaggctgagagaagcaaggctgtgagggcatccaaagggctgcctcaggttttgttcctgagaacgaagcgtggccccggaggctcaggcgtgctcagtggggccagggccaccagcatgggagtgggcaggggctgccacctgtagggggccagcactgggctccggggacgccagcagaggggccgagaggccatcagcagagtctgtgtcgaggtccagcctcccgtaagcttcgcacagaggcaggtcattagcttcgcaaaggcttgagcttttccaccaccagaaaccccagggagagacaggagcaggcagagaggaaagccaggggaggggagagcaagacagaagcagagttaagaaaacacgaccacaccccagaccwgcctttccctttctccactcctgctccatctgtcccctgagttggcaggcctggcaaggagaggcggccagtggtgagagccaccctagcattctgaaaggagga

SEQ ID NO: 954473 - DNA, 534 bp, Homo sapiens
gctgggtggacactccacttccagataagaggggatcttgtggatggtggtggaggcgctcctggccctactgggctccggcactcagcctgccytgccacaaaggcagcccatactagaggctactgcacgtcaggagaggggcaggctcaaaaccagaaaagttatactctgggctctgccagccccaccctcccaatccaggaaacccaattcatccaaatatgagtatcaatatccacccaaagataccagagggaaaaaagaaacctaaaaggagcgggtggccagtgcagtgctcactcctgaatcccagcactttgggaggctgaggcgggaggatcgcttaagcccaggaggtcaagactgcagtgagttgtgactatgtcactgcactccagcccaggcaacaaagcaagaccctgtctcaaaaacaaacaaacaaaaagggaacagcaagacttccctgcagatgaagaaaacacagagaaaaccactgccacaaagccaagtgaaagtggcaagccagcgggc

SEQ ID NO: 954474 - DNA, 603 bp, Homo sapiens
ttagtagagatggggtttcatcatgttgaccaggctggtttctaactcctgtcctcaaatgatctgcctgcctcagcctcccaaactgctgggattacaggcatgagccactttgcctgactgacaattttctatttctatcattttgtctatgtttattagttggcatttttctataaaaaggacttcccttctcttcctaatccctttaacatttcttaatatcagtatgaactcatgaattctattttattgagtatgaattgccccaaatttgatgagtggcagcccccataaactggttcttgtatctctttgacacatcttcctcagtttttgagcacttttaacatttctggcacaataagatgttccaggctcacctgaaaatgagctatgcttccaaagggtctggtgaatggtatttagagagcaagatatgggtgctgtgtgtgctcactactctgtggcaaaattgcttttagggcctttcaatgcacagaacaggaaaatacttctgtcaaaatcatgaattcataatgataccaccaastgatacccaatccaataatataggatcttcctcctctccttcccctaatc

SEQ ID NO: 954475 - DNA, 601 bp, Homo sapiens
ttataaattacccagtctcaggtacgtctttattagcagtgtgwgaacaaactaatacagtaaattggtactggtagagtgaggtgctactgtaaagatacctgaaaatgtggaagcaactttggaactggtgaacagggagaggctggaacagtttggagtgctcagaagaagtcaggaagatgtgggaaagtttggaacttcctagagacttgttgaatggctttgaccaaaatgctgatagtgatatggacaataaagtccaggctgacgtggtctcagagggagatgaggagcaaaggagactcttgttatgttttagcaaagagactggtggcattttgctcctgccctagagatttgtggaactttgaacttgagagagacgattttggggcatctggcagaagaactttctaagcagcaaagtgttaaagaggtgacttgggtgctgttaaatgcattcagttttatatattcacaaatatatggtttggaattataacttatctttaaaagggaagcagagcataaaagttcaaaaaatttaaagcctgatgttgcgatagaaaagaaaatctcattttctgaagagaaattc

SEQ ID NO: 954476 - DNA, 636 bp, Homo sapiens
ggatgctaagacacaagaactgcttgaaccctggaggcggaggttgtggtgagccaagatctcgccactgcactccagcctgggtgacagaggagtgagactgtctccaaaaaaaacaaaaacaaaaacaaaataggaagaaataccctgtaatccatccccacccccagccccacccaggccaggccagcatcttgtgatgaaggatgctggtcagtcaccgctgtgtgctgagtgaagagaaacaatgtcttatcatattatatattatatattatatattatatattatatatatatatcttttccccccccctttgagaccgagtctcactccgttgccccggctgagtgcagtggcacaatctcggctcactgcaacctccaccttccaggttcacgcgattctcccaccttagcctcctgatgaataatatttttatatgatatgaacactgagagctatcgaaggtgaaaagttttctttccagccctgacccctagcactttcctgcccaagagacaacgagagataccaatttcctgtgaatcattccggagktgtcctgtgcttacaccagcatgtgtgtataaatgttctcttttcccttttccgcacgctggtgtcagagcgta

SEQ ID NO: 954477 - DNA, 585 bp, Homo sapiens
agaatgaagaggtggaggctattttattttatataatcaagaaaggctttcctgagtatatagaagacattyaaattggccctgaaacatgagaagtttctatgcatatggtgggtgggtgcaaaattatttcagacagaggaaacagtgcgtgcacagatctcactcagaagaaagagccactgtatcacagggaggaatgggggaatgaatggctggaaataaagttggagagacgggcagagacctgaaaattcagtttgttgtacttttctcctaagatgtgtggagtttttatcatataaagaaaagctatttttgataaatacttttaatttcctacctaagtggcattccttctgctcccccttttctttgttttaattgttattgttattagaatcctgctttattcagaattccaaccctcaggaagatttttttcagctctagagcaaacttggttaatctaaattagtaatgtattaaaacatgtttagctaacttttcagagggtatgaaagcctaatttgtagcactttccagtttttgtggtgtaaatacttccatggtggtcattttcag

SEQ ID NO: 954478 - DNA, 621 bp, Homo sapiens
taaaaatatatttttcctgcaagatgcagrgactcaaacctcagcctttatgccctacatgtgtttaactggcaaacgtttatcatgctttaggtttaaaagttatctctttcaacagttggagaggttatttttgcataatgttaaaagccttaataataattaacatgcccaagagaatgaactgggtggggttatatattcaagaggtacattaatggactacaggtcagacgggaagacagtatcttcatctcatttaactaagtgctttagttttactttttaaaatagggagcagaggcaacagcttccatactcacctgtagtgttctttctaaaccctgtatattcaggcgaaagccacttttctgctggttagatgcaaggttctatgacaacagttggtaattagagatgaactctggtgggaaacaatgagggataatcataagacagacaaatccctcacctgtgatgtgttggtggaggaattactatttgcttgctgttgctgaatttgtgcaagctgctgtttctgcatgagtgccagttgctgttgatgttgctggtattgttcggctgtaaatgctgaacataaaataaagaaacactttataa

SEQ ID NO: 954479 - DNA, 457 bp, Homo sapiens
aaaaacctgacttaaaattccagcttggccaattacactttccataaattattttctctctgccttggtttcttcacttgtaaaaagaaaataagattattatgaggatgaaataaaatagtatatgtaagcaggaccggttatataattagttgggcctgatgcaaaatgaaaaagtgggctccttgatcaacaactattaagaattacaagatggtgacagcagggcattaatccaaatgtggggcccttttaagtgcaggaccttatgcaactctacaggtcacatgcctctgatgccagacctgtgtgtgagaaatagagtgtaaaacacatagcasgtgcttaatatatggtaactgctgtccctttctttgctattttcattcagatttccttttcctgaatgaaaaaatatgtattcactgtaatcagattttgttttacctgtagtatt

SEQ ID NO: 954480 - DNA, 567 bp, Homo sapiens
aagtggccagactgctctttatgcaggtccccaatcccatttcttctcactggttgggatctctagactggggtctccagccacttcctgttggtgagtttgggttgtcaacaggtctgtacctcctgggatggagctcccagaagaagaaggctgccagttttgctgtttcacagccttcactgttgataccatcaggtgctgaaaaatctgaggtgactagggactggaacagatccacagcatactgcatcagcagtggaaaagtggctagactatttttttacatttatggggtccctgatcccacatctcctcactgggtgggtcctcccagcctgggccttcagccaccccacaccagggctatcaagccagtatgagctctgcaactcccagggacaaagctccaagtaggaggggtgggttgtcatctttgctgtctttcagccctttcatttgctgtctccaggctatggagagtccayggggaccaggggcttgtccagatccacagcatggagaacaacctcatggaaaagtggccagactagtctctacacagtt

SEQ ID NO: 954481 - DNA, 567 bp, Homo sapiens
aagtggccagactgctctttatgcaggtccccaatcccatttcttctcactggttgggatctctagactggggtctccagccacttcctgttggtgagtttgggttgtcaacaggtctgtacctcctgggatggagctcccagaagaagaaggctgccagttttgctgtttcacagccttcactgttgataccatcaggtgctgaaaaatctgaggtgactagggactggaacagatccacagcatactgcatcagcagtggaaaagtggctagactatttttttacatttatggggtccctgatcccacatctcctcactgggtgggtcctcccagcctgggccttcagccaccccacaccagggctatcaagccagtatgagctctgcaactcccagggacaaagctccaagtaggaggggtgggttgtcatctttgctgtctttcagccctttcatttgctgtctccaggctatggagagtccacrgggaccaggggcttgtccagatccacagcatggagaacaacctcatggaaaagtggccagactagtctctacacagtt

SEQ ID NO: 954482 - DNA, 548 bp, Homo sapiens
ttaatttatgaattcggatggagatattctataatttcattttcatctcataactggaataatttcataaaaaaatccttcccctcctcaaccatttggttgctcagtatttcaatttatataagaaaggctctcttatcaaggcttcctcccccttcccccttttagtcattattcaagaaaataaattggttctctatcatcttataaatttaaaaaatactattatggactcatggatttggacatattttataagtttgaacccactgcaattcctttttttgttgaacctcaaactatcccatctttgaccagtagtatcctcttgaaggtggcccttgattcatgttgatagctaactgtctgatacgtcaagatagtccacatgcttcttgtacatttcttgccccagacttgaaatgagcaatttcttcaagaaaatctggcttattttaatgggaactaattgcastaatggagattttgctgctgtgttgatcattttctaggattcttcagtgtacatttaggacatacatatacaa

SEQ ID NO: 954483 - DNA, 631 bp, Homo sapiens
ttcttcatctgtaaaaggtaaagaacagcagcactgaccctttgtgaggggtaagtgagggcatgtgtgcacagtgcctagcacrgtgcctggtatgtggtagatgctcaaaaagtgtcccttaaatgaaagaaaggctatttaagttctttttttttttttttttgagacggagtctcgctctttcgcccaggctggactgcagtggcgctgtcttggctcactgcaagctccgcctcccgggttcacgccattctcctgcctcagtctcccgagtagctgggactacaggcgcccgctaccacgcccggctaattttttttgtatttttagtagagacggggtttcaccgtgttagccaggatggtctcgatctgctgacctcgtgatccgcccgcctcggcctcccaaagtgctggaattacaggcgtgagccaccgcgcccggccaaggctatttaagttctgtcccaaagggccttctcttgataacagcaataataacttggacttttaaagtgctttacattctacaagtattttgttgggggcagggcatggattatcagccccatttcagtgataaggagaagcacacaaagagaaagtggctgtcctgaggtcacaggcag

SEQ ID NO: 954484 - DNA, 390 bp, Homo sapiens
aagagcagaggagcggaagagcacaccgacaggcaccagcaaatgctggtaggccatcaacagtggaacaatgtggaatttggctggggatggtcagagaagagtccggacgctgggcagcctgactccaggggaagacaccttcccactccttcccccttctggcctccccattcacctcactgagaactacctccactcagtaaaaccttgcacttattctctaagcccacgtgtgatccaatttttctggtacactaaggtaagaacccaggagagagaaagccctctgtccttgtgataagkcagagagtctaactgagctgattaatgcaagccacctgcagacggctaaactgaaagagtgcactgtaacacacgtccactggg

SEQ ID NO: 954485 - DNA, 680 bp, Homo sapiens
ttaattttttgtagagatagtgtctcaccacgttgcccaagctggtctcaaactcctcaactgtagcagtcctcccaccttagcctctcaaagtgctgagattgcaggygtgaatcactgtgcctggcctatttaagatgattgttttcttttttgagacagagtctcgctgtgtcacccaggctggagtgcagtggcaccatctcagctcactgcaacctctgcatccctggttcaagcgtttctcctgcctcagccttccaagtagctgggattacaggcatgtgcagccatacccagctaatttttttatttttagtagagatggggtttcaccatgttggccaggctggtctcaaactcctgacctcaggtgatctgcccgccttggcctaccaaagtgctgggattacaggcatgagtcaccgcacctggcctatttaagatgattttaaatcatgttagcaatgcataattattataaaaatttgaaacaaacccccttaacgtctctgaaataactctaatgacatcttacatagccttctggaaattatttctatgtatatttctatgtcactgtgtgtgtttgtgtgtattcccaagtggaataatgaacattattgaataccctttctttgccaggatacgtaaacatgaaattttttttttaaactttc

SEQ ID NO: 954486 - DNA, 664 bp, Homo sapiens
cgagtgggcagggaggcaatgtagatataaacaactcatgaagatggctgctgcctgacactgacttgggccaaaatctgccagatttaagctgagataattcaccataatctaaaatgttcttcaggcatcactgcggcacagtgatgctgtttttgaggtgctgtctgtgaataccttctagaagagtctccatgactagctcagcagctaaacctccccagagaggaacagaacagaccctctgattccagttggccaaggcagaccacagacctgggctctgcccacagcacgtacctgtcagtgtcaccctcacccatggccacctgggcaggaaacgtcagaggactcctggagccatgccaaactcagagtccgtccctgccccactctccatcgtgaactcacagcctccagcctcctctgccccaggccagcgccttatcatggtttttagtcagaagacaagagccacatgagagccctgtggccatgctgaaagggtgggtgatgggttcggagctggggagctggcagagtccaaccttggggacttyccagccctgtcgacaagctgtgtagataacacagcccaacagcgagaggggagcgagatgcttcaccatgtggtggggatgcctggccctagtcctgctctggc

SEQ ID NO: 954487 - DNA, 636 bp, Homo sapiens
gcagttgcaggcagtgttgctcaggctacaaagccacattcctctcaaggctctarataatttgaagttccaatagctttaagtcccaattattttaagtttgaatttaatttcacaacactcacccatactcacacacacacactcactcacaattttctgacaccggctgggtgtccaataatttggacactacccagagttagtgcagactccacgggctgctcctccttcagatgccagccacaagtgggcttcccaggcaactgcacttctgtccaatttggcttcaaattcaggagttcccatgatctccattcaggtttgataatccgataggacaactcaaagactcacaaagtgttatacttccaattacagttttgtataaaagatacagcacaggaaccaccaaatggaaaaggcacatagggcgaggtctggggcggggcagccacagagtccccatcacctctcctcctattcgcagggggagtccagatgggtctgcagcatcctcagttcttgcctcctcagaagaaagaatttgaccaagggggcataaggcagagtgagagaccgaggcaagttttagagcaggagtgaaagtttattaataaagctttacagcaggaa

SEQ ID NO: 954488 - DNA, 642 bp, Homo sapiens
aagccacattcctctcaaggctctagataatttgaagttccaatagctttaagtcccaattattttaagtttgaatttaatttcacaacactcacccayactcacacacacacactcactcacaattttctgacaccggctgggtgtccaataatttggacactacccagagttagtgcagactccacgggctgctcctccttcagatgccagccacaagtgggcttcccaggcaactgcacttctgtccaatttggcttcaaattcaggagttcccatgatctccattcaggtttgataatccgataggacaactcaaagactcacaaagtgttatacttccaattacagttttgtataaaagatacagcacaggaaccaccaaatggaaaaggcacatagggcgaggtctggggcggggcagccacagagtccccatcacctctcctcctattcgcagggggagtccagatgggtctgcagcatcctcagttcttgcctcctcagaagaaagaatttgaccaagggggcataaggcagagtgagagaccgaggcaagttttagagcaggagtgaaagtttattaataaagctttacagcaggaacaaaaggaaggaaagtacacttggaagagggtcagg

SEQ ID NO: 954489 - DNA, 577 bp, Homo sapiens
gggcggggcagccacagagtccccatcacctctcctcctattcgcagggggagtccagatgggtctgcagcatcctcagttcttgcctcctcagaagaaagaatttgaccaagggggcataaggcagagtgagagaccgaggcaagttttagagcaggagtgaaagtttattaataaagctttacagcaggaacaaaaggaaggaaagtacacttggaagagggtcaggtgggtgacttgagagatcaagtgcatggtttgacctttgacttagggttttctgtgttagcatgcttccagggtcttgtgtccgtcccttctcccctgagtctcagagtgggcttcttcccctggggtgggctgtctgcatgcgcagtggtccgccagcacttgggaggggccgcatgcgcagtgtgtttactggagttgtgcgcatactcatttgaggccttcttcccttaccagtccggtgtttctagaagaaggycctatacaagttacactccgccattttgcctcttagtgctcatgcttgagcccacgggcacagtttgtgagatgtaatcgagaagatgct

SEQ ID NO: 954490 - DNA, 550 bp, Homo sapiens
ctccagtgtctatgcttcccatctttatgtctataaggrcccaatgtttagctcccacttataagtgagaatgtgtggtgtttggtttttctgttcttgtgttaattctcttagggtaatggccaccagctgcatctatgttgctgcaaaggcgtgattttcttctttgtgtggctgcatagtattccatggtatatacgtaccacattttctttatttagtcaccatcaatgggcatctaagtagattccctgtctttgctattgtgaacagtgtggcaatgaacatacaggtgcacattctttttggtagaacaatttattttcctttgggtatatacccaggaatgggatttctgggtagaataatagttcagctcttggttatttgagaaatctccaaactgctctctacagtggctgttctagtttacattctcagtatatataactatacccttttctccataactttgccagcatctgttattttttgaggttttaacaaaagccattctgactggtgtgaaatggtatcttattgtggtttc

SEQ ID NO: 954491 - DNA, 569 bp, Homo sapiens
atcagatggtcatatgtgtgcagccttatttctgggcttgaaatagattctgttccattagtytgtatgtctgtttttgtatgagtaccatgctgttttggttactgtagccctgtagtatagtttgaagttgggtaatgtgatgcctccagctttgttctttttgcttagcatttctttggctatttgggctcttttttggttccatatgaattttaatagttttctctagttctatgaagaatattattggtagtatgataggaatagcattgaatctgtaaattcctttgggcagtatggccatttttaatgattttgattcttcctagcatggaatgtttttccatttgtgtgtttcatctctaatttctttgagcagtgttttgtaattcttcttatagagatatttcacctccctggttatctgtatttgtaggtatttttttttgtggcagttgtgaattggattgtgttcccgatttagttctcagcttggctgttgctgatgtatataaatgctagtaatttttatacattgattttgtatcctgaaagtttgccaaagt

SEQ ID NO: 954492 - DNA, 639 bp, Homo sapiens
actccctcagcttctacctccaaaccttcaaaattacccatatctgtacctgccctctgcttccttctgccttcccagaggaaaaggagtcctcttcctatttctacccttcctgtctccttcatgactaagacttattccctgggctactctcgtatagtttcaacttattccactccactggcttttcctcaacaacggataaaatttaagtctcttcaatgttttagaaacaaatactttgatcctacatctctccctacccactcactccctttctctctttttcactccacagccaaactgcctgcccactatctccactccccgccagctcactcattccttggccttctgtcatcagactgctgctgcaacctcatagcaaccactctgggacataacaccaacgatcttccactgggcaattccaatggactctttcttgtcatgtttgaccttcaggtggcatttgatggtggtgaccattcctttcctaaaagctccctttttcyttggcttctctgataacactgcactccctggttcagctctgcctctttgaccagtactctcacctcaaaattttttaaactgatttttaattgacacataataattgtacatatttatggagta

SEQ ID NO: 954493 - DNA, 639 bp, Homo sapiens
actccctcagcttctacctccaaaccttcaaaattacccatatctgtacctgccctctgcttccttctgccttcccagaggaaaaggagtcctcttcctatttctacccttcctgtctccttcatgactaagacttattccctgggctactctcgtatagtttcaacttattccactccactggcttttcctcaacaacggataaaatttaagtctcttcaatgttttagaaacaaatactttgatcctacatctctccctacccactcactccctttctctctttttcactccacagccaaactgcctgcccactatctccactccccgccagctcactcattccttggccttctgtcatcagactgctgctgcaacctcatagcaaccactctgggacataacaccaacgatcttccactgggcaattccaatggactctttcttgtcatgtttgaccttcaggtggcatttgatggtggtgaccattcctttcctaaaagctccctttttccttggcttctctgataacactgcactccctggttcakctctgcctctttgaccagtactctcacctcaaaattttttaaactgatttttaattgacacataataattgtacatatttatggagta

SEQ ID NO: 954494 - DNA, 581 bp, Homo sapiens
tttattggagttcactagtatatgatgtttttctcctattactgcccaaaattacactttttctgtttcttcattaagcaaacactttattctttccaactttattgagttataatagaaaagtattatacatatttatggtatataatgtgatgttttgatatatgtatacattgtgaaatgattaccataattaagctaatatatccaacacctcacatagtcactgtatttgtccattttatgctgctataaaagaatgcctgaggctgggtaatttataaagaaaagaggtttattttggctcacagttctgtagatggttcaagaagcatcgtgccagcatctgcttctggtgagagcctggggaagcttccaatcatggtggaagctgaaggggagcagccatgtcacatggcaagagaggaagaaacagagagatgccaggctcttttaaacaaccatctctcrcgtgaactaatagtgtgagaactcactctttaccgaaaggacagcaccaagccactcatgagggacttgccccatgacaaacacctcccaccaggccccacctccaacac

SEQ ID NO: 954495 - DNA, 611 bp, Homo sapiens
aactattctcaagggaacttactgtataagaggaattttacagggtttttttttwttattattatactttaagttctagggtacatgtgcacaacgtgcaggtttcttacatatgtatacatgcgccatgttggtgtgctgcacccattaacttgtcgtttacattaggtatatctcctaatgctatccctccaccctccccctaccccatgacaggcccgggtgtgtgatgttccccaccctgtgtccaggtgttctcattgttgaattcccacctatgagtgagaacatgcagtgtttggttttctgtccttgcgatagtttgctgagaatgatggtttccagcttcatccatgtccctacaagggacatgaattcatccttttttatggctgcatagtattccatggtgtctatgtgccacatttgcttaatccagtctgtcactgatggacatttgggttggttccaagtctttgctattgtgaatagtgctgcaataaatatacatgtgcctgtgtctttatagcagcatgatttataatcctttgggtatatacccagtaatgggatggctgggggaattttacaggttttatatgatccctaga

SEQ ID NO: 954496 - DNA, 624 bp, Homo sapiens
tccccttaagtcaaggaaaaggcaaggatgcttcttcttaccgtgtctacccaacattctccgagtgattctagacagtgcaatagggcraggtaaagaaatacaagcatagaggttccaagatggccaaataggaacagctccagtctgcagctaccagcgtaagcgacgcagaagacgggtgatttctgcatttccaactaaggtattgggttcatttcactggggcttgtcagacagtgggtgtagcccatggagcagggcggggcattgcctcacccaggaagcgcaaggggttggggaattccctttcctagcaaagggaagccgtgacagatggtgcctggaaattcaggacactcccaccctaatactgtgcttttccaatggccttagcaaaaggcacacgaggagattatatcctgtgcctggctggtgggggcggtcccacacccacggagccttgctcactgctagcacagcagtctgagatcaaactgcaaggcagcagggaggctgggggaggggcatccgctattgctgaggcttgagtagtctcagcggccgtgaataagtgcccacctcatgtgcagagacacacaaagtggccgggaagctcgaact

SEQ ID NO: 954497 - DNA, 624 bp, Homo sapiens
tccccttaagtcaaggaaaaggcaaggatgcttcttcttaccgtgtctacccaacattctccgagtgattctagacagtgcaatagggcgaggtaaagaaatamaagcatagaggttccaagatggccaaataggaacagctccagtctgcagctaccagcgtaagcgacgcagaagacgggtgatttctgcatttccaactaaggtattgggttcatttcactggggcttgtcagacagtgggtgtagcccatggagcagggcggggcattgcctcacccaggaagcgcaaggggttggggaattccctttcctagcaaagggaagccgtgacagatggtgcctggaaattcaggacactcccaccctaatactgtgcttttccaatggccttagcaaaaggcacacgaggagattatatcctgtgcctggctggtgggggcggtcccacacccacggagccttgctcactgctagcacagcagtctgagatcaaactgcaaggcagcagggaggctgggggaggggcatccgctattgctgaggcttgagtagtctcagcggccgtgaataagtgcccacctcatgtgcagagacacacaaagtggccgggaagctcgaact

SEQ ID NO: 954498 - DNA, 745 bp, Homo sapiens
tggcataacaggtttctgccgaaaacagattcccaggtacagcaaaatagccagaccattatatacactaattaaggaaactcagaaagccaatacctatttagtaagatggacacctaaacagaagtggctttccaggccctaaagaaggccctaacccaagccccagtgttcagcttgccaacagggcaagatttttctttatatgccacagaaaaaacaggaatcgctctaggagtccttacacaggtccgagggatgagcttgcaacccatggcatacctgaataaggaaattgatgtagtggcaaagggttggcctcattgtttatgggtagtggcggcagtagcagtattagtgtctgaagcagttaaaataatacagggaagagatcttactgtatggacatctcatgacgtgaatgacatactcactgctaaagaagacttgtggctgtcagacaactgtttacttaactatcaggctctattacttgaagggccagtactgttaacccagccacatttcttccagacaatgaagaaaagatagaacataactgtcaacaagtaattcctcaaacctgtgctgctcgaggggaccttttagaggttcccttgactgatcccracctcaacttgtatactgatggaagttcccttgtagaaaaaggacttcgaaaagtgggctatgcggtggtcagtgataacagaatacttgaaagtaatcccctcactccaggaac

SEQ ID NO: 954499 - DNA, 559 bp, Homo sapiens
acctgaggacaggagtttgagaccagcctggccaacatggtgaaacgccgtctctactaaaaatacaaaaattagctgggcgtggtggcgggcgcctgtagtcccagctacttgggaggctgaggcaagagaattgcttgaacctgggaggtgaaggttgcagtaagccaagatcgcgccactgcactgcagcctgggcaacaagagtgagactccatctcaaaaaaaaaaaaaaaaaaaaaaaagaatgttatagaatgtggcagaagtaatgccatgtggcttccaagcccgtcattaaaaagttacagtttccacctggctctctctaacatttgaaatgcacactcgggaaggccagctaccatggcataaggacactcaagcagccctgtggagaagtgcgtgaggagaggaactgaggcctcttgccgacaaccagcatcaacttgcaaaccacatgagtgagctaccttggaactggattctccaaccttcgtacagcctttgsatgttgcagccccagccaacatttgactgtagcctcatgagagacccc

SEQ ID NO: 954500 - DNA, 598 bp, Homo sapiens
cccaatctcttccagctgacttgcagggtttctgctgagaagtttggtgttagtttgatgggatttcccttataggtaatcccttctctcttgctactcttagaatttcttctttttccttcacactgactttgaacagtctgatgactatatgcttagatgaggttcttcttgcaatttatctttcaggagttctctgagcttgtttctggatgtctaaatctcttcccagactagggaagttttccctaattacttcctgaaatagcttttctacactttttactttttcttctgtagaatatctataacctgtaagtttggatgctttatacaatcccatatttctccaagactttttcactttttttttcttttgagatggagtttcactctgtcacccagtctggagtacagtggcaccatcttggctcgccacaacctccacctcctggaatcaagcgattctcctgcctcagcctccaaagcagctgcaattacagtcacacgccacaaygccctgctaattttttttttgtatttttagtagagatggggttttcaccatgttggccaggctggtctcgaactcctgacc

SEQ ID NO: 954501 - DNA, 609 bp, Homo sapiens
accacgccctcccatgttctacggccgacagagttctaatttctccctggsacggagtgccagtgtggggttgtgggggagcaggccaccatcttcaccgtttgggcatctcggccggtccagcctgtaggtcttggagatgccaaactggggactgaagagatccccaacacagcacacttgctctaccaaaaagcagccagattgcttccctaagtgggtccctgatcccattcctcctgacaaggcgagacctaccaaccagggtctccagccccatcctactgacacattcaggcaggcaacaggtcattaccatcccgggatagagctttcagaggaaggggcaagctgtcatctttgctgtttcacagccttcactggtgatacctccgggtatgagaaaaaccaaggtgactaggggtctgaagcgcaccctcagcaaactgcagcagccctatgcaagagtggccagacagttaaaagaaaaacaaaccaaaagcaacaacaataaaaaccacacacacaaaaaacccatccaaaggtcagcaacctcaaagattaaaggtagataagcccacaaaggtgagaaagaatcagtgcaaaaac

SEQ ID NO: 954502 - DNA, 594 bp, Homo sapiens
attggagaaaaggcatacacgtttatgtaacgtatgtacacaggagccttcagcataaagaacgaacgtacaggggaacttgtccacttttatgcttctgtccaacaaagtatggacggccgggtagaatatgatcagacaagaagggtgtgatctaacgctgagaccgagtgaggacacccagcaaggcctgtccggctagattctgcctggcctctctgagcacacattccttccttctggaatgagggggtcttatgaccagcagtcaaacaaggtaggtcagatcatttctttatgaccagtttttacacagagagtctgagaaagaaaaagagtaacaggttttatggctggctttggagagaagagggtgtggtttctatgacccatcttggggaagagggattctggtttctatgggtagccttgggggaaaatgggactaagagacaggagggcgggaggaggtcagggaaaaccttttgcttctgaggctgcttccaagactttcattttggggtacaattttctgagccccaayactttcaaagacagatttccaaatggttttagttttaaatgttcaaatac

SEQ ID NO: 954503 - DNA, 610 bp, Homo sapiens
aagaacccctatcccactaggctggaataccttccagtgttcctccagtaataaatcccactcttcctactaggcccactgcctccaagagctgttccaggaatatgwcatgtcatgatgaccttcccctgatgtcttctgtatcatttacactctcctatcctttccttgttaatgaaatactctagtgtgttgctaattgttttctgtgaattcatgttatcttcatagctaaacaccaggccagtacagacactgccctgacctaggcctcacatggcagttgctcaccaatgggtagttctcaacagatgttgatttactctgttgtgaacattctaggagggtttggtgtgcatgtaacaaaaaaagaagaggaaggagaaggaggaggaataggagaagctgctgtttcccaaattatctctatttcatttagtttatgcacttagaaaacaagcaataatacaggaggggttcagatcttaacacacaaaaaaaaaccacatatgcacaaaatgaagctcactaaattttcatttaagaagaaaaactctttttagtgagcatagacagtgaatctgctgtgtatgatttattgaagttacac

SEQ ID NO: 954504 - DNA, 510 bp, Homo sapiens
cattcccaacatgctttgtttgccttcaatgttccaggacccttgctaggcactgaggacccagtgaagaatacaatagtcccccttattygagggctagtgggaagagttccaaaacccctggtggatgcctgaaaccaacatgatagtgccagaccctatatatatgatttttcctatatatacatacctataataaagtttaatttttaaattaggcagcataagtgattatggtattataacatatattggtatatggtatatacgtttatatggtattgtaacaaatacgtggtattataacaatatactatcatgaaagttatcacacactgtggccatacgtttctggtttgagatgtggaagcagaactaccatgtatttctttttccttcttcacaatttcacagatagatttgttcttaacacagctcttagcaacctcagcatataatttttttttctttccttaagaagtgaagagctttcaccctttcacttaaaga

SEQ ID NO: 954505 - DNA, 575 bp, Homo sapiens
aaaacatgctacagaaagttcatttaytcattcattcttcaacactttattgaacatcaaccgtatgctgggtgcatggaccttttgtccctcgtctgattctggctagtttctttttttattatactttaagttctgagatacatgcgcagaacttgcaggtttgttacataggtgtacatgtgtgatggtggtttgctgcacccatcaacccgtcatctacattaggtatttctcctaatgctatccctaccctagccccccaccccgggacaggccccagtgtgtgatgttcccctccctgtatcaatgtgttctcattgttcaactcccacttatgagtgagagcatgtggtatttgattttctgttcccatgttagtttgctgagaatgatggtttccagcttcatccatgtccctgcaaaggacataaactcatcctttttttttttttttttttgagacagtctcactttgttgcccaggctggagtgcagtggtgccatctcggctcactgcaacctctgcctctcaggttcaagctattctcatgcctcagcctcctgagtagctg

SEQ ID NO: 954506 - DNA, 646 bp, Homo sapiens
tctccaaagcctggctgagtagataaaatgtctagtctatttccaattagccttttcttcttcttttcttttggccacaggtggttgctgtttgggaatccctgcatcctttgagagtccccactggaggcagcgggcctaaagctcaagtggctgtaggcagttgaaaggctgcagtgggaaaggaaaggcctggcggtgggggggacagaaggcagaagcagcagggactcgaaggggtatatcaaagtgctcccctacaagaggacagaagggggatcaaaggtagtaaagtgagggaaggagcaaaagcagtgggaaaggagtggtcttaaaggggtcagttgggtgcgaacttatgtttccaaaagaagacaacgaagttccacattatctttagtaaaatcgtgccaacaagaaggagatggacagaggtggcaaagcatatagtcagcaggggttagggaaggtggtttcagccaactgagaagttcctatggaagaaacaggatcaaacaaagcaggcctcacaaagagccaggaaacattttccaatgcacagttaggaagtcagaccccacttgagagaaataattgrgaaaagagacttccagcctagagagtcagggagtaatcctcactaaag

SEQ ID NO: 954507 - DNA, 568 bp, Homo sapiens
ttttagtagagatggggttttgccatgttgaccaggctggtctcgaaacccttacctcaggtgatccacccaccttggcctcmcaaagtgctgggattacaggtgtgagccaccatgcctggcttaatttttgaatttttagtagagacagggtttcaccatgttggccaggctggtctcaaacttctggcctaaagctatccacccaccttggcctcccaaagtgctaggattacaggcatgagccactgcgcctggccagtcatggacatttgagctgtcctttttagtatgtaaaaagccattactaggtggagctgcagggacaagagaatcttgaagaggcattataaatactcacaagcaaaagcagaggattcccccttcctcccaggagtttagaatattctaggacaaacaattctaaaccacttgagcaacagtgtttcttctcttagggtctgtttgagcctatattgttcaaaaactccattattaatatatttttctttaaataaattattttctgataatttaaataattcatttctattttgcaaggccccag

SEQ ID NO: 954508 - DNA, 568 bp, Homo sapiens
ttttagtagagatggggttttgccatgttgaccaggctggtctcgaaacccttacctcaggtgatccacccaccttggcctcccaaagtgctgggattacaggtgtgagccaccatgcctggcttaatttttgaatttttagtagagacagggtttcaccatgttggccaggctggtctcaaacttctggcctaaagctatccacccaccttggcctcccaaagtgctaggattacaggcatgagccactgcgcctggccagtcatggacatttgagctgtcctttttagtatgtaaaaagccattactaggtggagctgcagggacaagagaatcttgaagaggcattataaatactcacaagcaaaagcagaggattcccccttcctcccaggagtttagaatattctaggacaaacaattctaaaccacttgagcaacagtgtttcttctcttagggtctgtttgagcctatattgttcaaaaacwccattattaatatatttttctttaaataaattattttctgataatttaaataattcatttctattttgcaaggccccag

SEQ ID NO: 954509 - DNA, 683 bp, Homo sapiens
tcgccaatcagttgaccttaagacagagagattatctgggctgacctaacctcatcacatgagccctttaaaagcagagcattttctgcagctgcagagagaagaggaattcagagatgtgaagcacgagggggttctatgtgagggactccctgtcgctgagatggagagtgacatgtgtcaaggaaacagggagctcagctgggcaaccccaggaactgaactgtgaccacaacacccaagagcttagaagtgggttttccctgactctccagacaggaattcagcccagccagcaccttgatttcaggctctcgaggccacaatcagggaacccagtgcagcccggccagactctggacaacagaactgtgagaaaacaaatgggaattgtcttaaggcactaagtttctggtaatgtgttatgcagcaacagaaaacaaacagaaaagtcagatcatttaacaggaattagagttttgctcttccctttctaatatttacacctctaatatatttttattattctgttagcgtctagaacctccagaaaaaggcaaacttcggcagcagtagtggaattcttgtttgttcctgattttgataggaatgtttagtgttcmccattagctgctttacgtgcaatagatttcctttatcacagtaaaaagtttcttttatcc

SEQ ID NO: 954510 - DNA, 492 bp, Homo sapiens
aattcaactatatcaataataagtttaaacatgactaaacacacaaacaatccacatcaaaggtggagattgtcagattgggactgaaaattatccaagtatatgctacctaaaggagacacattttatttatttatttatttatttatttgagatggagtcttgctctgttgcccaggctggagtgcaatggcacgatttctaaaggagacacattttagattcaaatatacaaatatgttgaaagtcaaagataaaaaagatacattatgcaaacagaaaccccaagaaagctagagaatcttatagttatatcaaagtagactttgtaacaaaagaagttactagagataaaaaggratattttataaagataaatgggtcaacacatcaataagttataacaattatgccaacataagcactagtaacagagcactaaaatacatgaagcaaaactgacagaaatgaaaaaaaaaaagacaaatcaag

SEQ ID NO: 954511 - DNA, 603 bp, Homo sapiens
agtataccaaacttatatgaagtgggatttatccyatgaaagcaagtatggtttaacatgtgaaaatcaattaatataaaacaccatgtcaacagaatgaaggacaaaaaccatataatcatctcaatatacacaggaaaagcatttgataaaatttgataccgcttcctgataaacacagtcaacacactgagaacaaaagggaacattctcaactttataatgtcctatgaagttttattttgatataattttagacttcagaaaagtggcaaaatagtacaaagtttctgtacagtcttcccctcagttccccatatgttatcattttaaatttattttctttctgtctgaactattcaagggttagtgacagacataatggctttttatacctaaaaacttcagtgtgtgtttcttaaaaaagagaaattattttacagagccacagtatatttgtgtaaagtccttcttaggccatagactttttttctagttttttatttatttatttttttatacttcaactcttaagttcaggggtacatgtgcaggatgtgcaggtttgttacacaggtaaatgtgtgccatggtggtttgctg

SEQ ID NO: 954512 - DNA, 810 bp, Homo sapiens
cattggggaatgtatgttcataattgatgctgggaaatgtggatattaatgtgctgtatgaaaaatcaattcaaaatggattaaatatttaaatgtaagacccccagctttaaaactatcacagaaaaacatagggaaaacacttgtggacatcagtccaggcaacaatttgatgggtaaaacttcaatagcacactcaacaaaagcaaaaatagacaaatgagactgttaaactaaaaggtttttgtgcagcaaaggaaaaaaccaacagaatggagagtcatcttatgtaatgggataatgtatttgcaagctattcaactgacaaaggactaatattcagaatatacaagagtctcaactcaaaaacaaacaaacaatcttatttaaaaaatgggcaaaatatatgaatagacgtttctcaaaagaagacatacaaatggctaacaagtatataaaaaatgctcaacatgtcttagatctggcagaatgaccgaataggaacagctctggtctgtagctcccagtgagaccaacacagaagatgatttctgcatttccaactgaggtaccctgttcatctcattgggactgattaggcagtgggtacagcccatggagaagcagggtgggggcgttgacttacctgggaagtgcaaggagccagggtcctccctcyctcagccaaggggagccctgaaggactgtgctattcagcccagatactatgcttttcccacggtttttgcaatccacagaccaggatattccctcctgtgcctacaccaccaggaccctgggtttcaagca

SEQ ID NO: 954513 - DNA, 653 bp, Homo sapiens
tagatctcggctttgcctgaggtttcagaggatggcatgtcctttgtcctatcaaaggtcaaccaagcatttctgctctgctcctatcacctctctcctcagtcattacccctgtcttccacaccaccctctccctctactgggccatttctatctgcatacaaacatgctctggagtacacttttgttttcttaaaaaatgttgctgttttgatttcctatttctttttttcttttcttttctttttcttttttttttttttctggagatggagtcttgcgctgtcacccaggctggagtgcagtggcatgatctcagctcactgcaacctctgcctcctgggtttaagcaattctcctgcctctatcacccaggctggagtgcagcgatgcaacctcagctcactgcaacctccgcctcccgggttcaagcaattctcctgcctcaacctcctgagtagctgggactacaggcgcatgccgccacgcccagctaatttttgtatttttagtagagacggggtttcaccatgttgcccaggctggtctsgaactcctgagctcaggcaatccaccctcctcagcctcccaaagtgctagggttacaggggtgagccaccatgcccagccttgatttcctatttctatgcaat

SEQ ID NO: 954514 - DNA, 504 bp, Homo sapiens
tctctttgtcttctgagcctagatgagtgcctggcacacagtagacactcagcaaacattcacagatggctacagggtgtgggaggtgagagacgaggtgctgaagatgacactcaagttgctgggctagacaactgtgtggatgatgaggccacagaaattccatggaaaaatggggacaaatagtgtttggagaggacaggaataagggatttaagtttttgacaagttaagtttgaaatacctgtgcggtagttggaataacggcccccaaagatgtccccctcctactctccggaacctgtgaatatgtcaccttacatggcaaaggggattctgcagatgtgattgagtttaggtccttgacatggggcattatccaggtgagcccaatgtaatcacagagtccttatatgaggaggcaggaaactcagaaatagagaaaagagacgtgatggaarcagggttgggagtgatgagaggaaggggccacaagccaacaaa

SEQ ID NO: 954515 - DNA, 522 bp, Homo sapiens
atccccagcactttggacgcggcttagcatgcagtaagtgtgcagtaaaatattagttgaatgagtaaatttgtctggcactgtttctccaccaaatttagagctcggtcatgccagtttggctgagcccgattcttagctgagctttggcccatccccctccccaaggagctaagatccatcctttgtttctctgggttcctggagttcactatatttcagaggctctgggaagaatgcacgcagtcttcttacattttagactgtcagtctaatcaccaagttgcctctttctcattgccccttgaggcattggctggcaagacgaactgtctcagatggttaatgaaggcagcgacctgctcctggagaggtaggctttaacatttgatactaatgacaggagctgtgtggcttggttgtgtcagggctgaaakcaacactgagggagagacggagcccgagacagcaagctggaagttggactctagtgcaggccagaacagaacaggctaggcccag

SEQ ID NO: 954516 - DNA, 547 bp, Homo sapiens
ctgtaatcccagctacttgggaggctgaggcaggagaatcacttgaacccaagaggcagtggttgcagtgagccgagatcrcaccattgcactccagcctgggcaacaagagtgaaactccatctcaaaaaaaaaaaaaagaaaagaagaaaaaagacaagatttacccatcaaccggcaaatttctcctctccctctcagcccaagcccaggacttttgatgggaaacaacactctaactccacatgtacctttgtactcaatctgtctgcccaggcacatggcagtttgggggtaagagtcagcaaagaggagaaggaaaaaccagccacacatatcactgccaaggaacacttgttgaaacctaccacgtgcaaagtgtaagagatgaaagagatgcatctcttggagatgcatctgccctcctggaacaggtgttctgggtagagaagcaaggaagaggcatcccaagatgacgtcccaggcttctacagtcctcatcctccaggcaatgagttcagcactgtgtataggtggccacgctggt

SEQ ID NO: 954517 - DNA, 435 bp, Homo sapiens
tcctttttttttttttaaggttaaatgatattccattgtatacatgtaccawattttgtttaaacattcataagttgaacacttgggttgcttctacggtttggctgttgtgagagaattctgtgaatttgggtatataaaaatctgttcaagtccctgctgttgtttcttttgaatagatagccaaaagtggaattgctgggtcatggagtaattctatttttaattttttgagtacctgccaaaccattttccataggggctgcaccattttacattcctaccaacagtgtgcaaggcttctaatttcttcatgtccttgccagcacttatcttcttatttaagaaaaaaatcacagctgctgtagtctgaatgtgtctcccaaaattcatgtgttgggaacttaattcccagtgcaggagtattgcgaggtg

SEQ ID NO: 954518 - DNA, 561 bp, Homo sapiens
ggccacatgtggaattagtgatccactggtcccccaccaatgtacagtgggtgctggcactgatggatactggcacagattgcagccttgtttatgagaacctggataagtttccaggcaaacctgcttacattaacagttatggaggccagtcagtgaaagtgaatcctgtatctctgcaccttgtcattggctgtttttctccccatttttatactgttgtatgtctctctcatgctggaatacattctgaggatggacattttacatggcctggcattaccaactatgaccagggaattcagactctgagtgtgtgtggtaaatctggtgctctgcagacatacgcattatcagcctcaggacctgccacaaccccaatgggttatttccacctgtcaataccatttgccaggggcgcatatggagataactgagacaattaaaaagctggaggaggtgcagagagtgagtggcacccacagtccctacaattctccrttgtggccagttagaaagcctgatggaacttggtggatgaaggaggactatcgggaactg

SEQ ID NO: 954519 - DNA, 561 bp, Homo sapiens
ggccacatgtggaattagtgatccactggtcccccaccaatgtacagtgggtgctggcactgatggatactggcacagattgcagccttgtttatgagaacctggataagtttccaggcaaacctgcttacattaacagttatggaggccagtcagtgaaagtgaatcctgtatctctgcaccttgtcattggctgtttttctccccatttttatactgttgtatgtctctctcatgctggaatacattctgaggatggacattttacatggcctggcattaccaactatgaccagggaattcagactctgagtgtgtgtggtaaatctggtgctctgcagacatacgcattatcagcctcaggacctgccacaaccccaatgggttatttccacctgtcaataccatttgccaggggcgcatatggagataactgagacaattaaaaagctggaggaggtgcagagagtgagtggcacccacagtccctacaattctccgytgtggccagttagaaagcctgatggaacttggtggatgaaggaggactatcgggaactg

SEQ ID NO: 954520 - DNA, 544 bp, Homo sapiens
tctgtgaagaaagtcaatggtagtttgatgggaatagcattgaatctataaattactttgggcagtatggccattttcacgatattgattcttcctatctatgtgcatggaatgyttttccatttgtttgtgtcctctcttattttttttagcagtggcttgtagttcttgaagaggtccttcacatcccttgtaagttctttgtagcaattgtgaatgggagttcactgataattttgctctttgcttgtctattattgatgtataggaatgcttgtgatttttgcacattgattttgtatcctgacactttgctgaagtttcttatcagtttaacgagattttgggctgagacaatgagctttttaaatatacaatcatgttatctggaaacagacaatttggcttcctctcttcctatgtgaataccctttatttctttctcttgcctgattgccctggccagaacttccaatactatgttgaataggagtggtgagagattgaagcagtaattaatagcctaccaaccaaaaaaggccca

SEQ ID NO: 954521 - DNA, 677 bp, Homo sapiens
acacagaaaaaaaacccactgatatayaggcaactgattattgacaagtgtgccaagaaatacacaatggggaaaggacaacctcatcatcaaatgatgttgggaaaactggataatcatatgcaaaagaatgaaatttggcccctattttccaccatctccagaagtcaactgaaaacagactaaaatataagacattaaattgtataaattctttttttttaatttttacttttagacggagttttgttcttgtttcccaggctggagtgcaatggtgcaatctccgctctctgcaacctacacctcctgggttcaagcgattctcctgtctcagcctcatgagtagctgggattacaggagcatgccaccacccctggctaatttttgtatctttagtagagacggggtttcatcatattggtcagactggtctcaaactcctgacctcaggtgattcacccacttcggcctcccaaagtgctgggattacaggcatgagccaccatgcccagccgtataaattcttaaatatatgacatcaaactgtataaattctagaagaaaagaatgaggaaaagcttattggtcttggcaatgatttcttaaatatgatcccaaaagcaaaggcaacaaaagcaaaaatacacaagtgggactatgtcaaactaaaaag

SEQ ID NO: 954522 - DNA, 602 bp, Homo sapiens
aatttttaaactttctgtagaaatggggttttgctacttwgctcaggctgttctcgaactctcagcctcaagcaatcctcctgcttcggcctcccaaaccgctaggattacaggcatgagtcattgtgcctgatctccacattttcttgattatagtaagtctttaattcagtttgtgtaagttctccaaattcttctttttcaaaattgttttgaatattataggtcctttacatcagggctccccagtccctaagccatgtactggtaccaatccatggcctgtgaggaactgggccacacagcaggaatgagtgtcaggcaagtgagcattactggctgagctctgcctcctgtcagaacagtgatggcattagattctcataggagtgcgaaccctattgtcaactgcacatgcgagggatctaggttgtgtgctccttatgagaatcgaatgcctgatgatctgaggtggaacagtttcaccccaaagccatccccctccctgccccatccatggaaaaattgtcttcctcaaaaccagttcctgctgccaaaattaggttggagactgctgcttctgctgctttacatagtcatat

SEQ ID NO: 954523 - DNA, 592 bp, Homo sapiens
ctggttaatttctttttttgtatttttagtagagacggggtttcaccatgttagccaggatagtctcgatctcctgacctcgtgatctgccccccttggcctcccaaagcactgggattacaggcrtgagccaccgcacccagcctctgttgtatttttttaatatcagtcgttgaattcttcagatgaaagatttctatttggttatttttcaagatcactcttcattaaatttcttcttaatatcatgaatagttttcttgattatattgaattgtccatctgtattctcctgtatttcatggagtttctttaagatcattatactgaatctcttttccagcaatttatagatctctttttatttaggatctattactagagaggtatattcctttggcagtgtcatattttcttgccttttcatcaatgtgtccctgtgtttatgtctacgtatttggtagaacaatcacctcttctaaatcttacagcatggcttttgtaggaaagactttcacttgtagaagggacttagtgtggcagttggaaagaacattgtggctctggttgtgagcagatggagtagcatacc

SEQ ID NO: 954524 - DNA, 605 bp, Homo sapiens
tgggaagactacaattcttccccagcggtcgagcagccccagtactcatgaagkgacgtagaggggacttctccccctcacccactgctgcagacacagccaggatgtctcctgtaggagcttggcttgggtgcatctgtagatggtctttatagagcattttggggtgactgtgtccccacaggatgtgtgtcctctggggtcaggcttgcaagaggagtagagccctgctccctctctacacaaaatgtcagcattcctgaagatggaaagatgcttgtctaatctgaatatccagaacactgggacaggaggatgatagggagttgggttgttttttgccaggcttgtagtagagctgaggtagcacccttcctttcacctatgaagacctcagtgcatttcatgggaactccctaggctacatccatcagggctgggatgtgtgctcaccattgtggtattgcatatacccacctaccttagccacagccaattcttacccatgaacacctctaattaaactgaagactaaattgttcaacccactgaaaaaatactggggaaaaaagtacacatcaagaggaataaaataagcttcagga

SEQ ID NO: 954525 - DNA, 479 bp, Homo sapiens; identical to SEQ ID NO: 953481

SEQ ID NO: 954526 - DNA, 710 bp, Homo sapiens
aaataccaaatttaaatacaatggaaataactggatcccaaggtggcaggggccaagtggtggtactcaacggtcaaaggcaaagtgggtgtagatactataatggacagcagagacaaaacagcaatcagaatattcttactcgtgtagagctctggcattggctaactaatcatggtgttcctagaagtgaaactgataggaagtctactgtattcctacttaatttttctaaggagaaaacttctaggtcaaatggacaaaagagtaatttaaattataaaaacagacaattatggcccctcaattaatttccagactttagccagtttacagacccagaaccccttgaatgaaggggaggacgggtccccttgaagaaggaccccactatattaccaacagtttatgcggtgaatctttctctcatccttccccaaggagacctccggccttttaccaaggtaactgtgtactggggaaaggaaatgatcagaccttttgggtactagtggacactggctctgagctgatgttgattccaggggactcaaacatcattgtggttctccagttaaagtaggrgcttatggaggtcaggtaattaatggagcttcagctcaggtctaacttacattgggtctagtgggtccctggactcatcctgtggtcatttccccagtgtcagaatgcacaattggcatagatgt

SEQ ID NO: 954527 - DNA, 671 bp, Homo sapiens
gctagaatataaagcaggcagaaaaatgtgaaaagactacactggcctagccctccagcctacatctttctcccatgctggatgcttcctgccctcaaacatcgaactccaagttcttcagttttgggactcagrctgggtctccttgctcctcagcttgcagacagcctattatgggaccctgtgatcgtgtgagttaatacttaataaactcccttttgtatatatatcctatatatagataaaattagttctgtctctctagagaaccctaatacaccaatgttttttaaaaagtaaaccacatctgtaatcccagcactttgggaggcagaggcaggaggactgcttgagcccaagagtttgaaaccagcctggcaatatagtgcaaccctgtcgctacagaaaattagaaaaaaaacaaaaaacacttagccaggcatggtgtgcttgcctgcagtcctagctactcaggaggctgaggcaggaggattgcttgagcccaggagttcaaggctgcagtgagccatgatcataccactacactccagcctggatgacagaacaaagactgtctcaaaaaaaaaaaaatgaaagaaaagatttgttcatacactttaccaggaggatgcgtggatggcaagtaaacacaggggaaggtgctctatgtc

SEQ ID NO: 954528 - DNA, 559 bp, Homo sapiens
aaaagtggccagactgctctttatgcaggtccccaatcccatttcttctcactggttgggatctctagactggggtctccagccacttcctgttggtgagtttgggttgtcaacaggtctgtacctcctgggatggagctcccagaagaagaaggctgccagttttgctgtttcacagccttcactgttgataccatcaggtgctgaaaaatctgaggtgactagggactggaacagatccacagcatactgcatcagcagtggaaaagtggctagactatttttttacatttatggggtccctgatcccacatctcctcactgggtgggtcctcccagcctgggccttcagccaccccacaccagggctatcaagccagtatgagctctgcaactcccagggacaaagctccaagtaggaggggtgggttgtcatctttgctgtctttcagccctttcatttgctgtctccaggctatggagagtccayggggaccaggggcttgtccagatccacagcatggagaacaacctcatggaaaagtggccagactagtct

SEQ ID NO: 954529 - DNA, 559 bp, Homo sapiens
aaaagtggccagactgctctttatgcaggtccccaatcccatttcttctcactggttgggatctctagactggggtctccagccacttcctgttggtgagtttgggttgtcaacaggtctgtacctcctgggatggagctcccagaagaagaaggctgccagttttgctgtttcacagccttcactgttgataccatcaggtgctgaaaaatctgaggtgactagggactggaacagatccacagcatactgcatcagcagtggaaaagtggctagactatttttttacatttatggggtccctgatcccacatctcctcactgggtgggtcctcccagcctgggccttcagccaccccacaccagggctatcaagccagtatgagctctgcaactcccagggacaaagctccaagtaggaggggtgggttgtcatctttgctgtctttcagccctttcatttgctgtctccaggctatggagagtccacrgggaccaggggcttgtccagatccacagcatggagaacaacctcatggaaaagtggccagactagtct

SEQ ID NO: 954530 - DNA, 582 bp, Homo sapiens
tatatatataaacaaacatgcacacacacatcccttgtatatgtatgtcctaaatgtacactgaagaatcctagaaaatgatcaacacagcagcaaaatctccattastgcaattagttcccattaaaataagccagattttcttgaagaaattgctcatttcaagtctggggcaagaaatgtacaagaagcatgtggactatcttgacgtatcagacagttagctatcaacatgaatcaagggccaccttcaagaggatactactggtcaaagatgggatagtttgaggttcaacaaaaaaaggaattgcagtgggttcaaacttataaaatatgtccaaatccatgagtccataatagtattttttaaatttataagatgatagagaaccaatttattttcttgaataatgactaaaagggggaagggggaggaagccttgataagagagcctttcttatataaattgaaatactgagcaaccaaatggttgaggaggggaaggatttttttatgaaattattccagttatgagatgaaaatgaaattatagaatatctccatccgaattcataaattaa

SEQ ID NO: 954531 - DNA, 603 bp, Homo sapiens
ctcccaaacagagtctctccctgtcctgagccacctgaaactgggggtgtagtgatgcaagcacccctgtggtcaccaccactgggactgtactgggtcagacctgaagccagcacagctctgggtcttgcccaaggcctgctgtaaccactacctggctactacctatgttcacttaaggccctagggctgtacaatcagcaggtggcaaagccagccaggtttatgtccttcccttcagagcagcaagttcccctaggcaggtccagagatgagccagggattggagtcaaaaacctgatacatttgtctgatattctagtctactgtggctaagctggcactgaaaccacaatacaaagtccttcctgttcccctctctgctttacttaggcagaagagcctctgcctatggccaccatcagcccagagcggggttctgccaggccactcttgattttcacttaaagcccargggctcttcagtcagcttgtagtgaatgctaaaaggcctgggactcacctttcagggcagtgggctcccctccggcccagtgcaggtccagaaatgctgccaagagcctaggtctagacttgggaact

SEQ ID NO: 954532 - DNA, 613 bp, Homo sapiens
ggggactcggtcgggaggaagggtgaaagaggggtgagggataaaggactccatattgggtacagtgtatgctgctcaggtgatgggtgcaccaaaatctcagaaatcaccaccaaagaactcatccatgaaaccaaaaatcacctgttccccaaaaactcttgaaataaaatgtaaaaaagagtacctacaaaaacttacagctagcatcatacttaatggcaaaaaactcaatgatcttccactaaactggaaacaaggcaaagatgtccgctcaccgcactcccgttcaacatcatgtccgaggtcctagcaagtgccatatggcaagaaaattaaaacagacacatacagtttggaaacgggaaaataaaacagtctctatttgcagatggcatgattatctatacagaaaaccccaaggaatctacaaataaacaatttcaactcacacgtgagtttagccaggctgcaggttacaaggtcaatgaacaaaaattaactatactagcaccaaagaattggaaattgaaattgcaaaaacagtacgatttatttwtttatttttttaataaaaaaattgtatttacttagaagcattcagaatgtcaac

SEQ ID NO: 954533 - DNA, 724 bp, Homo sapiens
acttttaagttaatgctggaataagttaagactttgggggattgttgggaaggcatgattagttgtgaaatgtgaaaaggtatgagatttgagaggggctgaggtggaatgayatggtttggctctgtgtcagctcatctcgaattgtaatccccaacatgttgagggagggacctgataggagatgatgggatcatgggggcagtttccctcatgctgttctcatgatagtgagttctcatgacatctcatggtttaaaaagtgtttggcagtacctctcaaccacctccatataagatgtgccttgcttccccttctgctatgattgtaagtttcctgaggcttccccagccatgtggaactgtgagtcaattaaacctttatttctttataaattacccagtcttatgtagttccttatagcagtgtgaaaacagactaatacactatttttatgtctaaatgaactgagatcagatattaaagccaatctcacggggttaacaagaattcttgacagaaatttagttatgattaagcattaatgaggctttactttgacccacttccttggaactgaaagtcaggtaacgttagatactagccatttgcatccccattgttcccatagataagatttctgatgttagatagatagatctctggtgttagaatcgtacagcttttgttttagaattgcttcagtggatcttgaattccagc

SEQ ID NO: 954534 - DNA, 724 bp, Homo sapiens
acttttaagttaatgctggaataagttaagactttgggggattgttgggaaggcatgattagttgtgaaatgtgaaaaggtatgagatttgagaggggctgaggtggaatgatatggtttggctctgtgtcagctcatctcgaattgtaatccccaacatgttgagggagggacctgataggagatgatgggatcatgggggcagtttccctcatgctgttctcatgatagtgagttctcatgacatctcatggtttaaaaagtgtttggcagtacctctcaaccacctccatataagatgtgccttgcttccccttctgctatgattgtaagtttcctgaggcttccccagccatgtggaactgtgagtcaattaaacctttatttctttataaattacccagtcttatgtagttccttatagcagtgtgaaaacagactaatacactatttttatgtctaaatgaactgagatcagatattaaagccaatctcacggggttaacaagaattcttgacagaaatttagttatgattaagcattaatgaggctttactttgacccacttccttggaactgaaagtcaggtaacrttagatactagccatttgcatccccattgttcccatagataagatttctgatgttagatagatagatctctggtgttagaatcgtacagcttttgttttagaattgcttcagtggatcttgaattccagc

SEQ ID NO: 954535 - DNA, 543 bp, Homo sapiens
aactagttagtgtaaggaagcccaaagttacagtmaggatggaaataaagatcagagtagaaataaaatagagattagacatacaatagaaagaaaaaaaatcaatgaaactaaaagttggtttttttaaaaacataaaactcacaaacctttagctagattaactaagaaaaaagaaagaagactcaaatacataaaattagaaatgaaggaggagatattacaattgaggccacataggtatgaaaaaaatcactaaacaattatacaccaataaattggagaactcagaaaaaatggataaattcctagacacagacaacctaccaagactgaattataaagcaataaaaattgtaaacaaaccaatagaaagtaaggagattgaatcttttatttatttatttatttagagacagagttttgttcttgttgcccaggtttgagtgcaatggtgcgatcttggctcactgcaacctccgcctcctgggttcaagcaattatcttgcctcagtctcccagtagctgggattacaggcaccc

SEQ ID NO: 954536 - DNA, 662 bp, Homo sapiens
tgagaatgggccatgatgacgatggcggctttgtcgaatagaaaagggggaaatgtggggaaaagagatcagattgttactgtgttggtgtagaaagaagtagacatgggagactccattttgttctgtattaagaaaaattcttctgccttgggatgctgttaatctataaccttacccccaaccccatgatctctgaaacatgtgctgtgtccacccagggttaaatggattaagggcggtgcaagatgtgctttgttaaacagatgcttgaaggcagcatgctccttaagagtcatcaccactccctaatctcaagtacccagggacacaaacactgaggaaggccgcagggtcctctgtctaggaaaaccagagacccttgttcacatgtttatctgctgaccttccctccactattgtcctatgaccctgccaaatccccctctccgagaaacacccaagaatgatcaataaatactaaaaaaaaaaaaaaaaaaaaaaaagaaacaggccgggcgcggtggctcacgtctgtggtcccagcactttgggaggccgaggctggcagatcacraggtcgggagttcgagaccggcctggccggcatggtggaaccctgtctctactaaaaatacaaaaaattagctgggtatggtgac

SEQ ID NO: 954537 - DNA, 816 bp, Homo sapiens
atccgctgatgacatcaccaccagtgtgacacctgatggcctcaccatcacctgcttaaaaccattccatgctttcccatgggcttaaagatagattttaaaacaacagcttcactgaatatcttcattaatatataattcaaatatcacagagtccactcttgaaaagtacaattcaggccgggtatggtggctcacgcctgtaatcccagcactttgggaagcctaggtgggtggattgcgtgagtccaggaattcgagaccagccttggcaacatggggaaaccccgtctctacaaaaaatacaaaagttagccgggcgtggtcatgcacgcatgtagtcccagctactcaggtggctgaggtgggaggatggcatgaacttgggagtctaggccattgtaagctgagatcacaccactgtactccagcctgggtgacagagagagagagaccctgtctcaaaaagaaaagtatacaattctgttgtctttagtgtagtcacttggttgtataatcgtcatcactagctaactccacgttttcaccacgtcaaaaaagaaacccttcatccattagcactcactccccaatctgccttccccccagccccagacaaccacgaatctacttctccctctacgggtttgcttattctgcatattttatattagtggaatcacacaatatgcagtcttttgtgtctggtttctttcatttagcacaatgttttcaaggctggtctgggctataacatgtatccgtattttattccttttcatggctaattggcatttsatggtgttgctatgccac

SEQ ID NO: 954538 - DNA, 573 bp, Homo sapiens
catgtgcaggagaactgccctttacacaaccatcagatcttgtgagacttattcactatcatgagaccagcacacaaaaaacccgctccgaggattcaattgccttccactgggtccctcccatcaggtccctcccatgacatgtggtgattatgggaaccacaattcaagatgagatttgggtggaaacacacagccaaaccatatcaccaatctttcagaaatggttagaacatacagctcaggatacgcagactgaccattccttggaggcaggtactatatttattttgttcacttctgatttattggtagctggaatgtgtgtggcatataggcatttattgaacaggcgttcaataagcacttgttgcatgaatgaaagactcattaaagtctaaagtcaaatatattagctatagtgtatttttttaatccaacattcctaatcattraaaatgaaaagaattttagaaatttcaagggatgtacccacagtcaaaatgggaattagtgcaaatctaaaattgggtctcccagccctttgttctgtcaattaaactactctgtcac

SEQ ID NO: 954539 - DNA, 566 bp, Homo sapiens
  misc_feature 524, 560: n = A,T,C or G
cactttagatccaatgtatactcaaataggtaaaagtaaagaatgggaaaaataattcaaaaaacatgggaaaatgtaaacaggatccaaaagatatytaatgtggtcatattaatgtcagacaaaatagactttaaggcaacaattatcattagagatgagagataaaataataaaaggctgctctttcaagaatatataacaattatgaacattaatgcacttaacaactaagccccaaaatacatgaagcaaaaattgtcataattgaaggaggaaatacaatccaacaataggagttgaagatttcagtattccactttcaataataaagcacctagaatgaaggcaaacgaggaggtggaaaactttagcaatactataaatcaactagacttaatagacatatatagaacattccactaaacagaaacagaatgcacattattctcaagtgcacatggaatattcttcaggacagacgaaaatgttagattataaagtcagcctcaatgagggattanaatttgcgaaagtatgttagtcaatgactggaatanaattag

SEQ ID NO: 954540 - DNA, 617 bp, Homo sapiens
ccccaccctaccagccagaagcagaagtcttacgaaaaggttttgaggaaaatatcctgtcctggtttactccatgccaacgaattcttcaracacatccttgacccgggacatagagttcaaatctagttcatgtgttttgtcaggctactggtctcctttcttaggaagactcctgactgtgccttttctgtttaaagatggtagaggtgacaggtgttctcctgcaagatggccaaggtgtgggaaagcaacagatctttgattctggcaatctctcgcaccgtatgcagggccaggcctgggtgggcatactggcaacggcttttggaaacctagtgagggaggaagaagggagcattggtttctacaataattctctctaatgggatctttttcacagtttctcgggcttgctcagcagaagagtaagtcagaattgccatgaagcccacatacaggttgggaaagtggctcaacaggggctcgatgactgggtaactgccagtgaagcaatgctggtacatcttgtggtcagagggcacatattttttcaagatgcccagtaggtcttcatcggcttctcggcagtggatcatcatgggcttctttaagag

SEQ ID NO: 954541 - DNA, 548 bp, Homo sapiens
tgtttacctaatcaagcctgggcaatggcaggcgcccctcccctagccttgctgctgccttgcagtttgatctcagactgctgtgctagcaatcagtgagactctgtgggcgtaggaccctccaagacatgtgcgggatataatctcctgggttgccgttttttaagcccattggaaaagcgcagtattagggtggaagtgacccgattttccaggagctgtctgtcacccctttctttgactaggaaagggaactccctgaccccttgcacttcccgagtgaggcaatgcctcgccctgcttcggctcgcgcacggtgcactgtacccactgtcttgcacccactgtctggcactccctagttagatgaacctggtacctcagatggaaatgcagaaatcacccatcttctgcgtcgctcatgctgggagctgtaggctggagctgttcctatttggccatcttgkctccctactttttgattttttaataatggccattcttgcagtaataaggtgatatcttgttgtggttttgatttgcatttc

SEQ ID NO: 954542 - DNA, 606 bp, Homo sapiens
agcacgagacagaggtgctgtgcctcatcactgcactgtgaccactggccttgcattcacgggactagggggaatkaaaagacaggcctcacacctgctttggacagacagtgggaagaagtgtgatccctctctccctctccccaggccatcggggagggtggagcacatttcagaagatgaggtttgtcctgggtctcaagggagatgagcagcgaagagagcagaaagcacagcagatgtgaaggcttcggaggtgaggggttgcagcatggaccaatgcaagaggaaatgtgatccggcgctcctcccagctttcccccaagtatgccagaggaaggagaccccggcaggtgtgcagagacctgtctgttgcagacggggccattcctaaggcagacacgtgggtcgatgaccgcagggccttcctccccctatctgaggcagatcgccccatctgtgctctgcccctcaccctccacttcaccttggaagcccccctccttatcttcaacctcctcctctctacggcttcctcccaccagtgtggaacccactcatgctcacatctgttccacttacaaagatgctttctctcctgggcat

SEQ ID NO: 954543 - DNA, 485 bp, Homo sapiens
gtacttttcagctccagaatttctttttggtttatttttaggttttgtatctatttatatttccattttgtccatatattatttctttgactttctccacatatttctttagttctttgagtatttttaagacagttgtttaaagtctttgtctaatatatttcccatcatgtctttttcagggacagtttctttggatttgtttttttttcctttaagtggtccgtacttttttgtttctttgtaatattttgttgttgttgttgttgttgttgttgttgcaaactggatatctaaatctaatatgtagtaactctggaaatcaaattatcctccttccctaggatttgttmttttgttgttgttgtttttattgttatttcttgattgttgtaggctgtccatatgccaaggatcagtcttaagtcttcttacgtcatttctgagcctttccctagacatgtgcagtcatgttctaactttct

SEQ ID NO: 954544 - DNA, 568 bp, Homo sapiens
agagctggttgtgcaggagaccacagttctattattactcaaatcagtctccccaagttttggggatgartcatttttttgttgttgttgttgttttttgtttgtttgtttgttttgacagagtcttgctctgtcacccaggctggagtgcaatggcgcgatctcggctcactgcaacctccatctcccaggttcaagtgattttcctgcttcagcctcctgactagctgggattacaggtacgcgcaaccacacccagctaatttttatttttaatagagacagggtttcaccatgttggccagcctgatctcgaactcctgatctcaggtgatctgcctgcctcagcttcccaaagtgctaggattacaagtatgagccaccgcgcccggccggggagcagaatttttaagaacaacttggtgggttgtggggtaagccagtgagccaggagtgctgattggtcagggatgaaatcataggagtcaaagttgtcttcttgcactgagtcagttcccgggtgggggccacaagataagatgagccagttaatctatctaggtgtgcc

SEQ ID NO: 954545 - DNA, 595 bp, Homo sapiens
gctcatgcctgtaatcccagcacattgggaggctgaggtggggagataacgargtcaggagatcaagaccatcctggctaacacagtgaaaccctatctctactaaaaaaatacaaaaaaattagccaggcgtggtggcaggcgcctgtagtcccagctaatgaggaggctgaggcaggagaatggtgtgaacccaggaggcagagcttccagtgagccgagattgtgccactgcactccagcctgggtgatggagtgagactccgtctcaaaaaaaaaaaaaaaaaaaaaaaaaaaaattaaaatcttatcaaggatcttcccagactacaatggagtaaaactagaaatcaataacacaggacctttggaagtttacaaatacatgaaaattaagcaagatgctcctgtacactattgggtaaaggaaaaaaatcaaggaaagaaaaacaatcttgagacaaatgaaaattgaaacacaacataccaaatccaatgggatacagcaaaagcagtgctaaaagtttatagcaataaacacttacatcaaaaatgcaagaaaaattcaaataaactaatgttgcacctacaggaa

SEQ ID NO: 954546 - DNA, 571 bp, Homo sapiens
cccacatactgcagtctagactcccaaagaaccagscttaggctgggaggtggctcacacctgtaatcccagcactttgggaggctgaggcggcggatcacaaggtcaggagttcaagaccagcctggccaaagagaccagcctggtcaacatggtgaaaccccatctctactaaaaatacaaaaattagccgggcgtggtggcgggcgcctgtcatcccagctacttgggaggctgaggcagaagaattgcttgaacctgggagggggaggttgcagtgagccgagatcaccccattgcactccagcctgggcaacagcagagtgagactccatctcaaaaaaaaaaaaaaaaaaaaagaagaagaaccagcattagaaagggctccggggtgggtttatccaccctaccaaattacaacaaaggcacctgaggctcaggagattaagcaatttgcccacggtcacccagccagaagcaaggcttccgcagccccctgtgagctccagcaggacagtcaggaggagagctgtcttctgaaggaatcctcaggatgatggggtgtcctgtt

SEQ ID NO: 954547 - DNA, 572 bp, Homo sapiens
tgactcagggagggcaagagccaggggctgggcgaggctgtggaggagggctctgcgggagcagggagcccggcagcttcmtgcgggtgccgggacgtgccgtccacagggttcaccatgtgtttttttcttcaccggccatgagaaaggattaattcagaaatctaaaaatggtccccaacaggctgagaagccaaacacccacaagccaccttccactaagagacgaattaccaatgtactggtggtcctgatgtctagataaaaatgaattccccaaccatgtcttacagcaaattgccacaaggcaaaatccaaagtaagcacacaccattatcctgcccctgtaccaggaaagcccccagggaatgaaggtagagaagaggaatttaaggcaagggttagtcaggagctagtctacttcttgctcctcaaaagatagcctgtaatttactgagcacttactatacgccagccctgacaggcagacattaattgccattttgcagatgaagaaactaaagctcagagaaaagaactaggtgcaaagtcacagcatgattgggaaacag

SEQ ID NO: 954548 - DNA, 577 bp, Homo sapiens
gttaatgggaaatgggtttgttactattttataataacacaataaatcaatattttaaamcttttttacttttaatttctaatatggtaaatataaatagatatattccagacaaacaagaactctttggaagcctccataatttttaagactataaagggggttctgtgactaaaaagtttgagaaccactgtagtaagtattcaacagattaattaatcctcaccaagcctgctcactggatgagaaattcctccatgatcaatcgatcctgtagtctgatctaacttctcccagagagaactgggtgtgttgctttcccctggccttcttccaggatactgctgtactgagtccatgtggatcacacaaggctaaccaaatccatcattccttacatctctattaaggccactagctaaaaagtatgctgctctggccatctctctttcaactcaacttctctctaatttccttatcctaatttattccattgcatgcttgatctgtgacaaatggctttttccacttccttgacctcatcattaaatgtttctttcatctcctgtctatgctg

SEQ ID NO: 954549 - DNA, 579 bp, Homo sapiens
gccaaaataggttaaaagttaggccttttgcaccaaacacttagccaagttgtgaatgcaaaaaaaaaaaaaaaagttcttgaaggaaattaaaaatgctactccagtgaacaaatgataagaaagcaaaacarccttactgctgatagggagaacattttagtggtctggatagaagatcaaaccagccacagcattctcctaagccaaaacctaatccacagcaattcaccaactctcttcaattctattataagaaggttgatagaggtgaggatgctgcagaagaaaagttggaagctagaaaaagttggttcataaactttacagaaagaagctgtctccttaacataaacatgcaaggtaaagcaggaagtgctaatgtattaatagaaattacagaaaattatccagaagatatggctaagttcactgatgagtgtggctgcactaaacaacagattttcaatgtatatgaaacagccttttattggaagaagatgccatctgggcctttcataggtaaaaaagagaagtcaatgtgtggcctcaaatcttcaaaggacaggctgactctct

SEQ ID NO: 954550 - DNA, 558 bp, Homo sapiens
aggcaggtcagatattaggtttgatgaatgctttaaggtcataagttatttctttgacttttgaaaattgttcaacttacctgctttagagccattagtttctacataaggcctggggacatgtggagttagccataacccctagcaatgctgaaaagagtcagactttatctgcacttctgtctggtgtcctaagccccacacctagtacataattaaaattgcttacttactaagtttttcaccaaaaataaaagttactaagagttaatattgtaacatgtaattgaaactactgaggaaacagttttacatgcaaggtgtgtaaggaaagtaaaatgtgtttttgataaaagattataagaaggcatgggaatgtggattttttttttttttgcctagattaaagggttaaagtcttgttttaagtttgataggaaaaagctaaamttttgagcaacttatggaaggtttatgaaggattaatcttgtaaaagaaattctatgtgtgaacactggctaaagttaaaggggtattcagttttttcataagttgaa

SEQ ID NO: 954551 - DNA, 576 bp, Homo sapiens
gacttgttgaatggctttgacaaaaatgctgatagtgatatgaacaataaggtccaggctgaggtggtctcagatggagatgaggaacttgttgggaactggaacaaaggtgactcttgttagttttaacaaagagacaggccgcatttggcccctgccatagatttgtggaactttgaacttgagagagatgatttagggtatttggtggaagaaatttctaagcaacaaagcatgcaaaaggtgatgtgggtgctgttaaaagcattatattttaaaagggaaacagcataaaagttcagaaaatttgtagtctgatgatgcagtagaaaagaaaaaacaattttttgaggagaaattcaagctggctgcagaaatttgcataagtagaaaggagcctaatgttatccccaagaccatggggaaaatgtctccagaccatgtcagaaaccttcacagcagcyccccccaacacaggcttagaggcccaggaggaaaaagttgttttgtgggccaggcccagggtccccctgctgtgtgcagcctagggacttggggccctgtgtcccagctact

SEQ ID NO: 954552 - DNA, 576 bp, Homo sapiens
gacttgttgaatggctttgacaaaaatgctgatagtgatatgaacaataaggtccaggctgaggtggtctcagatggagatgaggaacttgttgggaactggaacaaaggtgactcttgttagttttaacaaagagacaggccgcatttggcccctgccatagatttgtggaactttgaacttgagagagatgatttagggtatttggtggaagaaatttctaagcaacaaagcatgcaaaaggtgatgtgggtgctgttaaaagcattatattttaaaagggaaacagcataaaagttcagaaaatttgtagtctgatgatgcagtagaaaagaaaaaacaattttttgaggagaaattcaagctggctgcagaaatttgcataagtagaaaggagcctaatgttatccccaagaccatggggaaaatgtctccagaccatgtcagaaaccttcacagcagctccccccaacacaggcttagaggcccaggaggaaaaagtkgttttgtgggccaggcccagggtccccctgctgtgtgcagcctagggacttggggccctgtgtcccagctact

SEQ ID NO: 954553 - DNA, 641 bp, Homo sapiens
tggtgctaagcccctcactgccctgggcactccaagtgcaggtccygccgagcccacgcccacccggaactcacgctggcccgcgagtgccctgcgcagccccagttcccacccgcgcctctccttccaggcctctccctccacaccttccggcaagcagagggagctggctcaggcctcggccagcccagacaggggctcccacagtgcaacggcgggctgaagggctcctcaagcgtggccagagtggaggctgaggccaaggaggcacggagagcgagcaagggctgctagcgtgttgtcgtctctcagggggatggagtctggctctgtcacctaggctggagtgctatctctgcttactgcaacctgtgcctcccagctcactgcaacctttgcctcctgggttcaagtgatcctccggcctcagcttcctgagtagctgggattacaaacatgtgccaccatgcccagctaatttttgtacttttagtagagacagggtttcaccatgtgggccaggctggtctcaaactcctgacctcaagtgatccgcccacctaggcctcccaaaatgctaggattacaggtgtgagccactgcacctggcctgttttgggttcttttcttctctttttgaa

SEQ ID NO: 954554 - DNA, 656 bp, Homo sapiens
gccctgggcactccaagtgcaggtcctgccgagcccacgcccacccggaactcacgctggcccgcgagtgccctgcgcagccccagttcccacccgcgcctctccytccaggcctctccctccacaccttccggcaagcagagggagctggctcaggcctcggccagcccagacaggggctcccacagtgcaacggcgggctgaagggctcctcaagcgtggccagagtggaggctgaggccaaggaggcacggagagcgagcaagggctgctagcgtgttgtcgtctctcagggggatggagtctggctctgtcacctaggctggagtgctatctctgcttactgcaacctgtgcctcccagctcactgcaacctttgcctcctgggttcaagtgatcctccggcctcagcttcctgagtagctgggattacaaacatgtgccaccatgcccagctaatttttgtacttttagtagagacagggtttcaccatgtgggccaggctggtctcaaactcctgacctcaagtgatccgcccacctaggcctcccaaaatgctaggattacaggtgtgagccactgcacctggcctgttttgggttcttttcttctctttttgaaagtgcaaaagttgttgggaattgaatagtttcgc

SEQ ID NO: 954555 - DNA, 560 bp, Homo sapiens
atgtagaaagtaatattatcctctccctccctggatattgtgaacaatatcacaggagggtgtacaccccctgcagtattgaggttaatatcattttctttccacctgrttactacgaacaatatgacagaacggtgtacaccccctgcgatattgggggcgatatgctcccccccccaccgggtaatagcaaaaatatcacaggtgggtgtacaccccctgcaaaattgggaataatatcatcctttccccgccttgatattacgaacaatatcccgagggggtgtacaccccctgcgatattaagagtaagaacatactctcacccctggatatcatgaacaatattacaaaggggtgtacacgccctgcagtgttaaaagtaatatcatcctctttccccctggatattatgaacaatatcacgaggggtatacaatctttgcgacattgggagtaatatcattttctcccccagtgcatattacaaacaatatcacagaaggatgtacaccctctgtgatattgggaatacttttatgctcccccctgaaaaacta

SEQ ID NO: 954556 - DNA, 581 bp, Homo sapiens
gtaaataaaatgtggcatatccaaaaactggaatattactctgtcacagaaaggaataaggaattcgtatatgttccaacatggatgaaccatgaaaatgttatattaagcagcagaaggtaaacacccaaattcacatattgtatgctcccatttacagttggaaatgtgccacataacatttcagtcagcaatggactgcatatatgacagtattcctgtaagattataatactgtatttgtactgtaccttttctatgtttagatacacaaatacttaccattgtgttacaattgtcagagtgttccctacagtaatatgctgtacaggtttgtaacttaggagcaagaggctataccatatagctaggtgtgaagtaggatctaccatctaggtttttgtaagcgcactctgatgtttgcacaatgacaaaattgccttatgacacacttctcacaacatgtccccatcattaagggacacatgactgactgtatatgaaataacaagaccagagaaaaccataaaracagaaagcagattagtaattgccaggagtttagtggaagggggtttggg

SEQ ID NO: 954557 - DNA, 593 bp, Homo sapiens
aattagcaagatagaaattggcaattctcagaagaaatacaaatagctaataaatatataaaaatatatttaacctcagtaggtataagaaactgaaaatgaaataaaaacaaaaaccattgacaccacttaccttatattatcagattaatttaaaaaatgagtgtattctgccaaatgttggcaagaatgcagagaaatagaaactcacacactgaaagtgggagcataaatgccctacagctttacttagacagaaacttggcaattttaccatatgtggagggttgcaaaaatggccatgatccttcacttctcccatttccatactctttgtaatgtgattttgcacatccttttatcaagaggtggagtccatttcttctcctcttctatctatgctgaccttttattctattgcttttaccaatagattgcagcagaagagtcattatgtctcaagagyactttcactctttcactggctctcttgcttccagcaactgccatgagaacaagcctgctgaagaaagagaaaccacatggagcagagataagctgtccctgttaaggcaatgctagaccagccagcc

SEQ ID NO: 954558 - DNA, 613 bp, Homo sapiens
cttagagaaaaacttttataaaggaaaagttttagctttaagtgcttatattagaaaagaagaaaaggttaaaatcaatgatggaagtttctacctacaaagacytttttttttttttttttttgagacggagtcttgctcttgcccaggctggagtacagtggcgctatctcggctcactgcaagctccgcctcccgggttcacgccattctccttcctcagcctcccgagtagctgggactacaggcgcctgccaccacacccagctaactttttgtattttagtagagacagggtttcaccgtgttagctaggatggtctcgatctcctgacctcgtgatccacccgccttggcctcccaaagtgctgggattacaggcgtgagccactgcacccgctctactttttaaatacttcaagttctgggatacatgtgcagaacgtgtaggtttgttacatatgcatacatgtgccatggtggtttgctccacccatcaacccgttatctaggtctttaagccccgcatgcattaggtatttgtcctaatgctctccctcccctttcccctcaaccccccgacaggccctggtgtgcaatattcccctccctg

SEQ ID NO: 954559 - DNA, 603 bp, Homo sapiens
gatgtggcaaatacttttataagtagagcactcatttaatttatgatttgtaatttaagtagtagagtggaaagaacaatggcaggtacaagggaaggagacayggaaactcaaccacaactgcctttagttgagcactgactgcatgtgaatgcattgaacacaacacgtctatctcatttctcctttggcataggaatcacatcccattgtgcaaattaagatgctcaagtttaaagaggcaattaaattagtctcatcaagatcacacagctagtaggtggtggaggtggcacccatcctcaggctattggactccaaaccccatgtgaattagggttctctaaagggacagaactaataggatagatgtatatataagaggagtttattaaggagtattgactcacatgatcacaaggtgaggtcccacaataggccgtctgcaagctgaggagcaagggaaccagcaggagtcccaaagctgaagaacttggagtctgatgatgttcgaaggcaggaagcatccagcacaggagaaagatgtaggccagaagactaaatcagtctagtctttccacattcttctgcctgcttctattc

SEQ ID NO: 954560 - DNA, 716 bp, Homo sapiens
agaggaggatggaagaaaaggaaaaagaaagggagaaagraaagaaagaaggaagagatggagaaagggagggaaacaaaagaagcctcctggtaggtggatggtgatggagtccttgtgttcccagaccaaactgagggtcaggctgctatttcttgtggcccaataataagatgcagatgaactggggaggaagacagtttttatttctgcaaccggttacagggagaaggcctggaaattatcaccagaccaactcaaaattacaaagttttccagttttctaacctatatgtctacatgtaagcgtgcattcatctaaagacataagtgattaacttcttttaatctgtaactaaagtgtgagtcctgaagaccttcctctggagcttcagtaaatttactaaatctaaatggtctcagttgctggggtgattagccttatcttgtctcttgctagatcatgaaggtttgggaagttccttcagacccccagtaaacttgtttgtggaggcctgggaagtttcttcaggcccccaataaaacttgtttaatcctaaatgggtcctgttaagaattccttcattattttgtcatgctttaaggcccaggaaaggcctaggcaaagttcttggtgggcttttgttatatcccaggctttgtataagggctttgactttcaatatttaacttaaccactcggtcagtatggaaac

SEQ ID NO: 954561 - DNA, 603 bp, Homo sapiens
tcttgctccttctttcaccatgtgacattcaagctcctgccttgccttcaaccatgagtaaacactccctgaggcctctccagaagccaagcagatgcttgcaccgtgcttgtacagcmtgcagaaccttcagccaattaaatctcttttctttataaattacccagtcataggtatttctttatagcaatgcaagaatggcctaacacagctatcacccaggaaattccaagggattaagagctctgtttcaggaactaggaatgaagatcaatatgtgtacttcttattttaaagtacaatatcacactttcctggcacataatgtcttgaaagcattgtgttcacccactgtctccaattattctcttcctatcctctcttaaacccactccactgtgtctgtgtctttttttctttttttttttttttgagatgaagtctcactctgtcacccaggctgcagtgcagtggtgcgatctcagctcactgcaacctctgcaccccaagttcaagcaattcactgcctcagcctcccaagtagctgggattacaggtgaatgccaccaagcctggataatttttgtatcttcagtagagacg

SEQ ID NO: 954562 - DNA, 820 bp, Homo sapiens
agtaaatccatccaaatctgaattaatgcagttgtatttcacccagatacagcttcatagtccttattatggtcattgaaccacctggctagttcctcctccatggtgtcactaagtgattatgctcagatagtattttagatcacctttctaaaaaaggaactcaagatagataatttacttcacccctcatctctaaatcttaatccaatctaagtatattcatatctcttttaaattgtctctttagtctccttaagctattcctctagaattgaggccatcaagctacagatggtcttacaaatggagccctaaatgagttcaactaacaacttctactgaggacccctggaccaacccgctggcacttttactggcctagaaagctcccctctggaggacagtacaactgcagggccccttcatcgcccctatccagcaggaagtagctagagcagtcatcagccaaattcccaacagcagttggggtgtcctgtttgaggggggattgagaggtgacagtgtgctggcagccctcgctcactcttggcacctcctcagccttggcgcccactctggctgcacttgaggagcccttcagcctgccgctgcactatgggagcccctttctgggctggctgaggtcggagccggctccctctgcttgcagggaggtgtggagggagrggcgggagtgggaactggggctgcacgtggggctcacgggccactgtgagttccaggtgggtgtgggctcggcgggtcccgcacttggagcggccagccagcaccaccggccccgggcagtgatgggctt

SEQ ID NO: 954563 - DNA, 820 bp, Homo sapiens
agtaaatccatccaaatctgaattaatgcagttgtatttcacccagatacagcttcatagtccttattatggtcattgaaccacctggctagttcctcctccatggtgtcactaagtgattatgctcagatagtattttagatcacctttctaaaaaaggaactcaagatagataatttacttcacccctcatctctaaatcttaatccaatctaagtatattcatatctcttttaaattgtctctttagtctccttaagctattcctctagaattgaggccatcaagctacagatggtcttacaaatggagccctaaatgagttcaactaacaacttctactgaggacccctggaccaacccgctggcacttttactggcctagaaagctcccctctggaggacagtacaactgcagggccccttcatcgcccctatccagcaggaagtagctagagcagtcatcagccaaattcccaacagcagttggggtgtcctgtttgaggggggattgagaggtgacagtgtgctggcagccctcgctcactcttggcacctcctcagccttggcgcccactctggctgcacttgaggagcccttcagcctgccgctgcactatgggagcccctttctgggctggctgaggtcggagccggctccctctgcttgcagggaggtgtggagggagaggcgggagtgggaactggggctgcacgtggggctcacgggccactgtgagttccaggtgggtgtgggctcggcgggtcccgcacttggagyggccagccagcaccaccggccccgggcagtgatgggctt

SEQ ID NO: 954564 - DNA, 578 bp, Homo sapiens
tcaattaatttaatacaggtacagattaatctagactaatctaatgataaatttagtttctatttaacayataaatgcttttaaaaccacattgctagaattggtggtactttcatttctgtgacatgatagagaattaaacataggcaattcctatgcagaaacaaaagctaatttattaggaagacaaatcaacaaatcaattttgcacattttaattgtatttaaccttctagagcaataaaaagggacacaaaagaaatggctgtgcagagcacatggagaccatactggtataaggcaggcaaatgaaagagaactgttctcaaaacagagacgattgtgaagaaaaatgaaaaaacagatggaaaagtgcctgaaactttagaagaaaatacataaagtcatagaaagttattatttgggccaggctcggtggctcacgcctataatcctagcactttgggaggccgaggcaggcaggtcacttgaggtcgggagttggagaacaacctggccaacatggtgaaaccctgtctctaccaaaaatacaaaaattagccaggcgtggtggcgcg

SEQ ID NO: 954565 - DNA, 563 bp, Homo sapiens
tctaagaaatgctcctaccagactgtagcttggctgagctggcattcatctcatggccatggaagggggcctgtctgcctcagtagcagagtgaagggcctcccttctgctgcccagcaaagtgatggtgtcatgaataactctgttaaaggtttggattgattgatgttaatctctccgtggaatttcctagtgggatccaatacttgatctctaatgtttaagcccattttagaggggtttcattaatgatgctgaattaattttaatttgttgatttgttatatatggctttggtaaagtgtctattcaaatcttttgctcatttttctactggattgcttattattgaattttgagagttctttatatactgtggataaatgtcctttgccagataggtgatttgtaactatttctcccaatctgtgatttgtctctaggkttttttttttaatattaaatttattttagcttttttgagactgggtcttgctctgttgcctaggctggggtacagtggcatgatcttggctcactgtaacctctgtctcccaagtagc

SEQ ID NO: 954566 - DNA, 601 bp, Homo sapiens
tatctgtaactgttggcatttacatyttgtccatccaactgcccttggccaacaggagcagccaaacataaaagccctgggagtttatggatgagcttctctccctaattactgacaaatggagaaaaaacagtctttgctagtacaacttttgtggtaccattgacactccagagctttctatgggggctgattgtggctggacttcttacaaaaccatatttgcctaagtttcacacctgcactgtatcccatttctcttgcttccttacagctttctcctgaatgtagcctcccaataaattactcacaccagaagtattatctcagactctggttctaataatttaatgtatgataggttagaaggaaaggtgtaactgaaaagataaacagttaaaagattttgcaatgatacagaagaagtggaaaagtatgctttggaataggtggtggcagtagaggaagggaggtaagaatggaaagaattctagattgatggactgattgattgattttttttttcagacggagtctctgttgccaggctggagtgcagtggcacgatatcagctcactgcaaccaccgccttctgggttt

SEQ ID NO: 954567 - DNA, 582 bp, Homo sapiens
tcctttgggtatacactcagtaataggattgctgggtcaaatggtatttctgcttcaagatccttgaggaatcaccacactgtcttccataatggttgaactaatttacactcccaccaacagtgtaaaagcattcctatttctccacattacctccagcatatattgtttctgactttttaatgatcgccattctaactggcgtgagatggtatctcattgtggttttgatttgcatttctctaatgacgagtgatgatgagctttttttcatatgtatgttgtccgcataaatgtcttcttttgagaagtgtctgttcatatcctttgcccactttttgatggggttgtttgttttttcccttgtaaatttatttaagttccttgtagattctggatattagccctttgtcagatggatagggtacaaccccgttctgtgggttgcctgttcactctgatgatagtttmttttgctgtgcagaagctctttagtttaattagatcccatttgtcaattttggcttttgttgccattgcttttggtgttttagacatgaagtctttgcccatgcctatgtc

SEQ ID NO: 954568 - DNA, 459 bp, Homo sapiens
agagatatccactgttagtctgatgggtttccctttgtggatatccgctgtttgtctgatggggtttttgtgtggatagcctttttgttaatgttgatgctattcctttctgtttgttagtcttccttccaatattcaggtccctctgttgcaggtctgctggagtttgatggaggtccactccagaccctgtttacctgggtatcaccagcagagactgcagaacagcaaagattgctgcctgtttcttcttctgaaaactttgccctggggggcacctgccagatgctagccagagctctccttgctaggaggtgtctcccagtcaggaggcacaaggatcagggacccacttraggaggcagtctgtcccttagcagagcttgagtgctgtgctaggagatccgctactgtcttcagagccagcaggcaggaacgtttaaatctgctgaagctgtg

SEQ ID NO: 954569 - DNA, 605 bp, Homo sapiens
ttacacaattctgtgcattgaagcyatttatctcctgccaactgtggtaattaattttgttttcagttagtggaggggggattgatcttccctttgtgaaaaactttctcacgcaaatgtttcccagtgttgaaatgttgaatggctttcctcctgttgtacaggtatttactggaatctgagctcatgattctctgaatccatgactaatgcaaagtcagagccaagtttattgatgacttctatttctctctttagggatcaaagtttttcaaagtatacactacttagaacttttaaattatctctaagtctatttgcacgtaatgcaagtatagcaacctgtacaggtaaataccttttagtttcataaacaaggaatacaatctcatgtaggcatacgttttcaattaaaaatttcttataaacatatagtttgtgtgtctcacagagttctttaacccaaatacatgccagtggccttgtagagttgagtagtgtttataagaaggcttgtcactgggcagctttatgtcaatatccagaaaacttgggccatactatcaaaccttcaccaccaatgttttttactttgatttattgtg

SEQ ID NO: 954570 - DNA, 662 bp, Homo sapiens
atttggcccctactaccaccaagaaagaggcacaacacctagtgggcctatttggattttggaggcaacatattcttcatttgggtgtgttactccagcccatttatctagtgacccgaaatgttgccagttttgagtggggtccagaacagaagaaggctctgcaacaggtctagactgctgtgcaagctgctctgccacttgggccatatgacccagcagatccaatggtgcttgaggtgtcagtggcagatagggatgctatttggagcctttggcaggcccccatagatgaattacagcaaaggtctctaggattttggagcagggccctgccatcttctgcagataaccatcctcctttcgacatgcacctcttggcttgttatcgggctttgatagaaactgaatgtttgactatgggtcatcaagtcaccatgtgacttgaactgcctatcatgaactgggtgctttctgacctatctaaccataaagttgggcttgtgcagcagcattccattccgtcatcaaatggaagtggtaaatatgtgatygggctccagcaggtcctgaggaaacaagtgggtttcatgaggaagtggttcaaatgcccatggtccccactcctgctatcctgctttttcccctccagcctgcactga

SEQ ID NO: 954571 - DNA, 473 bp, Homo sapiens
gcagactcacacaagtgggtggtctcagtgactcactctggcggcatcccagggaaagtgccaatccaaacaaagtgaaatctcccytcaatacatggtagctgtaaatctggaaaattccatgtgtattaaaatcatgcaaaaacatactttgtttttctgcataaaacgaaattagattctgggctcagataattataaaaacctgtctcacctataggaatgtctgacaaaacatccaatatttgtgagggatgtggaacaattctttgatgggcagtgctgtgctgtgcattgtggaaaatttagaatccctggcttctcccaaatgccaatggcactctcaaatattacgacaaccaaaagtagtcccatcaatttccaacatggcccctagtaggcaaaatcatccccactgagaacccctgacctaggtgactgggtttatgaggaggtagactcaaaaaatttaa

SEQ ID NO: 954572 - DNA, 618 bp, Homo sapiens
ttgggtcccctccctttgtatgagagctctgttttcactctgttaaatcttgccactgcactcttttatgttccatgtttgttacagctcgagctgagcttttgcttgccgtctaccattgctgtttgctrccgtcgcagacccaccactgacttccatccctctggatcaggcagggtgtccgctgtgctcctgatccagcgaggtgcccattgctgctcctgatcgggataaaggcttgccattgttcctgcaaggctaagtgcctgggttcgtcctaatcgagctgaacactagtcactgggttccatggttcttttccgtgactcatggcttctaatagagctataacactcaccgcatggcccaagattccattccttggaatccgtgaggccaagaaccccaggtcagagaacacgaggcttgccaccatcttggaagtggaccaccaccattttggaaacagcctgccaccatgttgggagccctgggagcaaggaccccctggtaacattagcatttgccttaactttgggcgctagattaacatctctgggctagagagtggcagtacggctgacaggcacaggcactctgccaggtgaggttagctgt

SEQ ID NO: 954573 - DNA, 480 bp, Homo sapiens
ggtctggtgaataaaaagcaggagtggcttaattgtgccctgtgtcccttcttagtgtattgttacatccagggcattctaaacttggcagaaagtccttatgcctttgatttgcttgcacttcaaagggggacttgagaaaatacagagcattctggagtcacaaaccttaaaactgctgtgggagctaagaggaggttaagttttattccagtttggaggctagggagacttcctggagaaaagggctttttttaaaaagaaatttttaattttaaattaattttatttatttttgagacagagtcttactctgttgcccaagttggagtgcagtggtgtgatctcagctcactgcaatctccgcctccccggttcaagtgattctcctgcctcagcctctcgagtagcagggattacaggcatgyaccaccacacctggctaatttttgtatttttaatagagatgagttttcacca

SEQ ID NO: 954574 - DNA, 607 bp, Homo sapiens
gtttgtttctttcactttttttatttttcttttgagatggagtctcactctatcacccaggctggagtgcagtggtgcaatctcggctcactgcaacctctgcctcccaggttcaagtgattctcctgcctcagccccaccacgccccaccatgcctggctaatttttgtatttttagtagagacggagtttcaccactttggccaggctggtctcgaactcctgatctcaagtgatctgcctgccttggcttcccaaagtgctgggattacaggcttgagccaatgcacctggcatcactttttgttactgaaatgcacaatcgagcttgtctaatctgtggcccacgggctgcatgcagctcaggacagctttgaatgtggcccaacacaaattcctgaacattcttaaaatattatgagattttgtttgtttgtttttagctcatcagcttttgttagtgttagtgatggcggtggtggcctggctgctgccatgatactggctgcagtgggggmggggtagccagggctgcccgctccacagagccagtgagagctgggaacaggcagaagccctgcccgcttccaagttggaggtgtgagag

SEQ ID NO: 954575 - DNA, 782 bp, Homo sapiens
gagtgaactattcacaattgctacaaagagaataaaatacctgggaatccaacttacaagagatgcgaaggacctctggacctcttcaaggaaaactacaaaccactgctcaatgaaatacaagaggacacaaacaaatggaagaacattccatgctcatggataggaagaatcaatatcgtgaaaatggcgatactgcccaaagtaatttatagattcaatgccatccccatcaagctaccaatgacttttttcatagaactggaaacaactactttcaagttcatatggaaccaaaaaagagcctgcattgccaagaccatcctaagccaaaagaacaaagctggaggcatcacactacgtaacttcaaactatactacaaggctaccgtaaccaaaacaacatggtactgctacccaaacagagatagaccaatggaacagaacagaggcctcagaaataacaccacacatctacaaccatctgatctttgacaaacctgacaaaaacaagaaatgggaaaaggattccttatttaataaatggtgctgggaaaactggctagccatatgtagaaagctgaaactggatcccttccttacaccttatagaaaaattaattcaagatggattaaagacttaaatgttagacttaaaaccataaaagccctagaagaaagcctaggcaataccattcaggacataggtgtgggcaaggacttcatgatgaaawcgccagaaacaaaggcaaccaaagccaaaacagacagatgggatctaa

SEQ ID NO: 954576 - DNA, 585 bp, Homo sapiens
gggacaggggccctcttgtgaggcctgaaggatcagggcaaaccttaatgttgggggatgagacaggaagacakccaggggccaaaggggctagagctcacgtgtcgaccggtcaagagtcagcaacatgccgtggcgctggctgagcccagctcatcttgtgaccacagccatggctgctgcgtgtgaacagcccacaggtgaccagcgctgcttccttcccctgcttgtccccggtgcctctgagcatgagactcgacagcattctccccaaagcaagcagcagtcagtcccgccctgggcatgcaggccttgggcctggccactcgtgtctgttctcgcagtgcaagctcccgcctcccttgggtcgcacgctgctggactgtggcgtctctggggcacaggtgtggacttcccaggcccaaaagccacagatgagcattgggttgaaagagcgagtccctgagacctggggaggggaccgaggccatggaggaggtgggaatgcaggtgaggcagtggggagaggtcctcaggccccggggggaggagagtgtggccagaggccgagcggctctcagagaa

SEQ ID NO: 954577 - DNA, 779 bp, Homo sapiens
ccgaggccccaggagcatgagtaagtcgtrcaaggacacccagctagctggacgttgggctccacccaactctctccactctgtgagcccgacatgctgttcctctggggcctcgcttggtgttggcagctatcgctgtttgtagctgcatcatgcccatgtgctttctttccgcccaggatgtgaagccggtagagaaataaagcatcgcccctctgcgcgcccctccccgtctgctagaatgtttctcatgaacgcttctccagtggttgctctccagtccaaatgggaggcctttggcccgccagggagctgtaggttccccaggtgcttctcggaggctgacgagggcgtggagagcgcgtcggtgagcgcccgggtgcagatgcttatcagcactctgcagcgcgacggggctgctcggggcaccagcgatgagcgcgccgcacagaggggccacagggcagagggatgccacgacgccaggccggctgccaagcccaccgtgcacaaggagccacccgcgttggctgtctgtggtctcgttgctgactttgaccccatgggggaggaggaaactacagactttggcccgttggtgctagattcagacagtgatgattccgtggacagggacattgaggaggccatccaggagtacctgaaggcaaagagtggagccgcacagcccggggccggcggggcccagccaggtgcagcccagccttccagggccgcaggcggaggcagtagatgtaagccggaaccggctcacggca

SEQ ID NO: 954578 - DNA, 642 bp, Homo sapiens
gcctacctacatgtcccgggtaaatccatggactggattgagaacctgtcttcctgtttggtgtgctttcctctgattgatccccgcccctcacctattttacatatacctacccttccctaattggttttctacactgttgtgcccacctttgagtggtgtcttcgctttaaccttttctgcatactcacaaaccaatcagcacacatgccccattctgaatccataaaataccatggacccagccacactgagagagacaaaccacccgactgcaggggtgggggggccacccgtgtcccctctctgctgaaagctgttctgctgctcaataaaattcttccctacccatcctcacccttcaaattgtcagcgtatcctcattcttcgtggataaggacaggagcttgggaactgctgaacgcaggtacaagccatagcacaggtggggtgagtgggcctgacgcctcagcaggcccatggccaagcaaaggccaggtaggggggcgttgctggccatggaggtccctgattggcaaagtggccaagaaaaatcctgygtcaaaaaggtgggagatgaggaatctttgattcctgggtggccatgtggtttcccactgttttgagctgcagctgtgctgc

SEQ ID NO: 954579 - DNA, 585 bp, Homo sapiens
ggttagaatataaagcaggtagaaaaatgcgaaaagagagtggcttagcctcccagcttacatctttctcctgtgctggatgcttcctgcccttgaacatcagactacaagttttttatataagtttatgtatataatatatacatatatatttcattagttctgtctctctagagaaccctaacataacatacaaaggatatgaatattcagtacatcaaagagatatctgcacctccacattcattgcagcttattcacaatagcaacaataaggaatcaatctaagtgtccatcaatgaatggagaaaatgtgatatatattgatatatatatatgactattcttcagctttaaacgagaaggaaattctgtcattcgtgacatcatagatgaacctaggaagacattatgttaagtgaaataagccatgcacagtaagacaaatactgcaggatttcacttacatgtagaatctaaaaaagtcaaacycacagaaatcaggagaaaaaatgtggcttaccagaggctgggatggaagatatgtagggggaaatgttggtcaaaggatacaaaattttagtt

SEQ ID NO: 954580 - DNA, 395 bp, Homo sapiens
tacttatatcagccaaaatgtacttcatgacaaaaactacaagaagagacaaagaaggccattacgtaattataaaggggtcaattcagtcagaggagttaacrattataaatatatatgcacccaacactggagcacccagatatataaatcaaacattattagagctaaagaaagagacagaccacagtgcaataatagatggagactgcaacaccccactttcaccattagacagatctttcagacagaaaaatcaacaaagaaacatcagacttaatctgcactacagaccaaatggatataacacatatttacaaaatattttatccaatggctgcagaatacaaatttttttcctcagcacatggattattctcaaggatagaccatat

SEQ ID NO: 954581 - DNA, 610 bp, Homo sapiens
tgaccgtaggcatgtaactactaaaaatcagacctacaattcatgcctcattcatgtggccctaacactgccacattgcctccmaccagaggccatatatccacttactacacagccagccggtcctcatttcccttttgtacaaagagttgtcctggagtctctttgacagatgttttctagaatagcagtatattttgcttttgcttattgagactcttatcacattcatgtatttaggaagaatgtaagtttatgggtaggtgatttttaaaaattccagggaaaaccatagaagcagtctagttcttcactcatcattaaaacatacggaaagaagctatcaattttcccatatgctagaaaaaacaaatgtaaaatctcttctgcctttaaatgttccacacttatagcattatacttggaaaagttaagatttattttatatctagttaaaattatgccttggccgggcacagaggctcacccctgtaatcccagcactttgggaggccgaggcagatgaatcacctgaagtcaggattttgagacagcctaacttggtgaaaccccgtctccactaaaaatagaaaaattagctggacctggt

SEQ ID NO: 954582 - DNA, 737 bp, Homo sapiens
gttttgaaagtatttctggaaaaaaacagaggaaagaataagtgctatagttgggtgccgtctgggtggagttataaatagtggaataatttaaagacagtgacaggattaatgatcacggggcctgaagtctcacaatttcttcacaccaggccacacatatacaaattaccaaaaggctagctgggtaacacataggtctaagtgggttactcctctggttaaatctgtaagttagctccccacagcctacagaacagaggtagaggtatttggcatggcatacagcatctatttgaggccaggcatagtggcttacacctgtaatcccagtattttgggaggcggaggcaggcaaatcacctaaggtcaggagttgaagaccagcctgaccaacacagtgaaaccacatctctattaaatacaaaattaattagccagatgtggtggtgcacgcctataatcccagttacctgggaggttgaggcaggagaatcgcttgaacatgagaggcagaggttgcaatgagccgagatcgtgccattgcactccagcctcggcaacagtctccgtctcaaaaacaaacaaacaaacaaacaaacatcaacaaaaatctattcaasattgcaccatgcctttttaaaagaaaattcctttccttacatatcccaccctgctttgcacaagcatggcacacacacacactcacacattcacacaggctcacatacgtctca

SEQ ID NO: 954583 - DNA, 651 bp, Homo sapiens
agttaagagccataacagaacaggatttagggtataagtaaataaaaaatgtgccaccaatctggggaaatatcttgctaaataattgccatcttccctatgtgtattagtgcccgtgatcaatagacctgggtgtagatcattttatccatctcttttggaacagattcaccttattcttaaaagccaactcagacactcagtctcatttttcatagtgttccagttcaaaacttgacagttcttgaaactcttcaaaaataattcaggaaattatttctgtagctttttaaatatatgaggtggataatataaaaatttgaaatttaccttggataagcagcatcacttagacggtgagggtgaagaataaaaatctgggacgcactaaagtctactcttttctccacttcacatttattgggaatattctggaaagtggcttttgcccgtggttcctaaatgtcttccccctgtgagctataccagtcatcaggtgtgttatgtccatacagctttcctaagaaatggaaattaaagtgtctttccaactccacaggcaccatagctgctgaataataaagaggataaatggctcacatttaggaactacttactrtaggtacaactgggaattttcaggatgcaggt

SEQ ID NO: 954584 - DNA, 593 bp, Homo sapiens
tgttttctagcatccatataaaygtctgtgataaataagtcattgctcactggagctgcctttgtgaagcagatcctgtacttactgtttctttcacatgcaaaatgacagcagtcaacctaattgactattacttggtcagtttctgtgtcagaagtgatgccaggtaagtaggagaaatccaaacttaatgcatttctgtttaaacccagaaagatttagtaatagaaaaaacagcaccaatttcaggtttttcagagatgagtgtgttcccaaaggatgaacttgacactactgcattctttctcacaacctaaactggattcttctatgaatctctgagtgaattcttagtagacacattgacatggtataaaatacatcacacggctgtaataaacataggttagaattgtggttcagttttcagccaaatgccaggataccattttcatatgtagtctttcctaattggaaatctagaggatggggtacaaaatagtcatcctaatctgttcaaacatcaatggacaattatgtctctaaaattctcaatactttgcaattaaagagtttttgattcctacattgca

SEQ ID NO: 954585 - DNA, 595 bp, Homo sapiens
tgtatggatttcagtgtcctctagaaacccacccatgttccaataatcaaaactttttccttacatgctaggagtacaccacacttaatcctcttctcctggggggttgcgggtggggtggggggacaagtccccctatctgtataaaagagcttcacaagtgctactacatctacctggtttcaggaaccttttcccaatgtttgcagcagacctcaccaaactcccataaactcacgttttcttcctctggactgtcaaccagacttggagaacttgagagtggcatccacatcctagtgtttctgagcacccaacgaccatgcacaacgctcagctcaaggcaggcactgaatgctaacaaacagctcatatgtaggaaaagtgcaaatctattaaaatgctctgaaaagcccaagggggatcagcttttgaagtaattagtaattctattataataatttgtgcaaattaaaaaatatatatttgatgcaaaaagataaccacagaactgtttaaaagatggatttattatttatttatttatttwttttttttttgagacggcgtctcgctctgtcgcccaggcaggagt

SEQ ID NO: 954586 - DNA, 641 bp, Homo sapiens
gagctctttatatattccagaaactagtttttttgttgaatatgtgatttgcaaatattttcactgagtttttaggttgtctttttgccctttaatagggtcttttgcagaaaaagttttaaattttgatgaagtccaatttatcaagttttccttttatggatcatactgttggtattaagattaaaaatctcttcatttagctctaggtgttccatgaattttaaagatcttttatcaggtgtctttacagttgtataagaactctgcttaacctcagatcaaaaagatattctgttttttaaaaaagatttatagttttacaatttacatttaaatcccgtggtccattttgagcttttttaaaggtgtgtgtggttcttcttccccttcctcctcttttcttcttcttcatctacatcttcttcatcttctttctcttcatctttgttttgtcttttttttttttgcccatggatgtccaatggctctagtattatttattgaaaagtctatcctttctccaatgtattgcttttgcacctttgtaaaaaatcaactatccatatttttgtgggyttatttctcagttctttattctgttccattgatctatgcatcaaactcttcactaccattat

SEQ ID NO: 954587 - DNA, 754 bp, Homo sapiens
aggcattttgaacaagaccttcttcygaggggaggggtgacctgaaagacacttgccctactccaactcagaactcagtgctcttctactcctaggcttcccccaagccctgctctcagcccccagggcccacaaaactgcagaagcctttcgtgtggggctccctccaaagtgagatgaccccctagaccttcacgtctgggctggttcacctgaccctctacccacaagctgttctatgggagacaaagagaacaaggggaggatcaatgccttccctgatttagcctcttggatggaaaattccagagtcttaaaaaaactcagttgaaagatgcaaagtcaacatacaaaaaccagtcatctctgtatatactagcagtggaaaattggaaaccaaaattaaaagcaccataccatttattttcatgcgcgtccctgtgaagagaccaccaaacaggctttgtgtgagcaataaagctgtctatttcacctgggtgcaggcgggctgagtccgaaaagagagtcagcgaagggagataggggtggggccgttttataggatttgggtaggtaaaggaaaattacagtcaaagggggtttgttctctggcgggcaggagtgggggtcccaaggtgctcagtgggcaggagtgggggtcgcaaggtgctcagtgggggtgtttttgagccaggatgagccaggaaaaggactttcacaaggtaatgtcatcagttaaggcaaggaccggcca

SEQ ID NO: 954588 - DNA, 598 bp, Homo sapiens
  misc_feature 1, 2, 3, 4, 5, 6, 7, 8, 9, 10, 11, 12, 13, 14, 15, 16, 17,18, 19, 20, 21, 22, 23, 24, 25, 26, 27: n = A,T,C or G
nnnnnnnnnnnnnnnnnnnnnnnnnnngcagcaactcagaaatctttaaagttgaagggccaccctattagaacataggctgtgtctgctcaattataagcatgacttgatcaaagcaaactcagccttaagatactctatgtagggagaggtgaggaggcatatctgcgattaggaagcagaggtgggtagcatcagggagggtgaggcactgagctccacgctcataaaacaaagtagggccatctcacagtggctgcaaaccatctgggtccaacaaaatatcactgtcagtggggccctggtcacctggccatgcggctttgccacaggtccctgctattgttatcactctgtcgtaaaaaaaaaaaaattagagtcatctcaaaagataaaataatcatccacagaagagaggttgtccctggtgagctgtcctaacccaaggtggttttcatggttccaggacattcagtgcaaaagtcctggacacagatgcaacaatcaatattactttgtttaatcccttgccatatttaaagctgggcagagaatgcattraaattagaatcaatctcaacaagaaaagaatagaatg

SEQ ID NO: 954589 - DNA, 615 bp, Homo sapiens
caaatctacatctctatttctgtttttgttttttttttaacccctgtccaaccacactggttttctttygctactgtacagtcaatgtatgcaacatttgccttaaggtatacacccctactattctctctgtccaaatcctttatctcccccaacctgttatacctatttgctagtaaatgacgcaaatcataaattgtcaactgaagtcacttctgtaggttacgcctttttgacatccaaaggatgattcaagttcctctcttaagtactctagagtctaaagggatatagcatatagttgggtctgtaattgtactgttatttctttaataatttaattaatctcaatttctccaattagattgtaaactccatgaaagcatgtcactgtagttggtgcttcatatttgttgcacaagtaaatagcccttattggaaaaagataatgaatttgatatgacttctccagttacagattcttttaaacttttaaggttaactactgagttaattaaacctttctttgtcctctgtcaatatgttaacacaggtaatgctctgcctccttgaacacagataaattctccagggcataatttattcctgctctgc

SEQ ID NO: 954590 - DNA, 597 bp, Homo sapiens
tactacagacccatcagaatggctaaaattaaaaagatggtctataccaaatactggcaagattatggagcaactggagctcttataccctgatgctgggtatgtagattggtagaaccactttggaaaatgtttgacattatgtactaaagaagagtatgcatgtattgtataatccagtaacttcctgcctatctatatgtattaaataaatggttacacaagtataattaaagatatgaaagaggttcatggcagcattatttgtaataaacccaaactggaaacaacccaatattcaatgacagtgtaatggataaataaattatggcatattcatacactggaatattatacagcaatacaaatgtatgaacaatacagctacatacaataatatgggtaaatctggcatacatagtgttgaatgaatgcaggcacaataatgcatcctgtgtaattccatttataaagcgtttaaagctaagcaaaactaatctatggtgtagggtccagccctacggggctttgagggtgttctccccgtgtgcrgagacgagagattgtaagaaataaagacacaagacaaagagataa

SEQ ID NO: 954591 - DNA, 590 bp, Homo sapiens
gttgatagtttttttgtgttttgttgctgtgcagaagctcttaagtttaattagatcccgtgtttcaatttttgcttttattgcaattgttttgatgtctttgtcatgaaatctttgcccacttttaygtccaggatggtattgcctaggttgtcttccagggtttttataatttggggttttgagttgatttttgtatatagtgtaaggaaggggtccagcttaatcttctgcatatggctagccagttatcctagcaccatttattgaatagggaaccttttccccattgcttgtttttatcagctttgtggaagatcagatggtcatgggtgtgtggccttacttctgggcccctattctgttccgttggtctatgtgcctgtttttgtaccagcaccatgctgttttgattactgtagccttgtagtatggtttgaagttggataatgtgatgcctccagctttgttctttttgcttaggattgcctgggctagtcaggctcttttttggttccatatgaattttaaaatagtttttttttctatttctgtgaagaacgacattggtagtttcataggaacagcat

SEQ ID NO: 954592 - DNA, 593 bp, Homo sapiens
ggaagatcagatggtcatgggtgtgtggccttacttctgggcccctattctgttccgttggtctatgtgcctgtttttgtaccagcaccatgctgttttgattactgtagccttgtagtatggtttgaagttggataatgtgatgcctccagctttgttctttttgcttaggattgcctgggctagtcaggctcttttttggttccatatgaattttaaaatagtttttttttctatttctgtgaagaacgacattggtagtttcataggaacagcattgaatctgtaaattcctttgggcagtatggcctttttaatgatattgattcttcctatccatgagcatgaaatgtttttccatttgtttgtgttttctctgatttctttgagcagtgtttgtaaatctgattgtacagatccttcacctcctggttagctgtattcctaggtattttattctttttgtggcaattatgaatgggattgcctttcygatttggctcttggcttggctgttgttggtgtataggaatgttagtgatttttgtacactgatttttttatcctgaaactttgttgaagttgtttatcag

SEQ ID NO: 954593 - DNA, 570 bp, Homo sapiens
cttggtattatccatctttttaattttacccatgatgcagatacctgactaataatgttgagcagtttttcacgtgttttgtatctcttctaatgtgcagtgtatgttgaaatattttgcccagttttattgagtttttcttttcatgattaacttgtagggattctttacatattctgggtacaagtcctttgtcagatatatgtgttatggctatttttccaaatttgtggtttacattttctttttaaaaaaattttcaagtgtataatacattatacacttgatataataggcgctaggttctttaatgatatcatttgaaaagcagaaaacttttatgttgataagtccaaattagtattgtttatggttttttctttcatggtaatcatggttactgcttttatgtgagtgtcttaagaaatcttgatctacttccaaattmtgaagatatatattcaatatttttctcttatctttagtttttatgtttaggtctatgttttatgtcaaattcatttctatgtaaggtgtgaggtaagggtctaaatgtaaaatttttccatg

SEQ ID NO: 954594 - DNA, 469 bp, Homo sapiens
taatttcctcacatctctagtataaagactaaaagacaaatttatcaaaagtaattacaactatggcaacttaagaggcaatatraaaagatgtaaattgaaacaagaaaaagccaaaatgtggggagatacagttaacatgtagagttttttagtttttcctttgtttcttttcttctctttgtgatcaaagctaagttatcttctgtttaaagtaacttgttttatttataagatttttttgtaagccccatggtaaccacaaaagcataaacctataatagatacactaaaaataaaaagcaatgaattaaaacatacaaccaggaacaaaaatcacctaaccacaaaggaagacaggagttattatacaaaacaaccaaaaaacaagtaacaaaagggcaatagcaagtccttacctatcaataataacaatcaatgcaaatagactaaaatcttcaattaaaag

SEQ ID NO: 954595 - DNA, 469 bp, Homo sapiens
taatttcctcacatctctagtataaagactaaaagacaaatttatcaaaagtaattacaactatggcaacttaagaggcaatatgaaaagatgtaaattgaaacaagaaaaagccaaaatgyggggagatacagttaacatgtagagttttttagtttttcctttgtttcttttcttctctttgtgatcaaagctaagttatcttctgtttaaagtaacttgttttatttataagatttttttgtaagccccatggtaaccacaaaagcataaacctataatagatacactaaaaataaaaagcaatgaattaaaacatacaaccaggaacaaaaatcacctaaccacaaaggaagacaggagttattatacaaaacaaccaaaaaacaagtaacaaaagggcaatagcaagtccttacctatcaataataacaatcaatgcaaatagactaaaatcttcaattaaaag

SEQ ID NO: 954596 - DNA, 589 bp, Homo sapiens
caaaacaaaggggctacaggccccatgcaagtccaaaatccatcagggcagttaaatcttaaagttcccaaaatatttcctttgactccacatctcgcatcccggtcacactgatgcaagaagtgggttcccatggtcttgggcagctccgccccttggctttgcagaatacagcctccctcccggctgtttttatgggctggtgttgagtgtctgtggcttttccaggcacacagtgcaagctatcagtggatctatcattctgggggctggaggatggtggccctcttctcacagctccaataggtggttaccccattagggattctgtttgggggctctgaccccacatttcccttctgcactgctgtggcagaggttctctatgaaggccttgcgcttgcaacaaacttttgcctgggcatccaggcatttccatacatcttctgaaatctaggcggaggtgcccaaacctcaattcttgacttctgtgtacccacaggctcaacaccatgtggaaggtgctraggcttagggcttgcaccctctgaagccatggctggagctttaccttggtcccttttagtca

SEQ ID NO: 954597 - DNA, 492 bp, Homo sapiens
cagagagcagctccccagaaggggagacccgagagggaggcagagggctatgagtgagctggtccatggctggctggaagtggaaggcatgagggagactggtagggcatgctyagatcaccctgggttttgttcctaagctgttctggaggagagctgatatgatgagaggctgaaggaaaactgctcactgtgctcactgcttgtctcctggaatctggaactgacccctcaggggagggtgactggagggcctcctccagcctgctgagaacacagacaggtactccttggtgccacctgggtgatgggttaatgggcacactctcaacaagggtaggagctgttttggacacctgaacatcagatggggctgtcatcagtttggagaaagcaggtgatatggtttggctgtgtcctcacccaaatctcatcttgaattgtagctcccataattcccttgtgttgtgggagggacccggtgagagataa

SEQ ID NO: 954598 - DNA, 574 bp, Homo sapiens
caagtgggcgctgtcagccagaacatccacacatggcctctctgttatcatctctgtctcctcacagcataactgggctccaagagcaagtataacagtgaaacagcaaagaactaacacagctaacatcatttatgtttaaggggcctttacccattggtttttataactaagtctgggattaaaggggaactacatatacaactaactatgttttgttaaaaatttataggagcattgtgacctgacaaagttcccaacctccttggaccctggctgccacccagatttctgcagtcatcagtcacctctggatctcaacctcctcctcttctccctgtccttaacataaaaggagcctaaaatttgtactggcatacaatggtactttaggatgctagctcacccccttctcagttttgctggctctccaaataaacctgcttttcctcccatcaacccttgtctctcaagtctggctttccagaggcaagccgctgaacttgggttcagttacatcctgagcatcctaagatggaagacataatgmtctttatgacacagtctctccagt

SEQ ID NO: 954599 - DNA, 562 bp, Homo sapiens
ggctgggtctcagaaagcaaggagtagcagaggttaaaacaattatccagataatcctaattccttccgcagtacagaggccagatgtgtcttggttgcagaattaaccaggtctttgtgggcatctccatctacccccattgacagagatgcgactggcgggtcctggtggtcattttggatcaagcctggcagcctgttggttggtgagcattgcaggcagggacaaacctattgcaggggcttttgtagggatttgtagggatttctcctatgttttgttttctatgaaacaaacagttgattaagaaaacaaacagttgattaagaagacaatgcattccctcaccccttcatcctttgtctcattaacttggatctatttatgtcatgttaaccaaactctgagctggcttaaagtgggattgtatcacccagccaagtcgtaagtgcaagagggggtcttccagagggccattgcattgagaaagaaacactcactcatgtcaagatktatttgttagaaaacccctctggccaggtgcagtggctcactcctata

SEQ ID NO: 954600 - DNA, 450 bp, Homo sapiens
gtggaaaaggaaaccttcatacactgttggtaggaatgtaaattagtamagctactttgaaaaacagtaagaagctttctcaaacaattaaaaataaaactaccatataatccagcaatctcatgactgggtatatagccaaaaaaattgtatcagtatgttgaagagatatctctactcccatgtttattgtagcactattcacaatagccaagatacggatcaacctaaatgcccgtctacagatgaatggatgaagaaaatgtgtatatacacacaatggaatattattcagccataacacagaatgaaatcctgttatttgtggcaacatggatgaatctggaggatattatgtaaagtgaaataaaccaggcaaagaagaacaaaacacctcatgatctcactaatataaaaaatcttaaaaagtggatttcatagaaatagaga

SEQ ID NO: 954601 - DNA, 575 bp, Homo sapiens
aatgcacagaaagaaaaaacaatagaactaaatccaaacttcaactaacacaactaacatataaaaagataatgactacaattamaaatcgaaacgcaaacaccagattagatacaattaaagaccaaattagtgggatggaggatacttttgaataaattactcaaaatgtaccctacagtgccaaaaataaaaataaaaaatgaaagtaataaagaggttaagacacatagcagagaaggcccagcatgcattgagtcaggaaagcagtagcagagaatgtgtgtgagaggcaatattagcaagggtaggactcagaattttgagaattgatacggccaggtgtgatggctcatgcttataatcccagcacattgggacgtgggaggattttttgagtcaggagttcaagtctagcctgggcaacatagtgaaaccctatctcaacaaaaaatacaaaaacgagccaggtgtggtggcacatgcctgtggtcccagctactcaagaggctgagataggagaatcgcttgagccaagaggttgaggctgcaggaagctgagattgtgccactgc

SEQ ID NO: 954602 - DNA, 570 bp, Homo sapiens
actcctgtctcaagagccgagctcctcgagtgagcaattcctgtcccttttaagggctcacaactctaagggggtctgcgtgagagggtcatgattgattgagcaagtagggggtaygtgactgggggctgcatgcaccagtaatcagatcggaacagaacagtacagggatttttacaatgcttttcaatacaatatctggaatctatagataacataactggttaggttgtaactaccaggcccagggcgcggcagcaggctgtttgcctgtggatttcatttctgccttttagtttttacttcttctttctttggaggcagaaattgggcataagacaatatgaggggtggtctcctcccttaacagaatctcactctgttgcccaggctggaatacaatagcaagatctcggctcactgcaacctccacctcctgggttcaacgattcaccttcctcagcctcccaagtagctggaattacaggcatgcaccaccacgcccagctaatttctgcgttttagtagagatggggtttcaccatattggccaggctgttcttgaacttc

SEQ ID NO: 954603 - DNA, 570 bp, Homo sapiens
actcctgtctcaagagccgagctcctcgagtgagcaattcctgtcccttttaagggctcacaactctaagggggtctgcgtgagagggtcatgattgattgagcaagtagggggtacgtgactgggggctgcatgcaccagtaatcagatcggaacagaacagtacagggatttttacaatgcttttcaatacaatatctggaatctatagataacataactggttaggttgtaactaccaggcccagggcgcggcagcaggctgtttgcctgtggatttcatttctgccttttagtttttacttcttctttctttggaggcagaaattgggcataagacaatatgaggggtggtctcctcccttaacagaatctcactctgttgcccaggctggaatacaatagcaagatctcggctcactgcaacctccacctcctgggttcaacgattcacctkcctcagcctcccaagtagctggaattacaggcatgcaccaccacgcccagctaatttctgcgttttagtagagatggggtttcaccatattggccaggctgttcttgaacttc

SEQ ID NO: 954604 - DNA, 546 bp, Homo sapiens
tgcgcggattacaggcgtgagcccctgcrcccggccaaaatacattcttcttaattacctatttgtagaaatactactaaaatatgatcaagaatctttaaatagaaattttaatgaagacttttttttttgcatctttaacatggaagtacttcttactgatgattacattttttaaaatcatgcctgccagcccatctaagccaaattcaaacaccactctgcattaaatgaagctgcagtaggaaagctgagcacatagcacccaactgatcggaaagaaacgtaccatgtttaataaaattccagattcctgtggtcgttgtccataaaaatgctttgcagtgttggatatatggtttgcaaaagcaagcaaatcctccacagttccatatctgactgatgacaaccatggtacctcttggccactaagcagcagagacttagaacgctcatcgttttgattactgtcttgacacatggtcattagactgggttcataaactgctggctcttcacttgcataaagattttccataatgtcta

SEQ ID NO: 954605 - DNA, 599 bp, Homo sapiens
gagcaggtacaaaggtcagatcatagagtttaattaggattgagtttttccagattgtgggaaagagagtttctggggtgtcaattgagttggtctcgcctgtgtgagacacccatggggagccatgggcagcctttcaggagaaaagtctccttattgccttcatgtctttatgcctcgagagcataaccgctcagcggcattccacaggttgctcagggagataacactcccttgaagtagtggagtataatcaaacatctcagctccttctgaaacccactcccacctgtttcagtcccggttaagttaaagattttaagtagtttagacacacgtctttgatcaaggaaattcacagaaaccgccactgctatacatcttattgaatgactcatgagttctctttcactgattaatccttttcctcatcccttcctctccctcccatctgccctaagaacaaagagcttgtaaaccaattaattgggtggagcccgagagctctggaccttgagtaagcctccaatgctctggtcccctggacccaccttttaaacrcttattctgtctctttctaactcctttgtctccgccgg

SEQ ID NO: 954606 - DNA, 629 bp, Homo sapiens
tttcactcttttttttttttcttttgggacagagtcttgctctktcgccgaggctggagtgcagtggcgttatctcggctcactgcaacctccacctcccaggttcaagtgattctcctgcctgagccttccgagtagctgggattacaggcatgtgccaccatgactggctaattgtttttgtgtatgtatttttagtagagatgggatttcaccatgttggccaggctggtctcaaactcctgacctcaagtgatctggccacctcagcctcccaaattgctggaattacaggcatgaaccactacgtttggtcaacccttccatttcttaaacttagtttccaattatttccaaagctggatcctctcagaatcttccctaagtcaggtaaatgcagatagttgttcaggccaaaaatcttggagttatcttcaactccacttttaatttcacatcccaagtacaatctgtcagtcttcctattggttcattttcaagatatgtcaaaaatctgactgataactattgttatcactctgatccaaaccaccactgtattagacttggataattgcaatagcctcctatgttagtcatgacactaactgcttagcaaacaactccaa

SEQ ID NO: 954607 - DNA, 575 bp, Homo sapiens
agctatttttgaaacatttttttgtagagatggagtcttgctatgttgccgagactggcctcgaactcctgtcctcaagcaatcctcctgccccagcctcccaaaatgctgggattaccagcatragccaccttacttggcccccagtgtctttaattttgatgaagtgtatctattttttcttttgtcacttgtgcttttggtgtcatatgcaagaaatgatagcccaatctgaagtcataatgcttttcctctatgttttcttctgggagttttatagttttaggattcacattaggtctttaatccattttgagttaatttttatgtatagtataagatcagaatccaacttcattcttttttgcatatgaatttccagttttcccaacaccatttgttgaagacatagtcctttccctgtagagttgtcctgtcagccttgccaaagatcattttatcatatatgttaaggtgtatttctgggctttttactctattccgttggtctgtgtgcccctctttatgccagtactacattgttttgattactatatctttgtagtaaattttga

SEQ ID NO: 954608 - DNA, 782 bp, Homo sapiens
cagctgaccccacctgttcatragcattttcgtgcaaaggagcaaagctctgtatgcaaaaggggtttcttggctgggcacggtggctcacacctgtaatcccagcactttgggaggcccaggcgggtggatcacctgagttcaggagttcaagaccagcctggccaacatggtgaaaccccgtctctactaaaaaaaaaatacaaaaattatcggggcgtggtgttgcgcgtgtgtaatcccagcttcccgggaggctgaggcaggagaattgcttgaagccgggatgcagaggttgcagtgagccaaggtcgcaccactgtgctccagcctgggcaacagagcaagactccatctcaaaaaataaaatttaaaaaaggggaggggttcttgcagaactcttcacaacagcgcatgtacatacacacacacacatacacacactctgactcccacaatcaaggatacacacatcccctccccacactcactcacacactcatgtaattaaccatatacacttattttgtcattcacacacccagacgcacacgagtacatgctcagcaatgtgctggcacactcagccatacacgctgccccctgcccggctcccacacacggcacacagatgcctactcactcacacatgcttagccacacacgtgcacacacacacacctgtgcacaagctcactcaccttcctaaaatcttacattcacatgccagacacacagtcacctccatacacacgtaccgcacacagtcgaccccaccctcc

SEQ ID NO: 954609 - DNA, 602 bp, Homo sapiens
actctgccttctgggacagtcccgcctcatgcgcaggaaccggtgttccaggtggctgaagtttccggataactgaggataacctctggaatcaaggaatggaaaaagcgtggccagtggttgactctaacccaccaaggggctctgttaggccagcacttttgtattttaacagctctatcaaaatataattcacctaccataaaattcgcgctgtaaaaatgtacaattcaatggttttaagtacattcacagagttgtgcaaccatcaccacaatcaattttagaacattttcaccacctccccaaaacgccccgtatcccatgcctactccccatatgccctcatcccagcctccccaaaccaccaatctacttgctgtttctacagatctgccacttctgggcatttcctaggaatggaatcgtgccctatgtggccttttgtgtctggcttctttcactcagcaccacgttttcgaggttcattcacactgtagcatgagtttgtcgttcattatttttattgccaactaatatcccattgtatggacccaccacatgggkttcacccattcatccagtgatggccattggagctg

SEQ ID NO: 954610 - DNA, 687 bp, Homo sapiens
agggatgcagggcaccaagtcccaaagctgtacacagcaggaagaccctggactcagcccaggaaaacatttttccctcctagacctccaggcatatggaaggggctgccgtgaaggtctctgacatgccctggagacattttccccattgtcttgtcaattagaatttggctccttgttacttatgcaaatttatgaggccaatttgaatttctccctagaaaatgggtttttcttttctatcacatcatcaggctgcaaatttttcaaacttttatcctatgcttagaaattttttccaccagatatcctaaatcatctccctcaagttcaaagttcaacagatctctagggcaggggcaaaatgccactagtctctctgcatagcaagagtgacctttactccagtttccaacaagttccttacctccatctgagaccacctcagcctggaccttattgtccatatcacgatcagcattttggccaaagccattcaagaagtctctaggaagttccaaactttcccacatctttctgccctcatctgagccctccaaactgttccartctcagcctgttacctggttccagagtcacttccacatttttgggtatctttacagcagcatctcactacctaataccaatttactgtattagtctgttctcacactgctaataaag

SEQ ID NO: 954611 - DNA, 589 bp, Homo sapiens
ctgtcctacctcaggggtatatcaactctatggctttgtgtcataatcttattcagagagaccttgattgtttttcacttccataagatatcgcactggtcattgatgrcattgatgacattatgcttattggatccaatgagcaagaagtagcaaacacactggacttattggtgagacatttgtacacaaaatgatgggaaataaatctgactaaaattcagggactttctacctcaataaaatttctaggggccaagtggtacggggcctgtcaagatattccttctaaggtaaaggataagttgctgtatttggccctttctacaaccaagaaagaggcacaatgcctagtgggcctgtttggattttggaggcaacatgttcctcatttgggtgtgttactctggcccatttatcaagtgactagaaaggctgtcagttttgagtggggtccagaacagaagaagcctctgcaacagatccaggatgctgtgaaagctgctctgccacttgggccatatgacccagcagatgcaacggtgcttgaggtgtcaatggcagatagagacgctgtttggcacttttg

SEQ ID NO: 954612 - DNA, 678 bp, Homo sapiens
cttaaatgttcctgcctgctggctctgaagagagcagcagatctcccagcacagtgctcaagctctgctaagggacagactgcctcctcaagtgggtacctgaccccygtgcctcctgactgggagacacctcccagcaggggttgacaggcacctcatacaggagagctctggctggcatccagcgggtgccctctgggacaaagcttccagaggaaggaacaggcagcaatctttgctgttctgcagcctcttctaattaaacccaggcaaagagggtctgaagtggacctgcaggaaactccagcagacctgcagcagaagggcctgactgttagaagaaaaactaacaaacagaaaggaatagcatcaacgtcaacaaaaaggatgtctacacagaaaccccatctgaaggtcaccagcatcaaagaccaaaggtaggcaaatccatgaagatgaggaaaaaccagcacaaaaatgctgaaaaattcccaaaaccagaacacctcttctcttctaaaggatcacaactcctcgccagcaagggaacaaaactaaatggagcatgagtttgacaaattgacagaagtaggcttcagaaggtgggcaataacaaactcccccgagctaaaggagcatgttctaaaccaatgcaaggaagctaagaaccttgaaaac

SEQ ID NO: 954613 - DNA, 746 bp, Homo sapiens
accccatctgaaggtcaccagcatcaaagaccaaaggtaggcaaatccatgaagatgaggaaaaaccagcacaaaaatgctgaaaaattcccaaaaccagaacacctcttctcttctaaaggatcacaactcctcgccagcaagggaacaaaactaaatggagcatgagtttgacaaattgacagaagtaggcttcagaaggtgggcaataacaaactcccccgagctaaaggagcatgttctaaaccaatgcaaggaagctaagaaccttgaaaacaggttagaggaattgctaactagaataaccagtttagagaagaacataaatgacctgatggggctgaaaaacacagcatgagactttgggaagtatacacaagtatcagtagctgaagtgatcaagtgaaagaaaagatatcagagattgaagatcaacttaatgaaataagcgtgaagacaagatttgagaaaaaataatgaaaaggaaagaacaaatcctccaagaaataagggactatgttaacagaccaaacctatgtttgattagtgtacctgaaagtgacggggagaatggaaccaagttaggaaacactcttcaggatattatccaggagaacttccctgacctagcaagacaggccaacattcaaattcaggaaatacggagaacaccacaaagatactccytgaaacgagcaaacccaagacacaaaatcttcagattctccaagattgaaatgaaggaa

SEQ ID NO: 954614 - DNA, 635 bp, Homo sapiens
ccaggcaaaattacataccacttcttgagtgttttaaagcctcctaacygtatatatgtgagttctttgatatattgacttctttttctttgagtcgattcccagtagtggcattgctggatcaaatggtaattatatttttatttttttgagaaatctccatactgttttccatagtggctgtactagtttacattcccaccaacagtgtatatgagttcccttttctccactttcttgtcaacatctgtcttttttaataatagggattctggctgaggtatgctatctcattgtggttttgatttgcatttctctgatgattcatgaggttgaacattttttcatatacctgttggctgtttgtatttatttttttgagaaatggctattcatatactttgcccaagtatgaatgggattatttgtttttttcctgttgagttgagttccttatctgttctatatattagttcctgttggataaataatttgcaaatattttatcccattctgcaggttgtctcttcactctgttgatttttttgttttgtttttttttttttgtgtgtgggagctttttagtttaattaattcccaatcacttatttttggttttgttgcctgatcttttg

SEQ ID NO: 954615 - DNA, 659 bp, Homo sapiens
ctgcagcctcaacctcctgggttcaagtgatcctcccacctcagtttccacagtaattgggactacaagcgccaccactcccagctaatttttaaatttaaaaaaaaaawttttttttttgagacagggtctcactattgtccagggtggagtgcagtggcacgatcacagctcactgtggcctcaaccttccaggctcaggtaatcctcctctctcagtctcccaagtagctggaactacaggcatgcactaccaagcctggctcattttttatatttttagtagagaaggggtttcaccatgttgcccaggctggtctcgaactcacgaactcaagccattcacccacctcagcttcccaaagtgctgggattacaggtgtgagccaccatgcctggcctgtagtagtatttattatataaagcattcgcaaatatgaggagaaagaagactgaaggcaatttatcaattcctcctcaagttactgatgaatgcaatacacattaacagactgctataatagaaaatatcatgtgaattgaggcaacattcttgtcagcgatggcttccatgatgttaaaaattggctttatgtatgctttaagagcaatagtaaattgcttaatggtctaaaataaaataataaaaagattttcat

SEQ ID NO: 954616 - DNA, 598 bp, Homo sapiens
aagcactttcttcacaggtggcaggacggagtgagtgcaagcgggggaaacgccagacacttataaaaccatcagatctcatgagactgaatcactatcacaagaacagtatggggaaaaccacccctgtgatccgattgcctccacctgatcctgctcttgacatgtgaggattatggagattacaattcaagatgagattttgggtaggaacacagccagaccgtattaccatcttctccatttcagcctatttgtgtctttggatctaaagtgagtctctagtatatactgtataattggatcatatttttatattaattctgccaatctttgtcttgtgatgtgacagtttaatttactcacattgaaagtaattactgttgagtaggaacttacttatgtcattttgctgttagttttttatataccttacagaattttttcgctcattttcttcattgctatcttcttttgtgtttagttgaatttttgtggtgaaacatttaaatttctttctcatatcctttattgtatattctataactattttctttstatttaccatggggattatatttaacattttacattataa

SEQ ID NO: 954617 - DNA, 804 bp, Homo sapiens
ccggcagagagctacttctgctcaataaaacttggctttyattcaccaagcccaggtgtgatccgattcttccggtacaccaaagcaagaatccctctgtccttgtgacaaggtagagggtctaattgagctggttaatacaagccacctatagagagcaaactaagaaagcaccctgtaacacaggcccactggggcttcaggagctgtaaacattcacccctagacactgccgtggggtcggagccccccagcctgcctatctgtatgctcccctagaggtttgtgcagtgaggcactgaggaagtgagccatactcccatccacgccctacaaaggggataagggaatctttcctgtttcataagtagcaatctctgtggtaacagcccctgtggtgatgccgtctctctcggttctgccctctctatgctcagaggccctggttgctgattgcatctcatccgaacaccttgtcgggggctgaagcccactgtgcccaggtcttcctaggctgggccaggctgcgttttgacctgaccttgccctgcaaaccattccagcctcagcatagaccctccgctgctcctgcccaggcctcgcctattcccagtaaggctgcctggagcaagttgtttccaaacattgacctgaggttgagcaggagttaaaaccaaactcctgcacccccgtgaatgcccagccctgggacactcacattatttaagcagcattgctgaggatttggttcagctcagtactcccggggtgggttctcaaaacaccagactggggctggacaca

SEQ ID NO: 954618 - DNA, 833 bp, Homo sapiens
gtgtcacacacgtttacacacatgatcacattcttacaggctctcatgttcacatcacacattaatggtcacacatgctcacacacatgttcacacacatgctctcacacacaaatgctctcacacacttgctcacatacttgctcacatacattcatgctcacacacacaccacaccattgcatgcttcagccgttgcccgtgctatttcctcccttggaaagccctctactgtgaggccctcacctctcaaccctctccctggcccccatgttgtctatgtgatttcttgccatttaaaaatctacccaggtgtcagcgcttgggcagtttcctcacacctctcacccagttcatcctcccttgcttggtgctatttctgcccttgtccatatccccaccacagcatgcactttggattccaggcacgctccttgagtgtgaccccgaggccctctgtgggctcttggagcagggcaaagctgggtgtgctggggcgcagcacgggcctgatgccctgaggttgtttgttgtgctgggctggaggcgttcgaagaaacgtccaaggaggctgctagactcagttctttctttctgttttccctccacctcctctgctagtggaagctccatgtctcccaggctcgtgagctggcaaacacccccattgcatggttcagtgttgtcgttggcggcaggcgtacgtggaaggccagttacagagggtctctagggctaatgcatttcacaacacaccgscctctgacactccacgctctgcttttcctccagaaccactccctttgcaaaactctgtttcaaacaaaaagagc

SEQ ID NO: 954619 - DNA, 830 bp, Homo sapiens
actgaaaaccctgggttgtacactttaaaagagtgagtttcatggtaagtgatgcatatctcaataaagccgttattttaaaaaatgaaggtggaagagtttgcttatggtcaaaatcatatgaagtgattctctttgatggcagctaggggcatgtgttctcagcacgcactcaaggcttgttctccagtagcctttaataactgagggcaggcaggtggtcactctcagcctccactgttggccactctcttgtgggcagagagtgtgtcacaggagtgggacagggcacagttcgggggagggtcccagtggcaaactttatttgtcccggaatcccccctacagttggggaaacaccaggtaccctatgagtccatgtcccctgggctgctttgttgtaatgtaacataaaggctgatgagtgacttcaagcaaatgtggaacccgcaattctctgaactgctctctccccatctgtgaagccagagatcctgtaacatgctcctttggctcctgccaagcacccaggatgccggttctgtcttggagctgacagtgactcaagagtgggtgtcagccaggtgtgggagaaggagaggtgcgagtggggaggatgagaagggggaggtagcgaggggtaaggggtgcgaggggaaggaatgcagattgcatcagccccccagcaccatccagcagagtgattcgggttcactggcccccctygggcggaagcaatccttcacggagggccagggctctccccactctccttggagactgaagccacagtgtgagctcccgggtgtaactggggcttatggattctc

SEQ ID NO: 954620 - DNA, 831 bp, Homo sapiens
aaatggcccaaacagcactctgtaaaatggaccaatcagcactctgtaaaatggaccaatcagtgggactctaaaagtaaccactcgtgggggattgggaaaagggcattctgataggacagaaacaggacatgggaggggacaaataaaggaataaaagctggccaccccagccagcagtgacaacccgctcaggtccccttctccgctgtgtgacgtttgttcttttgctctttacaataaatcttgctccagctggctctttggttccgtgccatctttaagcactgtaacactcaccgggaaggtccgtggctccattttgaagtcagcgaggccaggaaccctccacgaacccactggcaggaactaaccctggacacaactggagaggctgaggcacgagaatcacttgaacccaggaggcagaggttgcagtgagctgagatggtgccactgcactccagcctgggtaacagaacgttacactctctccaaaaaaaaaaaggcgggggccaaaggcccgaagataacaaccctagaagctgcaatgccacacagaggtaaggatgcaggcctggagttggatctggacttcagccgtgtttttgctgtttattggccttatgacttggtttccttgtgagtaaaatgggtacaataaggatggttgcaaggaataaaggacagaaggctcagaaagtacttgttataatgcctgtgctattatagggagccaagaagtatttgttttctcccccattaagaaaaaatggcacaaaataaaaacgtmacaatgtcataaaccaaaacttcccaaggttaaaaata

SEQ ID NO: 954621 - DNA, 585 bp, Homo sapiens
tatatatattctgagtccctgggagaaccagcttggattccctggtcatgcaccagtatggagtagtagtgtttgacaagcttctcctgcctgatgacccacaaaggtggctggttctcttcccaactatcccattgaggagggctttttgatcagaggcagatccttgggccctgagcccgcagaatttatgatcatgagtgagtattgtggttctcatagagaatgatgcattgttcaatgtagggaaaatgtttagcagagattcatgaggaagaaggagagggcattgttgttgagtgctagaaaacacatagaaagaagaacaatctatatttagagagaaaatgaaaagattggagatcaaaagcgacctcagaagggctatctttctcagaaaaagcccactctgtttactataggagcttacatggctgcagggaaacctcaaatccttcttagaaaggtaggatagagttacagtgaggtctggggatatgcgagacaatgctcagacctcagcattttggttcaaaataaacaaggtgactcataacaaatkgctttgattaaaacattatattt

SEQ ID NO: 954622 - DNA, 578 bp, Homo sapiens
aaatgagtgcttacatcatcatcaccccctcccccaaacccaggcagtgatgcataggccctagcccctagacaacatctctagacacgcactgggccagaaaggaacccattgcctggaagagagggatctaggaatctagtcctggcaacattcatcacctgctgactagcgaaccctcagataccgaataatcagcagtgatagccaggcggtacttgctgtaggccttaagcaacattcagagccatgctggattcaggtgtgacccagcacatttccaactatgatagctaaagggagagactccttctgcttgaggaaagaagagggaagagaaaaaaggagtttgtcttgcagctttggtactagcttagccacagtggggtagaacacaaaatgagttcctgcagtccctgattccaggacttggctcctagacggcatttctggacctgccctgggytagatgggagcccatttcattgaaggaggagaccaaggcctggcagcattcaccacaagatgacagaagagccctgggatctgggtgaactttggtagtagccaggcagtac

SEQ ID NO: 954623 - DNA, 699 bp, Homo sapiens
tgccttagtgcagcagaagctgggagctggcctgctgaccactggaaggcagaagtctctgggrtccaggcaggcaggagagcaggcaggcccagagcctctgctccagctctctatctcggcccgggagaagccagagacctgaatggagcatgcgtctgagcctggcatcaggcactacgcccagcagcttctccagcttcacgggaccctacatggccagtgttactattattgtgcccatgttgtagctgcagggcctgaggcacgcccagagccacaccgggggaagcggcagggctggccagggtagaccaggcacatggtgcacagggccagcgctctgacccaggggctccagggctgtgccatgcagcccaggacagaagctcaaaggctgggcaaagcctatctactccctgtcgtgttttgtgccattcacaggcccccaacgtgtccccatgccacctgatatgttcctccactagagtcgtgaccaaaagccttgtcatggtttgttggcctacccggctccccagtcagtgtttcctaaaagtactcattcattcattcattcattcattcattcattcattcattcatctattctctcatgcaacaaatcactttgctaagcacagggaccaaagcagtgaacaagagagttaaacgtcttgctctcaaggaacagaagttcta

SEQ ID NO: 954624 - DNA, 609 bp, Homo sapiens
tccaagcaattgctaaaactacaaaattataacgtgacttgaaacagagataaaatatagaatgtaagtataaagaaaaattaatggaaaaacgtaaacaaccctaatatgcaaagagcactgacaaaccaattaggacaaaaaattgcttaactggaaaatgggcaaagggaaaaacagttaataggccagggctatagagaggtggttcacaaagataaaacacacgtgaccaattatcttatgaaaatatgttcaactttaccaacctcaccgacaatcataagaccacaattaaaaataaatacatcttttgtcacataacaaagtggcaaagattcaaatggctggccatggcaggcagaataatacctcccaaaaagatgtccacatcctaatcgctggcacctgtgaatatgttccctgatatggcaaaaagggctctgcaaaggggactaaattaaggatctggagatgaagagatgatcctgratcgttctgggtcatcccaagggtccttataagaaggaggtaagagggtcagagtcagagagggaggtgtgatagcagaagcagaagtcagagagagagagattggaaaatgctact

SEQ ID NO: 954625 - DNA, 438 bp, Homo sapiens
gtgcatgtgcatgagggctgctcctcaggacgaccttgcaggaagggacctctacctccatcctgccaccgggaagcctggggcttcgagaagggcagggtggtttattggtgccacatggctggtgggggcagcgctggaatctgaaccagactgggaagcataagagctcgtgctggttttcaccctccctggtgcctcctacatccacctcattctgtggccaccgcagacacccaggaccagacccgctcactgccctgagcctacacagatcacctcattctgtggccaccgcagacacccaggaccagacccgctcactgccctgagcctacacagatcacctcattctgtggccaccgcagacacccaggaccagacccgctcactgccctgarcctacacagatcacctcattctgtggccaccgcagac

SEQ ID NO: 954626 - DNA, 572 bp, Homo sapiens
aagagacctcctaggacacttgaaatatactcagatgtctgtcaatccacatgcagttttytgttacatggctgagagaagaatatttgaaaagaatactaagctggtatttcttcgtttaatgtttggaggcctgtactatactagcaaattcctagttatgtgttcaaatgatcctaagtctttgtacaatttgcaatagaaagacattttctacatcagcttctactgctatgtccaccactccaactttctctcctttaggttttcatttcatgtctggtgattggaaagactactgaagcaatatattcacaattttgtgttcttttttgaagaagacccctcaaaattgtaaaagcttctggcttcataaaacctaaatttacctatcatcacagaaaagaaatttatgagtctcttaaattaagcctccccctctcaattagagcaaaactcaacctctttatgatccatgcctactcttccaatgttatcaaatgtctctctcctccactaaatccaggattcagattttatgatctttgaattttattaaaaaggtcaagttc

SEQ ID NO: 954627 - DNA, 638 bp, Homo sapiens
aacagattctgccctgttgattattataccaccattttgtaattatttggacttcattctttcttttttttttttgagacggagtctcactctgtcrcccaggctggagtgcagtggcatgatctcagctcactgcaagctccgcctctcagattcacgccattctcctgcctcagcctcccgagtagctgggactacaggcgcccaccaccacacctggctaatttttgtatttttagtagagacggggtttcaccttgttagccaggatggtctccatctcctgacctcgtgatcctcccgcctcagcctcccaaagtgctgggattacaggcatgagccactgtgcccggcctattctttctttatttttgggacagggtctcactctgttgcctgggctggagtgcagtggtgcagtcttggctccctgcaacctctgcctctcagattcaagggattcttgtgcctcagcctcccaagtagctgggattacagaaacacaccaccatgacccactaattttttgtagagacagaatctcactatcttgctagggctgatctcaaactcctggggtcaagcgatcctctcacctgggtgttccaaagtgctgggattacaggcatgagccacca

SEQ ID NO: 954628 - DNA, 599 bp, Homo sapiens
aaaaaggccaggtcacccacaaagggaagcccattggactaagagtggatctctcagcagaaacatttcaagccagaagaaagtggaagccaatattcagtattcttaaagaaaagaattttcaaccgagaatttcatatctggccaaactaagtttcataaatgaagaaataaaatccttttcagacaagcaaatgttgaggaaattcatcaccatcaggcctgccttgcaagagctcctgaaggaagcactaaatagggaaaggaaaaactggtaccagccacagcaaaacacatgaaaatgtaaagaccaatgacactatgaagaaaaggcatgaactagtgtgcaaaataaccagctagcatcataatgacaggatcaaattcacatataaaaatactaaccttaaatgtagatgtgctaaatgcctcaattaaaatacacagactggcaaattggataaagcatcaagacccatccatgtgctatattcaagaggctcatcacacatgcaaagacatacataggctcaaaataaagggatgaaggaaaatttaccaagcaaatrataagcagaaaaaagcaggggttgcaatcc

SEQ ID NO: 954629 - DNA, 598 bp, Homo sapiens
ctgggagtaatgaatatgctacttattagaagggaagaagaaggagaaaggatttgggatgaatcagtggaagggtttgaattacaggttagtatgtttaggtagcttgttgcaatagggcatgactaaagttaccaaacagaaaaacaggtgaacaaagcagcaacctgagatgattaatctggctacagtatgcaaactggattgttgtaaaggggttggggaagataccaagagtagataagggtggaggacagattgggagggggtcaagggagacttctagaatgtgaaaaattatctacgtcttgatctggtggctgggcttaagcatatacatacacagaatgtcaacaaactgagcatttaatatttgcttactttactgaatgttttacttcaataccaaattactaataaaagaaaaacagtgcttatgaggatggaggctgggggcaatggagagtgattatctttccgtcatctcttgtatctaatccatcagtaaacytaagtgattctacctccaaaacatatctttattctaactacttctttccatctctactactttcttcctagtccaagctaatgctat

SEQ ID NO: 954630 - DNA, 564 bp, Homo sapiens
gagcccgggaggtggaggttgcagtgagctgagatcgtaccactgcactccaactccaacctgggcaacagagcaagactgtctcaaaaataataataattattattactattattatttattgtgcagattgaatgtgataatgcatctgcaatagctggcacttagtacacaaaggaataaacattagctacgcctgctgctctcatgattactaactctgactatactgaataacaaattggaacaatggtgtcttttgcggggaagaaaaaagaatataacctcaaccccttaccatgatcttcaaggccagtaaaactctgtagcctcacctcatacctttctcccacgccccgacagcttggtcactatgcaataggcacatagagtaacaagcacagggcttcgtgcttcttgcttcctgtttctgaaatgctctttccccagctctgtgcacgtctctggctccttatcatccttccagygtcagtttaaacaacaccttcgcagagaagctttccctggccactctatctgaagtcgctctccctagcacctccc

SEQ ID NO: 954631 - DNA, 594 bp, Homo sapiens
accttgggacatggtgccctgtgtcccagccaccccagctccagccgtggctaaaagggccccaggtaagtctccgaccactgctccagagggtscaagtcagaagctgccaagggttcaacgtggtgttaagtctgcaggtgcatagatggcaagagttgaggcttgggagtgtccacctagatttcaaaggatgtatggaaatgcctgtatgtccaggcaaagtcagctacaggggtggagccctcatggataacctctattagggcagtacagaggggaaatgtggggttggagcccctacacagagtccccactggggaactgcttagtggagctgtgagaaggtcaccatcctccagaccccagaatagtagatccaccaatatcttgcaccatgaacctgaaaagctgcaggcactcaacaccagcccttgagagaagccatgggagctgagccctgcagagccagagggcagatctgcccaaggcctagggagcccaccacttacattaatgtggcctggatgtgtgagacatggaatcataggagactattttgaacctttaagatttaatgactgccctgctggg

SEQ ID NO: 954632 - DNA, 709 bp, Homo sapiens
tcttatttctctttgctttagtttggatatttttctattgacctactcactaatcctgacatctgctgtgtctggtacattgttcaatccatccaagtaagttcatttcagatattgtgtctttcagttttaagttatttgactctttttcacagattccaacattcaattgaaattttccatctttttatccattttattaacttaacacactagtcacaaagtccttgtttgttaaatccattatctggattttctagaggactgcttctatttatactttctcttgattgctggtcatattttcttgactccttgcattctagtaattttttttttcttgagacagagtctcgctctgtcgcccaggctggagtgcagtggcgcgatctctgctcactgcaagctccacctcctgggttcacgccattctcctgcctcagcctcccgagtagctgggactaccggtgcctgccatcacgcctggctaattttttgtattttttagtagagacggggtttcaccatgttggtcaggatggtcttgatctcctgacctcgtgatctgcccgccttgacctcccaaagtcctgggattacasgcatgagccactgcgcccagccacagtaattttattacatgccaagcattgtatatataagaaccgtagagactgcaaatgatattcttaccatagaaaggtcctct

SEQ ID NO: 954633 - DNA, 709 bp, Homo sapiens
tcttatttctctttgctttagtttggatatttttctattgacctactcactaatcctgacatctgctgtgtctggtacattgttcaatccatccaagtaagttcatttcagatattgtgtctttcagttttaagttatttgactctttttcacagattccaacattcaattgaaattttccatctttttatccattttattaacttaacacactagtcacaaagtccttgtttgttaaatccattatctggattttctagaggactgcttctatttatactttctcttgattgctggtcatattttcttgactccttgcattctagtaattttttttttcttgagacagagtctcgctctgtcgcccaggctggagtgcagtggcgcgatctctgctcactgcaagctccacctcctgggttcacgccattctcctgcctcagcctcccgagtagctgggactaccggtgcctgccatcacgcctggctaattttttgtattttttagtagagacggggtttcaccatgttggtcaggatggtcttgatctcctgacctcgtgatctgcccgccttgacctcccaaagtcctgggattacacgcrtgagccactgcgcccagccacagtaattttattacatgccaagcattgtatatataagaaccgtagagactgcaaatgatattcttaccatagaaaggtcctct

SEQ ID NO: 954634 - DNA, 565 bp, Homo sapiens
gtgttttaagctaagtgttattgcaaaaacagtcaaaaagtttaaaaagtttaacagtttataaagtaaaaaagttatagtaaactaaggttaatttattactgaagaaakaaaaatattgaaaacgtaagtttagggccgcctaagacccagtgttgatggatctacagtggtgcgcggtcacgccccaggccttcacatccacgcaccccgcactccccaacgcagacagagcaacttccaagtcccgcaagctccgttcatggtaaatgccctacacaggagtcccattttacatctttttactttctttttactgtaccttttctgtatttagatatacaaatagtactgtgtcgcaactgcctacgtacaggtttgtagcctagtagcaacaggctttatcacacagccgggtgtgtagtaggcccggccatctaggtttgtgtgagtactctccagtatgttcaagcaatgatgaaactgcccagccacacgtgtcccagaaggtaccccgttgttaagcgaggcatgactgtatgaggaagataatattatttattgc

SEQ ID NO: 954635 - DNA, 606 bp, Homo sapiens
gaaatggtatttcattgtgatttgaattagctttcccctgatgactaacaatgttgagaccttttcatgttttttagcagtgcatatatcttctttgaggaaatgtcttttcaagtcttttgmccatttcacatgacaaatggctatttggaatacatattttaaagtatatttaaaatatatattatattctttgaggtaaaatatttcaaaatatatattccagatagtcatttgtcatgtgcatatatagagtaaaaatttttcccagtctgtcatttatgttttccttttgtatcagtgtcttttgatagaagactttacttctgatgaaattcagtttatcaaatttttttctcttatgattagtggtttgttggtttgtttcctacagaatctctgcttaccctgaagtcactgaaatagttttctgtgttatcttttagaagcttcacagttttagcttttctgttcagtagttcttttgggaaaaccctcaaaccatgtttttcctctgctcacataccacaacgacaatcatcaacacagaagaaaacatctgtgaccaaatgtgtggaggttttcccccacacaccaagcagcaca

SEQ ID NO: 954636 - DNA, 519 bp, Homo sapiens
gtggggacacagacaaaccatattagagtcgtattattttgcctaggctggagtgcagtggcacaatcatagctcactgtaaacttgaactcctggactcaagccatcctcccaccttagcctcctgagtagctaggactacaggtacacaccaccattaccagctaattttttaaattttttgttgaaataataaactcctggcctcaaattttatcctccagcctcatcctcccagagtgctgggattacacatataagccacgatgtccagccttatttatttttatttttatttttatttttattgagacagagtcttggtctgtctcccaggctggaatgcagtggtgcaatctcagctcactgcacccttcccatcccgggttcaagcaattctcctgcttcagcctcctgagtagctgggattataggcacctgccactacacccagctaatttttgtayttttagtagagacggtgtttcaccatgtcggccaggctggtctcttttaacc

SEQ ID NO: 954637 - DNA, 608 bp, Homo sapiens
tattattgataaacagagatgcaaaaatactcaacaaaatgctagcaaatagaatccagcagtatatgaaaaagctaatccaccatgatgaagtaggctttatccctgggacrcaagtttggttcaagacatgcaaatcaataaatgcgattcaccacataaatgggaactaaaaacaaaaaccacatgattatctcaatagatgcagaaaaggcttttgacaaaattcaacaccccttcacgttaaaaaaaaaaaaaaactctcgataagctaggtattgatggaacgtacctcaaaataataagagccatctatgacaaacccacagccgacatcacactgaatggacaaaagctggaagtactccctttgaaaactggcacaagaaaagatgtcctttcaccactcttattcaagatagtattggaagtcctggccagagcaatcaggcaagagaaaaaaaataaaggacatcccaataggaagagaggaagtcaaattatccctgtttgcagacgacatgattctatattaaaaatacaaaaattagctgggtgtggtggtgcacacctgtaatcccagctacttgggaggctgaggtgagaga

SEQ ID NO: 954638 - DNA, 581 bp, Homo sapiens
attggaaagctgggtataagtatgtggtgggggtaacggggaggaaagagaactaaatctttttctgtagtagaaagttaatagtcctcaaaactgaaaaagcaagaagtaacaaaacaagcatttccttccttccttccttccttttctttctttctttctttcctcactttgttgtccaggctggggtacatcacagctcactgcagccacgaacccccaggctcaagcaatccccctatttcagtctcctcagtagctgggactacaggtgtgtgccaccacacacagctaattttttttaagaagtttcaagtagagatgggagtctcactaggttgcccatgctggtctcaaactcctgagctcaagcaatcctcccatctcggcctcccaaagtgctgggattacaggcgtgagccaccatgcctggcagaagcatattattattattattwtttttttttttaaagtagagacagagtctccctatgttgcccaagctagtctcaaacccctgggctcaagggatcctccctcctcagcctcccaaagtgctgggattacaggtgtgacccctg

SEQ ID NO: 954639 - DNA, 853 bp, Homo sapiens
tacttacagatgaatacgttactttatctaaaaaatattggccgggcgcagtggctcatacctgtaatcccagcactctgggaggctgaggccagcagatcaggagttcatgaccagtgaaaccccatctctactgaaaatacaagaattagccaggcgtgctggcacacgtccatagtcccagctagttgggaggctgaggcaggagaattgcttgaacccggaaggcagaggttgcagtgagccaagatcacgccactgcactccagcctgggcgacagagcaagactccatcttcaaaaaaatattaaaattttaaaatataaaaataaataaataaaataaaaaatatccattgagcagctactcagtgcctggcctgtgcaaagaaagattcctcaaatggcaaagatgtcccaggcccctgcctctctggaagatgctccccagtagagaggcagttcctgaacaagacaagacagaggagggcaggaaaggagggttaccagtggcaagaatcgctgcagatgaaaatacaggaagaaaaatgtaacagaagggatctcctttaaataggttgattggagaggtaccctctaaggagggaacatttcaacagagaactgaaggttgagaaggagccagctatacagagtatgcagagaagcatccccggtggaggaacaaccagcatggaaccctgagttgggagctagcccaaaggcyggtacggctggagttcagggagccggggtgcgggtcgggggagatgaggccaggagggagcaggcccaatcgtgtatgccggggacccagggtggaagcaggaggatgagtcagggccttggcgttt

SEQ ID NO: 954640 - DNA, 853 bp, Homo sapiens
tacttacagatgaatacgttactttatctaaaaaatattggccgggcgcagtggctcatacctgtaatcccagcactctgggaggctgaggccagcagatcaggagttcatgaccagtgaaaccccatctctactgaaaatacaagaattagccaggcgtgctggcacacgtccatagtcccagctagttgggaggctgaggcaggagaattgcttgaacccggaaggcagaggttgcagtgagccaagatcacgccactgcactccagcctgggcgacagagcaagactccatcttcaaaaaaatattaaaattttaaaatataaaaataaataaataaaataaaaaatatccattgagcagctactcagtgcctggcctgtgcaaagaaagattcctcaaatggcaaagatgtcccaggcccctgcctctctggaagatgctccccagtagagaggcagttcctgaacaagacaagacagaggagggcaggaaaggagggttaccagtggcaagaatcgctgcagatgaaaatacaggaagaaaaatgtaacagaagggatctcctttaaataggttgattggagaggtaccctctaaggagggaacatttcaacagagaactgaaggttgagaaggagccagctatacagagtatgcagagaagcatccccggtggaggaacaaccagcatggaaccctgagttgggagctagcccaaaggccggtacggctggagttcagggagccggggtgcgggtcgggggagatgaggccaggagggagcaggcccaatcgtgyatgccggggacccagggtggaagcaggaggatgagtcagggccttggcgttt

SEQ ID NO: 954641 - DNA, 612 bp, Homo sapiens
ataactatttgtcctcttcctttatttttaagacttcagaaaacaactttcactaaattggtaaataaagttttagrtattattttctgattaatgaaatcaccataaactactacttctagacttccgaatgtcatgattttatttctggtcttattatatttgtgtttctgagtcttaatgagctagaaatgcttataagacaaaagcaatgtgtgttttttcctgcatcagattcttttacaccttatcttgaagtttgcataactgagtcactttctatttttttttaatcactttgataagagaaaaatttatgttagttgcagtccaggaaaaagaaggcacaaacactgctgatcaaatattactaaagcttttatggactcttgaacctcattttccctcccatatgtacacaagacacacttcattcttactctgtttatgcctctctgtctaatagaaacttcacttctgactccagctttgtctaattattaacacagagaggtactagaagttgtccattagcaaagaagagaaaaattatgtttagggaactaattttataacagcttaaaatggctttgatgtaaatctgccagatgc

SEQ ID NO: 954642 - DNA, 631 bp, Homo sapiens
tattaggcaagggggtgctccaaggcaggaatttggagtgccagggttccctaacttattgaatcttattttgtccagggacatgagaacaacaagaaacactaaatattggcagactactttgtatatctttcagctccatggttctgaatatagccacagggatacattcttgtttatgtgctatttctaaggcaatttaggcagatataaatataggtaataccacttctatggaaattatgactgtatataccagagtactcccaaatttggaaactttctcttagaatattaagcatccgtggctgggtgcggtggctcacttctgtaatcccagcactttgggaggccaaggcgggcagatcacgaggtcaggagttcgagaacatcctggccaacatggtgaaaccccgtctctactaaaaatacaaaaattagctgggtgtggtggcaggcgcctgtagtcccagcttcttgggaggctgaggcaggagaatctctcgaaccgaggaggcggaggttgcagcgaaccgagatcacaygactgcactccagcctggtgacagatgagactgcatcttaagaaaaaaagaaaaaaaaagaaaaaaagaatattaagcatccctta

SEQ ID NO: 954643 - DNA, 573 bp, Homo sapiens
tctcggaaccaagtacttcctaatcttttcttgtttcttctccttccccaacccctagcgcacccccttccccgccctgccaagtgtaggagagggatctctctggaatttccttatctgactaaggaaacttctctccaaaagaaatgcagtggtcttaaaccatcttcccaggaatctcatcaagtaaccaggaaagattaacacctgaaaaagaaaaaagactaaaagttatcaccatgtctagacagacttttatttttcttttgagacagggtctcgctctcttacccaggcagaagtgcagtggcatgatcacagctcactgcagcctcgacctctcaggctcaagcgattctcccacctcagccacctgagtagctagaactgcaggtgcgcaccaccatgcccacctaatttttgtattttgggtagagatggggtttcatcatgttgcccaggttggcctctaactcctgggctcaagtgattcacccacctcagcctcccaaagtgctaggattrcatgcatgagccactgcgcccgtcccagatatggttttcatctattct

SEQ ID NO: 954644 - DNA, 765 bp, Homo sapiens
acttaatctctagatcctttttttttttttttttttttgtcagggtctcacactgtcaccaaagagggagtgcactggcacaattatggctcactgcagcctcgaactcctagactgaagtgmtccttccacatcagcctcctgagtagctgagactacaggtgcatgctaccatgcccagctaaatagtttttctttttttttttttttgagatggggtctcactctgttgcccaggctggagtgcagtggtactaccctaactcactgtagccttgacctacagggctcaagtgatcctcctgcctcagcctcccaagtagctgggactaaggttgcacaccaccacacctggctaattttttaaatattttgtggagacagagtctcactatgttgcccaggctggtcttgaactcttggtctcaagtgatcctcctgcctctgcctcccagagcactaggattacaggcatgagccactgcacccgggccaatctctgtattttagattcccatttataaatgaggataaaggcatcacagggttgttgtaggctgatatgggttaatacaagtaaagtgcttagaacagttcctagttcataccaagtgttcagtaagggtcagcctatcattatttggcaagggagaagcagccgtcctggcccagaaatcagagaggtgtgaagaaattgattagagatcaagaaggcaatcagcctcaggcttccttcacggtttcccaacctggggtcagtggagc

SEQ ID NO: 954645 - DNA, 577 bp, Homo sapiens
agataaggagtcagcgaacagccatgctcctgctgccagggtcaacagagagaggccaaggtcacatgccagggttcacagcagcgggmtcttcctgacccatgcaaagacaaccctggataaacagaggttggcaatgctgactccacagccacggagaaccagcaacctggcccatacctcgctgtgaggccgcagggcccctgagcggccaaggcaggcagctcaggtctgggcaagtcccagctcctgccacttgtggcctcgcggtctatagggtgaactaaacacctgctactaagggggcgatgactgaaaaggccaggcgctccatacggagactgctgcttactcactacacgctgtaatactgccaccaaggacaccagaactaccgtcccatgtatgtacaggtgcccagaatcccagtttcatgctgctcaaaccctatttccagaggcgcctagctgcaaatcggccttcccctccctccctacttggaaatacaaccaatgcaaatgacagaacactgaggggagaaagccgccctaactctccccagggagcccacagcgtg

SEQ ID NO: 954646 - DNA, 653 bp, Homo sapiens
attatctgaatggtgccctcctctcagccaagggcattccaaagttatcctgaagaactagttcaggcatgacaggatggggggttggactgccccattatgccctcctccctttagaataattcaggcacaactgaccagcattaacattaaaacagatctcaagactgacaagacagactcctgtagcaataagataccagcttgactctagcacagcatcataagacagatagcaagccctggaagtactttactacaaactatatttctttgccatatcttgaagtactcctgcaaagttgtctcttgtggggaaaatctacattctgaagagaatctccttccttttccaggccttcttcctgatccaggagagaatcagctctgataagacacatttacaatggattctctctgaagcctgctatctggaggctccctaagtataatgagaaccctggtctccacaaccccttttctttctttgttgttttgtttttatttttttttttgagacagagtctcgctctgttgcccaggatggrgtgcagtgtactaatgtatgactttgcctgtgacttctgcttccctaaaatgcataagacagagtcgtgccctaactgcctcaggaccacttatcaaggcttcct

SEQ ID NO: 954647 - DNA, 585 bp, Homo sapiens
tgttgctgcaaaggacatgatttcgttcttttttatggctgggcagtatttcatggtgtatgtgtaccacatggtctttatctaayccaccactgatggacccctagattgattccatgtctttgctattgtgaatagtgctgcagtgaacatatgagcacacgcgtctttttggtggaaacatttgttttcttttgggtatgtaccaagtaatgggactgctgggtcaaatggtagttctaagttctctgaggcatctccaaactgctttccacagtggctggactaatttatgttcccatcaacaatgtataagcattacattttctctacagcctcaacagcatctgttattatttttttgactttttaataatagccattctgactagagtgagatggtatctccctgtggtttaaatttgcatttctctgagtagtgatgtggaacattttttcatgtctgttggctgcttgtatgtcttcttttgagaagtgtctgttcatgtcctttgcccactttttaatggggttaattattgtttactcattgaaatgtttaagttccctatagagtctggatgt

SEQ ID NO: 954648 - DNA, 585 bp, Homo sapiens
tgttgctgcaaaggacatgatttcgttcttttttatggctgggcagtatttcatggtgtatgtgtaccacatggtctttatctaacccaccactgatggacccctagattgattccatgtctttgctattgtgaatagtgctgcagtgaacatatgagcacacgcgtctttttggtggaaacatttgttttcttttgggtatgtaccaagtaatgggactgctgggtcaaatggtagttctaagttctctgaggcatctccaaactgctttccacagtggctggactaatttatgttcccatcaacaatgtataagcattacattttctctacagcctcaacagcatctgttattatttttttgactttttaataatagccattctgactagagtgagatggtatctccctgtggtttaaatttgcatttctctgagtagtgatgtggaacattttttcatgtytgttggctgcttgtatgtcttcttttgagaagtgtctgttcatgtcctttgcccactttttaatggggttaattattgtttactcattgaaatgtttaagttccctatagagtctggatgt

SEQ ID NO: 954649 - DNA, 612 bp, Homo sapiens
ttgtacaaagaagaacactaccaatcatattaaaatgattccaaaawattgaggaggagaattcctccctaactcattctatgaaaccattataaacctgataccaaaatctggcaaaaacaaaaaaacaacaacaaaagaaaactacaggccaatatctctgatgaccatagatacaaaaatcctcaacaaagtatgagcaaacccaaatccagtagaacatcaaaaagttaattgaccactatcaagtgagctctgttcctcgaatgcaaggatggttcatcataacaaattaataaatgtgattcaccacataaagagaaatatatacaaaaaacatatgattatctcaatagacacagaaaaagcacttgatgaaactcaacatccctttatgacaagagtcctcaaacactagacatcaaaggaacatacctcaaaataataaaagccatctatgacaaacccacagccaacatcatactgaataggcaaaaacactacccctaagaactgaaacaagacaaggatgtccactctgatcactcctattcaatacagcactggaagtcctagacagagcaattgggcaagaaaaagaaataaaaagca

SEQ ID NO: 954650 - DNA, 428 bp, Homo sapiens
gtaagacaattgaacttccacatctgtgatgcccctcccccattctgccctgcccaaagaacgcagaaaattgttctctaactcastggttctaaaactggaaaaagcgaggttgaggtggacaaccagcatcgccatcatcttgaaatctgaggcaggagacatgtctctgttttaaatcacggaaagcatcacacgttccccaaaggagaaataacccttaggataggcagagaaaaagagggaaggtgggacaaccatcctcaggaccggaagcgctgtactgtaactcaatcaaagaaaacacaaaatcagagtgaccatctgcggtaccacacagaaggatgtttgtcccacaagtcccctgggcatgaaccctgagctagcctttccacactactaagatatccctgtaggaatgtcctcca

SEQ ID NO: 954651 - DNA, 428 bp, Homo sapiens
gtaagacaattgaacttccacatctgtgatgcccctcccccattctgccctgcccaaagaacgcagaaaattgttctctaactcactggttctaaaactggaaaaagcgaggttgaggtggacaaccagcatcsccatcatcttgaaatctgaggcaggagacatgtctctgttttaaatcacggaaagcatcacacgttccccaaaggagaaataacccttaggataggcagagaaaaagagggaaggtgggacaaccatcctcaggaccggaagcgctgtactgtaactcaatcaaagaaaacacaaaatcagagtgaccatctgcggtaccacacagaaggatgtttgtcccacaagtcccctgggcatgaaccctgagctagcctttccacactactaagatatccctgtaggaatgtcctcca

SEQ ID NO: 954652 - DNA, 539 bp, Homo sapiens
gaaaggtgacagccatgcagcctctgtgagaaggtgggagggcatcctagtagatggaggcagaagggcttcaggaaaatgcatttaagcgttctatacctggaaaagggaaattgggaatttacccttgtcatattcaaagagttcacagatgagtgttggtgcctatttcatatggacagtttccagggccctcaacaagtggctctgggctcctttatgttttcctcccacaatattgagatgaacccgaggaatcgatcccaatcttgggatccacaggcctcctggctgcctgctgggcagtggcagccctccttcctctcttcccatctgaccttcttatctcctgtgtcaacacacatttcccagtactactgaatgtcctgaaagcaaacactcagccacctccgggaactggctgggtgtgatgctctgaagggagcaggtgcctcagccacgacagactcagcaacaaaccgccaggmaagtttgacagggggagagacacagccagggctcgctgctctgggggatcc

SEQ ID NO: 954653 - DNA, 471 bp, Homo sapiens
taatgacaaacatcgtgttgagcacaacgaaggataaacagggatcatgacagggagaggcccttagatytcagtgttccaccctcgagagcaggagtggcccagcccagactgaaggcggcagccactgagtcctattgcagggctcgtgtgtagagaaaaagagaatggccggaaaggaagatgacttctttccgcgctatgggccgtctccccaagaggtggcctgtctttgcacactcgccctgaacagcacgctgcacaagtcttctgcctgtcacatgtccacctggggtgtgttccctagtccatgctatctgtggaatgctgtgcgcaaagctccctggcatgcaccagggagaagagcatttggtggccataccagagtggcagatgctcacagaagacaaaaggcatgcaggatctgttctccacagccatgaagccctggacaaagctgtccagagggct

SEQ ID NO: 954654 - DNA, 806 bp, Homo sapiens
ttggactggtgattatctctgaggggcgtgggagggtgattttgctctctgatttgagcacttctcagctatttgagttttttcatcattattttaaatgatgraaattaaacatttttactttatttaaaaattatttttcaatgccaagtttctcagaaagcctaaaagagcaataaagatcgatatgaggacttggtttgaatattggctctgtaacttactagccatgtgacctttagctatcaatttaatctctcttgaaatcacatccattacttgacaaggaggcaggcagcatatgactcccacctggttgtacaatggggaacctttttggacactgaaccacactaaggaatagtagataactgaatagatgagcttttggagaggaggttagcttaatgctgtttcatgtcatttgatattgacattaataggctccataaagcttcttccctttttatccaggatgtgaaccagacatctttaagattgcagcagttaattttatccattcaagcttcccaatcaatgcttttacttggaaaatatttatgcttaggatgctgaaaagctttctccgcagtcaggtccctaaggcattctaatatcactttttagagttgagtgctgagaccttgggcccttgaagtgagaaacaataaataataatgactacagaacttggcaaatataaagctctaggcaaagttgtagaaagagtactcaagcgtgcagaataaacaagataatatatataactttctcagtttttgatcctaaaaattagaagtaaaaac

SEQ ID NO: 954655 - DNA, 641 bp, Homo sapiens
tttccttagtaagacccttgcacattttatcccatcttggcagccacgtctccgtgcatctggactaacacatcttccaaaggcacatttgtttctattcttagttttccatgtcacctcattggaagagacrggaagaatgtgaaaataatgggattgcagacatctggaagaattttactctaaccatgaaggattcaaagcaagtgtttccattagaaaacactacatgaacaccaacacaaaaagatgacagttgggccaggcacagtggctcacacctgtaatcccagcactttgggaggccaaggtgggtggatcacctgaggtcaggagtttgagatcagcctggccaacatggtgaaatcccatctctattaaaaatacaaaaattagccaggcgtggtggtgggcacctgtagtctcagctactggggaggctgaggcaggagaattgcttgaacctgggaggtaaaggttgcagtgagccaagatcatgccattgtgctccagcctgggcaacaagagtgaaactccatctcaaaaaaaaaaaaaaaaaaaagacgacagttgcagttgggtgcttgggaatttgggagatacagagttcggtaatcctttttttagtgattcccagattt

SEQ ID NO: 954656 - DNA, 565 bp, Homo sapiens
tggtgttgagtgtctgtggcttttccaggcgcatggtacaagctgctgatggatctaccattctggcrtctggaggacagtggccctcttctcacagcaacactaggcagtgcctcagtagggactctgtgtgggggctctgaccccatatttcccttccacactgcactagcagaggttctccatgagggctctgcccttgctgcaaaacttctgcctagatatccaagcatttccatacatcctctgaaatctagacagaggtttcccaacctcagttcttgacttcagtacacccacaggcccaacaccacatgtaagccaccaaggcttggggcttgcatcctctgaagcaacatcctgagctttaccttagccccttttagccatagctggaatgcagggcaccaagtcccaagactgcgcaaagcagcagagccctgggcccggcccacgaaaccattttttcctcctaagcttctgggcctgtgatgagaggggctgccaagaagacctctgacatgccctgaaaacattttccccattgtcttggagattaacattt

SEQ ID NO: 954657 - DNA, 457 bp, Homo sapiens
tagcaaagatttaaggaagattataccaaatttacatacattctttgggaacactgaagaggagtcaatacttacgaactcatttttgtgacaccaatactaccctgttatcaaaatcaaagacaataaaagaaaagaaagcaacagatccttgtccctcataagcaagaatgcaaaaaatttaaacaaaatgacaccacatagaatccaacagtatattaaaaagataatgcactgtggccaaccagtccatattccaggattgcaaggttagtttattattctaaaagcagtcagtgtaatttactatattaactaactaaaaaagaaaaaccrtgtgattagctgaatggatgaataaaaagcatttgataaaatgcaacatctattcctgatcttttttaaaaaaattcagcaaacatggagtagaagggaacttccttaatctgataagcat

SEQ ID NO: 954658 - DNA, 561 bp, Homo sapiens
taaaatagtccctttaagattcagatagagtcttatctactggctgtattttgcagggctggaccagtgtctcagtcagcatccaatatatggtgccarttctcctatagccaggattcacaggcccagggatcaaggagtaaaatgggagtaacatgaccccctttactaccgctattactactagtggcacactagcaaaatttttcccttctatccccatgactttatgctctgctggtttagaagtcttagttccaaagagtggaactcttctgctaagagacacaacaatgattctattgaagcagaagtcaagacgatcacgtggccactttggactccgcatgcgtctgaatcaacaagctaagaagaatgttgcttgctgacttggctgattaatcttgattaccaaggacactggatttctataatacaaggatagtaagaaagcgtatgtctggaatacagaagaccattcggtgtgtgtcttagtactaccatgccctgagacaagagtcaatagaaaactatggcatccccattaaagcgggactgcta

SEQ ID NO: 954659 - DNA, 522 bp, Homo sapiens
ccggcttagcctcccaagtagctgggactacaggcacgtgcccccacgcccattttatatttttgtagagatggggttttgccatgttgtccaggctggtctcaaatgcctgacgtcaggtgatccgcccacctcagcctcctgaagtgttgggattacaggtgagagccactgcacctggctgaggacattggtttttcctctgagaacccgtgggaggaatctgagcagaggtgggacaggatcagacttgcattttaacaccttcccccatctccagctaccaagtggagaatgggctgcagggctgcagggaggaggctactgtaatagtcctggcaggagatgaaggagttggactggggtggaggcggtgggggctgaggggtgtgggattctggatctttctggatctaccccgaatgtggagccaacaggggatgtattggacgtgggatgtggggaaagtarggacatgaaagaaggctaggacccaaggtgacctctaggaactgagagtgg

SEQ ID NO: 954660 - DNA, 604 bp, Homo sapiens
taggaggcagaggtcgcagtaagctgagatcatgacactgctctccagcctgggtgcgggtgacagagtgagactctctctctctcaatctctctctctctctctctctctmtatatatatatatatatacacacacacatatatagcttgaatttgttttataatgcagaataataatactttgttataattaaaaataaagtatgtcattatatgaagctaaaataacattaacattcatttgagcattaactcaactgtcaagaactgttctatattttattgagactacatatagtaaaaagcataggtcttaagtgtattgatcagtgagttttgacaaatatatatatatccatgcaaccagcacctaatcaagatacagagcagaggctggcaaattgctatctgtgagccaattcgaccctgtggaatgttttctgtgtggcctatgagtgaagagtgttttttttacatttttagaaggttattctttaaaaaggcaaagaagaatatacaacaaaaaactatacatggccctcaatgcctcagctcatcaagtggcctcaaggggggcaccattttctattaataatttgcatg

SEQ ID NO: 954661 - DNA, 759 bp, Homo sapiens
ccctcctagtgtctatgcatttttcttgttataagctcccacttataagtgagaatatgtggtgtttggttttctgttcctgtgttaggttgcctaggataatggcctmcagctccacccatgttgctgcaaaggacatgatctcatccttttttatggctgcatagtattccatggcgtatatgcaccacattttctttatccagcctacagttgatgggaatttaggttgattccatgtctttgctattgtgaatagtgccataatgaacatatgtgtgcatgtgtctttatggtagaacaatttgtattcctttgggtatatacccaataatgggatttttgggttaaacagtaagtctaggttttgttttgttttgatttgtttgagacggagtctcgcactgtcgcccaggctggagtgcagtggtgcaatctcagctcactgcaagctccgcctcccagattcaggccattctcctgcctcagcctcccaagtagctgggactacaggcgcccaccaccacgcccggctaattttttgtatttttagtagagacggggtttcactgtgttagccaggatggtctcaatctcctgacctcgtgatctgcccgcctcagcctccctaagtgctgggattacaggcatgagccactgcgcccggccttgttttgtttttttgggacagagtctcactctgtcacccaggctggagagcagtggcgtactctcggctcactgggacctccacttcct

SEQ ID NO: 954662 - DNA, 687 bp, Homo sapiens
cccaggctggagtgcagtggtgcaatctcagctcactgcaagctccgcctcccagattcaggccattctcctgcctcagcctcccaagtagctgggactacaggcgcccaccaccacgcccggctaattttttgtatttttagtagagacggggtttcactgtgttagccaggatggtctcaatctcctgacctcgtgatctgcccgcctcagcctccctaagtgctgggattacaggcatgagccactgcgcccggccttgttttgtttttttgggacagagtctcactctgtcacccaggctggagagcagtggcgtactctcggctcactgggacctccacttcctaggttcaagcaattctcatgcctcagcctcccaagtagctgggattacaggcatgtgccaccacacccacctaagttttttgtatttttagtagaggtttgcccatgttggccaggctggtcttgaactcctgacctcaagtgatccacccagcttagccttgcaaagtcctgggatcacaggcctgagctactgcacctggactgggtaaggctgttttaagttctttgaggaattgccaaactgctttccacattggctgaactaatttacactctcaccakcagtgtataagcattcccttttcttcacaacctcaccagcatctgttacttttt

SEQ ID NO: 954663 - DNA, 736 bp, Homo sapiens
ccatatgtcatgtcctcccttgctggcccctccttccttgacctgtgcatgggagtgggacactaaaactctagctggaatttgggccaattcatcttccttggatgaaaataggaattgctcttttattcactcaagaagcacttcaaaagtccacccgcagatctcaggtggtttctttttttctttctcttcctttttttgttgagatagggtctcactttgtgcccaggctggatgaagttcagtggtgtgatcttggctcactgaagcctgcaactcctgggctcaagctatcccctcacctcagcctcccaagtagctgggattacaggcatgtgccaccatgtctggttaatttttaaaattttttgtagagacagggttttgctacgttgcccacgctggtctcaaactcgtggcatcaagtgatcctcccgcctcagtcttccagagtgctgagattacaggcatgagccaccacacgcggcctcagcccatttcataatacagatgaccggtctgagtctaatggatgatcaagtttaagatttcccctcccctctcaggagtgtctggctaaggctcctttaaacacacactttgggaagtggtggggaagtgatgragacccatagcctaccctgactttgtgtcttgatgcccttagtgcgccctgacccaccccagggcctgcgggtagagtcagtaccaggttacccccgacgcctgcgag

SEQ ID NO: 954664 - DNA, 650 bp, Homo sapiens
actgaagctggagttgcctctgtagcaggtgccactccaaggcttcatactcagccagagtcagaaatgggacattgatctgagctcgttgatggtcagatggagacayccagtttggggaaagtggggaagagggtggggctgactggggtgaagttttagggagcagttgggggaaggagagctcattgaagagaaaaggatccttcaaggggggcttgggcacattttcaatcttggggaggccttgagatcccatgaaagtggcaaccagggactcactgtgcagagaagggagcccacagaatagctggctgtatttctgctggagatcactccctgagtcattatcttgtcccccagactgtggatgggggccacttagggctttaagggctggagagggcaaggctagagccatagggtttggagtttgctgacagtggtgtctttgttctgggttcattgtggaccattcagaaacccagaaggtctggatgggctggccagccacacatgaacaccaggtctggagggaaatggtctcaaatctatgaagagagacctgaggagtattcttcaggttgaaagaaactggctggtcatttccaggttggtaatacaatggtgggtttggcataagctgcctc

SEQ ID NO: 954665 - DNA, 615 bp, Homo sapiens
ttctgggtttgcttcaaaagttctaggcacttcagcgtatttaacaaaaagtttcaaggaaagtagacctccttctttgggctatgaatcctttccagagacaggatatctatttagataaatgtaagtttcaattcttccctttctcacagtcctcctctctaaaacagaattagtgagtaacacccatcttagagtgatacagcctggtagacagtgttttggaagactattactctttaactcttggaaaaggaagaaaatatacaaccctgcaatctgcgaagttcttgcacagatataaactcattgattctcagagaattggaggtacaagtatcgtcattcccattttacaaaagctcaagtggctcagtgacttgcttaagataaaatggttaacaggacccttgcttttactaagcaatttgacctcaaaaggcatgtctttctcattaaatacaccctttctataatcatgttaaataacaaattgttcccagggtaagagaaggggagtgatataaaattaagccattatcttattccttgctatggtttgaatgtttgtggcccttccaaaattcatgytgaaatttaatccctaaagcaaca

SEQ ID NO: 954666 - DNA, 589 bp, Homo sapiens
ttgggactacaggcgcccgccaccacacccgtctaattttttttttttttttgtatttttagtagagacggggtttcaccatgttagccaggatagkctcgatctcatgaccccgtgatccacccgcctcggccccccaaagtgctgtgattacaggcatgagccaccgcgcccagccggttgttctattttacactctcacaagaaatagacatgacttctagtttccccacatatttgccaatattagtattatcattttaaatggtagtctttccagtttcaatgcattttggttgcatttccccttatctaataatattgagcatcttttcacattcctataagccacttgtatctcttgttttgtgaaatacctgttcaagattcttataactatttagtggatctcaggagtactctgtgcgttttgaacacgcaatttttttctcatacatatatggaataatttatcacagtctatggcttaaaattatattttcttacattttgcagttttattaggatacatttttaattaatatctacaatttatcaatttttactcttatgatagtgctttctctgt

SEQ ID NO: 954667 - DNA, 645 bp, Homo sapiens
ccttcattctgaatgtctgcagtagarttgaattggggggcagttaggttccaggaacatattcactcctgttttgttcccttcccaatctcagcctttcggtgactgtttgggcaaagcctcccttgtggtagaagatgcctcacttctggggagaggagactcctcatcttgcagacaagaggcagcacccactggttcctgctccaaaagccattaacattataaactggccaggtgcggtggctcaaacctgtaatcccagcaccacttgggaggttgaggcagaaggattgcttgagcccaggattttgagaacagccttggcaacaaagtgagacccaatctctacaaaaagtagagaaaaaaatagctgggtgtggtggcactcacctgtactaaggaggctgggctgggaggatctcttgagcccaggtggttgaggcttcagtgaaccaagatcacacctctgcacttgagcttgggtgacagattaagaccctatctcaaaaaataaattataaactgattcacaataactttggttttgtcactaatatgctgaatatttttgttacaactaatatgcaaaatgcaaactggctatcactaccattctgataatggaattagctgtcctacata

SEQ ID NO: 954668 - DNA, 583 bp, Homo sapiens
agctagggaaacagggtcttcacaatgcctgggaaagaaggagagatgaagctcactagccayagaaaaacaggcagttaatttttaaagggctccagctctttctctttctcagggggaattgggttttctcacatacaactgagtttctgcttacacattctttaatttcttttaattcctgttccacttggaccagggccagggcatcactgtcctgtaccacccccaggagggtgttccttgcatcctggcccttctagctccagccttggttcaaagggctgcagatagagctcaggtcatggcttcagtgggtgcaaactataagccttggtggcttccatgtggcgttaagcctgcaggtaagcaaagtgcaagagtgaaggaggcttggcattctctgcctaaatttcagaggatgtatgagaaaggctggatgcccagggagaagactatgcacggctggagctctcaaagaggacctcttctaggacagtgccaagtggaaatgtggggttggaggccccactcagggtcctgactgggggggcggcctagtggagctgtgggaggggggctg

SEQ ID NO: 954669 - DNA, 372 bp, Homo sapiens
gtttgctgatgatatgatctaatacctagaataccttaaagattcctccagaagactcctagatttgataaatgaattgagtaaagtttcatgatgcaaaattaatgtacaaaaatcaktagcatttctacacactaataacaatcaagctgagaaccaaatcaagacctcaatcccatttacaatagctacaaaaagttggattattttagacctatgaaattgcttatgattgaaaccaacaatgatactagaacaaagcatagtggataatagcatgtactccagagtcattacagacctaggtggggattccactctctccacttaatagaattaattaaaatacagtagatataagtagcttttttt

SEQ ID NO: 954670 - DNA, 570 bp, Homo sapiens
ctgcggagcagactgtatatgcatcaggtgtgaggaagaaaatagattttggaaattatgagagctgtagagagtgagttgagcayagtttgtgattttaagggcctctaaaagtattagggcggcagcagccgctgcacggagacatgatggtcagcctaaaacagtaaggtcaagttgtttggacagaaaggctacagggtgcggtcccggctcttttgtataattctgaccgcactaaccatgcctaggaaggaaaggagttgttttgtaagggattgaggtttggagattagtcggacacgatcagcagggagagcacgtgtgtttttatgagaattatgccgagataggtaacagatgaggatgaaatttgggcttgactgaagtaaagggggctgtctgtgaaggcttgcggcagtacagcccaggtaatttgctgagcctaatgggtgtcagggtcagtccaagtgaaagcgaagagaggccgggatgaagggtgcaaaggaatagtaaagaaagcatgttcgagatccagaacagaataatgggttgtagagggaggtattg

SEQ ID NO: 954671 - DNA, 559 bp, Homo sapiens
ccttctacaacttggtgtctgagaggttttatctgtggcttgtcctgctacagaagcatcacattacctgacttcaaactatactatgagattatagtaatgaaaacagcatggtactattacaaaaatagacatatagatcagtggaacagaatagagaacccggaaataaagccacatacttaacaaccaactgatctttgacaaagtcaacaaaaataaatggggaaaggataccctattcaataaatggtgctggcaaaactggctatccacacacagaagaatgaaactggaacctatctaatctttcttgatcacatttccaagagatagctcccaggtccttgagaaagacattcctgggctataaaactatcaagagtctgggagaatatttacatctcaaaagagcccagaaaaaaattacaattgtcagttctcgaatgcaaatgtaaagaaaagggaagccaggggcctatagtcrggaagatatctatctaaagtttggtcaagctgagggcagtgttggtcatcgctggtgcatccatctggtttc

SEQ ID NO: 954672 - DNA, 559 bp, Homo sapiens
cagggttgtgttctaataaaacttgatttacaaaaacaggttgtcagcctgccaactgtagtttgctgcccctgatttaaatctataattcatatggttacaaaatggaaaaatctaatcctgccattctgtctacataaattaatggaatacatctgttaacataaactttcatcaactatttagttattttgagatatagttcacacaggaaaaacagtttaaatgcatgctttatttctttatttaccaattttcaatgaattggtttattagcatcctccaaaaatatttaaggaggattttgttgttgttgcttagtatcataagctcaaaacttcatacatatttgttgtgtttcactccatcacaccaattgaccttattgatgcttgaattatcccatcttttgccagaaggaaacttgtcaagttgtctcctgactcttttatatactgtytgatactatttgatagctctcttggatttttgcaatttcaacatgttccaggttcatcttatatattttttgccccaaatatggaatcagctagttctt

SEQ ID NO: 954673 - DNA, 598 bp, Homo sapiens
cccatggagggaggatttaaaccagccctagccagcggggaattgctgatcccagcagtctacacgtgagtgcccacaaacctcaccacctagtgccagagtgctctggatatttaaggaaacttgaaaggaagtctaagccataaggactgcaatttgtaggtgagtcctaggggcaaactaggcccagagacagtggagtggctgggggcacgcaacatactgaaataccagctactgcagccaagagtttccttccttccacttgaagaaaggagaaggaagagtggggagaactttgtcttgcagcttggataccatttcagccacagcaggatagggcactagtaagagtaattaggctgccattctaggccttagctcccagacaacatctctagaataaccctgaaccggaagggaacctgctgccttgaagaaaggacccagttttgtcagcatttatcacgtgctaaytgaagagcccttgggccctgaataaaccaacagtgaaacccagctactacatcatggtccttgggtaagcctctgagaacttctggcttcaggcaagactcagcacattagcaagtttggt

SEQ ID NO: 954674 - DNA, 598 bp, Homo sapiens
cccatggagggaggatttaaaccagccctagccagcggggaattgctgatcccagcagtctacacgtgagtgcccacaaacctcaccacctagtgccagagtgctctggatatttaaggaaacttgaaaggaagtctaagccataaggactgcaatttgtaggtgagtcctaggggcaaactaggcccagagacagtggagtggctgggggcacgcaacatactgaaataccagctactgcagccaagagtttccttccttccacttgaagaaaggagaaggaagagtggggagaactttgtcttgcagcttggataccatttcagccacagcaggatagggcactagtaagagtaattaggctgccattctaggccttagctcccagacaacatctctagaataaccctgaaccggaagggaacctgctgccttgaagaaaggacccagttttgtcagcatttatcacgtgctaactgaagagcccttgggccctgaataaaccaacagtgaaacccagctactacatcayggtccttgggtaagcctctgagaacttctggcttcaggcaagactcagcacattagcaagtttggt

SEQ ID NO: 954675 - DNA, 626 bp, Homo sapiens
gctaaaatccacgcaagatgaataattttacagacagttcttaaaaggatctgatttctaagttctacattaaaaaactataaggcagatttggagtgagatcaatgtgaattccacattgtgttctatcattgaccattcacatcatcttggccaagtcaatgatccttttttaaccttagttttgtgtcattagagtgataatcccaccttcacaagattgtgaaaatttaaaagatgctaaataaaagcattttattaaaacaaaaaacttggcccagtgtaattaccaccaaggttgtgttgatacatgtcgtgcttaaaaatagctgatggcacacaagcagatgtcaagcagccagtcatgtaacagaatgcagcattaataccatcataatgatgtaagtaatatactgcagataacggtcttaggttaatatctctttgaacaacattgctaatgctaaagagacagtgaaaaagtgaaacattatgtttagcataaaaatgtgaagagaaaataccatcyacctaattagaattttgtatggattaactagctaatgctggttagcatttgagaatgcaatggaagacagaattatacacattcacagacacaaagt

SEQ ID NO: 954676 - DNA, 609 bp, Homo sapiens
aaagggaatggtgacctgttgatgaggcgatcactcaacaatactcatcaataaccatgattgtggttgttctgtcaaggtttgccacaggctccacacaacattcttttaagagatgaggtcttactatattgcccaggctggtcttgaactccctgcactcaagtgatcgacgtgccgcagcctcccgaagtgctgggactacaggtgtgagccccatgtgcctggccctccatatgacattctcacactcctcagacactcagattgccatgggttcaccacgtcatagggccaagtggaagaaaggcttgtctggcagcctagtcagcaggccagcatttctcttgctctgaacctcactcaaagttccttgttaaataggaaagcacacccaaattttgtatatatggcctctgtgttagtccgttcccacactgcaataaagaaatacccaagactgggtaatttataaagaaaggaggttcaacgaytcacagttccacatggctggggaggcctcaggaaacttaccatcacagtggaaggggaagcaggtgcgtctcacacggtggcaggtaagagagagatgagagaacgaagcgggaa

SEQ ID NO: 954677 - DNA, 571 bp, Homo sapiens
tccatgttgctacaaaggacatggtttcattctttttatggctgcatagtattccataatgtatatgtaccatattttctttatccaatccactgttgataggcacctagattgattccacatmtttgctattatgaatagtgctgcaatgaacaggcaaatgcatatgtcttttggtagaacaatttgctatcttttaacaatctactttcttaaggtaataagaaaatttgttaaaatttctgaagaagatggaaaggaacaactgtgtggacatgaaaatcacctgggcaatttatctaaaatgctaattttcatacctacttataaagtttcttatatgggaaagttttggtgcatttttacagcaatatcatggacaatggaatagaatagtccaaaaatagaacaaactaaccacagaactttagtacatggtgacaatgacatcttaaataattaggttaaagattaacttttaataaatggtgctgggccaacaggtttactaattgaaaatagataagaccaaatccctatctcacaccatacataagaatagactactatt

SEQ ID NO: 954678 - DNA, 571 bp, Homo sapiens
tccatgttgctacaaaggacatggtttcattctttttatggctgcatagtattccataatgtatatgtaccatattttctttatccaatccactgttgataggcacctagattgattccacatctttgctattatgaatagtgctgcaatgaacaggcaaatgcatatgtcttttggtagaacaatttgctatcttttaacaatctactttcttaaggtaataagaaaatttgttaaaatttctgaagaagatggaaaggaacaactgtgtggacatgaaaatcacctgggcaatttatctaaaatgctaattttcatacctacttataaagtttcttatatgggaaagttttggtgcatttttacagcaatatcatggacaatggaatagaatagtccaaaaatagaacaaactaaccacagaactttagtacatggtgacaatgacatcttaaayaattaggttaaagattaacttttaataaatggtgctgggccaacaggtttactaattgaaaatagataagaccaaatccctatctcacaccatacataagaatagactactatt

SEQ ID NO: 954679 - DNA, 634 bp, Homo sapiens
taaaaatgtatttcctagatagtaagacttataaatcaaaattactccttgatccatgggctacagaacggatgctgtgttagcagacaggaaaacaacattcagctccttgtaagtctccrtcagagctcttgggtgaccagatgcattgttactgattttgaaacaaatctttttatctgaccagtaaatctcaacagtgggtttaaaattttcagtaaaccatgctgtaaacagatgtgctatcatctaggccttgtttcatttttagcacacaggcagagtagattgagtataattcttaagggccctagacatttcagaatggtaaataaacattgacttcatcctaaagtcaccagttgcattaacccctaagaagagagtcagcctgttctttgaaactttgaagccaggccttggcttctctctagccatgaaagtcccagatggcattttcttcaagacaaggagttttcatctccattcaaagtctgtttagtgtagccacctttatcaattatcttcactaggtcttctcagtaacttgctgtaacttctgcatcagcacttgctgcttcaccttgcacttttatgttatggagacagcttctttacttaagcctcatgagcc

SEQ ID NO: 954680 - DNA, 566 bp, Homo sapiens
caacccaaaggtccatcaactggcgaatagatcaataaattgcagttcgaccatatgttggaatactaggtgcagggaaaagaaacctacgactgatgtccacaatgacatgaattaatttcaaaagcattctgtaaagtgagggaagcagactccaatggctaaataccaggtgattctgtttaatgacaacctggaaaaagccaaactgcaggcacagaaatgaaatcagtggttgccaggggctagggaacggggaggggatccactgcaaaggggcacaggcaactttctggggctagagaaatgttcaatatctttttgttgttgttgtgtctagagatggggtcttgccatgttgccgaggctggtctcgaactcctgggctcaagtgcaggcaggagggcagtggcacgatctcagctcactgcaacatccrcttcctgggctcaagctattctcctgcctcagcctcccgagtagctgggattacaggcgtgagcctctgcacccagccaaatattcaatatcttgattgtggcggtgagtatactggtaactatgtc

SEQ ID NO: 954681 - DNA, 453 bp, Homo sapiens
ggcaaaaccctgtctctacacaaataaataaataaataaataaataaataaataaaaatacaaagcttaggagggcatgatggtgcaagcctatagtcccaggtacccagtactataggaaactacaaacctctattgttagatttgtcatctattattccgtacaaaagcattctatggattccattgctacagtcatgttttgcacattgggatatataaaatagtggaggaattttctgtttcagtggaaatttatgcatatttacagcacactcttcctggtacttctgactctatgggggctctgcactttttttttttttyccagacagagtctcaccctgtaacccaggctggagtgaagtggcatgatcatggctcactgtggcctcgacctcccctgggctcaggcaatcctcccacctcagcttcccgaatcaggcacatgcc

SEQ ID NO: 954682 - DNA, 445 bp, Homo sapiens
cacagaaaacaaaatatataagccaaaatgatcactgctgcgtcatctctaagrcaaaaaataagaaagcaatttatgtcaaaaatattaatcctgggggaatatatagtaaattatatcaatcttataaagctattaaggcaaataattataaagaacatgtcaatatatgctataatttaagtgaaaataataggaagcaaaacagtatgttcactataattgtaggtatgtgcattttacatgccagaggtaatatcaaaaaacaaaaattgtttaattaggtagcatgatactatgggtgacatttcaaatatttttttgaatgatgtgttctttcaataaggaatgaggcattttctaattaaaaagccaaaagctcagacaaggccaaacattaagaaaacattttttttttttttgagatggagcctcgctctgttgc

SEQ ID NO: 954683 - DNA, 737 bp, Homo sapiens
tgtctattccaattatgcatctagaactggggaaataacctggatggtctcaggkacccactgaacccactgtgaaatgaacctgagctaaaattccattaatcaccttacctccaaagacctctgttaggaaataaaaaataaaaaacccacaaactgttttttcctctgctctcacatcgcagcaacaatcaccacagaagatccgtgactaaatgtgtggggatttctccccaccaaaaagcaagcaagcaattctgtaccaactaggtgtcctccaattcaattaattttgatgctttctacctagagataacctcagaaaccacaagttgagggctcagtctctaagactgttcttccttcagacaccagttataagcccaggcctctggaacttctgatcaactggcctcaagttggagttcccacaacctctttttggggtttgattattttgctagaggagctcacagaactcaaggaaatacttgagttctgaagcactgaaaccacaggacccctagaaatttcctcaaggaaacacttgagttcagtaagctgctcagaggcaaggtgttggggaaggggcatacagcttccatgcactcgtttggtgtgccaccctccaggaacctccaggtgttcagctatctggaagctccccaaactcagtcttctttgtccttttatggagacttcattggatagacatgattgaagcatgaaaaaccatg

SEQ ID NO: 954684 - DNA, 798 bp, Homo sapiens
agtggtgtggagcctgttgagatattccttctaaggtgaaggataagttgctgcatttggcccctcctacaaccaagaaagaggtacaaagcctagtgggtctcattggattttggaggcaacacattcctcctttgggtgtgttactccaggccatttgtcaagtgacctgaaaggctgccagttttgagtggggtccaggagaaggctctgcaacaggtcctgtctgctgtgcaagctgctctgccacttgggccatatgacccagcagatcagatggtacttgaggtgtcactcgcagatagggatgttgtttggagcctttggcaggctcccataggtgagtcacagtggaggcctctaggattttggagcaaggccctgccatcttctgcagataactactctccttttgagagacagctcttggcctattactgggctttggtggaaaccgaacgttagactatgggtcatcaagttaccatgcatcctaaactgcctcatgaactgggtgctttctgactcatctagtcataaagtgggtcatgcacagcagcattccatcatcaaatgaaagtggtaaatacatgatcaggcttgagcatgtcctaaaggcacaaataagttacatgaggaagtgactcaaatgcccacggtctcctttcctgccaccctaccttctctccctgagcctgygccaatagcctcagggggagttgcctatgatcagttgacagaggaagagaagactagggcctggttcacacatggttctgcacaatatgcaggcaccac

SEQ ID NO: 954685 - DNA, 807 bp, Homo sapiens
tttctaggggtccagtggtgtggagcctgttgagatattccttctaaggtgaaggataagttgctgcatttggcccctcctacaaccaagaaagaggtacaaagcctagtgggtctcattggattttggaggcaacacattcctcctttgggtgtgttactccaggccatttgtcaagtgacctgaaaggctgccagttttgagtggggtccaggagaaggctctgcaacaggtcctgtctgctgtgcaagctgctctgccacttgggccatatgacccagcagatcagatggtacttgaggtgtcactcgcagatagggatgttgtttggagcctttggcaggctcccataggtgagtcacagtggaggcctctaggattttggagcaaggccctgccatcttctgcagataactactctccttttgagagacagctcttggcctattactgggctttggtggaaaccgaacgttagactatgggtcatcaagttaccatgcatcctaaactgcctcatgaactgggtgctttctgactcatctagtcataaagtgggtcatgcacagcagcattccatcatcaaatgaaagtggtaaatacatgatcaggcttgagcatgtcctaaaggcacaaataagttacatgaggaagtgactcaaatgcccacggtctcctttcctgccaccctaccttctctccctgagcctgcgccaatagcctcagggggagttgcctatgatcagttgacagaggaagagaagactrgggcctggttcacacatggttctgcacaatatgcaggca

SEQ ID NO: 954686 - DNA, 621 bp, Homo sapiens
aatcagcaaagcatacaagatgtggcctgggtgcttctaaaagcctacrctcacttccacaagtaaagagatcttatatttaaaagcgaagcagaacataacagtttggaaagtttgcagcctgattttgtggtaggaaagaaaaaaccattttccggggagaaattcaagatggctgcagaaatttgcataagatgagccaaatgttaatagccaaaacagtggggaaaatgcctccaaggcatttcagagaccttcatagcagcccctgccatcacaggcccagaggtctaggagggaaaaaatggtttcatggaccaggtccagggccctgctgctccgtacagcctcagaacatagtgccctgtatcccagccactccagttgctgctatggctaaaaggggccaatatacaggtcaggccattgctttagagggtgcaagccccaagcctttgtggcttccacttggtgttgagcctgcaggtgtgcagactgcaagagttgaggtttgggatcctctgcctagatttcacaggatgtatggaaatgcctggatatccaggcagaagtctgcagcagaggtagagcccttatggagaacctctactaggacagtgt

SEQ ID NO: 954687 - DNA, 724 bp, Homo sapiens
tgaatagaagtagtgagagtggacatcctttcttgttcctgatcttagagagagcagtttcagtttttctccattaagcatgctgttagttgtgtgattttcataaatgctgtttatcaggttgagaaatttttcttctgttcctaggttgttgagtgcttttatcatgcaagggtgttggatttcactaaatttttttttaatctattgagatgatcatatagggtctttcattcttgctaatgtggtgtattatgttgattaatttttgcatgttgaaccacccttgcattacagggataaacctcacttggtgttatgatgtacaatccttgtaatatgctgctggattcaatttgctaatattttattaaggatttttatatctatattcataaaggatattggtctgtggttttcttgtgttgtctttgtctagctttaggatcagggtaatagtgatctcatgtgataagctataaagtgtttgcttcttttctgttttttggaaaagtttgagaaatattggtgttaattcctctttaaacatttggtagaattcattagggaagccatcatctggtcctggactytgttagaagtcttctggttactgatttaatctcttttattctcataggtttgcttaggtttctagttcatattcagttaattttgatagtttctgtgtttttaggtatttgtctgtttcatctagattatc

SEQ ID NO: 954688 - DNA, 551 bp, Homo sapiens
aagccccttgtgcacatgggtactggcatattcccaggttctggggattaggacatggacgtctttggtgggggccattattcctgccacagccccccattcctggcttgtttgcccggggtgaggccgcctctgtgacattgtgacagagccatgttttagaccccagcacagtcccagccaactcaggctcaccagctcggttctagctgctgggcagaggagagacctttccccaggtgacaggcacgggttcagaagcagactcccttaagacagctcagtgcgtaaagcagcagagagccagtgtacgcacagacacgtgcatgcacacactcgcactaggggtggggttaacctgagtgggtgatttccatctacccctagatgctcactgtgaaaagcctttagcccatctgcatgtccaagtgtgtataagtgtgaacgtgtgcacatgagtgtgtatatgcaaktatgaacatgtgtgcacataagcaaatgtaaaagtaaatgtacatgcctgcacatgagtgtatgtgagggggcttttc

SEQ ID NO: 954689 - DNA, 649 bp, Homo sapiens
aggccctaaattttggtcatactctcacctaagtgagaacctgaccaaaaggggggaattattaaacaaaattatgagaggccattgttttggactaagctcatgcagtaggccctaacagaccagaccaaaccaaaatggagtcacttgtgctaaatatgactaatcaaactaagagtttaaagaaacacatagattctagaacagaccgggttttgttttttcctcctgtaaacaggacattctagcatataaggaggtacctctactctaaccctcacaaaaaaggtaacctaaattccttgttcccaccttacaaaacccatgtctgctatttcccagtgagtttaaacaccaaagaagtatatttatgatggtgattgtgacatcaatgactaaagttttggccaatctctcaaaattgagaagatgaccaaaaggggggaattgttagaccaagtttagcctaaatctgcctccttacatattttaaatttggcctaaaggtttctctgtactttgcraactatagcctaaatggagttatatacaaactgtagtctactcttgtgtcaatcactgagttttggctgatcaaaggtggccaactgttcaaaccgtgttcaaataaggaaaagccgagctataa

SEQ ID NO: 954690 - DNA, 612 bp, Homo sapiens
ttgagctaagactatcgggcttttcagatattgaatcatgtctgcaaacagagatagtttgacttcctstcttcctacttggagattctttatttcattctcttgcctgattgctcttgttaggacttccaatattatgttgaatagaagtggtgagagagggtatccttgtcttgctggttttcaagggaatgcttccaggttttgcccactcagtataatgttggctttgggtttgtcatagatgactcttattattttgaggtatgttcattcaatacctagtttactgagagtttttaacataaaggaaagccttttctgtatctattgagaaaatcctgtggtttttgtctttagttctgtttatgtgatgaatcacatttactgattttcgtatgttgagacaaccttgcatcctggggatgaaggctacttgatcatggtggattagctttttgatgtgttgctggatttggtttgcaagtctttagttgaggatttttgcatcaatgtttctcaaggatattggtctaacgttttcttgtgtgttgtctctgccaggttttggtgttaatatcatgatggcctcatagaatgaattggggagaa

SEQ ID NO: 954691 - DNA, 634 bp, Homo sapiens
cctttgttgtcctacctcaggggtgtatcaactctctggctttgtgtcataatcttatttagagagaacttgatcactttttgcttctgcaagatatcacactggtccattacattaatgacattrtgctgattggatccagtgagcaagaaggagcaaacacactggacttattggtgaaacatttgcatgccagaggatgagaaataaatctgactaaaattcagggaacttctacctcagtaaaatttctaggggtccagtggtgtggggcctgttgagatatttcttctaaggtgaaggataagttgctgcatttggcctctcctacaaccaagaaagaggcacaatgcctagtgggcctatttggattttggaggcaacacattcctcatttgggtgtgttactccagcccatttatcgagtgatcggaaaggctgccagttttgagtgggatccagaacagggcaagggtctgcaacaggtccaggctgctgcgcaagctgctctgctgctcggaccatatgacccagcacatccaatggtgttccaggtgtcagtggcagatagggatgctgttttgagcctttggtaggcccccataggtgaatcacggtgcgggcctctaggact

SEQ ID NO: 954692 - DNA, 548 bp, Homo sapiens
ttttgcattaatgcacatcaatgatgttagcatgaagttttctttttgtgttgtgtctctgccaggttttggtatccgggtgatgctggcctcatagaatgagttggggaggaatctctcttcctcagtttttttgtggtagtttccatagaaagggtaccagattttctttgtacatctgctagaatttggctaagaatctctctggtcctgggctccttttgggtcttggtttggattcattgctggtgagataatatgatttttggaggatgttaaagagccttattttgtcatattaccagaattgtttttctggttccttctcattggggtagactatgtccaagggaacatctgggattcaagggctgttgttcagattcttttgtcccatagggtgttttcttgatgtggkttcttcccattcctctaggaatgaggcttcctgagagccaaactgttctgattgtttttgcatttctgggtctagccacccagcagagatactgggctctgggccggtactggtgagtgtctgcaaagag

SEQ ID NO: 954693 - DNA, 505 bp, Homo sapiens
tagtcccagctactcgggaggctgaggcaggagaattgtttgaacctgggaggtggagcttgcagtgggtcaagatcgtgccattgcactccagcctgggtgacagggcgagactccatctcaaamaacaacaacaacaacaacaacaaatgaaaaagatatttgagattggcaaaaagacaaaaatttggataaaacattggcttgttcagaacgtgggaaacaatcactttcaaaggttgttggagggaatgtgaattagtacaaccttattgatcaaaattttaaatgcattatcctttgacccagtaattcagcttctgaaaatttataccatagatacagatcatagaaagagaaataacatacatgcaaacgacctgccttccacaaataggggactggttaaatgttggtacatccataaaatggaatactatgtaactaaaaggaatgagacagctctataggtactgctacgaaacaatactgtttgtatcttttg

SEQ ID NO: 954694 - DNA, 588 bp, Homo sapiens
cacctgctcaaagaagccccttcccagtttcccactatcacatatccttaatatactggtttcatagcacttgatacaagatagaattgggttgtttgtttgtctgttttctcattatttttaaaggctttctccccttcatggatgtgagctcagtaagggaagagagcctatttgtcttgctcctcattgtatctccatgcatggtataatgcctggtatacagaggtcacttaatatttgctaaattagatggctgactagaaggagctagtgtgcgtggctctcatggagaggaacagaagtggcgagtaaatacagcaccttcaaatgaaacatccaggaacacacattaggactaatcaaggaaacaactcaacccacagagaatgggggaaaaggaggcaggatgatggcccacccaggagagacagggagccaagggaacctcccctaacccagggaagcaataagtawatgtgtgaccctgggaatctacacttctctcacaaatctttgcaaccgtcaggtcaggaaacccattccaccagggccttcagtctgacacatagagtcccatggagtctc

SEQ ID NO: 954695 - DNA, 453 bp, Homo sapiens
cagtttgaaatgcttctcctactttcgggactcttcagcatcaaaatttctcccagataacctgacaaaactgtagaacatcagacctggaatgactgaaagaccaccrggctcagtgtttacctgaggtgggcaagtggctgagcagctcaggagtgggccccctgagtcttgtcccatcttactttgtactacactgttctttagagaaagcttccttttggagaccaaccaggactccttagaagcagaggtgacaaagcaagctttctaaatgatttggggaaaaggacaagtcttcctttcacatttttggaaggaaatatttttaataaggcagggattctccaatgaactggtctaaaccactgcttgcggcctcatgcctggcctgcttcacccactcaacagaatcacctcgtctctgaaggtggttgtgtttgaaacacctgc

SEQ ID NO: 954696 - DNA, 453 bp, Homo sapiens
cagtttgaaatgcttctcctactttcgggactcttcagcatcaaaatttctcccagataacctgacaaaactgtagaacatcagacctggaatgactgaaagaccaccaggctcagtgtttacctgaggtgggcaagtggctgagcagctcaggagtgggccccctgagtcttgtcccatcttactttgtactacactgttctttagagaaagcttccttttggagaccaaccaggactccttagaagcagaggtgacaaagcaagctttctaaatgatttggggaaaaggacaagtcttcctttcacatttttggaaggaaatayttttaataaggcagggattctccaatgaactggtctaaaccactgcttgcggcctcatgcctggcctgcttcacccactcaacagaatcacctcgtctctgaaggtggttgtgtttgaaacacctgc

SEQ ID NO: 954697 - DNA, 742 bp, Homo sapiens
ccccaacgaaatccaactttcaaaccgaaggcagtttaaagcccgaaagctaagctacaagtcttggataaatccatggactgagctgagaacatctcttcctgttggtgcactttcctctgactgatccccacccttcacttactttacatatatctacccttccctaggtggttttctacactgtcatgccacctttgaatggttcctttgttttagccttttttgtatactcgtaaaccaatcagcatgcagtccccacttctgagcccataaaagccccggacccagccacgctgggagagagaccacccgacttcaggtcagggaccaccctcgcatcccctctccgctgagagctgtttcattgcttcataaaactcttctctgcccttttcacccttccattgtcagcaaagggtacgaagaaggcagtaacaccatagccctccacccctcccccactacctgtgcccagtggcagccccttgccatgagaggcagtgcagggccaggccagccagggagcctccagcaggagcaggcaacaggactgacagagttgttaacacaccccccattcattgttaacatgcccgtttgtcaggctgctgacggtgggactaaaagagctgttagcatggctgtaacatcccctctggggcttcagagtcgagtgctttcctgtttgggygccaccaagttcccttcatctgcatgccagagttcacccccggagtca

SEQ ID NO: 954698 - DNA, 746 bp, Homo sapiens
gcatccatgttgctgcaaaggacaagatctcattgtttttttatggctgcatagtattccgtggtgtgtatgtaccrcattttctttatccggtccaccgttggtgggcatttaggttgattccatgtctttattattgtgactagtgctgtgataagcatacatgtgcatgtgtctttatggtagaatgatttatattcctttaggcatataccaagtaatgggattgctgggttgaatggtagttcagttttaggttctttgagtaatcgccaaactgctttccactgtagctgaactagtttacatttctgccagcagtgtataagcattcctttttctccacaactctcgcagcatgttatttttttaccttttataatagccattctgactggtgtgagatagtatctcattgttttgttttgttttgttgagacaggtgctagctctgttgcccatgctggagtgcagtggcacaatcagagcttactgaagcctcgaactcctgggctcaagcaatcttcccacctcagcctttcaagtagctgggaccacaggggtgtgccaccgtgcctgactaattttttaatttttttttgaagagatgaggtcttgctatgttgcccaggctggtctcaaattcatgggctcaagtgatcctcctgccttggcctcccacagtgctgggattgtaggcatgagccaccatgcctgggcctcactgtggttttgatttgcttttc

SEQ ID NO: 954699 - DNA, 639 bp, Homo sapiens
ttgtttggatcgtaccttgaacatctatttattttaygcagttccggcccttatcctaatggaaaacaccagcattttttagcttcacctcttatgaaattcttctcctctcttcttcttatattaacatccactgctctcaaaatctcaatcctgccactatcttccttcttccaatgaagaacaattacatggttgcactatgaaattcaagcctcaatcctcagcaatattgatcactcagagatccaccttaaaaatccagactttgacttctgtgttgatggttcatatctctgcccctcagaaaaaaaattcaggcaagttatgccattacaatttttacaactgcatagaacataggcttctagcttctacctggcacaaggcacctcagatcactaaacttttagctctcctaagagcttgctttttggctaaagagaaaagagttaatatctacacagagagtaaacatgcttttgggatagtacatgattttagtattgtatggaaaaccagaggatttttaacaactttgaggacaccaactaaaaatggacacaagtgtctgtccccttagcagctttgtgatggtcaaaggagttgcacatacttaaagtagaagctcacatggat

SEQ ID NO: 954700 - DNA, 627 bp, Homo sapiens
gaaaaggttgtgaaatcaatttagtgcctagcaaccagcatcttaaaaaataaataggatagaaaatatcgggccgagcgcagtggctcatgcctataatcccagcactttgggaagccgaggcaggmggatcacctgaggtcaggagttcgagaccagcccagctaacatggtgaaaccccatctctactaaaaatacagaaattagctcggtgtggtggtgtgtgcctgtagtcccagctactcgggaggctgacacaggagaatcacttgaacctgggaggcagaggttgcagtgagccaagatcataccactgcactccagcctaggtgacagagtgagactccgtctcaaaaaaaaaaaaaaaaaaaaagaagaaaatgtcatagattgttgcatgtacaaagatacatacatcacacgtgtgcacctgtgtgtatcctgggtcatgatgtaaaacattccttactgcgggtcgaaggtttgagagctatagttagagagaatatgttgcctgccctgaaccccaaagcctggcacacagtagatgttcaaagaattttgatacatagaaggatggatttaaattctcacagcaaaggtgactcttctgctggtggcccagc

SEQ ID NO: 954701 - DNA, 646 bp, Homo sapiens
ttattgtacagcaggtcacgggctgggccaccagcagaagagtcacctttgctgtgagaatttaaatccatccttctatgtatcaaaattctttgaacatctactgtgtgccaggctttggggttcagggcaggcaacatattctctctaactatagctctcaaaccttcgacccgcagtaaggaatgttttacatcatgacccaggatacacacaggtgcacacgtgtgatgtatgtatctttgtacatgcaacaatctatgacattttcttctttttttttttttttttttttgagacggagtctcactctgtcacctaggctggagtgcagtggtatgatcttggctcactgcaacctctgcctcccaggttcaagtgattctcctgtgtcagcctcccgagtagctgggactacaggcacacaccaccacaccgagctaatttctgtatttttagtagagatggggtttcaccatgttagctgggctggtctcgaactcctgacctcaggtgatcckcctgcctcggcttcccaaagtgctgggattataggcatgagccactgcgctcggcccgatattttctatcctatttattttttaagatgctggttgctaggcactaaattgatttcacaaccttt

SEQ ID NO: 954702 - DNA, 743 bp, Homo sapiens
acggtaatgtgtactatctctacatgggcttccaagtagaaaaacaggaactgtctttctaggagtgtaattctccattgcaaatggcatagttgtgggagtttatggtccaagcatcagggacttttgcaccaaaatctagacctgctgtacagcactttctagctgcaagctcccctcaaacccggaagccttttgtatcagtcaatagtaatattcccagtgtggaatatactgcctccaaaacccaaagagggcagatatgcttccttctttgtggtgggaagtatgagatgcaatcattctaactacattttggagggaatgtctgagcatactcaataaattagacctctaagaatttttttgatgtagtaggcctatgagtcctcataggatttatctcctattccctggagtgcatgtctaatcagcccctctagtgtacttaacagttattgcttatattgcccaattatcacgacatcataaatacaccagtgtgatattttttctaatgttcagatggttcagatttcctcagacttacattatgacagaggtcaagagatttaacatagccctggggcaagactaaacatatactgctgtatgttccaagtgaatacaaactgcatttcattcccttttctaacaggaatggaaaagaacacgtttgtcataccagtggctacaygccatatatcagaccttgttaatttattctataaaacatgcaacat

SEQ ID NO: 954703 - DNA, 608 bp, Homo sapiens
tcttcgacaattttgttctcaaaatcagagataccaaaaagcagtctgagccactggaaataaccctacttgcccccgaacgtaccagggacwtaacaggtctcagagaggctactgaatacgaaattgaactctatggaataagcaaaggaaggcgatcccagacagtcagtgctatagcaacaacaggtactgtaaataaacaggagagaacagagaaaagtcatgactcaggggtcttcttctcacagggctgagtaatcacaggagctttggatgcaggcaggctggcgctctgatcctgactctttcaattacagactgtgttaccttggacaatttggctaagtccttatgcaaaaaaagtatgatgccatttacttaatagggttgtgaggattaaatgagataattcatataaagcccatagcggaaggcctggcaggtagcaagggcccagcaaatgagagctattcacgttgccattaatgcatcatcatcgttacaattatcatctttttttttttacgttccaaagattcttccttctatctattatctcatcatatctcatctcatcatatcatatctcatcattttatccagag

SEQ ID NO: 954704 - DNA, 612 bp, Homo sapiens
gcaaaacttcttaagtaatatcccacaagcataggcacccaaagcaaaagtaaacaaayggaatcacaacaaattataaccttctgcacaacaaagaaaacaatcaacaaaatgaggagacaacacacgaaattggagaaaatattttctattcatctgacaaggggttaataaccagaatatataaggagcttaaacaaccctatagaaaaaaatctactaatctgatttaaaaatgggcaaaatatttgaatagacatttctcaaatgaagacatataaatgaccaacatgaatatgaaaagatgctcaacatcattgttcatcagagaaatgcaaatgaaaactccaatgagatatcacctcacctccgttaaaatggcttatatccaaacgtcaggcaataacaaatgcaggcgaggaaatggagaaaagggcaccctcatatgctgttgatgggaatgtaagttagtacaaccactatcagaatagtttggaggttcctcaaaaactaaaaatagagctaccatacaatccagctatcctactgctgggtatatatccaaaagaaaggaaatcagtatattgaagagatgtctgcactgtcatgttt

SEQ ID NO: 954705 - DNA, 612 bp, Homo sapiens
gcaaaacttcttaagtaatatcccacaagcataggcacccaaagcaaaagtaaacaaatggaatcacaacaaattataaccttctgcacaacaaagaaaacaatcaacaaaatgaggagacaacacacraaattggagaaaatattttctattcatctgacaaggggttaataaccagaatatataaggagcttaaacaaccctatagaaaaaaatctactaatctgatttaaaaatgggcaaaatatttgaatagacatttctcaaatgaagacatataaatgaccaacatgaatatgaaaagatgctcaacatcattgttcatcagagaaatgcaaatgaaaactccaatgagatatcacctcacctccgttaaaatggcttatatccaaacgtcaggcaataacaaatgcaggcgaggaaatggagaaaagggcaccctcatatgctgttgatgggaatgtaagttagtacaaccactatcagaatagtttggaggttcctcaaaaactaaaaatagagctaccatacaatccagctatcctactgctgggtatatatccaaaagaaaggaaatcagtatattgaagagatgtctgcactgtcatgttt

SEQ ID NO: 954706 - DNA, 620 bp, Homo sapiens
tatactgtggaagctttgttctttcgctcttcacaataaatcttgctgctgctcactctttgggtccaggccgcctttaagagctgtaacactcaccagaaaggtctgcagctccgctcctgaagtcagtgagaccacgaacccaccagaaggaagagactctgcacacgtccgaacatcagaaggaacaaactcaggacacgctatctttaagaattgtaatactcaccgtgagggtccatggcttcattcttgaagtcagcgagaccaagaacccaccaattccggacacaatagcaaccatcaccgtgaacaattttagaacattttcatcaccacaaaaagaaatctcatacccattagcaatcactccccgtttctcccccagtctctgcaaccatcaggcccagacaaccactaatgtactttctgtctctctagatttacgtattctggatatctcatatatatggaattacacatatgtggtcttctggggctggctttcttcacttaggttgttttcaagtttcctccgtgttacagcatgtatcaggacttcattctttttattggtgaatgaatattcyattgtacaaacataccaaattctgcttatc

SEQ ID NO: 954707 - DNA, 631 bp, Homo sapiens
tatatatatatatacacatatacacacacacaagtatatacatatgtaattgatatatacatatatgttttatatatgtgtatatacacacttatgtgaatatatgcatgtgtacataacattaattttttgaccaataaaaattgcataattatgtattgtgtatattataaaagtttgataggtatatatattgtaaaatgtttaatacaattaagttgatgaatatttatgtcaccttacatggttatgttttttgtagtgagagcatttgaggtctcctactgttgcagcaaattttaagcatacaaaacactgttattaactacatcttaaagctatacattagacccccaaaacttatttatcttataactgaaagtttgtactctgaacacctcatcattttttctacctccaggcctggtcattaccattgtactctctgcttctatgagttcaggctttttaaattctccatttaagtgagaacgtacagtgtttgtccttctgtgcctggcttattttgcayagcataatgtacccaggtccattcatgttgttgaaatagcagaatttcattcttttttatgggtgaataatattcagttgtctatttataccacatttt

SEQ ID NO: 954708 - DNA, 602 bp, Homo sapiens
ctgcccagagcttttctgtaaacagccatgagacacccgtgtgcaacagaagtgctgtatgcttctcatttcatcacaaagaatataaaaaacgtgtgctcaaggaccaagatttaaraaaattcatatttactgcattatcaaggacattttatttatttatttagagatggtcttgctctgtcacccaagctgaagtgcaatggtgcagtcatagctcactgcagccttgagttcctgggctgaagcctcccacctcagcctcctgagtagctgggactacaggtctacgccatgataccgggctaatttaaaattttttaattaagacagagtcttgccatattgcccaggctggtctcaaactcctgggctcaagtgattctcccacctcagcctcccgaaagtgctgggattacaggtgtgaaccactgtgcttggctcatcgaggacattttttaaaggaaactaattttactggtttgttgattgactgattgattgcagagtgtctggtgtttaagaacgtggtgattacttgcgtagtttggtgccggtgggagcactccagcattttacctattgctgtttttgcaccatca

SEQ ID NO: 954709 - DNA, 624 bp, Homo sapiens
cctggagctgccacaggaaggggtgctaccttccacgygggagccggagcccctggataccccaactggacacccaatccatcccagaccccgccgcccagctcagcccgctgcctgcatggcccagtggtctccccagccaggccctgcccccagcaccaatctctgcctcacagagcaagtagatctggcgtttctggaaggctcatctgctcctgtccctcctgcagtcacagggatgcagtcgagtgtctccactgatggctgctcaggttgccctggctggcttcaccctggctccaagcacaggcagggcctgaaactgccggccacctcctgccagtctgtgggcctggggctggcaggcgctgggcctgccttcctcaccggggtctctggcaccttccaaccaggtgactttggcacccaggaagtgcttgagaaaacttaatggggtaaatgcacaagttccatttcccttagcttcaaaaatggatatccaatgagctatcaggcccccagacatggaggagcattaaggacatgttgctaactgaaagacgcccatctgaaaggttgcatacccgtaggattccaactccatgacattctgaaaatggcaaa

SEQ ID NO: 954710 - DNA, 624 bp, Homo sapiens
cctggagctgccacaggaaggggtgctaccttccacgtgggagccggagcccctggataccccaactggacacccaatccatcccagaccccgccgcccagctcagcccgctgcctgcayggcccagtggtctccccagccaggccctgcccccagcaccaatctctgcctcacagagcaagtagatctggcgtttctggaaggctcatctgctcctgtccctcctgcagtcacagggatgcagtcgagtgtctccactgatggctgctcaggttgccctggctggcttcaccctggctccaagcacaggcagggcctgaaactgccggccacctcctgccagtctgtgggcctggggctggcaggcgctgggcctgccttcctcaccggggtctctggcaccttccaaccaggtgactttggcacccaggaagtgcttgagaaaacttaatggggtaaatgcacaagttccatttcccttagcttcaaaaatggatatccaatgagctatcaggcccccagacatggaggagcattaaggacatgttgctaactgaaagacgcccatctgaaaggttgcatacccgtaggattccaactccatgacattctgaaaatggcaaa

SEQ ID NO: 954711 - DNA, 591 bp, Homo sapiens
ctgtccagcagcctggccaaccatgcctggccttaattccatccatttctagtgagttacagcttctgctgratgcacattagaagatggtgaaagaaagctctgggctttccttagagagcaaagcatgctctcagtgaagggcagcctctggactggacccttctggctgctgagaagagacatactcatcctggaggcattcaattcacctcccgcttcaggtcactgagtcccactgtgcgcttagctcctactctgtgctagagctactggagggtgcaagagtggcaagctacctcgggaggagctcagggcagggagccggggggacacatggtgtggccttggagagctgaaccctcggaacgtcggatctgaccaagcacaatgcccagaaaccaccaggcactcgcctgtagccaacaagtcaggtttaatgactcactggaccaagggaagccaccaagctaatggttactgtctcatgtcaaagggaaataaccacctctacctggcagggtgtttgagacaattcaatgtgatggtacaatgagagaacacgcctccccgacccctacaatccccagc

SEQ ID NO: 954712 - DNA, 633 bp, Homo sapiens
gatcatctgttttccaacattctgaaaaacatctacagaggtgtaaggtgctacacaaatgagaataattagcttgtgccatctgtgggaaaacaagaagaaagaacctctacctcccgctccatcctgctattttgggcttcgtgaggaccaggggacgtggcaagtgtgtagagtggagcatcaccaatattgcttccatttatgggtgccatttgccctcctttactctggaaaccatgctaccttctctgccatgcacctctgctcactctgtgattagccagcgataaaaaaaaaaaaattgtcattcaaaaattgccaggcacagtggctcatgcctgtaatcccagcattttgggaggctaaggcagtcggatgacttgaggccaggggttcgagaccagcctggccaacatggtgaaaccccgtccctcctaaaaatagaaaaaaatagccgggcatggtggcacccgcctgtaatcccaactacttgggtggctgaggcaggagaattgcttgaacccaggaggcggaggttgcagtgagccaagatcmccccactgcactacagcctgggcaacagagcaagacgctctcagaaaataaataaataaataagtctgacttttg

SEQ ID NO: 954713 - DNA, 703 bp, Homo sapiens
ttcccaggtgaggcagtgcctccccctgctttggctcacactcggtgcactgcacccactgtcctgcacccactttctgacactccccagtgagatgaacccagtacctcagttggaaatgcagaaatcacccgtcttctgcgtcgctgacgttgggagctgtagactggagctgttcctattcggccatcttggctccacccccctcaagtgaacttttttatatgatgtgaagcaatgcttgaatttcattgttttctcttacacacatccagttgttccagtactatttttgaaaagactatgcttttgccattgtattaccctagcaacttttcaaaaatcaattttatgtggttgttcctttattctaaatgcctaactttataccaatatcacactgtcttaattactatagcttcacatgcagtctgaacatcaggtaatagaattcttcacctgtatgcttgtcttttaaaattattttcactattctaaattctttgatttccatatacattttagaatcacctaatctacacacacacacacacacacacacacacacacacacacacacccctgctgagatcttaattgggtttgtgttgaatctataagtcawtgttggaagaatagactttttaatgaaattatattttctaatccaagaatatagtatttatctccatttatttaggtc

SEQ ID NO: 954714 - DNA, 818 bp, Homo sapiens
attcctctctttgtactctttctctttatttctcagttggctgacacttatggaaaaatagaaagaacctatgttgaaatattgggggcgggttctsccaataggattattcatggtaagactcttttatgggtgtaggttaattctgaaaccactataactgtatattgaaattgtgtgaataaatgaattacaaatggtagaacacaggtttcttactatttcaacaaggggttacagataagcaagtggtaaaagctaaaatgaactatgtggcatttcataagagctagaagcctgagcatgaattcatatttagtttaatatagataaaggtgtgtatagagacggattagtatacatgcatgtattttctaactctgtccactgaaagagcttaggaacaccaacaccatactagcaacatgcaaacccatttcccagagctgggtttctaatgccattcttcaataaaaggaacctaggctccttggagaaatggctgattctagggctaaggcagcaaatataaagtatgatcccagagcatctcatcataccagaaagaaatggagtcatagcaaacaaacaaaagcgaagcaatacacaacaatgagggtatatcaaagagacatccctccttcaggatactaccccacccttcagggttaaatcagcaaggtaactttcttctaaaagagtaataattttacagtagataaacctcacaaagactacttcaaccagggaataaaggctgacactgacagcaataatttgtgtagatatagcataaactctttacaagaattaatgag

SEQ ID NO: 954715 - DNA, 683 bp, Homo sapiens
ccccaaagcattccacgctgggattttatactctgggaaacacttgtttccctgagctaaagcactgtagggcatcctgttctaggagggacaargccaaaacctgagctgctctgaatagttcctccttatatcagggcactacctttttagcatattctacagttatcctgagaccgtatgtgggaagaggaagggctgggtcacccaaggttattttgggactgtccttctgcaaatgtggccaaaataacatgtttattaacaaacccaatatttttagcttctctgtatcatgtaaacatcagtcaaaagtatataaacttacacatatacttgctaacgaatgtttcactagtttatttagtaatgatctaaatgtttaatggatatctattacttaattgggcataagtttcatgttgtgagttatcaaaaaacttttgaaaagtatttttaagcagacatataaaacataattagggttgaaatacgaatttgtcagaataatgacaaaatttgattaaaatcaaatttgttaataattttaaacatctggtagaaataatatttactactaaacccaagtaaaataaaaatgtatgcttgtatcatatttaatggagagaactcagaaaacaaagcagtttttattaaatcaaaaatattaaactagtcttatt

SEQ ID NO: 954716 - DNA, 611 bp, Homo sapiens
  misc_feature 508, 594, 595, 596, 597, 598, 599, 600, 601, 602, 603, 604,605, 606, 607, 608, 609, 610, 611: n = A,T,C or G
gtgtctttcatttccagaagttgtgattgtttctctggagattttttgtccatatcctgttttkttttgttttttttaatttatttaagttgtttttcacctttctctggtgcctctttgagtagcttaataattgaccttctgaattctttttctggcaattcagagatttcctcttggtttggatctattgctggtgaactattgtgatcttgggggtgttaaataatcttgttttctcatatcaccagaattgtttttctagtttcttctcaattggatagattatgtcagagggaagatctggggttcaatggctgctgttcagattgtctcatgggatacccgcttaatgtggtgctctctccctacccatagggatggggggcttcctgagagctagactgcagagattcttattgctctccagtctagccacccagcagagctagcaggctctgggctagtactggggagtgtctgcaaagagtcctgtgttgcgaatctngcttcaggtctctcaaccagggataccagcacctattctggtgaaggtggcaggggattgaagtggactctgtgagggtctttggnnnnnnnnnnnnnnnnnn

SEQ ID NO: 954717 - DNA, 644 bp, Homo sapiens
cagctgtagtacacagcttcacagttacgtgcactgccacatgtatgtaataatctggtatgtaacaggtgcttgttgaatatttgttggatgaatagatgagtgaccctagaaaaacacaatgcagacctatgrgtagaagaagaaaagaacctggagtttcctggaagttaggggttccagcccacctctgtccacagccatgtgatctcacacacacacacacacacacacacacctacacctgcacccatgagcctccccactttgtcagggatcatgattcacaggttatgctgcatctcctaacttttccatttctttgcactcactttttcactccatttataggcacacagcaaccccgtctcctgcaatgacccctgctccaggcctcacataaaccacctgctatctgtactcggcagccctggtccgaaggcaaacacagtcctggttgccccacctgacgcaattgctcctagcatttcttattcactctccagctttcgcttggctctaccctctgctgaaacagctaaccctcttgcctggcagagtcaaggaaatttttgagtccagggccttcaaccttgtgtcttcaggagcctctgcaaagctgggtgccatgtaggtgggctctc

SEQ ID NO: 954718 - DNA, 744 bp, Homo sapiens
atgatccagagcaggcagggtccacaatgactcagaaacatcttgagsacctgctcagagaatgacaacacacgggccagtgggaacagcttccaaaccccagcaaaggtgaacagtaagataagtaatgataattccaggttataatccaataaataagatagaaaactacacatccatactgacataaatacaacataaatgaataaattaaacgttgaatgaagagcagagtatttacacagttttaagctagtcctccatgtaatactaattaattacaaaggaagaaaggagtgaagaaaccacagacaccacctccatcaggtcaccagtgtgaacatcgtcagtaaccgggcaaattgcagtcctgccgacctgagagcacggagtgaggcggtcccagggtcgctcctgggttctcctgccaaggacgctaaacctgaatctgctcatgaggaagcatcaggcagccccgtgctgggggaaatcctgcaatgtaactggcctagagccattagagtgtcaaggccacgaaagtcacagaaagactgaggaacttttccaggtgaatggagcctaataaaacacaacagccaaatgcagcatgtagctctgagatggttccttttgtttttaaggatgtctgggggcaaatatgaacagggtctgagaattaggcattaggaatatatcaacgttgattatctgattctgttaactctactgtggttgtgtaggagc

SEQ ID NO: 954719 - DNA, 743 bp, Homo sapiens
ggttacactggaccacttccattgtggacagggcagtgctttattattactggaattgacasttactccagatacggatttgccttccctgcatgcaatgcttctgccaaaacggctatccgaggacttacagaatgcctttcccactgtcatggtattctacacagcattgcttttgaccaaggaactcaccttgtaggaaagaagggctgcaatgggcccacgctcacggattccccagtcttaccatgttcccaccgtcctggagtggctggcttcatggaacagaggaatggccttttgaagactcagttaccatgccagccaggtggcagccccttgcagggctggggcaaggttcttcccaaggtgctttaaatctgcatcagattttatgtagtgctgtctctcctggccgggattcacgggcccaggaatcaacagggtggaaatgagagtggcaccactcagtgttacccctagtgacccactggcaacatttttgtttcctgtccccaacacccctgctggccaacaggtgtcagttcccaagggagaaatgcttccaccaggagacacagcagtgattccattgaactgaaagtgaggcctgccttggactccctgtgccacagaaccagcatgcgaagatgggggtgactgtaccggctggggcgactctcatgtacaggcctccctcatttctgctgcaggacatccaggataagcctggacatcaccca

SEQ ID NO: 954720 - DNA, 585 bp, Homo sapiens
gaacaagctgttacatcatgcatttttaatttaatttagtttctaccttttactatatctgattctcctagacttatttccccattgcttgccagtttctttttttcaatcctatgcgtaccacgtatttctgtgcactgtctcaacaccttgtattaaataaggtggattaaaagtaaactagaaattgagtgctgaaatatctcttctgatgtgtttgcatgattgcaaatatgcagatacatataaacaactaatcaaaatgaaatgacaaagagatgctgacagaaacgagagggaggcgtgaggcttacaggaatggcaggtctcgcccgtatagcctgtgcctagacagtcacaggagaaggtgtcccacgactgggaacactcgcccccatgctcacagtagctgggcaagcacctaaaagaaaacagatacaactgctgtttccctttttcaatcatcaaaaaataagtgtcttaccaaaaacaggttaaccaaaaacaggttaatgtgaaagrgcagcatatgcaagataaccccacatgacgtgattactgggtctgccatcaaggttctctaat

SEQ ID NO: 954721 - DNA, 585 bp, Homo sapiens
gaacaagctgttacatcatgcatttttaatttaatttagtttctaccttttactatatctgattctcctagacttatttccccattgcttgccagtttctttttttcaatcctatgcgtaccacgtatttctgtgcactgtctcaacaccttgtattaaataaggtggattaaaagtaaactagaaattgagtgctgaaatatctcttctgatgtgtttgcatgattgcaaatatgcagatacatataaacaactaatcaaaatgaaatgacaaagagatgctgacagaaacgagagggaggcgtgaggcttacaggaatggcaggtctcgcccgtatagcctgtgcctagacagtcacaggagaaggtgtcccacgactgggaacactcgcccccatgctcacagtagctgggcaagcacctaaaagaaaacagatacaactgctgtttccctttttcaatcatcaaaaaataagtgtcttaccaaaaacaggttaaccaaaaacaggttaatgtgaaagascagcatatgcaagataaccccacatgacgtgattactgggtctgccatcaaggttctctaat

SEQ ID NO: 954722 - DNA, 708 bp, Homo sapiens
agtatctttctggagcaataatgccagaacagtgatgtttcatcagcattacaggcttgttctggcatcagattgtcaycagtgatgaccctagaaaatctgtcaataaatttctctgctgctccatgatcagcagatggttcaacacaaatcttttaaaatttagtaagcccagcacagtcgctcatgcctgtaatcccagcactttgggagacaggtgagaggactgcttgagctcaagggtttgagaacagcctgggcaacatagcaagacctggtggcatgtacctgtagtcccatactcaggaggctgaggtgagaggatcacttgagctcaggagatcaaggctgcagtgacctatcatcacaccatgcactccagcctgggtgacagagatgctgtctcaaaaaaataaataaataaaaaataataatttaatgccatatctcttcttaaatttctgcaaccagcctgttgaacattcacagttcacttcaattttcagttcatcatgcttgatctttctttttaaatatggggtctcactatgttgtccagaccagtactgaactcttgggctcacatgatcctcccacctcagcctcccaaagtgcgaagattacaggcgtgagccactgcgcccggccttgatctttccgcttcatgacaagcataccagtaagtggcatgtgttcactgtgatgctg

SEQ ID NO: 954723 - DNA, 594 bp, Homo sapiens
tttttaatagtagatccctgatttaatagtagtctattcttatgtatggtgtgagatagggatttggtcttatctattttcaattagtaaacctgttggcccagcaccatttattaaaagttaatctttaacctaattatttaagatgtcattgtcaccatgtactaaagttctgtggttagtttgttctatttttggactattctattccattgtccatgatattgctgtaaaaatgcaccaaaactttcccatataagaaactttataagtaggtatgaaaattagcattttagataaattgcccaggtgattttcatgtccacacagttgttcctttccatcttcttcagaaattttaacaaattttcttattaccttaagaaagtagattgttaaaagatagcaaattgttctaccaaaagacatatgcatttgcctgttcattgcagcactattcataatagcaaakatgtggaatcaatctaggtgcctatcaacagtggattggataaagaaaatatggtacatatacattatggaatactatgcagccataaaaagaatgaaaccatgtcctttgtagcaacatgg

SEQ ID NO: 954724 - DNA, 623 bp, Homo sapiens
tctctgctcatggtgagcattgcagactgagaacagctctacctttggtggttgttttatgtttcctcagtgactgatttttattagtttcaaaagataacaatatatgcatgcacacacgctgatgtttctgaagggcattgtgatgaaagattagaatgctttttgccttcctcctgatcaaacagtgggtcttagggagtatgggtacatttactttgtcaccaaaaagaataaaatctgttgacattgttacttgtcactcatcttcattcattcctttttctttttcaaattatactctaagttctgggatacacgtgcagaatgtgcaggtttgttgcacccatccgcccgtcatctacattaggtatttctcctaatagtatctctcccctagcccccaaccccttgacgggccccagtgtgtgatgtttcccctccctgtgtccatgtgttctcattgttcagctcccacttatgagtgggaacatgcagtgtttggttttctgttyctgtgttagtttgctgagaatgatggtttccagcttcatccatgtccctgcaaaggacatgaactcatccctttttatggctgcatagtattccatggtgtatatgtg

SEQ ID NO: 954725 - DNA, 431 bp, Homo sapiens
agatcttgggacttatcagcccccataatcatgtgagccaattccttattttacatatgcagcaggtccttgaataacattgtttctttcaacatctttcattataattttgatgagaaaaagaaatcaattcccagcagaagccactgcctgtgtggagtgtgcaggttctccatatctgtatgggttttttctgggtactcagctttcctcccaaatcccaaagatatacacattaggcaaactggcatgtctaaattgtcccagtatgagtaagtatgggtatgtgtgaatgcaccctgtgatggaaaggcaacctgtccagggktgcttcccaacttgcaccctgggctgctgagatagagtctggccacctgcaaccttgaactggaataagcaggttggaaaaatgcataaatgaatgaattaac

SEQ ID NO: 954726 - DNA, 589 bp, Homo sapiens
aagcagagcaggagtttgttgaatagactgaactaatggagaactgaaataatttttawggctttttaaatttgaaatatcagtgattatttttgttttgcttttcagggtctggagaactttttttgagctatttatagcttttaaatacactttaggtatactgagtagagtatacagaatttgaggcatatttatctctctttgcctaatttccccagaatttgtaaactatttgtgattcttaatttatggcaatgtgtttgtttgcatacatttaataagaatctgtttccttttataatgggacacagttgaaagaactgattattttcccatggttttgactgaaatgaccttgtgagaggttccagcaaagccaatttagaagagcctttgtggacaatgattcttgctgcactttgtgtgggtaatcagtccaagtatatgagactgaagattatttggtaagtaagttagtcctgctgtgattagtctttggtagaagtggaggactagagagagaaagattgtttttcagaagaaaactacagtattagattaacctttgattcctgggtggtcacgt

SEQ ID NO: 954727 - DNA, 632 bp, Homo sapiens
acatttatttctatcattctggaaaattaagatataaactatcrggaaacatactgaaaaaagtaattgaaaaataaatggtttcctataaaatatgttcatgttgaaaatcaaaatcacctctgttacaggaaaagaggtggggaagagcccactggagcccactggaattctagtttctgcctacgacaagacatgtcagatggacacaactttaaaacctaatcttccatttaggggtatcctcacactgataaaatgtttgtatcagatctaatgtttatttatttttttaaatttggctagttctagtaatatattaatcagtcacgagtcaaagctttaattgcatgccaaatcaatgatgaatttaaatcattgctctagcagaaaagtttctcaacaactaattattcaaaaacaaaacaaaacaaacctcagtaatctacattgacatcttattgcttgactagtcagagttttgtttgtaaacaataaaagtcaactttggctaatgtacaagaagagagaattaataaaaatggtgtcagaaatgtaatatactcattgggaggctgaaaaaccaagctggggtataaaattggccacaggaatagcctctgaggtctata

SEQ ID NO: 954728 - DNA, 534 bp, Homo sapiens
tagttctgtgaagaatgatggtggtattttcatgggaattgtattgaatttgtagattgattttggcagaatggttattttcamaatattgattctaccaatccatgagcatgggatgtatatccatttgtttgtgtcatatatgactcctttcagcagtgttttttaatttccctgtagaggtcattcacctcctttgttaggtatatgcctaagtattttatttttttgcagctattgtaaaaggggttgagttcttgatttgattctcagcttggttgctgttggtatatagaagagctactgatttgtgtacattaattttgtatcaataaactttgctgaattattttgtcagttctaggagctttctggaagagtaaagcattctatgatctattatcgtatcactctacctttctacctcttttcctcatgccccattctttttagtcttgtttactcctctttataaaataatttggtttccctaacccttcagactcttgcagatcttgtgtctagagagttctc

SEQ ID NO: 954729 - DNA, 634 bp, Homo sapiens
gataagagaaaactatgaataactgcatgaatcaattagataacttagataaagtgaataaattccaaaaaagacacaaattactaaaactgactcaaaaagtaatataaaacttaaatagattcataataagyaaagagaatgaattggtaattttaatgacccacaaagagaagcccaggcccagattaattcactggtaaattctaccaaacatttaaaccaatccttcacaacctcctccaaaaaacggaagaggaggaaacatttcccaactcattctatgaggccaatatgatcctaataccaaaaccagatatagacatcacaaaaaacctacagaccagtatcccttatcaatatagatgcaaaaatcctcaacaaaatactagcaaaccaaaccaagcagcatattaaaagattatataacatgaccaagggggatttattccaggattgcaaggttggtgtaacatccaaaaatcaattaatgtaacagaacttttttttttttttttctgagacaaagtctcactcttttgcccaagctggagtgcagtggtacgatctcggctcactgcaacatccacctcccgggttcaaacaattctactgcctcagcctcctgagtagc

SEQ ID NO: 954730 - DNA, 566 bp, Homo sapiens
catgttgctgcagaggacataattttgttcttttttatgtctgcatagtattccatggtatatacatactacattttattacagtccactattgatgaacacctagrttgatacatgtctttgctattgtgaatagtattgcaatgaacatatgagtgtgtgtgtctttttgatagaatgatttgtttacttttggatatatagccagtaatgggattgctgggcaaatagtagttctgttttaagttctttgagaaatctaattgatttccacagtgactgaagtaatttaccttcctaccaacagtgtataagtgtttccttttctccatgtgtcttgaatagatttttgtttaaaatcaatacctgaaacttggtttaagaggaacaaaaatattacaaaagggtcaaaagcatatatcaaactttaaattatgagaacaattttaccaaaatcagaaaaaaatagccttaaaaattactggaatcaaatatgatttgcttacctaaaatgttatgcagctttattatctttttagtaatactacattgagcttactaatttt

SEQ ID NO: 954731 - DNA, 586 bp, Homo sapiens
agcaaagtcaccacaatttgaaaaaaggaacaaaaatgcaaaaaatacggcactaagtagactggggaaaaagacacttacttataatatgaggtgaaaggaggagttggagygtctggaatatgcatgtggctaaaattttgtgccactctgtgatatggtttggctgtgtcctcacccaaatctcaacttgaattgtatctcccagaattcccacatgttgtgagagggacccacggggaggtaattgaattactggggccagtctttcccatgctattctcatggtagtgaataagtctcatgagatctaatgggtttatcaggggtttccacttttgcttcttcctcattttctcttgctgctgccatataagaagtgcctttcacctccctccatgattctggggcctcccagccatgtggaactgtctctttttcttcccagtcttagatatgtctttatcagcaatgtgaaaataaacaaatacagtaaattggtaccagaagagtggggtgttgctgaaaagatactccaaaatgtggaagtgactttggaactgggtaacaggcagaggctggaaca

SEQ ID NO: 954732 - DNA, 643 bp, Homo sapiens
acaggcatgcgccactatgcctagctaatttttgtatttttattttatttttattttttwattttttatttttttgagacagagtctcactctgtcaccaggccagagtgcagtggcacaatctcaagctcactgcaacctccaactcactggttcaagcaattctcctgcctcagcctcccaagtagctgggattacaggcgctcaccaccacgcccaactaatttttgtatttttagtagagatggggtttcaccatgttggccagaatggtctcgatctcctgacctcgtgatctacccgcctcggcctcctaaagtgctggaattacaggcgtgagccactgtggctggcccaagaagcacttttcaaagtccaagctccctagagaggagctgcattcttctgagattctgtgaggtctccatcattggaggtgcataagcaacactcacctggtcccccccacccatctggctcttctctactcagctcttcccacctgagtcttctggtggcacccaaaagactgccctgatccagaccctgcccctagaaatgccacctcttatgggccctgtgagatgcccacatcactctcttggcagggggcctaacgaggactcagccactgccccaggga

SEQ ID NO: 954733 - DNA, 738 bp, Homo sapiens
ccctaatgagagagacagcctgtcctttgaatttttgaagccaggcttctcctctctagcaatgaaagacctagatggcatcttcttccaatacaaggctgtttcatctacattgaaaatckgttgttggacatagtcaccttcattaattatgttaactagatgtttttgataacttgctgcagcttctattaatatatcagcacttgctgcttctccttgcacttttatgatacagagatggctccttttcttaaaacttatgaatcaatctctgcttaaactttccttccacagcttcctcacctctctcagccttcatagaattgaagagaattaggaccttgtcctagtttgggtttaagggaatattgtagctggtttaatttatccacacctctaaaacattctccataacagaaataaagctgtttcactttcttatcatttgtgtgttcacagaagtagcacttctaatttcctttaagaactttttctttgcattcacatcttgcctaactggtgcaagaggcccagcttttcatcagtcttggctttccacataccttcctcactaaacttaatcatttctagcttatgatttaaagtgagagatgtgtgacatttccttgcatttgaacacttagaggaaattgtagggttattaataggcctgatttcaatattgtggtgtctcagcaaacagggaggccttatatttaccaagtaagttggccg

SEQ ID NO: 954734 - DNA, 669 bp, Homo sapiens
gctgaggtgggagaatcgcttgaacccaggaggtagacgttgcagtgagctgagattgcactactgcactccagcctgggcgacagastgagactgtgtcaaaaacaaaaaaacaaaaaaacaaaaaaaaaactccctgagactgggtaatttataaagaaaagaagtttaattgactcacagttccacatggctgcgacgaaaacaggaaacttatgatcatggtggaaggtgaaggggaagcaaggcatatcttacatggtggtaggagagagagagagtgaggggggaagtgccacacttttaaaccatcagatctcctgagaactcactctcacactattatgagaacagcgtaggggaaatccacccctacaatccaatcacctttcaccaggtgtctctcctgatacgtggggtttacaatttgagatgaaatttgggtggggacacagagcccagccatatcagctcctatggcattgacttactacattatcttagtggagtttcatgaatgacagcttgccactcaaccatgtcgttagcacattgaaccctttgtcagtgctctgatttatattcctttgtgcaatacagtgttttgtacatagttgtaagtcaaataattactagttgatcatcctaaaagtccttccttgatttaaa

SEQ ID NO: 954735 - DNA, 877 bp, Homo sapiens
gcctcgtggtaaagtgtcagcacgcaggacgggtcccctgggatcctgcctccttccyccaaatacgaacatgccagccctccaaccctgatttcagcagcctctggtgacctctgaccccggcactttgagaaccgagtccctgcttcaaacagcggtgggtgggtgggtgggtggctccgggtggttggcaggggccctgccctccgctctgaagcctcccgcactgtgactagtgccccctcacatgacgcggggctgggagagccccagggagccgaaccttctctccctgcagggatgatagtgacggcaggtgaagaccaaccagagctgtgacttgtctgccctgttatgatttttaaaatgattttcattactatcagcatttgccaaagactggaactggtcttcccctcactgtccacactcaccacctgtgaacgccctccccatgagacagctctgccgggagtgttacaacccctccctggaaccagagagcagcccaggcccaggaaaacccagcagctcagccctgcggggcctgcttggccaccacagaggcctccgccgcctcctggagccctgtcttctcccgcaggctccttccttcctgttaacgttctagtcgagatggctccaagggccctcatgggtagaactcttccagggcagtggtacaggagaagggaaaacctggggcgcttgttttctggggagcggccctgccctgctacagccccatttgtcacatcctgtcgggaaacactgatttttccagtcacacacggtgtgggccacttgcttaggggtgaattgggttttgagtttacattaggaggcatgagctggctttgcgaacacgatgcattct

SEQ ID NO: 954736 - DNA, 215 bp, Homo sapiens
aactccttcctcaagcattgagctaccacacttttgtcctaaccatttctktgcttttctttcccatttatacttttgttttatagaatatgaggagagactttatatgttttatagaatggaaaaggctttagaagtcaccacctaacacaatcctctcaatttatacatgagaaaaactaagggcctgtaagacaaagacatttgtcctgggt

SEQ ID NO: 954737 - DNA, 638 bp, Homo sapiens
catccatctttctatctgatcatccatccatccatccatctatccatctattcatctaatcattcatccatgcatctggtcattcatccaactgatcatccagccatcctgtcacccrtccatccagccattcatctgattatccatgcctctgatcatccattcattcattcatccgatcatctatccatctgatcatccattcgttcacccaatcatccattcattcatccgatcatccatgcattcatccagcaaacatttactgagctactccctagttccaggctctgtgggaaatactgggacacaacagtgagcaaagtagacagcatccttatattcctggaattttctctccagggggagggccataaaataatcaaatttgaatcagtaagtgcagaatgacacctgtggtgtgtgcactgaaggaaaggaacggggcaaaatgaaaacaaagtgatggcttggccaggccttttccagggaagtctgagaagtgttctcagagatagaggccagagctgagaggggctgggaggatggcatggctggataaaggagtgagagggaacactcaataagtggaaaggaaccccatgaaggctgcagtgttagttttctgtggctgttgt

SEQ ID NO: 954738 - DNA, 765 bp, Homo sapiens
tgatccagtttataccaaaatatcaatatattcaaataataaactaaattagcccttctgtttaaaaaaaagatcttatcaaaatgctaaccactgtggcatatctgcaaagagaaccttgcctaagttcaaaattgtccaattccatagagaaagctgttatctagttttttaaacacctgtagcttccctacctccacagtttatcccatctataattttcaaatccccacctattcattttccactatctcgtttccacttgaaaactgaataattaggaaagtagatagatacatacatacatgatatctagatagacagatatccatagataaaataataaaaatcccaatctctagctagataaagagtattgttcccagtacacatttcagttatcttaaatgtttgttttttttgtgggtttattctttgggtgggaatgtattggttttggtttttatttttaacaaagacaaaagagaaagaggagagaaaagacaattgcacatttctaagtgttttatcagagcctcagtgtagaggttgtgttatgatcccgagtggaaatttgttttcatcacaaaccacctcacagtatgataccatttatcatgattgtcatcctaggctcaagggagagcagaaatagaattctagcagctctktgcataaggacctatgtactcaagcgcatgggtaatcctcagtaaaatcgttgccatcattgggtgccagccactggctactgacagtagttgg

SEQ ID NO: 954739 - DNA, 644 bp, Homo sapiens
acaaaaaaagataagaaatgggggctgggcactgtggttcacgcctgtaatcccagcactttgggaggccaaggtgggtggcccttggtgaggtcaggagttcaagaccagcctgaccaatatggtgaaaccccatttctattaaaaatataaaattagccgggtgtggtggcatatgcctgtgatcccagctacttgggaggctgaggcaggagaatcgcttcaacctgggaggtagaggttgcagtgagctgaaatcgtgccattgcactctagcctaggcaacaagagcgaaatgcccaatcaaaaaaaaaaaaagaaatggaatctgtggggagtagagtttctcccagagccagggaagatggaggggacagggatgagcgcagagctaggggagtccacctggagagagtgggctggttctccctgggggaggtgctccttccacacagggccctgaagggcctgggggagctgagctcagtgggggctgactgctgggagtttccagtgagtacacgtcgccatcagccaggatctaatcggggatctgcaaagggctctggccgcaytgggggcggagtctttgcctgactttcacctaatcgcagtgtccactgcctgccaccccgaggggccag

SEQ ID NO: 954740 - DNA, 598 bp, Homo sapiens
gttgttgttacagtaggtagctagttagatatgagcaggggaggagagggaccccctgcttttaaaataataattggycccagccagcaccagggaaaggcagtctcccaataaactaaaacacctgaaactggtgatcgccagctttccaataagatctcagtagctgggccagtaggctcaagcatgtgcattaagagaaaaaatggcagagtttaactggtatatgacctcctagggacatgtgacccgtaagggaataacacctcaagtgagcatgcatacatctccagaaacagactgcacatgcccctcttccaagtgctagcaggtcactgcacatgcagacagcccggccaaagggaagaatcaggaaagaaggaatgcaaaaccccaaaaacatgccagtatataaaacccaagacaaaaggtcaaactgtgcacttgatctctgaagtcgcccgcttggccctcttccaagtatactttacttcctttcattcctgctctaaagctttttaataaactttcactcctgctctaaaacttgctttggtctctccttctgcaccatgcccctcagttgaattctttcttc

SEQ ID NO: 954741 - DNA, 622 bp, Homo sapiens
aacatacagtatgtactctgtgtgcctggctccttttcctccacattaattgttgagattcatctctattgtatgtagttgtaggttgtccctgtstagtatcatgttgtgtaaatatactacaaatgatttacgcattctacttctgaggggtgatggagctattcccagtcagcacctgttacaactagtgctgctatgcacattcctggtcgtgtctttgggtaacataggatccgttgggatacaccttggaattcctagatgtgcaatttttcggctttaggacaatcagccaaattcaatttctcaaatggctgtatgagtctgcatccccaccagcagcacagagacttccagttattccacctcttctcctgagcttggctttcccacctttaggatcagagtccttctggtgggtgtgcaccagtgtcatgtcatggctggtgtggttggtttctaatcctctgggcagaggttctcggcacattgggattactgtccacacaaggctcccctcttgttattggtgcttgcttatttatgcccctttgtatccccacacccctacctttccccctcctccagcattaggaattcactctaaggcttttattgt

SEQ ID NO: 954742 - DNA, 613 bp, Homo sapiens
atttcctcagtcaactcactcttccagtcaagagattatttcactgattcttctctcttctcaagccctcttgcttttaactcttgggtttgcttcttattttcctgaaaaaataaaagcatagtaagasagcttccgcatatgtaccactaagtccactaaatgtccacatctgtatcctcatatgctgtctgccctcctattaacaatgcaaggctccttctgtaactatgttcttctccaaggccagccctcacctgggccctgtgtctcttcttccgccatgcaatgaccttgctcttaccatcatcccctcttctgcatcagtttctctctttctactggattattcagataaacatacaaatgtactgtgatatctcccacccttaacaaacaaacaacacctttctcctacatatcctcttccagttgctgcttcatttttctgattctcattgtggcaaaattccttgaaaaagttgttatatttgctgtcttcaccaactcttccttcattttctcttgactatattccagtcaggctttcctccccatccttccacatccccctaactccattgtcaggataatcaatgaactccacattgcc

SEQ ID NO: 954743 - DNA, 610 bp, Homo sapiens
tctgcaagccaaggaggggggcctcaggaaaagtcaaacctgcagacaccttcatcttggatctagccttcagaactgtgagaaaataaattcccactgtttaagccacccagtctgtggtgttttataactgcagatctagcaaactaatgcagctaataaatggtagaatgccttcaaacagaggtatcattaaatctagagaagtaagttatgctggatatcactttactgcagtggattaccatgattacaacagggtcattatttcttcttgaacccctcatttaggtcaaagtgagcaaaataaaagtctacttttggccgggcctggtggctcatgcctgtaatcctagcacttcagaaggctgaggtggtcggatcgattgagggcaggagttcgagaccagccaggccaacatggagaaactgtgtctctacaaaaaatacaaaaattagccgggcgtggtggtgtgtgcctgtagtctcagctacttgggaggctgaggcacgagaattacttgaacccaggaggtggaggttgcagtgagttgagattgcaccactgcattccagcctgggcracacggtgactccatctcaaaaagaa

SEQ ID NO: 954744 - DNA, 569 bp, Homo sapiens
aagagtttcacacagattcactctctgctttaaggatgattagacactctaaaaacacggggaattttccttacacattagcaaggaaggccattgttcctctattgcttgaagcattctctactgttttagaaattacagcctccatctatctccctcaaacactgacaagcacatgcatatacatacatacgtacacacacatacatatacacataaacacacattacattttagatataaatatagttaatgttttatgtatttaatattttccattgaggcctatgagaatacataccttaaaatatataatcaaagctcctagtagggaaagaacctcccagtttgctattaatttaaataacaaattgaaagttgtttgaaaaaagacagcttagaaaaaggagctgtcctgcctggagaaagagaaggttagcgatataattggtacttaccaaamtgatatgctttttaaagaaaagaaaatcataaggttggaaatctgtaattttgtgaattgacattatattccaaaatattttacatgagcttaccggggagtattt

SEQ ID NO: 954745 - DNA, 614 bp, Homo sapiens
tttgggttccactactcttttctgttgtttttctattctctatttcatttatttccagcctaatctttattgttttmttatttctttttgctttgtatttagattttttttctagtttcttgaggtaatgtttaagatctttctacctttctaatatacacatttacagctataaatttccctctgaccatcaatttagctgcactttctaagttttgatatattatcagcttttttcatctaaaagtattttctatttcctttttccatttctcctttgacctattgattatttagaaatgtattgtttaatttccacatatttgtgaatttcccaaatttacttgtttttaatttctaattgcattttattgtggttatacaatacacttttgtgtcattttgatcattttaaatttattatggcttgtcttgtggcataacatatggtctacccaagacagctccatgtggtgtgggatgggatgttcaatagatgtctcttaaatcttgttggctgatagtgttgttcacataatttattttcttgtgattttctacctgttgttccagctattgttggaagtggaatattgagttcgacatctattatt

SEQ ID NO: 954746 - DNA, 614 bp, Homo sapiens
tttgggttccactactcttttctgttgtttttctattctctatttcatttatttccagcctaatctttattgttttcttatttctttttgctttgtatttagattttttttmtagtttcttgaggtaatgtttaagatctttctacctttctaatatacacatttacagctataaatttccctctgaccatcaatttagctgcactttctaagttttgatatattatcagcttttttcatctaaaagtattttctatttcctttttccatttctcctttgacctattgattatttagaaatgtattgtttaatttccacatatttgtgaatttcccaaatttacttgtttttaatttctaattgcattttattgtggttatacaatacacttttgtgtcattttgatcattttaaatttattatggcttgtcttgtggcataacatatggtctacccaagacagctccatgtggtgtgggatgggatgttcaatagatgtctcttaaatcttgttggctgatagtgttgttcacataatttattttcttgtgattttctacctgttgttccagctattgttggaagtggaatattgagttcgacatctattatt

SEQ ID NO: 954747 - DNA, 568 bp, Homo sapiens
gcttgagcccgggaggtggaggttgcagtgagctgagatcgtaccactgcactccaactccaacctgggcaacagagcaagactgtctcaaaaataataataattattattactattattatttattgtgcagattgaatgtgataatgcatctgcaatagctggcacttagtacacaaaggaataaacattagctacgcctgctgctctcatgattactaactctgactatactgaataacaaattggaacaatggtgtcttttgcggggaagaaaaaagaatataacctcaaccccttaccatgatcttcaaggccagtaaaactctgtagcctcacctcatacctttctcccacgccccgacagcttggtcactatgcaataggcacatagagtaacaagcacagggcttcgtgcttcttgcttcctgtttctgaaatgctctttccccagctctgtgcacgtctctggctccttatcatccttccagygtcagtttaaacaacaccttcgcagagaagctttccctggccactctatctgaagtcgctctccctagcacctccc

SEQ ID NO: 954748 - DNA, 576 bp, Homo sapiens
gagggaggaggtattggatgtttgtggaagaagaaaaggggttaagttgccatctggggacagggagagggccatatagtgtgagattactgggcagcttttarggcccactggggctgctggtgagaccagtgagcactgttgagtgggtttctccagccacattcagcaacctgtttgtaggatgaagtgcacagagtagtcatgaagtgtcaaagcaaatagaacaaaataggtgaaatgcaaggagtgttggtaataattgatcatggaacttaaaatggataagaatgaaaggtaggatatcctgggggtgagggacactgaaaaactggcagagtcaatggcttggagttgttgatgaactgaaatgattgctggagttggggcactagagtgagtgaactgaatggagatgcatgaacttgagatcatggaggagttgttattagtaatgacaaagtctggagtatgaccacgacagcaaggtgattgacgcagggcagaagacaagtgtattggagaggaggaattcgagaaactgaggggccaggacattggaaagttcattgctgt

SEQ ID NO: 954749 - DNA, 552 bp, Homo sapiens
agtaaatgatatttctgtttggtttttattcagatttctcttatgaagttgaatgtctcgtaagggtttgagacatatatttttctgtgaattgtctgttcatgttttttgcccatttttctttttctttctttctttcttttttttttttttttttgagacattgtctcattctgtcgcccaggctggagtgcagtggtgcgatctcagctcactgcaagctccacctcctaagttcacactattttcctgcctcagccttccgagtagctgggactacaggcacccaccaccatgcccggctaattttttttgtatttttggtagagacagggtttcaccatgttagccagggtggtctcaatctcctgacctcatgatccgcttgcctcagcctcccaaagtgctgggattacaggcrtaagcaccgcgcctggcctttttttgcccatttttcttcttctttttgtttgtttgtttgttgttgttgtcgttttgagacagagtctcactctgtcacccaggccgagtgcagtggcaccatatcagctg

SEQ ID NO: 954750 - DNA, 630 bp, Homo sapiens
gctttaactaagaagtgaagaactgacacctgaacagagcacagatagccacacagacaggagctgcrtttcaaacaaggtcattgctgttgtccccactccaaattaagtgtctctgcttcacccttccttaccaaagttctgcttgatcatccttttgttttgttttgttttgttttttgtacttcacttctttgagaaaatataaaccaaaattttacatgaaacaggaattcagcttttgacaatgttagccattgaaacaacaacaacaaaagtttctattatttctcatctctgtgctatccagtgcagtagccaatagccacaggtgactattaaaattaaaattaattcaaataaaacaaaatttaacattagctggtcagttgtactagccacatctcagttactcaatagccacatgtggctagtggctactgaactaggcagcatgaatgtagaacattttcatcatcatagctttctaggtcatggaaaaattgcagaactcaatttccagtgtgcacatttatttgcatgcctaggagctttctgaccctgtgttgagctgcctaaccagcttcctgattgacctcctgatatttctgcaaatgtggactaagaggc

SEQ ID NO: 954751 - DNA, 565 bp, Homo sapiens
gatgttaatttccaagacaatgggaaaaatgtctccagggcatattagatgtctccattgcagcccctcccatcacaagcacagaggcccaggaggaaaaaatggttttgtgggctggacctagcrtccctgtgctgtgtgcagcctaggaacttggtgccttgtgtcccagcaacttcacctgtgactaaaagggtccaaggcacagcttgggctcttgcttcagagggtgcaagccccaagccttggaagcttccatgtggtattgagcttgtgggtgcatggacgtcaagaattgaggtttgggaacctctgcctagatttcagaggatgtatggatatgactggatgcagaggcagaagtttgctgcagaggcagggccctcatggagaacctctgctagggcagtgcagaagggaaatgtgagatcagagtctctacttgggtactgcctagtggagctgtgagaagagggccactgttctccagaccccagaatggtagatccacctatagcttgcactgtgtgcctggaaaagccacagacactcaacagtggcccat

SEQ ID NO: 954752 - DNA, 589 bp, Homo sapiens
gtaagagattacctaacttaccatgatcagaattttgrtagagatatgtatgctaaaggccattctaatgacagctcagattaaaataagaaatactttattgggaattggaagaaaagtgatacttgttggcaaaaacttggctaaattgggttttgtactaataatttgtggaataagaaatttgcaagtgatgaaacagaatatctggtaaaataaatatataagcaaagcattgaaagcatgacatggcttttcttgactgtttatggtaaaatgcaaaaagataggtatgaactatataatatgaatgaaagaatgtaaaattcaaagagtaataagagagaaattaatgatgaaatttataataaaagggaacagaaattaatgattttgaaaattgtcattctgtccatgttgtaaaaaatgaaaagagtgttttgcagaaaaaaataccaaggatgtggctaagcaaacattgatgaggagattagtgtggatagaaagaagccagtggctatttatcaagaaaataaaggaatgatcagaaagatattttggagatcatcgggttgtaccacttccatca

SEQ ID NO: 954753 - DNA, 589 bp, Homo sapiens
gtaagagattacctaacttaccatgatcagaattttggtagagatatgtatgctaaaggccattctaatgacagctcagattaaaatragaaatactttattgggaattggaagaaaagtgatacttgttggcaaaaacttggctaaattgggttttgtactaataatttgtggaataagaaatttgcaagtgatgaaacagaatatctggtaaaataaatatataagcaaagcattgaaagcatgacatggcttttcttgactgtttatggtaaaatgcaaaaagataggtatgaactatataatatgaatgaaagaatgtaaaattcaaagagtaataagagagaaattaatgatgaaatttataataaaagggaacagaaattaatgattttgaaaattgtcattctgtccatgttgtaaaaaatgaaaagagtgttttgcagaaaaaaataccaaggatgtggctaagcaaacattgatgaggagattagtgtggatagaaagaagccagtggctatttatcaagaaaataaaggaatgatcagaaagatattttggagatcatcgggttgtaccacttccatca

SEQ ID NO: 954754 - DNA, 625 bp, Homo sapiens
aggtgataaaaggaattcgttgactctcacaacagaaccatgcagaagtgggactgcctctggtgcaatttgatctggcccctggccgcaggtctctgatgttctttcagccttgcccttgccccgtgtcagtggtgatcttggactgactcccaccaaggatgcagcactgactgcagcggctcccggcctcacacccgtaacctcaccaacctgagctgaaagtgctgctctactcaggacggtcacaagcccttggcttctctctaaggttgtgggacacccctgagccaattattaggtccaggagtatctaataatctgagaactagtcactgagggcatcctgctgattggtggagtataatctctggagctgtgggtggatccttctctcccaaatcacagggaccctggagaccaagaatgggcacaaggttgagtcagctctagggaagcaccaaacaacactgacgcatagggatatttgtatgttaagtatttagtctgttaatttaatattaaakaaatgtggctggacatagtggctcacgcctgtaatcccagcactttgggaggccaaggcaggcagatcacttgaggccaggagttcgagaccagcctg

SEQ ID NO: 954755 - DNA, 639 bp, Homo sapiens
ctgcaattcctgcagactcatagaggtatcgccttgatagtcttagactaaatctggaagaattctctggattaccaggcagactcttgttctcttcccttacatctctccaaatatacagtctctctgtctgtctgtctctctctctctctctctctctctctctctctctgttctaagccacctaaagctgggggtggagtgacacaagcaaccctgtagccaccaccactgtgactgtgctgggtcagacctgaagccagcacagcactgggtcttgcccaaggcctgctgtaaccactccctggttactgcctgtgttcactcagggctctggggctccacaatcagcaggtggcataaccagccaggtctgtttccttcccttcagggtggcaaggtcccccaggctccaggtgggtccagaagtgccatctgggagtcagggactagagtgataaaccttagaagtctacctggcgttctattgtattgcggctgagctagcactcacaccacaagacgtagtccttcccagtcttccctcttctttccaaagacagaggagcctcayccagtagccaccccaggccacaaggagtactgacagactagtgctgatgttcccttagggtccaa

SEQ ID NO: 954756 - DNA, 528 bp, Homo sapiens
aggtgaaatatagattcccccaacctggccacagtgtctccacgcggctaatggaaaagccttcggagtgggcccatgttgcatatgyataagctttcctttggccgtggatgggcattgggtgctcttactcccatttcaactgtgtctctgtgcttctttgggtttccttcaagattaacaggccatctgggctaaacagctatttgaagtgacttggccaggccctgggctggcctcttgggaactctgggacttgagtgttgaacccgagccccgccctcctgctcacccactcagcatggcagcagcagcttttatgtatcagcagcgacctagaactaggccaagcatccccttcacctcctgcaggatgaaggtcaggctcctcacacggtgtcggaggtcctgcttcccctgcccctgggccctctgttacacccatcatcccgtgtccagacttaccacagctcctgagcaggcctggtgttctcctgcctgccaagccttcgcacctgctgcttcttc

SEQ ID NO: 954757 - DNA, 550 bp, Homo sapiens
aatgagttgtgctgaaagacctgcacctgcatcagggatgagaaaggcttagagcccaacttcagatgcaactgctggggaagagctagtgccctgctctggcctctcctgggcctggcaagtgtgccctgagaagcaactgcttgggagtcacagacctcaaccccaagcaagaaaggaaaaggtctataagaaaatcatggtggtcctgagaggagatggattcctgctgtcattacactgccctctatgcctgagatctcatcacaaatccagccatctcttttttctcaaaaaaatcagaggtaactctgtccccaaaacccataactgacaccactcactagaggcccagtgaacagctttctgcatcacagccataacaccctgtgttactttggtagactttcccttggatacctggtaggtgctctgagtgagcttgaagactkattatatctcataccatccctgacaatttggaggctggaaaagatattttcttctctactggaaaacaaaggcaggaggcaccaaggatctccagaga

SEQ ID NO: 954758 - DNA, 567 bp, Homo sapiens
caaaaccagcaagtttttattatgratttcaaaagggaggcagtgtacgaatagggtgtgggtcacagagatcacatgcatcacaaggcaataaaatatcacaaggcaaatggggacagagcaagatcacaggaccagggtgaaattaacattgctaatgaagttttatgccccactgggcactcattgccattgataacatcttatcaggagacagggtttgagagcggacaaccggtctgactaaaatttactaggcaggaatttcctcaccctaataggcctggggacactacaggagactggggcttatttcatcccttatctacagccgtgtaagacagacattgccagagcggccattttagagacctccccctaggaatgcattctccttctcagggttattccttgctgagaaaaagaattcagcgatatttctcctattcacttttgtaagaagagaaatatgactctgttccacccagctcccaggcagtcagacctaatggttatctctcttgttccctgaacatcgctgttatcctgttcttttttcaaagtgcc

SEQ ID NO: 954759 - DNA, 719 bp, Homo sapiens
catttcttaaaagaagacatacaaatggctgacaaatatatgaaaagatactcaacaccactattcatcagagaaatatatatcacaatcataatgcagtatcatatcaccccagttaagatgactattaccaaatataacaaaagtagcaaatgctggcaaggatgaagagaaaagggaattcttttacactgttggtagggaaagcaaatgttcttaaatgagagatagactgcaatacaaaaatacaaaagtggggcttgtcaaggccacactttcaacaacagacagatcacccagaaagaaaatcagtaaggaaatactggacttcaactatactttagaccaaaaggacctaacaaacatatacagaacgtttcatccaagagcagtagaatagacattcttctcaagtgcacacagatcattttcctatataaaacatgttagcccatagaacaagtcttatcaaatttataagactgaaataatataaaatatctattctcatcacaatgacagtaaactagaaatcaataacagaggaattttgaataattcataattgcatggaaattaaataatatgmccttaaataactaatgagtcaatgaaaaaattagaagggaaattttaaaatatcttgaaacaaggaaaaatggacacacgataaaataaaacttatgacatgcagaaaatacaattctaagagaagttta

SEQ ID NO: 954760 - DNA, 648 bp, Homo sapiens
tttgcaagtattttggaaatggtgtgttctcagccacgctgccagaggaggtatgttttctttttccacgtgtgtgggatgttgtttttattcatgaactattgagaatgagtggtttttatgacttgtagagggattttcacatccctcttattactggactctgaagacagaagggacagcacaaatgccctcagacatgaataacagtttcaaggagaaacatgggcacttctggttgttgttgacatgccatcaggggtcccaaaggattggccaggaaatcaggtttcatcatatgtcctttggaagctccttggacagttcacatgctcttccaatatatgacatgtcttccaagtatactttccaagaagagtttatcctttggagaagaggcagcttcacctgtcctgtttcatttgccctcctgccacccctgtcttggcattgattcagaagagccgtcttcctagcgttggtaacatcggctgccatttgccagatgccttctgtgtgcctgctggtgctgtgcttctcattyagtccttgtggtctcatgaagagctaggtattattatcaccattcctcagacaagaaaacagaggcttttggcagttagcaaagttgcttaagggcaagcagca

SEQ ID NO: 954761 - DNA, 616 bp, Homo sapiens
aaacccaaaccacagtgcgacaaccacctcacatccattggcgtgattaccatcaaacaacaaagcaatataaaacaaaacaaaaaacaacagaaaataacaagtgttgaagaggttgtgaaaatgttggaacacataaactgttgttaggattgtaaaatggcacagtcactatggaaaccacaaaagacgttcctcaacaaagtaattatggtctagcaatttcacttctgggtatgtgcccaaaagaatatatcttgaggagatatttttacatccatattcatggtagcattattcactatggacaaaaggtggaagcaccccaaatgttcattgacagatgaatgggtaaacaaatgtgacatatacatacagtgcaatattattcagacttaaatagaaaggtttgctgtgtgttacaacatggatgaaattttaaaacattatattaagtgaaataagatattcacaaaaagacaaatactgtattattccacttatatgatgtwcttagagtagtcaaattcactgagaaagtagaatggtgtttgccaggtacttggtgaaaggggaatgaagagtcattctataatggatacagagttttagctat

SEQ ID NO: 954762 - DNA, 763 bp, Homo sapiens
ctggtgggggactagtggattcccagttccacatgaggcctccagtcgtccggcgccccccaccaagccaagcacctcggccagttccctaatcaaacaggaagggcccagtctcttcaccagtctgcaaatcatccttgagctgccgtgtccccgcggggctgggttgagcaacagtattttgccccctcgggtattttccggaattgctgctgggggtacaattgcctccacagagccaacagcattccattgggtttcctctcagtttcctcccgagcaaccccggctgcaagtaaatccatccacatctgcatgcgggtcacccgctggggtccctttttatttcgtggggtggttacctgtgaagggggcaccttccccttctttatggcgcggattccccaatcccgctgatggccttctgcctcctcaagggctgccatagcagtagtcacttcatgtatgtggcaccccacatatggagtaagaacagcagctagagagccaaaagcactcagaggctgccagtcagcacaagatccctcacgtgggagataaaatgttcatcatctggcctctagggattcagatccaacatagcctgccgcatgcccatctccaggagtacctgtaccaaatcagctatgattgycattgactcataatttctggtatctctccagcatccttcctaacagtccatatggctgccatcagccactcaattaacatgtgatcaccttgcccttgtgccaaccat

SEQ ID NO: 954763 - DNA, 763 bp, Homo sapiens
ctggtgggggactagtggattcccagttccacatgaggcctccagtcgtccggcgccccccaccaagccaagcacctcggccagttccctaatcaaacaggaagggcccagtctcttcaccagtctgcaaatcatccttgagctgccgtgtccccgcggggctgggttgagcaacagtattttgccccctcgggtattttccggaattgctgctgggggtacaattgcctccacagagccaacagcattccattgggtttcctctcagtttcctcccgagcaaccccggctgcaagtaaatccatccacatctgcatgcgggtcacccgctggggtccctttttatttcgtggggtggttacctgtgaagggggcaccttccccttctttatggcgcggattccccaatcccgctgatggccttctgcctcctcaagggctgccatagcagtagtcacttcatgtatgtggcaccccacatatggagtaagaacagcagctagagagccaaaagcactcagaggctgccagtcagcacaagatccctcacgtgggagataaaatgttcatcatctggcctctagggattcagatccaacatagcctgccgcatgcccatctccaggagtacctgtaccaaatcagctatgattgccattgactcataatttctggtatctctccagcatccttcctaacagtccatatggctgccatcagccactcrattaacatgtgatcaccttgcccttgtgccaaccat

SEQ ID NO: 954764 - DNA, 604 bp, Homo sapiens
tagctatagattcacagtctgagcttctcccaccaccctctcagtctttgctgatcaaattcaggggaaggttaactagcctgtcttgaaccatatgtctatctctgggataatctctgcacctgagaaaggctggcttctcagagcagatgattttgttgttgttgttgttaaactttaaaagatgaatcagatgttacaatgactcatttctgggcaggcaaactcagggaactaggaaattgatgatggagtcagagattgaggtgctgggtgtggatgtgatgaagtacagacagagaggccacatctttccatgtgtgaatttatgaaagatctcagacacttaggtaaggatcctgaactattctctgcagttgatgagaaaccaccaacattttgtgaccagtcatgtcaacatttatgcttatacatattaaataggttttaatggtggtttaggccctattcccttgggaaccccatgcataggatgggatgagaagggatgggccttaagaatggaagcctggagaytctggcatgggatggatggtggtaatggagtctttgaacctggagcatggagtgggaaggaagaagt

SEQ ID NO: 954765 - DNA, 560 bp, Homo sapiens
gagggaagggcaggttatcgtctttgctttttckcaggcttcactgctgataccttcagccactggaaaatacgaggcaattggcgactggagtggacccccagcataccacggcagccccacagaaaagtggccagactgttatgtgggtgcccatttccatatctcctcgatgggcaggtcttcctggcctgggtctccagccagccccccacttgagctttcaagccagtagcaactcagcaactccctggacagagcttccaggagcaacagaaatcctctctgccactgcctctgcagtggaactgcccttgctaccctcagaatatcaagggagcaaagaccctaagtaccatattgacacctccaacaagctgcagttgacacaaggaacaagtcagtccatcttccacaggtacaacacaccccttactgctcatcaccagacaaggaaccctggcttgggcccacaacacagaccctccatcctggggtgattacattaagtaactgctaacttacacctctctggggtggagcccccaggagacaaggaa

SEQ ID NO: 954766 - DNA, 560 bp, Homo sapiens
gagggaagggcaggttatcgtctttgctttttcgcaggcttcactgctgataccttcagccactggaaaatacgaggcaattggcgactggagtggacccccagcataccacggcagccccacagaaaagtggccagactgttatgtgggtgcccatttccatatctcctcgatgggcaggtcttcctggcctgggtctccagccagccccccacttgagctttcaagccagtagcaactcagcaactccctggacagagcttccaggagcaacagaaatcctctctgccactgcctctgcagtggaactgcccttgctaccctcagaatatcaagggagcaaagaccctaagtaccatattgacacctccaacaagctgcagttgacacaaggaacaagtcagtccatcttccacaggtacaacacaccccttactgctcatcaccagacaaggaaccstggcttgggcccacaacacagaccctccatcctggggtgattacattaagtaactgctaacttacacctctctggggtggagcccccaggagacaaggaa

SEQ ID NO: 954767 - DNA, 627 bp, Homo sapiens
gctttaactaagaagtgaagaactgacacctgaacagagcacagatagccacacagacaggagctgcrtttcaaacaaggtcattgctgttgtccccactccaaattaagtgtctctgcttcacccttccttaccaaagttctgcttgatcatccttttgttttgttttgttttgttttttgtacttcacttctttgagaaaatataaaccaaaattttacatgaaacaggaattcagcttttgacaatgttagccattgaaacaacaacaacaaaagtttctattatttctcatctctgtgctatccagtgcagtagccaatagccacaggtgactattaaaattaaaattaattcaaataaaacaaaatttaacattagctggtcagttgtactagccacatctcagttactcaatagccacatgtggctagtggctactgaactaggcagcatgaatgtagaacattttcatcatcatagctttctaggtcatggaaaaattgcagaactcaatttccagtgtgcacatttatttgcatgcctaggagctttctgaccctgtgttgagctgcctaaccagcttcctgattgacctcctgatatttctgcaaatgtggactaaga

SEQ ID NO: 954768 - DNA, 603 bp, Homo sapiens
agtgagataaatgatgaaggtggttacactaaacaacagattttcaatagagacaaaacagccttaaattggaagaagattccatctagaaatttcayagctagagagaggtcaatatctggcttcaaagcttcaaaggaaagactgactctcttggtaaaggctgatgaagctggaacttgaggttgaagccaatgctcatataccattccaaaaatcctaaacccttaaaaatgacgataaatctactctgcctttgctacataaatggaacaacaaagcctggaggaaagcacatctgtttacaccatgatttgctgaatattttaagcccgctgttgggacctactggacaaaaacaaaaattcctttcaaaatattacaggccatgtacctgtacactaagagctctgctgcagttgtacaaggagattaatgttgtttttatgcctgctaacacaacatccattctgcagctcatggatcaaagagtaattttgacttcatatcttattggaaaaacacattttctaaggctttagctgtcatcaaaagtgattcctctgattggatctgggcagagtcaactgaaaagcttctgaa

SEQ ID NO: 954769 - DNA, 619 bp, Homo sapiens
attatcatcaatgataacttacttgcatattttaaaataaagaatgtaattggattgtttgtaactcaaagaataaatgcttgaggggatggataccccattctccataatgtgctgatttcatattgcatatctgtatcaaaatatctcatgtaccccaaaaatatatatactatgtacccacaacagtttaaaaaataatttaaaaaacttatttattatttttttttgagatggaatttcgctcttgttgcccaggctggagtgcaatggtgcgatcttggctcactgcaacctctgtctcctcggtttaagcaattctcctgcctcagcctcccgagtagcttagctgcctggctaatttttttgtatttttactagagacacggtttcaccatgttggccaagctggtctcgacctcctgacctcaggtgatccacctgccttggcctcccagagtgctgggattacaggcatgggccaccacrgccggcataaaaaactttttaaacaagtgatttcttaccttggtattgaaggtacggcaggatttcatgaattaaacctggaagaagaggaaccccagttgttccagtcatacaggcaaggccaacacaa

SEQ ID NO: 954770 - DNA, 593 bp, Homo sapiens; identical to SEQ ID NO: 953413

SEQ ID NO: 954771 - DNA, 622 bp, Homo sapiens
tggctagaatgaagcaggcagaagttggaaagagcagacctgctgagtcttctggccctcaccgttctcccgtgctggattcttctggccytcaaacatcagactccacgttcttcagcttttggactcatggacttacaccagtggtgtgccagggcctcttgagcctttggtcacagactgaaggctacactgtcagcttctctaattttgaggttttgggactcagactgatccaccactggcttccttgctcctcaacttgcagatggcttctcacgggacttgactttatgatcatgtgagtcaattttccttaataaactccctttcatatatacacatattgtattagttctgtccctctagaaaatcctgactaatacattagccaagcatggtggcatgtgactgtagtcccagttgctcaggagggtgaggtgggaagattgcttaagcctgggtggcagaggctgcagtgaactgaaaccaaccactgccctccagcctgggtgacagagctcaaaaaaaaaaaaaaaaaagaaatgtaaagtgctagcccttccacactgtgtacgtgtcaaaccttttccagttggtattttcacatcttagtattgca

SEQ ID NO: 954772 - DNA, 622 bp, Homo sapiens
tggctagaatgaagcaggcagaagttggaaagagcagacctgctgagtcttctggccctcaccgttctcccgtgctggattcttctggccctcaaacatcagactccacrttcttcagcttttggactcatggacttacaccagtggtgtgccagggcctcttgagcctttggtcacagactgaaggctacactgtcagcttctctaattttgaggttttgggactcagactgatccaccactggcttccttgctcctcaacttgcagatggcttctcacgggacttgactttatgatcatgtgagtcaattttccttaataaactccctttcatatatacacatattgtattagttctgtccctctagaaaatcctgactaatacattagccaagcatggtggcatgtgactgtagtcccagttgctcaggagggtgaggtgggaagattgcttaagcctgggtggcagaggctgcagtgaactgaaaccaaccactgccctccagcctgggtgacagagctcaaaaaaaaaaaaaaaaaagaaatgtaaagtgctagcccttccacactgtgtacgtgtcaaaccttttccagttggtattttcacatcttagtattgca

SEQ ID NO: 954773 - DNA, 733 bp, Homo sapiens
gcagaatactaaccacagagttttcaaagccatatcaaacataatcaatatgtttgtgaaatcaaagcacaaacattcaaatttctgatatttaatatacaaagcgtatctatacaatttataatttgataaattttacatgcttattctttctctgaatgtattacataattacatgagatatattaactcatatgctacaatatttcatttaagaatagtgtcctcttcaaaatcgatttgggaatacttacagcttgatttagctcgacggaataaatgaaaatcttagaagtttaattgttgctagatccagtgagaaaaactatccggtatggtacctttgcctgctattattcttctctatttatctttattagtattctagagttattaagaatagattataattgaaatacgagaagtcctgggaaaacttcatgggcagccacctaaccactttttttatattctaccgaaactggctttaaggaagaacgatcagagtacatactttaattacaagcagaagaacagagtaactttaactttatgatattcagtatttttttattctaatctttatgtgaccctgaaaatttgaattcaggctgggtgtggtggctcatgcctgtaatcccagcactttaggaagcccaggtgggtggatcccctgaggtcaggaattcaagrccaacctggtcaacatggcgaaaccctgtctcaattaaaa

SEQ ID NO: 954774 - DNA, 557 bp, Homo sapiens
gatttaaaatttgatgactttcttcctgaaaatcatatttatgtgtcctgtcaggccttgagcccaagctaagccatcatatcccctgtgacctgcacatacacatccagatggccggttcctgccttaactgatgacattccaccacaaaagaagtgaaaatggcctgttcctgccttaactgatgacattatcttgtgaaattccttctcctggctcatcctggctcaaaagctcccctactgagcaccttgtgacctcccactcctgccagccagagaacaaccccctttgactaattttcctttacctacccaaatcctataaaacggcaccacccctatctcccttcactgactctcttttcagactcagcccgcctgcatccaggtgaaataaacagccttgttgctcacacaaatcctgtttggtggtctcttcacacggacgcgagtgaaatttggtgccgtgactsggatcaggggacctcccttgggagatcaatcccctgtcctactctttgctccatgagaaagatccacctacaacctcaggtc

SEQ ID NO: 954775 - DNA, 599 bp, Homo sapiens
ctgttctcatgctgctaataaagacatatccaagactgggtagttataaaggaaagaggtttaattgactcacagttctacatagctgsggaggcctcaggaaacttacaatcctggtggaagggaaagcaaacacatccttcatgtggcagcagcaaggagaagtgcagagcaaaaagggaaaagccatcagatctcctgagaactcactatcatgagaacaggacggggagaaccaccccccatgaatcaattatctctacctggcccctgccacaacacatggggattatgggaactataattcaagatgagattagggtggacacagcaaaaccatatcactagccttcataggcttattaggacaaataaaaaatctgaaagtttagctttattcattttgtcagaactataatttggctccaactgtcttcatataagctaataaatttctaatactatattttactcattactaatttttttaatgaaaactgtcatttcttcacctgtatgtttttacaatttttaaattatatagaaagatagatgatagatagatagatagacagatagataatagatggatagacaga

SEQ ID NO: 954776 - DNA, 639 bp, Homo sapiens
cagggcacaaagtccctaggctgcacacagcaggggcaccctgggcccggcccatgaaaccttttttttttccaagcccctgggcctgtgatgataagggctgtctcaaaagtctctgacatgccctggagacatttctcccactgtcctggtgattaacatttggcttcttgtaacttatgcaaatgtctgcaactagattgaatttctcctcagaaaatgggtttttcttttctatctcattgtcaggctgcaaattttctgaacttttatgctctgcttctcttttaaaactgaatacttttaacagcacccaagtcacctcttggatgttttgctgcttagaaatttcttccgccagataccctaaatcatttctctcaagtttaaagttccacaaaactctagggcaggggcaaaatgccaccagtctctttgctaaaacatagcaagagtcacctttattccagtttccaataagttccaaaactgtactcctccataataayaaatctcagttaatggttacttcattcttctggctgcttaagccaaaaaccttggagttatcctttactcaggtttttctcaaaccaaatattcaatcttctaacatattatgtcaactctggttcaaaa

SEQ ID NO: 954777 - DNA, 625 bp, Homo sapiens
ttgttgttgatatatagcagtgttactaatttgtgtacgttgaytgtgtaacctgagactttattaaatttgtttttcaaatctaagaatcttttggaggagtctttagaattttctagatgtactacactcatatcgtctataaatggcagtagtttgactttctctttttcaatttggatgccccatatttttttcttgtttaattgctctttttagtacttccagaactatgttgaatagaaatggtaaaagtgggtatttttgtcttttctggtctcagagaccagaatttctcagagaaaatgctttcaacttttcccattcagtatgatgttgactgtgggtttgtcatatatggattttattattttaagataggttctttctatgtctagtttgtcgagagtttttttttttcataaaggagagctaaaatttgtcagtcacttctgcatccattgagatgatcatatggtttttgtttttaattctgatgatgtgatgtatcacattttttaacttgcatatattaaaccacctctgcatcccttggacataacccactagatgattttgaattatctttttgatgtactgctggattcagttagctaatattttg

SEQ ID NO: 954778 - DNA, 653 bp, Homo sapiens
atgaacctgccactaggcaactgactgatgaccctggggaatggtgtcatatcaggggctcagtgttggtctctgttgctggcagactgggcactcagagatagccttggccaggtcagccttggtgagtagaagtccacgttgctgagcccatgcataacctctattcttgtcaccatggctactttgctcatgaaacaattgggtgatgacaggtgtggctggagaaagaggcctactagtatccacagaacaggttatcttgtccactttattaaaatccttttttgctaaccctttggtgagcattcacatggggcacaaatatcttcaccctttttgcccattcagtgtctatccacatacttcatctccaaatttctttgtcaccaattttccagttatattgaactccctgaccatccagccaaaccactggccacggcctatgaattggcatataattgaatatctggctatttttccttctaagcaaagtcaacagggggactgctcaaagttgtgtccaccaggaggatttcccttcaccactgtccttcaaggtagcccagaggtgagatgtagtgctgcagctatccactttagggtggtacctgcatatcatacagaacmctctgtaaaccaggcctaag

SEQ ID NO: 954779 - DNA, 614 bp, Homo sapiens
gatcacagggaagtccccatgaagccaccgatgcaggctggaagagagaaggcaggtagcagaagtggggactayggaaatttggcctacttcttcatgtaacttccttgtgccttcagggcctctcaggcccaatcatgtgtataccacttccatctgatgacagagtgttgctgtgcatatccaactttgtgcgttggtggctcagataacatccagttcatgatgggaagctcaggttgcacggtaacttggtgactcattaagtatcagtctctactaaggcccagtagcaggccaagagctgtttctcaaaaagagactagttatttgttggtaatggcacggctttgctctaaaatcctaaaccaagattcacctatagggacctgccagaagcttcaaacagcatccctatctgccactgccactgaaacaccactggatctgctggatcatatgacccaagtggcagagcagcttgcacagcagcctggacctgttgcagactcttttcttgttctgggccctactcaaaactagcagctttttgagtcaattggtaaacaggctggtataacataatgaaattggaaaatgttgcctccaaaacc

SEQ ID NO: 954780 - DNA, 584 bp, Homo sapiens
gatcctcccacttcagcttcccaagtatgtaggactacaggcgcaagccaccatgcctggctaatttttttttgagacagagtctcgcactatcgtccaggctgsagtgcagtggcttgatctcagctcactgcaagctccgcctccagggttaacgccattctcctgcctcagtctccaaatagctgggattacaggtgtgtgccaccaggcccggctaatttttgtattttcagtagagatggggtttcaccatgttggccaggctggtcttgaacccttgacctcaggtaatctgccgcctcggcctcccaaagtacaggattacaggcgtgggccattgcactcggccagttaaaaccttttgttttgcaaattttttattcatgataaaggatacatgtaatatatatgtacatttatatttgaatatatgaatataaataccatggcctgatatgaatgtgatttttagggatagatatgtgtcacagtttgtatttccatcatttaaggttcctttcctaggtcttttaataggactcaattactgacaattaggagtaaaatcagagtagactgtg

SEQ ID NO: 954781 - DNA, 665 bp, Homo sapiens
atttacattcccaccagcagtgtgtaagcattctcttgtctccgcagycttgcaagcatctgttatttttttttttactttttattaatagccagtctgactgatgcaagatggtatctcattgtggttttgatctacatttcactgatgattagtgatgtggagcattgtttcatatatttgttggccacttgtatacctcattttaagaagtgtctgtttatgtcctttgcccactttttaatagggttatttattttttgtttgttgaattaaattctttacatattctggatattagacctttgtaggatgcatagtctatgaatattttctcccattctgtaggttgtctgtttattctgttgatagtttattttgctgtgcagaagttctttagtttcattatgtctcacttgtcaatttttgtttttgtggcaattgcttttgaaaacttagtcataaactctttgccaaggcttatgtccacaagagtatttccttgattttcttctaccacgtttatagttttaggtcttacatctaagtctttaatctatcttaagttaatttttgtatatgatgataggcagtggtccagtttcattcttctgcatatggctagctagttatcccagcaccattgattgaatagacagtccttt

SEQ ID NO: 954782 - DNA, 574 bp, Homo sapiens
cctcggcaccgggtggcacagcccaggagtgaaactgttcctcacctcgacaagccrgggggacatacaatccacagagcccccagtttatttggcctccccgtaggtttctgctgcagcctgagtgaggtttacatttataaggagaccctcattctcaatcttataaggtcctcttggaatattccagacaggaatggagctgacaagatgcttggaagggtgcagggctgcacgaagccacctgtccatttccccaccctgagacagggtcgcagtggatgagcacccgctttagggacattggaggtgggaagcccattgtcactcctgtgttgacatcacacgctagaagggagtctgtttcctctccctgaatccctgacactgcaaggaagttatttcctcgaactcttgggaagtaggggaactcctggccaccagcctttgtttaacagcccttcctgttgtcaaagagtgatgcccccaccgccccctggctctgctgcaaagcaggtgatttaactttgagtcatctgggtgacttctcagaagccacagaggctcaccatgg

SEQ ID NO: 954783 - DNA, 574 bp, Homo sapiens
cctcggcaccgggtggcacagcccaggagtgaaactgttcctcacctcgacaagccggggggacatacaatccacagagyccccagtttatttggcctccccgtaggtttctgctgcagcctgagtgaggtttacatttataaggagaccctcattctcaatcttataaggtcctcttggaatattccagacaggaatggagctgacaagatgcttggaagggtgcagggctgcacgaagccacctgtccatttccccaccctgagacagggtcgcagtggatgagcacccgctttagggacattggaggtgggaagcccattgtcactcctgtgttgacatcacacgctagaagggagtctgtttcctctccctgaatccctgacactgcaaggaagttatttcctcgaactcttgggaagtaggggaactcctggccaccagcctttgtttaacagcccttcctgttgtcaaagagtgatgcccccaccgccccctggctctgctgcaaagcaggtgatttaactttgagtcatctgggtgacttctcagaagccacagaggctcaccatgg

SEQ ID NO: 954784 - DNA, 769 bp, Homo sapiens
catgaggttgcctgataaaatacaggacacccagttaaagctgaattacagataaacaatgactaattttttagtataagtacatcccaaatattgcaagaaatgtatctgaaatatattgcaaaaaataaaaaattagcactggttatctgaaatttaatttaacaagtcatcctatatttttacagttttactgagttataatttacatactattcaaccctaccatttaaagcgtacaattcaatgctttttaatatattcacgaggttgtgcaaccatcgccacaatcaattttagaacattttcatcagccccaaaggaatccacatccattagtcacacccactccctatgccagccccagccccaggccctgacatccactaatctactttctgtctctagagatcggcctattctggacattttgtataaatgaaagcacacaacatgtggtcttcaggagtggcttctttgatttagcatgttttttcaaggttcatccatgttgtaatatgtatcagtacttcattcctttttattgctaaataatattccactgtatggatacaacagattttatttatccaatcatcagttgatgcacatttgggttgcctccacttttttggctattataataaaactgctgtaaacacttgtgtttaagttttttgtaaacatatgttttcatttmtcttgcatatatatatataggaatacaatttccgggtcacatggaaactctatgtttaacattttgaga

SEQ ID NO: 954785 - DNA, 585 bp, Homo sapiens
gcaatggtgtaccagagaagaacaagaaccccttttccaagacccttcatgtacagacaggctgcctgcctactgggkcagactttccctactgtccctagcaatgcaattgtatctctgaaacttcccattagtggatagatctgggactcaagacctgctgtttagattctttcatctgggtattcttccctttgatgttgtattcctcctcttccctaaaaatgggaattcctgagaaccatactatagggattgttattgctctcctgggtctagccacccagtggggctaccagattccaggctggtgttaggaaatgtctacaagggatccagtaatgtgacctgtcttcaagtctcccatctgtagataccagcaccagctctgatggaggtggcaggggagcaatgtggattctgtgagattccttggttgtagataggcttagtgtgttggctttcttgaatgctggttataattgtagtgaacttgtcatgtggatagactcaagacctctggttagccagggtgctgtatgcagaggtgatagctgaggtcacatgactgttttctccttcctg

SEQ ID NO: 954786 - DNA, 699 bp, Homo sapiens
tgtcccttgtcccctgtggatctggcagcatgaggatgctctctttctttctagtgttgccaaagccagattcatgaataaagctcttacgaatatttggtggccacataggcaagtctactggggagatgggaaagaaagggaggagtgtatggcaccctaagaaatttggagatgacctgggccctgacagcttcagaagcctccttattccctaacccttaggggtcttcaaaagtggtgagccccccgcccagtccaaccatatctcaccaaattaaatatcaaaccaagttctttttttttttttttttttttttgagacagagtcttgctctgtcacccaggctgcagtaccgtggcacgatctcggctcactgcaagctccgcctcccgggttcacgccattctcctgccttagcctcctgagtagctgggactacaggcacccaccaccacgcctggctaattttttgtatttttagtagagatggggtttcactgtgttagccaggatggtctctatctcctgacctcgtgatctgcctgcctcggcctcccaaagtgctgggattacaggcgtgagccamcgtgcccagcctcaaaccaagttcttagagtgaatacagatttacccacttaaatgctagaggcatacattcagaaaaaaatattattagactgcagtttggaccccaa

SEQ ID NO: 954787 - DNA, 787 bp, Homo sapiens
catatgtgctctgcccacctcactgacatgccattttccgtctttctccctctcctgaagcatccctttttttgagacacaacaatactgaaattaaatcaataaataaccctacagtggtctttaagtattcatgtgaaagaaatggtctcatatctcttactttaaatcaaaatctagaaatgattaaacttagtgatgaaggcatatcaaaagctaagacaggctgaaagctaggccttttgtgcatttagccgagttgtaaatgcataggaaaagttcttgaaggaaatgaaaagtgctacttcagcgaacaaatgataagaaagtgaaactaccttactggtggtgtggagaaaatttgagtagatagaagatctggagagatgattaaactagccacaacattgccttaagcgaaagcctaaatcaaactaagtccttagctctcttcaattccagggaggcttagaggggtgggaaagctgcagaagaaacactggaagctagcagaggttggctactgagatttaaagaaagaagcaatctttataacatacaaatgcatggtgaagcagcaagtgttgatggagaaactgcagcaggttatctagaagctccagctaatgtcaatgatgaaggtggctgccctaaacaatatattttcaawgtacagaagatatccttctattaaaagaaaatgccatccaggattttcatagctagagaggagaagtcaatgcctagcctcaatgcttcaaaaaacaagctgattcttgttaagggt

SEQ ID NO: 954788 - DNA, 626 bp, Homo sapiens
ccatgccccagagggcatcctctttcttctgagtctcctgtgctcatagtaaaaaaaaaaaaaaaaaaaaaagagagagagagagagagagactacagttctgaaatgccccatctccaataaattttaccctatgctcctatctctgcccctgccagatgcctgccaaagtgaagggcagggatttagccagccactgtccactccctgcccactttgtggctcaactcagaggcatccttcaagttccaccatatcatattcatgtactatcttctttgctgtaatttatggacacaattggagcacttccgagctccaattaagatggtgaatgtatctcattttataatatttagcaagacttcaccactggctgaccttccaaatgcgaagattgggctatattttaattctcacttcgtggtgatagctttgtgtctgagttatgagtgagagaatataagatgctattgttttcctcttttctaaccacaaagggcaattgcattggaagtggaaatttcatagmaaggaaaatgaagacacccactcctgtagcattacgggaaatagttcactgactccgcagttcagatgctgtctttgatcattacaacatacct

SEQ ID NO: 954789 - DNA, 576 bp, Homo sapiens
atcactgcaaaaagaacaggggaaattctggtcacgatagtgcggagtcacctgcctctcacatgcttagaaatcagtcatttcttccgatgttccctctcctgtcttctgagacatagaagggtctgctagttacaactccaataaggtaagtaaatccatatagggacagtggcaaagaccagacactgagccaaggtacgcggctcacatccccacagtgtgaccttgggcaagttacttaacctctcttaaaattgtaccagctcctaggacggttgtgagggtaagtatacaataatgctagttttgtttttcctcttggaatttaaaatcatcttctaatttttaaggaagccatttggaaacctctgggctcctataactgctttaaatttgtagtgttgaaagcaatataaccaatagtttccctaggattagaagaaacgtaagagttactcatttgggagtcaaacatcccaggttatggatgaagaggaagtaactgatgcattttgtcctgcagtgaatttcccaggctatgctgagaaggraagacgcggcccctggcatgca

SEQ ID NO: 954790 - DNA, 709 bp, Homo sapiens
gagcgcagtttaactacaaaggagccctggctgcccgccccgcccagacgcactgacctgttgttctctgtggctgctgatggcccrtccccaaccactggtgactcttccctggggccccaagctcagcccctaaccccctgttgctggaagtcagggaccccaaacagagagaccggctgaaaccatggcagaagaacgtggattgtgaagattttatggacatttattagttccccaaattaatacttttgtaatttcttatgcctgtctttactgcaatctctaaacataaattgtaaagatttcatagacacttatcacttccccagtcaatacccttgtgatttcctatgcctgtctttactttaatctcttaatcctgtcagttgaggagggtgtatatcattccaggaccctgtaataattgtgttaactacaaaaattgtacagcatgtgtgtttgagcagtatgaaatgtgggcaccttgaaaaaagaacaggataacagcaattgttcagggaataagagagataaccttaaactctaaccgccggtgagccaggaagaacagagccatatttctcttctttcaaaagcaaatgggagaaatatcgctgaattctttttctcagcatgggatatccctgagaaagagaatgggcacctaggggtaggtctctgaactggcccccccggggcgtacctg

SEQ ID NO: 954791 - DNA, 592 bp, Homo sapiens
cctgcactcaccagggcccaggaagcccccctgccccgacaggctgagaagtgcctgctcccactgcttggtctstccccactcccagcacctgctccagtttcagatcaaagttgtggccgagctgggacactgtcacaacctggctgggtgtgtgtttgctcagggcagtgctgacatgccagcaccctgctgcctcggcacccccagactttgggtgctgacaagcatgagagggaggccaacgcggggctgagggaagcacagcgcaggccttgcagccgcccctcggcaggaacactctggatgccatgcacactgtggatggcaggataatggtggccggaggcagacaagctcctgggaagaaaggggagggtccctggtgaaactccaccttcagcttacagaggacttaaggcctggggcccaggctgtcagttccacagaccggagtgagaacttacggtgcttttccagggctcacccgtgactgcccatgcaccaatcagcacacactttcctctgaagcccataaaaacccccggactcagccagacttgggcagaagacaggatgacctgcttatgga

SEQ ID NO: 954792 - DNA, 532 bp, Homo sapiens
agaccggagtgagaacttacggtgcttttccagggctcacccrtgactgcccatgcaccaatcagcacacactttcctctgaagcccataaaaacccccggactcagccagacttgggcagaagacaggatgacctgcttatggagaatagctgcccactgtgggtctctctgagctgttctgtcactcaatgaagcacctcttcacattgctcaccttccacttgtccacgcacctcattcttcctggacatgggagaagaactcaggacctgctgaatggcaggtctgaaagagctgtaacacaaacagggctgaaacacacccattgtttgccacattgcaggcaatgaggagaggaggagagaaggagagaagagctgcagcccttcaaggagcccagacctaggagctccctgagccagggcagtgacgccccctttggggccctgcggttcctggtgtttccaagcttctgggcactaccgtattccctggtttcagccatggaagctgtgtgtggtatgcctggt

SEQ ID NO: 954793 - DNA, 532 bp, Homo sapiens
agaccggagtgagaacttacggtgcttttccagggctcacccgtgactgcccatgcaccaatcagcacacactttcctctgaagcccataaaaacccccggactcagccagacttgggcagaagacaggatgacctgcttatggagaatagctgcccactgtgggtctctctgagctgttctgtcactcaatgaagcacctcttcacattgctcaccttccacttgtccacgcacctcattcttcctggacatgggagaagaactcaggacctgctgaatggcaggtctgaaagagctgtaacacaaacagggctgaaacacacccattgtttgccacattgcaggcaatgaggagaggaggagagaaggagagaagagctgcagcccttcaaggagcccagacctaggagctccctgagccagggcagtgaygccccctttggggccctgcggttcctggtgtttccaagcttctgggcactaccgtattccctggtttcagccatggaagctgtgtgtggtatgcctggt

SEQ ID NO: 954794 - DNA, 593 bp, Homo sapiens
cacactgtgtatttccattccaattctgggagtgctctgaggcctctgggggagaaggacccatgaaatattcaaaacataagtgaataaaatatctaggtgctagatakgggccaggaagagccctcggccctgcaaagtgtgtgtgatggtgagaagctaccggaagagatggtccctgtgcttggttcattccttggacatttatcaagctgacgaatgtagcagaggtgcttcagtcggctgtaattccacgggtggagtgctggctggagagttacctggggctgtcacactgcatgggctccgggacactgtggctgcccttatgtggtgtccccggagggccctgcaggtgtcacaccgctgctccacactgccacctgctgtcagcatctgtgcaacgtatccaggtctctgggggctagaatgaaaaacatgcatctcgtaaccaatgaaatcgggcttgtcctgaagacctcgtgcattcatccattctcacactgctataaagacatacctaagactgggcacttcatgaagaaaagaggtttaattggctcacggttctgcaggctttacaggaagcatag

SEQ ID NO: 954795 - DNA, 678 bp, Homo sapiens
tgtactgaatcaattggcctctgtttagtactattaattagacaagaaaaaagggagttgtctttgtgtaccactgggggtttgcagtttttagataataagtttattttaagtaactatgattttcattttctttcagtgttcaggtagccacaacttgaccatggggaccccttgaactggcacgacctcccgtccgcacccaagtccccaccagcctgtccctctgatggttctgggctgggtgtggcagggaaagggcagaagtgagactttgacctggtgggtgcacacgcctaggtgtaaatctagctccaacatcttacatgagaatgaattgaattcagattctttaatggctcaccctggagttttatccctcctggtaataatttcatgaccaacacaattctttgtttagctgagtattttgattctggtgagcatcatttcatgtgtgtggtgttgtcaacagccacaggtgagtctaaaataatagcacagggtcttgtgacggtgctgggaacctctccgctcatactggcccgcatgtcttyggacgggagtcgcagcgcaagcttgcaggtggtcattgctgggagtgttaaggcaatacaggtctctgagaagagagaaaaaggtgtctttatattcagaatagtcagggaacagcgctgg

SEQ ID NO: 954796 - DNA, 606 bp, Homo sapiens
aaaactgagatccagtcatttgcaacaacatggatggaactgaaggtcactgtattaagtgaaatatgccaggcacagagagataaatgtcacatattctcacttatttgtrggatctaaaaatcaaagcaattgaactcatggagatagacagtagaaggatggttaccagaggctaggaagggtagcctctgggggactacagggaaggtggggatggttaacagttacaaaaaaaaaggttagaaagaatgaataagacataatatttcataacacatcagagggatatagtcaataataatttaattgtacatttgaaaataagtaaaagggtatatttggattgtttgtaacacaaaggataaatggttgaaaggatagataccccattttccatgatgtgattattacacattgcatgcctatatcaaaatatctcttatattccataagtatatatgcctagtgtataccaataaaaatataattaaatttaaaaagtaattttattgccaaaagtatattcctaacattttttttttgagcagagtcttgctctgtcactcaggctggagaacagtggcataatcttggctcactgaa

SEQ ID NO: 954797 - DNA, 606 bp, Homo sapiens
aaaactgagatccagtcatttgcaacaacatggatggaactgaaggtcactgtattaagtgaaatatgccaggcacagagagataaatgtcacatattctcacttatttgtgggatctaaaaatcaaagcaattgaactcatggagatagacagtagaaggatggttaccagaggctaggaagggtagcctctgggggactacagggaaggtggggatggttaacagttacaaaaaaaaaggttagaaagaatgaataagacataatatttcataacacatcagagggatatagtcaataataatttaattgtacatttgaaaataagtaaaagggtatatttggattgtttgtaacacaaaggataaatggttgaaaggatagataccccattttccatgatgtgattattacacattgcatgcctatatcaaaatatctcttatattccataagtatatatgcctagtgtataccaataaaaatataattaaatttaaaaagtaattttattgccaaaagtatattcctaacattttttttttgagcagagtcttgctctgtcacycaggctggagaacagtggcataatcttggctcactgaa

SEQ ID NO: 954798 - DNA, 751 bp, Homo sapiens
cagttggcaaggatgcccctgcctgcagtcctaccattgattggcatctgactgcccactggctctccatatgctaagagcacactccaacctgtctcatgatatttgagggagggaaggcactaataattcacatagactccattgatttttgccatcttctcggttcctcttactccctctttttccctagagacgctgttaggaaactagctaacagtccttgaagccaaactgagtttctgaatttattgcattcctaaaatagtgggaaaaaaaatcaagaattgggcctcaagaaaatcacatactagcaaattatgttcctgtctgattgtgttgtagaaaaaaccgggttcttgtcacacaaccaggaaaatttagactcaggcaccttgtagtgtgagtagggcagggtttattgggtgaaaaggaaaaaaagaaagaggaactctcagcaaagtgagagtcctgctggcaggcccccaccttacagattgaatcccaggccaccacacaggaccccaagaggccaggctcctcccccactgtaaacagggtgaactttccctggctccatcctcttcccccagcacgcaggtgggcattacatagagagcatcagtcgggaaagggcgggcttcatccaggaccagcagttyggtttttcagccttcaggctgttttaggcttgaaggtggagttttgctggagacgttgactatctcctgtctctatcaatagtgaagca

SEQ ID NO: 954799 - DNA, 695 bp, Homo sapiens
gctgcattggggggacaccccacctcatccgactcatccgaaccacctggactctccagagccagcagacctggaatgctgagttgacccaaccacagaaatggcggccaccccttccccccggggaatgccctcccgtctcagacagactcagccagttgtgttggctggctggagttccaagccagtggatcttaccttttgaggtgctatggaaatgggtcccacagaacaatgctgcttggctctctggattcagccaccttcctagggaaatgtacagacagacctctggccctgctggggatcctggggccagaatgtgtaaaactcctgagtctctgtgtgtgcctaagtggctgctctgctgagactccacacggctctgcatgtcagacccaaggccctggtggcgtgggctcacaagaggatctcctggtccatgggttgcaaggatccgtgggagaagtgtggtttcccgggcagggtcgcacaatcaatcaccacttcccttggctaggggtgggagttctttagctccatgccactcctagctgggctgtcagcccatcctgctttttgttgttctccatgtgttgarttgtctgcctagtcagtcccagtgtgagaacctggatatttcagtctaaggtgctgaattcactcgctgctttcattcctctctgttagtggca

SEQ ID NO: 954800 - DNA, 583 bp, Homo sapiens
tgagagaactgcgtgagagactctctctgagaaggagtgcttaggaaagcccaaagtcaggatagaagacaaaagcaaggagaacagaggaactggaaacctayggcaactacagccacattacagcacctatttacagcaaacatgaaaaacaaacagccaactcttaacaagaataacataaatcctcacactaaaagacctgtttatctcagttcttaatagtcaacaccacatatccagcgttccacaaaaaaaaatacaagacatgtcaaaaggcaacaaaaaatacaagctaaagaaacaaacacaaaaaaatcacacccagactcagatatagcacagatactggaattctcaaacagaaaatgtaaaataactatgattaatatgttaagaaatagagtagaaaaagtagacaacctataagaacagatgggtaaaataagcaaagagatggaaactctaaaaagcaagcaaacaaaacaatgcaaaaaggaaatggccaaaataaaaaacattgtaacagatacaagaaatgatttgatgggcttcatagtagattcaacacagatgaggaaag

SEQ ID NO: 954801 - DNA, 575 bp, Homo sapiens
tagagcaccatcactgccttgtctgggcagaggcctgccagcctcctcrttgcttttttaccctgtttatagtactttgccgctcagcagcaaatggccttcttaaaataaaaatcagatcataggaccacattatttgaaaatccttacctgatttctctttgcctgcagaacaaaatccaaacttttcccatagcctacagggtcagccctgactgagctcctactgtttagctcctgcatcttttcctgggactgacacatagcaccacaggcttggtggcttaaacaacagaaatgtgtcctcccacagttctgaaagctggaagtctaaaaccaatgagttttcagggccatgctcccactgcaggctcaagggaggacccttacttgcctcttgcagcctccactgttgccagaagatgtggcgtcccttggcttgcacgtgcattgctacaatgtctgccttcctcttcttcctcttgtgcccaatttccctcttctcataaaaacacactcactggattagggctcactttagtccacctcttttaacttcatggcatcagcagata

SEQ ID NO: 954802 - DNA, 473 bp, Homo sapiens
cataaatatgtacaaatatcatgtgcaattaaaataataataataatttattaaatccaaattaaatgtccacggagagtgaaaagaacgtagtgcattcatgaaataaaaaaggagggctgttttaaaaaaaaatagacataagggctaggaaaatgttggaaattttttaatacatgtgaaagcaaaaagaaaaactcaataaagtttggaatgtgatctcagttgaggaaatctccagaagtagaacaaatagacaaagaaatggaaaataggagatgaataagaaaattagggaatcattcactgaaatatcctccttttgccatgtgacctgcaagcacaagcttctccttttgccatgattgtaagcttgcagaggcttccgcagacgcagatgcctgcttatgcttsctgtacagcttgcagaaccatgaaccaattaaatttcttttctttataaattaaaaaag

SEQ ID NO: 954803 - DNA, 473 bp, Homo sapiens
cataaatatgtacaaatatcatgtgcaattaaaataataataataatttattaaatccaaattaaatgtccacggagagtgaaaagaacgtagtgcattcatgaaataaaaaaggagggctgttttaaaaaaaaatagacataagggctaggaaaatgttggaaattttttaatacatgtgaaagcaaaaagaaaaactcaataaagtttggaatgtgatctcagttgaggaaatctccagaagtagaacaaatagacaaagaaatggaaaataggagatgaataagaaaattagggaatcattcactgaaatatcctccttttgccatgtgacctgcaagcacaagcttctccttttgccatgattgtaagcttgcagaggcttccgcagacgcagatgcctgcttatgcttcctgtrcagcttgcagaaccatgaaccaattaaatttcttttctttataaattaaaaaag

SEQ ID NO: 954804 - DNA, 599 bp, Homo sapiens
aagagtgtcacttaaggccaaaaatcagaccaatgaccacagaagagcaaaatggaacaaaatagragaatatttacctggctgtggtttcttcatgaggttacaaagtttttaagagcaagaaacgggtctgagtcagaaagcctgggacagaggacgagagttacaggattggtatgagctcattcaaggaatgattggattgacagatagatgaatggatgaatttgtgtatgtgctcataaacaggcttcctccctctcattgtcatcatcatcacagtcctaccagctcttccctctccccgagctgctcctttctgaggtctgcaattggatggccccctctcatcatttggcttcagctcagatgtttagttgccctcaggaagctgcctcctacatctgtgacctcatcacttgccattgtctaccaccacaccttggctcatgttccacagcactcacctctcttaaggaattcacgtaagtggtatgtgcttgatatttactgtctgtttccccatccctcaatggtatatcaaccacaccaaagcaacaagtatggtgatcctgttgacttctgtttgtccagaaatg

SEQ ID NO: 954805 - DNA, 591 bp, Homo sapiens
agattctcctgttttacgcacatgcgtataacttaattacttaattacaaaagtccttacatgtggtagggggaggcagaagaatggtcaatgtcagagagatgtgatatgagaaagactsaacttgccattgctggctttgaaggtggaggaaagggctattagccaaggaatgaaaacagcctctagaagttggaaaaggcaaggaaacagatccttcaaaaagcaatcccaataaaaagtggacaaaggaagtgaacagacacttctcaaaagaagatagtcatgtggccaataaacatatgaaaaaagctcaacatcactgatcattagagaaatgcaaatcaaaaccacaatgagataccatctcactccaaccagaatggcaactattaaaaagtcaagaaacaacagttgctggcaaggctgtggcaaaataggaacacttttacattgttggtgggaatgtaaattagttcaaccattgtggaatacagtgtagcaattcctcaaagacctagaaccagaaataccatttgaccaagcaacccattactgggtatatatccaaaggaagataaatcattctat

SEQ ID NO: 954806 - DNA, 586 bp, Homo sapiens
caagtagctgggactacaggcctgcaccaccatacctggctaatctttgtattttttgtacagatagggtttcaccatgttgcccaggctggtcttcaactccagagctcaaagccatccccctgccccagcctcccaaagtgctaggattagaggcatgaatcactgtattagtccattttcacactgctataaagaatacctgagactgcgtaatttataaagacaagacatttaattgactcacagttcctcatggctggggaggccttaggaaacttataatcatggcagaagacaaaagggaagcaaggcatgtcttacatggtggcaggagacagccagggccggggaaagccaaacattttaaaatcatcagatcttgtgagaactcattcactagcatgagaacagcatgaggaaaccgcccccataatccaatcacctcccaccaggtccctctctctacatgtggggattacaattcaagatgagatttgggtggtgtattagtttattttcatggtgctaataaagacatacccaaaastggaacaaaaggaggtttagttggacttacagttct

SEQ ID NO: 954807 - DNA, 647 bp, Homo sapiens
ggcaagaccaatggcaccacgattggcttggtggccatatgcaagaaacaaggtgatcagagcaaatcagggttctcttagccagatggaaggacgggcaagggggtgaggggaagggtatcaggtggcaacaccccacatgttggccacccttgccaggggcagcagcctgtgggaggcaggagtgagagggaagtcacatcgtccacgccaaagtcacacccctgcactgcaccccaccccaccaccgggactccctgcactgcctctactacccaccaaactgccaaaccacccccatggctccacccctgcaccagtcatgccactgcccccacccacgactgcattccacagggctacagactgcactgtccccaccactgctccttgcaaggtgtgtgggcccagcagggctggacgaaggctggagatggtatttgaggagcaagggcaggatagagaggcgggaccgggaacaaaggccacttgtgggcaagcaccatgggttagaggaaggatgccaagacctcagccagggagattggccaggggaggggccgccactcmgagaggaggaagccgcaacaagatgtgggaagcaacagggaggaagaaagccgggtacagcaggggcgggaggggtc

SEQ ID NO: 954808 - DNA, 551 bp, Homo sapiens
aatgagccacagatgcatgagcagtaaatgtttattgttgtaaaccataagattttgtggttgcttgttacacagcatcgttgttgcaacaactaaactgatacatccctgatttcttagtccatttgggctactacaacaaaatactttagactgcataatctataaatggcataaatttattgttcatggttctggacactggaaagtctaagaccaaggcatcagaagattcagtgtctggtgagggattgcactctgcttcagagactgtgccttcaatctcacatgttagaagagaggggagtaagcactgtgtccttacatgagagacagaggtaaggggccctctccagcctcttttattagagcactaatcccattcgtgagagtggagccctcatgacttaatcatttcccaaatacccccaactcttaataccatcatgctggatawtgggttcaaatatataaattttgaggggacactgatatgatttgggtctgtgtctccacccacatctcacctcgaattataatccccatgtttc

SEQ ID NO: 954809 - DNA, 585 bp, Homo sapiens
tttaaagaaaaactaatatcaatcctaatctaagtattctgaaaaatagaagaggagggaatactgccagactcattctatgaggccggtgttaccctgagaccaaaaccagacaaagaygcaacaagaaaaagaaaactacaggccagtatctctgacagacattgatgcaaaaatcctcagcaaaatactagcaaagagaattcaacaatacattttaaaaatcattcatcatgactaactagaatttatccatgggatgcaaagatgattcatcatataccgatcaataaatgtgactcaccacatcaacagaacgaaggataaaaactatatgatcatttcaattgatgctgaaaaagcatttgatacaatttaacattctttcctgattaaaaaaacccttaaaaagctatatatagaagaaacatacctcaacataataaaagccatatacaatagacccacagctagtatcacactgaatggggaacaactgaaagcctttcctgtaagatgtggaacacaacaagaatgcccactgttaccactgttattcaacatcatactggaagtcctagctag

SEQ ID NO: 954810 - DNA, 538 bp, Homo sapiens
gcctgtccaaggactacgcttcccagctttccttgcatccttytccactttctctcacctcatctcttcgctggatgctgaggatgcagaggccctcatgggtggtggggccacaagaccagagagactggttccccaaatcagggtgtagagggaagctgtcctccaaccaggagcatttggattaaaatgaaaatgcagataaaaagtaaacttctattatgccaagctaccaagattttgaagttcatttgttacagcaggcagaattatcccaactagcacagagaaatggaataagtttgacgagccagccagggagtgggaagactggagataaactcagatctgcccaactccagaggaacacccaggccaatcaggtgcacaacctgccaatgcaggtctcatatatgaggggctccccctgcccatagagcctgcgtgtctgttttcgcacctaatgctattgtaatggggcgaatgtgggctggcccaaggagtggacacaggataactattctgagtctgtgggttc

SEQ ID NO: 954811 - DNA, 582 bp, Homo sapiens
aggcacctgccaccatgcctggctaacttttgtatttttagtatagacagggtttcrccatttggccaggctggtctcgaactcctgaactcaagtcatccacctatctccgcctcccagagtgctgggattataggcatgagccactggggcctggtccttgattggcccttttcttgattggcctgcctgattattgccctatatgattattagctaggctgctcattgtaatctccgtcttttggcttttataataaaatttctctacactggggcaaacagagcagactgagtttggggctccctctctgccaaccttggtttggcagtggctgtcctcctctacctaaggccaccctacccacacaactatagctctctctggcttctaagaagagctctttcccctggccttttcagacctgggggtggaaaggcttcttgctctaaggattccctggctgttccaccatttatagtcagttttccttaaccctagcctcacttttgtaaacagtcacttaattgaatcatttaaatcacacttgaggagtttgctcttgtaagcagggcctaaag

SEQ ID NO: 954812 - DNA, 476 bp, Homo sapiens
tgtagttgtgtgattttgagtgagtttcttaatcttgagttctaattggattacactgtagtctgagacactgttatgatttcagttctttttgcatttgctcaggattgttttactttcaaccatgtgattgattttggagtaagtcccatgtggcaccaagaagaatgtatattctgttgtttttgggtggagagttctgtagatacctatcaggttcatctgatccagagctgagttcaggtcctcaatatctttgataattttatgtcttgatgatcggtctaatattgacagtggggtgttaaagtctctcacttttattgtgtgggaggctagcctctttgtagatctctaagaacttgctttatgaatctgggtgctcctgtattaggtgcatgtatatttargatagttagctcttcttgttgaattgaacactttaccattatgtaattcacttctttgtctttttt

SEQ ID NO: 954813 - DNA, 626 bp, Homo sapiens
ggcccagtgactcacacctgtaatcccagcactttgggaagctgaagtgggaggatcacttgagtgaggccaggagttcaagaccagcctggccaacatakcgaaacctcatctctactaaaaatacaaaaaaaattagttggacatggtggcacacacctgaaattccagctacctggtagctcagccatgacaattgcttgaatctgggaggcgaaggttgcagtgagccaagatcgcaccactgcactccagcctgggcgacagggtgagattctatctcaaaaataaataaataaatagaaaagaaagaaaaaaaagagcagccatcaggaggctgtctgctgaccacatttcctatagctggggagcaagtccctccttgaaaggtgatcttggtggcacttagctatgtctaccacagttcacactttatgtcacttgggttccatatgtattcagaatttagatggacctccagaattttgctcctcaagaattttgatggaagtctcttcttgggagaattttagaagcgggactaaccacagatctcactagtctagctggtctcagggccgcaactctctccttcactatccattctagattcctcttagcttcaa

SEQ ID NO: 954814 - DNA, 627 bp, Homo sapiens
gctactttaaccaaaatagcatggtacttgtataaaaacagacacaacagaccaatggaacagaatacagaacccggaaatgaagccacacacacacctatagccattwgatctttgacaaagtcaacaacaataagcattagggagagggctctctcttccataaatgatccttggatagctgactagacagatgcaaaagaataaaaattgacctctacctttcaccacaaacaaaaattaactcaagttgaattaaagatttaaatgtaaaacctcaaactataaaggaaaatctaggaaacttaaggaagacctaggaaacaccattctggaaatcggccctgagaaacaccattctgaacgtcggccctgagaaagaatttataagtaagtcttcaaaagcaattgcaataaaaacaaatattgacaagtaggatcaaattaaactaaagagtttctgcacaacaaaagaagctatcaacagaggaaacagacaacctacataatgggagaaaatattcacaaactacacatctgacaatagtctaatagccagaatctataagtaatttaaacaattccacaagcaaaaatcaaataaccccattaaaaattgggcagaaa

SEQ ID NO: 954815 - DNA, 570 bp, Homo sapiens
cctggctaatttttgtatttttagtagagacagagtttcaccatgttggccaggctggtcttgaactcctgacctcagatgatccacccatctcggcctcccaaagtgctgsgattacaggcgtgagttttttcatcagtacaatgggggtgtcaatgcaataagccaagtaccgggaatagtgccttgcccatcataagttgttaatttttactttcctgactacgctattctggatatgagtgatttgctgacatcacttcaaagtgtggtttggaagtgtaactggccacttccaggaagcctgcactggatcccagtagcagacagtatttggcttcctcattttggatatactgtaccaataagcacatgtgatctttcaactattttgtgtaaagaaaaatttcccttttattagactcaattctattcacctgggaacataacattcccaaaacagtttgcatccaccattccagggtgaaggacctcaccagtgtttgtgtggcaatcaggattccaaggcaagctgctgggtcacacaacataatccgcagacactagaaa

SEQ ID NO: 954816 - DNA, 756 bp, Homo sapiens
atggtcttacaaatggaaccccaaatgagttcaactaacaacttctaccgaggacccctggactgacctgctggcccttccactggcctaaagagttcccctctggaggacactacacctacagggccccttcttcgcccctatccagcagaaagtagctagagcagtcatcagccaaattcccatcagcaattggggtgtcctgtttagaggggggattgagaggtgaagctggctgggcttctgggtcaggtggggactcagagaacttttctgtctagctaaaggattgtaaacgcaccaatcagcactctgtgtgtagctaaaagtttgtaaacgcaccaatcagcactctgtcaaaatggaccaatcagcactctgtaaaatggaccaatcagcactctgtaaaatggaccaatcagcactttgtaaagtggaccaatcagctctctgtaaaatggaccaatcagcaggatatgggtggagccaaataagggaataaaagcaggccaccccagccagcagcggcaacctgctcgggtctgcttccacgtcgtggaagttttgttctttcgctcttcgcaacgaatcttgctgctgctcactctttgggtccacactgcctttatgagctgtaacactcaccacaaaggtctacggctttactcctgaagtcagtgaraccacgaacccaccgggaggaacgaacaactccggacgcgccacctttaagatctgtaacactcactgtgaagg

SEQ ID NO: 954817 - DNA, 576 bp, Homo sapiens
ttgtgtgctcacatgatctatttttttcgcatgcaaggcataatggagagcgagacagagaaatagagagagacagagaaagagagagacaggcagaggcagggagaaagagaaagagagaaagagacagagagggacacagagagaggtttctctgggtgtctttcataaggccactaatcccatcatggtggtcccactctcatgacctcagctaacattagttacctcacaaacgccccatttccaaatgctatcacattgggggttaggactgaacatatgaatctggggagacacagtcagtctataacactaacatttagtattgtcagtcttctcaaattttagccattctgcttggcaagtggtagtatgtatgaaccaattatctagtgctacctagttgtacatttaatttggatttgccagataatttacaaggttaggatgtattcatatgattacttgctcattttgttttgtgaatttcatgttcaastgtcttgctaatttttctgttgcttttttcttatggatttagagttaaaaaaaaatatgttctggccaggcatg

SEQ ID NO: 954818 - DNA, 764 bp, Homo sapiens
ctgcggatgccctcttcttgcatatattttaaatgtagacccaacatgagtccctggtggattctgtgctgctataacaaaatattgagactggataayttataatgaaaaagaaacatattggctcacagttctggtggctgagaagtccaagatcaggtgctagcatctggtgggagagagagagagagggagagagagacaaagagaccatgcctgaaagcccctttattaaggcactaaacccactcaggagggtggagccccatgggccaaatacttaaccaaagatcccacctcccaacactgtctcaatggcataaatttcaacgtaagttttgatggggacaaatgttcaaacccatggcagcacatgaataaaacagaatagaaaagccaaaaattttaaaaaataagaaaacccaaaaataaacttaatgacatctggaagtctaataagtggtaaatatgccatctcaaatcaatagagaaaaagaagaccttcttaataaatagtcctgtcataaatgggtagccagtggaagaagatacaatctgtcttagtctgttttccgttgctataacagaatacctcagactgagtaatttataaagaaaataagcttacttagctcgtgattctgggggctgggaagtccaagagcagggtgccagcatctggtaagggccttcctactacatcataatatgacagagtgcatcacatggcaagagagcaagagcatgtcaacctctcaggtctc

SEQ ID NO: 954819 - DNA, 577 bp, Homo sapiens
tcctctaattcaattccaagattatctacctggagatagcatcagatcccacaggttgagggctcaatcccacaagccccctctcctccttcccmtcaatttcaagtccaggcctctggaacttcagactgactggcttcagggtggggttcccataattccctctttgggtttcactaatttgctggagcagctcacggaacttagggaaacacttacttgtatttacctgtttattatgaagatattttggttttttttttgagatggagtttcgctcttgttgcccaggctggagtgcaatggcgtgatctcggctcaccacaacctccgcctcccgggttcaagtgattctcctgcctcagcctcccgagtagctgggattacaggcatgtgccaccaccctcggctaattttgtatttttagtagagacgtggtttcttcatgttggtcaggctggtttcaaactcctgacctcaggtgatccgcccaccttggcctcccaaagtgctgggattacaggcgtgagccactgcgcctggccttattatgaagatatgttaaaggatacaaatg

SEQ ID NO: 954820 - DNA, 577 bp, Homo sapiens
tcctctaattcaattccaagattatctacctggagatagcatcagatcccacaggttgagggctcaatcccacaagccccctctcctccttcccatcaatttcaagtccaggcctctggaacttcagactgactggcttcagggtggggttcccataattccctctttgggtttcactaatttgctggagcagctcacggaacttagggaaacacttacttgtatttacctgtttattatgaagatattttggttttttttttgagatggagtttcgctcttgttgcccaggctggagtgcaatggcgtgatctcggctcaccacaacctccgcctcccgggttcaagtgattctcctgcctcagcctcccgagtagctgggattacaggcatgtgccaccaccctcggctaattttgtatttttagtagagacgtggtttcttcatgttggtcaggctggtttcaaactcctgacctcaggtgatccgcccaccttggcctcccaaagtgctgggattacaggygtgagccactgcgcctggccttattatgaagatatgttaaaggatacaaatg

SEQ ID NO: 954821 - DNA, 576 bp, Homo sapiens
cgccaccacgcctggctaatttttgtatttttggtagagacagggtttcaccatgttggccaggttgttctccaactcccgacctcaagtgacctgcctgcctcggcctcccaaagtgctaggattataggcgtgagccaccgagcctggcccaaataataactttctatgactttatgtattttcttctaaagtttcaggcacttttccatctgttttttcatttttcttcacaatcgtctctgttttgagaacagttctctttcatttgcctgccttataccagtatggtctccatgtgctctgcacagccatttcttttgtgtccctttttattgctctagaaggttaaatacaattaaaatgtgcaaaattgatttgttgatttgtcttcctaataaattagcttttgtttctgcataggaattgcctatgtttaattctctatcatgtcacagaaatgaaagtaccaccaattctagcaatgtggttttaaaagcatttatrtgttaaatagaaactaaatttatcattagattagtctagattaatctgtacctgtattaaattaattga

SEQ ID NO: 954822 - DNA, 521 bp, Homo sapiens
ctgcagcaatcagaggggtacccccaaagaggcaagggaaggggagccctgggaaagaaactcagccttgagaaacagctccagtctacagctcccagcgtgagcgatgcagaagatgggtgatttctgcatttccatctgaggtaccgggttcatctcactagggagtgccagacagtgggagcaggacagtgggtgcagcacactctgcgagagccaaagcaaggtgaggcactgcctcactcgggaagtgcaaggggtcagggagttccctttcctagtcagagaaaggggtgacagacggcacctggaaaatcgggtcactcccaccctaatactgcacttttccaacaggcttaaaaaaatggcacaccaggagattatatcccgcacatggctcggagggtcctatgcctgcggagtctcactgattgctagcacagcagtctgagatcaaactgcaaggtggtagcaaggctgggggargggcgcttgccattgcccaggcttgattaggtaaa

SEQ ID NO: 954823 - DNA, 521 bp, Homo sapiens
ctgcagcaatcagaggggtacccccaaagaggcaagggaaggggagccctgggaaagaaactcagccttgagaaacagctccagtctacagctcccagcgtgagcgatgcagaagatgggtgatttctgcatttccatctgaggtaccgggttcatctcactagggagtgccagacagtgggagcaggacagtgggtgcagcacactctgcgagagccaaagcaaggtgaggcactgcctcactcgggaagtgcaaggggtcagggagttccctttcctagtcagagaaaggggtgacagacggcacctggaaaatcgggtcactcccaccctaatactgcacttttccaacaggcttaaaaaaatggcacaccaggagattatatcccgcacatggctcggagggtcctatgcctgcggagtctcactgattgctagcacagcagtctgagatcaaactgcaaggtggtagcaaggctgggggaggggcgcytgccattgcccaggcttgattaggtaaa

SEQ ID NO: 954824 - DNA, 622 bp, Homo sapiens
aaaaagactcaacataattggagccatgggggtttcagcaaagcaagctttctgcttgccccggacttgtactgtaggaggacataaagtgattcatcagtttttgtacatgcctgactgtcccttgcccttgttgggaagggacttgcttagcaagctgagagccactgtctcttttacagagcatggctctttgctgctaaagttacccagaacgggagttattatgacccttacggtcccccgagaggaggaatggagacttttcttaatgagccaggccaagtggtggccaagagtgtgggcagaagacaaccctccagggttggcagtcaaccaagcccccgtacttatagaagttaagcctggggcccagccagttaggcaaaaacagtacccggtccccagagaagctcttgaaggtatccaggtccatcaagcgcctaagaacctttggaattatggctccttgtcaatctccatggaacactcccctcctgcctgttcccaagcctgggaccaaggactaaaggccggtacaggatttgcacttggttaatcaagctacagtgactttacatcyaacagtacctaacccgtacacattgttggggttgctgcc

SEQ ID NO: 954825 - DNA, 629 bp, Homo sapiens
ttgtatgaggtcacaaagtggggggaacaggaactttttgaatgggaatcccgacaacaacaagcctttcataagttaaaggaaaaacttatgtcagccccagccctggggctacccgatctgacaaagccttttacattgtatgtgtcagagagagaaaagatggcagttggagttttaacccaaactgtggggccctggccgaggccggtggcctacctctctaaacaactacatggggtttctaaagaatggcccccatgtttgagggccttggcagcaactgccctgctagtacaagaagcagataagctgactcttgggcaaaacctgaacataaaggctccccatgctgtggtgacattaatgaatactaaaggacatcattggctaacgaatgttagactcaccaagtaccaaagtttgctctgtgaaaatccctgtataaccattaaagtttgtaacaccctgaaccctgctaccttgctcccagtatcagagagccctgtcaagcatgactgtgtagaagtgttggactcagtctactctagcagayctgacctctgagaccggccttgggcatcagtagactgggaactatacgtggatgggagcagcttcatcaaccc

SEQ ID NO: 954826 - DNA, 627 bp, Homo sapiens
ccagaggtacaaagaggcgctgctaccattccttctgaaactattccaaacaagagaaaaagagggaatcctccctaactcattttatgaggccagcatcatcctaataccaaaacctggcagaaacacaacaaaaagaaaatttcaggccaatatccctgatgtcccatcaatgtgaaaatcctcaataaaatatggcaaactgaatccagcagcacatcaaaacttatccaccatgatcaagtcagcttcatacctggaatgcaaggctggttcaacatatgcaaatcaataaacgtaatccagcatataaacagaaccaatgagaaaaaccacatgattatcttaatagatgcagaaaaggccttcaacaaaattcaacaccccttcatgctaaaaactctgaataaagtaggttttgatgaactgtatcttaaaataataagagctatttatgacaaacccacagccaatatcatactgaatggacaaaaacttgaagcattccstttgaaaactggcacaagactaggatgccctctctcaccactcctattcaacatagtgttggaagttctggccagggcaattaggcaggagatggaaataaagagtattcaaatagga

SEQ ID NO: 954827 - DNA, 483 bp, Homo sapiens
cggagcacacagtctggggatcagggaattgcccaacccattccatcatcattggcacatgaacactccttccaggatctgaaggtggacctagtcactcagttgttactacttcagctggcatctactggcacacaccatctatgggcctggagattggcctgcttagccaattgcagccaccaccatcaccagcatgcaccacttgggaactagagggttgacctcccactgccattgccattgcccaaattacatcagctgtcaaggggcccactaacccacccatccacctagcccaccattgtcactactggcatttgagtaaactccttggaagcccaatatttggcctgcttggacccactaataccaataccagcatatgctgccctggggcccagggacatgcacattcagcctacygctactaccactgagtcttgaagactggctcacttggcatcccagtctccagcaaaa

SEQ ID NO: 954828 - DNA, 566 bp, Homo sapiens
gtggaatctgcaagtggatatttgtctagctttgaggatttcgttggaaacgggattacatataaaaagcagacagcagcattcccagtaacttctttgtgatgtttgcattcaagtcacagagttgaacattccctttcatagagcaggtttgaaacactctttttgtagtatctggatgtggacatttggagcgctttcaggcctatggtgaaaaaggaaatatcttcccctgaaaactagacagaagcattctcagaaacttatttgtgatgtgcgccctcaactaacagtgttgaacctttcttttgatagagcagttttgaaacactctttttgtaatatctgcaagaggatatttggatagctttgaggatttcgttggaaacgggattacatataaaaagcagacagcagcattcccagaatcttgtttgtgatgtttgcattcaagtcagagttgaacattcyctttcagagagcaggtttgaaacactctttttatagtatctggatgtggacatttggagcgctttcaggcctatggtgaaaaaggaaatatcttc

SEQ ID NO: 954829 - DNA, 633 bp, Homo sapiens
catgtattgtatctatttattcatttatttatttattttggagacaaagtctcactctgtggcccaggctgaagtgctgtggcacgatctcagctcactgcaacctcagcctcctggattcaagcaattctcctgcctcagcctcctgaatagctgggactgcaggtgcatgccaccacatccggctaatttttgtatttttagtagagacggagtttcaccgtgttggccaggctggtctcaaacttctgacctcgagtgatctgcccacttcagcctcaaaaagagctgagaatacaggcgtgaatcgctacacccagccccttctttcatgtatttttacaaccccttaagtttcagctctctagctgtagattacaattgccagccttccttgtacctagttgtgaccacatgctaagttctgtccaatgggatgagtgcaagtgatgcctgtggttctggctagatgcttaaatgggagctgtttgtccatcacttattttcccttctcactggctggrggtgatggtgttgagctcttcttgaccatgcaggtagacagagcatcattaatgggatggcggaacaacacaataggaaaaacctaggtcctcaaaagacttcctgaaa

SEQ ID NO: 954830 - DNA, 584 bp, Homo sapiens
aaaaaagaaacaaaggatatataagacaataagaaaacacttaacaaaaagacaggagtaaatcctcacatatcaataacaaccttgattgtaaaccatttaaattcagaattagaagatatagactgtctaaatgtataaaaaaaagaccaaactgtattctgcctccacaaactcactttacctgtaaaaacacatatagactaaaagtgaggggatggaaaaagatattctatacaaatgaaaaccacaagtaaacaggaatatctatacttacatcagataaaatagaccttaagtcaaaaaaagacaaaaagagacaaagaaggttattatgtaatgataaatgtatcaattcatcaagaggatataacaattgtaaatatgcatgtacccaacaccagaacatccagatatataaaacaaatattactaaagctaaagggaaagatagaccccagtacaatagtagttgagaacttcaacatcccactttcaggattggaccagtaatctagatagaaaattaacaaacattggactgaamccgcaatatagaatagatgaacctaacgaatatttta

SEQ ID NO: 954831 - DNA, 787 bp, Homo sapiens
gggtgataagtgctaagaaaacagtaaagaagagacagggaatagggagtgccaggatttcaggaaggatggatgttgtgatagtaaatagggaaggcctcactaacaaggaacatttaagcaaagtcacttagatatttgagggaagagctttataagcattgagaggaactttcatcaaggctttgggtgggagcaaacctgtgtgttagaagatagcccggaggccaatgtgcctggaaaggagagaaggagggagagcccaatgggagacgaggccagagagaagtgggtagcaacctctaggccataataaaaactttgtcctatcctgtcagtgagctgtgaggccagggaaaatttaaatagaagaataacaagatctgacttacattttcaaagactactctgattgctactgaaaataggtatttgctattaaaataggtatttgctgttgctattgaaaacaggaaaaaacagatgcagtaagtctagttaagaggctattaatatattccagacagcaaataatgggaacttgggccaaagtaatagtggtgaagatgatgtgaagtgtgtagattctggaaatattattaagatagggctgacggcaattgctggtgggccagatacaggttatgagaagaagactggagtcaaggatttcagtctgagcaaatgaraggacacagttgtcatttattgagatgagataaagcatcttggtgagggaagcagattttggggaagatgattaggagttcagggttggccgtcttaa

SEQ ID NO: 954832 - DNA, 728 bp, Homo sapiens
caggaaggatggatgttgtgatagtaaatagggaaggcctcactaacaaggaacatttaagcaaagtcacttagatatttgagggaagagctttataagcattgagaggaactttcatcaaggctttgggtgggagcaaacctgtgtgttagaagatagcccggaggccaatgtgcctggaaaggagagaaggagggagagcccaatgggagacgaggccagagagaagtgggtagcaacctctaggccataataaaaactttgtcctatcctgtcagtgagctgtgaggccagggaaaatttaaatagaagaataacaagatctgacttacattttcaaagactactctgattgctactgaaaataggtatttgctattaaaataggtatttgctgttgctattgaaaacaggaaaaaacagatgcagtaagtctagttaagaggctattaatatattccagacagcaaataatgggaacttgggccaaagtaatagtggtgaagatgatgtgaagtgtgtagattctggaaatattattaagatagggctgacggcaattgctggtgggccagatacaggttatgagaagaagactggagtcaaggatttcagtctgagcaaatgaaaggacacagttgtcatttattgagatgagataaagcatcttggtgrgggaagcagattttggggaagatgattaggagttcagggttggccgtcttaag

SEQ ID NO: 954833 - DNA, 787 bp, Homo sapiens
gggtgataagtgctaagaaaacagtaaagaagagacagggaatagggagtgccaggatttcaggaaggatggatgttgtgatagtaaatagggaaggcctcactaacaaggaacatttaagcaaagtcacttagatatttgagggaagagctttataagcattgagaggaactttcatcaaggctttgggtgggagcaaacctgtgtgttagaagatagcccggaggccaatgtgcctggaaaggagagaaggagggagagcccaatgggagacgaggccagagagaagtgggtagcaacctctaggccataataaaaactttgtcctatcctgtcagtgagctgtgaggccagggaaaatttaaatagaagaataacaagatctgacttacattttcaaagactactctgattgctactgaaaataggtatttgctattaaaataggtatttgctgttgctattgaaaacaggaaaaaacagatgcagtaagtctagttaagaggctattaatatattccagacagcaaataatgggaacttgggccaaagtaatagtggtgaagatgatgtgaagtgtgtagattctggaaatattattaagatagggctgacggcaattgctggtgggccagatacaggttatgagaagaagactggagtcaaggatttcagtctgagcaaatgaaaggacacagttgtcatttattgagatgagataaagcatcttggtgarggaagcagattttggggaagatgattaggagttcagggttggccgtcttaa

SEQ ID NO: 954834 - DNA, 598 bp, Homo sapiens
atagatctcatgactgtgaatacacaggtgattcttgaacacagatcttttatctgcaggtccagaggtctccccrctatagcagggtggtctcctgaggtcatccttgatatcaccgcctaaaacggacagagtgagggctttaagaatgaggattttattcataaatgtatcaccagtacctagaacagggcctggaacattgtcaatggttcaaaaccataactagttaaatgaacaaacaaatagaggactatctacccatccactaaatagaagtaatgaaatattttgacttaaacactttctttctaaatatatccttattttctataacattctgggtgacaatcaacacaaatcctggctttgtggaatgagttcctctcctgccttgagtatctgtcgtttaagttaatttttttaaaggacattttctcccaacattcccccatcaatatccattacatgctgcttttgccagtctttttctggcttaacagtgtcaggcattaatgcatctatctacaagggaaaacactattaatctaaaaaaattatagcatctctgccatgccataaatccaaattttatcaa

SEQ ID NO: 954835 - DNA, 649 bp, Homo sapiens
gctcactcatggcagcaaatgtctggctggggcygagtggactcgggggctttgtttccgtgggtgccacccacggaggtgatacgcgtggcgctctcgccacatgccatggcccgtgcgtctgggggctcgcagcctcccacgatccctgcttctgcactgcggtcttgcacctgctgcttgtcagcgtggactcctctgaacaggggctgtgccacttgcttgggggccacggtgcaggatgctattttgtctccaacacatttttccttgttaaaattagctcctctttagaaccttctgctggccagtgtgtctcttcccatcctagctttgtgtcaccctcacactcggggggcaaatctcgtgagtcctcagccagcaactgatactgggtcgatgtggatggagaagactgccccccaactcctgaagatgatttatcccctcgcttctttcccaaagcaactgctgaacagataacactttattccctgaaggaagatcagaaatctactccaagcatttgtcacaagtaggaaaatagtcctttcagatcctatgagtacaaaacattgaaagtcccaggacggactgcataggtccagcctcctgtgagacacggacttctctcacgcttctgcattga

SEQ ID NO: 954836 - DNA, 649 bp, Homo sapiens
gctcactcatggcagcaaatgtctggctggggctgagtggactcgggggctttgtttccgtgggtgccacccacggaggtgatacgcgtggcrctctcgccacatgccatggcccgtgcgtctgggggctcgcagcctcccacgatccctgcttctgcactgcggtcttgcacctgctgcttgtcagcgtggactcctctgaacaggggctgtgccacttgcttgggggccacggtgcaggatgctattttgtctccaacacatttttccttgttaaaattagctcctctttagaaccttctgctggccagtgtgtctcttcccatcctagctttgtgtcaccctcacactcggggggcaaatctcgtgagtcctcagccagcaactgatactgggtcgatgtggatggagaagactgccccccaactcctgaagatgatttatcccctcgcttctttcccaaagcaactgctgaacagataacactttattccctgaaggaagatcagaaatctactccaagcatttgtcacaagtaggaaaatagtcctttcagatcctatgagtacaaaacattgaaagtcccaggacggactgcataggtccagcctcctgtgagacacggacttctctcacgcttctgcattga

SEQ ID NO: 954837 - DNA, 584 bp, Homo sapiens
gaagggccctggtcccgtgtccggggtgcagacccacagtctgggactctgagggcggtcgccacaggtgggtgcgttgmcaaatcgtggctgcttgagaacattgggagatcttgctacagaggtccgtgggtccttaccttgggaacgccggacacagcgcacacagcccaccaaccccagacccctggtggtatcacgctgtaagcacagaactcctactcgccttgtagtcctctccataatcctctccagttctcaaaacacatcatcagcttgattttctcctcggctgtgccagcataagccaacctgttccttcccacaccgtctgggccttcgggccctgccaggtggcaccactgcagaggggcaggactgagtgggacacataggtgtgtggttacctgcccgagagagggtggctgaccatctgggacaccatgcccagtcacactccctgccacacaggctggccctgagccatggcatttaggccaaggggaggggccctggctggcatttgtcacacgtcttcctgtgtctaaagtgcagaattcgggaaatacttctgagggcaggat

SEQ ID NO: 954838 - DNA, 529 bp, Homo sapiens
gggtccttgaggcagggaggatttcatttaattttgtaaactctatggcayctggctcagcgcaaaccgtcttcccaaagacaagctctgcccacccctccttagtcctagagatgatgccgtatgcagggaggcacagcattgcctgtgcttggcgagggcacctgtccggctgtggctacagggagggcaatgacaagggctgtgaaacactgcctgggaagccacgtccccagctagcagggccctggccctgggagggcctggggggatgaagtccggtctctcccagacaaacagatgatgtcagtgagagagggattccctccaagaaggaaagtgtcagataaacaccctggaacacaggcgcttgccttcctgggggcgggccttctttcaacagcaccgttacagacatcctgtgaacaaggccccagggatgttctattcccatccagagaggtgctttttttttttaaaaaaaaaaaaaaaaaaaaaaaaaggcctttctctggatataaagaaagtt

SEQ ID NO: 954839 - DNA, 602 bp, Homo sapiens
tgaaaccagtgagaacaaagagacaacgtaccagaatctctggaacacagctaaagcagtgttaagaggaaaatttatggcactaaatgctyacatcagaaagctggaaagatctaaaattgacacactaacatcacaattaaaagaactagagaagcaagagcaaacaaattcaaaagctagcagaagacaagaaataagatcagagctgaactgaaggagataggaccatgaaaaacccttcaaaaaaatcaatgaatccaagagctgtttttttttttttaagaaaaaattaacaaaatagaccactagctagactaataaagaagaaaagagagaagaatcaaatagacaaaataaaaaatgataaaggggatatcaccaccgatcccacagaaatacaaactaccatcagagaatgctagaaacacctctacacaaataaactagaaaatctaaaagaaatggataaattcctggacacatacaccctcccaatactaaaccaggaagaagtcgaatccctgaatagaccaataacaagttctgaaattgaggcagtaattaatagtctaccaaccaaaaaaagcccaggaccacag

SEQ ID NO: 954840 - DNA, 643 bp, Homo sapiens
gtagcgcctcactgttctgataagaagaaaacatgtacaagctacgaactgcaaattgagaaattttggtgattttgcaaatgagataaatggtcctatatttgcatttgaaattggcattgcacaaaataagttgactaataatttttaattttccttcttagaatgacaatgtggcaaataaaggaacccaatgaaaagaagggaaagagactgcagagggaaggaaaaagctttatattttactaccataatggcactttttaaaaaatttttatttatttatttatttttgagacagagtcttgctctgtcgcccaggctagagtgcagtggcacaatctcggctcactgccagctccgcctcctgggttcacaccattctcctgcctcagccttcccagtagctgggactacaggcgcccgccaccacacctggctcttttttgtgtgtgtgtgtgtttttagtagagacagggtttcaccgtgttggccaggatggtctctatctcctgacctcgtgatccacctgcctcggtctcccaaagtgctgggattacaggcgtgagccacygggcccggccaataatggcactttttcctgctttttgtacagggggtcctgcatttgtgttttgtcctg

SEQ ID NO: 954841 - DNA, 576 bp, Homo sapiens
ctccacagcctctccagcatctgttgttttttcactttctaataatcaccattttgactgatttgagacggtatctaactgtggttttgatttgcatttctctgatgattagtgatgtggagttttttcatatgtttgctggccacttgtatgtcttcttttgaaaaagaagtttatgttcttgttcagccttttgcccatttcttaattatttattaagaaaataaatttatttatttatttgcttgtttcagtgtttaagctccttacagattctggatactaaacctttgtaagatgcataaagtcccaatattttatctcattctgtaggttgtcagtttactctgttgatagtttctgttgctttacagaagctctttagtttagttaggtcccacttgtcaatttttgtttttgttgcaattgcttttgagaatttagtcaaacttttttcccaggkctgacatccagaatgatgtttcctaggtttacttccaggattcttatagtttgaggtcttacatttaaatcttcaatccatcttgagttaatctttgcatatagtgagagcta

SEQ ID NO: 954842 - DNA, 581 bp, Homo sapiens
tagcactttgttaagatctacatttcagcagttgaactgctgaaattccttacttacctcaccatttccaactgtgatgtgcctcagcatcacctggagaactagttaaaacaaactgctgagctccacctctggagtttctaattcagtggtctgaggtggggcccaagaatttgcatttcaaatgtcaccacatactgctggtccaggaatcacactcagagaacccctggtttacactttgatctatgtatagcttacctgtggctctccagagttggcatagataataattcttttattagaatattagtgacagtcactatggcttccctatcgtattagtcaaggttctctagagggacagaactaacaagatagatgtatatttaaaggagagtttattaaggagtattgactcacatgatcacaaagtgaggtcccacaataggccgtctgcaagctgaggaacaaggaagccagtccgagtcctaaaagctcaaaagtagggaagtcaacagtgtagccttcagtctgtggtcaarggttcaagagtcccaaaactgaagaacttggagtcc

SEQ ID NO: 954843 - DNA, 697 bp, Homo sapiens
atggttgtggatgcctgtattaccagctactcgggaggctgagggaggggaattgcttgaacccgggaggcggaggttgcagtgagccgagagtgagtcgasatcgcaccactgcactccagcctgggcgacagagtgagactccgtctcaaaaacaaaacaaacaaacaaaaaaaattagctgggcgtggtggcgtgtgcctgtagtcccagcttctggggagactgaggcaggagaatcacttgaactcggaaggaggaggttgcagtgagcggaggttgagccacggcactccagcctggcgacagagctagattctgtcaaaaaaaaaaaaaaaaaaaaaaagtaaaagaaaagaaaaaatggcaaaaaagactttattcaagactatgcaataggggtaaaaacaattgcaatttaaaaaggaaattaaattgaactctgttgaaacaaaggcaagaatattttttaacactgggactaacaaatggaaaaatattggaggactttagaggagaggaagatcaatattattaggctatctgtatttgctaacagtccttatcaaagttgagctcctgccctcccacagagattgggagacaggggctctacctttcctgattacatttcatacagatgggtcacaggtccttgagaaagattttcctgagttgtataaatttacatctgaaa

SEQ ID NO: 954844 - DNA, 630 bp, Homo sapiens
catttcatattatactctgtaattattcttggtataaaaaacttctaattttacataaaagtagcctgaggcagttgttcttattttctgaaacccaaccagatcaggagaagagaaaaagtgctcrtatcaaagctaagtcattgagaacaagagtgtagattcagcagccaatgctgactacccgtgaaccagtatcagatttaaatacacaaggatgtgtaggtaagctgtgtactttcaaccaaaacccttctgacgcacacctgttgttccttaatcagtgtgcccataaaagactagagatggggaatgtgctggggaataagtgtggatctaatattattggaagcataaataacattttcattatggatatcaatgattctagcttaaaacgtatacacacactgggccgggcacggtggcccacgcctgtgatcccagcactttgggaggctgaggtgggtggatcacgaggtcaggagattgagaccatcctggctaacatggtgaaacccccgtctctactaaaaatacaaaatattagccaggcatggtggcaggcgcctgtagtcccagctattcgggaggctgaggcaggagaatggcatgaaccagggaggcaga

SEQ ID NO: 954845 - DNA, 630 bp, Homo sapiens
catttcatattatactctgtaattattcttggtataaaaaacttctaattttacataaaagtagcctgaggcagttgttcttattttctgaaacccaaccagatcaggagaagagaaaaagtgctcgtatcaaagctaagtcattgagaacaagagtgtagattcagcagccaatgctgactacccgtgaaccagtatcagatttaaatacacaaggatgtgtaggtaagctgtgtactttcaaccaaaacccttctgacgcacacctgttgttccttaatcagtgtgcccataaaagactagagatggggaatgtgctggggaataagtgtggatctaatattattggaagcataaataacattttcattatggatatcaatgattctagcttaaaacgtatacacacactgggccgggcacggtggcccacgcctgtgatcccagcactttgggaggctgaggtgggtggatcacgaggtcaggagattgagaccatcctggctaacatggtgaaaccccygtctctactaaaaatacaaaatattagccaggcatggtggcaggcgcctgtagtcccagctattcgggaggctgaggcaggagaatggcatgaaccagggaggcaga

SEQ ID NO: 954846 - DNA, 571 bp, Homo sapiens
ccacagtggtattgcctaggttgtctcccagggtttttatagtttggggttttatatttaagtctttgattcatcttgagttgatttttgtatatggtataaggaaggggtccagtttcaatcttgtgcatatggctagccagttatctcagcacaatttattgaatacggagtcctttcctaattgcctgtttttgtcagcattgtcgaagatcagatggttttaggtgtgcaaccttatttctgggcttatttgggggtttgattgtggtataaggagggttcagtggactgttttcattactggaaggctttagggggccaaagctcagctcaggactcctgactgcatgctctaactctaggggactggtatcagaccctagctttgttctctggctcctcaaggttgggaacctgttgcactggagggaccaaaatgctcccagactgctggtcacaacactgtgatggatggtgccagccaaagcactttgtagagcagtggcagtsagatcagtcctctttgcacgtgtcggcagcagtgtcagcagcagcacaacagagtaca

SEQ ID NO: 954847 - DNA, 639 bp, Homo sapiens
tttccacacttctgaaagttgacttctattctgccctaactagctctgtgatcatactcataggctccagagccccacctgtcacatcttgaaatgatagggttggacatggatggttcttaatgcttctaatggctttaacgatatgtgtgactatgacagattaaatgaccactttcccataaccatcgggtttctctctccatgctgccagaagacaaatttatggccccatgtgacctataattagtactaagcttatttctggctcaacttaatacatacttttgttttctctttattatttctcttatctagagctttttcatgctctttcattgttctttatgttactcctgcaaactatcttaaataaactttggaaaacagtagggtataaataaatacgcatttattcctattttataatacagaattaacaatacaagattataattatgaaatcacttcccaatgactcgatgtagaaaattgaaaatggatttctttctttctttctttcttttttttttttgtgagctggagtctcgttctgttgcccaggctggagtgcrgtggtatgatctcgactcactgcaacctccgcctcccgggttcaagtgattctcctgcctcagc

SEQ ID NO: 954848 - DNA, 613 bp, Homo sapiens
tttctgcattcccaactgaggtacccggctcatctcattgggacaggttagacagtgggtgcagcccatggagggctagtcaaagcagggtggggcgtcgcctcacctgggargtgcaaggggttggggaactccctcccctagccaatagaagctgtgagggactgtgccatgagggacggtgcatcccggcccagatactatgcttttcccacggtcttcacaacccacagaccaggagattccctcgggtgcctaaatcaccagggccttagatttcaaacacaaaactgggcagccattttgggcaggcaccgagctagctgcaggagttttttttttttttcataccccagtggcacctggaacaccagagagacagaactgttcactcccctggagatggggctgaagccagggagccaagtggtctagcttagtggatcccactgccatggagcccagcaagctaagatccaatggcttgaaattcttgctgccagcacagcagtctgaagttgacctgggatgctcaagcttggtggtgggaggggcatccgccattactgaggcttgagtaggtggtttccccctcacagtgtaaacaaagctg

SEQ ID NO: 954849 - DNA, 555 bp, Homo sapiens
taaatctgcttggtgttctataatcttcttgtacttgaatattgatatctttctctaggtttgaaaattmctctgttgttatgtctttgaataaaattttcctatttctttctctatctccactttaaggctaataactcttagatttgcccttttttctagctcttgtacatgtgctttattcatttttatttttttcttttgtctcctctgactatatattttcaaataggctttcttaaagtttactaattctttcttctcctttatgaattttgcttttaagagatcttgatgcttcttcagtatgtcaattgcatttttcagcaccagaattttgcttgattctttttatttcaatctctttgttaaatttatctaatagtattctgaattccatctctgtgccatcttgctatcttggattttgttgagtttcctcaaaacagtattttggattatctgtatgaaaggtcacatatctctgtctctctgggattggtccctgatgccttatttagttcatcctgtgaggtcatgttttcctggatggtc

SEQ ID NO: 954850 - DNA, 642 bp, Homo sapiens
cttttttttttctttttcttgttatttatgtatttttttctttttctttttttaaatttttttatttwttattattattattatactttatgttttagggtacatgtgcacaatgtgcagatttgttacatatgtatacatgtgccatgttggtgtgctgcacccattaactcgtcatttagcattaggtatatctccaaatactattcctcccccctccccccaccccacaacagtccctggagtgtgatgttccccttcctgtgtccatgtgttctcattgttcagttcccacctatgagtgagaacatgcggtgtttggttttttgtccttgtgatagtttgctgagaatgatggtttccagattcatccatgtctctataaaggatatgaactcatcattttttacggctgcatagtattccatggtgtatatgtgccacattttcttaatccagtctatcgttattggacatttgggttggttccaagtctttgctattgtgaatagtgccacaataaacatacgtgtgcatgtgtctttatagcagcatgatttataatcctttgggtatatacccagtaatgggatggctgggtcaaatggtatttctagttctagatccctgaggaatcgccac

SEQ ID NO: 954851 - DNA, 789 bp, Homo sapiens
tctctgcctcctagcgcctatattccagtctctttcttctctggaaagagttccagatagtaagacttctttgttcatgtaagttcatttgttcatgaatgaatmaatgaatgactgactgactgaatgaatgaatgaattccacacatatacagcacgcctacctggttctgggtgctggtgctaaggtgagaacaagccagaccccatccctgctcccttggagctcagagcctatgggggcgggtgtcagacgtgtacgtgcatagctatggtagctatggcaaggctgtggaattgtcacaagccgccaaggctggagaaggggaccgaggggctggttgcacaggtctccagccttcaggagctccagagaggtgctctctgagccaagtcctgaggggtgaggagtttgccagacaggaaggctggggagggctaggtcatgttccaggcagaaggactagcccctaggccagcccgagagacccagcctttggggtggctgatcttgggagtctcagagcccaggctacagaaggaggtgagagggaaagtctgtggtcacagagcacagacttgagtctaaggtcagtagaagaccactagagatattgtgcagagaagtgactgggtttgtgtttagggacaaaaaactacagaaagggcaagactgaagggagggagggaggccagtcatgtcccgaaaccaaatcctgacgccagcctgcacctctcttctagggggcaaggctgctgatagggggtccaccttgggacctagttcag

SEQ ID NO: 954852 - DNA, 549 bp, Homo sapiens
catgcatttgtagtcccagctactctggaggttgagatgggagaatggtttgagcctgggaggcagaggttgcagtaagcccagatcacaccattgcactccagcctaggcaacagacccagaccttgtcttaaaaaaaaaaaaaaaaaaaaaaaaaaaacaaaacctgaacaaacatgccaccaaggaagatatacagtaatagacagttgacaagcaagcatatgaaatggttctcgatgtcatatgtcattagagaattgaaaatcaaaacaaagagataccactatacacctattaatataggcaaaatgcaaaatagtgacagcgccaaatgctggtgagtatgtgcagcaacaggaactctcattcattgcgggtgggaatgcaaaatgatacagactgtgatggttaatacttagtatcaacttgattggattgaaggatacgaagtactgatcctgggtgtgtctgtgaggktgttgccaaaagagattaacatttgtcagtgggctggggaagacagatccacccttaatctggcgggtg

SEQ ID NO: 954853 - DNA, 632 bp, Homo sapiens
cctgaaggcagaggcagctaactaaactgtgtccagattctggtccacacaaattgtgagakactatatactattgaaaggtgctaagttttagggcaatgttgtcagaaaggagcagatatctagcctcatctcccaagccccaggattctccatgcctctgcttatctcttcctcaggctgtctgtaccaaattggtccctttctaatctctgccaaactcacacctgtaagactcttcaccaagggtggcttctcactgacacattcttgtgcagagatgcctccctgttatcattctcatcatggattaaagatcacctcagtgaggactttgggtccccccattcaatgactttgcagctcttcttctcaacattctactttatataatagtccttgctcttttcttttatatatacttgctttagtgcttttgtcgagctgacttcagactgttctgtccttggaggggtatgcaggcatgatgtaatcattttctgtgccacatgttggacccaccagggtagctggcaaagggtgagtgcaagggaaaaaagattggctaagtgggcaatgtggaaattgttgataataacatgaggtgtgtgactcttacttgctccagctgc

SEQ ID NO: 954854 - DNA, 640 bp, Homo sapiens
gtattttactcatgagtgatggaggctccacagcagccatcagtcccactccctgagtagtgaagctgcagagctgcaagacctcttttgtgcacattccgtgaccctggtggctctggaggtggtgaagcttggaaatcgctggaaatggaggctagttatggaccagcggacctttctgatggtctttggctttctgtcttccagagaaatgtgatcaaaacccagaaaaacagaaaggtgagcagtagctgaagtcctcactttgagggagggtggaggtggaaatgagaaatcaccctgggcaggacattccctggtcccttcttccgcatctaagatttattgaaagggagtaatacacagagaaggaggagacctatcctaatgcagggtgcaatcaggggagtgaagttgatgacaacttcctagaggaagggccgtttacattcaactctgagaaccagttagggctgcatgatattggaggggaggtgagagccccttaaaagaaacacytcagagaccagccctcctcccttcttttataaggcccctacagagtctttcacccaggccctgtcagcatcctgtctttccctctgtctccagaagattaaagtcctccaggagatgcagc

SEQ ID NO: 954855 - DNA, 637 bp, Homo sapiens
ccttccaaggtgggtcaaaagcatttttcagagaagattattcctaacagtaaaggataataacagatggataaaaatctcaaataaattatgcctctatttgcagaagcgtcactctccagagtctccaagatccagagaatttccatgaggtagagtagtttatggacatttagcaaagttggtcctgactgctgtctcagcctcttaatagatgtgcagctatagacaatttactggacttagaacagttatataaacctgggctgcaagaaaacgcataacactgattgcaagaatggcaaccacttctcattcctctctgatctgggccctctgcaatgtacacttggggctgcttccatggagggaaagattttcttttcccaaatcttggatcgggctggccttatttgctctgcctcattcatactttttgttctaataaaataattaagatgtttagcgtctcatcccagcctttatcttgttaaaactatatcttatratatgtcatctctctttactatatttggttatattcattctattcaatactcaggtaattttttatctctgtttaatttagtgtttcacctataccttgtcctaatttttttattctttacattctacc

SEQ ID NO: 954856 - DNA, 641 bp, Homo sapiens
aagtgcggggccgccaagcccacgcccacccggaactcgcgytggcccggaagcaccgcgggcagccgcggttcctgcccgctccccgcaagataagggagccggctccggcattggcctgctgagaaaggggctcccacagtgcagcggtgagctgaagggctcctcaagcgcggccagagtgggcgccaaggccgaggaggcaccaagagtgagcgagggctgtgagggctgccagcatgctgtcacctctcactcatgagactgaagctgtgtctcaactgaagcttgactgggaaggatgcacttctgagctcaatctggttagttgtgcattattgttttgactcagttcttagtttctttgtgtctttggtcagggcactgtctccattctctgtcacacaagcctgtaaaaatgaaagcttaaaacattgaagctcgcttctccagagcaaagtatgcgacagacagagagaaagacaggaaaaaaggaagtaaacaatatcacaagagagagaaagtaagaagcaagtgacaatcttttcataatcaaatattggcagtgacattccctattttccaatgtattctactgccatgaagtgagtcactaaccacttactgtttacatttgggtg

SEQ ID NO: 954857 - DNA, 589 bp, Homo sapiens
acaacttctgtataagacactcttttctctkactccatcattaaccagggagatgatgcagtcctttacctgattatatctccacattcactcagaagttgggggaccagttgctgatgttttcactgtccttctggcccctccctcatgtctgcatttcctgtggatgggattttcctctctcatttcagtaaattccactatcttgatgatccgctttgtcttctgtcttccaggtctgtgaactccatcccagcagcatttaaatcatgcttatgtatttcagtcttaaagaaaacctcttgcttagccacaaattcctttctggcgactcccctttatttctaactatgcctcttcagtgtctcagaagagtggtctgccctctgcttccactcttacacttctctctcctcagtcttcaacccagtgtcatctgtcatcgttcctactacttcactgactttttttctcgcaacagggtctttctttgtcaccaattggctgactacttggcagcagtgtccttcctttaagaacatcttctgcctcttctccgagtccaccatcctacctctctcatgacagc

SEQ ID NO: 954858 - DNA, 654 bp, Homo sapiens
tgtgctcttgttcttcgctaaactgacagaaagattatccagtagaaccacatggagaagcatctagtcagcctttaataatttcccaattgtattagtcaygttaattctgctcttctctaataactgcagttctcatccccaataattctttcctattgtcatgtacaattgtgtaagttaagccttgatcagcaattgcttgccaatgagggcggtggggctgaaaggcagcctgtgctgtgctcagccaatcctcaacccagagcctgaattcagttcttcaccgaatcccatggaatgggaattcagttccccaccaaatcctactgagaattcagttccccactgaatcccaatgggaattcagttccccaccgaatcccaatgggaattcagttccccaccaaatcccactggatccaatggaatgacttttactgtcttctctctatctttaaatgaaagaaagaagaaccaatgaaggaagaaaaggtgggaaagggggcatatgtatgtgtatagttatttttataaatttgatcagaaaaatgttgagctacttattattttaaaatctacatttttttcctgctaatattgtttcttagaatatttccccttctgtaatgtgccaacatgaaggccagctta

SEQ ID NO: 954859 - DNA, 630 bp, Homo sapiens
cccagaacattaacccttttgatccctgtctyagtccatttgtgctgctgtaaccgaacatgtgacgctgggtaatttataaggaccagaaatttatttttcacagttctaaaggctgggaagtccaaaatcaaagcaccaaagtccaagatcaaagcaccggcatctggtgagggccttctagctgcatcctcacatagtagaaggcagaacggcaagaaagaaaaccaactctctcagccaagcctctttataagggcacctaaccctcatggcacctcctaaaggttctatgtcttaatacttccacattggcaacacctgaattctggagaggacattcaaaccacaacaataacacacactctgttgactgctttttgtgctctctctccttatagggttcccaggatcacattacaaaatacgctacctgcactcccatccttgtctcaagatatgcttctggggaaccctaaatgaggcagtagggcatattccctcagaaaggagtgcttgcaaatttgggaagccaaggcaggcaaatcatttgaggccaggagtttgagacaaacctggccgacatggcaaaaccctgtctctactaaaaatacaaaaattagcagggtc

SEQ ID NO: 954860 - DNA, 617 bp, Homo sapiens
ggatgaagcagacttgatcgtggtggataagctttttaatgtactgctggattcagtttgccagtattttactgaggattttcgcatcaatgttcatcagggatattggcctgaaattttgttgttgttgttgtgtctctgccaggttttggtatcaggatgatgctggcctcataaactgaattagagaggattccctctttttctattgtttggaatagtttcagaagaaatggtaccatctcctctctgtacctctggtaaaattcggctgtgaatccatctggtcccgggcttttttttggttggtaggctactaactactgcctcaatttcagaacttgttattggtctattcagggattcaacttcttcctggtttagtcttgggagggtgtatgtgtccaggaatttatccatttcttctagattttctagtttatttgcatagaggtgtttatagtattctctgatagtagtttgtatttctgtaggatcagtggtgatatcccctttatcattttttattgtgtctatttgattcttctctcttttcttctttattattctggctrttggtctatacactttgttattgttttcaaaaaaccagctgc

SEQ ID NO: 954861 - DNA, 801 bp, Homo sapiens
tagaacagctgcagtctaggcttaaaataagaacayggaacactaagaattggatgggaagagagaagcagacatgaatgtgtatttcacatgaatgagaaatgctaggtacatagcaactcaggcatatgaggaagaaataaggagtagaggctgggtataactacgggcttgcccttgagtatgtatttctttctcaggtcaggagcttcctctacacagggcccaaaggaacacagtaaacaccattttgatttgcatcaatatccagtgaaatccaccattggttggtaaaaagtggtgtccttcagaaaaggatccttgacaatgactattgctatacagaatggggtttgggttcagggagaaagccatcagtttttccagagtcctagtgtggaaggtaacttcagaacagagcaaaaaaaacaaaaaaacaaaaacaaacaaacaaacaaaaacaaaaacaattgcagacttttgactaacatggtcaaacatggtagaaatagggaaaagctgtgagtctgtgggtatttgggtgccagtggcagcaaaaataatttcagtctccattggttggtgagtttcaggctgttaatataatcatacagtttggaactgagtatggctacacatgcaggtaaaagatctcaggaatcacagccgctcatggaatacaggacataattataactatttgtgtggggagttcaaatatgtctttgtaatttaggctggaatgtatatgccaacacatttgtatcttgaatatataaaaccatatttgtgtctgaatca

SEQ ID NO: 954862 - DNA, 652 bp, Homo sapiens
ccccagatcagggaggttaaggtttgggagaaaggttcaggtgggtsaatactatagctatatgaagttgatttaaatggctttccaggtgttctccctaattccactcttgggggctgagaatctatccttcatatggcagccagagtcgttttaaagctgggccatacaacctcaacgtgattgacgtttgttggggggccatcctatgcattgtagcacatttagcagcatccctggcctctacccactaggtgccagcagcagcactccctccccacgttgcgacagccaaaaatgtctacagacattgacacatgtcccctgggggaggggagtgaaatcataccccctatcttcacttccccctgccccactgagaatctccatcataaagtgtaagtcagcccatgttactccctggtcaaaaatcctaccatgtcttctcattgttctgagcatgaaatccgccgtttggcccagccttcaaggccttgtgtagtccagccttgcctccctctcctgccccaccttgtacccctctgctgtcatctaccatcaccctttagccacatataaccctttttgacatacctcgataaaccaagctctttcttggacagggtggaagatggagagatatgggcagatt

SEQ ID NO: 954863 - DNA, 638 bp, Homo sapiens
tctcattgggcctctctattctctgagaaccaacaatagtgaaatagsccaattaatagccctgcaatagactcttaagtgttcaactgaagagtcgcacatctcttactttaaatcaaaagctagaaatgattaaacttaatgaggaaggcatattgaaagtcgagataggctgcaagctaggcctcttgcaacagttagccaagtcatgagtgcaaaggaaaagttcttgaaagaaataaagtgctgttacagagaacacatgaatgataagaaagtgaaacaaccttattgctgttacaaagaaagttttagtgatctggagagactgtcagccgcaacattcccttaagccaaagcctaatccagagcaaagctttctcttcaattctgtaaaagctgagagctatcaggaacctgcagaagaaaagaagctagcagagtttggcttatgagatttaaggaaggaagccatctccataacataaaaatgcaaggtgaaacagcaagtattgatgtacaagctcagcaatttatccagaagacatagccaagataattgatgaaggtggctacactgaacaatacgaaattcagtttagctaaaacagacttctgtaggaagaagatgtcatcta

SEQ ID NO: 954864 - DNA, 638 bp, Homo sapiens
tctcattgggcctctctattctctgagaaccaacaatagtgaaatagcccaattaatagccctrcaatagactcttaagtgttcaactgaagagtcgcacatctcttactttaaatcaaaagctagaaatgattaaacttaatgaggaaggcatattgaaagtcgagataggctgcaagctaggcctcttgcaacagttagccaagtcatgagtgcaaaggaaaagttcttgaaagaaataaagtgctgttacagagaacacatgaatgataagaaagtgaaacaaccttattgctgttacaaagaaagttttagtgatctggagagactgtcagccgcaacattcccttaagccaaagcctaatccagagcaaagctttctcttcaattctgtaaaagctgagagctatcaggaacctgcagaagaaaagaagctagcagagtttggcttatgagatttaaggaaggaagccatctccataacataaaaatgcaaggtgaaacagcaagtattgatgtacaagctcagcaatttatccagaagacatagccaagataattgatgaaggtggctacactgaacaatacgaaattcagtttagctaaaacagacttctgtaggaagaagatgtcatcta

SEQ ID NO: 954865 - DNA, 476 bp, Homo sapiens
tggtatgtattttttttagacacgtactgttgcacacttaacagactacagtataatgtaaacataatgtatatgcactggaagaccaaaaaaatagtgtracttgctttattttgatatttgttttattatgtggtctcaaattgaacctgcactttttccaaggtatgcctgtattctgtttcttagaggaactccacatatttgtataagattggctccaccttattctcactgtgtgtgactatgctggtcataaatgtgttcatacccactatgtgtctataagacaaaacctattctgacttgtcttttcccatgctttttcatctttctactctaggctaagagtagaggtagatcttggagaagagggacctgacaaaattttaatgtagttgtctttttctttgacaaaggaaggaaagcccatctcaagaggtcctttctttttctgtgttttgctttctccatca

SEQ ID NO: 954866 - DNA, 575 bp, Homo sapiens
tgtattataattttctatctgccaatcctgactttggtctcctttaggtctaggatatgtttattgtctatgtatctccaatacttgacacataacaggtactcartaagtatttactgtatagtaaataatgtgattcttacctttctcttctggttttttccaatttgtcttttaaaatcataatttctttgttgagagcaagttgctgaccttctgaatcatgcagttctttcttaagattttttatttcatttgcatgtattccttctcttttagataattcttcttcataaaagatacttttcttttccaaatcagtctttagtttggttatctcttgctgatgttctatgctgcatactcctggtgagtaactaatttgtttttgctatagaaataataacaaaagattagtgcatctacaagaataataaaatatttaaataacttctttctgtaatataaatgagtattcatataactgcattttttgtacatcctaacaaaaataaaattctatgttaaatctactaactttttgcctgccatatattgcaaatattttcctcagt

SEQ ID NO: 954867 - DNA, 612 bp, Homo sapiens
acaaaagcctgctctttctagccaaaggattaggaaaggggtagaccagaaagacagacaactcacagaaagtaacaattctacttgagataaacatcacagaaaaaaaaaaactggccccatgtcaccaatgtcaacaatggacaagtgcagggggagctagatttccaacctcatgaggctataatgagatgctcaaacacatctgcaagagtggtgtcagaaaaatgctgggtgtggttactcatcccaaaaatcccagcactttggaaagctgaggagggcgaatcacttgaggacaggagtttgagaccagcccaggcaacacagcgagaccccgtctctactaaaaatacaaaaaattagctgggtgtggtcccagctactcaggaggatgaggcacaagaattgcttgaacctgggagatggtagttgcagtgagctgagatcgcgtcactgcactccagcctggggaacagagtgagactctgtctacaaattaaaaaaaaaaaaaaaaaaaagagtgatgtcagaaaaagacaggacattaaccctcactrgctgacaacaagcctctcctcacacattgtcagtagaaaccacacggggaac

SEQ ID NO: 954868 - DNA, 581 bp, Homo sapiens
ccaagtggtgactccaagtgcagctgctgtaccacatgtagtttcattgctggaacaaattaacacatctcctgtacctggtatttagtcaytactttggcaaatgcttatttctccattcctgtccataaggcccaccagaagccatttgccttcagcaggtaaggccagcaatataccttcactgtcctacctcatgggtatatcaactctccaactttgtgtcataatcttgtttgcagggctcgtgatcacttttctcttccacaggatatcacactggtccgttacattgatgacattatgctgactggacccagtgagcaagaagtagcaaacacactggacttatgtactgatccatggactatagccaatggtttggctggatggtcagggacttggaagaagcatgattgaaaaattggtgacaaagaaatttagggaaaaggtatttggatggatctctctgagtgatcaaaaactgggaagatatttggatcccatgtgagtgctcatcaatgggtgacctcagcagaggaggattttaataatgaaatggataggatgactaatacaaa

SEQ ID NO: 954869 - DNA, 578 bp, Homo sapiens
acttattaactataacaagaacagtatgggggaaactgcccccatgattcaaattatctcccaccaggtccctcccacaacatgtggaaattatgggagttcaattyaagatgagatttgggtgtggacacagagccaaacaataccattctttccctggcccctccaaatctcatgtccccacatttcaaaaccaatcatgccttcccaacagtcagtcacccaaagtcttaactcatttcagcattaacccaaaatccaccatgcaaagtctcacgtgagacaaggcaagtcccttccacttaagagcctgtaaaatccaaagcaagctagttccttcctagatacaattggggtaaatgtattgggtaaacacagcagttccaaaggggagaaattggccaaaacaaaggggttcagggcccatgcaagtctgaaatccagtgggacagtcaaattttaaagttccaaaatgatctcctttgactccaggtctcacatacaggtcatgctgatgcaagagggaggttcccatggtcttgggcagctctgcccctgtggctttgcaggatacagcc

SEQ ID NO: 954870 - DNA, 642 bp, Homo sapiens
ctaaatttattaagtactcaaaaactagatgtaactagaaatctgaaaacaaaattcagtttgggtttctgtttatactcatatttatattatctagggcagtttcattaaattaaaatgcggtgtgaaaatttagttggtaacaaattacatcttgctttttctttttatttttttcttttgagacggagtttcgctcttgttgctcaggctggagtgtaatggcacaatctcggctcactgcaacctctgcctcctgggttcaagcaattctcctgcctcagcctcccgagtagctgggattacaggcatgcgccaccacacctggctaattttgtatttttagtggagacggggtttctccatgttggtcaggctggtctggaactcccgacctcaggtgatccgcctgccttggcctcccagagtgctgggattacaggcgtgagccaccgtgcccggccttacatcttgtgttttaatgaacagaataaaatggtgagacctcacaagcaatggaagyaaatactatttcacgaaacatttattctagttacacacaaattggctctgggttgctaagtacaatgtattttgtattgttggctacagtttaaaaaaagaagtaaaaaagtcattgat

SEQ ID NO: 954871 - DNA, 631 bp, Homo sapiens
gaaaccagaggccattatctctcagcaccccactgagggacttgttaaagggggacaggagccaactgaaaggggtcccagtggctaagctagaagtatttgaaacaaaacaaaagtagtaatggattataaccaaaagtataacatatatatccatgattccataaaaatataaacaaatgattaaataagtaaataaatatgaaggaaggcaaatttccctgcagaagcattcccaataacaggtagataacccaccctcaatggggggaagcaccaaccctcattgcttaagtatggatggcacatagtgacttccttcgaaagaatgtgcacagggaggaagtacagtgacatcacagtggagaagcccaggaaatccctcctccgccaggtgatcaaggtgaacgtcaacagtgatgaatcatgttgtttgtacataaccagagtataatgggatggaaatgtctcttcacttctgtggtcttcctcatacacacagacaaaatccgaaagccctgtccaaccatcagaaaacactagacaaatttcaatagagaggcattcgacaaagcacccagccagtsctcctcagagctgtcaaggtcatcgagacaaggaatgctcgaga

SEQ ID NO: 954872 - DNA, 492 bp, Homo sapiens
ccagctaatttttgtatttttagtagagatggagtttcaccatcatggccaggctggtctcaaactcctgacctcaggtgatccacccgcttcagcctcccaaagtgctgggattacaggcatgagtcaccgtgcccggcctctgccaagttttttgaagaacaaatgaatcataaaatgctggtcatgtcacttctggcttaagacttctcccagcttgcaggagcagtttccaatgcatttgctgcaaacccttcaaatgaaatcttacactgaaaatctaaatgaacaaccaatgaaagtgcagcttccctgagacctggggtggggctgggtgcagaacctgcatcatctcgtccgttccctccctctggttcaccttcctccaggtgccagtggggctctgaggattccagggagctcagtttgaaccmctggcctaaagctcaggtccaaatgcttggttagagcgtataaggcacaccatggtgc

SEQ ID NO: 954873 - DNA, 582 bp, Homo sapiens
aagtaggctgacagttcctcaaataagattgaattatataatccagcaattttactcctaggaatctacctgagacaaataaaaatatatgyccacacgactcatcatgaatgttcatagcagcagttttcatagtagccaaaagatgttgacaacccaaatgtccatcaactgatgaacagataagaaacagatagcatttccacacaatgaattatttaacaaaaagaaatgaagcattaatagatgctgtaacatttatgcactttgaaagcctatgctaaatgaaaaagtcaaaaaggaccaaaaattatatgatttctttcatgtgaaatttccagaaaagtcaaatctatagagacagtagatagataattgattgcctaaagttaggggatgaggagattggggcagcgggggggaagcggggtgaagatgaacaagaacagagcttctttatgggttagtaaaaatgttctaaaattgcttatggtgataaatgtacagttctgacaatagtaaaagccattgaattgtatagccattgaattgtacacttttaatgagtgaactgtatgctat

SEQ ID NO: 954874 - DNA, 582 bp, Homo sapiens
aagtaggctgacagttcctcaaataagattgaattatataatccagcaattttactcctaggaatctacctgagacaaataaaaatatatgtccacacractcatcatgaatgttcatagcagcagttttcatagtagccaaaagatgttgacaacccaaatgtccatcaactgatgaacagataagaaacagatagcatttccacacaatgaattatttaacaaaaagaaatgaagcattaatagatgctgtaacatttatgcactttgaaagcctatgctaaatgaaaaagtcaaaaaggaccaaaaattatatgatttctttcatgtgaaatttccagaaaagtcaaatctatagagacagtagatagataattgattgcctaaagttaggggatgaggagattggggcagcgggggggaagcggggtgaagatgaacaagaacagagcttctttatgggttagtaaaaatgttctaaaattgcttatggtgataaatgtacagttctgacaatagtaaaagccattgaattgtatagccattgaattgtacacttttaatgagtgaactgtatgctat

SEQ ID NO: 954875 - DNA, 603 bp, Homo sapiens
gagggattatgttcaaatgatctcttgtacagcatgatgactatagttgatgatatattcttgaaaaatgcgttaggtattctcaccacaaaaattaccatataacatgaatttattaactagatttaaccatttcactatgtatatatacttcaaagcatcctgttgtacaaactacatacatacaattttatatgtcaatttaaaaatagattaatcttttaaaaatcgccatctatattggcttgagaattatctaaatcagaaagaaaaggagaaaaggttaacctcataaagatcaactttaggccgggcatggtggcttacgcctataatcccagcactttgggaggccgaggcaggcggatcatgaggtcagtagatcgagaccatcctggctaacagggtgaaaccccgtctctaccaaaaatacaaaaaattagccaggcatgatggctgatttgcatgattggcacctgtagtaccagctactggggaggctsaggcaggagaatggcgtgaacccgggaggcggagcttgcagtgagctgagatcgcaccgctgcactccagtctggatgacagagcaagactctgtcaaaa

SEQ ID NO: 954876 - DNA, 603 bp, Homo sapiens
gagggattatgttcaaatgatctcttgtacagcatgatgactatagttgatgatatattcttgaaaaatgcgttaggtattctcaccacaaaaattaccatataacatgaatttattaactagatttaaccatttcactatgtatatatacttcaaagcatcctgttgtacaaactacatacatacaattttatatgtcaatttaaaaatagattaatcttttaaaaatcgccatctatattggcttgagaattatctaaatcagaaagaaaaggagaaaaggttaacctcataaagatcaactttaggccgggcatggtggcttacgcctataatcccagcactttgggaggccgaggcaggcggatcatgaggtcagtagatcgagaccatcctggctaacagggtgaaaccccgtctctaccaaaaatacaaaaaattagccaggcatgatggctgatttgcatgattggcacctgtagtaccagctactggggaggctcaggcaggagaatggcgtgaacccgggaggcrgagcttgcagtgagctgagatcgcaccgctgcactccagtctggatgacagagcaagactctgtcaaaa

SEQ ID NO: 954877 - DNA, 645 bp, Homo sapiens
cttggtaggggctaatgcaactgatgacttgaagtagaagccagtgctcatttaccattycataaaccctagggtctttaagaattatactaaatctattctccctgtgctctagaaatggaacaacaaagcctggatgacaaaatgtacatttacagcatcatttactgattattttgactccactgttgagacctacttctcaaaaaaaaaaaaatttttttttcaaatgattgctgctcattgacagtgcacctggtcacccaagagctctgatggagaagcacaaggagattaatgttgttttcacgcctgctaacacaacgttcattctgtagctcatggatcagggagtcattttgattttcaagtcttattatttaagaaatacatttcacaaggcgatagctgccataaatagtgattcctatgatggatctggacaaagcaaattgaaaactttctgggaaggattcaccattctagatccccttaagaacatttgtgcttcaatgggcaaaataaaagatcaacattaacaggagtttggaagaactggctttgaggtgtcaagatgtcattgaaggaaatagctacagttggggtggaaatagcaagaaacctagaagtggaacctgaagatgt

SEQ ID NO: 954878 - DNA, 551 bp, Homo sapiens
ctctggatgcagcaatgttgagggaaatttataacactraatgcccacatcaaacagctagaaagagctcaacttatcaaactaacatctcaactaaaagaactagagaagcaacagcaaacaaatcccaaagctagcagaatacaagaaataactaagatctgagtggaactgaaggaaatagagacatgaaaaacccttgaaaaaaattcaatgaatccaggagcagtttcttgaaaaaatttaagaaatagaccactagttagactaataaagaagaaaagaaagaagaatgaaatagacacaataaaaaatgataaatgtgatatcactactgatcccacagaaatacaaacgaccatcagagagtactataaacacctgaatgcaaataaactagagaatctagaaaaaattgataaattcctggacacatacaccctccaaagactaaaacaggaagaagttgaatccctgaatagaccaataacaagttctgaaattcagaccgtaataatctatcaaccaaaaaaaatcccaggaccagacgg

SEQ ID NO: 954879 - DNA, 551 bp, Homo sapiens
ctctggatgcagcaatgttgagggaaatttataacactgaatgcccacatcaaacagctagaaagagctcaacttatcaaactaacatctcaactaaaagaactagagaagcaacagcaaacaaatcccaaagctagcagaatacaagaaataactaagatctgagtggaactgaaggaaatagagacatgaaaaacccttgaaaaaaattcaatgaatccaggagcagtttcttgaaaaaatttaagaaatagaccactagttagactaataaagaagaaaagaaagaagaatgaaatagacacaataaaaaatgataaatgtgatatcactactgatcccacagaaatacaaacgaccatcagagagtactataaacacctgaatgcaaataaactagagaatctagaaaaaattgataaattcctggacacatwcaccctccaaagactaaaacaggaagaagttgaatccctgaatagaccaataacaagttctgaaattcagaccgtaataatctatcaaccaaaaaaaatcccaggaccagacgg

SEQ ID NO: 954880 - DNA, 537 bp, Homo sapiens
actctgccatagggctgttgcagtttgctttgagtctgctttagaccccagttgcctcactttcttctgtacctggaggtatcaccagtgaagactgtgaaacaacaaagatggcagccagctccttcttttggaagcttcatcccagcggggtactgacctgttcctggcctgtacacctgtatatgatggctggaggtccccgttaggacctctcatgcagtaaggaggaatgagttcaggcacccatccaaagaagcagtctggctgctttctgggagacaaagtgtgttgtgttgcagggtttactttttgtccagactgcctgtattcttcaaagccagcaggctggagttgctgagtcaactgaactacagagatgtcagcttatcatcccactgggagcttcaccctatggagaggttaaagctttgtccatagcaatytgcctggattgtctgaaggccctgcagggaggtcccacccagtgaggaaaaatggattgtgctctcacttaaagaaacagtctcgccacaa

SEQ ID NO: 954881 - DNA, 657 bp, Homo sapiens
ttgttggttgggtagggaactttgggtttgattctgggtgtttgcagtaatatagtccttgtatgagttatttgactgtaarcagcagttattgctatgatttcttcagtggtttatagtgcagttgctaatagaggctgttgtgatgtttgtgtgtggatgtgaatgccaagtatgcctgtcttcaggcttccaatgtggcagcagtggatttagtgtgcctagttttgggccccaatgacagcaggtctaggtaggctgatttgttggaccccaaacagcttgctcaggtacaggcagtttcaccatttgcccaagtgggtgagtgagtctttggggccttgggtaaagggtgtagcatgagtgatggcagtaataagggcagaacaacactctggctcccaggtggtttcctctagtgttggtggtttctgtgatatgctgtgcacaaaagtactcaagcttgcagtttgtgtgggtgggtgccagctgcagtcgtggcatgttgggtgttcttcagtctcctaggaggagtgctcagatgtcaaaggtgatgaatggggcagggtgattcccaggcccccagatgttggcctcaggctctgcaggggcatagttgggccagatgggcctgctctcaggcccctcagtggttca

SEQ ID NO: 954882 - DNA, 568 bp, Homo sapiens
gagcgacagagcgagactccatctcaaaaaaaaaaaaaaaaggcaaactaacactgaaatgcaagcttacagcaagatttattgcaacacagtaaaacactctgagggagagcaggctcatttctgggaagtaaaatcagcccctctttacaaaaatcaaggtgcttttatggggtttgttggaggagttgaggcttgggctgtgtttgagtgacaggatgatatcatttgattggcagtttatggttatatccctgaagttaaactgcgcatgtttttacccataattcattaagaaaagcccactcagagaggcaaaaccacatgtaaattttattataacgactataatgaggatgggttttccctgggttatggcctacatggactgggcacgtgtggctttaggccatcgttatctgtgccccagtttttctttctccaggatgtgctggccccagattgtaccataaattccatccattagggtggagttaggacggtctcaggctgaacttaggtgggctagggcyggtcttagtgacagccctcctgctttcttctctct

SEQ ID NO: 954883 - DNA, 589 bp, Homo sapiens
gagccatatttttcttcttgcagagagtctataagcagatgtgcaagtaggaaagatattgctaaattcttttcctagcaaagaatattaatattaataccctcggaaaggaatgtgttcctggagggaggtctataaacggccgctctgggaatgtctgtcttgtgcagttgagacaaggactgagataagccctggtctcctgcagaaccctcaggcttcctagggttgggaaaactccaccctggtaaatttgtggtcagactggttctctgctcttgaaccctgttttctgttgtttaagatgtttatcaagacaatacgtgcaccgctgaacacagacccttttcagtggttctccttttgccctttgccctgtgatctttgttggacccttatcagtggttctgcttttgccctttgtcctgttccctcagaagcatgcgatctttgttagatgcttattagtggttctactgtttgctctttgaagcatrtgatctttgtacctactccctgttcttacaccccctccccttttgaaacccttaataaaaacttgctgttctgagactcaggcaggcatcat

SEQ ID NO: 954884 - DNA, 646 bp, Homo sapiens
tcctatcattttcttcccaaacatggcctgaatctcaattctatttctctggaggattgaactgattatgttatagcattttgcttgatattacacttttgtttttctttcccttcagcatcccattttctcatattcccaccaatttttccagggaacacttcctgataaatcacttttgtacgaaacctcatcccaggatttgcttctggggaacccaagctgagataagcatacattaaaaatgtgaacacttgtaatcatcaggataatctacttagactttattgagtattttttttttgcactctcaaggcacattttgacatggtttgtattccctatactaaaattttcctggagttgatatttggatatttttcattcacttgtttcaagtttaggtaacacatagaatcaaatatttaaaattgcatatgatttgtgccctgaagaactttccagattattgaaactagttctagtctttcagagatgcttcaagagaagctaaacaatttagccataattgtagaacttaatagcggtaaaagcyagaattagaagctttttctcttttttctagccagtacccagtggtgtcttcctgttataaaatgaacacattttttcccctttatctgcc

SEQ ID NO: 954885 - DNA, 762 bp, Homo sapiens
acatcaaccattgtcaaccaatgatattttttctggcattgacattgacttttcacataaaatttcacatagaatttcatataaacgaaattatatggaaaataaccttacaggcttgacttcttgcactttgcataatgcttttgaatttctcccatgctgttactaattttttcttttctattgctgagtattatttcattttggctataccaagactcatttatccattcatgagtcaacagacattttagtgtgtcttacataaagctgctatgatgattcatgtcttgtatgcaaatacttttttttaaacaaaatttctcttggctaagtacttaggagtgcaattaccatcccatttgatatgtacctattcaactttacaagaaactgccaaattattttccaaagtagctgtgccatttttcattcctgcaggcaatgcatgagagttcaaattgttatgctcatcagtattgtatatggatatttatatttgcttcctttttagtcaatctagtggctacatagtgctatttcattttggttttgctttaaattgcacttttatgatgtatattattgaatagtgaagtcggagagcttttttcttaaagggttaaagaagaaaaaaaatargcttgctggccatgcattgtatctccaacctactcaaccctgccattgttgttcaagaacagccagaggcaatatataagagagtggttgtggctgtgatccaataaaagtttatttaca

SEQ ID NO: 954886 - DNA, 615 bp, Homo sapiens
tctttgaattttgatacaattaatcaacatgtgtccttgtattaaaaacattatatttgtaacacactctcttatgtaccagtaccattaaatggttatgcttaraattttcagtttatatttactggacggtcatgcatagacttttttgggtatgtaataattctttcttaacacttagaaaatttacttgaaaatttgaaggacacttttagacacatagtcatagattgttctaacttacatgacccttatgcatatgttaggaagacaatacaggttaattaattggttaaatgtttctaaaatgtcttcacagttggcttacctttctaaaacacttttaaatcatctgtcattgtcttctttttccaaataattatattttctatggcaacaagagagatgatattgcaggctttcttaaaagatcacttcactcttgtttctagtgttttcttccaaatcaataaatacggaattttaacagaaaatgttaaagatgggttttgaacaatgagaaaatatatttctttctcagatgtttcttaggtggaaagaagatttctgatctacagtcataacaccaagattgacatcactgttactgttaag

SEQ ID NO: 954887 - DNA, 467 bp, Homo sapiens
aatgtggctcccctctcatgaccctcccactggtctcattgtgccttgttggctcyggttgggtcccagaaccaatcactctggctagggcaatagaatgctccttttggccatggctgaatcacccagacactgttggggtttgggtgtgggagaggacactgttggggttcgggtgtgggagaggacacctgcacctgcacagggactgaggctgaaaaggaaaatagaagcactcttccagaagggtgaagaaatgccgatagtccaaatcaaagtgataacaaagaagatgttcagttcagccttctctcatagcctacttcttgccttctagcctagagccacctgattgtcccttgaagctctgaaatttaaattgaaggataaatataaattgtgtgaaggaaggccctttacagtaaactgaataatgccccccaccccgaccccaaatatccaggccc

SEQ ID NO: 954888 - DNA, 635 bp, Homo sapiens
agtaacaattgagacacatcttgttaggatctggtagagcacactttactayagaatcagaatagaatgtaaaaagaaatgagaaaaaatattataagaaatgcctggccatgatttgactgatagttattgaaggtgaatgacaagtatgtggagcctcattattttactcttcacacttctggagagttttcccataatgaaagatagaaaaaaatagagctaagaaaaacctaggagacgtgttatattttttaaagcaaatatcctaaaatataactttgttatttgctttctctgccaagaatgtagtatatttatgttcataattctgactttgatagactctcattagattaagaagaaaatatgaaggcaacatatcttaaccttttggaatcactaaaggcttgagaagtcagtttctgaaggaatatagcacttatatcctgattccaccctttctcccacctcaataaagtttttgaggctctttaacttaccttatagcatctctttcaccttctagatatcttttaacttcactgttacggcaccaactttaatgtaaacagagggggaaaaaacacaaaacacttttaaagggttagaactagaattttttcccctccata

SEQ ID NO: 954889 - DNA, 576 bp, Homo sapiens
tcctctaattcaattccaagattatctacctggagatagcatcagatcccacaggttgagggctcaatcccacaagccccctctcctccttcccmtcaatttcaagtccaggcctctggaacttcagactgactggcttcagggtggggttcccataattccctctttgggtttcactaatttgctggagcagctcacggaacttagggaaacacttacttgtatttacctgtttattatgaagatattttggttttttttttgagatggagtttcgctcttgttgcccaggctggagtgcaatggcgtgatctcggctcaccacaacctccgcctcccgggttcaagtgattctcctgcctcagcctcccgagtagctgggattacaggcatgtgccaccaccctcggctaattttgtatttttagtagagacgtggtttcttcatgttggtcaggctggtttcaaactcctgacctcaggtgatccgcccaccttggcctcccaaagtgctgggattacaggcgtgagccactgcgcctggccttattatgaagatatgttaaaggatacaaat

SEQ ID NO: 954890 - DNA, 576 bp, Homo sapiens
tcctctaattcaattccaagattatctacctggagatagcatcagatcccacaggttgagggctcaatcccacaagccccctctcctccttcccatcaatttcaagtccaggcctctggaacttcagactgactggcttcagggtggggttcccataattccctctttgggtttcactaatttgctggagcagctcacggaacttagggaaacacttacttgtatttacctgtttattatgaagatattttggttttttttttgagatggagtttcgctcttgttgcccaggctggagtgcaatggcgtgatctcggctcaccacaacctccgcctcccgggttcaagtgattctcctgcctcagcctcccgagtagctgggattacaggcatgtgccaccaccctcggctaattttgtatttttagtagagacgtggtttcttcatgttggtcaggctggtttcaaactcctgacctcaggtgatccgcccaccttggcctcccaaagtgctgggattacaggygtgagccactgcgcctggccttattatgaagatatgttaaaggatacaaat

SEQ ID NO: 954891 - DNA, 608 bp, Homo sapiens
tttcttgataaccagatgtgatgtaccaggtaaaagtaactgtaactgctgtaaagaggcctgcagtactataagtaacatgtgtgggaaggggaaaggttctatagccctgtgattaggtctgagtcctttagggagccttagcctctgggctgtgaccttcacaagagcttctcagccctccctcccatcaccacccttacttggggacaggatggccagaggtgggtaatttccttcctccaggcaggttaggctctgaaaacaaaaaacaaaacaaaacaaaacaaaacaagaaaacaaaacaccagtagcttaggtgaaatatttgcccttgaggaaagaccttgttaagaagaacagaaagctctggtgtacttcaagatggttccttttcaccttccctttctggaagcatgaggagatttttctccaacattcactgtgagaacctggtcaagctaggtgtcaaactcacagaagtgtggggacccttctctgtctgggtcttcctggagtttttaactctcagatgtgtccacatcgaacatccaacaattcrtcaattaagtttaggttttcctaccttgacaacggtttccccaaag

SEQ ID NO: 954892 - DNA, 595 bp, Homo sapiens
tcgatgttgctgaagaggacatgatcctcctctttgttctggctgcatagtattccatggtgtatatgtaccacattttctttattcagcctgtatgataaatattattttttwaaaaatcttgagttctaaattctcccactcagtcataaagacaagtatgaataaattactatttggtagtataatgaaggttataaggaacattttaaagtaattcttcagaactgttttagactatgctgttaggaaattgtagtctctctcaaatttaacaggcattttaccaagcatatttttataatttggagatgaagattttttccaggagcagtaacgtagactctaataacatgagagcaagcatgagaacagtatgtaaagccaaagtcaccatctctcctcctaccccctcttggtgattattcttaatttcagagtcaaaaatgactgccatctttgcagttgagaagcctaaaagacattcctgactcttctgtcttcctcacattcatgtctacttaatcaagtcaattttatctctagaatttatctgtattaaccaccatcaactccctgggcacagtgacaccat

SEQ ID NO: 954893 - DNA, 595 bp, Homo sapiens
tcgatgttgctgaagaggacatgatcctcctctttgttctggctgcatagtattccatggtgtatatgtaccacattttctttattcagcctgtatgataaatattattttttawaaaatcttgagttctaaattctcccactcagtcataaagacaagtatgaataaattactatttggtagtataatgaaggttataaggaacattttaaagtaattcttcagaactgttttagactatgctgttaggaaattgtagtctctctcaaatttaacaggcattttaccaagcatatttttataatttggagatgaagattttttccaggagcagtaacgtagactctaataacatgagagcaagcatgagaacagtatgtaaagccaaagtcaccatctctcctcctaccccctcttggtgattattcttaatttcagagtcaaaaatgactgccatctttgcagttgagaagcctaaaagacattcctgactcttctgtcttcctcacattcatgtctacttaatcaagtcaattttatctctagaatttatctgtattaaccaccatcaactccctgggcacagtgacaccat

SEQ ID NO: 954894 - DNA, 787 bp, Homo sapiens
ggtctatccaatgccatgggagcccccatcttgcatcagcatgacctggatgtcagatraggagtcaaaggagattattttggagctttaatacttgactgcactgctgggttttggacttgcatagggcttgaagccccttcgttttggccaatttctcccatttggaatgagtttatttacccaatgcctgaatccccattgtattttggaagtcactagctcacttttgattttacgggttcataggtggaaagcacttgccttgtttcagatgagtctttggacttggaccttttggttaatcctggaattaattaagactttgggagactgttgggaaggcattattggttttgaaatgtgaaagggacatgagatttgggaggggctagtggcagaatgacatggttaggctttgtgttcccacccgaatctcatccagaattgtaatccccataatcctcatgtgtcaaggggggggaccaggtgaaggtaattgaatcgtgagagtgatttccctcttgctgttctcatgttagtgagtgagttctcacaatatctgatggttttataagggggtcttccctgcttctcctgaaactcctccttcctgctgccttgtgaagaaagtgtattgcttccccttcaccttctgccataattgcaagcttcctgaggcctccccagccatgttaaactgtgagtcaattaaaccttcctttaaaaattacccagtctcaaagagttatttatagcactgtgaaaatggactgatacattttcc

SEQ ID NO: 954895 - DNA, 677 bp, Homo sapiens
accacggcctcatggacctcaataaatgcattttagaaggaagagaaatttcacagaagttcattcaccaatacccatcaatctctgctgtgaataaaacagcaaacaaacccagtcctaaagagtttgaatgycatagatggtctggtatatccctaacttcatacacccatagaggtgagggagtctgatttcctatgtaaagtatggagggtaaaaatagagcctaggatcagggctcaaaatcttttccaagaacagaaaaagcaatgtttatatattaaaaaatagtgtgtgcatgcgtgcatgtgtgtgtgtgatttacatacatatatacgcttaggcctttaggacaaagatgtttctcatgcaattgataaatatccattttgattgacacctctaaagtttactaggaaaattagacttctattgcaaaattaatagtatggagtgatgtttcttcttaggtcatatgaagaataaaaaaataataaaaagggaaataagtgtagaggaatgcagaaaatgaaaactatttgtttcctgttaaaagccatgcatagtgaatgtcttgagagaacctaggttccaaattacactcagaccccagctccaccaggccagcagctccctcatttcccagtggcctgccttcactctctagtggtggtcct

SEQ ID NO: 954896 - DNA, 449 bp, Homo sapiens
atggtggcatgtgcctgattcgggaagctgaggtgggaggattgcctgagcccaggggaggtcgaggccacagtgagccatgatcatgccacttcactccagcctgggttacagggtgagactctgtctggraaaaaaaaaaaaagtgcagagcccccatagagtcagaagtaccaggaagagtgtgctgtaaatatgcataaatttccactgaaacagaaaattcctccactattttatatatcccaatgtgcaaaacatgactgtagcaatggaatccatagaatgcttttgtacggaataatagatgacaaatctaacaatagaggtttgtagtttcctatagtactgggtacctgggactataggcttgcaccatcatgccctcctaagctttgtatttttatttatttatttatttatttatttatttatttgtgtagagacag

SEQ ID NO: 954897 - DNA, 595 bp, Homo sapiens
gtaagacaagttcaagtaaaaaggaaatggattaaaggaagacaggaaatgtaaaagaccagaatatggtaagagcttagagaaatctataaaggataattaaaatcagtcttagtcaataaatggagataagagataataaaaggtgttaatggatagatggatggatgggtgttaaggatggatgaaatacatgggggttcattatgcaattatatccacttttaaaatattcaaaatactccatgcgtaaaataatccttcttagaaataataagacattgcagaaaagcaagtctctaatttggaaaactccaagaatgcagaggtaaagttctaggacttaaaaagatgagtagagaaatgaaagatatagagaagaaaaagaaagcaaataacccaataatttatttatctataatgtaaaaaatcagattaaataatgaaaaaaacactcctgtaatcccagcagtttgggaggccaaggcaggcggatcacctgaggtcaggagttcgagaccaccctgactgacatgrtgaaatcccatctctactaaaaatacgaaaattagccgggtgtgatggtgggcgcctg

SEQ ID NO: 954898 - DNA, 593 bp, Homo sapiens
aagggctaatatccagaatctacaaataactcaaacaaattgacaagaaaaaaacaaccccatcaaaaagtgggcaaaggatatgaacagacacttctctaaagaaaayattatgcagccaacagacacaggaaaaaatgttcatcatcactggccatcacagaaatgcaaataaaaactacaatgagataccatctcacacccattagaatggcaatcattaaaaagtcaggaaacagcaggtgctggggaggatgtggagaaataggaacacctttacactgtttgtgagactgtaaactagttcaaccattgtggaagtcagtgtggtgattcctctaggatctagaactagaaataccatttgacccagccatcccattactgggtatatacccaaaggattataaatcatgctgctataaagacacatgcacacgtatgtttatcatggcactcttcacaatagcaaagacttggaaccaacccaaatgtccatcaatgatagactggattaacaaaatgtggcacatatacaccatggaatactatacagccataaaaaaggatgagttcatgtccttttagagaca

SEQ ID NO: 954899 - DNA, 600 bp, Homo sapiens
ggagctcccgccccaactcgaaagaggtggggctcccrgttgtccccagctcccactggctccatggagtgtgcaggcctggccacgcctccctactgcagccagcatgatggtggtggccactccagatggcccgctgctgccatcattatgggtagttgataaaggagacaagagtagagatttgaagagaatggaaaatatttaaaatagccactgtagaaaagtgggaaaatatgctatatggggctgtgttgagggcctgttcttagtaacatttaatctaatagaatatatatattttgaaaaagcattcctggtgctcctgatagatcccctgcttctccatcatgacctgctgctcctctaatttcttctaaaacccaccaaacaaaataaacactgtttgatttaaaatttttaataaggtaactcattccattcttggttccagttagaccactgagtgacttttgtgacaaaaacggagattctcacaaaatacctgttccaaaaatgtttgctagagacttcccagaacaaatcccttacatcagtgaggagacaggagtgcacgggcagtgcgattgacgtgtcctt

SEQ ID NO: 954900 - DNA, 726 bp, Homo sapiens
atattgtgcagaaccatgtgtgaaccaggccctagtcttctcttcctctgtcaactgatcataggcaactccccctgaggctattggcrcaggctcagggagagaaggtagggtggcaggaaaggagaccgtgggcatttgagtcacttcctcatgtaacttatttgtgcctttaggacatgctcaagcctgatcatgtatttaccactttcatttgatgatggaatgctgctgtgcatgacccactttatgactagatgagtcagaaagcacccagttcatgaggcagtttaggatgcatggtaacttgatgacccatagtctaacgttcggtttccaccaaagcccagtaataggccaagagctgtctctcaaaaggagagtagttatctgcagaagatggcagggccttgctccaaaatcctagaggcctccactgtgactcacctatgggagcctgccaaaggctccaaacaacatccctatctgcgagtgacacctcaagtaccatctgatctgctgggtcatatggcccaagtggcagagcagcttgcacagcagacaggacctgttgcagagccttctcctggaccccactcaaaactggcagcctttcaggtcacttgacaaatggcctggagtaacacacccaaaggaggaatgtgttgcctccaaaatccaatgagacccactaggctttgtacctctttcttggttgtaggaggg

SEQ ID NO: 954901 - DNA, 739 bp, Homo sapiens
agaccaatactggctggctctgtggtggtagcaaagagggaaggccggtgagagctgtgggtggggggctccccaagaagagcaggggttggggggaccaagcaacagaccgactgccattgwtcatccctttggccaaggacagactctgtccaagaaaattcaatatggggaaaacattagtaatagttatgaaaatattactggtaataaaaactgtgtggacttgtaatttaaaaacatttaataactagcttaacaatgtgttacaattgtcagacagttttaaatttgtgcttactttcataaatagtagtggccctgcaaaacaaggagcaagaactaaataagagtatgtgtgtgtgtgtgcatatgtcggtgtgtgtgtatgtatgtgtctaggcatgtgtgcatgtgtgcagtgtgcatatgcctgcatatatacacctgtttatatcatgtatgtgtatatgcatgtgtatgcatgtgtgtatataggtgtgcacatgtgtgtatacatgtgtatgtgtgtatttgcatgtgtgtgcatgggtgtatattggtgcctgcatgtatacatacatgtgtgtatgcatgcatgtgtgtgcagtatgtgtataactgtgtgtgtgtacatatggacgtgtgtgtatgtatatatgcacgcatatgtgtgtgtgtgtgtgtgcgcgcatatgctgtaaattaagttctagttacctgctaggcattagaatca

SEQ ID NO: 954902 - DNA, 605 bp, Homo sapiens
ctctgtggtcctgggctttttttggttggtagactattaattactgcctcaatttcagaacttgttattggtctattcagggattcgacttcttcctggtttagtattgggagggtgtatgtgtccaggaatttatccatttcttttagattttctagtttatttgtgtagaggtgtttctagcattctctgatggtagtttgtatttctgtgggatcggtggtgatatcccctttatcattttttattgtgtctatttgattcttctctcttttcttctttattagtctagctagtggtctattttgttaattttttcttaaaaaaaaaaaaacagctcttggattcattgatttttttgaagggtttttcatggccctatctccttcagttcagctctgatcttatttcttgtcttctgctagcttttgaatttgtttgctcttgcttctctagttcttttaattgtgatgttagtgtgtcaattttagatctttccagctttctgatgtragcatttagtgccataaattttcctcttaacactgctttagctgtgttccagagattctggtacgttgtctctttgttctcactggtttcaa

SEQ ID NO: 954903 - DNA, 657 bp, Homo sapiens
aactcaggtcaatgcagaagcgtgagagaagtccgtgtctcacaggaggctggacctatgcagtccgtcctgggactttcaatgttttgtactcataggatctgaaaggactattttcctacttgtgacaaatgcttggagtagatttctgatcttccttcagggaataaagtgttatctgttcagcagttgctttgggaaagaagcgaggggataaatcatcttcaggagttggggggcagtcttctccatccacatcgacccagtatcagttgctggctgaggactcacgagatttgccccccgagtgtgagggtgacacaaagctaggatgggaagagacacactggccagcagaaggttctaaagaggagctaattttaacaaggaaaaatgtgttggagacaaaatagcatcctgcaccgtggcccccaagcaagtggcacagcccctgttcagaggagtccacgctgacaagcagcaggtgcaagaccgcagtgcagaagcagggatcgtgggaggctgcgagcccccagacgcacgggccatggcatgtggcgagagygccacgcgtatcacctccgtgggtggcacccacggaaacaaagcccccgagtccactcagccccagccagacatttgctgccatgagtgagc

SEQ ID NO: 954904 - DNA, 657 bp, Homo sapiens
aactcaggtcaatgcagaagcgtgagagaagtccgtgtctcacaggaggctggacctatgcagtccgtcctgggactttcaatgttttgtactcataggatctgaaaggactattttcctacttgtgacaaatgcttggagtagatttctgatcttccttcagggaataaagtgttatctgttcagcagttgctttgggaaagaagcgaggggataaatcatcttcaggagttggggggcagtcttctccatccacatcgacccagtatcagttgctggctgaggactcacgagatttgccccccgagtgtgagggtgacacaaagctaggatgggaagagacacactggccagcagaaggttctaaagaggagctaattttaacaaggaaaaatgtgttggagacaaaatagcatcctgcaccgtggcccccaagcaagtggcacagcccctgttcagaggagtccacgctgacaagcagcaggtgcaagaccgcagtgcagaagcagggatcgtgggaggctgcgagcccccagacgcacgggccatggcatgtggcgagagcgccacgcgtatcacctccgtgggtggcacccacggaaacaaagcccccgagtccactcrgccccagccagacatttgctgccatgagtgagc

SEQ ID NO: 954905 - DNA, 586 bp, Homo sapiens
attaaactgcacatatttaaattgtacattttgatgagttttcacatgtgtatatacctgtgaaaccatcactacagtgaagataacaaatatatttattccctccaagtttccccatgcctctctgtcatccagcctcctctcctccccaaagaaaaatgtcccctctccaggaaaccactaattttctgtgactgtagactaatttacaatttctatatttttatgaaaatgaaatgagacatgtactgtttttgtttgtcctctttctctcagaataattattttaagagtcattcatgttgctgtgtgcatcagaagatcattattcttttattgcagagtaatattccattgtatagatacaccacaatttgtttatccatttacctgttgatgggcatttgtgttgtttccagtttatggctattacaaataaaactgctatgatcatttgtggacaaacactttcatttctcttgagtaaatacttaagagtagaatagctgggccatatggtagatatacttataatcttttatctaaagtgattgtaccaktttacattcccatcagcgatgaaaga

SEQ ID NO: 954906 - DNA, 611 bp, Homo sapiens
gtctcccacaattaccgttgttcccggcccagacttcaatccggcctcccacattattcctgataccacacctgacccccatgactgtatctctctgatccacctgacattcacgccatttccccamatttccttctttcctgttcctcaccctgatcacgcttgatttattgatggtggttccaccaggcctaatcgccacacaccagcaaaggcaggctatgcttatagtacaagccactagcccgcctcttagaacctctcatttcctttccatcgtggaaatctatccttaaggaaataacttctcagtgttccatctgctattctactactcctcagggattattcaggccccctcccttccctacacatcaagctcgaggatttgccccacccaggactggcaaattagctttactcaacatgccttgagtcagataactaaaatacctcttagtctaggtagacactttcactagataggtagaggcctttcctacagggtctgagaaggccaccgcagtcatttcttccattctgtcagacataattcctcagtttagccttcccacctcaatacagtctgataacagacgagcctttattag

SEQ ID NO: 954907 - DNA, 599 bp, Homo sapiens
aggcaggagcgtgtgtgtgtgtgtgtgtgtacrggaatgttgcagtttgtctgcaacacaaggcacacatagaaagtaaagggacatggggcaggaatgcagactggaacatagcaccaaggcacccccatgccaggccaagggacccttacataagtatttcctactagaaagaaagaacatttctgagcagggaaatgctgtgaagctcaaaccctcctcccccaccaaaatccattgcctcgggctgctggtagttcccctggctaataaggatacctcatccgagccatttccacttccaggctttgtcacctgctgaggccagaaaggcagtgaaagggtctggaagcattggtggcctagggagggtggcccctggtggccactcagctaaccaacatggtggcagaggcggcagcggaggccccactgcgctacgtgggtctgggttggaataacagagtaaatggtgggcagcaacttagcactggcattattggtgaggctgggacacaggctctccaagtcccgctgtggaggaggtgctagcatctacatgcacaccgttcctaatagtaaaatccttggaagacctt

SEQ ID NO: 954908 - DNA, 577 bp, Homo sapiens
tataggcagccatatggactgtgtaggatgccagtgaaataccaaaagatgtcagtagatggcagttgtacacagacttggtgcaagtcgttcaggagaaggataatgccgcgcaacccagtcctgcccaggcattctagctcaaagactaagtgctgtagctgggtgggggtgtagagccttttccgtttgattagggaactagccaaggtgcccagcttgggggcacaccagacgaccagcagtcacatgtgaaattagcaatcctctgatcctccaccaacgtatagcaagtgttagtgctggtagatcccagcacaaatacattctgggggtggatattctacatggcttggccttacaaaccatttgatggactgcttgatgatggaattgggacagtaccactatgtggtagacttggcgaatgcattcttttccagagagccaggaacagtttgccttcatgagagggtgacaatggactttcagtgttgctgmagggctatgtgcagagccccaccatatgtcgtgatcttgatattatgctaacctctgattcttttgcagatttaga

SEQ ID NO: 954909 - DNA, 652 bp, Homo sapiens
aggtggttggcacaagggcaaggtgaccacacgctgattgagtgaatataggcagccatatggactgtgtaggatgccagtgaaataccaaaagatgtcagtagatggcagttgtacacagacttggtgcaagtcgttcaggagaaggataatgccgcgcaacccagtcctgcccaggcattctagctcaaagactaagtgctgtagctgggtgggggtgtagagccttttccgtttgattagggaactagccaaggtgcccagcttgggggcacaccagacgaccagcagtcacatgtgaaattagcaatcctctgatcctccaccaacgtatagcaagtgttagtgctggtagatcccagcacaaatacattctgggggtggatattctacatggcttggccttacaaaccatttgatggactgcttgatgatggaattgggacagtaccactatgtggtagacttggcgaatgcattcttttccagagagccaggaacagtttgccttcatgagagggtgacaatggactttcagtgttgctgcagggctaygtgcagagccccaccatatgtcgtgatcttgatattatgctaacctctgattcttttgcagatttagaagtggcaacactcctctttcctgggattg

SEQ ID NO: 954910 - DNA, 778 bp, Homo sapiens
gaactcataaaactcaacaaaaagataataaacaacccaattcataaggacagaagatctgaaaacctccccaaagaaaacccaaactctttatggattgtacataagcatatgaaagatgctcaacattacatgttattaaggaattgcaaattaaaataacaacgggctatcactatatcactattagaatggctaaaatacaaaaacaatactagcaataccaaatgctggtgagggtgcagaacagtagaaactctcattcatttattgctggtggacatgcaaaatggtgcagccactttggaagacagttcaaaagttttacaaagctaagcatgctcttaccgtaagatttggcaatagttcctctaggtatttacttgattgagctgaaaacttatgtcctcacaaaactaaatgtagtctcaccataggatctagccattatgctcattggtatttacccaaataagttgaagaagttatgtccacacacacaaaaaaaactgcatatgaatgttttagcagctctattcataattgccaaaatttggaagcaacacagatgtcctccaataggccaatagataaactgtggtatgttcttacagtggaatactactcaatgataaaaagaaatgagctatcaagccatacaaaggcatagaggaaccttaaatgmaaattgctaagtaaaagaggtcagtctgaaaaggctacatactgtctgatttcaactatatagcattctagaaaaggcaaaactatagagaca

SEQ ID NO: 954911 - DNA, 487 bp, Homo sapiens
agctgggtttttccgagttccaaacacggcacagtgtatcagtttctgtgctggttacaagcctactggttatccctatcgagtatggcaggcagtgagggacttcagaggagtaygtcttaggacaagtggcatagtactgacattatttccgaagggctacatttcaagtgcttggggagactactgccacataactgaaaattagaaaccgacactgcagaaaaatacttggtccttaaatgtggcatttggatggattaaggacttgccgaaacgtaaaactgacagacttgggggggggggatgtcccaattagcacggcttctgtatgcaacgagtcccatactttgttaaaggaagaaaggaatgtgagttctcctaatctgttaagtatctttcggtgtaagttctgacaccacaatgttaaaaaagtcggatctcaaaaaccaactgctccaagcgaagtgcacagctgtcttgccta

SEQ ID NO: 954912 - DNA, 611 bp, Homo sapiens
cacagtcctgtgtgtctgtttccctttgaactacacaaactaactaatttggtgaacctattaagtgaacttctttatactcatggtctagagtgcattgaacactaaagcgtttgctagagattgtcaaaatcaattctgtcttcttccaactggaccaaggcttctttgagttaataaaactctgagaaatctgagttgatttttcgtagtacctctttctattcttttggggttttttttgtttgtttgttttttacttttcatggagattttccttaatttaacccaaaagatatacccatatgacatttgaatatgaaagaggtagtaggacaaagaatttgaagacagtctttcagagccccacaaagtacttgaaatttatcaataaacccctcctggtgcttcccaccatgttccacattccatctccattttaagccatgaaccttcaagtggcatctcctcctgtgaaacctacagtttggagataaattattgatgactaatgactcagaagaaccaaagaaargatcctctagtggagacacagcatagaaatggtggtccagggtgagaaggaactgcttccagtcccagtgccgcct

SEQ ID NO: 954913 - DNA, 684 bp, Homo sapiens
aggataaaagaaactttttactgtgataaaggaaatctattgcacgtaaagcagctaatggkgaacactaaacattcctatcaaaatcaggaacaaacaagaattccactactgctgccgaagtttgcctttttctggaggttctagacgctaacagaataataaaaatatattagaggtgtaaatattagaaagggaagagcaaaactctaattcctgttaaatgatctgacttttctgtttgttttctgttgctgcataacacattaccagaaacttagtgccttaagacaattcccatttgttttctcacagttctgttgtccagagtctggccgggctgcactgggttccctgattgtggcctcgagagcctgaaatcaaggtgctggctgggctgaattcctgtctggagagtcagggaaaacccacttctaagctcttgggtgttgtggtcacagttcagttcctggggttgcccagctgagctccctgtttccttgacacatgtcactctccatctcagcgacagggagtccctcacatagaaccccctcgtgcttcacatctctgaattcctcttctctctgcagctgcagaaaatgctctgcttttaaagggctcatgtgatgaggttaggtcagcccagataatctctctgtcttaaggtcaactgattggcga

SEQ ID NO: 954914 - DNA, 508 bp, Homo sapiens
tgttggacttcgttaaatgctttttccttgtcaattcagaggatcagatggtttttactatttcattctgttaatgtagtatattatattgattgatttgcatatgtyaaatcagtgttatatgccagaaataaatctcacttggtcatgatgtacagtctttttggtgtgttgttgaattcggtttgataatatttaattgagaattttttgcattaattctcatcagagaaattgacctatagttttcttttcttgtgatgtctttgtctggattaggtatcaagatgatgcttgcctcataaagtatgtttgggagtatttcctgtagccctattttttggaagagtttaggaagtattggtattagttcctctttgaatgtttggtagaattcagctgcgaaggcatctggtcttgggctcttaatttgggggagggttttgattatttcttcaatctctttgttattattctgttcaagctttctatttctttctgatttaac

SEQ ID NO: 954915 - DNA, 486 bp, Homo sapiens
acaggctttcttcattctttttcactttcatttttttcctctgattgattcatttcaaacagcctatcttcaagttcacagaatctttcttctgcttgatctagtctgctgttgaagctcttgattgtatttttcatttcattgatcaaattctttaattctaagatttatgtgtggttttaaaaaaaatgatatctatctctttattgaatttctcattcagatcataaactgttttcctgatttcattgaattatctatctgtattcttttgtatcttcctggatttcctttaaatcattattttgaattcttttttaggcagttggtaaattttcattttcttggagtcagttactgaagaattgttgtgttcctttgatggtatcatatttccttcgttttttgtgtttcttgtatcctgcattgacktttgtgcatctggtggagcagtcacctctctcaaactttacacagtggcttttg

SEQ ID NO: 954916 - DNA, 548 bp, Homo sapiens
ccaagcatggagaacctgaggattgggaggaccaactatatatgaaacataaataaatttgtattttgacttgggtcscatccccaagatatttcatttgtatgtagatattccaaaatccaaaaatatcggaagtctgaaacacttctggttccaaatattttggataaaggatactcaagctttacacacatttgctgtgtggccttgagagagttactcaaccacacttagctttagtccccttagctgtaaaacagggatgattaacacaatagtttctaccttataggtggatgtgaggaataaatacaatgaatacatgcaatccatttagaacatgtatgttaagttgaatcacaggcaattgctgttttggtggatctaaaatgaatattgtcagggccaggtgcggtggctcatgcctgtaatctcagcactttgagaggccgaggcgggcagatcacttgaggtcaggagttcgagatcagcctggccaacatggtgaaaccccatctccactaaatataaaaattagcctggcatgg

SEQ ID NO: 954917 - DNA, 794 bp, Homo sapiens
gtgtataggaatgctagtaatttttgcacattgattttgtatcccaggattttcctgaagttgcttatcagcttaataagcttttgggttgagactatggggttttctaaaaatatgatcatgtcatctgcaaacagggataattgacttcttctcttactatctgaaagttctttatttctttatcttgcctgattgccctggccagaacttccaatactatatttaataggagtagtgagagagggcaaccttgtcttgtgccagtttccaagggaatgcttccagcttttgcccattaagtatgatattagctgtgggcttatcatatatggtgcttattcttttgaggtatgtttcttcaatacctagtttattgagagtttttaacatgaatgaatggtgaattttattgaaagccttttctgtatcttttgagataatcatatggttttggcctttagttctgtttatgtgatgaataacatttattggtttgtgtaggttgaaccaaccttgtatcccggggatgaagtctacttgaccgtggtggatacgccttttgatctgctgctcaattcggtttgccagtattttgttgaggatttttgcatcaacattcatcaagaatattggcctgaagttttttgttgttgttgttgttgtatatctgccaggttttggtatctggatgatgctggcctcatagaaggagtttgggaggaatccctcctcctcaayttttttgaatagttttggtatgagtaataccagctcttctttgtacatctggt

SEQ ID NO: 954918 - DNA, 788 bp, Homo sapiens
gggagtgtaaattagttctactattttggaagacagtgtgatgattcctcaaagacctaaagacagaaatgtcattcagcccagcaatcccattactgggcatatacccaaaagaacataaatcattttattataaagccacatacacacatatgttcactgcagcactattcataacagcaaggacatggaatcaccctaaatgcccaacaatgatagactggataaagaaaatgtagtacatatacaccatggaaaactatgcagctataaaaaagaataagatcatgtcctttgcgcaaacattaatggagctggaggccattatccttagcaaactaatacaggaacagaaaaccaaatacagcatgttctcacttatagtgggagctaaacgatgagagcatacggacacacagagggaaacattagggtggaggataggaggagagagaagaacgggaaaaataacaaatgggcattaggcttaatacctggatgatgaaacaatctgtacaacaaacctccatgacacaagtttacctgtgtaccaaactgatatggaagtgctgggaagggaagagcgtggtccctttaaatgatagggaaggggagaagggaagtgttgggtagaggaggacgtggtccctggctagggctccacccccacggacctaggtaaggacaggcacttctgctttcatgccgaaatgtagcattttccaagaccaccctggcctgccrtgcccccatcatgggcctataaaaaccagagaccttagcaaggc

SEQ ID NO: 954919 - DNA, 617 bp, Homo sapiens
gatgaaaaggatgaagaagccccagaggaagtgatgccggcaaagacagcaacaaacttcatattaaaggaactcttgtagatattgcatgacgttgacaatgttagatgctgttccgaaaacagcacgacagttcaccaaggcatagaaacactgctggctccttatcataagctatacgacaagagggaggcaagcactgttcaaactgggcttgatacacgtctataaataaataaagcactttaattggctgttgtttaatgttttaaattacagtgtaaaaatgaagtactcccaaccaggcacggtggctcactcctgtaatcccagcactttgggaggctgaggcggataatgaggtcaggagatcaagatcatcctggctaacacagtgaaaccctgtctgtactaaaaatagaaaaaatcagcctggtgtggtggcatgccacaactacttgggaggctgaggcagaagaatcgcttgaacccaagaagtggagcttgcagtgagccgagatcgtgccaytgcactccattctgggcgacagagcgagactccatctcaaaaaaaaaaaagtactaatttcactatgtttcatttccttatacattta

SEQ ID NO: 954920 - DNA, 617 bp, Homo sapiens
gatgaaaaggatgaagaagccccagaggaagtgatgccggcaaagacagcaacaaacttcatattaaaggaactcttgtagatattgcatgacgttgacaatgttagatgctgttccgaaaacagcacgacagttcaccaaggcatagaaacactgctggctccttatcataagctatacgacaagagggaggcaagcactgttcaaactgggcttgatacacgtctataaataaataaagcactttaattggctgttgtttaatgttttaaattacagtgtaaaaatgaagtactcccaaccaggcacggtggctcactcctgtaatcccagcactttgggaggctgaggcggataatgaggtcaggagatcaagatcatcctggctaacacagtgaaaccctgtctgtactaaaaatagaaaaaatcagcctggtgtggtggcatgccacaactacttgggaggctgaggcagaagaatcgcttgaacccaagaagtggagcttgcagtgagccgagatcgtgccactgcactccattctgggcgacagagygagactccatctcaaaaaaaaaaaagtactaatttcactatgtttcatttccttatacattta

SEQ ID NO: 954921 - DNA, 655 bp, Homo sapiens
aatataaataacaaatttagcatttttgggtgtacaattcaatggcattaagtacattcacatcattgggcaattatcaccaccatccatctctagaccttttccatctttccatactgaaactctactcattcaacaactccttccaggtgctggtccctgtatccctccagcctttggtaacctctattctatgttctacgttctgtttctatgaatttaactactccaggtacctcatgtaaatgaaatcacacaatattgttctctttgtgcctgacttatttcatttcatattgtgtcttcaaggttcatccatgttgtagcatgtaccattcttttttaaggctgcatagtattctctcgtatgtatataccatattttgtttatccattcagccatctatgaacacttgggttgctttcacctttcggttattgtgcataatgctgctatgaacatgggtctataaatatttcctccagactctgccttcagttgttttgggcatataccaagaagtagaatttccagatcayacggtaattctatttctcattttttgaggaggcttcatactgttttccatagcagttgcaccattttacatttccactaactgtgcagaagggttccagtgtctctacatcctca

SEQ ID NO: 954922 - DNA, 573 bp, Homo sapiens
atgggaaatgggtttgttactattttataataacacaataaatcaatattttaaamcttttttacttttaatttctaatatggtaaatataaatagatatattccagacaaacaagaactctttggaagcctccataatttttaagactataaagggggttctgtgactaaaaagtttgagaaccactgtagtaagtattcaacagattaattaatcctcaccaagcctgctcactggatgagaaattcctccatgatcaatcgatcctgtagtctgatctaacttctcccagagagaactgggtgtgttgctttcccctggccttcttccaggatactgctgtactgagtccatgtggatcacacaaggctaaccaaatccatcattccttacatctctattaaggccactagctaaaaagtatgctgctctggccatctctctttcaactcaacttctctctaatttccttatcctaatttattccattgcatgcttgatctgtgacaaatggctttttccacttccttgacctcatcattaaatgtttctttcatctcctgtctatgctg

SEQ ID NO: 954923 - DNA, 589 bp, Homo sapiens
acaaaaacaagcaatgaagaaaggactccctattcagtaaatggtgctgtgaaaactggctagctataygcaaaagattgaaactggacctctatattttaccatataaaaaatcaattctagatggattaaagacttaaatgtaaacctaaaactataaaaactctataagaaaacctaggcaatactattctggacataggccctggcaaagactccaagatgaagactccaaaagcaactgcaacaaaaacaaaaatagacattgggacataattaaactaaggagcttctccacagcaaaagaaacaatcaatagaataaacagataatccacagaatgagaaaaaatatttgcaaactatccctctgacaaaggtcttagtatccagaatctataagaaacttaaagaaatcaatgagtgaaaaacaaatagtcccatttaaaaaaaatagtcaaaggacatgaacagacatgaacagatacttctcaaaagacaacacacacatggccaacaagcatatgaaaaaattttcagtatcactaatcattagggaaatacaaatcaaaaccacaatgagatacgat

SEQ ID NO: 954924 - DNA, 624 bp, Homo sapiens
agtctgataggcttccctttgtgggtaacctgacctttctctctggttgcccttaatattttttccttcattttaaccttggwgaatctgatgattatgtgtcttggggttgctcttcttaaggagtatctttgtggtgttctgtgtatttcctgaatatgaatgttggcctgtcttgctaggttggggaagttctcctggataatatcgtgaagagtgttttccagcttggttccattctgcctatcactttcagatacaccaatgtaacataggtttggtcttttcacatagtcccatatttcttggaggctttgttcatttcttttcattcttttttctctaaccttgtcttcatgctttatttcattaagttgatcttcagtctctgatatcctttcttctgcttgattgattcagctattgatacttctgtatgcttcacaaagttctcatgctgtgtttttcagctccatcaggtcatttatgttcttctataaactggttattctagttagcaattcctctaaccttttttcaaggttcttagcttccttgcattgggttagaacacattcctttagctcggaggagtttgttattacccaccttctgaagcttact

SEQ ID NO: 954925 - DNA, 751 bp, Homo sapiens
tggaccacgacactgggaagagatgggcagtggggtgccagagccgactgttcagtttataggacatgcccaagctggttgttaaacacaaccattatttacaaattacatgaacttmgaattaactgaattatagaaatataacagtatattgtacttaaaatgtattttttactcatttttgtatattttattatctgtgctcttgaggttgtgtatatctcatacctgcagtgtgaataccccgtaatgatgtgttcctactgcgcatctctgctcagcttcactttcaggggcattagattggtaggttgaaattggctatgatgggggtatttacaccatggaaattggcaaacaccatcaatcagggcttgctttttttttttttgagatagggtcttactctgtcacccaggctggggtacagtggtgtgatcacagctcactgcagcctcaacctccctggtctcaagcaatccggggcttgatttgttgtcttatagatattgtctacatgtaatctaggcagtgatgggaaaatgttaacaatgaggattaaacttaaaagtaggttgtatctgtaaccgttatcttgtgagtagcacaaaaaattgagaaaatactcttccagtatttgaaaaccattatctgattcagccaagttgctcacctgaagttccaacgtaagtctttgttgtttcttttttatgtttcttgttcatgtaaacaaaactctcagccagtgttc

SEQ ID NO: 954926 - DNA, 422 bp, Homo sapiens
gcttcaattataaacctcatttacaagtcttaatagaaaaggaattgatttttttctgctttcaaagagaaaatgagtgaaratagacaccctctaaagcatattcaacacctacccaacaaactttcaaaggtagatctatttagctaccaccatttacttgaagttaaaatggtacacaaaaatctattgcctaaatggtagtcttcattttatcatttaaaattaagattcgactaaaagatcaatagaaaaatatttgatctaaagaaagaaatataccatgttttcttttatttagtatattaataaaaacaataaagatacacatgcttcagaatggaaagaaaggtgtttacttttaacggcagaacatatcaatcacctcattattacataatatattatttaaggtcaagtgt

SEQ ID NO: 954927 - DNA, 615 bp, Homo sapiens
tctgaatatcctttttttgagcataaagcaagracatggctttttttccccttcatgcactcaagggactcactcaaacacctaataatgctgttcaacctttaatacattcataatggaattccccagttagcgtgttttcacttgcctgggtagaggcaccagctacaacctcttcaaatacttaaaagaaaatactgttcacattaattgtaagaatcttcaaaagaatgctagaatacctcaaatggaaaattcacaagtagtagcagacaagaagacatagagcataggagtgaatagtagctataaatcagatacaagccacattaatgaattgagataagaagtgtgaaataaaatcgatccccgctcatcagagaaggaggagagggttatttttaatcttgggatgaatttaaaatcaataaaaaagtataatagtctcataaacagaaatcgaacgacaatgcaaggagttggaaaaaattaaaaacaaagggaaaaaagtacaccaatttacttcaacagttacaagaagccttgtttgatagtgttaactgtattcataatgaacatgtgtatagagccttttaaaacatcccatcaagcact

SEQ ID NO: 954928 - DNA, 621 bp, Homo sapiens
ctggaggtcattatgctaagtgaaatatataccatttattaagcatggatcagtctgtgctaagaggtttacatagattagcacattaagcatttataacatcaatttgatgtggtataataatcaccccaatttttttccaactcaattggaggtataattgacaaataaaaatggtatagattcaaggtatacaacatgatttaatatatgtatatattgtataatgactatcccaatcaaactaacacatcattcaccacagttgccactgtgtgtgtgtattaaaaacatttaagatctgctctcttaccaaatttcaagcaaacaatatagtattattaactacaatgattgtgctgtacatcagatccccagaaccctcagtttcttcatgtttaaaatggatgtgaataattaatacatatatgtctgtatatgtatatatatatacacatatacacacataaaacgtaatacatatatatakacatatacacacataaaacttaatacatatatatatatatatacatatacacacataaaacgtaatattattttaaaatgaagaaactgaggcccaagtaacttaggtgatttttccatgatcacacaact

SEQ ID NO: 954929 - DNA, 575 bp, Homo sapiens
gtgacagagtagtttaattgacagaacaaagggctgggagacccaattttagatttgcactaattcccattttgactgtgggtacatcccttgaaatttctaaaattcttttcattttyaatgattaggaatgttggattaaaaaaatacactatagctaatatatttgactttagactttaatgagtctttcattcatgcaacaagtgcttattgaacgcctgttcaataaatgcctatatgccacacacattccagctaccaataaatcagaagtgaacaaaataaatatagtacctgcctccaaggaatggtcagtctgcgtatcctgagctgtatgttctaaccatttctgaaagattggtgatatggtttggctgtgtgtttccacccaaatctcatcttgaattgtggttcccataatcaccacatgtcatgggagggacctgatgggagggacccagtggaaggcaattgaatcctcggagcgggttttttgtgtgctggtctcatgatagtgaataagtctcacaagatctgatggttgtgtaaagggcagttctcctgcacatgct

SEQ ID NO: 954930 - DNA, 578 bp, Homo sapiens
agaaattgaagaggagagaaaactgacaaacttattttacaaggccagcattaccctgataccaaagccagacaaggacaygacaagaaaagaaaattacaggccagtatccctgatgaatatagatgcaaaaatcctcaacaaaatactggtaaactgaattcaatagcacattaaaagaattgttcaccattagtaacatagtactggaagtcctagccagagcaattaggcaagagaaagaaacaaaaggtacccaaatcagaaattaagatattaaatagtctctgtttgtaggcaacattgttttatatttagaaagccctaaatactctatcaaaaaacggttcaaagtaataaacagaccccacagaaatacaaaaaaatcctcagggattattatgaatacctctgtgcacacaaactagaaaacctagaagaaatggatacattcctggaaacaagcagtctcccaagattgaaccaggaagaaatgaaattctaaagagaccaataatgagttctgaaattgaattcagcaataaaaagcataccaaccaaaaaagcaccggaccaga

SEQ ID NO: 954931 - DNA, 590 bp, Homo sapiens
tttaaaacaccaaccttaccrtgtaactctttatctcaaaatcttaacggcttgctatcacactgagaataaaatcagaaatcttgaccaaggcccacagcatgcaaagaccagcccttgcattgccagtttctctgatctcatggcctaactcactcactcagatccagccacgccagccttcttgaagttccttggatgtgtcattcccatctccaggcctttgtgcctgtggctcacttacttggagcactctttttaaaaaatttttaattattatgggtacataataggggtatacactgacggggtccatgcaatgttgtgatacaggcatgtgatgggtaataaccacaacagggcatttggggtgtccatcacctcatacatttatcatttcattgtgtaaggacaatccaattccactctttcagttatttttattgggtttttttgttttgttttgtttttgagatgagatctcactctgtcacctaggctggagtgcagtggtacaatctcaagtcactgcaacctctgcctccagagctcaaacgatcctcgtacgttagcctcctgagtagctggaa

SEQ ID NO: 954932 - DNA, 615 bp, Homo sapiens
ctcgtgatccacctgcctgggcctcccagagtgctgggattacaggtgtgagccaccacgccaggccgacagtaccttacaaaactaaacatactcttaccacatgtttcagcaattgcagtccttggtacttacccaaagagattgaaaacaaagatatgttcaacaaaaacttgcacacagatggttatagcagctttgtccataattgccaagacttggaagatgacttttaatagctaaatggataaataacctgtggtacattcagacaaccaaatattatgcagtgataaatagaaatgagctagcagagacatgtaaagacattgaggaaacttagatatatgttgttaagtgaaagaagtcaatccaaaaaggctacatactttaggacctctgggggaagggagggatgaataggtggagcagagaggatttttttgggtggtgaaagtattctgtatgatactgtaatgatggataygtgtcattgtgtgtttctcataacctatagaatgtaaaatacaaagagtgttccctaatgtaaactacggtcttaataatagtgtattagtattggctcatcaattgtaacaaatgtaccaggagatg

SEQ ID NO: 954933 - DNA, 615 bp, Homo sapiens
ctcgtgatccacctgcctgggcctcccagagtgctgggattacaggtgtgagccaccacgccaggccgacagtaccttacaaaactaaacatactcttaccacatgtttcagcaattgcagtccttggtacttacccaaagagattgaaaacaaagatatgttcaacaaaaacttgcacacagatggttatagcagctttgtccataattgccaagacttggaagatgacttttaatagctaaatggataaataacctgtggtacattcagacaaccaaatattatgcagtgataaatagaaatgagctagcagagacatgtaaagacattgaggaaacttagatatatgttgttaagtgaaagaagtcaatccaaaaaggctacatactttaggacctctgggggaagggagggatgaataggtggagcagagaggatttttttgggtggtgaaagtattctgtatgatactgtaatgatggatatgtgtcattgtgtgtttctcataacctatagwatgtaaaatacaaagagtgttccctaatgtaaactacggtcttaataatagtgtattagtattggctcatcaattgtaacaaatgtaccaggagatg

SEQ ID NO: 954934 - DNA, 615 bp, Homo sapiens
ctcgtgatccacctgcctgggcctcccagagtgctgggattacaggtgtgagccaccacgccaggccgacagtaccttacaaaactaaacatactcttaccacatgtttcagcaattgcagtccttggtacttacccaaagagattgaaaacaaagatatgttcaacaaaaacttgcacacagatggttatagcagctttgtccataattgccaagacttggaagatgacttttaatagctaaatggataaataacctgtggtacattcagacaaccaaatattatgcagtgataaatagaaatgagctagcagagacatgtaaagacattgaggaaacttagatatatgttgttaagtgaaagaagtcaatccaaaaaggctacatactttaggacctctgggggaagggagggatgaataggtggagcagagaggatttttttgggtggtgaaagtattctgtatgatactgtaatgatggatatgtgtcattgtgtgtttctcataacctatagaatgtaaaatacaaagagtgwtccctaatgtaaactacggtcttaataatagtgtattagtattggctcatcaattgtaacaaatgtaccaggagatg

SEQ ID NO: 954935 - DNA, 572 bp, Homo sapiens
tgagggacaattgggtagtttctgagttttggtgattataaataacgcacctctatgagttatatgatttgcaaatattttctcccagtctatggcttgtcttttcatccttaatccttttaacagtgtcttttgcaggtcaaatgttttctattttgataaaatctgatttattttttcttttatgaatcatgtttttggtattgtatctaggaattctgtgcctaacttaaggtcagattttcttatatatttttttcgagaagttttctacttttatgtcttacatttaggttgatgatccattctaattttttataaggtgtgaattatgggttgagactctttttttgtatatgaacatccaatttttcaagcactatttgttgaaaagactatgctttttgtctttaattgtctacatctgtttcagagataagagttacttctgagctttctattctgtttcattgatttctttgctatcctcttacaggtataacactgtcttaatcatagcttaagtaytgaaataaaatagtgtgagtcctctaccttctaattcaaaaggt

SEQ ID NO: 954936 - DNA, 605 bp, Homo sapiens
gaaggaatggagcagccagccggttcctccattcattkgcttgtgtgctccctcctacaaggggttaagcggggtgggctgagtaaacagggcacccctgtcacgagtcccacgaaacagtcaagaaaataatcctgcatcaatttgactcctcgtcctcccctaatggtttgcagtctttcctatgtcataataaagctacattttattctggaaaaaaatttgctctacaagtttagagacttgctgcattttgttcgctgccaattccttaggacttagaacagtttcttgcaaattataggggctcttatttaatttcataaaaggaaggacattcctccctgcaaaagataaagaagatgatttcagaaaaatataacagatcttttctaagaaagaaaacttgacagctttatactgattttttacaaaaactgtgattactagaaaagatattgcacactattacattatgggttgtgttaagatgagatttttccttgactttgacccccttcgtggaactggagtgactcatttcactcagcctgcagcctgcagtctgtggatggctaagtgttaacagctcagtaaaaggttag

SEQ ID NO: 954937 - DNA, 621 bp, Homo sapiens
ttgtcaatttttggttttgttgcaattgcttttggcatcttcatcatggaatctttgccaggaacttaaataaattaacagacagaaaacaaacacccccattaaaaagctgacaaaagacatgaacagacatttttcaaaagaagacatacatgtggccagcaaacacatgaaaaaatgcacaacgtcattaatcattagagaaatgcaaatcaaaacccacatgagatacaatctcacaccagtcagaatggttagtattaaaaagtcaaaaaataacagatgctggtgaggttgcagagaaaagggaacactttttaactgctggcagggatataaatagtttaaccattgtggaaggcagtggtgggaatttctcaaaaaacttagaacataattaccatttgaccaagcaattccattattgggtatacatccaaaggaatagaaatcattttaccgtaaagacatatgcactgataagttcatcgcagcaccactcataatagcaaagacatggaatcaacctaaatgcctatcaatggtagactggatttttaaaaagtggtacgtgtacacatggaatatgacacartcataaaagggaatgagataatgtcc

SEQ ID NO: 954938 - DNA, 452 bp, Homo sapiens
atctaaatatagagaacatcaatgtctctaataattgctacagagaaaaatgtatctggctgggaaagctacagaaggccatggtgggaataggatgctatttaatctaaggtggtaggcaaggcttctgctgaagaagggaccttactagcacctggctgctttctttaattatttttcctgtctggctttcaagttttgaaatccttttcagcttcttttttttttatttatatgaatttaatttttgtagagatggcatcttgctatgttgcccaggctggtcttcaactcctggggtcaagtgatcctcgcaccaccacctyccaaagtgctgagagtacaggcatgagccactgcgtccggcccttttcagcttcttaagagtttaaaactcttaagagacagggtcttactctcttgcccaggctggagtgcagtggtgtgatcac

SEQ ID NO: 954939 - DNA, 706 bp, Homo sapiens
ctcctgtgtcttgtaagttatttaacatctaagttacagtggaaatagaaatggcattcaggtaatttgactaaagtgtgctcaacttttaaaattatgcttgtattttcagacatttaactgaaccctagttgattgtaaggagtagtctctacattttgagcatggtattttcaaaggaaaacacaggttgagcatccctaatatgaaaatctagtatttgaaactttttgaagaggaggagccaagatggctgaataggaacagctccggtctacagctcccagtgtgagcgatgcagaagatgggtgatttctgcatttccatctgaggtaccgggttcatctcactagggagtgccagacagtgggtgcaggtcagtgggtgtatgcaccatgcgcgagccgaagcagggcgaggcattgcctcactcaggaagcgcaaggggtcagggagttccctttcctagtcaaagaaaggggtgacagacggcacctggaaaatcgggtcactcccaccctaagactgcgcttttccaacgggcttaaaaaacggcgcaccaggagattatatcctgcacctggctcggagggtcctacacccacggagtcttgctgattgctagcacagcagtctgagatcaaactgcaagtcrgcagcaaggctgggggaggggcacccaccattgcccaggcttgcttaggta

SEQ ID NO: 954940 - DNA, 730 bp, Homo sapiens
attacccaacaccaccctggcctgccacaccctcatcctgtgcctgtaaaaacccgagaccccagcaggcagacacacaggtggctggacattgagcatatcagtggaggaacacataggcggctggatgtggagaggaacgcacaaacaggtacccgcatgtcagcaggccaacgaccaacagaatgacatggagtctggctggtgcagttggaggagagcccaggccactgaaaggcctgtctccaggggaaaaccatttccttctggctctcccatctgctgagagtgctaaatcactcaataaaaccttgcactaattttccaagcccatatgtgatcccattcttccagtacactaaggcaagatcctcaggatacagaaaatcctctgtccttgtgagaggtgacaatgtgttagcagccctcgctcactctcagtgcctcctcgacctcagcatccactctggccacgcttgaggagcccttcagcccgccactgcactgtgggagcccatctctgggctggtcaaggccagagtcagctccctctgcttgcagggaggtgtggagggagagacgcgggcgggaaccagggctgcacgtggtgctcgcaggccagcgcaagttccgggtggccgcaggctccgtgggtcccacagttggagctgctrgccggtgcctccagccgtgccggctccaggtagtgaggggcttagcacccgggcca

SEQ ID NO: 954941 - DNA, 616 bp, Homo sapiens
attgaataaattattatatggtcagagaaaataatactatataaccattttaaatgaagatgtaaatgcttaaacatcaatacagaatgttgtttatgaaatcrtaagtgagaatatatagtatttccttttaagcaagaacatttgcatgtataagcatgaaaaataatgaaaaactaacagttgttaattgggaggtaggattataactgattttatttttattatatctttctgtgtatgttactataaacacactttagactgggcttctgggcacttaggcagttgtgcttctcttggtgccttttccccatttttttttttttttttttgatttgcatgtatgacagttttcatgtcttacggggaaggctattgggaatcccactttgtagaagataggtatgctcctttctcttgcctgtccatcacagcttcaggcagcatttgtttctgtccctcttatgagagatctccttaacccatttatgcctgaggttgcaactttttgaattttgaaatcagaccttggtgatgaccttgagcagtaagatataaataactcccacatgcttagcgttccaataatggaacactaggcataaatgagttc

SEQ ID NO: 954942 - DNA, 415 bp, Homo sapiens
tagccaagacaatggggaaaatgcccctaaggcatttcagagacctttaaagcagcctctcccatcacaggtgtggaggttgaggaggggaaaatggcttcctgagccaggctcagggccctgctgctctgtgctgcctcaggacatggtgccctgcattgtagctactccagctctagccatggctaagaggccaaggtacagatcaggctgttgcttcagagggtataagctcaaagccttggtggcttccatgtgtggtgttaatcttgtggatatgcatagggcaagagtagaggcttgggagcctctgcctaggtttcagaggatgtrtggaaatgcctgaatgtccagacagtagtctgttgcaggggcagagacctcatggagaacctctactagggcaatgtggagg

SEQ ID NO: 954943 - DNA, 599 bp, Homo sapiens
gaggtacaggcattgggtaaatacacgcattctaaacgggagaaattagcccaaacaaaggggttacagaccccrtgcaagtcagaaacccagcagggcggtcattaaatcttaaagctccaaaatgatctcctttgactccatgtgtcacatccgggccacactgatgcaaggggtgggctccaaaggccttgggcatctccacccctatgaagttgagtgcctgcagcttttctaggttcatggtgcaagctgtcagtggatctaccattctggggtctgcaggatggtggccttcttctcacagctccactaggcagtgccccagttgagactctgtgtggggcctccaatcccacatttcccatccatactgttctagtagaggttctccatgaggtctctgttcctgcaacagacttctgccttgatttccaagcatttccgtacatcctctgaaatctaggcagagcctcccaagcttcaactcctgccctctgtgcacccagaggcttaacactatgtggaagcctccaaggctcatggcttgcaccttctggagcagatgcctgagacatatctggagcccttttagccat

SEQ ID NO: 954944 - DNA, 602 bp, Homo sapiens
agctctgctttagggctataagtacttggcatggtttggatgtttgacytctcaaaatctcatgttgaaatgtaattcctggctgggtgctgtggcttatgcttgtaatctcagcattttgggaggctgaggtggaatgatcacttgatgccaggattttgagaacagcctgggcaacatagcaagacctcatatctgcaaaaaaattttaaaaattagccgggtatggtggcatgtgcctgtagttccagctactcaggaggctgccgcaggaggactgcttgaacccgggaggttgaggcttcagtgagctgtgatcatgccactgcactccaactcggcaacagagcaagactgatatggtttggctgtgtccccacccaaatcttatcttgaattgtaactcccacagttcccacgtgtcgtgggaagaacctggtgggaggtaattgaatcatgggggcaggtctttcccatgctgctctcatgatagggaataagtctcaagagatccaatggttttcaaaataggagtctccttgtacatgctgtctcttctctttgcctgcagccattcatgtaagatatgaattgctgctcct

SEQ ID NO: 954945 - DNA, 583 bp, Homo sapiens
tccatgatggaaaggatccaatgcaaataatccacaaccacagagtacacaggcccctgaggagctgactctccatcagaggctcaggtttggcctctgtgtatgtcaattgggcacttagcagtggtcagactggcctgggtgagtacatccttatgttactgaatccttccataaactctgcaccttccaccaaggccgcttcattaatgagccctttgagcaattgctggagtaactggagaaagaggctgcctgacattcagccagagcagatgatcacagcctcctgattcctgagatcttcctcagtaaggccttgggtgagtattctcataagacacaaatattctcatactctggattcattcaaagaggtccaacaatatgattcttgcctaatcttgcagttttattctctccaaattcctgaccatacagctccaaacactagccactgctcatgaatcagagtaaagcctcacctctggacatctcatcttccaggcaaagtggaccactggraatacccatctttgtcacaatcctccagggattcctgaatgtggttgaggtgctgcaa

SEQ ID NO: 954946 - DNA, 625 bp, Homo sapiens
gaaatataattgcttcatgaagctttatcattataaacaggcaaggatggccatagatggcttggtgtgcagcatgaactgtggctcaggaagctacctacctgttccctcatagatcctcttcaacccaccttcaccaacctatctccattcattcttttccagattataatttacagccttgcacataccacctctcatgattctgggaacttgcaagtttcttctctctatccagaatgctcagataatttcctactaatccctagtaccaaatcaaacattctgtttctgagatggttcccctaacttgcttaggtcattagtctcaatctcatttatgattcaacacaatatattcccaactccattaaagtccttgtcagagtgtgctagcaacattctaatacttgtccatcatttgaattgtccatcattcaaatacaagtctagaagctccttgatggtaaggatgatatcacattcacctgtgtgtcccctcagtgcacagtatatatagattttaagtagatgttgattgggtaaaagcataagtaagygaatgaataaatgaatgaatgagaaaagcaggaattgctatagaactagaagtcaggaactatgc

SEQ ID NO: 954947 - DNA, 540 bp, Homo sapiens
tcagatccccttccacaccgtggaagctttgttctttcgctctttgcaataaatcttgctactgctcacgctttgggttcacgctgcttttatgagctgtaacactcacckcgaagatttgcagctttgttcttgagcccagcgagcccacgagcccaccaggaggaacgaacagctccagacgcgctgccttaagagctgtaacactcgccgcgaaggtttgcagcttcactcctgagccagcgagaccacgaacccagcagaaggaagaaactccgaacacatctgaacatcagaaaggacagactccagacgcgccaccttaaaagctgtaacactcaccgcgagggtccgcggcttcattctttaagtcagtgagaccaagaacccaccaattccggacccactaattacagtaaaattatacaattagatttgaatgatgccagttcgttgggggtgaaataagttgcagaagaactccctgaaaacgcaacacgtgtgtcatgtaatgtttgtcatcaaggatgacaaggtttc

SEQ ID NO: 954948 - DNA, 612 bp, Homo sapiens
ctacagccatggtgtctccactgctttacttcatctcattttaaattgttacatatgacctagctgtatgtttattggcaacctttagtgcttatatagattatttttatagttctaatttgatcataccaagtcattgattgaactgttattaaatttttattatgcataaagtctttcccaaatcttaaggagaaacaaataggaacttccttcttctcttttcttttctttctttctttctttttctttctttctttctttttctttctttctttctttctctttctttctttctttctttctttctttctttctttctttcttttgtctttctttctttctctctctctctttctttctctttgtttgtttgttttgttttgagacaggatctcactcatcacccaggctggaatgcagtagaacgaccatagctcactgcaacctcgaccttctaggctcaagtgatccttctgtatcagcctcttgagaagcttggacttacaggcatgcactaccatgtctggctgaatttttaaactctttgtagagacagggtacyactatgttgcctgggtgcgatcctcccgccttggccttccaaagtgt

SEQ ID NO: 954949 - DNA, 612 bp, Homo sapiens
ctacagccatggtgtctccactgctttacttcatctcattttaaattgttacatatgacctagctgtatgtttattggcaacctttagtgcttatatagattatttttatagttctaatttgatcataccaagtcattgattgaactgttattaaatttttattatgcataaagtctttcccaaatcttaaggagaaacaaataggaacttccttcttctcttttcttttctttctttctttctttttctttctttctttctttttctttctttctttctttctctttctttctttctttctttctttctttctttctttctttcttttgtctttctttctttctctctctctctttctttctctttgtttgtttgttttgttttgagacaggatctcactcatcacccaggctggaatgcagtagaacgaccatagctcactgcaacctcgaccttctaggctcaagtgatccttctgtatcagcctcttgagaagcttggacttacaggcatgcactaccatgtctggctgaatttttaaactctttgtagagacagggtactactatgttgccygggtgcgatcctcccgccttggccttccaaagtgt

SEQ ID NO: 954950 - DNA, 612 bp, Homo sapiens
ctacagccatggtgtctccactgctttacttcatctcattttaaattgttacatatgacctagctgtatgtttattggcaacctttagtgcttatatagattatttttatagttctaatttgatcataccaagtcattgattgaactgttattaaatttttattatgcataaagtctttcccaaatcttaaggagaaacaaataggaacttccttcttctcttttcttttctttctttctttctttttctttctttctttctttttctttctttctttctttctctttctttctttctttctttctttctttctttctttctttcttttgtctttctttctttctctctctctctttctttctctttgtttgtttgttttgttttgagacaggatctcactcatcacccaggctggaatgcagtagaacgaccatagctcactgcaacctcgaccttctaggctcaagtgatccttctgtatcagcctcttgagaagcttggacttacaggcatgcactaccatgtctggctgaatttttaaactctttgtagagacagggtactactatgttgcctgggygcgatcctcccgccttggccttccaaagtgt

SEQ ID NO: 954951 - DNA, 616 bp, Homo sapiens
tgtaaagcatgttcacatacaaattacttagcctctttgagcctcagttttcttatatgtaaagctggattaatagtacattttgtgtttaaaaagataatgtatatgaagtgtttaccatttttcttggcatctagttcagttctcagtaactgatgtggtggtggtggtggtcatagtagcagtaagatccgtagtaatagtagcagcagttgttttagaaattagtaactgaggcctggcaaagttaaaggctctttcattaacacccagatgggaagaaatgaagctggtcttcagaggcaggctattttcactctgtgtcccaaattttcccccctagaccgtttttatacttctggggctctcagaaaatattctcagctattctgttagcttgatctcctaccatctgagagtgggcttccttcaaacaaccaaatttccaggtatttctaaactgcccttcccctacaccattctttgattcagtatttcaagacccctaagagaaatggtacatttacgtgtaagcacaggatagtgaagtatttacaacaagtgctttggagccagcaaatatggatcagaatgcwgctttcctttcctacataca

SEQ ID NO: 954952 - DNA, 822 bp, Homo sapiens
ctgagtgggctggacatggagttgtcagcagccacaggrgggcagcacagccccaggaacagtcgtatgtgtgatagagtgtgtgagagcatgtatgtgtgtatgtgtgggagcatgcttgtgtggtgtgtgtgtgagcatgggtgcgtgtgtgcgtgtgtgagcatgcgtgtgtgtgtgcgagcatgggtgtgtgtgtatgtgtgcgtgtgtgtgagcatgtatgtgtgtgcatgtatgtgtgtgtgtgagagagcatgtgtgcgtgtgtatgcgtgtgaccatgcctgcgtgcgtatgtgtgtcagcatgtgtgcaagcatgggtgcatatgtgtgcatgtgtgatcatgcatgcaggtgtgtgtgtgatcatttgtgcatgtgtatgtgtgagcacgtgcgtgtgttagcacgtgtgtgagcatgcgggagtctgtgagcatgcgtgcgtgtgtgtgtaagcatgtgtgtatgtatgtgtgcgagcatgtgtgtgagcatgcatgcgtgtgtatatgtgtgagcatgcatgcgtgtatgtatgtgagcatgtgtgcatgtgtgcgtgtgcgagcatgcggtagtctgtgtgagcatgcgtgtgtgtgtgcaggcatgtatgtatgtgtgtgagtatgggtgcgtgtgtatgtgtgcacgtgtgagcatgcatgtacgtgtatatgtgtgtgagcatgcatgcgtatgtgtgtgtgagcacgtgtgcttgtgcgtgagcatgcgggcatcagtttgtgagcatgcgtgcatgtgtattagtgagcgtggatgggtgtgtgcaagcatgggcatctgtgtg

SEQ ID NO: 954953 - DNA, 582 bp, Homo sapiens
ggttaaatcagatctcttttactgtcataattttctcattcatataatttttgcaaaggcagtctcaagrtcagcaatctgttgctgaaaattagacattctgtgcaaaaacccagcctggaagtccatttctccttatgttaaatggaggaaatggtgatgtgttacaagaacaccaaaacctctagccacttccctaacacataacctaaacacagttaacacctgtagaatatattattatgaatgcctaaatcatcacttgtcttggtctctaatcaattaacaaggttgttaacagtcatcctgtgtgcagcaacaaatccgtttgcacaccatgccatacatagccttacctttttttttttcttttgagatggagtcttgctctgttgcccaggctggggtgcagtggcatgatctcggctcaccgcaacctccgcctcctgggttcaagtgattttcctacctcagcctcccagatagctgggattacaggggcccaccacgtccagctaatttttgtatttttagtagagacggggctttgccatgttggccaggctggtctcgaactcttga

SEQ ID NO: 954954 - DNA, 629 bp, Homo sapiens
caaggcttggagcttgcatcctctgaagcaatggcccaagctgtcccttggccccttttagtcatagctggagtggctggggtgtagggcaccaagtcctgaggctgcacacaggaggtgggccctggacctggcccatgaaaccatttttccctcctagacctcccgacctatgataataggggctgctgagaaggtctctgacatgaactggagacattttccccattgtgttggtgtattagtctgttttcaggctgctgataaagacatacctgagactgggaagaaaaagaggtttaatttgacttacagttctacagggctggggaggcctcagaatcatggcgggaggcaaaaagcacttcttatatggtggcagcaagagaaaatgaggaagaagcaaaaacagaaactcctgaaaaaacccatcagatcttgtaagacttattcactatcacaagaatagcacagaaaagactggcccccatgatttaattacctccctttgggtccctcccacaacatatgggaattctggaagatacaattcaagttgagattttgrtggggacacagacaaaccatatcattcggtgatcaatatttggatccctgttacttatgga

SEQ ID NO: 954955 - DNA, 553 bp, Homo sapiens
taaccaccattctactctctgtctctataaatgtgactaacctgagtatctcatatgaatagagtcatacaatatttgtccttttgtgtctgccttatttcaygtagcatgatgtcttcaaggctcatccatgttgtagcatgtgtcagaattttattccttttgaaggctgaatagtatttcactgtctgtatacaccacaattcatttatccattcatcgagcagtgaacgtttgggctgcttctgccttttagctgcagtgaacaaatgttcttatgaacatgggtgtaaaatgtctgtcaagtccctgcttccaattcttttgggtacgtgcccagaagtggaattgctggatcatgtggtaattttatatttatttttttgaggggctgctatactgttttccacagcagtggcagcattttacatttccaccagcaacacacaagggttccagtttctccacatcttcaccaacacttgtggttttgctttttggtaatagccatgctaatgggtgtgaacaagaagtgctttaagcatctcctaaa

SEQ ID NO: 954956 - DNA, 745 bp, Homo sapiens
aagccaggcacttttcttagtastttaagtatcctaacacattgaatcctcccaacaaccctaagaggtaggtgctattattatcctcatgctcaagatgaaaaaaagatggcaaagaagcctacgaaaagatgctccacatcatatgacatgagggtaatgcaaattaaaacaacaagataccactgcacatctattagaatggccaaactccagaacgctgacaataccaaatactggagaggatggggagtcacagaaactctcattcattgctggtgggaatgcaaaatggtacagccactttggaagacagtttggcgttttcttacaacatgaaacatacccttaccatatgatccagcaatggagcttcttggtatttacccaaagagctgaaatctgatgtccacaaaaaatcctgcgcatggatgtttagagcagctttattaataattgcaaaaaaatgagaagccaccaagatatccttcagcagatgaatggataaactgtggtacatcctgacaatggatacagttgacccttggtaaccacaggctcctcatccatggattcaaccaaccatgaattgaggatattttttttcaggggggcaccgggggaacagagtctcactctgttgccaggctgaaggacagtagtgccatctcagctcactgcaacctccacctctcaggttcaagtgattctcctgcctcagcctcccaagtagctgggattacag

SEQ ID NO: 954957 - DNA, 562 bp, Homo sapiens
actgtaccttaaacagaaaatgcttaataaatgttagctgactcataaaggaaaacaaaaacacctgcaaccctatccagtggactttttatagaattactawaaacagtattgcaacacagaaattcagatactagcccttattatgtcatttaagtagaaggaaaatcatccacaaaagtaaaagccttcacaaccaactttcttagtttgcttcatacagaaatataagctttgtgagctgccttttgaaaggagaaggaaatgtctggggcattttctgtgtatcccttttcaatgtaacttggtcagacatcctttttataagcatcccaacttactcatatacaaatttgcacacagtacaatggccactagcacataagcaaaataggaaagaggaaaaaaggtggagtttcaaaagttttgtttcttgcaggttgttgaggacattcatgtcacctaaagcaattgtttgaaatgcttgttccccggtgctgtaaagaaataccacttgaacattaatttaatttagtcaggccatttttacttcctgcagaaa

SEQ ID NO: 954958 - DNA, 571 bp, Homo sapiens
aggcagatcacttgaggtcaggagttcgagaccagcctggccaacatggcaataccccatctctactaaaaacacaaaaattagccgggtgtggtggcacacgcctataatcccacctacttgggaggctgaggcatgagaatcgtttgaactggcaaggcggatgtagcagtgagccgaggtcacgccactgcactccagcctgggtgacagagcaagactccttctgaaaaaagaaacaaaaaaacttctcattgacttttctgcccagccatgctgtcacccctaaccacatagtagagttagacaggtcctgctacatgttaagtcacttaacatgtttctgttagagctataagacatctgagaaatggaatcgaatgtctattttatagacctagaattacatgaggaataaaagcccagcatagaaaaaaatatccaaaaargcaaaaattaaaatcattttaatttcatcacacagatcttgattaatattttaatgtagatccttccatatttttatgcttatatgtaataaaataatatgcatgctatttttaaaccttct

SEQ ID NO: 954959 - DNA, 769 bp, Homo sapiens
accaaggaatccagcaaatcatcagaagccagaaagaggcaacaaaggactctcctgcatatttcagagcgggcctggcccakccaacacttgatttcaagctagcctccagaactgcgagacagtaattttctgtttaagtcacctggttcatggtacttggttccagtggtcctgggtgctgaggtccttggccctccatcccagctcctggttgtggctcccttctggggagaggggctcctattgtggtttgtctccttcatttccctttacagttgcctccttctatatactttcataggcccctcttccaaatcctggaagcacatttacttccctcaaagcatcccctagcaatagggataggggctgtcattggaaggaaaggctacaaaggggaaaggatcatttgattttacagatggcaatgtcaatatcaagaaatgcctgttctcccggagaaactacagctagtttctccttaatctgttgctgcctcttgtttgcaagatccttgtcctctttagtgatgacagaatcccctgcctcctcttggcccctgtgataaggtcacaggatttacctggagtctcatctcctctggaagctccccagagctgcctgcaccctgaagccctccctgcctgttctggctggcaactgtctctagttgagcaagcttcctaggtctgtgccacagccaggcccctgctttgggctgtctctgttgttagttatcttttcacatgtgcatcacatctgccca

SEQ ID NO: 954960 - DNA, 585 bp, Homo sapiens
aaagacacatgcacacacgtgtttatagcagcacaatttgcaattgcaaaaatatgaaaccaacataaatgcycatcaaccaatgagtagataaagaaaatatggtatgtataacccatggaatactactcagctataaaacagaattaaataatggcctttgcagcaacttggatggagctggaggccattattataaatgaagtcactcagaaatgaaaaaccaaatgtcatgtgttcccataagtgggagctaagctatgaggatgcaaaggcataagaatgatacaatggattttagggactaagggaggaaggataggagggggaggagaataaaagactacatgttgggttcagtgtatactgctctggtgatggatgcaccaaaatctcagaaatcaccactatagaacttatccatgtaaccaaaccccaccttttccccaaaaactactgaaataatttttttaaggttcacatcttggtaaatggtttttagtcctaatcctgttcttcacacccatatttgtgttttctgatcaccagcagacatagattcctttgaggcaactacacaaaaca

SEQ ID NO: 954961 - DNA, 585 bp, Homo sapiens
aaagacacatgcacacacgtgtttatagcagcacaatttgcaattgcaaaaatatgaaaccaacataaatgctcatcaaccaawgagtagataaagaaaatatggtatgtataacccatggaatactactcagctataaaacagaattaaataatggcctttgcagcaacttggatggagctggaggccattattataaatgaagtcactcagaaatgaaaaaccaaatgtcatgtgttcccataagtgggagctaagctatgaggatgcaaaggcataagaatgatacaatggattttagggactaagggaggaaggataggagggggaggagaataaaagactacatgttgggttcagtgtatactgctctggtgatggatgcaccaaaatctcagaaatcaccactatagaacttatccatgtaaccaaaccccaccttttccccaaaaactactgaaataatttttttaaggttcacatcttggtaaatggtttttagtcctaatcctgttcttcacacccatatttgtgttttctgatcaccagcagacatagattcctttgaggcaactacacaaaaca

SEQ ID NO: 954962 - DNA, 665 bp, Homo sapiens
atgggccatctacttcactcaattcagatayactgaatgtatttcatattgtattgtttctcacttagtctttaaaactaatctatgagatgtatggtccaaaagaccaccaggatggcttaacagtagaaaggagagctttgtgatatcggtttgcaaaccaggaagagacagttttggcatgtaataaaggtgctttctcttcaaagagggaaagggcaggatggtttttgtgcctcacagggtctgtattacacaatagtcatatatattcaggttttggaggaaagctgtacatatttatgaggggagccaaatgcatgcacaatggctacacatatatgtaatatccatcccatgttcactttggggaagggttttggctttaaactgagatggaatttggctctttacgttaaaggtgacctacaggacacagagataatttgtgtgtgcagtctctacaatttgctgaaactggcttgaggttggcagttacttatcaggaaagtgtttctaaggccaggtctctgtccaatcagggctgtagtggtctggattgtacatcagacttaggaagtgtctgacaatttgcctgataattcctactgttagggagtttagcaagagtgtggtttttcttgtagccacaggaatttaggaaa

SEQ ID NO: 954963 - DNA, 617 bp, Homo sapiens
tattcaagagctcttttcatcttgcaaaactgaaattctgtacccattacactctaactcttctttcttccctcccccaacccttaaaaaccaccatttcactttctgtctctgtgtttcttttttttctctaggtgtcttatataagtggaatcatggagtatttgtcttttcgtcactaccctactctgcacaatagacatataaatatgtcctcaaatataaaaatgtcctcaaagtacacacatgttgtaacatgtgtcagaattggctttttaaggctgaataatattccattttatgtatataccacattacataatggattatatgtaccacatatccattcattcatggatacacatgtagattgcttccatattttgctattgcaaataatgttgttattaacatgggcttacaactatatctcttcaagtctctgccttcagttacttacccagaaacgtaattgatggatcacatagtaattccatttttagtttcctatagaacctccatactgttttctacagtgactgtaccattstacattcttaccaacgtgcacaagagttcctatttctttgcctcttcaccaacacttgatattttgt

SEQ ID NO: 954964 - DNA, 524 bp, Homo sapiens
ttgggtggggacacagacaaaccatattagagtcgtattattttgcctaggctggagtgcagtggcacaatcatagctcactgtaaacttgaactcctggactcaagccatcctcccaccttagcctcctgagtagctaggactacaggcacacaccaccattaccagctaattttttaaattttttgttgaaataataaactcctggcctcaaattttatcctccagcctcatcctcccagagtgctgggattacacatataagccacgatgtccagccttatttatttttatttttatttttatttttattgagacagagtcttggtctgtctcccaggctggaatgcagtggtgcaatctcagctcactgcacccttcccatcccgggttcaagcaattctcctgcttcagcctcctgagtagctgggattataggcacctgccactacacccagctaatttttgtayttttagtagagacggtgtttcaccatgtcggccaggctggtctcttttaacca

SEQ ID NO: 954965 - DNA, 738 bp, Homo sapiens
ttggtaagcccacaagctaactctagcaaaaatgagtaaaaaataaacattactggagagcttctttgaaaacaggaaaagacccaatggtgaaacagcaggggactctaagactgccaccccaaagaaatctacacttaaaataccaagagtcctacttaaattatgagttcattgcaacaggtgattcacattctccaagccactttgtacaatatttgatgactagctatcaaacgaagccatcaaaccttcaacactgcttcgccacatggagaccaagcgccctgcgttaaaacacaagcctttggagttctttaaatgaaaaaaatgtgaatatcaagtacagaagcaattactgaaggccaccacttcatcaaatgtgtctgcactgagagcatcattcttagtagctaacggcattgctaaagctgagaaaccctttaatactggtgaagagtgatcctgtttgctgttaaggacaactgtcatgaactttcaagagaggctgcagttcaaagggtggcatgtgttcctcttttggctagcaccataactagatgaattgaggaaatagcagaggatcctgaggcacaatcgttagagaggattagtgagtcaccrtggtaggcaatccagattgacaagtctaccgatgttgacaacaaggcaacagtgcttgtttttgtgtgatatatttttcaggaggatatccatgaaaatatgttacatgtactt

SEQ ID NO: 954966 - DNA, 654 bp, Homo sapiens
actgtaaataagcatcctttttgctatttagtgccatgatttttttcacttcttttgtgctttttcttggtgatatggytgtttaaatggtgccatatgaagtgctgaagtgttatctagtgtttgtaagtgcaagaaggctatgctctaccttctggagaaaatatgagtgttgaataagctttatttagactgttgaccatgagttcaatgttaatgaatcaacaatataaaataaggtgctttagcagccaggcatggtggctcacgtctgtaagtaatcccagcactttgggaggccgaggcgggtggatcacttgaggtcaggagtttgagaacaacctggccaacatggtgaaaccctgtctctactaaaaatacaaaaattagccagatgtggtggcacatgcctgtggtcctagctactcagagactgagtcaggagaattgcttgaacccagtaaacggaggttgcagtgagccgagatcgcaccacttcactctagcctgcgcaacagagtgagactctgtctcaaaaataaaataaaataaaataaggtactttaaacagaaacacacattaaacaagattatgtattgatcagttgatgaaaatgttgtgaccagaggcttacaggaacctaaccttgtatt

SEQ ID NO: 954967 - DNA, 630 bp, Homo sapiens
aaataatgctaaattttgttttcaaataaagctgtakcagggtaatatctttttatgctttctgaattataaaaagataattaggcatatttcatattcttggcattctgttgagcagcatgtacttttctcaagagattaaagttgtctgctctgcttctctattttagtaattctgagcaaataacaatactgttttatttgaagcttgtataagactttccccctacatgtgagtcttaatcttacagaaattcatttatcatacctcctccaatgcagttttctttatttactagtgcatattcttccaaatgcatttctgagagtggcattttagtaacatcattgatctccagcccagtgtgctttggaaactctgagaatctacatgtgctctgcaagcaggaaatattgtgttagaagaaataatgattgaagggatggatgaccagaaggaagagatattaatatccgttatgtatgtttcttcctgtctgtcatatgcttaacactgtgccagcctctgagaagtcatgatgataaggatgatttctattcttagggagcttaaaataatgttatgttggactggaagtcatcaggttcagatcctccctacgagaaatc

SEQ ID NO: 954968 - DNA, 583 bp, Homo sapiens
tatttttcttcttgcagagagtctataagcagatgtgcaagtaggaaagatattgctaaattcttttcctagcaaagaatattaatattaataccctcggaaaggaatgtgttcctggagggaggtctataaacggccgctctgggaatgtctgtcttgtgcagttgagacaaggactgagataagccctggtctcctgcagaaccctcaggcttcctagggttgggaaaactccaccctggtaaatttgtggtcagactggttctctgctcttgaaccctgttttctgttgtttaagatgtttatcaagacaatacgtgcaccgctgaacacagacccttttcagtggttctccttttgccctttgccctgtgatctttgttggacccttatcagtggttctgcttttgccctttgtcctgttccctcagaagcatgcgatctttgttagatgcttattagtggttctactgtttgctctttgaagcatrtgatctttgtacctactccctgttcttacaccccctccccttttgaaacccttaataaaaacttgctgttctgagactcaggcaggcatcat

SEQ ID NO: 954969 - DNA, 582 bp, Homo sapiens
tattctctttgaagcaattgtgaatgggagttcactcatgatttggctccctatttgtctgtaattggtgtataagaatgctcatkatttttgcacattgattttgtatcctgagactttcctgaagtttcttatccacttaagaagattttggactgagacgatggggttttctaaatatacaatcatgtcatctgcaaatacggacaatttgacttcctcttttcctaattgaatatgctttatttcttactcttgcctgactgccctggtcagaacttccaacactatgttgaataggagtggtgagagagggcatccctgtcttgtgccagttttcaaagggaatgcttccagtttttgcccattcagtatgatattggctgtgggtttgtcaaaaatagctcttattattttgagatatgttccatcaatacctagtttattgagagtttttagcatgaagggctgttgaattttgtcaaaggccttttctgcatctattgagataatcatgtggtttttgtctttggttctgtttatgtgatggattacgtttattgatttgtgtatgttgaacca

SEQ ID NO: 954970 - DNA, 605 bp, Homo sapiens
ctggttttatattaaaattgtcctggggattttaggtaatatactaagagaagggaaaaaagaacagacattaaatatataaatattaacagaaagagtaaaccattcttattagcagccaatatgatcttccaccaaaaaaacaaaaacaaagtgtaagcacttagagctagagttgagcaagattataaaagatgactgtgcaaaactcagatgattttctataaaactaaacatttacaataccaacaagaaacataaaataaccagaaataaatcttaaaacaaatgtacaatataattatatgaagtcaaaaaccaaaaacacttgtgtaactcactttattacaatattccctttattgtggtggtctagaaccaaaataatgaaatagaggagtagaacaacactacagaacaaatggaactaaaagaataatacagaatattccactcaacaacaacagaatatacattcatcttaatggcacatgaaacattctccatgacagaccataaaacaaggctcaacaawttttaaaatactaaaattatataaagtattttttctgatcacaatgtaataaaaccagaaatcaattaca

SEQ ID NO: 954971 - DNA, 587 bp, Homo sapiens
  misc_feature 562, 563: n = A,T,C or G
gaggctggaccctgcaaagccacaggtgcagagctgcccaagaccatgggaactcacctctttgatcactgtgacctggatgtgagacctggagtcaaaggacataattttggaggtttaagatttgactgccccactggatttcagtttgcatgggccctgtaacccctttgttttggccaatttctcccatttggaatggctatatttacccaatacctgtacccccattgtatctgggaagtaactagcttgcttttgattttacaggctcataggtggaagggatttgtcttgtctcagatgagactttggactgtggacttttgggttaatgctgaaatggattaagactttgggggactgttgggaaggcatgactggttttgaaatgtgaggacatgacatgcggaggggccggggtggaatgatatggtttggcctgtgtccccacccaaatctcatcttgaattgtactcccrtaattcccacaggttgtaggagggagccggtgagataactgaatcatgggggcaggttcccccatactattcttacagtnntgaaaatgtgtcacaagatctgat

SEQ ID NO: 954972 - DNA, 608 bp, Homo sapiens
cacgctggccgaagagcacaccgacagatgctggcatgccggcaggccatcgaccggtgggacaaggctgagtytggctggggcagtaggaggagagccgggccatcgagcggcccaactccgggtgaaaaccatctcccttctgcctcccccatcagtggagagctacttccactgaataaaactttgcactcattttccaagcccacgtatgatctgattcttcgggtacatcaaggccagaaccccggatacagaaagtcctctgtcattgcgacaaggtagagggtctaattgagctggttaacacaagccacctacagatggcaactaagagagcatcctgtaacacatgcgcactggggcttcagaagctctaaacattcacccctataccagacactggattatacgctttacttatatcactgctttttttttcctctaaaaaagtcactgccatgaggttggagccccacaaactgcccatctttatgctcacttacaggtttgagcagcagggcactgaggaagttagccactcccccatcacgtgtcctgcgaggaggacaagggaacctttcccatttcaataatgtgcactatac

SEQ ID NO: 954973 - DNA, 743 bp, Homo sapiens
gccaatagctcctaacaagagagtcagcctgtctttgaagctttaaaaccaggcattgacttctctctatctctgaaagttctagatggcattttcttccaaaatgagrctattttgtcttcattgaaaaactgtattttagcatagacttcatcaacaaaattagctataatagatcttctagatgacttgctgtagcttctctattagcacttgctgcttcaccttgcacttttgttatggagacagcttctttccttcagcctcatgaaccaacctctgctagcttccaacttgtcttctactgctttcccacctctctcagccttcacagaactgaagacagttagggccttgctccatattaggctttggcttaaaggaatgctgtggctggtttgatcttctttccagaccactaaaacgttttttatatcagtaataaggctgtttcactttatttaggtgttcactggagtagtacttttaattttcttcaataacttttcctttgcattcacaacgtggcacaagaggccaagcttttgacctatcttggttttcaacatgccttttttcactaagcttaatcatttctagttttttaaagtgagagatgtacaacccttccttttacttgaacatgtagaggccattatagggttattaattggcctaatttcaatattgttgcatctcaaggaatagggaggcccaaagagagggagagaaatgggagactg

SEQ ID NO: 954974 - DNA, 639 bp, Homo sapiens
atggtgtatatgtaccacattttctttatccaagctgttgttgatgggcatttaggttgattccatgtctttgctatgatgaatagtgctgcaatgaacattcacrtgcatgtggctttaggtagaatgatttatatttctctgagtatatgcacattcctttttttcccacaatctcaccagcatctgttattttttggctttttagtaataagcattctgactggtgtgagaaggtatcttatcgtggttttcatgatgttgagctttgtttcatatgcttgttggctgcatgtatgtcttctgttgagaagtctctattcatgtcctttgcccacttcttaatggtgttgttcgtttttctcttggaaatctgatatcgatttttcctaggcatgaacatgggatgtttcttcattgtgtgtcttctcttttttctttgagtgctattgtataattcttattgtacagatctttcacctcactgttagttgcattctgaggtattttactctttcatggcagttgtgaatgggattgacttcctgatttggctctgggtttggctgttgttggtgtatagaatgctagtgttttttgtacattgattttgtatcctgcaacatgcctgaagtagtt

SEQ ID NO: 954975 - DNA, 564 bp, Homo sapiens
ggctgggatgcagggcaccaacaccctacactgcacacagcatggggaccctgggcccagcaaaaccrttttattctaggcctctgagactgtgatgggaagggctgctgtgaagacttctgacatgcccaggagacattttcaccattgtcttggggattgacattcagttcctcgttacttatgcaaatttctgcagccagcttaactttctcctcagaaaatgggtttttctcttctatcacattgtcaggctgcaaattttctgaacttttatgctctgcttgccttataaaatgaatgcctttaaaagcacccaagtcacttcttcaatgctttgctgtttagaaatttcttctgtcagataccctaattcttctgtcaagttctaagtttcactaatctttagggcacgggcaaaatgctgccagtctctttgctaaaacataacaagagtcaactttgctctagtttctaacaagttcctcaactccatctgagaccacatcagcctggatctcattgttcacatcattatcagcgttttggtcaaagccattcaaa

SEQ ID NO: 954976 - DNA, 633 bp, Homo sapiens
gcggtcgcctgcagttccaactactcgggaggttgaggcaggagaattgtstgaacccgggaggcggaggttgcagtgagccgagatcgtgccactgcataccagcctgggtgacaggcaagactatatctcaaaataaatacatacatacatacatacatacatacatacaaacacatatatgtaatgtataaatattacctttttgtcatctatttaacaaaatatttgctcaaatatatccttccatctgacaactatttaacattacttttctaatatttttaccttattgctgctgacttgatacatttttattcattccactacatccttgttattttggaagatctatcctttatttctttattaaggggtatcttcaattttttgacctcacaattagatgcataattttcaagtactatttgaaataaagatgccttctattgtcttagcaaattagtcaatttctctacttacccctcctcaataagttgacaaattcaaaaaacataaatttccccatttctttttcaccactcccctccaagaaaccttggaaccagtttgttccaaggtttgttcccaccaaagtctagattatacaaaaatattttagaatgttaacga

SEQ ID NO: 954977 - DNA, 632 bp, Homo sapiens
ctatggatatgaaagacaaatacacttgggagcargaacgggtgaaatttttgatctcttcaaaaagttcatcacaattaattcttagttcaaagggcaactgaagccaaccccacttatcatttgtaaaaggataagggataatacagctaaagaaatcctgaatctgtattaaacttactgtttaactgctgactagtagccaagattggattctttttctctaccatctttatataagaattcaaaggaaatgcgacagtttaaaagaagaagagaaaaagttaaatgcttaaatagtctactcagcgaatatatgtggagcatctacagtggaaggtagctatgccagtggttcccaaatttgtctgtctattagaatcacttgagatcttcaaaaattccaaaatacaaaaaaattagctgggcgtggtggcatgcgcctgtagtcccagctactcaggcactgaggcaggaggatggcttgagcccaggaggtagaggctgcagtgagccgagaccacaccactgcactccagcctgggtgacagtgagatcctatctaaaaaaaaaaaaaaattccaaagcccaggccacaccacatcaattatctcacagtctctggggttggg

SEQ ID NO: 954978 - DNA, 606 bp, Homo sapiens; identical to SEQ ID NO: 950374

SEQ ID NO: 954979 - DNA, 656 bp, Homo sapiens
aggagcaatagctttagtttggatgaacgagatccctgaaaggggattcactgctttacagaactgctaatcctacattcattttaaaaggaaaaataaatattgccctgattattgtcaattttatgtaaacttaatacatattactatttttaaaatgacctttcacttaaataagactagtattgatatgcccaattttactataaaagcagagggttttttattatattaaaagtatggttgccttgtgttatgaagtatatgacttcagcaccttctattagatttttatttctttgcatcattgtgacatctgctcaggtgttttcaatctcatttcttagatgtgtttctccatcaatgttagatttttaaattaaaataatactttacagaaaagaaaaagtcacctttctttgggcaaaatgactagtccaagatcatttgtacagatctcaacaactatataatggcaagtctggatatctcatctgctacgaaatttctgaatgactccggaaagtttttagatagatcatggttataagtgcaaattcaaattgtcaaaattatcagctgatactcgagcttacatcaatagaaccactgcrgtgtttatattattttttttttattttattctattttttgag

SEQ ID NO: 954980 - DNA, 654 bp, Homo sapiens
aatcaaatcaagaactaaacccctttgccaaagctgtgaaagaaataaaatactgggaatacacctaaccaaggaggggaaagacctctaccaggaaaactacaaaacactgctaaaagaaatcataggtgacacatggaaacacatcccatgctcatggatgggtagaatcaatattgtgaaaataaaatgaccatactgccaaaagcaatctataaattcagtgcaacacccatcaaaatatcatcatcattcttgacagagctagaaaaaacaatcataaaattcatatggaaccaacaaagagcccacagagccaaagcaagactaagcaaaaagaacaaatctagaggcatcacattactcaacttcaaaccttactacaaggccatagttaccaaaacagcattctactggtataaaaacacacatgtagaccaatggaacagaatagagaacccagaaataaagccaaatatagccaacctataattgacaaagcaaacaaaaacataaagtgggaaaaagacaccctattcaacaaatggtgctgggataattggcaagtgacatgtagtagaatgaaactggattctcwtctctcgccttacacaaaaataaagtcaggatggatcaagtacttaaacctaaggc

SEQ ID NO: 954981 - DNA, 540 bp, Homo sapiens
aggactatgactactggattgtgtgmtaatgatatgtttagttttgtaagaagccactaaactgttctccaaagtaggagatttctgtagattccatatattagcaatgagagttcctctccctccaagttctcaccaggatttgttgtcagtattttgaattctggccattctaaaaggtatgtggtggtcttccattgttgtcttaaattccatttccctaatgacatatgatgtggagtatctttttatatgcctactgttttttaagcttcgccttttattttagttacttggggtacccatgcaggtttgttatatgggattatagtgtgatgctaacatttggagtatgattccgatcacacagatgtgaacatagtacctgataggtagttatttaactcactccccccaaacctttagtagtttgtagtctctattgttttcatatttatatccatatgtgctcaattttagcttctacttataagtgaaaacatgcagtatttgtctttctgttcctgtgttacattacga

SEQ ID NO: 954982 - DNA, 540 bp, Homo sapiens
aggactatgactactggattgtgtgataatgatatgtttagttttgtaagaagccactaaactgttctccaaagtaggagatttctgtagattccatatattagcaatgagagttcctctccctccaagttctcaccaggatttgttgtcagtattttgaattctggccattctaaaaggtatgtggtggtcttccattgttgtcttaaattccatttccctaatgacatatgatgtggagtatctttttatatgcctactgttttttaagcttcgccttttattttagttacttggggtacccatgcaggtttgttatatgggattatagtgtgatgctaacatttggagtatgattccgatcacacagatgtgaacatagtacctgataggtagttatttaactcactccccccaaacctttagtagtttgtagtytctattgttttcatatttatatccatatgtgctcaattttagcttctacttataagtgaaaacatgcagtatttgtctttctgttcctgtgttacattacga

SEQ ID NO: 954983 - DNA, 603 bp, Homo sapiens
aagtccactggtctgagcccaactctgcactagggcttgcctaggagttgaagtcattgtggcctagacagtcttttaagtttatatagagccccaaagtcctgtggtaatgaggcttgccagaactcaggttccaaccactgggatgggtgattgtcctctggacaggtctggtctaaatgctctttctgtgggcaggcatgagatgcatttggcccggttttgctctctgctatgacagggcaagaccgagttcaatgcaaagtccaacagtcactgcattctccctcccctaagtgcacaattctctctccatgtcacatggccactgccaggagataggggaagggtggcactggtaatttaagactgtctttcctaccctcttcagtgcctctttcagtcatttgaagttaaaaccaggtactgtgagtgctcacctgatttctgattcttatgtaggtgttttttttgtgtgtgtaggtagttcttaaatttggagttcccacagcrtaaagtcttctatttggccatcttgctgtacgttctcccctagattttttaataaattacaaagctgacttttagatgttctatttattt

SEQ ID NO: 954984 - DNA, 580 bp, Homo sapiens
gttcaacatacacaaatcaataaacgtaatccatcacataaacagaaccaaagacaaaaaccacatgattatctcaatagatgcagaaaaggcctttgacaaaattcaacagcccttcatgctaaaaactctcaataaactaggtattgatggaacatatctcaaaataataagagctatttttgacaaacccacagccaatatcatactgaatgggcaaaaactggaagcattccctttgaaaactggcacaagacagggatgccctctctcaccactcctattcaacatagtgttggaagttctgaccagggcagtcaggcaagagtaagaaataaagcatattcaattaggaaaagaggaagtcaaattgtccgtatttgcagatgacatgattgtatatttagaaaaccccatcgtctcagtccaaaatcttcttaagtggataagaaacttcaggaaagtctcaggatacaaaatcaatgtgcaaaaatmatgagcattcttatacaccaattacagacaaatagggagccaaatcatgagtgaactcccattcacaattgcttcaaagagaata

SEQ ID NO: 954985 - DNA, 570 bp, Homo sapiens
ataaacctgtacaaatgttgaatgtagagttgaaaataayatttaaaataaagtctgctggggaagaattcagtggtacactcaatctttctggatattttatttctaataatatctcaaattacgttggtttgtatagcagtcctatcacactggtaatttatatcgacctttcagtccaattaaatcatttgctaattttcatgtaaacttctggttaagtcagagctccactcttacttgggttgtcaattattcctaacacatattttgcaaagactgttaaattaattccagttgtattaaagggtagaaagtcattttagaaggcccagagtttattttttaatgatcttcgaactacacaggcacattcaaaaatgtaagcacaccaggactggcaaaacaagaaatttatcattgaccccttcaaataggttgaaagttttctgcacaatatctttcccagtatttgatgtgacacgcctctctgctttggattattttttacttttttactgtgatacacaatcatgactcagaagaaagttctccagtcaataaaatcct

SEQ ID NO: 954986 - DNA, 578 bp, Homo sapiens
cttccaaaacagaaaacaccaggcccagatgcattcacggatgaattcttccaaacatttaaggaagaaattatgccaattstctacaatctcttccagaaaatagaaggagaatgaaatagaatgcaacaatgtataaaaataattatacaccatgaccaagtaggatttatcccagatatgtaaggctggttcaacatttgaaaataatttatgcaatccattccatcaacaagccaaagaagaaaaatcacacgaaaatatcagaagatgcagaaaaagcatttgacaaaattcaacaccattcatgataaaaactctcagcaaattaggaatagaagaaaacttcctcaaattcataagcaaaatatattttgaaaacctacagctaacattatacttaaactaatataatttaatgggaaacttgaagcttttccgctaaaatcaggaataaggcaaagaagttccctctaagcactgcttttcaacattgtactggaaggaagtcttagttaatacaatatgacaagaaaaggaaattaaaggtatacagattgggaaggaagaaataaaac

SEQ ID NO: 954987 - DNA, 568 bp, Homo sapiens
atgttactattatctgaatgtttgtgtcattcccaaactcatatattgagacctaatcatcaaggtgttaccaaatggtgttaccaaatggggccttgggaggtaatgaggtcaagagggtagagccccatgaatagaatcagtgcccctatagtaggactccagagagctccttctccccttccaccatgtggggacacagctcacaggaacccccatgaataggatcagtggccccagaggagggaccccagatagctccttctccccttccaccatgtgaagacacagctcacaggagcccccataggagggaccccagagagctccttctccccttccactgcgtgaagacacagccagaaggcaccgtctatgaaccttcagggagcaggccctcaccaaacaccaaatctgccttgattttgaacttttcagcctccagactgcaggaaataaatgtctgttgtttataagccacccggtacatgataytctattattacagcaagaacagactgagaaaaaaacaacaacataaaatggtagattgttggtagaagtgacc

SEQ ID NO: 954988 - DNA, 535 bp, Homo sapiens
aggggcggggggatgagggagcttctgcccaggcctctaggcagcaccacccgggtagccaccaggtggcgctgtggaccgctgtgcgttctcccagatggagccctaggggttggggracacaagggagcctttttctgttagattggggcaggcggggcgagcctcctaaccctatgtccatctccagaagcagtatgtctacctctacaactgtctgaacagcgcgctggcagacgggctgccctgagtcagcactggtcacggtgcaggagaggtttgtgccctgtgggatggggacagcattcctgacacatccacgtgggcctgggctccctggaagggcggcctccactgggccctgtgctgggaaggtacagggtcttggaataaagacctgtggccaagcctgaagctcagtgtgttctgtctgtccatcctcaggcctgggcccagcgtgtgggtctcgtgggcaaacatggagccgggatggaagctaggacctggagtctggttgaacttggtgacctatggc

SEQ ID NO: 954989 - DNA, 644 bp, Homo sapiens
tggttaatacgtgatgttcttctgtggtactgtttggccctggagttctttggagtctaaagacgtttggcctttaaaaatcaaaatgccatggaaactgctttactccaaattttggttcacaaccataactggattacctaccagggcaaacaaaatttagcaatgtgaaaatgttcataaactagtgagcttgtattgctatcttatggctagagttccaaggtaaaagccattggaactttgtgcatgtatatacatgtctagatgtgtttatttgtatgtacatttattaggttatatgttgtgtcttccaaattggcttataattgagagtgcttaaattaaaggagcacataagttaaataaatatgtcctagcatttttcaagttcacatgacttgaatatatcttctttaataaacaagctggctttaaaattattggtaaaataaaaatagaaatgtctttaaaattgtcagcatacatttttgtctggattttacatttgtccatgctagatactttgaggtgtcaggatttggcacgaaaggttataaaactataaatctagccaaaaccaaaatgatctctgtttgtgtgacttttgacaaataagaccartttaatgttgttggtttcac

SEQ ID NO: 954990 - DNA, 563 bp, Homo sapiens
gcctgaaggatcagggcaaaccttaatgttgggggatgagacaggaagacakccaggggccaaaggggctagagctcacgtgtcgaccggtcaagagtcagcaacatgccgtggcgctggctgagcccagctcatcttgtgaccacagccatggctgctgcgtgtgaacagcccacaggtgaccagcgctgcttccttcccctgcttgtccccggtgcctctgagcatgagactcgacagcattctccccaaagcaagcagcagtcagtcccgccctgggcatgcaggccttgggcctggccactcgtgtctgttctcgcagtgcaagctcccgcctcccttgggtcgcacgctgctggactgtggcgtctctggggcacaggtgtggacttcccaggcccaaaagccacagatgagcattgggttgaaagagcgagtccctgagacctggggaggggaccgaggccatggaggaggtgggaatgcaggtgaggcagtggggagaggtcctcaggccccggggggaggagagtgtggccagaggccgagcggctctcagagaa

SEQ ID NO: 954991 - DNA, 745 bp, Homo sapiens
atggggccttccaagtcataggcagatgcaaagatgttctgatcagcagttggttattacctaaagacctgaaatcagtagaaaggaatgtctgagttaygataaggggttgtggagaccaaagttttatcacgcaggtgaagcctccaggcggaggtttcagagagaatagattgtaaatgtttcttatcagacttaaagcgtctgtcctctcagtctgaaggtctgtgttgatggtaataaggtatgtccaactccctcttcccatcttggcctgagctagtttttcaggttaactttggaatgcatgtggcagagaggacaggtccaatcagatggttggggggcttacaattttacttttggtttacctgactatcataattttcataagcaatctaggcaaactattaaaaattaattaattaagtgtaatggactaaatgcttgcaaataaacatcatagaatttaaaatctaaagttatagcaaattaaataatatttgttaaatgtctgtatcgtttccaatttttttaacaaaaatttgattataggagaaaacatttttctgaaaaataatgtgtttttatgaaaaggaaataatttttgtctaattcaaaggctatttaaacgtcatttttgaaacaaggtgtattagggttctctagagggacaggactaataggatagatatatacatataaaggggagtttattaagcattaacttacacaatcacaaggt

SEQ ID NO: 954992 - DNA, 577 bp, Homo sapiens
ccactactctcttcaaagctgtcagacagggacatttaagtctgcagaggtttctgctgccttttgtttggctatgccctgccccagagatggagtctacagaggcaggcaggcctccttgagctgcggtgggctccacccagtttgagcttcctggctgctttgtttacctactcaagccatggcaatggcgggcacccctcccccagcctcactgccaccttgcaatttgatctcagactgctctgctctccatgagcgagagagactccgtgggtgtaggaccctccgagccaggtgcaggatacaatctcttgatgtgccatttgctaagaccattggaaaagcacagtattagggtgggagtgacctgattttccaggtgccatctgtcacccctttccttgactaggaaagggaattccctgactccttgtgcttcctgggtgacatgatgcctcgccctgctttggctcacgctcggtgcgctgcayccactgtcctgcatccactgtccgacaatccctagtgagacgaacctggtacctcagttggaaatgcagaaatcagtcgtctt

SEQ ID NO: 954993 - DNA, 732 bp, Homo sapiens
acagtggaataccactcagccatgaaaaggraagaacttcggatccatgcaataacatgtatgagtctcaaaaacatcctgaactgaaaaagtcaggcccacgagagtagatactgtgtgattccttttctatgaagttctagaaatgacaaacccaagctgtagtgacagaacccagaccatgatttctggggactaggaatggcagtaaggattggctgagagaagcgcaggttctttctgagctaaggtaaatgttctgtatcttaagcgtggtggtgttttcgcagatgtaggcatttgtcaaaagtcatcgaactggctgggcgtggtggcccacgcctgtaattacagcactttgggatgccgaggcaggcaggtcacctgaggccaggagtttgagaccagccgtgccattgtgctccaccctgggcaacaagagtgaaactctgtctcaaaaaaaagaaaaaaaaaacaaaggccgggcaccatggttcatgcctataatcctagcactttgggtggcgaaggcaggtgaattgcctgaggtcaggagttcaagaccagcctggtgaacatggtgaaacctcatatctactaaaaatacaaaaaaaattatccggacttggtggcacacacctgtagtcccagctacttgggatgctgaggcaggataatgtattcaacctgggaggcggaggttgcagtgagccaagaccgtgccactgtact

SEQ ID NO: 954994 - DNA, 395 bp, Homo sapiens
gcaaagttgaaggatacaaaataaatgtacaaaaatcactagcattcttatacaccaacaacagctaaactgagagccaaatcaggagggcaatcccattcacaaawgccacaaaaagaataaaatacttgtgaatacagctaaccaggaaggtgagagagctctataataagaaggataaaacactactcaaagaaattaaagaagacatatagatgcatagatggaaaaacatctatgttcatggataggaagaatcaatatcattaaaatggctatactgccgaaagtgatttacagattcagtgctattcctatcaaactaccaatgacattcttcacagaactagaaaaaactattttaaaattcatatggaaccaaaaaagagcctgaa

SEQ ID NO: 954995 - DNA, 395 bp, Homo sapiens
gcaaagttgaaggatacaaaataaatgtacaaaaatcactagcattcttatacaccaacaacagctaaactgagagccaaatcaggagggcaatcccattcacaaaagccacaaaaagaataaaatacttgtgaatacagctaaccaggaaggtgagagagctctataataagaaggataaaacactactcaaagaaattaaagaagacatatagatgcatagatggaaaaacatctatgttcatggataggaagaatcaatatcattaaaatggctatactgccgaaagtgatttacrgattcagtgctattcctatcaaactaccaatgacattcttcacagaactagaaaaaactattttaaaattcatatggaaccaaaaaagagcctgaa

SEQ ID NO: 954996 - DNA, 710 bp, Homo sapiens
ttgtaggtctctaaggacttcccttatgaatctgggtgctcctgtgttgggtgcatatatatttgggatagttaggtcttcctgttgaattgaaccctcctttaccattatataatatcattctttgtcttttttacctttctggttaaaattctgctttgtctgaaattagaattgcaacccctgcttttttctgttttccatttgcttggtagattttcctccatccctttattttaagcctgtgggtatcatgatgtgtaagatgggtctcttgaagacagcataccattaggtcttatttttttcttcagtctgccactctgtactttttacgtggggcatttagcctatttatattcaaggttattattaacatgtgtggatttgatcctactattgtgctgttagttggttactatgttggcttgtttgtgtggttgctttagagtgtcactggtctgtatgtttaaacatgttttatgttagctggcagcagtctttcctttccatatttagtgcctctttcaagatctcatgtaaggcaggtctggtggcaataagctctctcaacatttgcttatctgaaaaggatattatttctctttaacttgagaagattagttggttggatatgaaattattggttgaaggtttttytctttacaaatgttgaatataggctcccaatcttttctggcttgtagggt

SEQ ID NO: 954997 - DNA, 593 bp, Homo sapiens
aggacaccaagtccctaggctacacacagcatgtgaccttgggcccagcccatggaaccacagttttctcctagrtttctgggactgcaataggagaggctgccataaagtcctgtgtcatgccctggagacattttccctattttcttggtgattaacatttggttccatgttacttatgcaaattatgcagccagcttgaatttcttcaactaaaatgggattttcttttctatcgtattgtcaggcagcaaattttccaaatttttatgctctcctttcctgataaaattgaatgcctttaacagtactcaaatcacctcttaaatgctgtgctgcttaggaatttcttctgccagatactttaaatcatctctctcaagctcaaagtttcaaaatctctagggcaggggcaaaatgccagtagtctttttgctaaaacataacaaaacctgcctttgctccaattgtcaacaagttcctcatcttcatctgagaccacctcagcttattgttcatatcactatcagcatttttgtcaaagccattcaacaagtttctaggaagttccaaactttcccacattttttctg

SEQ ID NO: 954998 - DNA, 614 bp, Homo sapiens
cacggcagggactgcacactccacggagctagctggggctgggaacaggccagagtcccaccccctactgagttagggtgggagtcctgcactcctgggcacaactgaagcagcccagccatggytctggacctgagcatccctgcactctcaggggcctggaatcctccttcctccacaagatcagaagtgcctgctcccactccctggcctctcaccatgcccagtgcctgctctagaggggaggaatgttttggctgagccctggtgctgttgcaacccagccaggtgtataccttcacagtgatgctgacaccccagccccttgctgcctcggccccctccagacttgggcactaaggagcgccggagggaggccgggatggagctgaggtgcccctcagcacgaacaacctggctgccatagtcaacatgttgatggcgggaggcaggttcctgggtggaaaggggtgggtccccggtgaaaccctaccctcaggtcaggaacagcctgaagactaagggtcgggctgccagttctggttgaagtccagggcctggagtgaggacttcatcgatgactgtttggccaattagatggtgcttttgggggg

SEQ ID NO: 954999 - DNA, 704 bp, Homo sapiens
actctctctgaggagggcttggagaagttcaaagtcaagagtggggaaaaaataaagacctaaagaaatttgaaatctctggcacctacagatatagcaaacattaaacacagaccaactctaagtaaaattaacataaatcctcacactaatggcctacttagctcaattcctgctacctgatacaccatgtctggtttcaacaaaaaatttaaaaggacacccaaaaggaagaaagaaaaaacacacagcctgaagagacacggcaaacatcagaatcagactcaaatatgacacagatgttgaaattatcagacagggagtttcaaataactatgattaatacattaaggactctattgggaaaaagtagaaaacatgcaaaaacggattgataatgtaaccagagaaataaaaattctaagaaataatcaaaaggaaatgctaacatttctaacagaaatgaagactgccttagatgcactcatctgtagactggacgaggctgtggagagaattagtgagcctgaagatacatcgatagaaacttcccaaaccgaaatgcaaagagaaaacaaaakaataatagaaacaaaacagaatacccatgaagtgtgggaacatttcagaagatgtaaggtacatgcaattaaaatgcaaggagaaaaaagagaatgggggacaatatttgaggtagtaatagc

SEQ ID NO: 955000 - DNA, 506 bp, Homo sapiens
caccttggcctcccaaagtgctgggattacaggtgtgcaccaccgcacccrgcctgccacactgtttctacagacacacattcgtgtacacacacacacacacacacacacacaaagccagggacatgtgcatgtctgtattcatgcatgaatatagcaaaagcattttcattagggaaacattccagctttttcctggctctgaagacaatgtaattgggcttgccacaggtggaagatgggagctactctgcccgcaggcagaaggcctccccactccctcttcctcccagcttgatgtggttagctaatcactgccaaggatgttattcacttccctcaggggcggcccctcacacagacctctcctttgtctcactcacccctggaaatctgcccacctccactctcagcctcacatgtactttcctgagatctccggctctgtctgtcaccagcacagtggggatgaaattcattattctaaactctcgagtctcagccac

SEQ ID NO: 955001 - DNA, 562 bp, Homo sapiens
agatgatattctgttcaaatgtttcctatttcaaagaactctctagagtcccatttactcctgacaagtactaacagtgcttacaagttttcttcaacctggcgaattgctcaaattaaggaaatagttttacttaagaagaaagctgcatcaggacttggaaactgtagaacaaaacttgaaaaggatttcgtcagacagtaagatttatctcctgtgccttaatgtgcaaaataaaactatgaaataactggttcttgcttaatgtgatagtacaaaaattttttttcagctagtcgtaagctagaaccaaaagattccactacatccttcacagcataaggtgtacattttaggagatataaaattataaatgttcatctccccaaaacagctcactgtatattaccatatgtataattctatattttttcctggttgccaaattcaggatttttcaaagtgtgctttctaggtcactagctcaaaaagatgtttgtaaaastttcttgataaagggatacagtgttacaattaggaaatcatcaaactatttgttaaa

SEQ ID NO: 955002 - DNA, 604 bp, Homo sapiens
gaggtcagcacaaaatacaggtcataaagactttgctgataaaataggttgcagtaaagaagccggccaaaacctaccaaaaccaagatggcgacaagagtgacctctggtcgtcctcactgctacaytcccacctgcgccgtgacagtttacaaatgcaatggcaacgtcagcaagttaccctatatggtctaaaaaggggaggcatgaataacccaccccttatttagcagatgatcaagaaataaccataaaaatgagcaatcagcagccctcggggctgctctgtctatagagtaaccattcttttattcctttactttcttaataaacttgcttttactttgtactgtgaactcgccctgaattctttcttgtgcgagatccaagaaccctctcttggggtctggattgggacccctttcctgtaacatccctagtgcttatagaatccattaagtcatgttttaaagcacaacttcccctgaaacaacctccaaaccccttaccagagatgctcttcaataattaaaataacaaagaagaggccgggtgctgacatctgtagttccagcactttgggaggcagaggcaggcagatcac

SEQ ID NO: 955003 - DNA, 671 bp, Homo sapiens
cctgtctgcctctaaagtacagctgccttggatgataccagcctgcctcccaactcatgccaagtttattcactcactcagccagmcagtcagctagcacctactatctaagctatatgctgaaaacaataacaatatttgtcactaaatgtaacagagaaccctaactgcattcttgtaaaatccatttcctttctcaaaattttgtttataggactgttagagccattccaataatgtactttttttcatttttctttttttgtttttgacagagtctcactctgttggccaggctggagtacaatggtgtgatcttggctcactgcaacctctgccttctgggctcaagtgattcacgtgccttagcctcccaagtagtagctgggattacaggcatgtgccaccaagcatggctaatttttgtatttttagtagagacagggtttcaccatgttggccaggctggtcttgaactcccagcctcaagagaccagcccacctcggcctcccaaagtgctgggactacaggtgtgagccactgcatctggcccatcaatgcacttttgaaggtgagcctctcttacttgggttgatggaggtgcagccttcccaacttagcagttcagaaatgaggaagctctctttctgatggactgaatctcccaccc

SEQ ID NO: 955004 - DNA, 605 bp, Homo sapiens
ctgaagatatgcactatgattcacctaaaggagcatttycaaaggctccagacagcatccatattggccacagactctttaagcactaatagatttactgggtcatatggcccaagtggcagagcagctttaatggcagcctggacatccatcagaactgaaaacctttcaattatttgatgaatgggttagagcactcccaaataagatatatgtggcctccaaaattcaaagaggcccactagccattatgcccattcttagtggtaggaagacccaatgcagcaacttgtccttcactttggaaagattatcttgacatggcctagacgactagattcctaagaatttcacctaggtggcaggcccttgagtttttgccagatgtatcccactctctggcatgaatgtgtcttgacgtgctgtctagggtaatggctatttcctactttgcaggtccaaggagcatgatgccataatgtagagggccagcgtcatattctgtggattgaagatgcaatacaaaatccagactggattttgacagaggactggagagttcatagagtcttgaggcaggcagtgaaggtgcacggctgagactt

SEQ ID NO: 955005 - DNA, 648 bp, Homo sapiens
gctgctggtccagggactaatccttaagyagccaggccatagaggagctgtggttgaatcaggttagcctgattgttttatgttgttgttgttttcttttttttttttgagacggagtctcgctcgtcgcccaggctggagtgcagtggcacgatctcggctcgctgcaacctccgcctcctgggttcatgccattctcctgcctcagcctcccaagtagctgggactacaggcgcccgccgccacactcggctaattttttgtatttttagtagagacggggtttcaccgtgttggccaggttggtctcgatctcctgaccttgtgatccacccaccttgggctcccaaagtgttgggattacaggtgtgagccaccacgcccggcccccttttttttttttttttttttaagacagggtcttgctttgccacccaggctgggtagagtgacatgatcatagctcactgcagccttgacctcccaggctcaagtaaacctcccacctcagcctccccagtagctgggtctacaggtgcacaccaccacatccagctaatttctgcaattttttagagatagggttttgccacattgcccagggtggtctcgaactcctgagctcaggcaattcaccagccctcagct

SEQ ID NO: 955006 - DNA, 786 bp, Homo sapiens
cctctcaccctgactcacaaggtgttagcaataatggacactcctctatcttctgccacactctgaacaatacttcacttccatcaaatggattcatcccaaaggtaaygcccatcgcttctggagggagaaaggtaatgttttcataccactttcatttgatctcatttagaaggtacttgagtaatagagaagactgggttttctctgggattatacgtaggcatttcttaatgactgggacatgttctgaaaaatgtgtcattacacaatttcatcactgtgctatcatagaacacacacacccgaccctagatggcatagcctactccacacctaggctgtacggtatggcctgttgctgaagtctacacacctgtacagcatgttactgtactggatactgtaggcaactgtaacacagtggtatttgtgtatctaaatgtatataaacacagaaaaggtatagtaaaagatggtataatctcatgggaccactatcagataaaccatccatcaccaacagaagcatggttatgagacacaggactgtacctgcagccgccaccatgaggtcaatggcagcctggatagtggaacccactcttctgctggtctcatggaaggcagctctctggagcttatgacaggcaccacatatccctggggggaggcaagagttcaccattagtccaagtctgcagcctcccattgtctaggcctgcagccaaattactgaacctaaacttctgggagccatgaactgggctctacgttgttccaaag

SEQ ID NO: 955007 - DNA, 589 bp, Homo sapiens
ccactggactcctgaatgtgagaaggacacaggctcccaggactatccagaagcatgcctcatcaccataaagctctgaaacacyggctgggtgcagaggctcacacccgtaatcccaacacattcagaggctgaggtgagaggatcacttgaggccaggaactcaagaccagcctaggcagcatagcaagaccccatctctacaaaaagtataccccaaaattagctgggtgtggtggcacatgcctgtagtctcaattaattgggaggctgaggcgggactatcccttgagcccaggagtttgaggctgcagtgaggtatgatcgcaccaccacactccagcctgggagacagattgagaccatctctaaaacaacaacaacaggccaggtgcagtggttcatgcctgtaatcccagcaatttgggaggctgaggcgggttgatcacctgaggtcaggagttcaagaacagcctgggcaacctggtaaaatcccatctctactaaaaatacaaaaaaattagcagggcatggtggcaggcgcctgtaatcccagctactcgggaggctgagggaggagaattgcttg

SEQ ID NO: 955008 - DNA, 546 bp, Homo sapiens
catgagccactatccccagcttacaattttatttagtttttaataaatagtaaattcacattgtagaatatctaaaaaataaaataatgacatgttaacttcttccccactgttgtccccagttcctttctgcagaggcacctgctgtcacttgctcctcacgaattctgctagagctacactatgtgtagacatatggcagcgtgctcctcagcctcttccgtgctggtttgtccactgaatttatcttggcgatttttcctcgtgattacatgtagagctgcctcattatctacagtagctgggatgcacatttcacatgtttatgtacactgacttccaaaaggttgcacttacagtatgtgagtttctaaaaaggagagaccatgttggcagttctccacacagaagacaaactgagaagggagagcgggcacgaattactcatctgtccacagagatggtgagacmgctcagtgtgggaagctgtataagggaagtatatacaattctacctgaattggaagtaaacagggacattgcatt

SEQ ID NO: 955009 - DNA, 547 bp, Homo sapiens
ggtgcatgcctgtaatcccagctaccctggaggctgaggcaggagaatcgcttgaacccaggaggtggcggttgcagtgagccgagatcacagcattgcactccagcttgggcaacaagagcgaaactccatctcaaaacaaaacaaacgaacaaacaaaaaccaataatacttcaacttacagcagacttacctgcaataatagatgccttcagtgacctaaatggtatcttcaaactgctgagagaaaataaccacaaaccagaattccttacctgtgaattctacccaaggtataaggtgtaataaaaacatctttagacgtagacaccaagagaggtcacccctcacaaaacctcactggaagaactactgatggaagtttcttttttttttttttttttgaggcagagtctcactctgtcgcccaggctggagtgcagtggcatgatctcagctcaytacaatctctgcctcccaagctcaagccatcctcccaccttagcctcctgagtagctgggactacaggtgtgtgctaccacactc

SEQ ID NO: 955010 - DNA, 602 bp, Homo sapiens
gatccctgggccaacgtaaacattcacagttgggagaaacaaagaggaaacagaaaagtcaccaaaaaaagaaatcatagttagaagatgagctctccatgaagtcaaggaaatgcattattcacaaaggaaaagcaattagcaaatctgagtgcttacagatagttcaagaaggataacaacagagcaattacaattgcatttagtaaagtggaggtaattgatgaccttgatcacagcagtttgggtaggatgttgaggatgaaatgtaattttaatgaagacaagtttagacaatcctttcaagtaaaaatgacagaaatgagggggtagttagaagaagaggcagatacaaaacaaattttcatcttaatgcactaatgggaataattcagtctagaaagaaataaataacagaggataaatgggaaaattctggggtaagaaagcaagaggggatggaatctaggatacttttgcagaggctgwtattatctaggctcttagtgctacaattcatggtggcaagaagaaaggaaggacagatatataaccacaggtgcaggtagatggctcgatgaaattaatttttctgtctatta

SEQ ID NO: 955011 - DNA, 537 bp, Homo sapiens
acatgccccagagcctcactatctttctgtgaaagatttaargtttaccttcacctttgccactggagaaaaaagtgccattattttcttggtttcaatttgaggactatctaaaataggatgcttctttagtatccatttaacttctgacataattgtgtccttgtagactcttggtgttgttatatttatttttatacaaaattgctttttagagtctcaaaatgtcatgcctcagaaataatgtgtttattaattgctaattattaattctagtattagatttgcactaaattaccactgtaaacagaagatgaggatgtgatatgttaacatggaaattggggtaattcattaagaatttactacttaaaaacaaaagaaacttgttggttatatgttttatgctttcatatacattgctttttaagttaaggtatgtgtctttcctctcatgatctctgagttcccaccgtcctgatctcttttattttaaaaagtatttttattagctagttgacgaacacagaattttta

SEQ ID NO: 955012 - DNA, 624 bp, Homo sapiens
gggttgatgaagctgctcccatccacgtatagttcccagtctactgatgcccaaggccggtctcagaggtcagrtctgctagagtagactgagtccaacacttctacacagtcatgcttgacagggctctctgatactgggagcaaggtagcagggttcagggtgttacaaactttaatggttatacagggattttcacagagcaaactttggtacttggtgagtctaacattcgttagccaatgatgtcctttagtattcattaatgtcaccacagcatggggagcctttatgttcaggttttgcccaagagtcagcttatctgcttcttgtactagcagggcagttgctgccaaggccctcaaacatgggggccattctttagaaaccccatgtagttgtttagagaggtaggccaccggcctcggccagggccccacagtttgggttaaaactccaactgccatcttttctctctctgacacatacaatgtaaaaggctttgtcagatcgggtagccccagggctggggctgacataagtttttcctttaacttatgaaaggcttgttgttgtcgggattcccattcaaaaagttcctgttccccccactttgtgacctca

SEQ ID NO: 955013 - DNA, 617 bp, Homo sapiens
ggcagcaaccccaacaatgtgtacgggttaggtactgttrgatgtaaagtcactgtagcttgattaaccaagtgcaaatcctgtaccggcctttagtccttggtcccaggcttgggaacaggcaggaggggagtgttccatggagattgacaaggagccataattccaaaggttcttaggcgcttgatggacctggataccttcaagagcttctctggggaccgggtactgtttttgcctaactggctgggccccaggcttaacttctataagtacgggggcttggttgactgccaaccctggagggttgtcttctgcccacactcttggccaccacttggcctggctcattaagaaaagtctccattcctcctctcgggggaccgtaagggtcataataactcccgttctgggtaactttagcagcaaagagccatgctctgtaaaagagacagtggctctcagcttgctaagcaagtcccttcccaacaagggcaagggacagtcaggcatgtacaaaaactgatgaatcactttatgtcctcctacagtacaagtccggggcaagcagaaagcttgctttgctgaaacccccatggctccaattatgttgagtc

SEQ ID NO: 955014 - DNA, 630 bp, Homo sapiens
ccagaggtacaaagaggcgctgctaccattccttctgaaactattccaaacaagagaaaaagagggaatcctccctaactcattttatgaggccagcatcatcctaataccaaaacctggcagaaacacaacaaaaagaaaatttcaggccaatatccctgatgtcccatcaatgtgaaaatcctcaataaaatatggcaaactgaatccagcagcacatcaaaacttatccaccatgatcaagtcagcttcatacctggaatgcaaggctggttcaacatatgcaaatcaataaacgtaatccagcatataaacagaaccaatgagaaaaaccacatgattatcttaatagatgcagaaaaggccttcaacaaaattcaacaccccttcatgctaaaaactctgaataaagtaggttttgatgaactgtatcttaaaataataagagctatttatgacaaacccacagccaatatcatactgaatggacaaaaacttgaagcattccstttgaaaactggcacaagactaggatgccctctctcaccactcctattcaacatagtgttggaagttctggccagggcaattaggcaggagatggaaataaagagtattcaaataggaaaa

SEQ ID NO: 955015 - DNA, 583 bp, Homo sapiens
tgacacaatctatctaaacttctaggatacagcaaaggcaatgctaagaggaaagttcatagcattaaatacrtacatcaaaaagtcttaaagagcacaaatagacaatctaagattacacctcaaggaactagagaaacaagaacaaaccaaacccaaaccaagcagaagaaaagaaataacaaagatcagagcagaactaagtgaaatcgaaacaaaaaagatacaaaagataaatgaaacaaaaacctggttatttgaaaagataaataaaattgatagtctattatgaagattaaccaagaaaagaagagagaatctctaaagaacctcaattaaaaatgaaacaggagatattacaactgataccacagaaatacaaaagatcattcgaggctactatgaatacttttacatgcacaaactagaaaacatagaggagatgggtaaattcctggaaatatgcaaccctcctagattaatccaggaagaaatagaaactccaaacagaccaataacaagcaacaagactgaaatggtaataaatacattgccaacaacaacaaaaaaatctaggactaga

SEQ ID NO: 955016 - DNA, 581 bp, Homo sapiens
atagactgggaaaaatatttgcaaaacagatatctgaaaaaggatttgtatttgtaatayataaggaattcttataactcaaaataaacaacatactacaaagtggacaaaaaatttgagtgtatgtgtcaccagaaattgatttgttgatatgatatgaggtaggggacaagatattgtcatgaccttgggatggggaagatatcttgtcacaagaaatgctaatgctgaaggaaaagttttgtaaattacattcaaattgagaacctcttgtcaaacgatactgagagaataaaaagtcaaatcatggcgtaggataaaatatatgcaatacatagaaatagcagaaaacatgtttctagaacataaaaggaactcctacgtgttaacagaaaataatttctacaagttttctgtaaatctgaaactgctctaaaaaatacagtatattttttaaaacatggaaggaaagaaggaaggaaggattaactcattagaaaaaagagcaaagttgaacagacactttcctaaacatgatatccaagcagttaaacaagcatatgaaaaggtgcttaattttt

SEQ ID NO: 955017 - DNA, 532 bp, Homo sapiens
caattatttcttctttgagaccttgacacagtaaggtttatattctaagtgtatttttagcaattaaatatcaaagccaacccaattagtctaatacaggagactcgttcaatcacatgtttatgtttttctctctatgaaaaagaatctaaattggccttttttcactatgcagcagaactgtgtttctggacctctaccagtttgtcagctgagcagttctggctgcagcttgtctgttgatggatagcacagcccctctatctgagtgctcagcagagtgcttgtgaaggcagcaccacagcaacagttgctcagagcgaacggattcaggagcctcaatttagcaatagagtccagggttttcagctcagtgtctttagcctgtctctgctggtcatgtcagttatgttctattcaatccaggaggtgctgtttacrttgtagtacatatatagtcattgcctaatgagtcatacagagagaaaagtaagttataaattatgtcccccatttgctgcaactctcagtg

SEQ ID NO: 955018 - DNA, 570 bp, Homo sapiens
gacctcctctggagattcttcacagtcacctcattcatcaataatataccatatgttcttactgccatcatccagcagctcacccccagccacccatgactctcctgtctgtcccagctactctccaactacgcccagatttcagcgggagtctgtaccccacaccccagaaacacctacaaactcacagacctcagtgagatcctcgccagtctctctcacgtcttcacccccagcccttacggaccctccagtctgtcccagctactctccaaccacgcccacatttcagcgcgggtcagttccaggatcgaagggatcaccaccaagcccaccgctttcactgagttactccccagtctctagcacgtctttatctccaaccctcagggactcgcctgtctgtcccagccactctccaaacacgcccacacttmagcgggagtccgttgcaggcacccagaagtcaccaccaaactcaccaatttcactgcgttactccccagtctctctcatgtcttcaccatccctcagggactctcccgtctgtcccagctactctccaaccac

SEQ ID NO: 955019 - DNA, 594 bp, Homo sapiens
tttcctaaccaagcaggacagtcactcatgtcattgtgttctcccgtgacctcctctggagattcttcacagtcacctcattcatcaataatataccatatgttcttactgccatcatccagcagctcacccccagccacccatgactctcctgtctgtcccagctactctccaactacgcccagatttcagcgggagtctgtaccccacaccccagaaacacctacaaactcacagacctcagtgagatcctcgccagtctctctcacgtcttcacccccagcccttacggaccctccagtctgtcccagctactctccaaccacgcccacatttcagcgcgggtcagttccaggatcgaagggatcaccaccaagcccaccgctttcactgagttactccccagtctctagcacgtctttatctccaaccctcagggactcgcctgtctgtcccagccactctccaaacacgcccacacttcagcrggagtccgttgcaggcacccagaagtcaccaccaaactcaccaatttcactgcgttactccccagtctctctcatgtcttcaccatccctcagggactctcccgtc

SEQ ID NO: 955020 - DNA, 646 bp, Homo sapiens
agaattccacaactttacgtttccctttcctaaccaagcaggacagtcactcatgtcattgtgttctcccgtgacctcctctggagattcttcacagtcacctcattcatcaataatataccatatgttcttactgccatcatccagcagctcacccccagccacccatgactctcctgtctgtcccagctactctccaactacgcccagatttcagcgggagtctgtaccccacaccccagaaacacctacaaactcacagacctcagtgagatcctcgccagtctctctcacgtcttcacccccagcccttacggaccctccagtctgtcccagctactctccaaccacgcccacatttcagcgcgggtcagttccaggatcgaagggatcaccaccaagcccaccgctttcactgagttactccccagtctctagcacgtctttatctccaaccctcagggactcgcctgtctgtcccagccactctccaaacacgcccacacttcagcgggagtccgttgcaggcacccagaagtcaccaccaaactcaccaatttcactgcgttactccccagtctctctcatgtcttcaccatccctcagggactctccygtctgtcccagctactctccaaccacgccc

SEQ ID NO: 955021 - DNA, 630 bp, Homo sapiens
ctttacatttccctttcctaaccaagcaggacaatcactcatgtcattgtgttctcccgtgtcctcctctggagattcctcacagtcaccccagtcatcaataatataccatatgttcttactgccatcatccagcagctcacccccagccaccaatgactctcctgtctgtcccagctactctccaactacgcccagatttcagcgggcgtcggtatcccacaccccagaaacacctacaaactcacagacctcagtgagatcctcgccagtctctctcacgtcttcacccccaggccttacggaccctccagtctctcccagctactctccaaccacgcccacatttcagcgcgggtcagatccagggacccagggatcaccaccaagcccaccactttcactgtgttactccccagtctcaagcacgtctttatctccaaccctcaggaactctcctgtctgtcccagctactctccaaccacgcccacgtttcagcgggagtccgttgcaggcacccagaaatcaccaccaaactcaccaatttcactcaattactcyccagtctctctcatgtcttcaccagccctcagggactctcccatctgtcccagctactctccaaccac

SEQ ID NO: 955022 - DNA, 606 bp, Homo sapiens
aagtacgatgggccatgcacttctggcggtcgatgaagagactgttggtcatggcggtaacgtccttctccaggctcatgtggatgtcctcgaggttgcaaagggactgctccccttctagaagcttctccygcagcgctgtgatggacatgttcagctcctccacctcactcaccagcttggggatgttggggggtgtgagctggggctggggagggcataagtatgcacctactggggtgcaggggacccaaaactcccaatgggagctggcaggaggtcctgggaagacgccatgaaaggatcccaccaggaaagcggctctagggcagagcataaattacgagggtcctcccagggagcacggtcctgagtgggaatgagtgacctgcgtgcaatctcgaccctggcagaacaggactggcctcagccgacaaggctcagttctttccattcctgatatttgacggaaggaggcacccagttccttgaaggaactgaggggcaggaaaggaagaaaggtacttaggctcagaaggggccaccaggcatccattaacaagggaaacaaaaggacggcccatctatgcctatagcccaggcgta

SEQ ID NO: 955023 - DNA, 476 bp, Homo sapiens
aaaacaggtttacctaatgaaaatatgcttagtgacttgggataaaccaatagatgttcacaactgatggagagccgtgaaagagagataacggtaaatagttacaataacacaattttcctgcacctgtcgaggatttccccaaaaaaacgcagaatgtgggatgcacctaaggcataggaaagagagagggcagaaggagtaagagagaaataggaggaaggagggaaggaaagaaggaagtcaggaaggaaggaaggaaggaaggaaggaaggaaggaaggaaggaaagaaggacgtaaggaaggagaaaacaccggtgttactaaaagcccccaaaaaaatggtttccccctgtgggtaagcctacaatgtgkacgaatcttgaaaatattgtgctacgtgttatgtcagtcataacagctcccctattgtgcaattccgcttataggaaatgtccacaatatggtaatcta

SEQ ID NO: 955024 - DNA, 475 bp, Homo sapiens
gttaggtgctggctggcctcttatgccatcgctttccctgtgtctctcacccscttccagtaaggctatcctggtgtgtttttgtgaggtaacaggagtctgagagaagtagtgggaaacatacaagtgagttttcaagccactgcttacatcaaatttactaccctcccattagccagagcaaatcacgtagacaggcccagactcagtatagatcactaaccatgcacatagatacagagaaactagacaaagtggagccctcagtctagtcctccacagtacatgtggacattttaatgaaattttatgacatggaatatagacttcaaaggtaacaagtacacaggtgtaaaaaaattgctctaagtgctaataggagccatgaaacctgggttttaattttggtttttccaccattatttgtataaccttgaataaatttggtagctagaggaaggaaggaagagataga

SEQ ID NO: 955025 - DNA, 571 bp, Homo sapiens
ttttttgaaaggctggagtagaaaagaaatatctgctaatgagaagcacagtgggtggaggctgcatccacctcacacacttgcgcggggagagtgaggaaccaggttgcacagctacctyctgctctggccttgacacaaattcctgtccctatagaaaagtcatttcatttctgcgcacctcagactttgctaatataaaatgaaaggattgggatagattttctcttaagacgtcttcccactctaaatttccaaaattcaatgaaaatgaaagcctgatccatagccataaaagtgtaccaggggatttagatggcagcctagtcagagcctacattatatttgatttcttcagtagcattgaggcaacaagaacatatgatgcactcctcacgggacttgagatagaagtgactcttgttcttatgatgaaaatgacactaatttttaattccattttactgtcctggctgtcacttctgtgtgctctttaatgaagtaatacatacttaaacttcactcctgaaatacagaagtctttctagtccttactataaaagagcaaatg

SEQ ID NO: 955026 - DNA, 655 bp, Homo sapiens
tgctgggtgccccaacctgttcctctgagatgttgtacagtgggtccctctttgctccaccccccaggctgaactctaggcatttggagcacccactttcctggagcaatagcctaagccaccccatcctttttgtgcagagatcctggtgcgagaggagtcctccctggttcaagcccaggcaaatctctccaggcattcagagaatccattcacctggttcagcagcctgaattgtcacacctttcctgtacagagattgtggtacagcaaggccctctctacttcatgcccaggcatatctccaggcagtcagagcacctgcttgccaggaccagtaagctgagccatcccacccttcctttgcagagattgttgtggagcatgtgttttgtgtgctaacacaaaaacacacaagttacatagctcacagaccgcataaaataaccatgcaatagaaatgacaaagcaaccagctatcagcttcgccataggatcaaaacctcagaaaccaatattaacctttaatgtcaacagtataaatgccctcacttaaaaggtacagagtagcaaactggatgaaaaaaaatcaagacccgtctgtttgttgccttcaagagacccatctcacayataatgacacctataggcttga

SEQ ID NO: 955027 - DNA, 353 bp, Homo sapiens
gtggctcacgcctgtaattccagcactttgggaggctgaggtaggcagattgcttgagatcaggagtttcagaccagcctggccaagatggtgaaaccctgtctctaccaaaaatacaagttagccaggcatggtggaacctgcgtgtaatcccaactactctgaaggctgaggcaggagaatcacttgaacccaagaggcagaggttgcagtgagccawgattgtgccactgcactccagcctgggtgacagagtgaggctccatatcaaaataataataataataataataataataataataataactattttctgtgagtccaaagataaaatagcattacagaatacc

SEQ ID NO: 955028 - DNA, 843 bp, Homo sapiens
ctatttgtgcatgtactctttgatggagcattcctacctctagaaatttcccttaatgaaatacctccaatagctaaaaaaaaacaacaacaaaacaagcaaacacacaaaaacaaacaaacaaaacacatatgcataagtatttttcattgcaaatttaatcattatttttaattgtaaaatggtggaaatgacctaacggtccaaatataggacctccctaaaatatagttgatcctcatactgcagaagttggttacttaggctagctgtgaaggtggaggatgataagagaggttgggggactatatgaaggagtgactttttctgagcaagtaattttgcaatatagatacagataacatttggagacatgccaatgctctacacatttaaaaattaaaattaaatcagtaaggacaaaaagaaaaataaaacagcaacctagcactgaaagcaggctgaagcttatgaactcaactgaactttaaatgaataccataaccacactaacatgggaaaagcatacttggataagtttttcttgttgttttgccttttagtttgattaattaattaatattgcaaaattttttgctcggaaaattatcactttttttccaatatttatttttggttcagaggatacatgtgcaagtttgttacatgggtaaattgcacatatggttttttgatcctcaccctccttycaccctcaaccctcaagtaacaactggcatgtattgttcccctctttgtgttcgtgtgtactcagtgtttagctcccacttataagtaagaatattcagtattttgttttctgtttctgcattaatttcttta

SEQ ID NO: 955029 - DNA, 628 bp, Homo sapiens
tatggcttgtcaagtcctgatttacacataccagttgcagtttctgtttctattggaacttcttgggctccattagttagtccggtggcttaaaaaacaggcaggatatgtgttagaggaccatgaaaagctatgtagacagctactgtattgtcacagccagcaagcagttgacgtcaccccatttggcctcttcccctctgaagatcatctccaaaacatggaagctttgcagatttgtgtgagcaaaaagagcagacttgacctgtagttttgagtggcacttagaattgttcactggatcccaaaatgaaattctagagtttcaattaaaggaggatctgcaatatcacatttaatcaacacgttttaatcagacaggttcattgttaggcagaaaaatataggtatcttaatttatggatatctgttagtgcagcaaagtatgcataaaatgttaaattgtttttctatatgaattttatgaatttaaatagtccctgggtactagtcttatactccaaatttgagacatataccaggacaggaaaaaattaaaatgcktagagaaaagatgatttcagctaaaactagagtggtcaattttgcagagcagcattttaaacat

SEQ ID NO: 955030 - DNA, 690 bp, Homo sapiens
tgtagctgcagcagcggtccctggggccctgtgcagaccaggaaaggggaggcccagcgtgccctgggttgaccatggagggtgtgggggaggtgggcaggcagatagctggaaaccagtcctggggagatgaaggaagccaaggaaaaaacctgtgtgagctgaggccccaggttgtgcccactccccacactcagtcgtcccactggactccacagaatgcaaatacgaaagttaaatttattaaaatttcaagacgggaaccacagaggctttaatttcaagcaaggagtccttccaagttcacggccctgtgcccctgggcccctgaatgcattctttgggatggtcatttcttccacgttacccataaagaagctgagggtgttggagcaactctccaaagtgcacagcactcggagttgtggtgctgggcttcaaacccatgtctgactgtttcaaagccaactcttaactacaaggtgcagagacacggtgacgacagacgtggaccagcaggaacacatccaacagtgaagcacaacacttgaacctaagcaagggaagggtgctgggactgggaggatctcaytggggacaagtcatagcaaggaccaaaggaaataaagaagggggaagacccttgggtaaagtgtttagggttcctaaaagcaaggggcagggatgact

SEQ ID NO: 955031 - DNA, 552 bp, Homo sapiens
gggggaaataactgcccaggtagccaggtagttgtttcagcaggtgttgggcaagatcctggcttcaggtatgacccagcacagtcccagtgaccacaggggtgcttgtgtcacctcatccccagttgcaggtggctcagaaagagagagaaacatttttttgtgagaaagtaagggaagagaataagagtgtctgcctggcaatctatagatttcttctggatcttattcaagacgatcaaggtggtacctctatgactgtgcaagaaccacaggataactgggcttggggtggcccccaatagaaacacaacttataacacaacaccttattccttttgaatatttggaaagctttcccaagaaggacaggtacaaacaagcccagactgtgaagaccacagtaaataccaaacccttcaatgctcaggcatagatggacatacacaataatcaagatcatccaggaagatatgaactcaccaaatgarccaaataaagtaccagggaccaatcctagagaacagacatatgtgacctttcagacagaga

SEQ ID NO: 955032 - DNA, 643 bp, Homo sapiens
cattgcccctccctgggtctgcagctccacgaccctcagactagtacaagacctctccctgggtcgccagcttcctgaccgtcgaactacaacaaaattgctcctccctgcgtctgcagctccacgacccwcacaccagaagaagacctctcctccctgggtcgccagcttcctgaccctcgaactacaacaaaattgctcctccctgggtctgcagctccacgaccctcagaccagaagaagacctctcctccctgggtcgccagctttctgaccctcgaactataacaacaatgctcctgcctcagtctgcagctccacgaccctgaaactagaacaagacgtctcctccctaagtctccagcttccggatcctcgaattgcaacaacgttgctcctgcctgggtcttcagctccacaaaaatcaatctagaacaagacctctcctccctaagtctccagcttccggatcctcgaattgcaacaaccttgctcctgcctgggtcttcagctccacaaaaatcaatctagaacaagacctctcctccctgggtcgccagcttcctgaccctcgaactacaacaaaattgctcctccctgggtcggcagctccacgaccctcagaccacaacaagacctctcc

SEQ ID NO: 955033 - DNA, 665 bp, Homo sapiens
attgagaatgggccatgatgacgatggcggctttgtcgaatagaaaagggggaaatgtggggaaaagagatcagattgttactgtgttggtgtagaaagaagtagacatgggagactccattttgttctgtattaagaaaaattcttctgccttgggatgctgttaatctataaccttacccccaaccccatgatctctgaaacatgtgctgtgtccacccagggttaaatggattaagggcggtgcaagatgtgctttgttaaacagatgcttgaaggcagcatgctccttaagagtcatcaccactccctaatctcaagtacccagggacacaaacactgaggaaggccgcagggtcctctgtctaggaaaaccagagacccttgttcacatgtttatctgctgaccttccctccactattgtcctatgaccctgccaaatccccctctccgagaaacacccaagaatgatcaataaatactaaaaaaaaaaaaaaaaaaaaaaaagaaacaggccgggcgcggtggctcacgtctgtggtcccagcactttgggaggccgaggctggcagatcacraggtcgggagttcgagaccggcctggccggcatggtggaaccctgtctctactaaaaatacaaaaaattagctgggtatggtgaca

SEQ ID NO: 955034 - DNA, 766 bp, Homo sapiens
ctcctcagctgcacacaattggacaggaagcaggcctggcacttcttatgtcctatgcaggttttgcttggccagcttggtagatggggttttacagggagagcggccaagctggttctgtgccttctctgttttttccacctttgacccagcattaactctaggagatttcccctcccccagctactcactagcccagctcagccccattggtaaaaatgtggagctgtcaccaagtccatcaccatctccccttgcttccaccttcctgtcctgtctcaagtccacgtgttctctccatcccagccacccctgccttagctcagctccgggttaagtctcacctgggtcaccagtctctgttcttctcactgctgaatccgctgatgacatcaccaccagtgtgacacctgatggcctcaccatcacctgcttaaaaccattccatgctttcccatgggcttaaagatagattttaaaacaacagcttcactgaatatcttcattaatatataattcaaatatcacagagtccactcttgaaaagtacaattcaggccgggtatggtggctcacgcctgtaatcccagcactttgggaagcctaggtgggtggattgcgtgagtccaggaattcgagaccagccttggcaacatgkggaaaccccgtctctacaaaaaatacaaaagttagccgggcgtggtcatgcacgcatgtagtcccagctactcaggtggctgaggtgggaggatggcatgaacttggg

SEQ ID NO: 955035 - DNA, 811 bp, Homo sapiens
ctgatgacatcaccaccagtgtgacacctgatggcctcaccatcacctgcttaaaaccattccatgctttcccatgggcttaaagatagattttaaaacaacagcttcactgaatatcttcattaatatataattcaaatatcacagagtccactcttgaaaagtacaattcaggccgggtatggtggctcacgcctgtaatcccagcactttgggaagcctaggtgggtggattgcgtgagtccaggaattcgagaccagccttggcaacatggggaaaccccgtctctacaaaaaatacaaaagttagccgggcgtggtcatgcacgcatgtagtcccagctactcaggtggctgaggtgggaggatggcatgaacttgggagtctaggccattgtaagctgagatcacaccactgtactccagcctgggtgacagagagagagagaccctgtctcaaaaagaaaagtatacaattctgttgtctttagtgtagtcacttggttgtataatcgtcatcactagctaactccacgttttcaccacgtcaaaaaagaaacccttcatccattagcactcactccccaatctgccttccccccagccccagacaaccacgaatctacttctccctctacgggtttgcttattctgcatattttatattagtggaatcacacaatatgcagtcttttgtgtctggtttctttcatttagcacaatgttttcaaggctggtctgggctataacatgtatccgtattttattccttttcatggctaattggcatttsatggtgttgctatgccac

SEQ ID NO: 955036 - DNA, 717 bp, Homo sapiens
tagagacggggtttcaccatgttggccaggctggtctcgaactacctsaggtgatccacctgcctcagcctcccaaagtgctgggattacaggcgtgagccagcacacctgtcctcaataaagctgttttttaaaaggcagccaggaggatgaacattggatgactgcactgataggaggtccctagagtagtcagatttatagaaacagacaaaatagtggctgcagggaccaggaggaggggctggggagctggtgtttaatggttgtagagtttcagtttgacaagatgaagttttgtggatggatgacaatgatggttgcacaacagtgtgaatatactttttttttttttttttttttttttgagacagagtcttgctctgtcgcccaggctggagtgtagtggcatgatctcggctcactgcaacctctgcctcctggattcaagcgattctcctgcctcagcctcccgagtagctgggattacgggcacgtgccaccacacccggctaattttttttatttttagtagagacggggtttcaccaagttggccaggctggtcttgaactccttacctcaggtgacccgcctgcctcagcctcccaaagtgctgggatgacaggcatgagccaccatgcccagccaggtgaatgtacttaattccatggaactgtactgttaaaatagttaaaatagtaaatgttatatgtt

SEQ ID NO: 955037 - DNA, 576 bp, Homo sapiens
acagtgtttgtacaagggcagggttctggcagaggtgggaatttctggctctgtgcctgccaaatctccatmtgcaatggcagtcagtaggggaaggtgatgggggtgaaggagggtggactatactcccacacgctcatgaagtaagtaaaacaaaacccagccatggagacacatgccagcaaagtgatgtggggagttgctgtgggcttagaggaagcttcagtatggggagggaatgtgcaggctggtgtgcagttgtagtagtcaccttgcgggagttctccatcggtcagacatactcttccagggcagaagctatggtgtaggcccctaggatacccaagactgccttgtaggcagatatggccaggttggggccctgagagagggcagcagaccaagaggtgctcaggtcagaccagccccccttgaagtgcaaggccatcctgcagcgatcagatctgatagttcccctagggctaatgtctcttacaggagtaagttgagcatagagggatggccacacctggctgtgctcctctacagatgcctttgtaccaaaccctctgggct

SEQ ID NO: 955038 - DNA, 753 bp, Homo sapiens
gctatagactggagctgttcctatttggccatcttggaaccgccagccaataaatctattgttaaagaaaacaataatgaggaatctctacatattcttattgaatgagtagastaggatatattaagtgaagaaagcaagttatataaaagtgtacaggaggtccttgaatgtcagtttgcttaatgtcggtttgttataaggttgttataaggttgataaggaaaaaaatctattctcagcaggagccacagtttatatggagtttgcatgttctccccatgtctgcctgtgttttatcctggtagtccattttccgcccacatcctaaagctgtgcatgtcaggtaaattggtttgtctatattgttctagtgtgagtgtgggtgtgtgggagggtgctcagcaatgggatggcatcctgtccagggtgggttccaccttgtgtcctgaccttctggaataggcttcaggcacctgcaacactggacttgaataagtaaggaaataattgtcttacttgtttttattattctttcttaaatgtatatctagcttacatttattaccatgtttaatattagatatatgtgggatttttatctaaaagtttgatgatgtttttatgacaagaaatatgccataggaacttaactctttttaatatcaattagcctatggtaaaactggttttgttaaatgttgtttttgcttaaagtcagttttcaagaacctattgatgatgtaaagtgag

SEQ ID NO: 955039 - DNA, 659 bp, Homo sapiens
tggtgctaagcccctcactgccctgggcactccaagtgcaggtccygccgagcccacgcccacccggaactcacgctggcccgcgagtgccctgcgcagccccagttcccacccgcgcctctccttccaggcctctccctccacaccttccggcaagcagagggagctggctcaggcctcggccagcccagacaggggctcccacagtgcaacggcgggctgaagggctcctcaagcgtggccagagtggaggctgaggccaaggaggcacggagagcgagcaagggctgctagcgtgttgtcgtctctcagggggatggagtctggctctgtcacctaggctggagtgctatctctgcttactgcaacctgtgcctcccagctcactgcaacctttgcctcctgggttcaagtgatcctccggcctcagcttcctgagtagctgggattacaaacatgtgccaccatgcccagctaatttttgtacttttagtagagacagggtttcaccatgtgggccaggctggtctcaaactcctgacctcaagtgatccgcccacctaggcctcccaaaatgctaggattacaggtgtgagccactgcacctggcctgttttgggttcttttcttctctttttgaaagtgcaaaagttgttggg

SEQ ID NO: 955040 - DNA, 662 bp, Homo sapiens
gccctgggcactccaagtgcaggtcctgccgagcccacgcccacccggaactcacgctggcccgcgagtgccctgcgcagccccagttcccacccgcgcctctccytccaggcctctccctccacaccttccggcaagcagagggagctggctcaggcctcggccagcccagacaggggctcccacagtgcaacggcgggctgaagggctcctcaagcgtggccagagtggaggctgaggccaaggaggcacggagagcgagcaagggctgctagcgtgttgtcgtctctcagggggatggagtctggctctgtcacctaggctggagtgctatctctgcttactgcaacctgtgcctcccagctcactgcaacctttgcctcctgggttcaagtgatcctccggcctcagcttcctgagtagctgggattacaaacatgtgccaccatgcccagctaatttttgtacttttagtagagacagggtttcaccatgtgggccaggctggtctcaaactcctgacctcaagtgatccgcccacctaggcctcccaaaatgctaggattacaggtgtgagccactgcacctggcctgttttgggttcttttcttctctttttgaaagtgcaaaagttgttgggaattgaatagtttcgcctaaag

SEQ ID NO: 955041 - DNA, 431 bp, Homo sapiens
aatcagaggcacaagactctttgaccattatgcagtgagtggtataaaagagaaagtggaatccacttctgcatataaacccaaaagaattgaaagcagggtctcaaagaggcattcrtacacccatattgatagcagcattattcacaatagctaaatggggaaacaacgcaagggtccatccagcgatgcatggataaacaaaatgtcatctatccatacagtggaatactcttcagccttaaaacagaaggaaattatgacacatgctacaacatggatgaaccttgaagatattatgctaaatgaaatcagccagtcacaaaaagacaaatactgtgtgattctatttcaatgaagtgcccagaataggcaaattcatagacaggaaatagaatggtagttgccaagggctacagggaaaggggaga

SEQ ID NO: 955042 - DNA, 481 bp, Homo sapiens
taatgaacattttttgccaagtactgtgcatcaatggacaatgtcaagaaagcagagagacaacctacacaatggaacagaaccttcacaaattaaatatttgacaagggaatttatatccgcagtatgtaaagcaccccagaactcaacaataaaaacaagtaaacaacccagttaaaaaatgggcaaagggccaggtgtggtggctcacacctgtaatcccagcactttggaaggccaaagcaggtagatgacgagatcaggagatggagaccatcttggccaacatggtgaaaccccatctctactaaaatacaaacaaacaaacaaacaaaaattagccaggtgtggtggtgcatgcctrtagtcccagctactcaggaggctgaggcagaggaatcgcttgaatccaggaggcggaggttgcagtgagccaagatcgagtcactgcactccagcatggcgacagagtgagactctg

SEQ ID NO: 955043 - DNA, 652 bp, Homo sapiens
atgcggcagaatggaaggaatttttgggtggtgagcagggtggcagagcacgtggtatggcagacaggttctagggtctctgagatgatccctcagcgtgcttttatgggggcccatgtgcacctgccatatccctgttgagagaaggggcgctgaggtcactcctgtgcctttgctcacacccatcttccagcatgcccttcctccctctgccctccagccctggttgcagctcccaggcctgtctgaggttgccactgcccccaggccacctttgctgacatggaatccccagtatcccctgcccctcattttcttcacagagggtcttttctgcagcctgagctctggactgggcagggacaagtactcccaggggaccccagtgccacagtccccttctgccacggtgcatgagcaggcacacttcaggtctcacctggggctgggctaggccgatcctgccttgcctgggacatcaggagctgagggtctatataggtcaggccccaggaagcctcagggggcttgtggaagggtgggggtgtgtgtgtatggacagatatatggatggacagactgatggaaaaacggataagtaactgtccagtctgaagtcctgyccatgaaggagagaccctggaaggcctct

SEQ ID NO: 955044 - DNA, 626 bp, Homo sapiens
caccttagatctttctttttcttttcttattctttccttttttttttttttttttttttttttggagacagagtctcattctgttgcccaggccaatctcagctcactgcaacctctgcctcctggattcaagtgattctcctgccccagcctcctttgtatttttagtagagacgggatttcaccgtattagccaagatggtctcgatctcctgacctcgtgatccgcccgccttggcctcccaaaatgctgggattacaggcatgagccaccgcgcccggccccgacctttttttttttttttagattccgcatataagtgagattatgtactatttctgcttctatatctggtttatttcacttagcatcctatcctctaggtccacccatgttgtggcaaatggcaggatctcctccttccataagcctcagtaacatccattatatgtaatggaattaagcatacatgcaccacaccagtttctgcatccattcatccattgatggacacctatgctgtttycatattggttcttgtgagtagtgctgcaatgaacatgggagtgcagacatcgttgcaaggaagggacttcatttcctgtgggtatatacccagctgtgg

SEQ ID NO: 955045 - DNA, 569 bp, Homo sapiens
tatatattgtatgtattatatgctgtattcttacagtaaagtaaactcaaggamaaaaggataagaaaatcataagagaaaatgtatttactattcatgaagtggaagtggaagttgatcaccataaagatctccatcctcgttatcttcacgttgagtaggctgaggaggagcaggcagaggaggggttggtcttgctgtctcaggagtagcagaggtagaagaaaacccacgcaccagtggactctcacagttcacactagtgttgttcaagggttaactgtactttgatactggtaaacagcatattcccaataactgaaatgtatcatgtgtacatttccactctggaaggtgtcaggaccaagggtatctcttggagaatttagaattttcatctttgtcagccttccaagccgccccccctaaataaatatacatccaagtcaagtcaacatgatttctacatgaaagctacttcaagacaagtcctccaattctcactcccttttctaattaagttgccatcccactctccttcaacatagagaccctggagtcatctgtgc

SEQ ID NO: 955046 - DNA, 567 bp, Homo sapiens
caccaccactcctagctaactttttttatttttttgtagatacagggtcttgctatgttccccaggctggtctcaaactcctgggctcaagtgatcctcccacgttggtctccattctttcttatcacggaattatcttagccccattgtcaaaaatccatttctgtctcagcactgtccagtagaactttctgcaatggtggatatattctgtatctgtgctaatacagtgccactagacaattgaaatgtgttcacttaaagtatagcaggaactaaagttttaattttatttgcatttgataaatttacatttacatttacatagccacataaggctagaagccactatactgaacagcacagttttggaatctttctcctattgcattgatttctattgttatatcattactaacctgttttaattactgycatttataataaatcttcaaatcagatagtaaaatcctccaatttttttttaattccccaaattgttttgcttattttaggttatttgcatagccacatacattttagaagcagcttgtgagttgctacaaa

SEQ ID NO: 955047 - DNA, 596 bp, Homo sapiens
tagttttgtttcattactcttttaggttaagacaatctttaagaccctctgaactagtcaaaattatattccctytaacaaaagccatattcctgtgcctttttataatcttttaacaaaaacacgttttacacaccttgcatgtaaaactgtttctccagttgtcttaattgtatgttataatgttaacttttagcaacttttatttttagtgaaaaacttgataagtaagtgatttttaactatataccggggtggatcctaggacgtcagacagaaatgaagataaggtttgactgttttcagcatagctagcgggcatagctcttcgtatgtccccaggccttatttataatctaatgctccaaagtaggtaaatcaaacaattttcaaaagttaaagaaacactttgaccttaaagcatttagcaaatcggatatctgaccttcatttagaccaaatgtttacattttcaagacattttattttactaataatttttaaaactgtccttatttccaaaagatgaccgaggtcatgtgaacaaaacggcattaaagtttttatttttctgacaaaatatttgacttaagtgc

SEQ ID NO: 955048 - DNA, 632 bp, Homo sapiens
atagaagtgggcatcatccaatccattgagggcttataaaaggtagagcaagggagaattctctctctctgactgcttgagctgggacatcagtgttcccctgccctcaaagtggaacttaccctrtaagtgcttatggttctcaggcttcagacttgaattggaactacattgttgtcttttttttgaaacaccagcttgcagaaagcagacgttgggactttatagcctccataatcacatgacacataatcacatgacctccatcattacataaatacttacaatctctcacgctctttttctacacacacacacacacacacacacacacacacacacacacacacgggcttttctggagaaccctgactaacatacttctcttcctttatatttacccttgagtttggtgacactgggggtgttttggggatctggctaagaggaagttgaactggcaaataatttagttggatatatttatgtagtttgtggtcattacagtgtatagcgaactatctcagtcggggagtggcttccagcattattaatgtgcctactttaacagtctacctggcaatgtaacagaagatgcaggggtagaggtgtataactatgaaaatgtactt

SEQ ID NO: 955049 - DNA, 667 bp, Homo sapiens
tgggaggcactagtctcaaagatccagagcctcaaattgctggatgaccttggggatggctcatctgcttgctgtacgggcccctgtttccccatctgaaaaccaagggtcatatggcatacttttttttaaagggccagatggtaaatattttaggctccgagtgttatacagagtttaagtagtgcaactatttaattttgtcactgtggcatcaaagtcactgcacatgatatgtaaacaaatgactgtggctatgttctaataaaactttatttgtaaaaataaaggcatctgctgactctgttctgcttgattattaaggattcttctaattttctcattgtgatcccacgatgggtccatgagccctttggcattgggagatgaagactaggtgaaaagctatggttttttatcctttgttcactgctcttttgtggctgatttttgggatgagtgatgagtgtagagtgttttatatgaactttcaagataaatattcatctctaaagaattgtattatttatttatttatttatttatttatttatttwtttatttttattttttgagactctcactcttatctcccaggctggagtgccatggcacgatctctgtttgctgcaacctccaccttctgggttcaagcgattctcatgcc

SEQ ID NO: 955050 - DNA, 638 bp, Homo sapiens
acagctccaatggccatcactggatgaatgggtgaamcccatgtggtgggtccatacaatgggatattagttggcaataaaaataatgaacgacaaactcatgctacagtgtgaatgaacctcgaaaacgtggtgctgagtgaaagaagccagacacaaaaggccacatagggcacgattccattcctaggaaatgcccagaagtggcagatctgtagaaacagcaagtagattggtggtttggggaggctgggatgagggcatatggggagtaggcatgggatacggggcgttttggggaggtggtgaaaatgttctaaaattgattgtggtgatggttgcacaactctgtgaatgtacttaaaaccattgaattgtacatttttacagcgcgaattttatggtaggtgaattatattttgatagagctgttaaaatacaaaagtgctggcctaacagagccccttggtgggttagagtcaaccactggccacgctttttccattccttgattccagaggttatcctcagttatccggaaacttcagccacctggaacaccggttcctgcgcatgaggcgggactgtcccagaaggcagagtttccccatggggcccagcagtgacagagaaacacc

SEQ ID NO: 955051 - DNA, 782 bp, Homo sapiens
tggccggagggtggggtcgactgtgtgcggtacgtgtgtatggaggtgactgtgtgtctggcatgtgaatgtaagattttaggaaggtgagtgagcttgtgcacaggtgtgtgtgtgtgcacgtgtgtggctaagcatgtgtgagtgagtaggcatctgtgtgccgtgtgtgggagccgggcagggggcagcgtgtatggctgagtgtgccagcacattgctgagcatgtactcgtgtgcgtctgggtgtgtgaatgacaaaataagtgtatatggttaattacatgagtgtgtgagtgagtgtggggaggggatgtgtgtatccttgattgtgggagtcagagtgtgtgtatgtgtgtgtgtgtatgtacatgcgctgttgtgaagagttctgcaagaacccctccccttttttaaattttattttttgagatggagtcttgctctgttgcccaggctggagcacagtggtgcgaccttggctcactgcaacctctgcatcccggcttcaagcaattctcctgcctcagcctcccgggaagctgggattacacacgcgcaacaccacgccccgataatttttgtattttttttttagtagagacggggtttcaccatgttggccaggctggtcttgaactcctgaactcaggtgatccacccgcctgggcctcccaaagtgctgggattacaggtgtgagccaccgtgcccagccaagaaaccccttttgcatacagagctttgctcctttgcacgaaaatgctyatgaacaggtggggtc

SEQ ID NO: 955052 - DNA, 605 bp, Homo sapiens
agcaggaattgcagtttcagataaggtggccatgaaggtgtcccttcaaggaaaatgtagtagttgggaaggggcaagtcacatggctctctggggaagagtgtgcagggcatcgggarcagcccttgcaaaggccttgagaaggaagcatgccccatgctctcctcctcatatgaggaggccaacaggtcttgaatgaagctatggagaaagagaaagggaatacgattggaaaggtaacaaggaatggatcacgtagagccttccagggcaacgtaatgaccttggctattccttttaaatgagatggaaagcccgtggagcattttgagtagaggcgagacaaaactgatcaggacaactctgcttgctgggcagagaatagaatcaagggaagcaatgacagaagagactgtcctaagagtccaggcgagagatggcagtggcttggacaaaggtggtagcagtggaggtcacagaagatgctgaatatagtgttcatgtttactttatgggatttactaagagattggctgtgtgttaaaaggaaaagatcattctaaagcttctggcctcagtgattagatagacttgccattaacttc

SEQ ID NO: 955053 - DNA, 631 bp, Homo sapiens
ctaaataaatagaggtataaattgcatttgatgtttgtgatttggaagactcaacagtgtaaaaacgtcaattttctgcaaattagtttacacattcaaagaaatcccaaacaaaatattagaaaagagagagagagagggagagagagagagagagagagagagtgtgtgtgtgtgtgtgtgtgtgtgtgtgtgtgtaccgacaaactatttctaattttatatggacaagtaagtaagaggccaacaggatctaaagcatctaaagaatgaaatctgagaagtaccctacttgataccaagacttttaggcccacaagaattaagacagtatggtactggctcaaagacagacaagccaattaatgtaatcatgaactgagggcatgcaaagattttctaaaacgaataaaagaaaacaaaagcaaaaacaactaatcataaaatttgaaagttggaaaacagtataattatgaacttctattaatcaaaaactttaaaaaattgaaaaggcagaccacagacataaagaatatagctgaaatatactgatcaatggattcacacatcaaatgtattaaaaatttcagtgtataaaagygataaacgtaatcacaaaatgaactagaaa

SEQ ID NO: 955054 - DNA, 551 bp, Homo sapiens
aaaacactcaggaactacaaaaggatctcatgaccactgctactgccatcacccaccacaccacaggttcmaaggatgccaaaagcccacccacctccttaccgcaccactgctactactggcatctgagaaagccactcagaagcccaggaaccagcctgcctggaactgccacctcaggtgccagcatacattaccccaggtcacaatgataaacatgctgagcccaccactactaccaacgaaacctgaagaacttattaggcattccagtcctcagcacaacttccccacatctcccacccatggctgcaccctaactcgctgagcaatccacagataccaaggctatgtatagccaaagaaatcttacacagttttcatcactgcaaagaaccagagccaaatgccataccaagtaaatatcatagtaatatgttcaagaaaaaaaaaatcccctcccatgaaagtaattttaaattaaaaagaagcaactattactccagagcaaaaatcaaagtaatatgacaccttcagagaaacacaatagt

SEQ ID NO: 955055 - DNA, 549 bp, Homo sapiens
ctgctgagatacaacaaaagtagtgcaaagagtgaagtttacagccttaaatgcttacataagaagtagaaagattaaaaataaacaatgaaacatcacamctcaatgaactagaaaagcaagaataaaccaaacccaaaatttgctaaagaaaataaatcagaaacataaaagatataaagatataaagaaaaaattacaaaggattaaagaaataaacagttggttcatcaaaaagatgaaaacaattgataaactcctagctagtctaaccaagaaaataagaataaagatctaaataaacaaaatcaaatataacaaaagacattacaactgataccacataaatacaaagatcatcagagactattaccaactctatgctcacaaactggaaaacctagaggaaacagaaaaattccccaaacataccactttttaagatttatcaaaaagaaatagaaaacctgaatagaccaataataatgagtggtgagactgtatcagtttttaaaaatctccatacaaagaaaagcccaggaagagatg

SEQ ID NO: 955056 - DNA, 549 bp, Homo sapiens
ctgctgagatacaacaaaagtagtgcaaagagtgaagtttacagccttaaatgcttacataagaagtagaaagattaaaaataaacaatgaaacatcacaactcaatgaactagaaaagmaagaataaaccaaacccaaaatttgctaaagaaaataaatcagaaacataaaagatataaagatataaagaaaaaattacaaaggattaaagaaataaacagttggttcatcaaaaagatgaaaacaattgataaactcctagctagtctaaccaagaaaataagaataaagatctaaataaacaaaatcaaatataacaaaagacattacaactgataccacataaatacaaagatcatcagagactattaccaactctatgctcacaaactggaaaacctagaggaaacagaaaaattccccaaacataccactttttaagatttatcaaaaagaaatagaaaacctgaatagaccaataataatgagtggtgagactgtatcagtttttaaaaatctccatacaaagaaaagcccaggaagagatg

SEQ ID NO: 955057 - DNA, 483 bp, Homo sapiens
tcaggaccacagagcctcttctgggtgatgctttgttccaatcactcatgtctcttgtccctaaaattcaagtctcatcgctaaaaatgtataagtttagaaagattttttcagcgyttttcaaatttggaatttcccctgctaacaggcaggtgacataaaatttcagtaagctcacttcaagtatcttagggtttcctcataactttctcccccaggggagcaccaggcacctgagacaattatgggatgacagaaaaaaaacaagagtttgtaagaaaacatactgccataaatcccacctttgctgcttatgagttgtacaggagagacaaattttcaaaaccctatgtgggtctccacatctacaaaaatggaggtcacatgtctctgtcccttacacttaggagagtgccgggcacacagtagggttttccattgttatttctctttcttatttgctactgttcttcctgccttaac

SEQ ID NO: 955058 - DNA, 454 bp, Homo sapiens
attatcagacccgtcctaactctgacttacaacccaggtcactacaattctaactggacagaggaccagccttagaaacattcttttctgataagcaattgcagactttawaccagtttcagcagcgtatagaggctgtgcacaaatgatctttgtgtcataaagaattccaccctattttaagcaaaaccctgctccaaagtaaacataggatatatgttacatgcatgtttactcactgtgcctgtgttcgactcccctcataaatatgtacagcttttcccccaaaccaactaaatatatttaataccaacttgtgagccataaaacccaaactccttcccttctttgaagacagagtacctttgatatacaatggaaactgtcccttcccagcctgcaaactaatatcaccaataaagctcttttctgctatttacctatcctgctcatc

SEQ ID NO: 955059 - DNA, 603 bp, Homo sapiens
aggctctaacaaactgcctcagactgagattacaatgttgatgaggtaaccaactgaagaatragaaacccaaagaaatctagataacttcttgtaattagccctgccgtcatggaagactccacctatcacttatgttgaatttaagagatgttattttgataatggggcagcagatatcccagattaaggtggactcctcaaaaaggtcacattttgtgagccaagccctaagggcacaaaccccagactacttggaaaatgtggttctggctgccacagttcccaaggctgaaacactatgagcaaattaagactttgcaaccttatatatggctttcagtggatggaaaacattggaagtttgtttggttaagctgtggtcagccactgcatagcttaaaatgcaccttgcttactgtgcatagtcactctctcctgtgcctctcaatccgtccctcccccactaccccagcctgatttaaggaatagatgattaggagtttcctggtcaccaaggggtactgaagatctatgcacctgtcaagtgtgctggggaactttggggaggggaggaactccaattcttatggttttgctgga

SEQ ID NO: 955060 - DNA, 656 bp, Homo sapiens
tagcttttggcacccccaaaagttaactactgatagtctactgttgaccagaggccttaccaataatataaacaatcaattaacacatattgtgtatgttgtatgtagtatatataagcatatagtatattcttaaagtaaattaagctagagaaaaaatgttattaagaaaatcataagaaagagaaaatttatttaatattcatgaagtggaggtcagtcatcatcagccaggcgcagtggctcatgcttgtgatcccagcactttggcaggctgaggcaggctgatcatttgagctcaggagtttgagaccagcctggccaacatggtgaaaaccccgtctctaccaaaaatacaaaaattagccgggcatagtcgtgtgcacctgtaatcccagctactctggaggctgaggcaggagaatcccttgaacctgggaggtggaggttgcagcgagctgagatcacaccagtgcactccagcctggatgacagagcaagattctgtctcaaaaaaaataataatcatcataaatatcattgtcttcatgttgaatagaatgaggaggaggaggaggagggtttggtcttgatgtctcagaggtggcagaagtggaagatagtctgcrtgtaagtgggcccacacagttcaaacc

SEQ ID NO: 955061 - DNA, 600 bp, Homo sapiens
gaagcttattttattcctcttgatgtgtacttttttccccagtattttttcagtgggttgaacaatttagtcttcagtttaattagaggtgttcatgggtaagaattggctgtggctaaggtaggtgggtatatgcaataccacaatggtgagcacacatcccagccctgatggatgtagcctagggagttcccatgaaatgcactgaggtcttcataggtgaaaggaagggtgctacctcagctctactacaagcctggcaaaaaacaacccaactccctatcatcctcctgtcccagtgttctggatattcagattagacaagcatctttccatcttcaggaatgctgacattttgtgtagagagggagcagggctctactcctcttgcaagcctgaccccagaggacacacatcctgtggggacacagtcaccccaaaatgctctataaagaccatctacagatgcacccaagccaagctcctacaggagacatcctggctgtgtctgcagcagtgggtgagggggagaagtcccctctacgtcmcttcatgagtactggggctgctcgaccgctggggaagaattgtagtcttccc

SEQ ID NO: 955062 - DNA, 815 bp, Homo sapiens
caaattaacacatctcctggtaccttgtatgcagccattgacttggcaaatgtctttttctccattcctgtccataaggcccaccagaaacaatttgcattcaactggcaaggccaktaatatacctttactgtcctacctcaggggtatatcaactctccagttttgtgttctaatgttattcagagagaacttaatcacttttctcttctgcaagatatcacactggtccattacattgatgacatcatgctgattggatccagtgagcaagaattagcaaacacactggacttattggtgagacatttgtttgccagaggatgggaaataaatctgactaaaattcagggactttctacctctgtaaaatttctaggggtccagtggtgtcaggcctgtcaagatatgccttctaaggtaaaagataagttgctgaatttggccccttttacagccaagaaagaggtataacgcctagtgggcccattggattttggaagcaacacattctgcatttcgatgtgttactctggcccattaatcaagtgacccaaaaggctgacggtttgaagtggggtccagaagaggagaaggctctgcaataactccaggctgcagtgcaaactgctctgccacttgggccatatgactcagtagatccaatggtccttgaggtatcagtggcagatagaaatgctgtttgcagcctttggcagacccccataggtgaatctcagcggacacctccaggattttggagcaaggccctgccatcttctgaagacaactaccctccttttgagagacagctc

SEQ ID NO: 955063 - DNA, 815 bp, Homo sapiens
caaattaacacatctcctggtaccttgtatgcagccattgacttggcaaatgtctttttctccattcctgtccataaggcccaccagaaacaatttgcattcaactggcaaggccattaatatacstttactgtcctacctcaggggtatatcaactctccagttttgtgttctaatgttattcagagagaacttaatcacttttctcttctgcaagatatcacactggtccattacattgatgacatcatgctgattggatccagtgagcaagaattagcaaacacactggacttattggtgagacatttgtttgccagaggatgggaaataaatctgactaaaattcagggactttctacctctgtaaaatttctaggggtccagtggtgtcaggcctgtcaagatatgccttctaaggtaaaagataagttgctgaatttggccccttttacagccaagaaagaggtataacgcctagtgggcccattggattttggaagcaacacattctgcatttcgatgtgttactctggcccattaatcaagtgacccaaaaggctgacggtttgaagtggggtccagaagaggagaaggctctgcaataactccaggctgcagtgcaaactgctctgccacttgggccatatgactcagtagatccaatggtccttgaggtatcagtggcagatagaaatgctgtttgcagcctttggcagacccccataggtgaatctcagcggacacctccaggattttggagcaaggccctgccatcttctgaagacaactaccctccttttgagagacagctc

SEQ ID NO: 955064 - DNA, 614 bp, Homo sapiens
ttctcccctgaaaatgggtttttcttttctatcacatagtcaggctgcaaattttcgcaacttttttgctgttttccttttaaratgcaatgcttttaacagcacccaaatcacctcttgagtgctttgctgcttagaaatttcatctgccagataccctaaatcttctctctcaagttcaaagttccacaaatctctagggcaggggcaaaatgctgccagtctttttgctaaaacataacaagaatcacctttgctccagttcccaacaagttcctcatctccatctgagaccacctcagcctggagcttattgttcatatcactatcagcatttttcttaaagcggttcaacaagcctctagggagttctaaactttcccacattttcccatcttcttctgagccctccaaactgttccaacctctgcctgatacccagttccaaagttgcttccacattttcggttatcttttcagcaatgccccactctactggtaccaatttactgtattagttcattttcatgctgctgataaagatatacctgagactgggaagaaaaagaggtttaatgggacgtaagttccacatggctggggaagcctcagaa

SEQ ID NO: 955065 - DNA, 608 bp, Homo sapiens
taaaaatgtgggaatatttggaacttcccagaggcttggaaggctgagaagacagcaaggtgtgggaaagtttggaacttcctagagattgttgaatggttttgaccaaaatgctgatagtgatatagacaatgaattccaggctgagatggtctcagatggagagggacttcttggaaactggagcaaaggtgattctgttatgcttttgcaaagggactagtggcagtttgccccatcctagagatctgtagaactttgaacttgagagagatgatttagggtacctggcagaagaaattcctaaacagcaaagcattcaagaggaagcagagcataaaagtttggaaaatttgcagcctgatgatgcaatagaaaataaaaacctgtctttggggagaaattcaagctggctgcagaaatttgcataagtaatgaggagatgcatgttaatcaccaagacaatggggataatgtctccagagtatgtcagagatcttcccagcagcmcctaccatcacaggcctggaggcctatgagggaaaagtggtttcctgggccagggccagggcctctctgctttgtacagcctcaagtcatggtggcct

SEQ ID NO: 955066 - DNA, 620 bp, Homo sapiens
ctgtggagaaatccatgtggcaaggaattgagacctctgtctggtcaccagcataaacctgcctaccatgtgtgtcagccatcttaaaatcagattttctagccycagtcaagtcttcagatgactgcagccctggctgacatctaactgcaaccttgtatgagactctgaggcagaacaacccaactaagccactcccaaattcttaactcacaaaaaagtatgtgagataataaatgattgttgttgtttcaagctgcgaagttttacataattatgcagtgattgataactaatattgaggaagtgataaacacataataaataaaataatttcagatgtcaatagtgttatgaagaagataaaggagaacaatatgatagaggaatgggggaaaagctgctttgctaagactgggaacctctctgaggaagtaacacttgagttgagacaagactgagcataaagaagcaatcatggctgggtgcggtggctcattcctgtaatcctagcactttgggagaccgaggtgggagaattgcttgaggccaggagttcaagacctcaagaacaacttggccaacatagcgagaccctgtctcttaaaaaaaatcaatca

SEQ ID NO: 955067 - DNA, 559 bp, Homo sapiens
tgtggcctggggtgccagggcatgaggccctgcttcaagctgagggcccagggaggagccggtacctctccacctcctttagcttccattcctctggctcctagtcagaattgtgttccagctcccagatgatagggcctgggcctgccaccccgtagatcatgaacccacagtgaggaatggcaacacagacattcaagtccagctagagactcagagtaaccaccacatcaatgcgtactagccttcagcatcctacaacatggcagcagcctgacatctcctcttattattgtattgtagtctctttagatctactaatatttgctttatatatttgggtgcactgatgttgggtgcataaatatttatgattgttatatcctcttgctgaaccaattcctttatcattatataatgatgaatattttgtttctacagttttggatttaaagttaattttatttgrtataagtgtagcttatattcatcccttcactttcagtctatgtgtggtcttacaggtgaggtgagttcttgtaagcagcatatagttaag

SEQ ID NO: 955068 - DNA, 603 bp, Homo sapiens
aaattcaagtatgctgcagaaatttgcataagtaatgaggagccaaatgttaatcaccaagacaatggggaaaatgtttccacggcatatcagggactttcacagcagcccctcccatcacaggccaggaggcctaggagataaaaatggtttcatgggatggtcccatggtcccctgctgtgtgcagcctagggacttcgtgccctgtgtcctaggtgctccagccatggctaaaaggggccaagatacagttccggccatggtttcagagagtgcaagccccaaaccttggcagcttccatgtggtattgagcctgtgggcacacagaagtcaagaattgaggtttgggaatctgcacctagatgtcagaggatgtatggaaattccaggatgtccagacagaagtttgctgcagggaaggagccctcatggagaacctttgctagggcagtgcagaggaaatgtagggttgaagctcccacactgaagcactgcctagtggagctgtgagacgagggccaccatcctccagaccccagaatsgtagatccaccgactgcttgcactgtgtgctggaaaagtcacactcagtgccagccca

SEQ ID NO: 955069 - DNA, 622 bp, Homo sapiens
agccctaagtaaatagggaaacataatatgtctatgagttcagaggctcaatactgttaagacrttaaatctcccaaattggtttacagaatcaattcaataaaaatgccagaggggtttttgtttttgttttgcagaagttcagaaactggcattaaaattcatgtgaaaatgcagagggttgagaatagaccaaacaaccttgaaaaagaaggaagttgtagaatcaaaattacccaacttcaagaatcttataaagctacagtaattaagacagtgtggtatttgcattaagagagggaaatagaataatggaaaaggatagagaactcaaaaatagattcacacatgtatgaacaaaggctattcaacaaaggtgaagtgtaaattcagttgagaaagaatattgtttgcactgagtgatactgaaaaaagaccatatccatatgcccaaaaaataacttctatttatgtctcataacatatataaaagttgactcaaaacggattataaaactaaatgtaaaactcaaaccaggcaacttataaaagtaagcatatgagaaaatatttgttactttgggttaggcagaagttgctgagataatataccaaaactata

SEQ ID NO: 955070 - DNA, 476 bp, Homo sapiens
ggtttttttgttttgttttttttctttttgagatggagtctcgctctgttgcccaggctggagtgtagtggtgtgatctcagctcactgcaagctccacctcccagattcaagcaattctcctgcctcagcctcccgagtagctgggactacatcacttggcatgtttttaaggttcattcatgttgtagcatgtatttatacttcatttctttttgttgctgaataatattccattgtatggacataccacattttatttatcctttcatcagttgatggacatttgggttctttgtgcttttttgctatgatgaataatgctgctatgcacatttgtgtacaagtttttgygtaaacatgtgttgtcatgtcttttgggtatatacctgggaggtgaattactggcatctatggtaactctgtgtttaatcattcaaggaactgccagactggttgactgcagaatggtttcca

SEQ ID NO: 955071 - DNA, 476 bp, Homo sapiens
ggtttttttgttttgttttttttctttttgagatggagtctcgctctgttgcccaggctggagtgtagtggtgtgatctcagctcactgcaagctccacctcccagattcaagcaattctcctgcctcagcctcccgagtagctgggactacatcacttggcatgtttttaaggttcattcatgttgtagcatgtatttatacttcatttctttttgttgctgaataatattccattgtatggacataccacattttatttatcctttcatcagttgatggacatttgggttctttgtgcttttttgctatgatgaataatgctgctatgcacatttgtgtacaagtttttgtrtaaacatgtgttgtcatgtcttttgggtatatacctgggaggtgaattactggcatctatggtaactctgtgtttaatcattcaaggaactgccagactggttgactgcagaatggtttcca

SEQ ID NO: 955072 - DNA, 554 bp, Homo sapiens
aatttataaagaaaagaggtttattcggctcgcagttctgcaggctatacacaaaacacagtgccagcatctgtttctggagaggtctcaggaaacttgctatcatgacggaagatgaaaggggagcagacataccacatggcaatagagggagcaagagagagacgggggagaaaggtgccaggttctttcaaacaaccagctctcacgtgaactcagagagagagaacttgcccactaccacggggagggcaccaagccattaatgcaggctctgcccccacacctccccaaacacctcccatcaggccccacctccgacactggggatcacatttcaacatgagatttagaggggcaaaacctccaaaccatatcatagcttttttgaaatatacaatacaatattattaaccatagccaccctagtgtgcactagaacamcagaacctgttcctcctatcaaactgtaactttgtacccactgaccaacctctctccatcctccccaacctccctgcctctgctatttactattctactctctatttctg

SEQ ID NO: 955073 - DNA, 717 bp, Homo sapiens
actgctgtcttcaaagctgtcagacagggacatttaagtctgcagcggttactgctgtctttttgtttgtctgtgccctgcccccagaggtggagcctayagaggcaggcaggcctccttgagctgtggtgggctccgcccatttcgagcttcctggctgctttgtttacctaatcaagcctgggcaatggtgggctcccctcccgcagcctcgctgccgccttgcagattgatctcagactgctgtgctagcaatcagcgagactccgtgggcgtaggaccctccaagccaggtgtgggatataatctcgtggtgcgccgttttttaagcccgtcggaaaagcgcagtattcgggtgggagtgacccgattttccaggtgccgtccgtcaccccttttttgactcggaaagggaactccctgaccccttgcgcttcccaagtgaggcaatggctcgccctgcttcggctcgcgcacggtgtgcgcacccactgacctgcgcccactgtctggcactccctagtgagatgaacctggtacctcagatggaaatgcagaaatcaccgtcttctgcgtcactcacgttgggagctgtagaccggagctgttcttattcggccatcttggctcctccccctaggtaacattcttgccttgttcctaatcttaagttgaatgtatcaaatattttaccattaagtatgtaattttctctca

SEQ ID NO: 955074 - DNA, 462 bp, Homo sapiens
taaatagttcttattatttagagatatgytccataaaaacctagtttattgagagtttttaacataaagggatgttgatgttgaattttatcaaaggccttttctgcatctattcagataatcgtgtgatttttgtctttggttctgtttatgtgatggattacatttattgatttgcatatgttgaatcagccttgcatcccagggatgaagccgacttgttcgtggtggatatgttttttgatgtgctgctggattcagtttgccagtattttattgaggatttttacatcaatgttcatcaggtatattggcccaaagtttgttgttgtgtctcttcccagttttggtatcaggatgatgctggcttcataaaatgagttaggaaggaattcctccttttccattgtttggaacagtttcagaaggaatggtaccagctcctctttgtatttctggtag

SEQ ID NO: 955075 - DNA, 552 bp, Homo sapiens
ttttagtagagatggggttttgccatgttgaccaggctggtctcgaaacccttacctcaggtgatccacccaccttggcctcmcaaagtgctgggattacaggtgtgagccaccatgcctggcttaatttttgaatttttagtagagacagggtttcaccatgttggccaggctggtctcaaacttctggcctaaagctatccacccaccttggcctcccaaagtgctaggattacaggcatgagccactgcgcctggccagtcatggacatttgagctgtcctttttagtatgtaaaaagccattactaggtggagctgcagggacaagagaatcttgaagaggcattataaatactcacaagcaaaagcagaggattcccccttcctcccaggagtttagaatattctaggacaaacaattctaaaccacttgagcaacagtgtttcttctcttagggtctgtttgagcctatattgttcaaaaactccattattaatatatttttctttaaataaattattttctgataatttaaataattcatttcta

SEQ ID NO: 955076 - DNA, 552 bp, Homo sapiens
ttttagtagagatggggttttgccatgttgaccaggctggtctcgaaacccttacctcaggtgatccacccaccttggcctcccaaagtgctgggattacaggtgtgagccaccatgcctggcttaatttttgaatttttagtagagacagggtttcaccatgttggccaggctggtctcaaacttctggcctaaagctatccacccaccttggcctcccaaagtgctaggattacaggcatgagccactgcgcctggccagtcatggacatttgagctgtcctttttagtatgtaaaaagccattactaggtggagctgcagggacaagagaatcttgaagaggcattataaatactcacaagcaaaagcagaggattcccccttcctcccaggagtttagaatattctaggacaaacaattctaaaccacttgagcaacagtgtttcttctcttagggtctgtttgagcctatattgttcaaaaacwccattattaatatatttttctttaaataaattattttctgataatttaaataattcatttcta

SEQ ID NO: 955077 - DNA, 657 bp, Homo sapiens
tttctcaaggaacaaagcagtaaattgccctgacgtgatgaagcttatattctagatggggtaacaaatggggagacagactataaacagcaaatatcacaaataagtagtttaaataaaatgttagaaggtgataaacaatacagtaaaacaaaaacaaaacccttatagttgcaaggtaagaggaatcagagaatggaatggaatactattttcgatagggtaatctgagtaggcctcattgagatggcaaaacttgcacaaagactagatgtaaatgagtgagttagctatgtggatatttagagacagaaccttgaaggaagagggaacagcttgcagtaagacactgaggctgaagctagccaagtttgtttaataaatagcaagattggtgtggccgacacaaagagaaagaaggagagtaggaggagataggaccaattttcagtggattccaagtttacaccaaagagaaacaaaggatggaagactgggtaggacctctcaggtcatttcaaggaattgacttttattctaagacaaatggtgagyccctgcagagtacagataaaatctgattgtttttttgaaaagatgactctggctgctgtgttgagaaaagaccatagtgaggctaggataaaagtctaggat

SEQ ID NO: 955078 - DNA, 555 bp, Homo sapiens
ccatgttgaatagggagtggtaagagtgagcatccttgtcttgttctggttctccagggaatgctttcagcttttkcccattcattgtgatgttggctgtgggtttgtcatatatggctcttatcattttgaagtatgttccttcagtacctggtttgttgatggttaacatgaagggatgttgaattttattgaaaggcttttcttcatctgtagaaatgataatatggtttttgcttttagttctctttatgtgatgaatcacattgattgatttgcatatgttgagccaactttgcaacccaggaataaaacctacttggtattggtgagttaactttttgatgtgctgctggatttgatttgctagtgttttgttgacaatttttgtgtctatgttcaccagggatattggactgaaattttcttttttgtatgtgtatctgccaggttttggtatcaaaataatactggcctcatagaatgagttagagaggagtccctcctccttcatactttgaaataatttcagaaggattggtgccagctctttat

SEQ ID NO: 955079 - DNA, 644 bp, Homo sapiens
ataaatgaatgaaggaaggcaatggaaattatccagacatggatcttgaagtgggagataccctaatatatgtagtcaagtggaatgatgacagaaagggtcagatttggccattgaaaatcaaattaccgatgactttggagagagcaggatcaggaaagtgggtgcttgagatccattttggaggagttgcggaaagaatgaaatagggagaacgggaagccggcaagtataggtgacttgtgtagcccatcccctgatatcctctatattcgtttgctagagttactgtaacaaagtaccacaaactggcttaaatgacagaaattggttgtctcacaattctggaggttagaagttccagatcaaggtgtcatgagagttgtgtgagaaccgtgaggaagaatctgttccatgcctctctcctggcttctggtggtggtttgccggcaatctttgtcattccttggcttatagaagaatcgccctgttctctgccttcatcttcacttggctttctttctrtgtgtatgtgtgtccaattttctctttttataagaataccaatcatattgaactagggccctgacctcatcttaactaattatatctgcaatgaccctatttcctaataaggtcgtatt

SEQ ID NO: 955080 - DNA, 540 bp, Homo sapiens
cctagagctcaaatcctgtgaggagagataagatttatacatgtgaaagtgaaggaacaaagggatgatttgctccaagtgtgtggtctattggctctttaataagcattgattgagctttttcagaaccaggacagggctaggcaagggagacccagagatggaaggggctgagtctcccctcttagcacaggccagatggaggacaggcttgttagccaatcagggccaaagagaggaaagaagcttagaagcttcacagtagcacgcaataggtgcccaagcacttgcttaaatacttactgtggatttttaaatttttaatgttcttaaaaatggagatggggtctacactatgttgccctggctggtgtcaaactcctgggctcaagcgatcctcctgccttagcctctcaagtaactgggaccacaggcatgagcctacacccagttggatttccttatttaatcctcataaaattctatgaggtgggggccattactgctcccrttttatgcatgaggcagctgagggtttgt

SEQ ID NO: 955081 - DNA, 575 bp, Homo sapiens
tgttgaataggactggtgagacagggcattcttgtcttgtgccagttttcaaggggaatgcttccagcttttgcccactsactatgatattggctgtgagtttgtcacgtatgactcttactattttgaggtatgttctttcaatacctagtttattgaaagtttttcacatgaagggatgttgaatgttatcaaaggccttttctgcatcttttgagataatcatgtggtttttgtctttagttctgtttatgtgatgaatcacatttattggtttgcatatgttgaaccaacattgcatcccaagatgaaaccaatttgatcacgtttgataagcttttgatgtgctgctggattcagtttgacagtattttattgaggattattacattgatgttcatcaaagttattggcttgaagttttctttttttgttgtatttctgccaggttttggtataaggacgatgctggcctcatagaatgagttaaggaggagttcctccttttcaattgtttgaaatagtttcagtagaaatgttatcggttcttctttgtacctctggtagaattcagc

SEQ ID NO: 955082 - DNA, 575 bp, Homo sapiens
cacacctgggtccttgtcttatttttgaaaacattggttcaacatggagaaaacacgttctgttctagagcagtgtattcctatgttcaaaatcttagcacaactctttgtaggaacagattcctcattcagatcaaatccataaagtcgaaaagagaatgcgggcccagattttgcttggtttcttacctatttatagcagaaagtagaggcttggtgttgtacaactccaggggatgccattattattcacataaacaggcacccttgaagttgtggagtgcacagcctaaatgcagctcatgcaactgccctaaaactctttaaagtgatttgttaacttttaaagatgaattgtgcaaggaaataaaggctcctaatatttatcaggatttttagaagttaatctaagacatgtatgaggagaaattttgtaaaatgtaagtcmctgtctaatatatgttattaatagtaaaatagtcatctaaggaattgatatttaacgggtaagatatattagaaagagtagagatttctttgtgttttacaaattccaaactggttggtgtttttat

SEQ ID NO: 955083 - DNA, 694 bp, Homo sapiens
caggctctgtcttctggggtctttctccttctcgcctctrcctacttgtactcagcttctggctctcctccatcaaaaaggctcctgtccttcggccccatggcggagacagcagcccctgctattctaggtttgtgtcctcccagtggtaggaacaacacaaaaagcttcttcctgtctgtctccaagcacagcaatttcagggaatactgtttctggcccaacctcttgacaagagggatggggccataatggcttaggtcaggtcacctgccatcccagggggtacagggaccgggctctgtgatgacagtcccagaagaatcatccttgttctccaaaggaaagggacgtggtcctacatcatgcaaaggaaggggcagacccttcctttcctttctcttccttccactgccccacccttgacaccccacttcccagagaccattaagaccatcaggtgaccaactgccaggtgggaaaggacctgaatgacttaccagccatttgtaccttcaagtgaattcatttcagggggttgctctcatccctctcagttaaatggtgttcagatagtggaatgagggaatggaggagatactggaatgtggctgaatatttcatcgagaagggaggccagctttgtgttttgttttctacaccgtcccagtgagcctgctccagaccaggaatg

SEQ ID NO: 955084 - DNA, 456 bp, Homo sapiens
tcaaatgtcaatctcttctgccaacaccctcacagacactcccagaaacaatgcttcaccagccacctcggcatctgtattagtccattctcacactcctaatagacatacccaagactgggtaatttataaaggaaagaggtttgattgacttacagttcagcatggctggggaggcctcaggaaacttacaatcatggtggaaggggaagcgaacacatccttcttcacatggtggccacaaggggaagcgttgagcaaaagaggaaaaaaccccttataaaatctttagatctcatgagaactcactcattatcccaagaacagcatgagggtaaccgtccccatgattcaattacctcctactgggtccctcccacaacatgtggggattatgggaactatcrtttaagatgagatttgggtggggacacagacaaatcatatcagcattct

SEQ ID NO: 955085 - DNA, 731 bp, Homo sapiens
ggaagggtggtgcagacccaacagttgaaaacattggtcacctcagcataggtccacaatacasttggagcatgttaacctatgtcgaagtgacagagcaagcacaggtactaacgggggtaagtcacgtccctcaggcaaaatacaagctaacctttcatccctgaataacaatgcagcccccaagcacttttgccctgggcaatggtactacaccttctcagctccccatggtttctttgagtcctgtatcagtgccacagtcacaggggagctcataataggccacacagacagtacatatgtgccccggaggagggctccttccccgaccgccccaccatgaacagccaaccatgggggccatgcatcaaacacccaaggagcgacatgcaagtcacactgcaggccctccccacagggagctatgatggccagccaccagcagtgggggacttggagggtccacagacacagccaggttttctgttctcctgccttcaagggtgttggggcaggcaacaacaggttaccataagtccccatatctggtcagaggaggtcatccctggtatgtatctgcaactgaatgggacagtagcccagtgtaacaaagcctccactggggctgggccaccttttggtggtcattcattcaaggtttggagcaccatgtccagcctggaactccagccctgcaaagatgggggtgtgacatgcaagcataaccc

SEQ ID NO: 955086 - DNA, 731 bp, Homo sapiens
ggaagggtggtgcagacccaacagttgaaaacattggtcacctcagcataggtccacaatacagttggagcatgttaacctatgtcgaagtgacagagcaagcacaggtactaacgggggtaagtcacrtccctcaggcaaaatacaagctaacctttcatccctgaataacaatgcagcccccaagcacttttgccctgggcaatggtactacaccttctcagctccccatggtttctttgagtcctgtatcagtgccacagtcacaggggagctcataataggccacacagacagtacatatgtgccccggaggagggctccttccccgaccgccccaccatgaacagccaaccatgggggccatgcatcaaacacccaaggagcgacatgcaagtcacactgcaggccctccccacagggagctatgatggccagccaccagcagtgggggacttggagggtccacagacacagccaggttttctgttctcctgccttcaagggtgttggggcaggcaacaacaggttaccataagtccccatatctggtcagaggaggtcatccctggtatgtatctgcaactgaatgggacagtagcccagtgtaacaaagcctccactggggctgggccaccttttggtggtcattcattcaaggtttggagcaccatgtccagcctggaactccagccctgcaaagatgggggtgtgacatgcaagcataaccc

SEQ ID NO: 955087 - DNA, 539 bp, Homo sapiens
agctgcatgcaaaggggatgttacttagtttagttcccgatagtccaccatcatccaccaagtttcatcaggctttctatctggtcatactggagaatcgtaggggttgtagrtgccacacactatctgcacctcctccagcttcttaattgtctcagtcatctctgtatgcccacccggcaaatggtattgatgaatggaagtaacccattggggttgtggcaggacctgaggctggcgatgcatatgtccatgcagcactggcttcaccacatgcccttggagtctgaattactttgccgtggtttgtaacaccaggccctgtaaaatgtccacccccagaatgtattccagtatgggagacacatacacaatatataagcggagagccaaacatcccatgccaaggtacgatacaggcttcactttcattgatcagccaccataactgtcaatgtaagcaggtttgcctggaaacttatccaggttcccataaacaagcctgcaatctgtgccagtatccgccagcgccggcaccc

SEQ ID NO: 955088 - DNA, 631 bp, Homo sapiens
gcatgccaggtgtcaggttccactttgagctggggcccgaggggagtgggtggacgggtggcaggtagctgaaagaacactcgagggaccgtaggcagttgggacatggctttattctctctctctcctacagagtcagcagtgcagttatatgacttatagacaatagtggctcaaagccaggtataagctcacacaaacaggttactttaaatggctacataaatatgatcacataatgcacagagttgtgtgcctgtgctctagacccgctgtgtcatgctgtactggatgtctgcctcggcctgctcctgactgaagcacagccattctttttacactccatcctctagaccgggagaaaatgtgcccacagggaggaaccctgaacttataggtcacagtagcaatacagggagcaacaactcattactaatactcccatggtgctgcctataattattagggtccagcacaggccagagcccagagacacccaccgtgtctgtaggaggttgtcaataaggctctcaactgccttgatttcctggggaascccctgcaaagctgctgttacgttttgttgattgtcagggatgaaagtacaacattgagttccccaaagagcaca

SEQ ID NO: 955089 - DNA, 752 bp, Homo sapiens
cgaacagtccatcgcgggggccacatattaaatacctaaggagtgacatgtaaatcatactgtagccccccacccccatccccctgccaccagggagctacaatagccaaccattgggaatgtggggctaggagggtccaggaccaaagccaggttttctcttcccctgccttcagggccgttggggcaggcaacaacagattactgttcatccccatacccagccgggggaggtcatccttggtgtgtgtctgtagctggatgcgggtggcggtccggtgtagcagtgcctccaccggggctgggccacctttccatggctgttcgttcaaggtttgcaacaccaggtccaaccttgaactccagccccacaaagataggggagtaacatacaagcgtaacctgtttttcaggagtcggttatgtcactcagtcataccagcagcttgtgggttatgtggaacatggaacctttactttacgtccatccattgtgcccactgttgtatctgctgttcagtaaaatgcattcccttgtccctttcaacagtcagaggacgaccgtatagggcacacaagtgctgcagggcctgaatggtatgttgctggtcggccgtcctgcaagggtaggcaagcaacagaccggtggccatgtgtatagctgtcagcacatgcctawgcccctgtaacctcggcagtggcccgacgtagtctatttgccatctagtcaagggaatctgccctaccgtcac

SEQ ID NO: 955090 - DNA, 581 bp, Homo sapiens
tttagattggagagtttaatccatttatatttgaagtaattactgatatgaaaggacttctgctattttgcttttttttctataggcttgtagctttcttgttccttatttcttgctttactgctttcttttggtttagttgacttttttgtagtgaaacattttaattctctttatattgccttttgtgtatgttctatatctattttctttgtggagttgccatggggattgcatttaacagcctaaagttataacactctaatttgaatttttaccagcttcacttcaatagcatacaaaatgtccgcttctatacagctctgtccctacctctttcacttattgatatcacaaattacatcatttttctggatttttaaatttttaaaatagacttagggtgtgcaagtgcatttttgtttcatgaatatactgattgcatagtggtagagtctgggctttttagtgtaaccatcccctgaatagygcgcattgtacccaataggtaatttctcatccctcacccccctcccatcccaccttctcaccttttgtaatctctaatgtctagtcttcca

SEQ ID NO: 955091 - DNA, 581 bp, Homo sapiens
tttagattggagagtttaatccatttatatttgaagtaattactgatatgaaaggacttctgctattttgcttttttttctataggcttgtagctttcttgttccttatttcttgctttactgctttcttttggtttagttgacttttttgtagtgaaacattttaattctctttatattgccttttgtgtatgttctatatctattttctttgtggagttgccatggggattgcatttaacagcctaaagttataacactctaatttgaatttttaccagcttcacttcaatagcatacaaaatgtccgcttctatacagctctgtccctacctctttcacttattgatatcacaaattacatcatttttctggatttttaaatttttaaaatagacttagggtgtgcaagtgcatttttgtttcatgaatatactgattgcatagtggtagagtctgggctttttagtgtaaccatcccctgaatagcgcgcattgtacccaataggtaatttctcatccctcacccccctcccatcccaccttctcaccttttgkaatctctaatgtctagtcttcca

SEQ ID NO: 955092 - DNA, 593 bp, Homo sapiens
tgcaaaggacataatttcactctttttgtggctgtatagtgatgcatggtgtaccaaattttctttatcccctccattgttgatggacacctaggttaattctatgtttttgctattgtgaatggygctgggatcaacatgaaactgcatgcatgtgtctctttggtagagcaattaatttttttgatatatatccattaataagattgctgggccaaactgtaattttaagttatttaagaaatttcaaaggtggctgaactactttacatttccaccaaaataaaggttcccttttctccacagcctcaccagcatctgatatttgttaaattttagtaatagctattcttactggtgtgagatggtatctcatcatgttctggatttgcatttctctgataattagtaatgtagaacatttttttcatatgtttcttggctgcttatatgtcttcttttgaggaatgtctgtttatgtcttttgctcctttttagcagggttgtttttagcttgttcaattgtttaagttccttatagattctggatgttagacctttgctggatatagagtttgcaaatattttctctc

SEQ ID NO: 955093 - DNA, 584 bp, Homo sapiens
gactaggacttccagtactacattgaataggagtggggagattgggttacactgtcttcttccagttcatagggcaatgcttccaggttttgccattctgtatgttattggtcgtgggtttgtctaagaattgctcttaatatggtgaggtgtgttcctccaatgcctagtctattgcgggtttttattatgaaggtatgctggattctatggaaagatttttctgagtctattgagatgatcacattgtttttgcttttaattctgtttatgtggtgaatcacacgcattgatttgtgtatgttgaaccagccttgcatcccaggaataaagcccatttgattgtgatgtatgaatttttcaatgtgctgttgaattcggtttgctagtgttctgttgagggttcttgcatctatggtcatcagagatattggccggaaattttcttttatcattgtgtctctgccatattttgatattatgctgatactgccttcacggaataagttagggaggagsctttcttccttttggtggaaatcattttagtaggattggtaccagttcttttttgtacatctggt

SEQ ID NO: 955094 - DNA, 726 bp, Homo sapiens
attattcccaaagttatgctcactttattttaaacatttataatttcctttctcacaggctactcaaaagaaacatgtgtgaaacttaaattatcatttttttaaacagtattggtgtgaggagtccaactcctggttaaaaacctacttactattttccaggtgtgaccacaaatgattacaaaaggtttatgtgacaggcctcgaagtggaagctgccctttccacagcaggcttgacgcccatccagaggatggcagtgtccaaggggaatggcagaaaaggactcaggccaggctgctccggtccatcaagttcttccgccatttgcattccaagcccaggcaccttcattcctaggtgtctttctctgaggctttaggtggaggccttcttcaagcacctctgctaagcctccttactggaagaaagacagggaaaacatgaagacaattccccacttttctagtacttttccactcctaactctctcctgcatcatcattccagggtccatacaactgcaggagcctttcaggttccctcaactgaggggacctccgtacccatgctgacccttcgctgaggcacaactctatgaggtaaaataaaacaggttttcatcagtgttttctccagttttagcttcttccactacagaaaatgattaaagkcttaatttttttgtgtttggcttgttgcttttatagactatgctgatatttg

SEQ ID NO: 955095 - DNA, 580 bp, Homo sapiens
tcttacactggtctgttcagtctcctttgtgaacagacccaactgttgctagtgagtcaccagtattcaatatatgcaatagcaacatgtctacagccacagttccttattccatgcatcaaagcacactgaagttccggcagtctgactgaaagatgactcatctaccaagactcaacttaagcaggacttcctcagtaaggcctcctctagtcttcagcaaaagtaagtgcttctgcctcagggtctatggaagctgagacataccactaacactacatctatcacatactattgtcattgtcttcacactgatgaatctcatccataggacctcagttggaggtgaatggacaataatcatgctaaaaacacctgcacaactgcaacaagaaatttttttcttggtctttctgaattttgcctgctaagacctcctacttacccctacacasaaatttgtcttttaactgccctttgcacatatattggtttaatatttttcctttgctgctgtgctacctgaactgcaaaattgaatctctggattacatgttatagtaacacaatctctaatatt

SEQ ID NO: 955096 - DNA, 569 bp, Homo sapiens
tcctgtactcagtatcataaaaaccagttacaaatgttactctaatgccaacttacttaatcttcataaataatgtattcattttaccagctattgctagatcatttaaaaacaaattgccagtgtgaaaagagttacaccattactatcctttcaaaaaattagttgtattcatttcatctttaaaaatattttatgaaatatcttaaacatataaaatgtttagagcatgattttgaagataccaaagtaaatacatatgcatgcatcttaacattttaccatatttacttcagatttttaagaagtaaaatataacagatacagttgaaagcactttgtccctttttcaatcatattttcttccctctctaccccaagttaaccagtatgaggtcagtgattattctccatccatgcattttaaatattttaagaagtatatatatatccttatgaatattgttttgcacacttaaccatgcatttttaaatattttaagaagtatatatatatccttatgaatattgttttgyacacttaaccatgcatttttaaatattttaag

SEQ ID NO: 955097 - DNA, 772 bp, Homo sapiens
ggggattaaattctcctcttttctactctgggcattctctttttaatatgtcctgattttccacatttgtaacatccacttacagtcttagtttttccctgtatctccctcttatctttttgttgaaataagttagtattctctcatctcctccaggaggggtcttgatctaatcttttcctgactacctcttctacagtggaaaccatgattttcactttttggttctgcttctcttcctctctccttacaaaagccttttgactttccctcagtaactcttcaatcagtttctcattccactcatcaatcttctgtagtttcttagtaatgtcaggccagctttcagttacaaagttaaccttcaaaaggccttgccttactgggtcttctggatctaatccgagtatttcctcatttgatctctgagagtctctgcaagaatgcagagggaatttcttcattttcctgttgaatctcgtatgccttcaagacattttgtgtcctaggagtggactctttgatccctttaattattaattccctgaagtcctgcatttgggccagatctctgggatcattattttcccattcagggtcgacgttcagaaatttttgtttggctggtgagactccttgcccaggagggtgttgcctctcccasatggtcatggctgctctcctaatcattcccctttcttctcctgtgaacaggatattcataatagacatcattttagctcaggtgtaaaagctgcgtcctaggaattgg

SEQ ID NO: 955098 - DNA, 565 bp, Homo sapiens
taggtccaaatgattctgcattttaatatttcattcagtacagggcacaaaactgaaattcaataagctatgagayaaataattcggtatcagagaagcatataatgttcccttaaatattaaaatcctgataatgtgatttcattctaaaaatttaacaatgttcaatagcaatacattcaagggggaagatgccaagtacactgtcatgcaagagtaaaagaaggatatgagaaaaatgaccttaaaattgttcaaagacatgttttaagacaatcctacaacccagaactgaaaaaaagccatttcacttgaccaggttgacattacctacttagcacaaagaaacttttaaggtgttctggtttacatccacttgtaggaaaggctacccattgataatagcttacatttattaagcatgtatctccttgtttaatatctataactaccctgtaagataataaccattattatattatttcataggtgataaaactgaagcttagaggtgtcaagaaacttgaccacggtcattcagcttttgagataagagtggcaatac

SEQ ID NO: 955099 - DNA, 621 bp, Homo sapiens
cgattcctcatccaatcacctctctccccgccagatggcagttaccttttccccatgaccttggctcaccatggtcctggcaaaggggtgaagactgtgtcccagtggcagagattgctggctgcccccagtatccgttttcctcttctttctaaagtaaaagaaatcccagctttgagctggacacgtggctgctcatgtaaagattcaagttcttagcctcccttgcagctacacgtagttatctgaccaaatccttgccaatgacgcagaagaagtgacctgtgaaacttcgggttcctgaccttagggggaagagaggtgccttcccccgcttcttctccctgttcccacagttggattaatgaggtgatggcaggagtggggcagccgtgggattatggaagggaagctgggtgttgaggatcacagagcaacaagctgcaaaaagcctgtgtgcccgtgtcaccaccacgctagctttagactgctgaagctcagcctgctatgcgggggscgggcggggtgggggtgggggggcgctgtcctgtttaatcctgttattttggcatttcttacagtagccaaaatgtatcctagttaaaatagatccagatagag

SEQ ID NO: 955100 - DNA, 621 bp, Homo sapiens
cgattcctcatccaatcacctctctccccgccagatggcagttaccttttccccatgaccttggctcaccatggtcctggcaaaggggtgaagactgtgtcccagtggcagagattgctggctgcccccagtatccgttttcctcttctttctaaagtaaaagaaatcccagctttgagctggacacgtggctgctcatgtaaagattcaagttcttagcctcccttgcagctacacgtagttatctgaccaaatccttgccaatgacgcagaagaagtgacctgtgaaacttcgggttcctgaccttagggggaagagaggtgccttcccccgcttcttctccctgttcccacagttggattaatgaggtgatggcaggagtggggcagccgtgggattatggaagggaagctgggtgttgaggatcacagagcaacaagctgcaaaaagcctgtgtgcccgtgtcaccaccacgctagctttagactgctgaagctcagcctgctatgcggggggcggscggggtgggggtgggggggcgctgtcctgtttaatcctgttattttggcatttcttacagtagccaaaatgtatcctagttaaaatagatccagatagag

SEQ ID NO: 955101 - DNA, 593 bp, Homo sapiens
ctgcattagcccctgccaagagtgtcagcgtgtcctttgatgtttcaagccagcattgacttctcttctgtagctatgaaagttctagatggcatcttctgccaatataaggccgtttcatttasattgaaaatctgttgtttaatctagctgccttcattaatgatcttagctaggtcttctgaataacttgctgcagcttctacatcagcacttgctgcctcactttgcacttttatgttatggagatggcttctttccttatacctcatgaaccaacctctgctggtttccaacttgtcttctgctgcttcctcacctctctcagccttcataaaattgaagagaggtagggctttgctctggattaggctttgtcttaagggaatgttgtggctggttttatttactcacaacactaaaactttcttcatatcagcaataagcctgtttcactgtcttatcctttgtgtgttcactggagtagcactttcagtttctttcatgagcttttcctttgcctccacaacttggctgtttctgatgcaagagcctaagtttcagcctatctcggtttttgacatatcttcctc

SEQ ID NO: 955102 - DNA, 632 bp, Homo sapiens
agctcccttcttcctcctgctctccctcctgctagggattagaaaggaaaatgagacacagccccagcccacaygaacctctaacactgtagaggagagtttcacctactgagtggcatttataatttagttaccatgggtattatggaagaagtgagaaaaactggaagcaaaaacaactttaaactagtagaagcccttatccctatttctgactagctttttaaaaagtatttaatatattttttaaactgacaatataaacctcaccaaattttcattatgatcatctgcaattaatgttttccatggtttactgtgaacacatacagtaccatccatggtactcttcttttttttgagacggagtcttgctctgtcgcccaggctggagtgcagtggcgggatctcggctcactgcaaccaccgcctcccgggttcacgccattctcctgcctcagcctcccaagtagctgggactacaggtgcccgccaccacgcccggctaattttttgtatttttattagagatggggtttcaccgtgttagccaggatggtctcgatctcctgacctcgtgatccgcccgcctcggcctcccaaagtgctgggattacaggagtgagccaccg

SEQ ID NO: 955103 - DNA, 447 bp, Homo sapiens
tgatgctctctggaaaatgccacctcccagcaggaggccaaccagcacaaaaacacagcattaaaccaccaaagttaagaaccctcatggagtccatttcayacccctgccacctccactgcaacaggcaatggcatttatagctaagagacctatagatggtccacatcacaggattctgtgcagacaatctcagtacaagcccggagctggatagacttgctgggtggctagacccagaagagagacaacaatcactgcagtttcactcacaggaagccacatccatagggaaaagggaagagtactacatcaagggaacacctcgtgggacaaaagagtgtgaacaattgcctccagtcctagaactgaagctgctctagggttgatgaagccgacccaaattagaaaaagccagaaaaccaactctggtaatatgacaaaaca

SEQ ID NO: 955104 - DNA, 565 bp, Homo sapiens
aagtttccataaataagtgtgataaacatcaagttaacaaaacagcaaaaaagttatgttctctgcagcccttctcagagcctttaatatgccaatcttctctatgaatttctgagagaggaaacaaaatagaaaaatgtttgtgattcatcacataaacagacctaaagacaaaaaacacttgattatctcaatagatgcagaaaattctttcaataaaattcaataccccttcatgttaaaaactctcaatatactaggtattaaaggaacatgcttccaaataataagattcatctatgacaaacccacagccaatatcatattgaatggccaaaagctggaagcattccttttgaaaactggcacaagacaagtctgacctctctcactgcttctagtcaacacagtattggaagtcctgagaaaaaaataaagggcacccagataagaagagaggaagtcaaactatccctatttacaaacaacatgatcctgtatctagaaaatttaaacaacataatcctgtatctagaaaactccayagtcttggcccaaaagctcc

SEQ ID NO: 955105 - DNA, 690 bp, Homo sapiens
agggatgcagggcaccaagtcccaaagctgtacacagcaggaagaccctggactcagcccaggaaaacatttttccctcctagacctccaggcatatggaaggggctgccgtgaaggtctctgacatgccctggagacattttccccattgtcttgtcaattagaatttggctccttgttacttatgcaaatttatgaggccaatttgaatttctccctagaaaatgggtttttcttttctatcacatcatcaggctgcaaatttttcaaacttttatcctatgcttagaaattttttccaccagatatcctaaatcatctccctcaagttcaaagttcaacagatctctagggcaggggcaaaatgccactagtctctctgcatagcaagagtgacctttactccagtttccaacaagttccttacctccatctgagaccacctcagcctggaccttattgtccatatcacgatcagcattttggccaaagccattcaagaagtctctaggaagttccaaactttcccacatctttctgccctcatctgagccctccaaactgttccartctcagcctgttacctggttccagagtcacttccacatttttgggtatctttacagcagcatctcactacctaataccaatttactgtattagtctgttctcacactgctaataaagaca

SEQ ID NO: 955106 - DNA, 593 bp, Homo sapiens
atacctttactgtcctacctcaggggtatatcaactctatggctttgtgtcataatcttattcagagagaccttgattgtttttcacttccataagatatcgcactggtcattgatgrcattgatgacattatgcttattggatccaatgagcaagaagtagcaaacacactggacttattggtgagacatttgtacacaaaatgatgggaaataaatctgactaaaattcagggactttctacctcaataaaatttctaggggccaagtggtacggggcctgtcaagatattccttctaaggtaaaggataagttgctgtatttggccctttctacaaccaagaaagaggcacaatgcctagtgggcctgtttggattttggaggcaacatgttcctcatttgggtgtgttactctggcccatttatcaagtgactagaaaggctgtcagttttgagtggggtccagaacagaagaagcctctgcaacagatccaggatgctgtgaaagctgctctgccacttgggccatatgacccagcagatgcaacggtgcttgaggtgtcaatggcagatagagacgctgtttggcac

SEQ ID NO: 955107 - DNA, 588 bp, Homo sapiens
catacattctgcaaagccgggtacaagaatcttcatagcagctttattcatcatagctaaatattaataaatagaaaggggataaataatttgtggtatatctatacaatggaatactayatggcaaaaaaattaatgtgatactgcatgctgatgaatggaataatacagacatacctcgtagacattattctgggcaaaggaagccagttacaaaggagtacatactatatgatttcacctaaatgaagtttcaagaacaagcaagactaatttcagttgacagacattagaatatttttagcttttgtggtgatggtctggtattgatgggaaagggacataagggcaattttctgaggtgatggaaatgctctacatcttgatctgtcgggtgactgcatgggtggatgcacatgtaaaaatacatcgccgatgtacatttaagatttgtgcacttacccaggtgtagtggctcacgcctgtaatcccagcactttgggaggccaaggccagtggatcacctgaggccaggagttcgagaccagcctggcccacatggtgaaaccccatctttactaaaaataa

SEQ ID NO: 955108 - DNA, 748 bp, Homo sapiens
aaaatggcagagtcctcatttttgtgtgccagctctgatgggatcctatggaacctggccaaatgcagcccagaaggagaatggaccacaggtaacatgtggcagaaaaaagcaaacactccagaaacccaaactccagggacagacccatctacctgcagggaatctgatgccagcatggatagtgatgccagcatggatagtgagccaacaccacatctaaagacacggcagcgtagaaaggtgagtttgaaggaagggtcagaaatactaggggagggctgggagcagtggctcacacctataatcccagcactttgggaggcctaggcgggcagataatgaggtcaggagatcaagaccatcctggctaacacggtgaaaccccatctctactaaaaaatacaaaaaattagctgggcgtggtggcgggtgcctgtagtcccagctactcgggagtctgaggcaggagaatggtgtgaacccgggaggcagagcttgcggtgagccgagattgcgccactgcactccagcctgggcgacagagcgagactcttgtctcaaaaaaaaaaaaaagaaatactaagggaggagggctgtaggtctgacacagcacattgtgatgcttctctgaggaggggcccctgagaactcaccattctgctctcccctttcctctttgagattcactcgggctctgtcacagccctccrtgtgctacctgagttgctggtgacagcttcgaagg

SEQ ID NO: 955109 - DNA, 578 bp, Homo sapiens
agcacccagttcatgataggcagctcaggtcacatggtaacttggtggcccatggtcaaacattcagtctctactgaggcccagtagcagaccaagagctgtctcaaaaggagtgtagttatttgtgaatgatggcaggaacttgctccaaaatcctgaaggcctccactgtgattcacccatgagggcctgccaaaggctccagacagatccctatctgtcactgatacctcaagcaccattggatctgatgggtcatatggcccaagtgacagagcagcttgcatagcagcctggacctgttacagagccttctccttgtctagactccactcaaaaccagcagcttttcaagtcacttggtaaatggggcagagttacacacccaaatgaggaacatgttgcctccaaaatccaaagaggcctactaggcattgcacctcttttttggttgtaggaggggccagatgctacaaggtgtccttcaccttagaagagmtatcttgacatgccccataccactggacccctagaagtctcattaaatgaaaccacatccgaaataaaaccacaacagc

SEQ ID NO: 955110 - DNA, 545 bp, Homo sapiens
gatatttctgtttggtttttattcagatttctcttatgaagttgaatgtctcgtaagggtttgagacatatatttttctgtgaattgtctgttcatgttttttgcccatttttctttttctttctttctttcttttttttttttttttttgagacattgtctcattctgtcgcccaggctggagtgcagtggtgcgatctcagctcactgcaagctccacctcctaagttcacactattttcctgcctcagccttccgagtagctgggactacaggcacccaccaccatgcccggctaattttttttgtatttttggtagagacagggtttcaccatgttagccagggtggtctcaatctcctgacctcatgatccgcttgcctcagcctcccaaagtgctgggattacaggcrtaagcaccgcgcctggcctttttttgcccatttttcttcttctttttgtttgtttgtttgttgttgttgtcgttttgagacagagtctcactctgtcacccaggccgagtgcagtggcaccatatcagctg

SEQ ID NO: 955111 - DNA, 599 bp, Homo sapiens
tacctccttgtacatgcctttttatctacatgtgtacaaccttttctggaaggagtacctaagagtaaaattgctgaatctatagtgtgtmtatcttcagctttagtagatactcatcaagcagttttccaaatggttctatgaatttgcattcccccataagattacaagagttccgtttttctatttttttttttcattttagccatcctgatgagtgtgtaggggtaatacattgtggttttaaattgtactcttttgatgcctaattaagatgaacactgtcccatatatttaatggctatttgcatgacttcttgtggtaaaatgctcattttctattggaattatctttgttcttaataatttgtaacaattttttatagattctggatatgagtttttatcgggtatatgcattgcatttatctcctttcactcttccttgccttttgattatcctcttggtgtctgtcaaagaaaaaaatctgaattttaatgtaatctgatttattctttttttccctttatggttaccacttttgtgtgatgtttaagaaatcttatcgtatcccaacattatgaagattttctcctgt

SEQ ID NO: 955112 - DNA, 599 bp, Homo sapiens
tacctccttgtacatgcctttttatctacatgtgtacaaccttttctggaaggagtacctaagagtaaaattgctgaatctatagtgtgtatatcttcagctttagtagatactcatcaagcagttttccaaatggttctatgaatttgcattcccccataagattacaagagttccgtttttctatttttttttttcattttagccatcctgatgagtgtgtaggggtaatacattgtggttttaaattgtactcttttgatgcctaattaagatgaacactgtcccatatatttaatggctatttgcatgacttcttgtggtaaaatgctcattttctattggaattatctttgttcttaataatttgtaacaattttttatagattctggatatgagtttttatcgggtatatgcattgcatttatctcctttcactcttccttgccttttgattatcctcttggtgtctgtcaaagaaaaaaatctgaattttaatgtaatctgatttattctttttttccctttatggttaccacttttgtgtgatgtttaagaaatcttatcgtatcccaacrttatgaagattttctcctgt

SEQ ID NO: 955113 - DNA, 798 bp, Homo sapiens
cagaggaaaaaaagcttaaatgaaataaacctctttgctgatagaaacagtacaggttattgtgcattctaccaataaatgtgtagctggaaccrtagcctgatttctggtttttaaattttgtccttaatttttatagtgttcagcagcaatctgatttgccattggacaaaagatggacacaatgtacatgaagtaaaaagggtctaggtttttaatactgagaataaaaccaaatattaggtttttaaaagctgatttcttttaatactacattgataagtaaggatatatatttttcacaccatttaattcatacaagttgaactcttatgaactcaaatcctttaacactttctataataatttcttcatggtttaaaaaaatgcttgttttctagagaaaaatgatcatctatataataattgggtaaaattaagctatataaattacatattgaattagcaggagacattttactttttgagttacaatttgccagttgcccatgaaagattcaattggattatgaaaaatcttactgtttatagattctttcaatggccaaagtgttgggtgcaatttttaaaatgtaaataaaaacacaccattttaaagagtttaactaaatcaaattcatcaatgtttccactatgttaagttgaaccattttactatatgcatgttaaaaataaagctaaaggtaaaaagcccttctttttaaaatttttatttattattatttttgagacccaggctgacatgcaatggcatgatcttagcttactggaacctca

SEQ ID NO: 955114 - DNA, 621 bp, Homo sapiens
aacaacctggagtttcagggaggcytccattaactcatgctggtccagggctactgcacaaatgcaggacaacatgccatttgtcgaaacgttttaaagatatgattcagctaatgaattgtgagcaaaatatgctctctccttttacctggacagatgcacctttgcaccctagaaggaaggctgggtttgaatatagccttctgggaatctgtgatggtgacttttatgtcaacttggctaagctatggtggcccagttatttggtcaaacccagcctagctggtgctgtgcaagtatattttagatgtgattgacatttaagttactagactttgagttaagtagatgaccttccatcatgtggctgggcctcatctaatctgttgaaggcctcaggggatagactttcccccaggaggaaggaattctcaagactgaagcacaaaaactttgcctgagattccaggcaattgccctgtggaatgtggacctaagacagcaatatctggcctaccagcctgccctacaaatttcagccagccctacttgccaggacccataattgcacaaactaattccttattccttaaaataaatctctctctctcccccaacccc

SEQ ID NO: 955115 - DNA, 723 bp, Homo sapiens
agtttcagggaggcttccattaactcatgctggtccagggctactgcacaaatgsaggacaacatgccatttgtcgaaacgttttaaagatatgattcagctaatgaattgtgagcaaaatatgctctctccttttacctggacagatgcacctttgcaccctagaaggaaggctgggtttgaatatagccttctgggaatctgtgatggtgacttttatgtcaacttggctaagctatggtggcccagttatttggtcaaacccagcctagctggtgctgtgcaagtatattttagatgtgattgacatttaagttactagactttgagttaagtagatgaccttccatcatgtggctgggcctcatctaatctgttgaaggcctcaggggatagactttcccccaggaggaaggaattctcaagactgaagcacaaaaactttgcctgagattccaggcaattgccctgtggaatgtggacctaagacagcaatatctggcctaccagcctgccctacaaatttcagccagccctacttgccaggacccataattgcacaaactaattccttattccttaaaataaatctctctctctcccccaaccccacgcatacacacacacacacacacacacacacacacacacacacacacacacacacactatattggtctgtttctcttgtgaactctagtagtggctttttagggtgctgtg

SEQ ID NO: 955116 - DNA, 621 bp, Homo sapiens
aacaacctggagtttcagggaggcttccattaactcatgctggtccagggctactgcacaaatgcaggacaacatgccatttgtcsaaacgttttaaagatatgattcagctaatgaattgtgagcaaaatatgctctctccttttacctggacagatgcacctttgcaccctagaaggaaggctgggtttgaatatagccttctgggaatctgtgatggtgacttttatgtcaacttggctaagctatggtggcccagttatttggtcaaacccagcctagctggtgctgtgcaagtatattttagatgtgattgacatttaagttactagactttgagttaagtagatgaccttccatcatgtggctgggcctcatctaatctgttgaaggcctcaggggatagactttcccccaggaggaaggaattctcaagactgaagcacaaaaactttgcctgagattccaggcaattgccctgtggaatgtggacctaagacagcaatatctggcctaccagcctgccctacaaatttcagccagccctacttgccaggacccataattgcacaaactaattccttattccttaaaataaatctctctctctcccccaacccc

SEQ ID NO: 955117 - DNA, 694 bp, Homo sapiens
acttatcagtatatgcctaatcttrtttcatttatacctctctcctttctacctcactggattattttaaagaaaatcccagacatcatagcattttatccatgaatgtttcagtatgtatgtctcagaagtattgtcttctttaaaaacacataaccataatactattatgacatgcaaaaattagtaatttttttttttgagacggagtttcactcttgtcacccaggctggagtgcagtggtgcgatctcggctcactgcaacctctgcctgccaggttcaagcaattctcctgcctcagcctcctgaatagctgggattacaggtgcctgccaccatgtccagctaattttttgtattgttagtggagacgggatttccccatgttgggcaggctgatcttgaactcctgacctcatgatctgcccgcctcagcctcccaaagtgctgggattataggcatgagccaccgcgcctggccaaattagtaattttttaatattactaagctgttagtgttaaatttccctgattatttcataaatatttttatagcagttttgtttgcattaaagttcatataagctgcagacatcggcagggtgtggtggctcacacctgtaatcccagaacttcgggaggccaaggtaggaggatcatttgagtccaggagttcacgacaaacctgggca

SEQ ID NO: 955118 - DNA, 423 bp, Homo sapiens
caaagtaatgctgctacagctcatgaccatgacttctcaaacattaatgtacaaatgcatcacacagggatcgttraagatgcagattctgaatcagtaggtctggacggggcctgagagtctgcatttctaataagttctaacatgatgttggtgcagctggtctaaggtccacattttaaataaggagttagagcaattcacggccttttcacgtgattagcctccttctctatattactattccaaagtagtttcatttaatacttgtcactcaatcaccgaagtcaggattttcctgaagacaagcactgtgtaccccatctctgctatatcctttagcacctagcatagcactaggaatgagtgctattataaggatgagaaaaaggaagtagcaggtaacagagacagaccctttct

SEQ ID NO: 955119 - DNA, 423 bp, Homo sapiens
caaagtaatgctgctacagctcatgaccatgacttctcaaacattaatgtacaaatgcatcacacagggatcgttgaagatgcagattctgaatcagtaggtctggayggggcctgagagtctgcatttctaataagttctaacatgatgttggtgcagctggtctaaggtccacattttaaataaggagttagagcaattcacggccttttcacgtgattagcctccttctctatattactattccaaagtagtttcatttaatacttgtcactcaatcaccgaagtcaggattttcctgaagacaagcactgtgtaccccatctctgctatatcctttagcacctagcatagcactaggaatgagtgctattataaggatgagaaaaaggaagtagcaggtaacagagacagaccctttct

SEQ ID NO: 955120 - DNA, 485 bp, Homo sapiens
ttttgtttttttgagatagagtcttgctctgtcccccaggctggagtgcaatggcgtgatctcggcttactgcmacctccacctcctggcttcaagtgattatcctgcctcagccccccaagtagctgggattacaggtttgtgccatcacacctggctaatttttgtatttttagtagagatggggtttcaccgtgttggccaggtgggtctcaaactcctgacctcaagtgatccacccacctcggcctcccaaagtgctgggattacaggtgtgagccactgagcccagcccttttctctacttttatacattctataaacatttactgggtgcctactatgagtgagggatctactggagctgggcccaggaagattactagaaaatggcagtgtttcccatggaggtgctttccagtggagaggtcatggtacatggaaaacagtaggcagacaaaccagagtcaggtagctccagtgtc

SEQ ID NO: 955121 - DNA, 640 bp, Homo sapiens
gctgcatctcctggaggactttaatcttctggaaacagagggaaagacaggatgctgacagggcctgggtgaaagactctgtaggggccttataaaagaagggaggagggctggtctctgargtgtttcttttaaggggctctcacctcccctccaatatcatgcagccctaactggttctcagagttgaatgtaaacggcccttcctctaggaagttgtcatcaacttcactcccctgattgcaccctgcattaggataggtctcctccttctctgtgtattactccctttcaataaatcttagatgcggaagaagggaccagggaatgtcctgcccagggtgatttctcatttccacctccaccctccctcaaagtgaggacttcagctactgctcacctttctgtttttctgggttttgatcacatttctctggaagacagaaagccaaagaccatcagaaaggtccgctggtccataactagcctccatttccagcgatttccaagcttcaccaccaccagagccaccagggtcagggaatgtgcacaaaagaggtcttgcagctctgcagcttcactactcagggagtgggactgatggctgctgtggagcctccatcactcatgagtaaaatac

SEQ ID NO: 955122 - DNA, 638 bp, Homo sapiens
gtaagagtcacacacctcatgttattatcaacaatttccacattgcccacttagccaatcttttttcccttgcactcaccctttgccagctaccctggtgggtccaacatgtggcacagaaaatgattacatcatgcctgcatacccctccaaggacagaacagtctgaagtcagctcgacaaaagcactaaagcaagtatatataaaagaaaagagcaaggactattatataaagtagaatgttgagaagaagagctgcaaagtcattgaatggggggacccaaagtcctcactgaggtgatctttaatccatgatgagaatgataacagggaggcatctctgcacaagaatgtgtcagtgagaagccacccttggtgaagagtcttacaggtgtgagtttggcagagattagaaagggaccaatttggtacagacagcctgaggaagagataagcagaggcatggagaatcctggggcttgggagatgaggctagatatctgctcctttctgacaacattgccctaaaacttagcacctttcaatagtatatastatctcacaatttgtgtggaccagaatctggacacagtttagttagctgcctctgccttcaggtctcttatgagattggggc

SEQ ID NO: 955123 - DNA, 604 bp, Homo sapiens
gcagctggagcaagtaagagtcacacacctcatgttattatcaacaatttccacattgcccacttagccaatcttttttcccttgcactcaccctttgccagctaccctggtgggtccaacatgtggcacagaaaatgattacatcatgcctgcatacccctccaaggacagaacagtctgaagtcagctcgacaaaagcactaaagcaagtatatataaaagaaaagagcaaggactattatataaagtagaatgttgagaagaagagctgcaaagtcattgaatggggggacccaaagtcctcactgaggtgatctttaatccatgatgagaatgataacagggaggcatctctgcacaagaatgtgtcagtgagaagccacccttggtgaagagtcttacaggtgtgagtttggcagagattagaaagggaccaatttggtacagacagcctgaggaagagataagcagaggcatggagaatcctggggcttgggagatgaggctagatatctgctcctttctgacaacattgccctaaaacttagcacctttcaatagtatatagtmtctcacaatttgtgtggaccagaatctggacac

SEQ ID NO: 955124 - DNA, 642 bp, Homo sapiens
aagtgcggggccgccaagcccacgcccacccggaactcgcgytggcccggaagcaccgcgggcagccgcggttcctgcccgctccccgcaagataagggagccggctccggcattggcctgctgagaaaggggctcccacagtgcagcggtgagctgaagggctcctcaagcgcggccagagtgggcaccaaggctgaggaggcaccaagagtgagcgagggctgtgagggctgccagcatgctgtcacctctcactcatgagactgaagctgtgtctcaactgaagcttgactgggaaggatgcacttctgagctcaatctggttagttgtgcattattgttttgactcagttcttagtttctttctgtctttggtcagggcactctctctattctctgtcacacaagcctgtaaaaatgaaagcttaaaacactgaagctcgcttctccagagcaaagtatgcgacagacagagagaaagacaggaaaaaaggaagtaaacaatatcacaagagagagaaagtaagaagcaagtgacaatcttttcataatcaaatattggcagtgacattccctattttccaatgtattctactgccatgaagtgagtcactaaccacttactgtttacatttgggtgt

SEQ ID NO: 955125 - DNA, 461 bp, Homo sapiens
agtgcggggccgccaagcccacgcccacccggaactcgcgctggcccggaagcaccgcgggcagccgcggttcctgcccgctccccgcaagataagggagccggytccggcattggcctgctgagaaaggggctcccacagtgcagcggtgagctgaagggctcctcaagcgcggccagagtgggcaccaaggctgaggaggcaccaagagtgagcgagggctgtgagggctgccagcatgctgtcacctctcactcatgagactgaagctgtgtctcaactgaagcttgactgggaaggatgcacttctgagctcaatctggttagttgtgcattattgttttgactcagttcttagtttctttctgtctttggtcagggcactctctctattctctgtcacacaagcctgtaaaaatgaaagcttaaaacactgaagctcgcttctccagagcaaagta

SEQ ID NO: 955126 - DNA, 614 bp, Homo sapiens
cagaaaatcttgagcttgcagaataacagaaaagaaaaaaaaaacaaaaacacaacttgccaaaacactgaaactccctctacttatgaaataaacaaactggcttaaattggtggaatcattatggccaaatggtgttttggcagaatcaccttgctgaggtcaccgtctgaattttcactgcctgtttcatcacaactccccttcagtttgcccatgacatccatgaggaggcaatgagcttgagagtaacgtttcagtataaaattgctttctcttaaaaacctgatgtcatagtattggcttctagcacttcaagaagtgagctccttttactcaataacaatgttatctatatcttagagacagtcaacaggagataatctcttctgggaccaaagaaggtgactaataaaccatttaatcaacacattacctaaccaaaagctgtggaccctgatgaggaaaataagttaaaatgagactattggctcattttaatagatatggtgataaaagcaaaaaaaaaaaaaaaaaaagagagaatttaagcggtctcaaatacctaaaagatgacatrgattagcttcaagtaacacataatgtggctggag

SEQ ID NO: 955127 - DNA, 692 bp, Homo sapiens
tcctaaagatgaaaaacaatattatgttcccctctgttttggttattacagagaataacctgtttactaatggtcagtacctgtgtctctgtgtctgatgccaagaataaattcatcatctgcatagccgccactgcaacagaagccaactgcagtcaatgttggctatgcgtggaattgccagaggccaccaaaaatgggctacgttggagaatcgtccctgtaccttactgcataccgaatgttgtgtgtatatccctgacaattctcacactacgactctccttgcacagccatggtgggtgtggttttcattaactgtgcttttaattctcctgtgcttaccctgagtctgtaatctgtatcaactatgctttccccaagtatctgtaagggtattttcctacaattgagtatcaaattgaagccaaatttggaagaaaagttaaatattcaattttatctcaattgaacatggacacaaacaatggtcaccaagtcccggaacaggttctgtgagtttcttcaggcgttcatccaccagtgtctcagagaaatttctattttaatctgttcctgtatgttagttattgaaaaacaacagacawtcgccaaaaatttgacatttttgtggtttttgagcccagtagtgaagagtcctcgttacccggccttatgccaaagaactcctt

SEQ ID NO: 955128 - DNA, 622 bp, Homo sapiens
gctgtatttagatataattcacatacgatacgtttcactcatttagagtttatagttcagtggcttttagtatattcacttatttgtgcatccactgccaaaattagctatagaacactttcattacctcaaaaggaaaccccacacctcttaactgtcactctccaatccctccatatcccacccctatcccccagccctagatggtgactagtttactttctgtctccacagatttgcctattctggacatttcgtataaatagaatcatacagcctgttattcttggtgacttgcttctttcacttagcctaacattttcaaagttcatccatgttgtagcacatattggtatgtcatttcctttcattgccaattgatatccattgtatacatacataactttgtttttatccactcatcatttggtggacatttgggttgtttcttctttttggctatgatgaataatgctactatgagcagttgtgtacaagattttgtgttgacatctgttttcttttyttttttttttggatatatacctaggaatggaattgttgggtcatatgtggtaactcttaaattaacattttgaggaactgctagtctgttttgaca

SEQ ID NO: 955129 - DNA, 643 bp, Homo sapiens
acaatctgagccctggactgcaggaaagttcaggacaatgacttcctgattcccatgccttttgattgtgatagagatagggcttgcttctctaggatctgattctctgttttgaatctcttattgcttctgttatcccttacttatacctgattgataggtgccgttgttacttagtggccctaaaggagccatgggggaaaaaaagcctgggcagtaattacaagataaaactttacattgtgattatcagtgtacgggaggcacgcagattatacatgctacatcagtattggcaaagatagtcaactccactattcaaagttcaacccctctttatcatcaactttcctggctatagctcctaatatgagattaagaaaaagcaaaacttttgaaccaagcacctgataatgctcataggtcttcatctggtgagcactcagggtatcactgactgctggttaatattaaatttgagcaagtttagttttataatttcttattatattgatcagaaactagaagtatgtaattattaattataayctaaaagtaatacagacacaaaaatagattacacatgaacacaaaatacaaatattgatattattttggagtttaaaggcttacaatgcaatag

SEQ ID NO: 955130 - DNA, 595 bp, Homo sapiens
ccagcttcacaggaggctggggcaggaggatcacttgagcccaggagttcaaggctgcagtgagctatgataacaccactgcactccagcctgagggacagagccagaccctrtataaaaagtaaaataaaataaaaataaaaatgaaagaaaagaaaaagaagaagagaaaaagaaaatcgtccaagtaatatcctataatggcctaaaaagtgtttgagtgaaagattcaggagagttgcatgtctctcactccaaatcaaaagctaaaaatgaagcttagtgaggaaggcgtgatgagccaaaatctaggcctcttggccaaacagctaagttgtaaatacaaaggaaaagttctgaaggaaattaaaagtgctgctccagtgaacatatgaatgataagaaaacaaatcggtcttattgttgataaggagaaagctggagtggtctggagagatgatcaaaccagccacaatattcccttaaaccaaagcctaatccagagcaacccctaactctctttaattttatgaagcctgagagaggtaaggaaattgcagaagaaaagtttgaagttagcagagtttggttcctg

SEQ ID NO: 955131 - DNA, 581 bp, Homo sapiens
gacatattcacttccctcaggtgagattagagtcctaatctccccamactgtaccttaaataatatttattctaccacctcctataaacaactttgctgagggagtttacaacatagcttaaaaagggaagctttcacttcctttctcaagccacgattaccagaaccttgccagggagccaggagcccggctgcagccctagggctcgcacagccctccagggccagccctgacatcccaatggctggctcagtttctgcctcagccccatcctttccataatgattctttcagccggcactcctctggttggagtacagaaaccctggttaaaacacaactcaatcttcactcctattttccaaaggcttttccaaaatgggaaagctacagtgctcaggagactggctgaacaatttgaggtttctggcaagcacggacatgtgcagatgtgtttttcaaaacaagagcagagccttgcaaactcatttacataagtcttctctcccggaaaaagaggaaagtagtagttctggcacaaatatctgagaaaatcttgctttctatgtgtttagacctg

SEQ ID NO: 955132 - DNA, 779 bp, Homo sapiens
attacttgcttatagactgagaatggaagaggccggcacctaggaagaggcacagttgacggcgaagccaccagggatggccacaatgcatgcatctgtgtccatgtgtgctcatgtgtgtgcrcacacacatcctggaagcctcggtttcaggcgtcttctctgtgagcagagaccctgtggggatggatgcatgctattatagattcataaacatctgctcgtgtggcctgggtagtcccttctagaaggaaagcccctttgcttctgtcactcctgacaaaaatacttgcgtacacagcattatgatacataccattctctagcaacttcggaatcagggtcctaatgccacacactgcagatgagctgatagagagcagtgatgagaatcagacctgcttgtgcactttccgaagactttcatccacattctctcacacgagccttagagcgacagcagcctgtgaggcaaacattgctctctgcattgctcatggatcaggacttgcccatcctcagagctaataaatggcaccaacgggacataaagtcaggactttcacgatgcccctccatcccatggacattttgacacaggatatggtttgtcacggcacctccctcacctccctttccagggcccttttcctctgcctctgggttctgtttcctgtgtccttggctcctcagggctctcctctcctatgtcagccacactgatctccactcccagatttctggcccgtgaagcaccctatgctaggattgcctctcca

SEQ ID NO: 955133 - DNA, 652 bp, Homo sapiens
atagtgcaagaggttgaaagtattaaaagtagtttcttgatattctgctgttaatcctcagatatttattggtgatcttccagctttttcatagcaaatgaatattttttccatgtagctacagtgttgcaccactagtgtcattgtgtatcatagcttttgtctagttaaaaaaacttaaagggaggagccaagatggccgaataggaacagctccggtctacagctcccagcatgagcaacccagaagacgggtgatttctgcatttccatctgaggtactgggttcatctcactagggagtgccagacagtgggcgcaggacagtgggtgcagcgcaccatgagccagccgaagcagggcgaggcattgcctcactcgggaagcgcaagaggtcagggagttccctttcctggtcaaggaaaggggtgacagacggcacctggaaaatcgggccactcccacccaaatactgcgcttttcagacgggcttaggaaatggcgcaccaggagattatatcctgcacctggctcagagggtctgacgcccacggagtctcgctgaytgctagcatagcagtctaagatcaaactgcaaggcggcagcgaggctgggagaggggcgaccaccattgcgtaggcttgcttaggt

SEQ ID NO: 955134 - DNA, 703 bp, Homo sapiens
ttagaatgtatttgctgctaaaagacacccccaccagcaccatgacagtttacagatgccatggcaatgtctggaggttaccttataaggtctcaaaagggaggggaggagacctcagttcctcttcatccctttactttcctgataaacttgctctcactttactctgtgaactcgctccaaattctttctcgcatgagatcaaagagacctctcttggggtctggatcagagctcccccttttccagtaacaccagcactttgtgggaaagacagaggcgggaggattgagtgaggccaggagtttaagatcagcctggccaacataaggagacctaagtgcctaacttaaaaaaaaaaaaaaaggccaggcatggtggcttacgcctatagtcccaatactttgggagaccgaggtgggcagatcacttgagcccagcagttcgagaccagcctggacaacattgtgaaaccttgtctctacaaaaaaaaaaaaaaaaaaaaaatgaagaaattcccaggcacaatagtgtgcacctgtagtcccagctattcagaaggctgagatgggagaatcgcttgagcccaggaggtagaaattgcagtgagctgagattgcrccactgcactccagcctgggtgacagagggagaccctctctcaaaaaaataaaaaaagaaacccaggcaggcatggtggcac

SEQ ID NO: 955135 - DNA, 617 bp, Homo sapiens
gaatagtgggaacttctcctgcttgataaaaacacctacaaaaacctacagctaacattatacttaatggtgagagactggatgctttctcactaagactgggaacaaagcaaaggtattcactctcacaacttttattcaacatagtgaaagaagttctagccagtgcaacaaaacggaaacaaaaggcatacagagggaaaaggatctagaactgtctctatgtgcaggtgtagattccaaacgaatctacagaaaattcctagaactaataagtgagtccagcagtgttactggacatgagataaacatacaggaatcaagtgtatttctatatactaacaataaacatgtagacccgaaaatttaaaatacagtaccatttaaaattgctcagaaagtaaaatacttcagtgtaaatttaacaaaacataaacagaacttccatactgaaaactacaaaatactgatgaaagaaatctaaggatgtctaaataaatggagagatatactatgtaaatggattggaaaactcaacamaataaagatgtcaattctcctcagatttatatacagtttcctttctaaaccccagcaagaattttatagacatagac

SEQ ID NO: 955136 - DNA, 617 bp, Homo sapiens
gaatagtgggaacttctcctgcttgataaaaacacctacaaaaacctacagctaacattatacttaatggtgagagactggatgctttctcactaagactgggaacaaagcaaaggtattcactctcacaacttttattcaacatagtgaaagaagttctagccagtgcaacaaaacggaaacaaaaggcatacagagggaaaaggatctagaactgtctctatgtgcaggtgtagattccaaacgaatctacagaaaattcctagaactaataagtgagtccagcagtgttactggacatgagataaacatacaggaatcaagtgtatttctatatactaacaataaacatgtagacccgaaaatttaaaatacagtaccatttaaaattgctcagaaagtaaaatacttcagtgtaaatttaacaaaacataaacagaacttccatactgaaaactacaaaatactgatgaaagaaatctaaggatgtctaaataaatggagagatatactatgtaaatggattggaaaactcaacaaaataaagatgtcaattctcctcaratttatatacagtttcctttctaaaccccagcaagaattttatagacatagac

SEQ ID NO: 955137 - DNA, 591 bp, Homo sapiens
tggatttctctgatgctgcttcaataggggaaattgcagcactgccttcttactgacagatgggagtggaaatccaggttttccacttagcatctgttgacatctgaggtggagggttccttattactgatggatgggagatctagtactccatctggtcgtcactggtgggcagaggtgagggctcattaccacctggtagggatggataaaagtcttggctccctagttggcctcctgtggtaccacttgggctggggtaatgggacacctcactgcagcctaatgaaagtggaaattcaggttccccggttggcctttgctgacattataggggtgggaccaccatttttactatggtatggagtagtgtggctattggctacaagttttttgtcttgctggatgggttctttcatggcctttggctagagagagtgggcttttgttgggactttttgtttgtttgcatttgttggcacttctgtgttgctggctgcttccacttcaaggatggaatgtatgaggcaaaaagaaaacccaagaaactcaccacygtgtagtttcttggattctggggtccctagctag

SEQ ID NO: 955138 - DNA, 579 bp, Homo sapiens
aatgaaagattggataaagaaaatgtggtacatatacaccatggaatactgtgcagccataaaaaggaatgagatcatrtcctttgcagggacatggatgaagctggaagccattatacttagcaaactaatgcaggaagagaaaaccaaacactgcatgttatcatgtataagtgggagctgaacaatgagaacacatggacacagggaagggaacaacactttctggggtctgttggggaagggcaaggaggggagagcattagggaaaagagctaatgcatgctgggcttaatacctaggtgatgggttgataagtgcagcaaacaaccatggcacatgtttacctatgtaacaaaactgcacgtcctgcaaatgtaccctggaacttaaaaaaaaaattataaaaaaaacatcctcaggaactgtgactgcaaaactcacacatagcctagagaaaaaaacaggcagaagagtaaggctgggagagggagacagagaaaagcagaggtagagagaagctgagttgtgagtagggccctgggcagcaatggttggccccctttggttggcctcctc

SEQ ID NO: 955139 - DNA, 566 bp, Homo sapiens
gatttgctgatgggagaaatgtaaagctctgagcacctgcttggcaagaggacctttggccccaagaggaaggaggttttctgcagaagtagasaactcctcgctcaccaagggaagcaggagagtgagagaggctggtgcagatggcccctgagaggcggaggtgggaccacctctgctactttctctttccctttgctggtggtccagtgtctactgctgccttcgcaattgaaaagcccgatccccagccgggtatggtggctcacacctgtaatctcagcattttgggaggccgaggagggcggatcatgaagtcgggagatcaagaccatcctggctaacatggtgaaacttgtctctactaaaaatacaaaaaattagctgggcatggtggcacatgtctgtagtcccagttacttgggaggttgaggcagcagaatcgcttgaacccaggaggcggaggttgcagtgaaccgagatcatgccactgcactccagcctgggcaacagagtaagactctgtctcaaaaaagaaaaaagaaaagcccgatccctgtcttggt

SEQ ID NO: 955140 - DNA, 683 bp, Homo sapiens
aactcctaagctcaagcaatccacctgtctgagcttcccaaagtgctaggattataggcatgagccaccatgcccagccctttattattttaagtgcaaaatggcccaacatgtctccagtaggaatagaaggaatggggtgggagatttccttttcatcttccaagcaggggctgctttgaaccaagttgttgggagccaggccagaggctggtaagtgcctgtggataggccaaggcatttacaggaggagtcccagcctttaaaatggactatattaacataaatacataactccttccagaagtactgtggtcatgacctctcccatgggttgcagttcctcttgtccttgtgccggttgcctttggattctgcatgatcccaggaataaccctcccctgcattttctatctgcagcatagactccatgactatgtccttgcctgcttcctgtcctgggcctggaatgtagggtctcctataaatctactttgatttatgtttggtgggtctagttgctcaggctttcttctgattggataatgactatgacaaacattcctggagcactaaaggtttcacatgcattcattcactcaatccttacaacaggcttatggatcaactactgacacttktatgcctgttttgcaaatgaggaaattgaggttcagagaagc

SEQ ID NO: 955141 - DNA, 581 bp, Homo sapiens
actaatttgcctaatttcaatgttgttgtttctcagggaacaggggagggttggtgctgagaaggagagagactaggaaacaaccagttggtggaacattcagaaaacatttatcgaatgttcrccatgttatctggtcacagttcatggctcccaaaaacaattataataacatcaaagatcactgatgacagaccagtaaaacaggtaaaataataaagtatgaaatatcttaagaattaccaaaatttgacccaaggacatgaagtgagcatgtgctgttggaaaaatgcacccgtggacttgctcaaaagggatgtcactaatcttgaatttgttaaaaaaaaaaaaatgtaatatctgcaaagtacaataaagtaaagaataaaatggggtatccctttttgataaatgggtcaaatcatgaaaaatataacacgtgtaatggttcattttatgtgtcaactgggatgtattaaatggtacctcgactaccattacaaaatggtaaagcatcattttggggtgtatctgaggataatcctggaagatactggcatttgaattaatgattaactaag

SEQ ID NO: 955142 - DNA, 616 bp, Homo sapiens
aaactcctccaagcaaaaggaacacgttctaacccaattcaaggaggctgagaaccttgaaaaaaggttagaggaattgctaactagaacaaacgtttagrgaagatcataaatgacctcatggagttgaaaaacatagcatgagaacttcgtgaaacatacacaagtatcaatagctgaattgatcaagcagaagaaaggatatcagattgaagatcaacttaatgaaataaagtgtgaagacaagattagagaaaaaaagaatgaaaaggaacaaagcctccaagaaataggggattatgtgaaaagaccaaacctacattagattggtgtacctgaaagtgacaggcagaatggaaacaagttggaaaacatccttcaggatattatccagaagagtccccaacctagcaagacaggccaacattcaaatttaggaaatacacagaacaccacaaagatactccctcgagaagaacaaccctgagacataatcgtcagattcaccaaggttgaaacaaaggaaaaaaagttaagggcagccatagagaaaggccgtgttacccacaaagggaagcccatcagactaacagctgatctctctgcagaaacccta

SEQ ID NO: 955143 - DNA, 616 bp, Homo sapiens
aaactcctccaagcaaaaggaacacgttctaacccaattcaaggaggctgagaaccttgaaaaaaggttagaggaattgctaactagaacaaacgtttagagaagatcataaatgacctcatggagttgaaaaacatagcatgagaacttcgtgaaacatacacaagtatcaatagctgaattgatcaagcagaagaaaggatatcagattgaagatcaacttaatgaaataaagtgtgaagacaagattagagaaaaaaagaatgaaaaggaacaaagcctccaagaaataggggattatgtgaaaagaccaaacctacattagattggtgtacctgaaagtgacaggcagaatggaaacaagttggaaaacatccttcaggatattatccagaagagtccccaacctagcaagacaggccaacattcaaatttaggaaatacacagaacaccacaaagatactccctcgagaagaacaaccctgagacataatcgtcagattcaccaaggttgaaacaaaggaaaaaawgttaagggcagccatagagaaaggccgtgttacccacaaagggaagcccatcagactaacagctgatctctctgcagaaacccta

SEQ ID NO: 955144 - DNA, 672 bp, Homo sapiens
aaatgggccaaaacaaaggggctacatgacccatgcaagtctgaaatccagcagggcaaattttaaagcttcaaaatgatctcctttgactccatgtttcacatccaggagtcaatggaactccatttacatccatgctgatgtaagaggtggttcctatgttcttgggcagctccaccactgtggctttgcagggtacagcctcccttctggctgctttcatgggctggcattgagtgtctgcagcttttccaggtgcacagtgcaagctgtcagtggatctaccattctagggtctggaggatggtggcccttttctcagagctccactaggtggtgccccagcagggactgtgtgggggctctgaccccagagcactgccctagcagaagttcaccatgagagtgcatgcctagtggtaaacttctgcctggacattcaggcgtttctatacatcctctaaaatctgaaatctaggtggaggttcccaaacctcaatttttttttttttttttgagatggagtctcactctgtcacccaggcccaggctggagtgcaatggcgckatctcagctcactgcaacctccgcctcccaggttcaagtgattatcctgcctcagcctccagagtagctgggattacaggcacgtgccaccacacctggctaat

SEQ ID NO: 955145 - DNA, 579 bp, Homo sapiens
gcgtttgccaccacgcccagctaatttttgtatttttagtagagacagggtttcaccatgttggycagtctggtctcgaactcctgacctcgtgatctgcccacctcggcctcccaaagtgctggaattacaggcatgagccactgtgccccgccatgaatgcacttctttagtgcccttactacctgtgcccggtcctgcacgcagggccactgcctattagaatagaaggcacggtgtctatgacccatcatacttataggagcccatgataatgttctagctttaatttattttaaagtcagaagaaaaagagaatacaacaatgatgaatatgtaataatgaatccagcctcgtctatcttcatgtctataccaaggcaatgtaagacttaattttaatatttgtatagagcattggtccatgaaagcaaatgtgcatatgtcctagggaagtcacagtgggccctgcttccatggcctcccctaagtgtccagtgacatttctccttactgtggcattccttttccgagacaccaactatttcttccaaatttttgtcttccttggctttcttt

SEQ ID NO: 955146 - DNA, 742 bp, Homo sapiens
gcccctcctacaatcaagaaagaggttcaatgccaaatgggcctatttggattttggacccaacatattcctcatatggatatgttacaccagcccatttatcgagtgacctgaaaggctgtcagttttgagtggggtccagaacaggagaaggctctgcaacaggtccaggctgctgtgcatgctgcagtcccacttgggccatatgagtctgcagatccaaggaggtgtcagtggcagatagagatgctgtttggagtttttgacagaccctgagaggtgaatcacagcagaggcctctaggattgtggagcaaggtgctgccatcctctgaagataactactctccttttgaaagacatctcttggcctgttactgggctttggtggaaactgaacgtttgactacgggtcaacaagtcaccatgtgacctgaactgcctatcatgaactgggtgctttctgacccatcaagccatcaggtgggtcgtgcacagcagcattccatcatcaaatggaagtgatatatatgtgatcaggctcaagcagatcctgaaggcacaagtaagtgacatgaagaagtgactcaaacgtccatggtctccactcctgccaccttgtcttctctcccccaccctacactgatggcctcatggggarttccctatgatcagttggcagaggaagagaagactagggcctgcttcacagatggttctgcacaatatgcaggcatcaccag

SEQ ID NO: 955147 - DNA, 600 bp, Homo sapiens
acaaaatgtcaattaacagtagagtagttaagcattgtttgtattctctaagtgaaatactttatagtagtgaaaataacctaaagctatactcagtaacatgaatgaatttaaaatacaattttgagcaggtataaaagaattcaaatttttatgtgtcatttatttgtagtttaaaacaacctaattaacatactggttatttgtgtgtaaatatatggcaaaactatgaaaaaagcaagagaatgacaatcccaaattgcagaaaaattcaggaaagagagcgaaatatgaatgttctgtttcttaatttgtgttgtaagcacataaatgtttatttcttcctttcttcttcccttcctcttcatctttgtcttcaaaattgcttgtgtcacccttttgtatatgtcacatatttcacaataaagggaaaagtttaaagtatgaaacaatcaagttttgggtgaatgtggagaaacagacattcatgtttctggtgagagtagaagttggtatgatcacatttcaaaacaacttgtcaatatttgatatgtttgaccctgcaaattgtctctgatccygaaatttagtagagaatct

SEQ ID NO: 955148 - DNA, 519 bp, Homo sapiens
aaaacagtttggtagtttctcagaaaatcaaacatagagttatctcaatactcaagagaattgaaaacaaatactcaaacatgtatgtgcatacacatgtgcatagcagcacggttgacaatmaccaagacatagaagtgactaaatatccatcaatgtataaatgggcaaagatgtgatatgtatatgtgtatgtgtgtatggaatattgttcagtcataaaaaggagtgaagtactgatatttactacaatgtagtgttatgttaactgagagaagacagatcatcttctgtcatatattctataatattctagaattaggattctagaatatatgacaaaaggtcatatattctaaaattccatttatatgaagcatctagaatagatgactctatagggaagggacacaaattaatggtttccaggggctgcagggcacagagataaattgctcaataggtgagacaatttactttggactgatagaaatgctctggaactcgaggtagttgcac

SEQ ID NO: 955149 - DNA, 572 bp, Homo sapiens
gttgttgttcccttgcatttcttgcctttatcctcattcggtcagtggtatgctgccaattcatacgtcccagtattatcccrtaatatttggaaaagttggtatcaactaagagtgcaggagtacaagtcttaactttggagtttgaaaagctgaaaccccaggaataaaatttcttaatttagaagaatatacagctaggcaatttttcttattcctggaaatagacaaagatttcttggattgagggatggaagatgatatcaatagttgaggaggaacaggagagttgaacgatgtgtctttgagaacgggatcattactttatctccatgccagactgaaaaaccctggactggggatgaaatcagataaaaaaaaattctggtaattttgggaaatgtgaaaacagagaaattttgccctgtgctccctggatagaacccaagaaagcagcaaaatctcaggttgcttgccctgtggggattgtatttaatcattcacacactgatttgtctgttcaacaggtattttctttttcattgattgatggattgattgagaaagggtgt

SEQ ID NO: 955150 - DNA, 568 bp, Homo sapiens
aggcagcatggaagctggtctagaaaggtagaatcttattatatggctttaggtgataytattctctttgcctcagttccatatatgtaaaatgagataatggaaattgaagcccggtgtggtaagctacactggtgactcacatctattatttgatgtgttcagcactccacttttctgggaacaggcactaactcgctgttttagtcagggttctttcaagggacagaactaatagggtagatgtatatgaaggggagtgtattaaggagtattaactcacaggatcacaagctgaagtcccacaataggctgtctgcttggctgagacgcaaggaagccagtccgagtcccaaaacttcaaaagccgacagtggagccttcagtctgtggccagagatctgagaacacctggaaaaccaccggtgtaagcccaagagcccaaaagccaaagaacatagagtctgatatttgagggcaggaggcatccagcacaggagaaagatgaagtctggaagactcagcaagtctgctcttccatcttctcctgcctgctttattctagctg

SEQ ID NO: 955151 - DNA, 559 bp, Homo sapiens
ccttccacatttttaggtatttgttacagcagcaccccactcccagcacaatttcttgcttagtctactcctgctgccatagcaaaatatgttagactggataatttataaataataraaatgtatttctcacagttatggaggctggaaagttcaagatcaaagtaccagcagacgtggtatctggtgaaagtttgctctctgctccacagacggtgcctgttgctgtgacctcatatggtggaagggcagaagagcaagaaggtacaaacagactccctcaagcccttttataagggcactaatcccattcatgaaggcagaaccctcatgacctaattacctcctaaaggccccactccttaatactattgcattgaggattaagtttcaacatgaatcttggagggacatgaacattccaagatagcaagatttatggcactgttctatctaaagcaggtattttataacctaaaaaaatcaaaaccatatacgatatccacatgcaaaagaatgaagttggacccctttccatacacaaaaattaactccaaat

SEQ ID NO: 955152 - DNA, 494 bp, Homo sapiens
cagagagcagctccccagaaggggagacccgagagggaggcagagggctatgagtgagctggtccatggctggctggaagtggaaggcatgagggagactggtagggcatgctyagatcaccctgggttttgttcctaagctgttctggaggagagctgatatgatgagaggctgaaggaaaactgctcactgtgctcactgcttgtctcctggaatctggaactgacccctcaggggagggtgactggagggcctcctccagcctgctgagaacacagacaggtactccttggtgccacctgggtgatgggttaatgggcacactctcaacaagggtaggagctgttttggacacctgaacatcagatggggctgtcatcagtttggagaaagcaggtgatatggtttggctgtgtcctcacccaaatctcatcttgaattgtagctcccataattcccttgtgttgtgggagggacccggtgagagataatt

SEQ ID NO: 955153 - DNA, 791 bp, Homo sapiens
gaggttgaataagacaacactctaccttctcatttaaattatcataccataagcaaccttgtgccatatttttcacacttttgtgccttttkttggtgcttttctgtttaaaatggtctccaagcataatgctgacatgcagtatagtgttcttaattgcagaaggctgcgatatgccttatggaaaatacatgcattagataatcaccttcttccaaacatgagttatagtgctgctggccttgacttcagtgttaatgaatcaataatatgtataaaataggtgtatctaaatggaaacatatataaaacgagcttatgtattgatcagttgagaaaaggtcctgactacaggtttgcagaaacctaattctgaacttcccctagcagcatggttcagtgtccactaattcattgttcactataacttcatataacctaactactgcaaataatgagactttcttatgtagtatttctgtcatacagatagacatagataacttcaagatcatagaaaatggtaaaatatagtgaaattcttagaaagtgattagtttttaggttttacctttgtttttaaaatcattaacaatatgtttacagtatttgtttttttcataatggctgggctggctcataaaatttctgaaaatttaacagtttgctcttgtgaggctatatatgccatctcttgcacaccactaagtagaagcaactaggaagaacctattttgggggcacaaagcagattttaaggaaaaagaaacccatctgtgtgtaatattagg

SEQ ID NO: 955154 - DNA, 577 bp, Homo sapiens
actggtgtatgttcaagagtccacaagctaaagaacttggaatctgatgtttsagggaaggtatcatacagcatgggagaaagatgacggccagaatactcagcaagggaagtctcattccattttcttctgcctgctttattctagccatgctggcaactgattaaatgacacccacccagattgagggtgggtctgcctctcccagtctactgacacaaatattaatctcctttggcaacaccctcacagacacacccaggaacaatactttgcatccttcaatccaattaagttgacattcaatattaaccatcacaacatctatatagagcaccttccatgaatggaccttacaggactgaaatctgttctgggtgagtcagtgagtgagtaagaagtaaatgtgaaagcctaagtcattactgtatactaccatagactttataaacactctacactaaacttatagaatatatttttctttcttcagtaataaattaatcttactgtaacttttttacttctacactttaattttttttaacttttgactcttttgcaataacactttaaa

SEQ ID NO: 955155 - DNA, 578 bp, Homo sapiens
tccagctattgtctctggattctggtcactgcttcctccctttgccacttatatagaataatggtaatggatcccccagtttattggccctagaaggtttcaccgtcactacttgtttcccttaatcttctggtatctttgaaaacatgtctttattacaagctttctgtttacctaattttactctgccatctgcttgtccatgaccctgacataaccacctttaagaaaaatatcctgaccttaacctactttgcaatagcatcaaccatttcttcctatcatttttgccccaatgctttttagtgtgggaaaatacgtgtaccttaaaatttactatcttaaccattgttaaatgtatattttagtagtgttaaatacattcctattattgtgcaatcttcatcaacatccatatccaaaacttgttttatcttgcaaaactgaaactctatatccattaaaaaataactttccatttcccctcccyacaggtcctggcagccatcatttctgcctccatgatttaagctactccgagtacttcatatgtggaatcatacagtatttttattttt

SEQ ID NO: 955156 - DNA, 564 bp, Homo sapiens
tactggagcctcattgatatggtggtagcatgtgggaaaggggaaatatactattataatcttaattattaaatctctgttttttagtggatcgatgtcctggagctgtggagtggacttaaatcagggaaattcccattcctaggtggtatacagcccctgacagtctttcccttggagtgtaggcctttgttacagagaatactcaggttgtatttcgcagtggttacttttcttttcctccttgccagaactataaggggatccttcttggctctttactgtgagaatctggcagtaccataaaacccacaatagtgtggggactcccccataggacagcattctcctaggagtttcccactttcatgctattccacagtcagcctccagcaagtcatcaaaattaccatttaagtgtttgtactggattgaatttttatcctcaaaaaaggtatgtctgagtcttarcccttcatacgtgtaaatgttacattatttagaaatagttggctgggcatggtggctcacgcctgttgtaatctgagtactttgggaggccaa

SEQ ID NO: 955157 - DNA, 568 bp, Homo sapiens
tagcggtaacaccagtgcctgggaaggcaaccgttacttagctgaccttggtctagcagtaatgtcagtgcctagggaaggcacccgttacttagcaaaccrggaaagggagtctccctttccccaggggagttagagaagactctgctccaccacctcttgtggaaggcctgacatcagacaggcctgcccgcagccatccagaggcctaaacgtctccctgtgatgctgtgcttcagcggtcacgctcctggtccactttcatgttccaccctgtatacctggctctgccttctagatagcagtagcagaattagtgaaagtactaaaagtctctgatatgcagaaataatggcgtaagctgtgtcctctctctccgccttggctgtcaaacagggaagggccgcctgtccagtggacatgtgacccacgtgaccttacctatcattggagatggctcacactccttaccctgcccccttgtcttgtatccaataaataacagcacagcctggcatttggggtcactatcagtctccacatcttggtggtagtggtcccctgggcc

SEQ ID NO: 955158 - DNA, 568 bp, Homo sapiens
gatgtagtatctttcctggagcaaattgatatgtctcccagcatttgcttcgtagctactgacctgcccttttctcctcactgatttgcaaggattgccagcaacggtttgcatttacctgtcagggctaacagtatactttcagttttgcctcaggctatgtcaattctcctgctctctatcacatttattctgcagagatgttgattgtcttgacgttccacaaaacatcacattggattacctcatggatgacagtatgatgaatggatctgatgttcatgaaacaccatatactttagaggccttggtaagatataaggtgggagataggccccacaaaaattcagggacctgccacctcagtatggtttctgggggctcaattgtcactcctccaaggcaaaaggaaagttgctggtccttggatgatctaaatgggaaaagagggagaatgtrtgttcagcctttttgtatttaggagggaacatatgccacatttaaaaatgctttttgaattcatctatagagttatctctaaggctgccagtttcaagtggtgttgagc

SEQ ID NO: 955159 - DNA, 738 bp, Homo sapiens
ctgacgcctccctgatgtgtctgcctggctcagccctgctgagctccagaattgcttttctgatctscctgaagcctcacttgatgagtagtagacgtcaaacccaacagttcctgaatggactttctgaattctgtcctctttatctagaaccagccttctagttccttaagacaaaatatgtagcatcatctttactgttgaatttgtcaaaaaattttgctggttgtgttttgaagatacacccagagtccagtctcttctcaccccatctgcagaatagcctcactcttgtctgaaccaccttcctctctcaccctaattacagcatttctcagaagccaaatggatttcttcccaaattgctggcgtcctcattttgctcggagtaaaacccttaaagaggccttctaatgtgcaggcccctgatagctttcacacagcacccctccccatctcctccccaaccttgctaactgcacttccaacacacccgccccgcccgctttagggtcttgacaaccggtccctctgcattaaatgccttttctaattatcttcatggctcgctcgctgcttctcctccttcaagtctttgctcagttgttaattgtctcagcgagactttccctggcaacctgatttaaaattgcaacaccaatcccaacattgcctatctcctttgctatatttttcacgtagtattgactatcttctaatgaactgtttgagttttct

SEQ ID NO: 955160 - DNA, 596 bp, Homo sapiens
atgaatagaaaaaaagacaggagattaataaaaacattgaataacaacactatagagcatgtggttctaacagacatacacagcacactccactttgtaacagtataatacacatttttctcaagtgcacagggacattttccaagactcaccatatgctagactacaaaacaagtcttaataaatctaaaaatattgttattatacaaggcattacattgatcacagtagagtaaaactataaataaattgcagaacaaaaactagacaattcaagaatacatgaaattaaacaacccattccttataaaaacaatggaccaaacaagaaatcacaaggaaatttagaaaataccttgagacaaacaaaaataaaagcataacacaccaaaatatgtaggatacagtgaatggaaagccactgtgtggcagtaaactctgcaccaaagaagaagaaaggtctcaaatcaactacttaacttttagagaaagaacaacctaaattcartgctagcagaaagaaggaaacaataaagattagagcagaaataaataaaatagggaattaaaaacaatacaaaacatcagtgaaacta

SEQ ID NO: 955161 - DNA, 666 bp, Homo sapiens
ttttttttgtttttctaccacatattcaggctgcacattttccaaacttttatgctgttttccttttaaaacttagtgcctttaacagcacccaagtcacctcttgaatgctttgytccttagaaatttcttctgccagataccctgaatcatctccctcaagttcaaagttccacaaatctctagggcaggggcaaaatgccaccagtctctttgctaaaacataacaagagtcacctttattccagttcccaacaagtttctcatctccctctgaggtcacctcagcctggattttattgtccatattactatcagcattttggtcaaagccattcaacaagcctctaggaagttccaaactttcccacattttcctgttttcttctgagcccaccaaactgttccagcctctgcctgttacccagttccaaagtcacttccacatttttgggtatctttacagcagcactccactctaccggtaccaatttactgtattagtctgttttcatgctgctgttaaagacatacctgagactgggttatttataaagaaaaagaggcttaatggacttacagtactggggaggcctcacaatcatggtagaaggtgaaaggcacatcttacatggcggcagacaagagagaatgagagccaagtga

SEQ ID NO: 955162 - DNA, 622 bp, Homo sapiens
ttctaagtttttatcattttagatcttaaatttgggtcttcaatccactttgagttaatttttgtatatgtataaggtaagggtccagcttcattcttttgcataygagtatccagttttcccagcatcatttgcttaaaaaaaaatacaaaacaaaacaaaaactaaaacaactgtctttccccattgagtggtcttagcagcactcctgttgaaattcaccatgtatttgagtgtttatttctgggttctctcttctgtttaattggtctatatgtctatctttatgccaataacacatattttgattacggtagctttgttgtaagttttgaaatcaggcagcgtgagtcattcaaatttgttctttttcttcaagattgttttggattttgggggtctcttgagatttcatataacttttaggatgagttctctatttttgcaaaatatgtcattaggattttgatagggattgcactgaatttgtagattgcttttggtagtattaacattttaacaatattaagtctttcagtccaagaacacagatgtctttccatttatttatgtcttctttaattttcttctgaaaatattatgtacttttcagtgtataagg

SEQ ID NO: 955163 - DNA, 369 bp, Homo sapiens
gtccctctagagaaccctaatacagattttgatactaggagtggttctagaagaacagaatattaaggatggagttctttcattggctttggggtttctggagttggctgcttaatatgatttagtccccaaaatgctaaggactctacttctaacagtatggagaacactgatagtccttggtgggaactgttatgaaccagaaacgcaccaatccccaacccaaatactattacataaagttaacaatacttaaatgctgatatraaaaggaaataaaatgaaaatattttcttagtacaagtgtatacatgcacaaacatgtttttaacaaaaggaggaggaaatactcaagacaattacagtcct

SEQ ID NO: 955164 - DNA, 369 bp, Homo sapiens
gtccctctagagaaccctaatacagattttgatactaggagtggttctagaagaacagaatattaaggatggagttctttcattggctttggggtttctggagttggctgcttaatatgatttagtccccaaaatgctaaggactctacttctaacagtatggagaacactgatagtccttggtgggaactgttatgaaccagaaacgcaccaatccccaacccaaatactattacataaagttaacaatacttaaatgctgatatgaaaaggaaataaaatgaaratattttcttagtacaagtgtatacatgcacaaacatgtttttaacaaaaggaggaggaaatactcaagacaattacagtcct

SEQ ID NO: 955165 - DNA, 603 bp, Homo sapiens
tgaacaccttcagatgcaagaggaaatttgggggggtgttggctatattcattatcttgagtgtggtaatgatttcataggagtatcaagcttatcaaattgtacacttcaaatatctrcagttgattgtgtgtcaattgtgtcgagaaggaaaagaaactttttatctgaggaatacaagcctcaatgatcagaccctgagagacattgaaatgtgacagcagccacatctcactccctcttgatctacttgaagccacttgctatgtgggctgtagaatgactgacgccaagtagctgtaagttaacctaacaatgccacatgctggactctataactcatattctatagttcaaccgtgtatagccaatcactaatcaatgttacttctgtaaaccattgagaattcctgaaaaacaacttttgtaatcacccccctcctgattcgccctttttactttaaaaactcaagcctctcctttgttttccggagcacttcccagtgcacaacctagtcccaaggttgaggactgcagccagtcctcatatataaaccctctatattaattttgcctcagttttcttatttagatcaacagcct

SEQ ID NO: 955166 - DNA, 565 bp, Homo sapiens
ctacagttttgacacctgctccagggatagtcattgccaaagggtagaaacaccagggggctcatcacattcgcaaaaactgagagcacagtgcctcccagttatacaggcatctgggcaatgtggggagaacagtagcaggtacataaggccacccccagatacaacatccactccagtttgctgataggaaaggctactgtgtcctcatagacccataagctcccaagaggcaaaaagtccattggggtccgaccttggtgaggccacttgttccaccataccttcagtgtggtgacacatgttatgtttgcacaggccgtgacaggtacccatcctgttaccccaatgttgctctgtgcactgcaatgcctgggcttgggctactacatgttcccctactagccagccccactcatcacgaatgctacrgtccagccatgggtcttgctgtgtcctttgtccaaagcttgccacattgtgttccaggcatcagccatgggatctcaagtctccaggcatgtccagttctctgcagacacgggatgtatgtgtcagggaaagc

SEQ ID NO: 955167 - DNA, 604 bp, Homo sapiens
ttttgaggttgatttccagttttattccactgtggtctgagagagtgcttgctataatttcaattttcttaaattyattgaggctcgttttatggcctatcatattgtctatcttggagaaagttccatgtgctgttgaatagaatgggtatgctgcagttgttggatgaaatgttctgtatatgtctgttaagtccatttgctccaaggtacagtttaaatccattgtttctttgttgactttctgtcttgatgacctgtctagtgctgtcagtggagtattgaagtccccactcttattgtgctgctgtctatctcatttcttaggtctattagtaattgttttataaatttgggtgctcctgtgttaggtgcatatttattcagtctttaaaaggaaggacattctaacacatgctacaacgtggatgaatgtggagggacattatgccatataaaataagtcaatcacaaaacagacaaatactgtatgatttcacttatacgaagtgcctgtagtagtcaaattcatagagaatttggttgccagcagctggggagaggggataataagaaattttgttcaattggttttacaacatgg

SEQ ID NO: 955168 - DNA, 557 bp, Homo sapiens
ttcatggtaatgttctatataggtgtaccattttttaatctttttataacataattttactgtgccttttctatgtttagatacatttagatatgcaaatatttaccattgtgtcacaattgcctacagtgttcagaacaggaacttgctatacaggtttgtagcttagaagcaataggctataccatatagcctaggtgtgtagtaggctatacaatctaggtctgtgtaagtacactgtatgactttcacacagtggtaaaatcacctaatgatttctcagaacatttctccttcattaaatgacacatgattttttattaaacagactatagtttagagcagggtgttccatcttttgccttcctggccacattggaagaattgtcttgggtcacacataaaatacactaacgctaatgatagctgatgagctttaaaaaaattgcaaaacaatctcgtaatttttttttctttttttttttttgagatgragtcacgctttgttgctcagcctggagtgcagtggtgccatctcggctcactgcaacgttcgc

SEQ ID NO: 955169 - DNA, 570 bp, Homo sapiens
tgaggcagggtggatcgcttgagctcagaaagttgaggctgcagtgagtcatgattgygccactgcactccatcttgagttacagagggagaacctgtttctaaaaaacaaaaacaaaaacaagcaagcaaacaaaaaaaactggtgcggtggttcacacctgtaatgccagcactttgggagactttgggaggccaaggcgggcagatcgtttgaacccaggagtttgagaccagcaacatagcaagacccagtctctacaaaaacttagctgagtgtagtggttcatgctgtagtcccagctactcgggaggctgaggtgggatgatcgcttgagcttaggaggttgaggctgcagtgagccgagatcacagattgcattccagcctgggcaacaaagcaagaccctgtctgaaaacaaaacaaaaccaacgaacaaaccaaccaaacaatgaacagtccttaatattgttatatatccagcctgtatttagctttcctgaatacaagaaagtctcataattgttttactatttttagttagaatcaggacccaaataaaatgcatgt

SEQ ID NO: 955170 - DNA, 684 bp, Homo sapiens
ttaagtctgttttaatttacaggcttcaactattttctttttttktttctttccttgcaacctattcattggagaaactggaccaatgtcatagtgttttccatatagtctgtcttttgctgatttcatcttcctctgacccctgcatgtcctataaatttttaaatagatctagaggcttgatcagatttcaatttaagcttttttggtgagaatactccatagatgctgtgtacttccatcaggaggtacatacataatgtttgattgtctcctttcttgtgtgatattattaatagcagctatcaatgattcctacccatatccattaggaaatgcaaattgatgatagtcaaattatatcattcctttataatttatttagcaaaaatactctgtaaaaaaagctttctctttattcactatttggctgaaatatagattgcacaggaatgagactaagtgcttgattgttttcctttatttaccaatattcaaaataataaggtgtttccctaggatcctccgaatgtaaccaatgcatttttttttttttttttggccaatgaaactttaattgcattgaaataaattcatggatttttaatacatttgatggtttaaatacattgcagtgattattcttattgatgttcaaattattccatctttggctagtgggat

SEQ ID NO: 955171 - DNA, 545 bp, Homo sapiens
agggagtggggtattatccacatttgacagatgaggaaactggaggccagagtcaaagtacctagttggcatcagagtgaggccaagggattatgctttctttcagggaaaaaagaaatggaaaaaagagagactggtgcttatttaaagctgaagaatgaactatcaaatcatgcccaagcaaggtctagaagtggaagaaacaattattctggacatctttcagtcaagtgtatcattatcatagattcccaggcattcttatcaaaattgtggctgtgttaagaagttttgcaaggttagcttctgagaaggtgaaaaaatttaggctgaaaaatctgctatatttgccatctttaaccaggtagacagattttactcctgctgaaaaaaaaaaaaaaacctttgcattgaaaaaagaattatytttgaatgttttctttaagacacaattcaagcactattttaagggcatctaccttctctttcatcaagtattgagcacctacaagatactagaaattctgttagatctggggatagaa

SEQ ID NO: 955172 - DNA, 569 bp, Homo sapiens
tttgtagttgtgattgcattgcaaaattcttgtgttattaagctctgtcagacccattatgttcttttttgtaccaactattttgtccttcagctcctgtatcactttattgtgatgcttattttccttggattgggttttgccatcctcctgaatctcagtgatctttgttcctgtccatattctgaattctatttctgtcatttcagccagttcggcctggttaagaactcttggagaactggtttggtcattagtagaatatgtgacaccctggccatttgagtcactggagttcttgtattggttctttctcacctctgtgcgtgggtgttactttaactgcagtgtagatagagtataaccaatagacttcttttctggatgttttcacagggctgaggctttgtgtagctatgctttttatttgaagctgacttcttatctttggtttcagagggaaatatgttaataaggtatttttggtattgaaactttggggtgtgatccagtaggtgacacttaggcttattggtcagttggttgackcttgcccaattgtgtggatt

SEQ ID NO: 955173 - DNA, 648 bp, Homo sapiens
agccaaacccaacacagtatctctttctcctgaattcaaatagctgctggtgctaccatgaaaaagcaccggtattttgacaggctcagcactcccaacccccttgctggcccttcttctccagcgacagcctgaattgagccagctctggcatggagtcagatagtgaagttcctcttgtcctccgtggaagggaaactcggggactcatgcacatggggtacacctcatttgaatcattgcactcaatgcattatatacagaattgataaagtctggttcaaattaattttacagggcctgaacccacaaactagatacattttcaggctttagtataccaaaagaactcaaataagatgcctcttggtaaagtgtgatttttataggcctttgctactggttagaattcctagatgaaaaaaaaaatgaggcagtaccaagtgccaggaactctgacttcagactgagggtacacaggaatggaagacacacacaggtatatacaattcttacacatacgaggggtgataagattgagggacttactagaaagaaatgggaactggaaataggcaaatgtgaggaaaacttgtctaatatattacgtcattacctatcwcactgaggtctggttaccctctgtcc

SEQ ID NO: 955174 - DNA, 648 bp, Homo sapiens
agccaaacccaacacagtatctctttctcctgaattcaaatagctgctggtgctaccatgaaaaagcaccggtattttgacaggctcagcactcccaacccccttgctggcccttcttctccagcgacagcctgaattgagccagctctggcatggagtcagatagtgaagttcctcttgtcctccgtggaagggaaactcggggactcatgcacatggggtacacctcatttgaatcattgcactcaatgcattatatacagaattgataaagtctggttcaaattaattttacagggcctgaacccacaaactagatacattttcaggctttagtataccaaaagaactcaaataagatgcctcttggtaaagtgtgatttttataggcctttgctactggttagaattcctagatgaaaaaaaaaatgaggcagtaccaagtgccaggaactctgacttcagactgagggtacacaggaatggaagacacacacaggtatatacaattcttacacatacgaggggtgataagattgagggacttactagaaagaaatgggaactggaaataggcaaatgtgaggaaaacttgtctaatatattacgtcattacctatctyactgaggtctggttaccctctgtcc

SEQ ID NO: 955175 - DNA, 622 bp, Homo sapiens
gtggaaggaatgaagactcartataggtaattgtttctgtaattgaaaagaaagcctatttgaaaaatcctgatgagaattatgatgtgtattcagatttttgaatgattgaacttagttgaccacaaggtgtcaaggaaggtactagaacattaacagtatactgaagaaatgtttaaagttaataacaaataggaataggggcatattagtgcttttaaattggtaaattaaatgttaaacttaacaatttaatgttaattagatggccaggcacagtagctcatgcctgtaatcccagcactttgggaggccaaggcaggcagatcacctgaggtcaggagtttgaggccagactggccaacatggtgaaaccctgtctctactaaaaatacaaaaatcagccgggcgtggtggtgcacgtctgtagtctcaactactagagaggctaaggcgggaagatcacttgaactgggtggcggaggttgcagtgagccacgattgcaccattgcactccagcctggaccacaaagtgagacttcatctgaaaaacatttaatgttaaattagagaagattaaaaaaccatatacaatagtcactggttttatatcagaatatt

SEQ ID NO: 955176 - DNA, 597 bp, Homo sapiens
tgctcagcattatctgaggcaagagttgaaagagtttctaaaagagaactgtgagtttaaaagtcaatgaatctggccaggcgcggtagctcacgcctgtaatcccagcactttgggaggccaaggtgggtggatcacgaggtcaggagatcaagaccatcctggctaacacgaggaaagcccatctttactaaaaatacaaaaaaaaaatagctgggcgtggtggcgggcccctgtagtcccagttaaaagctgtgggggaaagactaactggttaatataggagaaggaatgagagtttgagccactagaagaagagttaggaggttaaatagctttgatgtgaagctaaagaacacagtacagtcaatgccaaatataagatatcaaaagaaaataaaaggagtaattcacttgggagctaaaatattccaagaacatgaacccatgcctaaaatgaaaatgaaacataattgcgatgataatttagtctttataaagaaaaaaggtaaggtatagtggttaagtgtttgggytctggagtccaacacagcctagttcaagccccaattctgtcacttaaactagcaagcttgg

SEQ ID NO: 955177 - DNA, 548 bp, Homo sapiens
atggacacttaggttgattccatgttttggttattgtgaatagtgctgcaataaacacagaaacgcagataactctttgatatattgatttcctatcttttaggcataactcaatagcggaattgctggatcatatggttagttctatttctagctttttgaggaatctccatctgttttccatagtatggctattctaattcacattcctaccaacactgtacaaggattcgcctttcttcatatcgtcaccagcatgtcattccttgtctttttgacaaaagtcattataactgggttgagactatagttttgatttgcatttctctcatgattagtgatgttgagtattttttcatgtacctgttggccatttgttccatcttttgagaaatgtgtttttaggtcttttcccattttaaaatcaaattattcgacattttkctatttagttgtttatatataactgtttatatattctggttattaatcccttataaaataaatatttccaaatattttctcccactttgtgggttgtctcttca

SEQ ID NO: 955178 - DNA, 548 bp, Homo sapiens
atggacacttaggttgattccatgttttggttattgtgaatagtgctgcaataaacacagaaacgcagataactctttgatatattgatttcctatcttttaggcataactcaatagcggaattgctggatcatatggttagttctatttctagctttttgaggaatctccatctgttttccatagtatggctattctaattcacattcctaccaacactgtacaaggattcgcctttcttcatatcgtcaccagcatgtcattccttgtctttttgacaaaagtcattataactgggttgagactatagttttgatttgcatttctctcatgattagtgatgttgagtattttttcatgtacctgttggccatttgttccatcttttgagaaatgtgtttttaggtcttttcccattttaaaatcaaattattcgacattttgctatttagttgtttatatataactstttatatattctggttattaatcccttataaaataaatatttccaaatattttctcccactttgtgggttgtctcttca

SEQ ID NO: 955179 - DNA, 435 bp, Homo sapiens
tctcaaaatgaagaaaacgactaaaaggggggaattgttaaagcaaactaaatatggcctgagaaggactcyatacttctatatctgagtccttgtgaactaactgcaacctaatttaacaagtagacaagattgaaaacttaacttagcagtatgtgcctataacaatagctgagtcttggccaatcccagcagacatacttcaaccactcatacactgccaagtgttcaaactgtgttcaaataaggcaaatgccaacctgtgactaatctggctgtttctgtacctcactttggatttctgtatatcactttactttttttgtctataaatttgatctgaccacgaggccccctggattctctctgaatcttctgtgattctgggggctgcccgatttgtgaaacatttattgcttaaactcctttaaattt

SEQ ID NO: 955180 - DNA, 639 bp, Homo sapiens
catcaagctcgaggatttgcccccacccaggactggcaaattagctttactcaacatgccctgagtcaggaaactaaaatatctgttagtctaaatagacactttcactgaataagtaaaggcctttcctacagggtctgagaaggccaccgcagtcatttcttcccttctgtcagacataattcctcagtttagccttcccacctctataccgtccgacaacagaccagcctttattagtcaaatcagccaagcagtttttcaggctgttagtattcagtgaaacctttatatcccttacggtcctccatcttcaagaaaagtagaatggactaaaggtcttttaaaaacacacctcaccaagctcagctaccaacttaaagaggactggacaatacttttaccactttcgcttctcagaattcaggcctgtcctcggaatgctacaaggtacagcccatttgagctcctttttattaggccccagtcttattccagacaccagaccaacttagactgtgcccccmaaaaaacctgtcatccctactattttccgtctagtcatactcctattctccgttctcaactactcatacatgccctgctcttgtttacactgccggtttacacagtttctcc

SEQ ID NO: 955181 - DNA, 488 bp, Homo sapiens
agtaaaatgaggctgaaacctactgggctgcattctcagacggttaatgcattataagtcacagggtgagataggaggtcagcacaagatacaggtcataaagaccttgctgaaagaagcytgctaacacccaccaaaaccaagatgtccacaagagtgacctctggtcgtcctcactgctatactcccaccagcaccatgatggttcacaagtgagtgccatggcaatgtcaggaagttaccctatatggtctaaagggggaaggcatgaataatccaccccatgtttatcatatcatcaacaaataaccgtaaaaatggacaaccaggccaggcacggtggctcaggcttgtaatcccagcactttgggagggccagatgggcagatcccgaggtcagaagatagagaccatcctggctaaggtgatgaaaccccatctctactaaaaaaatattaaaaaattagcctggcctggtggcaggtgcc

SEQ ID NO: 955182 - DNA, 631 bp, Homo sapiens
tatgctcatgtcttttatttctttcttgatattagtagttttcattttctcactctagttttttgtttttaatacatttgctggacatttatgagaacaattcattttcttaaaaagaccaacttttgayaaattggtgttttaaagttactatctagttagtatcccattgatttccactcatatttttatgatttttaatttctactcacttttaaatttttatttttaaataaaatttttaatttatttttaaattaatttgttctctttttcaagtttcttaagaaggaatattaagatcattgatcttacagttttttaaatgtaggcatttgtagctataaatttccctctatggactgcattggctacatctcaaattttatgttgtgtattattaacattcaatttaaataatatacttaataatttttatttgacttatgtattatttactgctatgttgttaaatttccaaactttcggaaattttctagatattttactgcattaatttctaatataattctcttatggtcacagaacacatttttcaggacttgaattcttttcagtttgtttagatttgtttacttatcaacatacaatctatcttggagaatgtttt

SEQ ID NO: 955183 - DNA, 564 bp, Homo sapiens
ggctcagaggcctgacattcaccttgtgctaacagggtcaacctggaaaaccgttttttcccatgtgatgcccacggcctctctactgcaggagctcaacccactcatcagcacagcctgcaagtacaggaagttaatccctccccactggaggaaccctcaaccagagggagtaggaaccagtgggtgaatgctccaactcagagggccttagacctcttctctgggggctatggaagaatccagcctgcaatctggagaacacattatttctcagcattccttctttccttgcttctttccccccactctttcttctattttctggaatcaccttcagataaactactggcacccaagcctttgcctctggctctgttttgtggggaacccaagctaagatgtcacctcaacattttaggactttatttttcttctcttcaaaataaggggctttcagacacagtgccttgggggctatcctgggaggaagggtatcctccctgtggctagaagagtccakcagaaatctgcccacaccactgggacagagcagctccaaat

SEQ ID NO: 955184 - DNA, 764 bp, Homo sapiens
accttcagctagacccttggtgcatcatgtgtttctgatgagacttttttagttttctcaccatctcagcccacccttcccctctctctcacacactgtgggtgtgggagctgcatagagctccattcgtggtccacttctacctgaacacctctcatccactgatcccagtgatttacacccacaccaggtgcagttccaacagagatctgtcttctgggctcctggttgacgtacctgtccataccctgatgacacctcaaatgccacatttctcatactgacctttctctttgactttctgtcttggatgaggaatcatattcatataagacccaacctcaacgtcctctttgaattctccttctcacccattccttctcttcccatctaatcagtcaccaagttgtctctttttcccaactttgtctttgctgtctgctccaccaccatcaatgctactctctgggattagaacagtggcttgtgtctgatctctccagacctgtgggctcctttcctcatccctgctggtcccctgccttaaaccactgccatctccactccctctggacctgcggggattcttcttgtccttcctctaacttaagttagacaataactgcccggccatgtctttcccatcctggtctctccattctcatctcagtgcttacaccgtctgtctcacatggcrctggtttgtctcctcccttcgaatggaggctctttgtgggcagagtccatgtcatattcctcttggt

SEQ ID NO: 955185 - DNA, 554 bp, Homo sapiens
ataacatattaaatattatatatatatatatatatatataaatttttttttgagacagagtctcactctgtcacccaggctagagtgcagtggcatgatctcagctcactgaaacctcagcctcccagattcaagcaattcccctgcctcagcctcccaagtagctgggattacaggcatgccccaccacacctggctaatttttgtatttttagtagaaacagggtttcaccatgttcaccaggctggtcttcaactcctgacctcaaatgatctgcccacttcagcctcccaaagtactgggattacagacttgagccaccgcgcctggcctaaatatatatttaaataaaatatattacattttactcctattagttttactaaatggcaattacaggtatccaaagaacatttactgagcaaccaccaggyactatgctagaatcagagatatcacagtgtatctcctgtctctactcctgtggagtgggagagagagctctccacacagtggaaaaacagaaatccctatttctgtgaaaacaccaagt

SEQ ID NO: 955186 - DNA, 554 bp, Homo sapiens
ataacatattaaatattatatatatatatatatatatataaatttttttttgagacagagtctcactctgtcacccaggctagagtgcagtggcatgatctcagctcactgaaacctcagcctcccagattcaagcaattcccctgcctcagcctcccaagtagctgggattacaggcatgccccaccacacctggctaatttttgtatttttagtagaaacagggtttcaccatgttcaccaggctggtcttcaactcctgacctcaaatgatctgcccacttcagcctcccaaagtactgggattacagacttgagccaccgcgcctggcctaaatatatatttaaataaaatatattacattttactcctattagttttactaaatggcaattacaggtatccaaagaacatttactgagcaaccaccaggcactatgctagaatcagagatatcacagtgtatctcctgtctctactcctgtggagtgggagagagagctctccacacagtggaaaaacagaaawccctatttctgtgaaaacaccaagt

SEQ ID NO: 955187 - DNA, 572 bp, Homo sapiens
tgcctgtagtcccagctacttgggaggttgaggtgggaggatcgcttgagcccacgagtttgaggctacagtgagctatgatagtggcggcactgcactctagcctggacatcagagtgcagccctgtctctaagaaaaaaaaaaaagaacgagtctaaataaactgtagagttctatttataagcatttactgagcactcttcagtgtagaggactgggctgggtacaagggagaaaacaagaagtgacctcagcctcaggacactcaccatgtagtaagggagaaaagtaatacacaactttctataatctaaagtaggaagtgttaaatccccacagagagagtcaggtaaaatgctggggagtgttgacgagagagacattcattctctggagagatccaagattgctccgtggagcaggtggcatgagaattggactttacaggatgatgggtttgggtcgagtggttgttagctgtgggaaagcaccaggcagaaggagcagcatgaacccagcactyggactcaggatgggccacccagagcctgtggtggtcagtcccaccctg

SEQ ID NO: 955188 - DNA, 572 bp, Homo sapiens
tgcctgtagtcccagctacttgggaggttgaggtgggaggatcgcttgagcccacgagtttgaggctacagtgagctatgatagtggcggcactgcactctagcctggacatcagagtgcagccctgtctctaagaaaaaaaaaaaagaacgagtctaaataaactgtagagttctatttataagcatttactgagcactcttcagtgtagaggactgggctgggtacaagggagaaaacaagaagtgacctcagcctcaggacactcaccatgtagtaagggagaaaagtaatacacaactttctataatctaaagtaggaagtgttaaatccccacagagagagtcaggtaaaatgctggggagtgttgacgagagagacattcattctctggagagatccaagattgctccgtggagcaggtggcatgagaattggactttacaggatgatgggtttgggtcgagtggttgttagctgtgggaaagcaccaggcagaaggagcagcatgaacccagcacttggastcaggatgggccacccagagcctgtggtggtcagtcccaccctg

SEQ ID NO: 955189 - DNA, 841 bp, Homo sapiens
tgaggaagggctgcaggggaarctgctgtttgggtgggtgaggcttgcgcgaggggccaggagtcagagcatctaggccaggagccagtgggctggcttagccgagtcggccaggcctcttgcccgtctgagaactctttttgccccattttccagcccagaaaagcagatgggaaggagtggctgtgtggaatggggtgggataggtgttagaagggcggactgtacctctggtcctgttaaccagcttgtcgatgactgaggatcgcagacagtgagatgtctttctaatggccatgtcaccccaacctggtgctccttgcctcttctctcattttatcgttcagcgtacttagcaccatctaaccttctacctttcttttttcttcatggcccctctctccaacgcatgcagtcaagctgttagaggatgacttggggctattctgtcccctgctgaattcctggcctttagagtggtgtctgtcccaaaggaggcaacacggaaagattgactgaattaactgagtattcagccctttcctttgcctctcctgtaaaacaacggtattggagtcaaagatccctaaggcgtctctccagctccacacagattttcttctcatccttaatgtgcgatggggtcacctgggggagacgaggcaagggagggaggctgcagtcattgtcaccccttagcagtgacaggttggcaccataggagatctgtgctcagagggcctctttgtcaagaggtgaggagaggaagggctgttcacacaacctccccgagtcagggcccctcccagggctcagttgcctttgagtagccccaggtgct

SEQ ID NO: 955190 - DNA, 562 bp, Homo sapiens
tttctcctaaaaaaaaatgggtatttcttttctactgcattgtcaggctgcaaattttctgagcttttatgctctgttttccttttaaaaccgaatgctctaaacagcacccaagtcacctcttgaatgcttggctgctgagaaatttcttccaccagaaaccctaaatcatctctctcaagttcaaagttccacaaatctctagggcaggggcaaaatgccgccagtctctttgctaaaacataacaagagtcacctttactccagttcccaacaagttcctcacctccatctgagaccacctcagcctggaccttgttgttcatatcactctcagcatttttgtcaaagccattcaacaagtctctaggaggttccaaactttcccacatttttctgtcttcttctgagctctcccaaactgtttcaacttctgcctgctacccagttccagagtcgcttccgcattttcgggtatcttttcagcaaygccccactctactactggtacgaatttactgtattagttcgttcttatgttgctgataaagacatactcaaa

SEQ ID NO: 955191 - DNA, 540 bp, Homo sapiens; identical to SEQ ID NO: 954947

SEQ ID NO: 955192 - DNA, 545 bp, Homo sapiens
agctggttatcacactttagatttgaacctgctaactagaagaatggtgggtactgaaaacaggasaacaggtatcaagtactttgggaaatgctgttatttaaagaggaatgaagaagaatatccagatgaggagggagaagacaggtagaggggagagattttaggtggggcaggtgcaaagaaaatgagagaagaatttcaagaaaaaattgacacataaaagtttcgggatgagataaatgagaagtagagaagcttttgttagcccgaagtcatttaaagagagtggcttagggagatagaagtttagtagagctttgaagagaggaggaagagtctgggtgattaccaatcagttttttgagaagtttggaggcaaactgaaagggaaaagttaggatggtgatcgaagagtaggaaatattatgtaaggtttgttggtgaagattttggaattagagatataaacatattttcaggcaaaggaattgaggagtaatgagggggtcaaatctcaagagctaggttactgagccctggaa

SEQ ID NO: 955193 - DNA, 494 bp, Homo sapiens
tgtaagggagctctgtggctggggatctgcattggctgaacccaacacgaagccaggagacaaggactccactggcatagaccatgcgggggctctcctaggaaarcgaaaggggaggaagggtggagagtaattttttttattttttattttttagacagggtctttctctgttgcccaggctagagtgcagtggcgtgatcacagctcactgcagcctcaacctcccgggcccaagcaattctcccacctcagcctgcagagtagctgggactacaggcatgtaccaccatgcccgactaattttagtgttttttgtagagagagtctcaccatgctgcctaggctggtcttgaactcctgggctgaagcaatccatccaccttggtctcccaaagtgctgggattacaggcgtgagccacggtgcgtggccaagagtattttatatctttcatatacatatacatatgtgatatatatccatttgtctata

SEQ ID NO: 955194 - DNA, 582 bp, Homo sapiens
gcttcccactccagggcctcctctgagctattgtgtcactccacacagctcctctttgccttgctcatcctgcacttgtccatgtacctcattcttcctggacgcaggacaagaacttgggacctgctgaatggtggggctgaaagagctgtaacacaaacagggctgaaacacaccccttgctcaccacattgcaggagaagaagaaagaagagctgtggccctttggggagcccagacctgggagctccccgagccagggctgtgactccctctttgaggccctgaagttcctgaagtctccaagcttccgggtgccaccatgttccctggtgccagccatagaagctgcttgcagtacacctggtctagctgcagccttgcagagagccagcacctgtgctgacacctggagctgcccaccccactgcagtagccagcacgcttgcctgtaagcagtggccagaccccatgcttgctcactcacataccccttactgctccacacctggcttgcccttggcaggcatggcatccaggtcagtggcatgagccgagtrcagcctgccaggttgagtggga

SEQ ID NO: 955195 - DNA, 571 bp, Homo sapiens
taagtccacttgtttggttaaactctattaycagaaatagaaatttatgacattagctttctaacgtttattggtcatagtttttttctttcattttctttctataaatacaatcacacataaatctatttgattgctataagttgagtttcaagaagacaaacatattagaatttatccagtcacttcttttgctcttttttaagtcagtaaagtaagcaaccttaataaaatacttcatcacatcagcaaatatttaagaagcagcttgggaagtaatttcaacaaatacaactggtgattttattttttaaactgaagaaaaattattcatattgaggtgggcatattggtgagaaaatggaacataagtactttcaggtggctcaaagcaacacgaacagagccaaacaggttagaacataaatccatcccttagtagaagggaactgttacaataggtcacaacaatgaagacagattgcaaacatcctactttaggcacagataagaatgtaacaaagcagaaactggccacaactggttaaatccaagatggccaaaatcttga

SEQ ID NO: 955196 - DNA, 635 bp, Homo sapiens
gataagatatatgttatttctgggatgtaaggctggttcaacatacgcaaattaataaatgtgattcaccacttaaacagaattaaaagcaaaaaccatatgatcatctcagtagatgcggaaaaagcttttgataaaatccaacatcccttcatgataaaaaccctcaacagactgcaggcattgagcagatataccatgaaagaacatacctcaaaataattagggccatctatgacaaacccacagccaacattatactgaatgggcaacagctagaaccattccctttgagaactggaacaaaacaaggatgcccactctcactccacctattcaacagtgctggaagtcttatccagagcaatcagtcaggagaaagaaatgaaaggcatccaaataggaaaagaagtcaaactatttctctttgctgatggtattattccacacctagaaaaccctaaagactccacaaaaagactcctagaactgataaataacatcagtaaagttacagtatacaaaattaatgtacaaaaatcagtaccatttccatacaccaataacatccactctgagagtcaaatcaagaacatgattttatttacaayagccacagagaaaatgaaatacct

SEQ ID NO: 955197 - DNA, 596 bp, Homo sapiens
tggagaagcaaattgtggtatatccttataatgaaatgttatttgcccataaaagtaagtaaaatactgatttgtgttataatatggacgaatcttgaacatgtactaagtgaaagaaactaggttcaaaaggccacttactgtatgatttcatttatataaaatgtccataattggcagatcaatagagacagaaagtggatgagtgctttccaaaggctgggggtggtttgagggtggggagcggctgctaataggtacggggtttcttttggggggtgataaaagggttccaagtatccaagattagataaattgtggtgatggttgtgcaaccctaaagtatactaaaaactacttaagagtagaaatgaaacttcagaaactttaaagagtgttgagaggctgggtgcagtggctaacgcctgtaatcccagaactttgggaggctgaggtgggtggattgcttyagccagaagtttgagaacatcctaggcaacatgcaaaaccctatcttcacaaaacaaaaaaatacaaaaattagccaggcgtggtggcgcctggtcccagctatttgagaagctaaggtgggagga

SEQ ID NO: 955198 - DNA, 631 bp, Homo sapiens
ttccacagctgggtatatacccacgggaaatgaagtcccttccttgcaacgatgtctgcactcccatgttcattgcagcactactcacaagaaccaatatggaaacagcataggtgtccatcartggatgaatggatgcagaaactggtgtggtgcatgtatgcttaattccattacatataatggatgttactgaggcttatggaaggaggagatcctgccatttgccacaacatgggtggacctagaggataggatgctaagtgaaataaaccagatatagaagcagaaatagtacataatctcacttatatgcggaatctaaaaaaaaaaaaaaaggtcggggccgggcgcggtggctcatgcctgtaatcccagcattttgggaggccaaggcgggcggatcacgaggtcaggagatcgagaccatcttggctaatacggtgaaatcccgtctctactaaaaatacaaaggaggctggggcaggagaatcacttgaatccaggaggcagaggttgcagtgagctgagattggcctgggcaacagaatgagactctgtctccaaaaaaaaaaaaaaaaaaaaaaaaggaaagaataagaaaagaaaaagaaagatctaaggtgcaaca

SEQ ID NO: 955199 - DNA, 457 bp, Homo sapiens
tgtgtggcgcatgcctgtaatcccagctacccaggaggctgaggcaggagaatcacttgaacctgggargtggaggttgtggtgagccaagatcatgccattgcactccagcctgggcaacaagagtgaaattctgtctcaaaaaaaaaaataaaaaagaaaaaaaaaaaaggtgggcaaaggaaatgaacagacactttccaaaagaagacatacatacagccaacaagcatatgaaaaaatgctcaatatcactaatcattagagaaatgcaagtcaaaaccacaatgaaatacaattttacaccggtcagaatggctattattaaaaagtcaaaaaataacagttacgggcaaggttggggagaaaagggaacagttatacactgctggtagcaatgtaaattagttcagccattgtggaaagcagtctggcaatttctcaaagaacttaaaac

SEQ ID NO: 955200 - DNA, 618 bp, Homo sapiens
caacagctagagaatatacattcttcaccatagcacatggaagattctccagaccatatattaggcgacaaaacaagttttaacaatttttttaattgaaatcatatgaagtatattttatgattacaatggaataaaactatgaatcaataacagaaggaactttggaaactgttcaaatacatgaaaattaaacaacatgttcatgaaaaaaacaatgcatcaaagaaaagaaagttttttaatttaaaaattccttgagacaaatgaaaaatgaaaatacaacatacaaaagcctatataatataggaaaaatggccctaaaataaagtttatagcaataaacacctacatgaaaaaaaactagaaagaactcaaataaacaacctaacattactcctcaaagaactaaaaaaaaaagaacaatccgaaaataagtagaaggaacaaactaataaaatcagagcagaaataaacaaaaaagagattaaaaaatrtaaaagatgaacaaaacaaaaagctgtattttgaaaagataaacaaacttgacaaacctttagatagactaaaaataaaagtgaggaaattcaaataactaaaacaagagaagaaaagggt

SEQ ID NO: 955201 - DNA, 604 bp, Homo sapiens
gaaggaatggagcagccagccggttcctccattcattkgcttgtgtgctccctcctacaaggggttaagcggggtgggctgagtaaacagggcacccctgtcacgagtcccacgaaacagtcaagaaaataatcctgcatcaatttgactcctcgtcctcccctaatggtttgcagtctttcctatgtcataataaagctacattttattctggaaaaaaatttgctctacaagtttagagacttgctgcattttgttcgctgccaattccttaggacttagaacagtttcttgcaaattataggggctcttatttaatttcataaaaggaaggacattcctccctgcaaaagataaagaagatgatttcagaaaaatataacagatcttttctaagaaagaaaacttgacagctttatactgattttttacaaaaactgtgattactagaaaagatattgcacactattacattatgggttgtgttaagatgagatttttccttgactttgacccccttcgtggaactggagtgactcatttcactcagcctgcagcctgcagtctgtggatggctaagtgttaacagctcagtaaaaggtta

SEQ ID NO: 955202 - DNA, 634 bp, Homo sapiens
ccccacctccaacattgggaatcacatttcaacatgagatctggagagaacaaacatctaaaccatatcattccacacctggtccctgagatctcatgtccttctcacattgcaaaatacaatattcccttcttagtagtcctccaaagtcttaccttgttctagcagtaactcaaactctaaagtccaaagtctcatctaagactcaaggccgtgtttcttccacctatgagtctgtaaaatcaaacaagttgtttactcccaagacacaatggtggtacaggcattgggtagatattcccattccaaaatggagacataggccacaataaaaggacaataggccccacaggagtccaaaacccagcagggtagacgttaaaccctaaagctccaaaataatccttggctccatgccttgcatcctggacacactggtgtgaggagtgggctccctagaccttgggtagctctgcctctgtggctttgcatggtgaagtcyccatggtggctttcacgggtcggagttgggtgcctgtggcttttccagggttagtgttcaagcttccagtggctctaccattctcaggtctggagggtggcggctcccttcccataactctgccagagagtg

SEQ ID NO: 955203 - DNA, 651 bp, Homo sapiens
agaatgacacaccttcataagaacgaaaaatcaagtgagcactcacagtagctgattttaacttcatattactgaaagaggcagtaaagaaatagaaaaaacagtcctgaatcacctatgccacccgccctccaccccagcagcagacgtgtggtatggggtgtgtctctgggtgctgagggagcagaacacagcaattctgaggcattgatctcagtgctgtcctgttagagaagaaaggaaaaccagacgaaactcagctgatatccgcccaaggagggagcatttaaaccagccctagccagaagggaattgccaatcccagtggtccaaacttgagtgcctggaaaacctcgtcacctaaggccaaagtgcttttgtctctaagtaaacttaaaaggcagtctaggccataaggactgcaactcataggcaagtcctagggctgaactaggtccagagacagtggactgaggggacaggtcacaatctgagataccagttggggcaacgaaagragtgctggcatcacccctccactaacccctggctgcccagctccaggctccaaaagagaccccttccttccacttgaggagagcagagggaagactggagaggactttgtcttgcattttggatactaactca

SEQ ID NO: 955204 - DNA, 598 bp, Homo sapiens
  misc_feature 50: n = A,T,C or G
ttatctgtaactgttggcatttacatyttgtccatccaactgccctttgnctcattagcagccaaacataaaagccctgggagtttatggatgagcttctctccctaattactgacaaatggagaaaaaacagtctttgctagtacaacttttgtggtaccattgacactccagagctttctatgggggctgattgtggctggacttcttacaaaaccatatttgcctaagtttcacacctgcactgtatcccatttctcttgcttccttacagctttctcctgaatgtagcctcccaataaattactcacaccagaagtattatctcagactctggttctaataatttaatgtatgataggttagaaggaaaggtgtaactgaaaagataaacagttaaaagattttgcaatgatacagaagaagtggaaaagtatgctttggaataggtggtggcagtagaggaagggaggtaagaatggaaagaattctagattgatggactgattgattgattttttttttcagacggagtctctgttgccaggctggagtgcagtggcacgatatcagctcactgcaaccaccgccttctggg

SEQ ID NO: 955205 - DNA, 628 bp, Homo sapiens
acggtggggaacaggataagaccagtaaattccatgtatcatcaccatagggaatctcagcagagaaatgaaatacacgcacacacacacgcgcgcacacacacacacaygaaccaaattgaaattcagagctgaaaagaacagttatctgaaatgaaaacatcaccatgtgcgtaggcttaaaagcatattggaaaatgaaaagaaaggagctgtgaatctgcagatagattaatagaaattatccagtctgagtaacagaaagaaaaaggattaagatgattaatttgtaggacataatctggggttgtgaaaaggggggctttctttttgttccacttttaggttcagcaggggatacgtcgtgcaggtttgttatataagtagattgcatgtcgtgggggtttggtgtacaggttatttcatcacccaggtagcgggcataatacccgataggtagtttttcgatcctcaccttccacccaccctctaatctcaagtggactccggggtctattgttcccttctttgtgtccatgtgtactcagtggttagctcccacttataagaaagaacatgcagtatctggttttctagtcctgcattaatttgcttagaacaatggcct

SEQ ID NO: 955206 - DNA, 528 bp, Homo sapiens
ataacactgaatgtaaatggactaaattctctaatcagaagacatggagtggctgaatggattaaaacacaagatccaatgatctcttgcctacaagaaacacactttacctataaaggcacacatagactaaaaacggaggaatgaaaaaaatttcatgtcagtcaaaaccaaaaagcaggagtagccatacttatatcagaaaaagtagatttcaagaccaaaactgtaagaagagacaaaaatgtcattacataatagtaaaggggtcaattcagcaagagaatatatcagttgtaaatatatatacacccaacactggagcaccagatatataaaccaaatattagagttaaagaaagagactgcaatacaataataggtggagacttcaacaccccayctttagcatttaacagatcattgagacagaaaattaacaaaggaacactggacttaatgtacactatagaccaaatggatctacatgtacagaatacttaatatttacagaatatttacaaaata

SEQ ID NO: 955207 - DNA, 528 bp, Homo sapiens
ataacactgaatgtaaatggactaaattctctaatcagaagacatggagtggctgaatggattaaaacacaagatccaatgatctcttgcctacaagaaacacactttacctataaaggcacacatagactaaaaacggaggaatgaaaaaaatttcatgtcagtcaaaaccaaaaagcaggagtagccatacttatatcagaaaaagtagatttcaagaccaaaactgtaagaagagacaaaaatgtcattacataatagtaaaggggtcaattcagcaagagaatatatcagttgtaaatatatatacacccaacactggagcaccagatatataaaccaaatattagagttaaagaaagagactgcaatacaataataggtggagacttcaacaccccatctttagcatttaacagatcrttgagacagaaaattaacaaaggaacactggacttaatgtacactatagaccaaatggatctacatgtacagaatacttaatatttacagaatatttacaaaata

SEQ ID NO: 955208 - DNA, 789 bp, Homo sapiens
gctgctcgggaggctgaggcaggagaatcgcttaagcccgggaggcggaggttgcagtgagtggagatgacaccactacacyccagcctgggtgacagagagacatcccatctccaaaacaacaacaacaacaaaagatataaatggaaaatgaacattggatttggtactaggacggtcatgggagaccttgacaacagcagtctcagtagattagtcttgatcaaatctttactggatcaggttgaaggctgggtgagctggctcacacctgtaatcccagcattttgagaggctgaagtgggcggatcccctgagttcaggagtttgagaccagcctggtcaacatggtgaaacccagtctctactaaaaatacaaaaactagctgggcatggtggtgcatgcctgtgatcccagctactcaggaggctgaggcaggagaatcacttgaacccaggaggtggaggttgaagtgagctgagatcacaccactgcactccagcctgggcaacagagcaagactctgtctccaaaaacaaacaaccaaacagaacaaaaagaatggaagtagtgatgatgaccagaaataattatttcaacttttttttcaggaagtgcagcagagagacaaggtagtaattgaaaaggaattcaggccaaggttagatatttttttgattgtagtttttatgtttttgttacttattgttatttaagaccggattattaaagtgtaattggaaaggttcagtagatagggaaagaaaatgatggcatagaacaaaggg

SEQ ID NO: 955209 - DNA, 789 bp, Homo sapiens
gctgctcgggaggctgaggcaggagaatcgcttaagcccgggaggcggaggttgcagtgagtggagatgacaccactacaccccagcctgggtgacagagagacatyccatctccaaaacaacaacaacaacaaaagatataaatggaaaatgaacattggatttggtactaggacggtcatgggagaccttgacaacagcagtctcagtagattagtcttgatcaaatctttactggatcaggttgaaggctgggtgagctggctcacacctgtaatcccagcattttgagaggctgaagtgggcggatcccctgagttcaggagtttgagaccagcctggtcaacatggtgaaacccagtctctactaaaaatacaaaaactagctgggcatggtggtgcatgcctgtgatcccagctactcaggaggctgaggcaggagaatcacttgaacccaggaggtggaggttgaagtgagctgagatcacaccactgcactccagcctgggcaacagagcaagactctgtctccaaaaacaaacaaccaaacagaacaaaaagaatggaagtagtgatgatgaccagaaataattatttcaacttttttttcaggaagtgcagcagagagacaaggtagtaattgaaaaggaattcaggccaaggttagatatttttttgattgtagtttttatgtttttgttacttattgttatttaagaccggattattaaagtgtaattggaaaggttcagtagatagggaaagaaaatgatggcatagaacaaaggg

SEQ ID NO: 955210 - DNA, 433 bp, Homo sapiens
aaacaaggtgattctctcctgtgcctggcttagtggctcccatgcccatggagccttgcacactgctagcacagcagtctgagatcgatatgtgagacagcagcctggctgggagaggggcaactgccattactgaggcttgagtaggtaaacaaaggggctgggaaactcgaacaagggggagcccaccatagctcaacaaggcctactgcctctagactccacctctgtgggcagggcatagccaaacaaaaggcagggggcaacttctgcagacttaaatgtccctgtctgacagctctgaagagaggagtggttctcctagcacagcgtttgagatctgagaatggacagactgtctcctcaagtgggtcygtgacccctgtgtagcctaactaggagacacctcccagtaggggctgacagacaccac

SEQ ID NO: 955211 - DNA, 591 bp, Homo sapiens
aattttctcctcagaaaattggatattcttttccattgcattgtcaggctgcaaattttccaaacttttattctgtttcccttttgaatggaaatgctttaacagcaccaagtcacttcttgaataccttgctgcttaaaaatgtcttctgccagatatcctaaatcatctctcaagttcaaagttccacaagtctctagggcagggacaaaaacccgccagtctcttttgtaaaacataacaagagtcacctttgttccagttcccaagaagttcctcatctccatctaagaccacctcagcctggatttcattgtccatatcattatcaacattttggtcaaagcaattcaacaggtctctatggagttccaaacatttccatatttttctgtcttctaagccctccaagctgttccaacctctgcctattacccagtcccaaagtcgctttcacattttcaggtatcttttcaggagagcccccacyctctctactggtaccagtttactgtattagtccattttcatgctgctgataaagacatacccaagactgggaagcaaaagaggtttaatggacttacagtt

SEQ ID NO: 955212 - DNA, 739 bp, Homo sapiens
atcgcttctatttacctagccagcttccgaaagaacaccaagaaatagtcatcattccagcagttacccttaggactctatactrtatttctaagttaggatggccaatgtgtcagcatagagacctggtgatttcatttaataaaggaaatcagctttaaatatgggtggacatttttttctgtttgcaccaagctcttaatgtttcacaagtgctgtagtgtgctagatacttaattattccaaatttcaagttattatctatgaagtatataagtctgatttattatctgcttcctacatttttatgaggcttgttagcagaactccattatatctgactgactccctgatgtcaagaagccattcttgtgaaaatatttaacataaaaatgagccaacaaatcatggaaatggctctgctaaacaggaaaaacagggtgagatgtaaaatattgtttaggacataattgcaaatattatgtcaattttaaagcaactatgtaaacaccctataaaggagctacttatgatgaaagcaatattctccagctccttggtatctcatttccagctaatttttcctttcttggctcccaccagcgtttcgatgatgagttcattggattaaggacattacatggccagtttaagaccatgtggtaattccaaagaaagatatgatatgactctgcctaaagtccccttaagcaaaagaattaaagtcatgaagaacgtc

SEQ ID NO: 955213 - DNA, 611 bp, Homo sapiens
ataccctttatttctttctcttgcctgattgccctagccagaacttgcaacactatgttgaatacaagtgctgcgagagggcatccttgtcttgtgctggttttcaaagggaatgcttccagtttttgcccattcagtatgatattggctgtgggtttgtcataaatagctcttattattttgagataccttccatcaatacctagtttattgagagtttttagcatgaagcgatgttgaattttgtcaaaggccttttctgcatctattgagataatcatgtggtttttgttgttggttctgtttatgtgatggattacatttattgatttgtgtatgttgaactagccttgcatcccagggatgaagccgacttgatcatggtggataagcgttttgatatgctgctggattcagtttgccaatattttgttgaggattttcacatcaatgttaatcagggatattggcctaaaattctttttgttgtgtctctaccaggctttggtatcaggatgatgctagcctagtaaaatgatttarggaggattccctctttttctattaattgggatagtttcagaaggaatagtaccagctcctctttgtac

SEQ ID NO: 955214 - DNA, 776 bp, Homo sapiens
ccctaggtgctttttcccagggagatgggggttttatctataagtccccaactggggctgctgccttttgttcagagatgctctgcccacagacgtggaatctrgaaaggcagatggccttgttgagagcggtgggcttcacccggttcgaactttcccggaggctttctttacactgtgggcataaaaccgcctactcaagcctcagcaatggtgggtgcccctcccctctccaagctccagtgtcccaggttgatctcagactgctgtgctagcagcgagaatttcaagccaattgatctcagcttgctgggctctgtgggcatgggacccaccgagccaggcaccagagggaatctccttgtctgccagttgcaaagaccatgggaaaagcacagtatctgggcagtagtgtactgttcctcctggtacagtctctcgtggcttcccttggctaggaaagggaaatcccctgatcccttgcacttcccgggtgaggcaacgcctcgccctgctttggctcgccatctatgggctgcacccactgttcaaccagtcccaatgagatgaaccaggtacctcaggtggaaatgcagaaaacacccatcttcttcatcaatcttgctgggagctgcagatcggagctgttcctatttggatatcttgccggaaatccccatcagtctcttttattttagctattctggaggatgtgtggtgatatctcattgattttgatttgcatttacatgattattgaggaaattgaacacttt

SEQ ID NO: 955215 - DNA, 657 bp, Homo sapiens
ttatccaaagtcattaggcaagtgcatattaaaactacaataagatgccactttactcccactagaatggataaaagactaaccatactaagtgctggcaaagacatgggcaactaaagttcttatacactgttggtgagaatgtaaaatggtacgaccactttgaaagacagttttttcttaaaagatgaaggatacacataccatataacccagccattcaacccatgcacaagtgtacatgaatgttcatagcaactttatttgtaataacagccaaaactgaaaacaacccaaatgttcaacagatggatggataaacacacagcagtatagtatccataaatgaatattactcaacaataaaaagaaataaattattgatccatgtaaaaatatggtggaatctcaaaatcataatgctgagtgaaagaagccaaacaaaagaggctacatgctgtattatttcacttacataaaatttcagaggccaggcacggtggctcatgcctgtaatcccagcatttttgaaggcsgagactggagggtcacttgaggacaggagttcgagaccagtctagccaaaatggtaaaaccccatctctactaaaatacaaaaattagccggacatggtggaacacacttgtagtcccagc

SEQ ID NO: 955216 - DNA, 578 bp, Homo sapiens
acccactccagggcctcctttctgctaagagctgcatagatcatgggatgacttgtcagcagagaggagccasccaccccaggacctccctatctctactgagctgtttactgctcagtaaggctcctcttcttcttgctcaccttccacttatctgcatgcttcattcttattggttgcaggacaagaacttggggcctgctgaatggcaaggctagaagagctgtaacacaaactgggctcaaacatgccacttgctcaccacattgcaggagaagagatggggagaagagctgcagcccttcagggagcccagacctgggaacttcctgagctggggctgtgactccttctttggggccctgcatttcctggcatctctaagcttccagatgccactgcattccccagtgccagctggggaagctgcttgcagtgtgcctggtccagctgcagcctcgcagagagctggcacctgtgctggcacctggagctgcctgccccactgtaccagccagcagactgtgcacagtggccagaccccatgctctctccctcacacacccctcactgctcca

SEQ ID NO: 955217 - DNA, 832 bp, Homo sapiens
attttctttatctgatctgtcactgatgaatatttgggttgattccatgcctttgctattgtgaatagtgctgcgatgaacatttgcattatgtatctttacattattttatctttatgataaaataatttatatttctctgggtatatacccagtaatggaatgctgggttgaatggtagttctgtttttagctttttgagaaataccatactgctttctacaatggttgaactaatttacactcccaccaacagtgtataagtgtattgcgttttctccgcaaccttacctgcatctgttattttttggcttcttaataatagccattctgactgatgttagatggtatctcattgtggttttctcattgcagccctgtagtatagtttgaaatttggtaatgtgatgcttccagctttgttctttatgcttgatattgccttggctattcgggctctttttgaatatgaattttaaaatagttttttctagttctgtgaagcatgtcattggtagtttgataggaattgcactgaatctataaattgctttgggcagtgtggccattttgataatattgatttttcctatttatgagcttggaatgtttttctatttgtttgtgccatctctgatttctttggatagtgttttattgtgattttagtagtagaactctttcacttccctggttagctgtattcctaggtattttattctttttgtggcaattgtgaatgggattgcctttctgatmtggcttttggcttggctgtttgtgtataggaatgctagtgatttttgtacattgattttgtatcctaaacttt

SEQ ID NO: 955218 - DNA, 816 bp, Homo sapiens
tggaccaagactatggggttttctagatatagaatcatgttgtctgcaaacagggatagtttgactttcttcatatttggatgcccttatttcattctsttgcctgattgctgtggctaggatttccagcactatatcaaataggattggtgagagaggatgtgtttgtcttgtgccagttttcaaggggaatgcttgcagcttttgcccattcagtataatgttggctgtgggtttgtcatagatggctcttattattttgaggtatgttctttcaatacctagattttttagagtttttaacataaaggggtgttgaattttattgctagcattttctgcatctatagggatacaatgttgcttcctttttaaatttattgaggtttgttttataacctatcctatggcctaccctgaagcatgttatatgtgtacttgagaaaaaggcctaaatatgtgtgttaggtctagttgttttatagtgttgttcaaatcttctatttccttgttggtcttcttgccaattgtttgtccattattgaaaatggggtaatgaagtttgcaactaaggaggactgtttttgaaatgctcagcttcagagatactaattgtattgatagaggcctcttttgaaactgcatctcagctcaacttctcccttttcccaaacctacttctttcacttttttataagtttgtttccaagggctctcccaacaaactctcagcatgaaatctctgtatcagtgtgtatttcccagggatttaaaatcttaaatggtcttagaaacaaacttaaagtaagattttgg

SEQ ID NO: 955219 - DNA, 689 bp, Homo sapiens
tggtccccagaagcttggaggtgctaggaatcacagggccccatagagggagttacagcattggctagggaagctcccaggtctgggatccctgaagggccgcrgcttttctctacttctcttcacttgcaatgaggtgaacaaggagcatgtttcagccttgtttgtgctacagctttattagccttatcattaggtgggtcttgagttcttgtcctgcaaccaggaagaatgaggtatgtagacaagtggaggatgagcaagacgaaggagagctttattgagggacagaacagctcagaggggaccctctttctgcagccagggtgtctcgatgagtgtttagctcttagcagagaggagaccctggagtgggaagctcctctttgcaggtaggtcatcccatcatctctgcagttctcagcagagagggtagctcctctgcaggtggtagtcctgttgtctctccgtcccctgctttggctgagcccggggtttttgtatgagcctcagaggggaggaagtgcgtgctgtttggtccatggccagcatggatgggcccggaaaaggcaccacaagttcccactccggtccccatgactgttagcctggaccccaaccttgaggccctccctggcctgaaggtgggacctcaccagggacctgccccttctgcccaggagcctgtt

SEQ ID NO: 955220 - DNA, 707 bp, Homo sapiens
ccctgtctgacagcttccctttccccccgcctgcttttaactggcctctcgctctcactcttgcctcctttcagtccattctctgcccagcatcaacagtgatgcttcttaaaacaccaaccactgtttcatctcgtacttaaagctcttccgtggctttccatctcattagaggaaaacacaaatttgtacaaggctctatgtggcttgtgcccctgcaggtctgcatgcctgcctcctttcagacatctccttttgggctcctctggaccccatccctgtgttagccatactggtctacttccacctccccaaaagctacccctcacctgggcacatgcggtcctcttgattgacgtgctgttaccctccacacatacctgactagctcttcttgattatttagttcctggctttgatggcatcctccccaagaagacttccccaatgactgtgaatgtctctgtcttggcccttgtttccttttactggaaacttaaaattgcaattactttatctatttactgggtattggttgggttcctccctagaacagaagcctgacagggcaaggatcatgcccatcttgctcactgctatatctccagcacttagcacagtgcttggcacatggcagamtcctagaaaattcagatgaatctggtggaaggcccagctaaactctcactgtgcagccacttctgaca

SEQ ID NO: 955221 - DNA, 555 bp, Homo sapiens
gtcagctgcatttccatatcgtatatctagactcccaattataggcccagtgctgtttttctttatyatctccagtgtctggcacagtgctagtcatgaaatacactttctgaatatgtttgtggaaggaaggaaggaaggaaggaaggaaggaaggaaggaaggaaggaaggggcaacccccctggggttaatgctgcctgtgctccctgaagttcatgaggctatgaataaagaatgaggaccccctgttccccaccctcccagccttgtggtggtggctgggtgtgcagggatggaggctgtgtcttttgcaaagtgtcctccacccgagggcaaaaactacatcataagtcaaaaccagcaggggggcctcccgagccatcggtgcacgtagctccatgcagtgctctgtgaatgcgcctctggatgtgtgcaggtgcatgcgatggaatctatctgatgctatgaagggtggtaacatttgaaaaggggtgacggggaaggagaagaaacacctgtgctcctttgtaggtgaagaagcaccctgcttcct

SEQ ID NO: 955222 - DNA, 631 bp, Homo sapiens
tattctactgttctgggggtctaatttttttttttaattcagaatctttgaatctctcccccaaagacctaagactagcttgaatgttagaaggatytgtctctgggctgtatggagaagtgtggctgctatatgagagcagattctcatggaaaaaacatttttcccccatggaattttcttccatgagtctaaacccatcctggctcagggccctcccagtctcctgcactgagcaagcaggtagggagagagaaaagaggggtggtctggagttttaggatctgcatttgaatctctcctcttgatttgtgaccctgggcaaggctctgccaatctcttgttacctagcacctggtctatgccaggtcccagagctttttgggttctatctgggcctcagcatccacattggacaaaaagggtaaatattcctgccatgcagggttattatgacaaatgcaatgaaataataaatgtggaagggcttctcacagtgcctgcctcagagtggaaactcaataaatactagggcattctgtgtctgaaaatctcacctctaattattctcttttccttccctattatacaaaacagcagcagcagtaacagcgaccacaaaatgcactcc

SEQ ID NO: 955223 - DNA, 631 bp, Homo sapiens
ctaatctatctatctatcatctatctatctatctatctaatctatctaaatgctaatttcatctattagctatctatctatcatctatctaatatagctatcatctatctatctatctatctatctatctatctatcatctatctatcatmtctctctctctctctctctctctctctctctctctctctctctctctatcatggggaggtggggagagagagacaatgagagagagagagagaggttaccaaagccactgtgtaaggctgcacagtgcgtaggctgcctaatcacacttaggctacaatttgaacagcactttgtgggggttgtgcagtgtggatgtcctgtctggttctgacctcaaagatatagttttgtggattgcttaagctctcattttcccctccagggtgaccttgccccaggcccttagcttctgctatataccattaaagcatcctgctcttaccagttagaatggaaacaatttactgcttaaataatttatccagattccgcacagccagtcttttgcggagattcatctgctaataaagaaaattgattttagaagccaaagtcaatacgaagttagggaaacattcggttatttgcatgttcctgtc

SEQ ID NO: 955224 - DNA, 586 bp, Homo sapiens
caatcaggaggcatgcaggttagggacccactttaggaagcagtctatcccttaagcagagctcacatgctgtgcttggagatgtgctgctctcttcagagctggcaggcatgaacgtttaaatctgctgaagctgtgcccacaaccgccccttcccccaggtgctctgtcccagggagatgggggttttatctataagcccctgactggggctgctgcctttctttctgaaatgccctgcccagagaggaggaatctagaggggcagtcttgctacggaggctttgtcaagctgcggtgggctctgcccagtttgaacatgctggaggatttatttacactgtgaggggataagtgcctactcaagcctcagtaatggtggatgcccgtccccctaccaagctcgagagccccaggtcgacttcagactgctgtgctggtgtgagaatttcaagccagtggatcttagcttgctggactccatgggagtgggatctgctgagctagaccacttggcttcctggcttcagccccctttccaggggaatgartggttctgtcttgctggcattccaggagccactgg

SEQ ID NO: 955225 - DNA, 544 bp, Homo sapiens
actactaatgaatgtacagtgcagtggtggttcaaaaagttttgcaaaggagacgagaacttgaagctgaggagcatagtggccggccattggcagttgacaasggccagttgagagcaaccatcaaagctgatcctcctacagctacatgagaagttgccgaagaactcaacatcaaccattctacagttgttcagcattagcagcaaattggaagtgacaaagcttgataagcaaaaatttaaaaaatcattgttttaaagtgttgtctccccttattctatgcaacaatgaaccattttttggttggattgtgacgtgcaacaaaaaatggattttacacaatgaccagcaatgaccagctctgtggttggaccaagaagaagctccaaggcacttcccaaagtcaaacttgcaccaaaaaaacgtcatggtcattgtttggtggtcggctgccagtctgatccactacagctttctgaatcctggtgaaaccattaaatctgggaagtctgctcagcaaatcgatgagatgcaccaaaaa

SEQ ID NO: 955226 - DNA, 557 bp, Homo sapiens
gcataaatgctgtgtgtgttctgactgctccctcaacgggccatttccccgtctctctccctctcctcaggcctcccttttccctaagacacaacaattgaaagcaggccaattaagaactcttcgctggcctctaagtgttcatataaaagagtcacatgtctctcactttaaataaaaaactagaaataattaagcttagtgagaaaggcatgttgaaagctgagacaggcctgaaagctggacctcttgtgccagttagcaaagttctgaattcaaaataaaagttttgaaggaaattacaagtgctacttcagtgaacatatgaacgatgagaagccaaaacagccttgttgatcatatggagaaattttagcggtctgaagagatcaaatcagccacctaatccagggcaattcctgacttcaagtctctgaaggctgagtgagatgaggaagctgctgaagagaaattgaggctagtagagasttggttcttgtcgtttaacaaacggagctatttccagaacataacagtgcaaggtgaagcagcaagtg

SEQ ID NO: 955227 - DNA, 491 bp, Homo sapiens
aaggattatatagtttaaaatatcatatgttataacctaatttataatagaaacttgataaatatgaaatkatagccttctggtgggtaaatgtaggtctcatttttaatgtggtagcctaaacaccaccagtcaaggtcatagatctcgcaatttattttggtatgaaaagagtatatttttgacctacatattcaataaatagccaggtatttcagttataagtgtattgactctcagatcccaatttacctttcaatatttgtcctgcaataatagaagaaactcaaacatctcttctttacagtatgcgcgatgttaaactttctcagtaggggtcgctggtgggatatggcaggaagaagggacactcctgctctttttgtctacagcttcatgggggaggagccaagatggccaaataggaacagctccggtctacagctcccagcgtgagctacgcagaagacgggtgatttctgcatttccat

SEQ ID NO: 955228 - DNA, 491 bp, Homo sapiens
aaggattatatagtttaaaatatcatatgttataacctaatttataatagaaacttgataaatatgaaatgatagccttctggtgggtaaatgtaggtctcatttttaatgtggtagcctaaacaccaccagtcaaggtcatagatctcgcaatttattttggtatgaaaagagtatatttttgacctacatattcaataaatagccaggtatttcagttataagtgtattgactctcagatcccaatttacctttcaatatttgtcctgcaataatagaagaaactcaaacatctcttctttacagtatgcgcgatgttaaactttctcagtaggggtcgctggtgggatatggcaggaagaagggacactcctgctctttttgtctacagcttcatkggggaggagccaagatggccaaataggaacagctccggtctacagctcccagcgtgagctacgcagaagacgggtgatttctgcatttccat

SEQ ID NO: 955229 - DNA, 491 bp, Homo sapiens
aaggattatatagtttaaaatatcatatgttataacctaatttataatagaaacttgataaatatgaaatgatagccttctggtgggtaaatgtaggtctcatttttaatgtggtagcctaaacaccaccagtcaaggtcatagatctcgcaatttattttggtatgaaaagagtatatttttgacctacatattcaataaatagccaggtatttcagttataagtgtattgactctcagatcccaatttacctttcaatatttgtcctgcaataatagaagaaactcaaacatctcttctttacagtatgcgcgatgttaaactttctcagtaggggtcgctggtgggatatggcaggaagaagggacactcctgctctttttgtctacagcttcatgggggaggagccaagatggccraataggaacagctccggtctacagctcccagcgtgagctacgcagaagacgggtgatttctgcatttccat

SEQ ID NO: 955230 - DNA, 515 bp, Homo sapiens
aaagatacccaagaatgtggaagtgattttggaactgggtaacaggcagaggttgaaacagtttggaaggctcagaaaaggacaggaagataagggaaagttaggaacttcctagagacttgttgaatgtcttttaccaaaatgcgtatagtgatatggacaatgaagtccaggctgaggtggtctcagatggacatgagaaacttgttgggaactggagcaaaggtgacacttgctatgttttaacaaagagactggtggcatgttgcctctgccctagagatctgtgggactttgaacttgagatgattttgagcatctggtggaaaaaagttctaagcagcgaagtattcaaaaggtctttggtactgttaaaagcattcagttttatgtattcaaaaatacatgatttgaaattaaaacatgtttaaaagggaagcagcrcctaaaagttcagaaaatttgcagcctgacattgtgatagaaaagaaaaacccatcttctgaggagaaatt

SEQ ID NO: 955231 - DNA, 600 bp, Homo sapiens
aagcaaggcaaagagatgctttattgagtgacagaacagctcagaggagatccacagtgggtagctgctttttgcaggcaggtcatcccatcccctagctgagtctggggtttttatgggcttcagaggggaggaagtacatgttgattggtccatgggtgtccatctgtaggcccagagaaagcaccataaattctcattctggtccacagaattggcagcacagccccaggccttaggctgtactcggcctgaaggtggggttttactgggaaccaactccttctgcccaggtgcctgtctgcctcctgcagccattatactgccatccacggtgcccagagtacccaggctgttcatgccaagaggcaactgcaggcctgcaccacaccattcttagcctctgcttgacctcccttcttgctcatcagtgcccaaagtccagacgggactgaggtggcagggagcttatgtgtcagtgttgctccaagcatttgcataccggccagcttgtgacagcacccaggctcagccataacttttctctgaaaccagagcaagtgccrgaagcaggaagaggccaggcagtgggaataggca

SEQ ID NO: 955232 - DNA, 621 bp, Homo sapiens
gaagctgtgagagactgtgccctgaggaacggtgcactccagcccagatactgtgtttttcccatgatcttcgcaacccgcagaccaggagattccctcgggtgactacaccacgagggccctgggtttcaagcacaaaactgggcagccatttgggcagacaccaagctagctgcaggagttttttttcatactccagtggtgcctggagtgccagtgagacagaaccgtttcctcccctagaaagggggctgaagccagggagccaagtggtctagctcagtggatcccacactcatggagtccagcaagctaagatccactggcttgaaattgtcactgccagcacagcagtctgaagtcgacttgggtgctcaagcttggtggggggaggggcgtccaccattactaaggcttgagcaagcggttttccctcacagtgtaagcaaagctgctgggaagtttgaactgggtggagcccaccatagctcagcaaaaccatgtagccagactccctstctagattcttcctcactgggcagggcatctctgaaagaaaggcagcagccccagtcatgggattatagacaaaactcccatctccctgggacagagcaccta

SEQ ID NO: 955233 - DNA, 599 bp, Homo sapiens
gtaggggctaatgcaactgatgacttgaagtagaagccagtgctcatttaccatttcataaaccctagggtctttaagaattatactaaatctattctccctgtgctctagaaatggaacaacaaagcctggatgacaaaatgtacatttacagcatcatttactgattattttgactccactgttgagacctacttctcaaaaaaaaaaaaatttttttttcaaatgattgctgctcattgacagtgcacctggtcacccaagagctctgatggagaagcacaaggagattaatgttgttttcacgcctgctaacacaacgttcattctgtagctcatggatcagggagtcattttgattttcaagtcttattatttaagaaatacatttcacaaggcgatagctgccataaatagtgattcctatgatggatctggacaaagcaaattgaaaactttctgggaaggattcaccattctagatccccttaagaacatttgtgcttcaatgggcaaaataaaagatcaacattaacaggagtttggaagaactggstttgaggtgttcaagatgtcattgaaggaaatagctacagttg

SEQ ID NO: 955234 - DNA, 575 bp, Homo sapiens
ggctggctgctgtttgcctccaacacagtgtgtgcagtgcatgcagggtgggccctgagaaaggggtgagcaatgtctacaggatccagagcttggaggggctgaaagttagtgtattccatagagctccaragaagtgggcactgtggactgaactgagaagttgccaacccaaggcttacaggtctgcacgaaaaggagagccaaggtcatagtgacgcaaaaccagtacaaaaatgtttatagcacctttattcttaatagccagaaaccaggagcaacccaaatgtccttcaatgggtgaatggttagacaaatggtggtacatccacaccgtggaaggcaactcagcaaagacaggctactgatacacacaagacttggacaaatctccaggaacaatgttaagtgaaaaaagccaattctaaataattgcatattttattatttcatgtatatcacattcttgaaatgacaaaactataaaaatagagaatggattcgtgattgccaagggtcagggatgggggttagagggaggtatacgtggctataaaagggcaacacgaaggacc

SEQ ID NO: 955235 - DNA, 575 bp, Homo sapiens
ggctggctgctgtttgcctccaacacagtgtgtgcagtgcatgcagggtgggccctgagaaaggggtgagcaatgtctacaggatccagagcttggaggggctgaaagttagtgtattccatagagctccagaraagtgggcactgtggactgaactgagaagttgccaacccaaggcttacaggtctgcacgaaaaggagagccaaggtcatagtgacgcaaaaccagtacaaaaatgtttatagcacctttattcttaatagccagaaaccaggagcaacccaaatgtccttcaatgggtgaatggttagacaaatggtggtacatccacaccgtggaaggcaactcagcaaagacaggctactgatacacacaagacttggacaaatctccaggaacaatgttaagtgaaaaaagccaattctaaataattgcatattttattatttcatgtatatcacattcttgaaatgacaaaactataaaaatagagaatggattcgtgattgccaagggtcagggatgggggttagagggaggtatacgtggctataaaagggcaacacgaaggacc

SEQ ID NO: 955236 - DNA, 589 bp, Homo sapiens
acctaggtccaactgaacatcagagaaacatgtttttcatctatttgctggagctcagaacataataccccaaagtataccatcttggcaygtggagtactttgaactaatggagtttggaagaacctcagaaactggatctttctgacctcccatgctcccgtctcctgcccttctttctctctgaaagcaaatcatagaaaccaaaactgctgtcctccagggcaggtcatagaaactaaaactcctctcccacaaagcaaaccataaaacctagaaagatcactctctctcttctcccttgaagacccccattcagaggggtcctgtcccatacccaggaggaaggaatgctacacagagagtctgagaaggatctgaacagatagggcttaatggatttcccccttagtctattcccattagatcatcctctttttgtccaatcacatttctacacagcttcattgaatctaagcataaaaatagacagttttccctgggcttttgggtcttcatttctgaagcctcctgtgtcacatagatcctaattaaataaatttgttatgcttttctcctgttaacctgc

SEQ ID NO: 955237 - DNA, 580 bp, Homo sapiens
ctgtcaagtgagcacctacccaaggcctccccaacatggcaatcttggtgcagtcaaatttcttacctggtagctcagtactccccagaaacccagatgaaagctgcaagccttcttttgattyagcttcagaagtctcagagcaacacattgaccacattatgttagtgaaataagtcattaaagccagctcagattcaaaagatggggagttagactccatctctcaataggaagaacatcaattaacctgtggccctctttaatctaccatagacaggctgctagacaagtatctaccagcttaaatatttactgcttgcttagatccaagggaaagataaatgagaagtaagacatcaaatggttcagggtactcaggggacagagcttcagaatgggcagttacaggacttatcctctgggtggttcctgtgggagacctagcccccaccaatcctgctcatttcactgatggtgatacctttaagaagtgttgaaaaaaggattatgaaggaaaatctgtaaaaggaggataggaatagtatatctatttcacagggttgtggggattcaatag

SEQ ID NO: 955238 - DNA, 661 bp, Homo sapiens
aaataatctgggaggtcctcaaatggttaaacatatagttagcatatgatgcaacagtttcactcccagggataaaaataaaaacaaaaaagagaaatgaaaacgcacatccacataaacacctgtacagaaatgttcccagcagcattattcgtaacagctacaaagtagacacaacacaaatgtccatcaactggtagaataaatataatggggcatatccatacaatggaatgttatttggcaataaaagaaatgaagtactgatatatgctacaacatgggtgaaagttgaaacaatgatgccaagtgcaagaagccagttgcaaaagactaaatattttatggttccatttagatgaagggtccaggatgagcaaaactatagagacagaaagtagattagcagttgctgagggctgatggggagaggatgaagaattgagaggtgattactgaaaggtatggggtttctttttgggttgataaaaatgttctaaagttgattgtggtgataattgtcaacyctgtgagtattaaaaactatgaaattgaaaattttaagagggtgaattgtacagtacatgaattacatctcaatgcagtgttacaaaatttttttaaattaaaaaagggtggatttggaattgagaggcaataa

SEQ ID NO: 955239 - DNA, 661 bp, Homo sapiens
aaataatctgggaggtcctcaaatggttaaacatatagttagcatatgatgcaacagtttcactcccagggataaaaataaaaacaaaaaagagaaatgaaaacgcacatccacataaacacctgtacagaaatgttcccagcagcattattcgtaacagctacaaagtagacacaacacaaatgtccatcaactggtagaataaatataatggggcatatccatacaatggaatgttatttggcaataaaagaaatgaagtactgatatatgctacaacatgggtgaaagttgaaacaatgatgccaagtgcaagaagccagttgcaaaagactaaatattttatggttccatttagatgaagggtccaggatgagcaaaactatagagacagaaagtagattagcagttgctgagggctgatggggagaggatgaagaattgagaggtgattactgaaaggtatggggtttctttttgggttgataaaaatgttctaaagttgattgtggtgataattgtcaactctgtgagtattaaaaactatgaaattgaaaattttaagagggtgaattgtacagtacatgaattacatctcaatgcagtgttacaaawtttttttaaattaaaaaagggtggatttggaattgagaggcaataa

SEQ ID NO: 955240 - DNA, 605 bp, Homo sapiens
gaacagtataaattatgctcttgtgtttgaaaattyatccaaaatgttcactatttcaggaaactacataaccaatggcaactttgctcatatgtagtctatctccatcagtctatagctgccattgatggcgattctatatctaagtacaagcatgtgactattccattatgtcttctggtataatagttcccaaggattaattatatgtaaatacgtactatggactccccctcaaaatttggtttggatttcaagactgattacacactgaccaaaaaggatatgaaaagctatattactctcattgttggtgggattgcaaaatggtgcagccactttgggagactggcagtttcttgcaaagctaaatgtagtcttaccataggatccagcagtcacacccctaggtatttacccaaataaatgggaacttatatctacacaaaaacctgcatatggatgtttatagaagctttattcataattgccaaaacttagaagcaatcaagatgtccttcagtaggtgaatgaatgaacaaagtgtggcacagcagagcaacagaatattactcagcagtaaaaagaaatgagtcaccaagcca

SEQ ID NO: 955241 - DNA, 565 bp, Homo sapiens
cataagaggccctaagataacttctggtagtctgggacttcttgggaaaaacagaggaggtgccacagaccctgttttgggaaaacacatacacacacacacrtacacaccctctgtttccctcatgaaaccccaggaattaaaagcagctacatctctctcaaaatcaaaggtgctgttctgtttcgcattgtgttatctgatggttttaagttttggggctatcaaattactttgcattatgagagggctttgtgtaataactaggtaaaaaatataccttaagggatggctaatagaagttatggagggatacttacttctttgcacatctggatcagagaagcatgctgttggctacccggaagatttggaaacatccccaccccaaattaagggataaggctcccatggggagtgggctgattacaaaatgggctgattgcctttgggttgccttgcaatgagatgcgtggtagaagcactacactgtcttctccccatagtatttccctccttttgggaatccaggatccactataaaatggcaccctttattttgagg

SEQ ID NO: 955242 - DNA, 588 bp, Homo sapiens
atgcgtggtagaagcactacactgtcttctccccatagtatttccctccttttgggaatccaggatccactataaaatggcaccctttattttgaggatctgtctttgccttcagctgtgccagcttattcagccataaaaatgcatgctttcctagtcgtgttcctccaaggtctccaccctgaagccagtaatccaattaagaaactagcaaatgaaaaattttacaagtgctaaatcttctgtctgggtagctatatatgtgttgtgtgtaatatctataaaaagagctctaattaattgtcttagagaaaaataaatgcttaaatattttaaaggaaagataaaagctgtaatgcttcttagttaatgtgactttaatttttaagaaataaaaaagtcttcaagattattggtaaaatacaagtgttatcaatataaacaggtgatctaaatcatrtaagtcaaatactaggtttgctaaaggtttcaaggttgtaaaccacctgcttcacaatttggtaagggctggggacatacaaaattaacaaccccctaactatgctggaaaaagtaagtgattttctc

SEQ ID NO: 955243 - DNA, 551 bp, Homo sapiens
ctatagagacgatggggtgggacagagacatactgggcctgggagctggtggggggcrgtcgggcaagatgggagggaacagtgcgaggcgtctcaacaatccagggggtcagagacccagagaccaaacccctgacagaaaataaactggtgggaagaaaccatcatctccttttttttttttttttttttttgagacagagtttcactcttgttgcccaggctggagtgcagtggcacgatcttggctcactgcaacctccgcatcccaggttcaagcaattctcttgtctcagcctcccaagtagctgggattacaggcatgcgccaccacacccggctaatatgtttgtatttttagtagagacgaggttacatcatattggtgaggctagtctcaaactcctgacctcaggtgatccacccgcctcggcctcccaaagtgctgggattacaggtgtgagccaccgtgcccggcccatcatctcctttataccgacctctagcagaaaggtgtcgttcgttcagttatgaacgaggccatgaaccaa

SEQ ID NO: 955244 - DNA, 526 bp, Homo sapiens
  misc_feature 487, 488, 489, 490, 491, 492, 493, 494, 495, 496, 497, 498,499, 500, 501, 502, 503, 504, 505, 506, 507, 508, 509, 510,511, 512, 513, 514, 515, 516, 517, 518, 519, 520, 521, 522,523, 524, 525, 526: n = A,T,C or G
catgttctcagtcataggtgggaattgaacaatgagaacacatggacacaggaaggcgaacatcacacactggggactgttgtggggtggggggaggggggagggatagcatttggagataggcctaatgctaaatgacgagttaatgggtgcagcacactaacatggcacatgtatacatatgtaacaaacctgcacgttgtgcacatgtaccctaaaacttaaagtataataataaaataaaaaaatgtatatagggaatgattaaaaaaactgtcattaggcattagctagctgcatcaatcagagacacggaaaacaaacatatgagtacatgtgaaattttggagcaagggccagactaatgtaggaataggtggcattttcctaatatgcttattctatggcagatggttcctatattttacagcctgaatagttccrtcactgtgaattctctatctctagtaaaatacaatcaatttgnnnnnnnnnnnnnnnnnnnnnnnnnnnnnnnnnnnnnnnn

SEQ ID NO: 955245 - DNA, 736 bp, Homo sapiens
gtctaaacacaaaattcatttatgccttataaataccttatacacatagcctgaaggtaattttaaacaatatttttaatagctttgtacatgaaacraagtttgtgttaagtacttatgtgtggaatttcccacttgtgatattatgtcagtgctcaaaagttttggattttggagcatttcagatttcagattttcagattagggatgtttaattgtattagtttactttggtccgtcttgtgtatataagtaactgtattagctttctattgctgctataacaaattaccacaagcttagtggcttgaagaccacacagtttttttattttacagttctataggacagaatttcaaagtgggttttgggtgggtacagtggctcatgcctataatcgtagagctttgggaggctgaggtgggaggatagcttgaggacaatagtttgagatcagcctgagtagcatagagagtagagtagagtaacatctctactaaatacatacatacatacattacatacaaacataatgagcctcactgggatgtaatcaaatggtcaacagtgctgcattccttttgaagcggctatgttgtctggggtatatacctggggttcgtagtcttgcaccaggaaaacttaggacacagacacacatgaagagtttaggggtggaggcttaataggcagaagaaaagagaaagaaaaacagctctctctatagagaggggtc

SEQ ID NO: 955246 - DNA, 656 bp, Homo sapiens
gagatgccttatatgaaacatgagtttgatggaggttagttttctcttacgcttttctctcctgtggataacaccttttgaaagaggggagaaaacagtcttttgctgcatttcttgggcctcatcccaaaagtctaattactttcttttgtcaatgatttattaattttgctattctcttggcttgcttgataaagcagaagaaaatgatctgaaaacgcagcccaaaggatttagggaaaggcataatttcattagaatctggaatgatcagtgataagattctgtttctcaatgtcctttgaaaacctctgtggggtatttgatgtcaaatgcatccagaaggcaggagcatggatttggagctttcctaatccccattcccaacaaatcctgtcaattttaatagcctttgaattactttatgcctcagtttccccatctgtatcaggaagatgcttgttcctcaaacaggtggtaaggcttgtgcaacaagtctgtgcagcttgcaagtaaggtgtggtgccagctccaagtgttctagttcgctcttctcacccattacagcatttgaacatctttctttactgtacakgagtttggccgtgagtcctggctttttctagtcccacagaagccaggtctagagctcttag

SEQ ID NO: 955247 - DNA, 625 bp, Homo sapiens
ccctctgcgcctggcaaccagcacagggcacttaggtgagccgagggtgtagacmcttcaggctgtcagtgcagaccagcaggtccagaggcctcctcttcccgtctctcaggctgcacacctttacgggaaatcaggccgacgctgtcccgccccacgaacttcaggctcctctctctggagacaggtccatgcctgtccaggctgggataccttggcaccaggcaggccctctgggtgcagggttctttcactcctcagcgtccaccctgctttcccacaaaccacaggccggtgggtccctggcctgggttccggcatggaagggagtgagaggagggtgcagcccctgagggaagagggtcctgagccgggctcaccagccttcctcaagcacatgggagcctccagggctcacaataaatagtggcagcatggggagcatcctctggcctctctcattcagtcaagggtctgcgggttgagacagaggggccccagcctggctgctctggtccagtcctggcaggcaggagctctggtggagggcagaccacattccaggaggatggccagggaggggtggtggtggacgccccataatgtctcctcccacggagagact

SEQ ID NO: 955248 - DNA, 741 bp, Homo sapiens
gtcctcatttttgcaactggtcacgtggtcgtagctggtattaatgactaccttcttctactacccattttatatctcttttgccttcagcaagcacctcagcaggtcattgttttttacctggtgaagtgacccaaaccttcattcctgaatggtctaggccatttgtagtcctgtctgaattgggctgttgtagtttcccattgaccttaatcacagggcatgataatcctaagagattccctaagggatctcacatgcatactcttccttacctccattgtggagtagtagactgatttcatcttgatagtctggctcaatcaccccagcccacactgtaactcccttcttagcctgttgactcagatgtagaaggagcccaaagtgtccaggtgacaatcttaacttccaatttaatggaatcattgttgtgtctcctggtggcagcattcctctctctgtaactaagacctccaggccagcagaatgtaatgtcatgggaacaggaagcaaaaattttgctagtgggtcactaggggtgatggtgagtggtgccacttccacttccaccccgtgattcctggacctatcaatcctggctgtgggagaaacagtactatatagtggatgctgattcagagcatacacrgccttctggagaactttgccccagccctgcaaagtatagttacctagttggcattgtaattattacttcaggatgccattccaccgttc

SEQ ID NO: 955249 - DNA, 732 bp, Homo sapiens
cctgacctccatatgcctctactttaactggaggaccacaatgacattttgggtcccctggaatcaacgtcagctcagagccagtgtccagtagtccccaaaatatctgataatttccctttccccagtgcacagttactctgttaaaagcccagaggtctccttggggaaggatgggagaaagatttactgcataaattgtcagtaatgtagtgaggtccttcctcaaggggacctggcctccccttcattcaagtggctttgggtttgtaaactcactcaagtctggaaattgattgaggggccatgattctgtttttataattcaaattagtcttttgtccatttgagctagaagtcttctgcttgtataaattaagtaggaatgcagtaggtttcctattaatttcacttctaggaacacagtgattaattaaccagtgccagagctctatacaagtcagactattctgattgccactttgcctctgctgtccattatggcagtagctatgcccaccttgcctttgacagttgagtgccaccacttggcccctcccacctcaggatccaattattcccattgtatttaaattttgtagttgastgactgtggtttccactgttagatctgacatacagagaagagcaattacagggctcttcaaagatgcaggtgctgccctcacaaatctgttttgcaaggcattggtcaagggtgtatcttctgga

SEQ ID NO: 955250 - DNA, 597 bp, Homo sapiens
tgggagtaatgaatatgctacttattagaagggaagaagaaggagaaaggatttgggatgaatcagtggaagggtttgaattacaggttagtatgtttagatagcttgttgcaatagggcatgactaaagttaccaaacagaaaaacaggtgaacaaagcagcaacctgagatgattaatctggctacagtatgcaaactggattgttgtaaaggggttggggaagataccaagagtagataagggtggaggacagattgggagggggtcaagggagacttctagaatgtgaaaaattatctacgtcttgatctggtggctgggcttaagcatatacatacacagaatgtcaacaaactgagcatttaatatttgcttactttactgaatgttttacttcaataccaaattactaataaaagaaaaacagtgcttatgaggatggaggctgggggcaatggagagtgattatctttccctcatctcttgtatctaatccatcagtaaacytaagtgattctacctccaaaacatatctttattctaactacttctttccatctctactactttcttcctagtccaagctaatgctat

SEQ ID NO: 955251 - DNA, 585 bp, Homo sapiens
ctgttattatcatcattctacagacaaccttttgaagaggagcagagattgccttaccactgactaaggagtgtcttcctcctacttagggttcggtaatgacgtgaaaagcatttttaaaaagasagtaaatggagcatatttggggtatgcattttactattgctggtgccgatatgtgctacagcaaaacctctgccaagagaggataaaaggagtcagctcatagtgggtggatactagaactagacagaggttcagattgacattgtttagggggatggggagatctaacaggaaaaggagatgactcagaaagaacttccccaacagtttaggatgccccctaatgatgggaacattctaagatatccgctagagaaaaagtccaggaaggtatggcatagatttctcattgctgcttcaacattcatttaccctttctttattagtaagagagctccaattttatttagggtggcaatgtgcctagctaaaataatgcatttcccagcttatcttgagattaaagtggccacttcactgagctatgaccagtgagaagtaaacaaaagctattagaat

SEQ ID NO: 955252 - DNA, 631 bp, Homo sapiens
atttactattactaaggtttactattctaagcctgcttcttcatcagtaagtamggataagtattatgtatgcatcataaggctgttgtacatattaaataaaataatgtcacaaagtccctataacagcacctcctaagtataaagtgctaagttaaaaagttatggggcagcaagtttatatctaatcttgaaagagttcgcatgatctgacaaaggtcttattgatcctttctggctctatctgtactctgttgtcactcatcttcacagcactaaaaacatcttccagaccccttcctgcaacatttgaatgtgctcatcacacattgtgagcttttttgttaaagtggaagaaacaacaatatgaacaagtcagtatccacccttgggtcattacgccccccaaactgtatgaatagtgtattaccctcattataatgctgtaaagcatagttttgttatttaaagtgatttaaagtttgatatggcttagagaatttttgagaattacatgatattccttgagataattgaaaatactccaggtgtcacaaaataggaaagggaattactaacaggagcttaggcaaagtgctaataagcagggaagagaaagtgggctgagtgc

SEQ ID NO: 955253 - DNA, 513 bp, Homo sapiens
ctgttctttctcctttctatcctttggagacaccatttacacatatatgaatacatttgatgttgtcctagctcaatgatgcttcttttattttgattcttttttctctttcaaggtttttttcaagtagtttctattgttatatctttaagtttactaattatttattcttcaatggctggcattaatctgacattgattcaattctgtgtatttttcatctcagacattacaattttcatcactaggagcttgatttgtatttttacattattcatgtctctacttctcaaatatatggaagatgttttaatgtttttttaatgatcttgtctgctaattctaatatcaatatcacatctgagtcagtttcaatcaggtgagattccccattatgggttatattttcctgtttctgtgtatgccctttgaytgggtatcagatattgtgaattctgccttgttgagtcctggaaatttttgtatacatataaatactcctaagttgtgttc

SEQ ID NO: 955254 - DNA, 565 bp, Homo sapiens
caagtgtttgggagttcctccttcccttctctctctcctgctgccttgtgaagaaggttcttacttcccctttgccttctgccatgattgtaagtttcctgaggcttccccagccatgtataactgtgagtcaattaaacctctttctttataaattactcagtctcaggtatttctttataacagtgtgaaaatggactaatacaccctgtctctacataaaatttaaaaatcaaccagatgtggtggcttgtgcatgtagtcccagctacttgggaggctgagacgggaggattgcttgagcataggaggttgaggctgcagtgagccatgatcacaccactacactccaacctgggtgacacagtaagaccctgtctcaaaataaataaataaataaataaaggtcgggcacagtggctcacgcctgtaatcccagcactttgggcggccaacgcgggtggatcatgaggtcaggagattgagaccatcctggctaacacggtracaacccatctctactaaaaatacaaaaaaattagccagacgtggtcgcgggcacctg

SEQ ID NO: 955255 - DNA, 620 bp, Homo sapiens
agcaagactcttctgggtagtcgactcaaagtcccacaaatsatgaggttttccagtctagttggtgttaacaggcagcatacccaccagtgggctctgttctctctaatccttgggtgagtctttctatagacttgagtcatcttctcccaagcatgtgccagtcacttctcagctgaatactcaagggggccacctgcaaatctccagagccctctctgtctctatgtagctctcttccgtggtccccagtcttgcaaactcttgctgccttggtctcccaagactcagctaagcctccttagctgaggccatcctctgtgctccgtctgtgccacagtaggcaatgggaggtggtcagatggggcgatcttggggcttgcttcttttgtttcccatctctcaggggggtcactgatcttcattgcctgatgtccaaacatgtcttggccacttttatttggtccctttaaaaaatttgaaccaacacattggctcccctgggtccttgttgacacattctgctgatcttaggacttggcctccataatcccgtgagccaattccttataataaatctctttctacataagtatatattgatatatgcatcatattgg

SEQ ID NO: 955256 - DNA, 555 bp, Homo sapiens
caggtccttcccctccttgcgggtcccctcccctgcctcctgcccctgctgggaaggctgccctgtgcagtggtgctgagtctgggtggggtgaaatgatggaagcccccaccctctgctgctgctggaggcccagggtgggatcttcatctgtctgaaattcaggtccatgctggacaaacaccttagagggtcccttagttcagagctgcctccctgtttattctcctgcagtgactgaggagcttggggccgtgacagggcatttgcctggtggtcctggctaagccgcgttcctttccccaggagagggtggcggggactgtgttggggtgggagagggagcactgtgacccccgtgtggccagccctgcccactccctgtgcagtcttcagctcatctgatcacagggcttcaagggatgagggccacagctctgcaaattgtcagagaggtgggtaataaggagaaggttacattccttygacactgcttgcttgaatgggagatgggaacctaagattctgaaaataaacaggttaaagaaaccaaac

SEQ ID NO: 955257 - DNA, 606 bp, Homo sapiens
acaatttcctagggccaactaactctcaggtacagaacattacgatgacttccaagtaacccatccctctgggggcctctgggcttccgaagagtgatgaggaggaagaagtgcaragccctgcagacagcctgtgctctgttcctaataactgcccatctccacattcccaatcaagcagcccctggggaatgtcttcagagctgctctaggtgggggtcccatcaaagcagcaccacttggaccatagtgttggaacccccagacaaacatcacccctccgggcctttacccaggtcatctgtaaggggacatagccctcttatcagggtcctggaccagaatccctagacatggcctgaccctctcagttccgttcccccccttttcctccttctccagcctgcctactaccctgattcctgtcccactatggcctgggctttctccagcacccagagactggggtacatggcttttccctgtggctctcaaaccagttgatggttttcagatctccgtggccatcgtgtccatggcaacagcagctttcagctctcccacctcagtggttctttctgataatggtttccaaaaggtacaaag

SEQ ID NO: 955258 - DNA, 519 bp, Homo sapiens
gcaggcttcacccttactctacaaggcaggaacttttttttttctttttttgagacagagtctcactctgtcacccaggatggagtgcaatggcacgatctcggttcactgcaacctctgcctctcccgggktcaagcgatcctcctgcctcagcctcccgagtagctgggaatacagatgtgcaccaccgcacccggctaatttttcatattttcagtagagacagggtttcaccatgttggccaggccggtctcaaactcctgacctcaagtgatccgcctgccttggcctcccaaagtgctgggattacaggcatgagccactgcacctggccggcaggaactatgatatacccagttgacagatgaggaaatcaaggcatgggggaaaggtagcaagtcacctgtggccccgtggctcataattggcagagccaagaccccagcctgagcagaatccagaccctgggccctggctcttgctattctctctgtaaaccaccattttgggtgccctg

SEQ ID NO: 955259 - DNA, 723 bp, Homo sapiens
tgtcagaagtggctgcacagtgagagtttagctgggccttccaccagattcatctgaattttctaggaktctgccatgtgccaagcactgtgctaagtgctggagatatagcagtgagcaagatgggcatgatccttgccctgtcaggcttctgttctagggaggaacccaaccaatacccagtaaatagataaagtaattgcaattttaagtttccagtaaaaggaaacaagggccaagacagagacattcacagtcattggggaagtcttcttggggaggatgccatcaaagccaggaactaaataatcaagaagagctagtcaggtatgtgtggagggtaacagcacgtcaatcaagaggaccgcatgtgcccaggtgaggggtagcttttggggaggtggaagtagaccagtatggctaacacagggatggggtccagaggagcccaaaaggagatgtctgaaaggaggcaggcatgcagacctgcaggggcacaagccacatagagccttgtacaaatttgtgttttcctctaatgagatggaaagccacggaagagctttaagtacgagatgaaacagtggttggtgttttaagaagcatcactgttgatgctgggcagagaatggactgaaaggaggcaagagtgagagcgagaggccagttaaaagcaggcggggggaaagggaagctgtcagacaggggcagtcctcatgcttg

SEQ ID NO: 955260 - DNA, 701 bp, Homo sapiens
ccagaaatccaagccaggtcaaaaccaaaaccgaagtatcaggcaatctaagtcaagtcaaaaacaaaaaccaaagtgccggtacaggcacactgtgggtgatcaggccacgcttccactcaaatggagtaggcaagttcccaagaccagtcctgtcaagcaatttaaaccaagtcaaaaccaaatccaaagtgccaataaaggcacgctgtgggtgatcaggccacgcttctactcagatggaatgggcaagttcccaagactagtcctgtcaagcaattcaaaccaagtcaaaaccaaaaccaaactgctaataaaggcacgccgtggttccactcaaatggagtgggcaagttccaaagactagtcttaccaagtttcagatgtccggactccaagtgccagttccttcccggtgttcagccactgtgttaatcctccgcgggggcctgctacgcattgctctggcaaggcgttccaccggggcaattgcctaccccgaagcgctctttggatcatgtcactcaggctggccgaagtctcccgcagagacgctgcacagcgcaggcttaagccgcctaaggggctgccttggcagtctgtcagtcacctcgcttcccagtcagggaaccaagaaaggtagcaggatgagtcrcaaacaaaacctctcagacacggagttgtagaaggaagggctttat

SEQ ID NO: 955261 - DNA, 745 bp, Homo sapiens
taccctctccaagcctgttatctgtaaaatgagaataacagtagcttgtttcctctccaggttgaggtaagaattaatgtatgttggccggatgtggtggctcatgcttgtaatcccagctctttgggatgccraggtgggtggatcgctcaaggtcaggagttcgagaccagcctggtcaacatggcgaaaccccatctctactaaaaatacaaaaattagctgggtgtggtggtgcatgcctgtagtcccagctactcaggaggctgaggcaggagaatcgcttgaacttgggaggtggaagttgcagtgaaccgagatcgtgcgactgcactccagcctgggtgacagaataagactccatctcaaaaaaaaagaacaaaaaaagaattaatataatgtatgtatgttaagtaaacctttaagaaaaggtttttgttatttttatgtaaaaatgctttgttattagaagtgctatgcaaatttattattattaaaagcaatggttcccatgaactgtatcttcttggtctttagaattgtcttctgcttgaaagtgctttggaagtgattaaaaagatgagattgttggtttagtgctcaccaactgaggatcaacactgccaggatgccagtctggtttgacttgcttcctctggccctggcgctggctgagtgctggctaggggagaggccctggatgaaagatgtcctggcagcaggaacattaacactcactcttgag

SEQ ID NO: 955262 - DNA, 629 bp, Homo sapiens
aggtctaaattgactaatccactccaccatcccaatttccctaagcctttggatcccttcctctacattaatccaagggagatcaggcatttccagctcattcacagtgggccctcttttaatgcatctttcagctaaccaagcaaatgaaccattagaaccctttttaactcttcgagatgcaacattaaatgcagagtccctacttagtgggcccaaatcaataaattcagcctgattcaactctactttccttccaccattatcccacccctaatatccattcccatgcctgttctccagatttctgtttacataaactagaaaactcaagcagttctttttgagtatagcacacctcctcatgggtcacactctcaacctcaccctataggggcctgctgggactttagtctagttataggtctagaagcaaactcgggtgttgagggtggctcctgaggagaatcaactttatcttgcctggcaactgcctcaggggaggccatcactgytgccttaggcagtgcagggttcgtttccttagacaaaggtggaaaggctgatggcagcctgggtcagggaggggatgttgccactactgggaatggggaagctgtttcttctgg

SEQ ID NO: 955263 - DNA, 746 bp, Homo sapiens
taataaaatagcctgtggtttgtggggtggcaaactcctgtaattccagcactttgggaggccaaggctggttagatggcttgaggcaaggagtttgaaccagcctggtcaacatggtgaaaccccgtctctaataaatatacaaaaattagccaggtgtggtggcacacacctgtaattccagctacaccagaggctgaggcagaaaaatcgcttgaacctgagacgcagacgtttcagtaagctgtgatcacgccactgtactccagcctgggtgacaaagcaagactctgcttcaaaaaaacaaacaaacaaaaaacattaacaatgataataaaataggataattagaacaatattatatttaaaagttatgtaactatagtctgtctctttctcaaaatatcttattattacacacgcaaatttaatacctttccacttaactaagcacttgtcatatactgtggccacaacttaacttttgtagtttgagttgtgacagcaaagctagcaagaatttatttttccttcttcacaatttttgagatagaagattcatgcatactgtagatcttagcaaccacgccatacatttttttctttgcttattaggtaatgaactttcaccttttcaattgaaggaagcattttatggcttatctttggcatatcagaattgccagcatcactactcttrcattttggggccattattaagtaaaacaagggttacttgaatacaa

SEQ ID NO: 955264 - DNA, 581 bp, Homo sapiens
gatattattggctaaagaattaaattgtgattgctaatttttgtgattttttgcataaatatatatgtttatgttttatagtcattcattacctgtggtcaataagcagtaaaaagtgttgtcctacaaggtcaaacaacattaagaaaattcattttttaaccatataatgtaagttaatttgtaaaaacaagtaatatgttcaaaaaagtatttttaataatggttattaatatagtagctagtaaattaggcacaaatgcaacatgaaatgtataccctccctctactatgtgtaccaaccacatttaacaacaaaaagaagaaagaggtttcttgatatatatatatatatatatatatttttttttttttaagaacaaatgtcagaagagagagaatttctctccttttttcaaaaagcaggtaatgtgagtttgactaggcaagrtggagttttccttgatttgaatgatgctacagaattatcaataaatattgaaggcagctccaaatgaaacctaagcccaacttacggaattgcatacatatctagaatgacagtggcaactggactgaaa

SEQ ID NO: 955265 - DNA, 589 bp, Homo sapiens
actaaaaactaagacacaaaccttcacattaacgtaggactatacggtatcaaggtcactaataccactgtcttccaccttcacatcttgtcccactggaaggtcttcaggggtaataacatgcttggagcygtcatctcctatgatagcaatgtcttcttttggatacctcctgaagaatctgcctgaggctgttttatagttaacttttttttgtaagtagacggagtacactctaaaataattatgagaaatatagtataagaaatgcctaaaccagtaacttagtcatttattatcattctcaaatattatgtactatgcatatatcaaatactgtgtgggccaagggttggacaagcttgctttacaccatcatcaccacaaacatgtgagtaacatgttgcgatgatagctacaatgtcagtaggtgataggaatttttttcagctctattataatcttagggtaccacttacatatatgtgttctgcctttgactgaaaatgtcagtggcacatgactatattgttattctgtgatcacttagtgaatctgtatactttgttgggagcacaagtcccatcac

SEQ ID NO: 955266 - DNA, 432 bp, Homo sapiens
agatgagatttgggtggcgacacacagccaaacyatgtcaatgatcatgtcatctgcagagagaaacaatttaactttcccgatttggaatgacttttttttttatcttaataaagatgtcttaattgctccgatgaggattttcagtaagatgttgaaaagaagtgacaagagtggacattcttgccttgttcttgatcttagaagaaaagttttcaatttttcatcattgagtatgatagctgtaggtttgtcatatatgagcttcattgtgttgaggtacatttattctatacctaatttgttgagaccttttatcatgaaagaatgttaaattttgtctaatgctttccatattaagatgattatatggtgtttcttcttcattctgctaaagtggtttttcgcatttatagatttacttatgttgaa

SEQ ID NO: 955267 - DNA, 671 bp, Homo sapiens
gtaggtgggagaagaggccacatagtatctccctgggcctcctggtgaaaaacttgtgtgtgatttttcaggcctgaccacaaacttggggaaagctgacccctaccccagacttggggcacagcccatgcgtggcagtctctggagggagctctcaaggtctcaggtctctctggctggtcgtagtcatcacatatttgcattcctagcccctgagccttcattcctgggtttatcagaagccttggggagaggtgttctttaggcgcctctgctgaggccttctttgggtggggcagggaagggagagaaatcttgaagccgcttttccccacaatgactcagaatctagtacttccactcctagccttccccctcccttgctctcggccccagagtccataaaacttccagagccttttgttcagggctctgtcagcagtgagaccaccccaacccgacattcctgctgatctacttgaccctgggcccctgtgtgttccatgggggaaatggaacagggagagtccacgctttctctggtttcagatacttgcttataccattgcaggacatgaytgaaagcttgactcttttgttttgggcttgttgccttaattgactattgtgacacctggcagctcagcgctccctctcccagttcaactgag

SEQ ID NO: 955268 - DNA, 639 bp, Homo sapiens
caagacctgcctggccaatatagtgagaccccatctctactaaaaataacaaaaattagccgggggtggtggtgagcacctgtaatcccagctactcaggaggctgaagcaggaaaatggcttgaacccaggaggtggaggttgcagtgagccgagatcgcaccactgcactccagtctgggcaacagagcgagactctctcaagaaaaaaaaacccaataaacaaaatgggcctctgagagtaaaatgggtcatgaagggggattatgggagcaaactgggacttttctgggcaaatgatgacatggggtctgacctacctctgcaacaggtaagttaatctaagctcattcaaagttaaaacaattttttaaataattcttccatttaaaatgtgttgttaattgaacccttcttatcttgaactctgatgagtttttatcttgagaattaattcttgcaaagtaaagtatcttgagcttctctggtaagtttttgattctagagttatatcttaaaacacaaagtataacacaggtcactttccctggatgatatatcaagtgagatactgtgaaaatactctkcatggtaagccctcgactctacctctttctttttatgaaaacagaatacatg

SEQ ID NO: 955269 - DNA, 556 bp, Homo sapiens
aagtcacaattacaatgccaactaggtgacaatactttgcagggmtggggaaaacttctccaaaggtcgtatatgctctgaatcagcgtccaatatatggtactgtttcttccataaccaggattcatgggtgcaaaaatcaaggggtggaagtggaagtggcaccactcaccatcacccctagtgatccactagcaaaatttttgcttcctgttcccgcgatattatgctctgctggcctagaggtcttagttccagaaggaggaacgctgccaccagcgttatatactgatttgtgggatgcagccagtggtttggctggatgatcaggaagacaatccgggagacaacgggagacaaaacaatgattccattaaactgcaagttaagatagccacctgaacactttgggctccacctacctctaagtcagcaggctaagaagggagctacagtgttggctgggattgactgaaccggactatcaagatgaaatcagtccacaatggaggtaaggaagagtatgcatggaatacaggagatccactagggtgtc

SEQ ID NO: 955270 - DNA, 629 bp, Homo sapiens; identical to SEQ ID NO: 948708

SEQ ID NO: 955271 - DNA, 629 bp, Homo sapiens; identical to SEQ ID NO: 948709

SEQ ID NO: 955272 - DNA, 498 bp, Homo sapiens
ggagatagcactactgcactccagcctgggtgacagagtgggaccctgtctcaaaaaaaaattatggcagaggcaaagggagagcagcacttcagatgtctggagacagatatggagmaagagaaagagggggaggtgtcatacacctttaaacaaccagatacaacaccaccaaggggcatgatgatgctaaaccattcatgagacccacccccgtgatccagtcacctcccaccaggccccgcctcgagcactgagaattacacttcaacatgagatttgtgcagggacacagatccaaaccatatcacagtgttcttaggggagaggtagaggaatgccttgagagcttgttgcaaagaatctaaccagctcgctaaaaatacagaccaggcacctcccagccctttctctagcctaccctcttcatctaggttgacaatccaagaggaaatcctgagtccccagggattttcgtggctgtgcaagagtaaggct

SEQ ID NO: 955273 - DNA, 821 bp, Homo sapiens
tttttttctgattcaattttgctgcttgttattrgtctgctcagggtttctatttcttcttgattaatttagaagggttatgtttttaggaattttttcatttcctctagactttctactttgtgtgcatagaggtatttttagtagtcccaaattaccttttgtatttctgtggtgtcaggtgtaatgtctccagtttcatttctaattgactttatttgaatctacttcttttcttagttaatctagctaatagcctatcaattttgtttatcttttcaaagaaccagctttttgtttcattggtatttggtattttttgttgttattgtttcaatttcatttagttctgctctgatctttgttatctcttttcttctgctagctttggatttagtttgttcttttttctctagtcccttgaggcatgacattaggttatcaatgtgtgatctttaagactttttgatgtaggcatttagtgcttaactttcctcttagcactgctttcgctgtatcccagaggttttgataacttgtgtcactattttcattcatttcaagggatttttaaatgtccacctggatttcattattaacccccaaaacattcaggagcagatcatttaatttccatgtatttgtatgcttttgagagatcctttggtagttggtttctagtttattccactgtggtctgaaaagatacttgatatgatttcgacatttttaaatttactgagacttgttttgtggcctgtcacgtggtctgtcttggagaatgtcctatgtgctgatgagaagaatatatgctctgtagt

SEQ ID NO: 955274 - DNA, 712 bp, Homo sapiens
aggagtattttgaagtagtaagagaaaattcttttgaatcctttagaattatgtcaaaagaaggactgttttatgttcaagtgaacataaattctcagttcttattttgtttcttgtttctttatgactctaacatactaagatctccttgctctgaacttagagtacttattgtcaattgttaaattaacgacattgtttttattatcaccttatctttttatttgttgcagatctgtttaagcagactgtagatgtattgacattaaagaactcagtttcctcatattctcatgtagcttatcgaatgccatgtgtatataatgagtactcaaatatttgttaaaagatttatttactgcctgtaaaatgtgatttgctgctacaaggtatttaacagatattcaaaattaggaagctatggatctacgtttagcagagagagaaaaggaaagaactgatgaaaaatagtaattagtgactcatcttagtattccttttaaatttgttcacttattgcagtctgttaaaaaaaaaaaatctttttactggccgggcacagtggctcacgcctgtaatcccagcactttgggaggccgaggtgggcagatcacgaggtcaggagattgagaccatcctggctaacrcggtgaaaccccgtctctactaaaaataaaaaaaaattagctgtgcgtggtggcgggtgcctgta

SEQ ID NO: 955275 - DNA, 855 bp, Homo sapiens
ttgggaagttttggtttatgacattgtkacgtttttattttgtgccattttttcttaatgggggagaaaacaaatacttcttggctccctataatagcacaggcattataacaagtactttctgagccttctgtcctttattccttgcaaccatccttattgtacccattttactcacaaggaaaccaagtcataaggccaataaacagcaaaaacacggctgaagtccagatccaactccaggcctgcatccttacctctgtgtggcattgcagcttctagggttgttatcttcgggcctttggcccccgcctttttttttttggagagagtgtaacgttctgttacccaggctggagtgcagtggcaccatctcagctcactgcaacctctgcctcctgggttcaagtgattctcgtgcctcagcctctccagttgtgtccagggttagttcctgccagtgggttcgtggagggttcctggcctcgctgacttcaaaatggagccacggaccttcccggtgagtgttacagtgcttaaagatggcacggaaccaaagagccagctggagcaagatttattgtaaagagcaaaagaacaaacgtcacacagcggagaaagggacctgagcgggttgtcactgctggctggggtggccagcttttattcctttatttgtcccctcccatgtcctgtttctgtcctatcagaatgcccttttcccaatcccccacgagtggttacttttagagtcccactgattggtccattttacagagtgctgattggtccattttacagagtgctgtttgggccattttaaagagtgctgattggtgcattttacagaccgct

SEQ ID NO: 955276 - DNA, 801 bp, Homo sapiens
tgttgttgtttctttcttcgtttttaacattttttggtttagtactttataatgcatattttgaattaaaaaatgaattacagagtggctatgtcagargaactgagggtctttggacttttttttttttttaataattgcagactcaactgtgaaattgctgcttacatttccttcagaaataatgaactcctgtgacagtgactttgaatgtgtctttaacacacttgacttaatgagatcccttttctggaggatataaaatgttccccagagatgtaatgtcaccactaggggataatctaatgtcctaaaagggctaattatttcccctaaaacattacaacaaactcattactgtaaggacaaccctatgaactctttaaaagatgatgaaaatgacagcaccgagaagggagatggtcctactctttggggtaataaacgacattcagagttagaatcctttgacaatcaaatattttttaaaacttttttaaaattatactttaagttctaggatacatgtgcagaatgtgcaggtttgttacataggtatacatgtgccatgatggtgtgctgcacccatcaacccatcatctcggttttaagccctgaatgcattaggtatttcttctaatgctgtccctccccttgctccccaccccctgacaagccccagtgtgtgatgttcccctccctgggtccacgtattctcattgttcaactcccacttatgagtgaaaacatgcggtgtttggttttctgttcctgtgttagtttgctaagaatgatggttgc

SEQ ID NO: 955277 - DNA, 613 bp, Homo sapiens
actaatcgttacctcctcctccttgctcttgttacccaataaataagaagggctatagaagctcaaggggggctgcctttgctcactagaagcagggagygctcttcttgtccatgctagcctttcctttaaactgtttcttttgcctctttgttatcatttctgtgtttgtccctttgttcagtcataatgacgttctctagcagtaacagtagtaactgctgtaatgatggtctcaagcagtaaccatggcagttagccacaagtggtgcccaaacagggatgaatagggacagacagggacagatagggataaagactagcaaagactagcaatataaggtcagtgccctaaagaggtacaaaagtagagactagcagagactagcaatactagcagaaacttgaagggactatcagggacagagacctgaagggacctgaagaggcctgcagggacaataagaaataagtagagataagtagagataaatagagataaggaagtacagataggtaggagcagacagggacttgcagtaactatcaggtaccatggggacagatcaagaaaaccatacaggaagctgagaaactgctggagcaccggggt

SEQ ID NO: 955278 - DNA, 587 bp, Homo sapiens
gcgcgagccgcgggatgggggcccgggccgcggaggaggcgccgctgstgtgtcccttggtggagagggcgctgccggccctgcgcggtttccagccaggaagcttcgggaagcctggtgagagctgagtgcgcgaattcggatcttagagaaaggcaccccgttcacccacgacccttccgctcctgccgctgcttccctgagtcgctcaggctgtgggaagatgtttgtcggcatctttgaaaaattgatttcttatgctgcgtcaggtggtttccttgtcactgtggctgctcagcgggaggctgttctggcgggaggaggactgctcggttgtctggtgggcattccgcctcgtggtcctggtcccttgatacctgcaggggatcagcagcccgcgtttcgtggccactgtgttgtaactccaacttcccctcccgcaaattaagcgtagagtaaggggagagagtaacatgggtcggatttttctagaacggcccttgtgacagtgagctttttggtggcagggagcttctttggtccgccttcctggagaccagatgcagcaaaacgcagtctttttcttt

SEQ ID NO: 955279 - DNA, 755 bp, Homo sapiens
acatttcttttactcaaataagatctcacatgactgtttataatcaaacattcccctttccatctgattaaagagcttctgcacagcaaaagaaactactgttctgtaaacagacaacctacagaaatgggaggaaatattctcaaactatgcaactgacaaaggtgtaatatcaagcatctataaagaacttaaatcaacaagcaaaaaacaaccccattaaagggtgggcaaaggacataaacagacacttctcaaaagaagacatacaggcagacaacaaacacatgaagaaatgctcaatatcactaatcatcagagaaatatgaatcaaagccacaatgagataccacctcatgccagtcagaatggctactattaaaaagtcaaacaacaacaacaacaacagatgccggtgagactgtggagaaaaagaaatgtttatatactgttggtgggaatgtaaactagttcagccactgtggaaagcagtttggagatatttcaaagaactaaaactagaactacctctcaaccagcaatccattactgggtatatatccaaaggaaaagaaattgttctaccaaaaagacaagtgtacttgcatgttcatcacagtactagtcacaatagcaaagacatggattcaacctaggtgcccatcaacagtggactggataaagaaaatgtagtgcaatatatatcatgamatactatgcagctataaaaaagaacaaaatcatgtccttggcag

SEQ ID NO: 955280 - DNA, 561 bp, Homo sapiens
aaggaaaataaaagaagtaaataaaattagagaaacagttcagtatgtccaacatgtgaataatgtaggggaaacattaggaaaaaatggaataaaccttaaaaaaataaattcagaaaaatatattgtagaactagcagatatgaactagccagaatgagttatgtcaacaagaaatgttagaataccaagggcaaagagaagagactggaatctttcagagagaaaaataaataagcaaaggattagaaatccttagacttcacaacaacaatatcggaagccagacagcagttgaatgatgtcttcaaattgttaacggaaaattatttccaactttatattctatacccagagaaatcaagtgtgtgaagagaattaaaatgttttcacatgatcaagatgtcaaaaaatttacttcttatctacacttttcaagaaaacgcctcaagtaagtgctccaccgtaactaggagtaaacaaakgaagaggaaattatggacttagaaaatagggtcttcgacacaagagacagatgtggcatattgcctggaggaggct

SEQ ID NO: 955281 - DNA, 647 bp, Homo sapiens
gagccttgtgaccttggtcaagtcaccaaaactctgagccccagctttctcctccaggcagtaaacggaggagttaagagtgggcttggagccagcctgtgctctctgagaactgggacarccagtgctcctctgggcctctgtcccctccccgtccctcttggggcaggaggactaagtgcaggcttcccccagggccaaggctccttgaagccctcagtagtaacctgggcttctagaaaggtggttgctcgtgcctggtgctaagtttcagatccggctctgacgcttctagctgtcatttggagtaagtttctgaacgtctgagtgcctctgtttccttatttgtaaaatggggacaacaagacccactccctagggctgctgtgaggattctgtgaggtgcctcgtgcacagccctcggtgtggtaagcgctcgattcccgcccccactgtgctcactctctccttcctgctcctggcactgccgggcaatgggcaaggcaaggatcactgccccattttgcagatgaagaaacttaggctgagaaaaggaaggggcttggccgaggtcacactgcctttggtgatgggcagccatccagaatcagctccactctgcccacccccgccccctggaccctctg

SEQ ID NO: 955282 - DNA, 647 bp, Homo sapiens
gagccttgtgaccttggtcaagtcaccaaaactctgagccccagctttctcctccaggcagtaaacggaggagttaagagtgggcttggagccagcctgtgctctctgagaactgggacaaccagtgctsctctgggcctctgtcccctccccgtccctcttggggcaggaggactaagtgcaggcttcccccagggccaaggctccttgaagccctcagtagtaacctgggcttctagaaaggtggttgctcgtgcctggtgctaagtttcagatccggctctgacgcttctagctgtcatttggagtaagtttctgaacgtctgagtgcctctgtttccttatttgtaaaatggggacaacaagacccactccctagggctgctgtgaggattctgtgaggtgcctcgtgcacagccctcggtgtggtaagcgctcgattcccgcccccactgtgctcactctctccttcctgctcctggcactgccgggcaatgggcaaggcaaggatcactgccccattttgcagatgaagaaacttaggctgagaaaaggaaggggcttggccgaggtcacactgcctttggtgatgggcagccatccagaatcagctccactctgcccacccccgccccctggaccctctg

SEQ ID NO: 955283 - DNA, 646 bp, Homo sapiens
cccaggctggagtgcagtggtgtgatctgggctcactacaacctccgcctcctgggttcaagtgattctcctgcctcagccttccaagtagctgagattacaggcacctgccaccacacccagctaatttttgtatctttagtagagatggggtttcaccatgttggccaggctggtctcaaactactaacctcaagtgatctgcccacctcagcctcccaaagtgctgggattacagatgtgagccactgtgcctggcctcagtattgagtcttctaataccataaaactaccactcagatcaaagactagaacattgcccgtacttcctgaaggcctcctgtgccacttcccaatcattacttcctctctcctccccaaagataaccactatcctgacttctagaaaaataggttagctttttccttttttatttttgaactttataaaaattgaattctttattcttttttctctcatgtctgatttattttgctcagtattatctttatgagattcatatatgtctttgaatttagatataatgcattctttttcattrcttcatagaatataaacgtatgaatatactagagtttatttatccagttgactattgatggacatgtgggttatttccagttt

SEQ ID NO: 955284 - DNA, 626 bp, Homo sapiens
gatcttggacatcgaagccttcagaactgtgagaaataaatttcaattgtttaagctaccaagtctgtggtattttgtcatggaagacagagtgaattaatatatttatcttcaatgtttagaagagtttaagaaggattagtgtaaaatcttttaaaactctttggtgaccagtgaagccttctgatccaggacttctccttgttgggaagttgttttaaaattatttacttaatattcttagtagttataggtctaatcagattttctatttcttcatgattcagtctttgtaaaaattgtgtctacttcatctatgttatccaatttgtttgtagtagtctcttctattcatttctgaaaaattggttgtagtgtcctcattttcatttccaattttagtaatttgagcactctgtctttttttccataaccactctaactaaatttgccaatttcgttgatccttttaagtaatcaactttttggttcattaattttctctrttttatctctggtctaatctttattattttctttattttgatagctttgggttcatagtagtggcactttcccacttgagatctgaattaagtgaaatagagaccagttcttcatggact

SEQ ID NO: 955285 - DNA, 658 bp, Homo sapiens
aagacaggcggctaccctctgtggatgtgtgggtgcctatgcaactatagagagaagggattttttctaatgtttcatttctttgttgacagggtctcrctcggtcacccaagctggagtgcagtggtgcaatcgtagctcacagcaacctccaactcccaagtagctacaattacaggtgtgcaccaccatgtccagataatttctgtgtgtgtgtatgtatgtatatacttgtatgtatgtatatgtatgtgtgtgtatatatatatatatatatatatatatatatatatatatatatatacacatacacactcacatgtatatatacacatacatatttttaagtagagacaaggtttcaccatgttggccaggctgttcttgaactcctggcctcaagtgatctgctcgcctcagcctctcaaagtgcaaggattacagaagtgagccaccacacctggcctagcatttcttgtttttgaatccagagatagaactgttaaaatttacacaagattgggaatccctagaaatcatctagttcaccactagaggaagaaacagaggcctagagaggttaggagaccttcctgagattgtgcggcaggccttctatccgacgcctggaccgtgttctttcccccatacctgctac

SEQ ID NO: 955286 - DNA, 599 bp, Homo sapiens
agtgatctacagattgaatgcaatccccatcaaatcccaatgatatattttgcaaatagagaatctcatgctaaaatttatatggaatatcaaaaacccagaataactaaacaaccttgaaaaagaagaacaaagaggattcatagttcctgatttcaaaacttaatacaaagtgatagtaatcaaaacagtactgtactggcataaaacagacacagagaacaaaagaacagaatagagaccggaaacagacttttaaatatgtagtcaaatgatttttgacaaggttgctaagaccattcaatggggaaaggacagtcttgccaacaaatggttctgggaaaatggatatccatatgtgaacaaatgacttacactatatataaaaattaactcaaaatggatgaaagacctaaacctaagagctgaaagcataaaactcttaaaaaaaatcgcaggggaaaactttaatgacattgggtttggcaatgatttcttagatatgacactaaaatataggcaacaaatgaaaaaatmaagtggattccatcaaaatttaaatctttgacacatcataagacaccatcaagtgagtgaaa

SEQ ID NO: 955287 - DNA, 549 bp, Homo sapiens
ggcaggtgcccctctgggatgaagcttcccgaggaaggagcaggcagcaatctttgctgttctgcagcctcctctgttgatacccaggcaaacagggtctggaatgcacctccatcaaactctagcagacctgcagaagaggggcttgactattagaaggaaaactaacaaacagaaagcaatagcatcaatatcaacaaaaagcatgcccacataaaaactccatccaaaggtcaccaacatcaaagattaaaggtagataaatccacgaaggtaaggaggaaacagtgcaaaaaggctgaaaattccaaaaaccagaatgcctcttctcccccaaaggatcacaactcctcaccagtaaaggaacaaaactagacagagaatgagtttgacgaattgacagaagtaggcttcagaaggtgartaataacaaactcttccaagacaaaggagcatgttcctacccaattgcaaggaagctaagaaccttgataaaaggttacaggaactgctaactagaataaccagtttagagaagaatataaatga

SEQ ID NO: 955288 - DNA, 450 bp, Homo sapiens
aaaagaaaaaagaaaaacagctaagtagcatttagatgaaactatgactctgaagtagggggtgcggcaagtagagaggaaagaatgtatcataatgccttaaacaaaacttttgagtgagagaagactataaaacaccctttaagcacttattcactggactccatttgtgtttctaagaaataagatatacagactcacttcagaaggttttctcctacactgtatctgagacaccataaatagaaacatacattatgttgccactctatcacaagactgaacctggacacttgtaaggaaaggaacaaccataaagacagttggccaaggacaggattgacattcaccctgggggagctcctcgtagtagctacaasccaacccaaaacagcttctgggtttgtgatgctggtgctggctagtatgctgcataaatgttgtttgttt

SEQ ID NO: 955289 - DNA, 596 bp, Homo sapiens
ctcctcattcgccttccaccatggttgtgaagcctccccagccatgtggaactgtaaatcaattaaacctctttcctttgtaaattacccagtctcaggtatgtctttatgagcagcataaaaacagactaatacactgctcaaacaacttcctttagccactctataagagtagatctgctggcaacaaagttttaaaaatttccttaagttgagatatatttatttccccttcattcctgaaggttaaactaatataaaatttgtggttgacagggctggtttttcctgtttgtttgtttggtttgttttctttttattccagcacttgaaaaatgtggacttcttctggactccatggtttcagatgagaaatctgctgacattacattctatattcctctttgagttgtttctctctggctgctttcaagatttatttctttgtctttcaaaatgttcagaagtttgactatgttatctcttggtataaatttctttgcctgtaatgcctttgaatttcactaagtttcttgtagctgtaactctgtgtgtgtgtgtgtgtgtgtgtgtgtgygtatgtgtgtgttgtaacc

SEQ ID NO: 955290 - DNA, 734 bp, Homo sapiens
actagcctctgtaaaattctctgaaccaaaacaagaaggctccttctttggtatatgtgtctttkccattccctctgcctgaaagttctagtgttctagtccgtttgggctgttacgacaaaaataccatagaatgggtggcttataattaacagaaatgcatttcttatggttctagaggctaggaagtccaagatcaaggtgctggcacattcagtgtctggtgagggtcccctttctgtttcatagatggctctcttctcaccatgctctgttatggagaaggggcaaagggagctctctggtctctttcataagggcactaatttcattaatgagggctctgttcaccttcatgacctaatcgcctcctagacaccctccttcctaatgtcatacctttggcgataggatttcaactaagaattttagaggaatataaactgtcagtctatagcaccctgatagacaaaggacttgctctctcacctccttcagatctctgctcaaagctcaggtaccagtgaggctttccttgaccccctctcccactgcttacaacagcagctcctctttccccatgccccatcccagggcccattttccctcatagttttgtattcatgtttctctattgcagtattataccactgcctgctatatttttatttattccaccccaccccttgaatataaggccccaaagaatccatatttttcttttgttgcattca

SEQ ID NO: 955291 - DNA, 618 bp, Homo sapiens
gggttagcattaggagaaatacctaatgtaaatgatgagttgatgggtgcagcaaaccaacatggcacatgtatacctgtgtatcaaacctgcattgtgcacatgtactctagaacttaaattatttaaaaaaaaaaaaaaagaaataaaaaaccaagtcaatatatttattcacttatttttaatttttctttttttttttttttttttgaggcagaacctcactctgttgcccaggctggagtgcagtggtacgatctaggctcactgcaacctctgccttctgggttcaagtgattcttgtgcctcagcctcccaagtagctgggactacaggcatgcaccactatgcccagctatttttttgtatttttagtagagatgcggtttcaccatgttggccaggctggacttgaactcctgtactcaagtgatccgcccaccctggcctcccagaatgctaggattataggcgtgagccaccacaccyggtctcaagtcaatatctttaaaaagcaacttgagagaggcaaatatttcttcatctgtcacctttatttgtaaaagcagaaaactctctaagtcagtagactacaatctaatgattagaatatcgaaa

SEQ ID NO: 955292 - DNA, 606 bp, Homo sapiens
aggcactgtgcttccccagtactcaacaggctgatgggtcactgacagacgaggaggaacaacctgtcctagatatsattaaaggagattcttggcttgatggagagacaggctcccacaaaaagaaaaatgagaggatgttatggtcatgtattactaatagtttagaggagaaaatttgaaaatgtaaatgaaatggataaattactataaaaatacaaaatattaaaactgactcaagagaaaaattgaatgattcaaaccaataaacatcaaagaatttaaatcagtagttaacctttctattaacaaaatgtgcagtactgatgactttacaggtaaattctaccaaaaaaaaagagaagacaatttcatataaactcttcaaataatcacacagaggaaacactctttactcattgtatgaggcaagcttacatttgataccaaaaccaaactagaatacactaagcaataaaaactaaactaaaatcacttgtcacccacacacacataaacctagttaaatgaatacagcagtgtataagaatatatataacctaggccgggtgcagtggctcacgcctgtaattccagcactttggg

SEQ ID NO: 955293 - DNA, 621 bp, Homo sapiens
ttggcatggaggcaagtgaggttccccactgcagaaaatgagtgagacagaacccccagggatccatatttctgtcacagacctttgcaatcctggggaaagggaatccccccgaccaccttccccttgggcctctgcactgacactgagagcttcatggagtctgtgcaaaacttctgctcaggcccatatggatccccaagggacttgcattcctcagcaccccagcactagctgctgtttcgttgccaacaaaagagtccaggctctctcacatacttctaggatagggtctgcatccgttgtgccgaggagcctacaatctgcaagccttacctcggctacaccccagcaggcaaagcccagtgccttgggacccccgcgcatccaccccacccctgccggctctgcacttctctgagataacagacagtcagccattttagcctctgcccctgctgccctcagtctggggagggagtgaagagcctaaggattatcacggggcctccagcacacagtaattggaaaagtggccaggctgtttkctatgcaggtccctgctcctgctattcctcactgggcaggacctcctgacatgggccccagcacagccaccaa

SEQ ID NO: 955294 - DNA, 604 bp, Homo sapiens
agcaaaggaagtttaaggaagtccagcgaattctgattatctgcatgatgaccattcagccactgttgttcttatagcagcaaatattaaaattttygtttctcagtcattttctacacccaaacttgtgatgagtctgtctatagaataacccagcagtactgatttgaaaactaaatcccagatctgagctcttatctactctcttcttgcatatatgtatgttgtcccttctccccaactccctgcctctattctttgtctctgccaagtcaagctgcctttcttctgctgaattaacctgatatcaatagcttacctgtcaccacttgtcagaatttcctcccactgcccatcttgattcatactgtcccactgcctcagtgattctgaactcactgtctgacacaacccacatttctttgagattctgcatgattcaaagttcatctaggagagaggttcatatcataaaccccattttcagcagcatctcaggtcatgctcacttctaattatactgttaaatgagtgtcctttggtatttaattttgtattatcagaggtttattgaaaaatagaaggcatttatgcaaaaacattt

SEQ ID NO: 955295 - DNA, 685 bp, Homo sapiens
agtttgtaaacttgacccactttacttgaaggaaaggctggatccccttgaggaaggatcccactacactaccaacagtttatgctgttaatctttcttccatctttccccaaagagacctccagccttttactagggtaactgtgcataggggaaagggaaataatcagacctttcagggactactggtcactggctctgagctgacattgattccgggggactcaaaaatgttattgtgatcctccagttaaggtaggggcttatggaggtcaggtaattaatggagttttagctcagatccaacatagagtggctccagtgggtccttggactcaccctgtggtcatttccccagtgccagaatgcataattgggacagacatacttagtagctggcagaacctccacattggctccctgactggtaaagtgagggctgttatggtgggaaaggccaaatggaagccattagaactgcctctacctagaaatatcatacatcaaaataatatcgcatccttacaaaaattgcagagattactgccaccatcaaggtcttgaaagatgcaggggtggtgattcccaccacatccctgttcaactctcccatttggcctgtgtagaagacaggtggatcttggagaatgatagtggattatygtaagcttaacaaagggtttac

SEQ ID NO: 955296 - DNA, 618 bp, Homo sapiens
tatcacactagtcagaacagctacttttaagaagtcaaaaaaacaacagatgctggcaatgttgaaaaataaaaggaaacacttctataataatgctggtgggaatgtaacttagttcagccactgtggaaagcagtgtggaaatttcccagagaactcaaaatagaactaccatttgtcctaacaatgccactgttggttatatacacaaaggaaaataaatcattctaccaaaaagacacatgcactcaaaagttcattactgcactattcacaatagcaaagacatggaatcaaccatgattgtcatcaactgtggactggataaagaaaatatggtacaatacaccacggaaatgatgcaactataaaaaagaataaaatcatgtcctttgcagcaacatagatgcaactagaggccactatcctaagacaatgcagggacagaaaaccaaatactgcaatgtggacacaaggatgggaacaayagatactggggactgcctgatgtggaggagagtgggagagggacatgggtgggaaggctacctatggagtactatgctcaccaccttggtgatgagatctttcatacaccaagccttagcaatatgcaat

SEQ ID NO: 955297 - DNA, 765 bp, Homo sapiens
acaacatgtcaatgccatacttaaataagcactcatttctaacacatctgtgggttggctggaggtggtctgagctagggtaggcaactcactttttttttttttttttttaaagtttcactcttgttgcccaggctggagtgcaatggcaccatctcagctcactgcaacctccacctcccaggttcaagtgattctcctgcctcagtctcctgagtagctgggattacaggcatgcgctaccacgcccggctaattttgtctgccttccttcctttctttcctttctttctttcaacggagttttgctcttgttgcccaggctggagtgcaatggcgtgatctcggctcaccgcaacctctgcctcccaggttcaagcgattctcctgcctcagcctcccaagtagctgggattacaggcatgtgccaccacgcccggctacttttgtatttttagtagaaacggggtttctccatgttggccaggctgatctcgaactcccgacctcaggtaatccgcctgcctcggcctcccaaagtgctgagattacaggcgtgagccactgcgccaggcctaattttgtattttttagtagaaacgggggtttctccatgttggtcaggctcgtctcgaactccggacctcaggtgatctgcctgtctcggccycccaaagtgctgggattacaggtgtgagccactgcgctgggcctggcaactcactttcaagctggctgggcttggctcctcacatttgtgcattc

SEQ ID NO: 955298 - DNA, 765 bp, Homo sapiens
acaacatgtcaatgccatacttaaataagcactcatttctaacacatctgtgggttggctggaggtggtctgagctagggtaggcaactcactttttttttttttttttttaaagtttcactcttgttgcccaggctggagtgcaatggcaccatctcagctcactgcaacctccacctcccaggttcaagtgattctcctgcctcagtctcctgagtagctgggattacaggcatgcgctaccacgcccggctaattttgtctgccttccttcctttctttcctttctttctttcaacggagttttgctcttgttgcccaggctggagtgcaatggcgtgatctcggctcaccgcaacctctgcctcccaggttcaagcgattctcctgcctcagcctcccaagtagctgggattacaggcatgtgccaccacgcccggctacttttgtatttttagtagaaacggggtttctccatgttggccaggctgatctcgaactcccgacctcaggtaatccgcctgcctcggcctcccaaagtgctgagattacaggcgtgagccactgcgccaggcctaattttgtattttttagtagaaacgggggtttctccatgttggtcaggctcgtctcgaactccggacctcaggtgatctgcctgtctcggcctcccaaagtgctgggattacaggtgtgagccactgcgcygggcctggcaactcactttcaagctggctgggcttggctcctcacatttgtgcattc

SEQ ID NO: 955299 - DNA, 497 bp, Homo sapiens
aatcaagaggaagcttaaacttaaaatgaaatcgaaagtttagactcctacatgggattggacattttaaatgctgaacagagcctatttttatagctagaagttacaggacacatttttggttaactgagaatgatccaaaaatcatgtgaattttgtgatccagaaagtcacagaacatgccctagattttatcccaggggcagggaggagtgacctgcagagtaagtttgaattggtaaatagaaaacaagaataaaatagtttgctgtttacattccataagcctggctctttcaacatcatgggtatatttcttggttgaatttagtatgccactatgacgccggattgtgatatttgcctaggatgttttgtcctaacatttagtatggaatcatttgcccaaatcacctgcccctctccacttgtagctttatttcaagakgtatgtttctcaaagtggagtgactgccagagtgggagaaaggagctag

SEQ ID NO: 955300 - DNA, 558 bp, Homo sapiens
tctccatcctagctccgcctctcacaattctctggctccagatcccgcccacgagaccccgtttcctatagggccctttcgtctgggataccaggcctggtctccactagcctcggactttccagccccaggtcccaaatcctggacccaccgtcccatcctctgagctccactctcatggaccccaaacctcactccagtcctttgaactccatgatcctggcctggcctggcccccggagccctccattgcccctcaagagcccagcctggtagactccttccctagggttgcatctccagccccgcccctgaagactggtaatctaccacccctttccctgcccacgtgcccctacccagcccgacttgaggccttcagtctcccagccgcggaccccaacagcgggcgagggcagtgaccgtgcggggatgagccacctccacyggagcccgccttcttctccgcaattccccgcagcaccacagcgccttcccggtcccgtgacgccgggggccagcccaggccctgggatcgccaggttccacactatgagg

SEQ ID NO: 955301 - DNA, 614 bp, Homo sapiens
tgaactctaccagagttacaaacaggagctgataccctttcttctgaaactattctaaacaattgcaaaggagggactcttccctaactcattttctgaggccagcatcatcctgatacyaaaacctggcagagatataacaacgacaacaacaacaacaaaaaaaacacttcaggccaatatcactgatgaacattgatgcaaaaattctcaatacagtactggcaaatcaaatccagcagcacatcaaaaatcttatccaccatgatcaagttggtttcatccctgggatgcaaggctggttcaacatatgcaaatcaataaacataattcatcatataaacagaactaaagacaaaaacatgtgattatctcaatagatgcagaaaatgtctttgataaaattcagcatcacttcatgtgaaaaacgctcaataaactaggttttgagggaacatatctcaaaataataagaaccatttatggcaaacccacaaccaatatcatactcaataggcaaaagctagaagcattccccttgaaaaccaggacaagacaaggatgctctcactcaccactcctattcaacatactattggaagttcaggccaggg

SEQ ID NO: 955302 - DNA, 614 bp, Homo sapiens
tgaactctaccagagttacaaacaggagctgataccctttcttctgaaactattctaaacaattgcaaaggagggactcttccctaactcattttctgaggccagcatcatcctgatactaaaacctggcagagatataacaacgacaacaacaacaacaaaaaaaacacttcaggccaatatcactgatgaacattgatgcaaaaattctcaatacagtactggcaaatcaaatccagcagcacatcaaaaatcttatccaccatgatcaagttggtttcatccctgggatgcaaggctggttcaacatatgcaaatcaataaacataattcatcatataaacagaactaaagacaaaaacatgtgattatctcaatagatgcagaaaatgtctttgataaaattcagcatcacttcatgtgaaaaacgctcaataaactaggttttgagggaacatatctcaaaataataagaaccatttatggcaaacccacaaccaatatcatactcaatrggcaaaagctagaagcattccccttgaaaaccaggacaagacaaggatgctctcactcaccactcctattcaacatactattggaagttcaggccaggg

SEQ ID NO: 955303 - DNA, 587 bp, Homo sapiens
cataaagattctccacatccccaccagacgcaggaggccagctggcttcaccctgtggatcccgaagcagrgatggggtggagctgcctgccagtcccgcgctgtgcgcccgcactcctcagcccttgggtggtccatgggactgggcgccctggagcagggggcggtgctcatcggagaggctcgggccgcacaggagcccacggaggggctgggaggctcaggagtggcgggctgcaggtcccgagccctgccccgcgggaaggcagctaaggcccggctagaaattgagtgcagcgcgggtgggctggcactgctgggggacccagtacaccctccgcagctgctggcccgggtgctaagcccctcattgcctggggccggcagggccgccggctactcgcagtgcggggcccgccaagccgacgcccacccggaactccagctggcccgcaagcgccgcgcgcacccgtggttcccgctggcgcctctcgctccacacctccctgcaagctgagggagctggctcctgccttggccagcccagaaaggggctcccccagtgcagtggtgggctgaaggactcc

SEQ ID NO: 955304 - DNA, 554 bp, Homo sapiens
atgaatgtacgtgaggaaatttcctcagagtgaggaaaaaacttcctgaaaggattagaaagaataatgcttggccaggcacagtggctcacacctgcaatccctgtactttgggaggcygaggcaggtggatcacttgaggttaggagttcaagaccagtctggccaacatagtgaaaactcgtctctactaaaaatataaaaattagcccagcttggtggtgcatgtttgtaatcccagctactcaggaagctgaggcatgagaattccttgaacctgggaggtggaggttgtagtgagctgagatcgtgccattgcacttcagcctgggcgataaagcaagactccaactcaaaaaaaaaagaaaaaaaagaaaaagaaagaataacccttgacactcacacagggccagcaatagtgtctgttcccaccagccagagtgaaagatctcttaattcacaaggtaaggcagagtacacagaaaggtctagcctcaataatgagggggaaaaaatcaaccttagaataaatgtagtcctggttttacctcaca

SEQ ID NO: 955305 - DNA, 634 bp, Homo sapiens
atgacactcacaagtgaaaagccaacacacagaatgggaggcaacatttgaaaatcatatatctgatggaattatatccagaataaataaagaaaaactcatcaacaacaaaacaatccaattcaaaaatgggcaaagtttctccagagaagatatacaaatggccagtgagcacatgaaaagatattcaacatcatttgtcataagggaaatgcaaatcaaaaccacaatgagataccacttcacactcaaaacaagggaaaacaagtgtccttggcaaggatgtggaaaaatttgcacccttgtgtgtggatagtgggactgtacaatggtacagccactgtggaaagcagtttggtagtgtctcaaaaagttaaacataactgggcacggtggcccccacttgtaatcccagcacattgggaagctgaggtgagaaggtcacttgagcctaggaattcgagaccagcctgggcaacatagtgagaccccatctctaaaaaaaaatttaaaaattagccgaacatggtggcacacacctgtagtcccagctacttkggagactgatgtgggaggattgcttgagcccaggtcaaggctgcagtaggctacgtaatgtcactgcactccagcc

SEQ ID NO: 955306 - DNA, 632 bp, Homo sapiens
cccaggagtttgagaccagcctgggcaacatagccaggccagcccttgtctcaaataaatagaaaaaaaaaaaaaaaawatatatatatatatatatatatatatataaaattaaaaaaagaacaagtcttagaggtgagaacaggctcctcctggtttgttacctccatagcacaaggaaaaagagggctcagtgctaagctccccattttgccagggagcttctgtgggacttccctaaaaagatccctctctgaagctgagagaatgaactcgtttcactcaaggggaaaccactctcagaaccaccatctctcactgcttagtgatgtgtcctcacgagttggcagacttctcccccaatggtaggaaccgagagggacctggcttcactcaccatcctcagggcagggccccagttcatggctgttcctggagtcagaagctaggggctccttagcgggaggtgagagggagccatctgtccatctagctgcttctgtgtggaaactgcccacaggcgtggtgccaccagatgactctcccccaagggacttgagcagctctctgtgggccagctccatatcctggaagagtcggcgggggaatgtctgctcgagtccttctattcc

SEQ ID NO: 955307 - DNA, 624 bp, Homo sapiens
tcccctaacaagacagtcatcctgttttctgaagcttcactttttaaaaaatttatttatttayttatttttgagaatgagtctcactctgtcacccaggctggagtgcagtggcgcgatctcagctcgctgcaacctctgcctcctgggttcaagcgattctcctgcctcagccttctgagtagctggcattacaggcatgcaccaccatgcctggctaatttttgtatttttagtagagacggggtttcaccgtgttggccaggctgggctcaaggtcctgacctcaggtgattcacccgtcttgggctccgaaagtgctaggattacaggcttgagccaccacgcccgaccctgttctctgaagctttaaagtcaggcattgacttctctctagctatgaaaatcctagatggcatcttcttccaacagaagatgtttcatctacattggaaatatgttgtttagctacttccatgaattatcttagatcttctggatagcttgtagcttgtccatcagcacttgttgcttcaccttgcactcttttgttacagaggtttcttaccttaaacttcatgaccccacttctactggcctcaaacttttcctctccagtttcct

SEQ ID NO: 955308 - DNA, 560 bp, Homo sapiens
tgccttgacattcaaatgagatcattaggagataccagtcagaaccaccatgtatgttggttttaaaagacacgagttaacaacatggatgatcctttaaagcattatgtttattatattaaatgtctaagaaaggcaaatatataaagacagaaagtttggtggtgcctagggcaggcaatggggataactgtaaaaggacatgaggtttctttttaggataatggaaatgtcctaaaattagattgggattatggtacacaactctgtaaatatagtaaaattcattgaattgtatacttagaattgatagagacaggaggcagggaaattctgggaagaagagggcaggtccctggcaatggccccaccctcaagccaaaaagcctaatgccatggcccaaagtgagaacttacattcctgttttcctgctcaaatgttgccttttccaaaagcacccatggcccaccctgcccacccatcctatacctataaaaaccccagaactcagccagcagaaaagagaagcagstggatgtcagagactacagttggacgt

SEQ ID NO: 955309 - DNA, 625 bp, Homo sapiens
gaaatagaatttagaatatggataggaacaaagatcatcaagattcaggaggatagcaaaacccaatctgaggaaaacaagaatcatgataaagtaatataggagctgaaggacaatatagccagtataaaaaagaaaccaatggttctgacagaactgaataacacaatataagaatttcacaatgtaattacaagtattaacagcagaataaaccaatttgaggaaagaatctcagaacttgaaaactggttctctgaaataagacagacaaaaataaagaaaaaagaataaaaaagaatgaacaaaacttctgagaagtatgggattaggtaaagagggcaaatctatgaatcactggcattcctgaaagggagagggagaaagcaaacaacttggaaaatacattacaggatataatccatgaaaacttccccaaccttgttagagaggccaacagtcaaattcaggaaatacagagaactccttcaatattctacacaagaagatcatccccaagacacataatcattagattttctgaggttgaaatgaaagaaagaatgttaaatgcagctagagagacagggcatgtcacctacaaayggatccccataaggctaat

SEQ ID NO: 955310 - DNA, 451 bp, Homo sapiens
tgcaaaacatgacttcatactcttatggctgtgtaatattccatggtatatatgtaccacattttctttattcaatccaccatcaatggatacctaggttgattccatgtctgctattttgaatagtgctatgataatcatgccagtgcaggtgtttggttttgttgggggtgcatttgatagaacaatttactttcctttgggcatatagaaagtaatgggattggtgggcaaaatggtaattctatttttagttctttgagaaattttcaaactgctttccacagggactgaggtaatttacaatcccaccaacagtatataagcattcacctttttccatgcctggtcaaaacctattttyattttttttactttttaataatagccattctgactggtgtgatagaatctctcattgtggttttgatttgtatttctctgattatta

SEQ ID NO: 955311 - DNA, 554 bp, Homo sapiens
ttgtaatcctgagaaaacttatgtgtgattataggatcctgaggcctaaagttcgtgagcttattccattgcatcttctgagaagggcttcctacgtctccagcatcccggggccttccctgctctgatggtgggagattcttccagcttctaggtttccgtgaccttagttagcaaaggcaggaaaagatgtaacaggtagactaggggtttgctccacagttcggaggctttgagcaattgtgtgtttctcttgcctgcctgccttccttcctttctttctttcttttttcttcctttcttttttttttgttttgttttgacagtgtttctctctgttgcccaagctggagtacgttggtgtgatcatagctcactgtactcactgcaccctcgacctcctgaggtcaagcagtcctcccccctcagccccctcggtagctaggactacaggcacttgtcaccacaccaagctaaattttttctttcatctyttgtggtaatgggagtctccctatgttggccaggctggtcttgaactcctggcctcaagc

SEQ ID NO: 955312 - DNA, 627 bp, Homo sapiens
ggaggctgaggtgggaggatcacttgagccctagaggttggggttacagtgagcgtggtggtgccactgcactacagcctgggtttatagagcaatacctcatctcaaaaaaagaaaaaaaaaagaggaagcacattgggggaaaatatatatataatagagattacagtgctttgcaggaaggttaatttatttaacattataaacttagcattttccaaacttacttgaacacagatccattctttcatagaacaattattaatagaacttgctttgagaaatgctgttccagaacatttttactgaattagcaaaagagtgttccagtgagaaagagttaattctacttttgagagttttaagaaacccaggtgcagaaaggcagacatcacatgttctcacttatttgcgggatctcgtattagtccattttcatactgctatgaagaaatacccgagactgggtaatttataaagaaaaagaggtttaagggactgacagtttcacatggctgtggaggcctcacagtcacgatggaagwtgaaggaggagcaaagacatgtcttacatggcagcaggcaagagagtgcatgcagaggaaccaccctttataaaaccatcaa

SEQ ID NO: 955313 - DNA, 661 bp, Homo sapiens
ataattcactgtaatgaacagttaaaatacagagccagggctgggagaggtggcggaggcggcccgggaagcttcctttctttgtactgcccaggcgcagagagacccagccatggtcaccattaagttatttttttcttccacaacgaccttgactttcagttggacttggtttttaatttaaaaaatcttttgagtgtccaggagagtgtgacaggagagtgcagtatgtgtggacatcgctggttcccccagccctgggcatcctgggtatttgaggtttgtggaaggttccccttgtgcagagagggtaagttgtccgaggatggagggaggcaggcagggcctctgggaaggcctactgttctctctttgcctccaggcccagcacattctgctgcttgtctggtctttttttttccttttttgtagagatggggatctagctatgttgcccaggctggtctcaagcttctgggctcaagcaatcctcctgcctcagtctcccaaagtgctgggattacaggcatgagccaccatgmccagccttgccgtcctccttatgtgcccttccctccttgccagttcgtccaccctgccctatctccatgcctgctgtagaggcctgggaggccctctctagactcaactccctgagcta

SEQ ID NO: 955314 - DNA, 568 bp, Homo sapiens
gatcatgggggcagttttccccatgctgttcttgtgatagtgagtgagttctcatgagatttgatggttttataagtgtttgacctttcctccttcatacgctcacactgtttcctgtcaccttgtgaagaaggtgactgcttcaccttctgccatgattgtaagttgcctgaggcctcccagccatgtagaactatgagtcaattaagcctcctttgcttataaattaccgaggctcaggtagcatctttatagcagtgtgagaatggactaatacagtaaattggtactgcagagagttgggtactctacaaagatacttgaaaaggtggaagcaactttggaagtgggtaatgggcagagactggaacagtttggaggtctcaaaagaagataggataaagtgggaaaatttggagcttcctagagacttgttgaatggttctgaccraaatgctgattgtgaggtgaacaatgaagtccaggctgaggtggtcttagatggagataaggaacttattgggaactggagtaaatgtcactaacagtatgctttagcaaagagact

SEQ ID NO: 955315 - DNA, 738 bp, Homo sapiens
tggctgttctcataagtcgttattggtcagcctgaagcctcactgttacaattactttgtctaattatgatttttgctgtcaaacttatgttaaaatttcagcaataacagtttatttgttcagtgctctcactgcattataaacatgaagttttcacattttgtatgttttagtaatcatgaatgactttctagtattgtccacattatatatttgatatctatttatactgcgaattaacactgaaacaatgaactaacgtgattttcttgaagacaacacattgtgttcagttggttctctgaaccctaaataaagctgaaaagtgtattaattttggtatggattccctaatgattgcacagttacttgtatatattttatagctgtaaatcttggtggataaactagaattagcagtgctcaatgacttcaaatgattttttttttttttgagatggagtctctctctgtcacccaggctagagtgcagtggcgcgatctcggctcactgcaacctccgcctcctgggttcacaccatctcctgcctcagcctcccgagtagctgggactacaggcatccaccaccacgcctggctaattttttttttttttgtatttttttagtagagacggggtttcaccatgttagccaggatggtctcgatctcctgacmtcgtgatctgcccgcctcggcctaccaaagtgctgggattacaggcgtgagccaccgca

SEQ ID NO: 955316 - DNA, 583 bp, Homo sapiens
aaattaaaaggaggctgaaaatttgatgttgcccttggaagtgaggggaaacattgttctcctcagcaaacctggtctaacatgtctgccaatccagtgaacgtatttcagcatgtgtcatgtgggatgcaccttatgaagggctgtctatacagatgttagggtatatcttagttaatttggcttataacaaagtgccatagagtgggtagctcataacaaataaatttatttttcacagttctggaagctgggaaatttgagaccaaggacccagcatgttcaggttcctgtgtgggctctcttctgggctgcagacggccaccttctcgcatgtcccctcttagaaagagaataagagagctcttgggggttccttttataaaggctctaattctgtttatatgaactattactgatgacgtaattacctcccagaagccccaccttcttatgccatccttttgggggttggaatttcaacatatgggtttggagagacacaaaccttcagtccattacagggtccaagttgcttcatgatccacaaactaccaaaatstaatacttgatacaaattcac

SEQ ID NO: 955317 - DNA, 539 bp, Homo sapiens
tgctaagaccattcactggggaaaggacagtcttttcaacaaataggatgggaaaactagatgcccacgtgcagaagaatgaagttggactcttcctttacgycatacacaaaaattaattcaaaatgaatttaatacctaacctaagagtcaaaactataaaactcatggaaggaaacataggggaagatcgtcgtgacactggatttggcaatgatttctttgatatgacagcaaaaccacaggcagcaacaaaaaatagataattttggacatcagcaaaatttaaaacctgtgcatcaaaagagtgaaaatacaacacatggaatgggagaaaatatttgcaagtcatatatctgataaggaattaatatccaggatgtataaagagctcttacaactcaatacttgcaaagaaacccccacaaacccaattcaaaaatggtcaagagacttgaatagacatttctctaaagaagatatacaaatggctggtaagcacatgaaaaaatgctcaacatcagtaatagttactgcaa

SEQ ID NO: 955318 - DNA, 539 bp, Homo sapiens
tgctaagaccattcactggggaaaggacagtcttttcaacaaataggatgggaaaactagatgcccacgtgcagaagaatgaagttggactcttcctttacgccatacacaaaaattaattcaaaatgaatttaatacctaacctaagagtcaaaactataaaactcatggaaggaaacataggggaagatcgtcgtgacactggatttggcaatgatttctttgatatgacagcaaaaccacaggcagcaacaaaaaatagataattttggacatcagcaaaatttaaaacctgtgcatcaaaagagtgaaaatacaacacatggaatgggagaaaatatttgcaagtcatatatctgataaggaattaatatccaggatgtataaagagctcttacaactcaatacttgcaaagaaacccccacaaacccaattcaaaaatggtcaagagacttgaatagacatttctctaaagaaratatacaaatggctggtaagcacatgaaaaaatgctcaacatcagtaatagttactgcaa

SEQ ID NO: 955319 - DNA, 721 bp, Homo sapiens
gcccagtcatggctgtggactcaggcatctctgcactctcgggggcccagaaagcccccyttccccacaggcttggaagtgcctgctcccactgcctggcctctgcccactcccagcacccactccaattttagagtgaagttgtggctgagcctgggtgctgtcatgacctggccaggtgtgctcatgctcagggcagtgttgacacaccagcctgctgatgccttgaccctctctgaacattgagcactgatgagcatgggagagaggctgaagggggactaaggatgacttggcatgggcttgtaggcaccacttgacacagacagcctgggtgccatggccaccatgggtggcaggttaatggtgttaggaggaagacaagttcctggatggaaaggggtgggtccccagtgaagctccccctttaggcctgggatggcctgaagcctgggggccaggttgccagttccacagaccagagtgagaacttactgtgctttttctgggcctgccaatgtctgcctgtggactaatcaggacaccctcttcccctctgaagcccataaaagcccctgactgagccttactcaggcagacatcaagatgacctgccttcaaagaggagctacccactgtgggtattctctctgctgagagctgagcagacatttagacaacctgtctgcagagcagagctactcactgtgggtctcctctg

SEQ ID NO: 955320 - DNA, 721 bp, Homo sapiens
gcccagtcatggctgtggactcaggcatctctgcactctcgggggcccagaaagcccccctyccccacaggcttggaagtgcctgctcccactgcctggcctctgcccactcccagcacccactccaattttagagtgaagttgtggctgagcctgggtgctgtcatgacctggccaggtgtgctcatgctcagggcagtgttgacacaccagcctgctgatgccttgaccctctctgaacattgagcactgatgagcatgggagagaggctgaagggggactaaggatgacttggcatgggcttgtaggcaccacttgacacagacagcctgggtgccatggccaccatgggtggcaggttaatggtgttaggaggaagacaagttcctggatggaaaggggtgggtccccagtgaagctccccctttaggcctgggatggcctgaagcctgggggccaggttgccagttccacagaccagagtgagaacttactgtgctttttctgggcctgccaatgtctgcctgtggactaatcaggacaccctcttcccctctgaagcccataaaagcccctgactgagccttactcaggcagacatcaagatgacctgccttcaaagaggagctacccactgtgggtattctctctgctgagagctgagcagacatttagacaacctgtctgcagagcagagctactcactgtgggtctcctctg

SEQ ID NO: 955321 - DNA, 721 bp, Homo sapiens
gcccagtcatggctgtggactcaggcatctctgcactctcgggggcccagaaagccccccttccccacaggcttggaagtgcctgctcccactgcctggcctctgcccactcccagcacccactccaattttrgagtgaagttgtggctgagcctgggtgctgtcatgacctggccaggtgtgctcatgctcagggcagtgttgacacaccagcctgctgatgccttgaccctctctgaacattgagcactgatgagcatgggagagaggctgaagggggactaaggatgacttggcatgggcttgtaggcaccacttgacacagacagcctgggtgccatggccaccatgggtggcaggttaatggtgttaggaggaagacaagttcctggatggaaaggggtgggtccccagtgaagctccccctttaggcctgggatggcctgaagcctgggggccaggttgccagttccacagaccagagtgagaacttactgtgctttttctgggcctgccaatgtctgcctgtggactaatcaggacaccctcttcccctctgaagcccataaaagcccctgactgagccttactcaggcagacatcaagatgacctgccttcaaagaggagctacccactgtgggtattctctctgctgagagctgagcagacatttagacaacctgtctgcagagcagagctactcactgtgggtctcctctg

SEQ ID NO: 955322 - DNA, 569 bp, Homo sapiens
gaatctttctggtcctgtgctttttttggttagtaagctcttaattactgcctcaatttcagaactcgttattggtctattcagggattcaacttcttcttggtttagtcttgggagagtgtatgtatccaggaatttatccatttcttctaggttttctagtttatttgcacagaggtgtttatagtattctctgatggtagtttgtatttcagtgggatcagtggtgatatcccctatatcattttttattgcttgtatttgattcttctctcttttcttctttattagtcttgttagtggtctttctgttttgttgatcttttcaaaatacctgctcctggattcattgattttttgaagggattttgtgtctccatcttcagttctgctctgatcttagttatttcttgtcttctgctagcttttaaatttgtttgccattgcttctctagttcttttaattttgatgttaggatatcaattttagatttttcctgctttctcttgtgggcatttagtgctawaaatttcccttgacagactgctttaaatgtgtcccagagatt

SEQ ID NO: 955323 - DNA, 592 bp, Homo sapiens
gactccatttgaaaaataaataaattaattaaattaaattaaaaaaagaagtacaaatgtagggttgcctagttaacaactacttagagcaataaaacaggtcatcagaatagttatgktctaaatgaggaaaagaaacactctttggaagctggcaagtaaagaatcttatccaaacctagaagatcggcttctgtctgagtagctataggactacatgtctatgtgtattaagtatacatgatatttctatataatttgagataatctttggtaaatacagctaatttaaaaattgttggtaaaataaaatgtctttagaattttcagtactaaaaataatttaaaattttttgcgtgggactattgatcagattttggcttcccctgttagcagtcttaagatcatgaaactgttgcctctgtaatttttttatatttgtttggtttttccataagctgaagctgtaagggctgcctgctgggctcccctgaagccttgcacacatcttgctgtgagcttatgtctttgtttttgagcctctggattctcagatctggacaggtggccatggagaggtgtgtctacagc

SEQ ID NO: 955324 - DNA, 632 bp, Homo sapiens
gagtcagtctctgaatggtttggctctgtgtccccacccaaatctcatgttgtagctcccgyaattcccatatgttctgggagggacctgattggagaaaactgaatcatggcggtgggtctttcccatgctgttctcatgaaagtaaatgggtctcatgagatctgatggttctaaaaaatgggagtttctctgcacaagctctttttttgcctgctgccatccatgtaagatgtgacttgctcctccttgccttctgccatgagtgtgagacctccccagtcatggaacagtaagtccaattaaacctctttcttctgtaagttgcccagtccctggtatgtctttatcagcagtgtgaaaacagactaacacagtaaattgatactgggagtggggcattgctaaaaggatacccgaaaatgtggaagtgactttggaactgagtaacagacagaggttgaggaaaatgtgggaaagtttggaacttctcagagacttgttgaatgactttgacaaaaatgctgatagtggtatgaataataaggtccaggctgaggtggtctcagacagagatgaagaacttgttgggaactggaacaaagatgactcttgttatgttttagcaaaga

SEQ ID NO: 955325 - DNA, 736 bp, Homo sapiens
acaggctgatcttaaaattcatgtggaaataaaagggactcagaatagccaaaagattcttgaaaaaagaacaaggtaagraaatatacacttcctggttacaaaacttactgtaagctatgttaatcaagactgtgtggtactgccataaggataaacacgtggaatagaatttgaagttcagaaataaaccatctattttttggcaatccaaaaaaatgaagtttgacctccttcccccacacatgtacaaaaattaattccaaataaaatgagtcaaatagctaaacattaacaatggaaaacttgtagtagaaaacatacatgtacatctttgtgatcttggattagggaatactttattagatttgacacctgaagcacaagcaacaaaaggaaaaaaaaatagacacattggaccaaatctaaattaaatacttgtgtgctacaaaggataccatccaaaaactgaaaattaaacctagataacaagggaaaatatatgaaaattagatagacagatgatagatagatagatagatgatagatagatagatagatagatagatagatagatagatgatagatagatagatagatccaaaatatatttctacaaacctgttacgactcaataatgaaaacagaaataacttagtttaaaaatgggcacagaatttgaatagacatccatccaagaaagatacacaactggctaataagggcttgcaaaagg

SEQ ID NO: 955326 - DNA, 742 bp, Homo sapiens
cattatatccttgttctataaactcttatcyattttaaaaattatttatgtttactattacttttatttttattttttttaattaaaaattaagacccaaacacacattagccttgggctgcacagggtcagcatcatcagtattactgtatcccatctccatatcttattccactggaaggttttcaggggcagtaacatgcatggagctatcctctcctatggtaataatgatcccttcctcctggtattcatacccttgtgtaatcttctattcttgagtgtgggctgaatttaatgacttacttgtaacaaatagaatacagccaaaatgatggtatgccacttctgatattagattataaaaaatattgtggtttttctcttgggttccctatcttgctctctcttggataccttactctgggagaagccaattgccatgtagtgaggcagccctggatggaggcccatgtgcatgaaatcagaaacaaactgtctgaggccttcctgtagccacatgagtgagctttgaaatggatcttctatggcctgaaaactcccacacaagtgagcttagaagcagattttttctaagtagacccttgagacacttgtaaccgcagccaacatcttgactgcagcctctgtgagagaacttgatatagggtcatctagcaaagccactcccagattcctgacttgcagaaagtaggagataataaatatttgttgcttccag

SEQ ID NO: 955327 - DNA, 561 bp, Homo sapiens
cccattcacccacacatccagtttggaaggatttatgtcctgccatcaggcaagtagagggtgaggtagagtgttcccrtgttttaagggtctttaatttaacaatcctcaatattttagggagaaatatttttatttccttcaaggccatggaaacccacagaaggggagcctcccctgccacatctgtgaccagacttgctggcctggttggggagtaagtggaagtgaggtggagtggcagtcacccacccagcagccttcccaagaccctccttccctgacatgtgggggtggcagtgtgcggcacacaatacaatgtgttcatcttgctgtttcctttcctgggtcaattgcccttcccagccacctctgcagtaggtgaggccatggggccaagttctgactaataggaatgtgagcagagatgcagcccttcccatctggggcagttaaaaaccggtgcacaaaggccgggcgtggtggctcacgcctgtaatcccagcactctgggaggcagagacaggtggatcacctgaggtcaggagttcgagaccagcc

SEQ ID NO: 955328 - DNA, 561 bp, Homo sapiens
cccattcacccacacatccagtttggaaggatttatgtcctgccatcaggcaagtagagggtgaggtagagtgttcccatgttttaagggtctttaatttaacaatcctcaatrttttagggagaaatatttttatttccttcaaggccatggaaacccacagaaggggagcctcccctgccacatctgtgaccagacttgctggcctggttggggagtaagtggaagtgaggtggagtggcagtcacccacccagcagccttcccaagaccctccttccctgacatgtgggggtggcagtgtgcggcacacaatacaatgtgttcatcttgctgtttcctttcctgggtcaattgcccttcccagccacctctgcagtaggtgaggccatggggccaagttctgactaataggaatgtgagcagagatgcagcccttcccatctggggcagttaaaaaccggtgcacaaaggccgggcgtggtggctcacgcctgtaatcccagcactctgggaggcagagacaggtggatcacctgaggtcaggagttcgagaccagcc

SEQ ID NO: 955329 - DNA, 601 bp, Homo sapiens
ttgtcaattcgtcaaactcattctccatccagttttgttcccttgctggtgaggagttgtgatcctttggaggagaagaggcattctggtttttggaattttcagtctttttgcgctggtttttccttatcttcatggagttatctacctttggtctttgatgttggtgaccttctaatggggttttggtgtggatgtcctttttgttgatgttgatgctattcctttctgtttgttagttttccttctaacagtcaggcctctctgctgcaggtctgttggggtctgctggaggtccactccagaccctgtttgcctgggtatcaccagtggaggctgcagaacagcaaagattgctgcctgttccttcctctagaattttcatcccagagggacacatgcctgatgccagccagagctctcctgtatgaagtgtctgttgaaccctgctgggaggtgtctccccatcaggaggcatggggaccagggactcacttgaggaggcagtctgtcccttagcagagcttgagtgctgtgcygagagatccacttctctcttccaagccagcagggcaggaacgtttaagtctgctgaagctgc

SEQ ID NO: 955330 - DNA, 759 bp, Homo sapiens
taggtgctctgtcccagggagatgggagttttgtctataatcccatgactggggctgctgcctttctttcagagatgccctgcccagtgaggaagaatctagasagggagtctggctacatggttttgctgagctacggtgggctccacccagttcaaacttcccagcagctttgcttacactgtgagggaaaaccgcttgctcaagccttagtaatggtggacacccctccccccaccaagcttgagcacccaagtcgacttcagactgctgtgctggcagtgacaatttcaagccagtggatcttagcttgctggactccatgagtgtgggatccactgagctagaccacttggctccctggcttcagccccctttctaggggaggaaacggttctgtctcactggcactccaggcaccactggagtatgaaaaaaaactcctgcagctagcttggtgtctgcccaaatggctgcccagttttgtgcttgaaacccagggccctcgtggtgtagtcacctgagggaatctcctggtctgcgggttgcgaagatcatgggaaaaacacagtatctgggctggagtgcaccgttcctcagggcacagtctctcacagcttcccttggataggggagggagttccctgacaccttgcgcttcctgggtgaagtgacgccccaccctgcttcgtcttgccctccgaaccagtcccaatctgatgagctgggtacctcagttggaaatgcagaaatcaccca

SEQ ID NO: 955331 - DNA, 649 bp, Homo sapiens
ccccaacccaaatactattacataaagttaacaatatttaaatgccgatatgaagtcaataaatcttatgtcacatgataaaggaaaaggaaataaagrtattttcttagtacaagtgtatacatgcacaaacatgtttttaacaaaagaaggaggaaatactcatgacaattacagtccccgtttctgcagtggtctcgtggtcgtagatgctattgatgactaacttcttctactacccattctgtattccctttgccttcagcaagcacctcaacaggtcatgtttttttttccttgtggagtgacccaaaccttcattcctgggggatctgggccatttctagtcctgcctggattgggctgttgtagtttcccattgaccttaatcatagggcgtggtaatactaagagacaccctaatggatctcctgtattccatgcatactcttccttacctccgttgtggagtaatagactgatttcatcttgaaagtctgggtcagtcagtcaccccagccaacaatgtaactcccctcttagcctgttgacttaaaggtaggaggagcccaaagtgtccaggtggcaatgttaacatccagtttaatggaatcgttgttgtctctcctggtggcagtgttcctccctc

SEQ ID NO: 955332 - DNA, 649 bp, Homo sapiens
aatagcacagcagaaagtttgtcaaaaagttttttttaggaaaaattttattgaaatatatgcatacagaagagtgcattaatcataagtgtatatagccattgaattttcacaaagttaatggcccgtatcactgtatcaagaaaacaggacattaccaggtccctagtcccttccaccttgatccctcgcagtcattgagtcctacaaaaacagaccactttccacactcccctcatcatggattcgtttggccagtttctgagttttatataaatacaattgtacaggatgtgtatttttctggctcatttctttatttaatgttatttcatgagatccattcatattattaacatatagcagtagtttatcgctttttgttgctttattgtaattgattgcatgattatttgcaatttattcatctattctattgttgacagacatttgggaggttttcaggtttttggttattataagtaaagctgctatgaatcttcttacacacatcttttgagtgtacacaaacatgcaattttgttaggcatttttctaggtatggaagtgctgggtcataraatatatgtgtttagctttaataaatactgccaaattgttttataaggtgatcatacaaatttatact

SEQ ID NO: 955333 - DNA, 580 bp, Homo sapiens
tgataatgaaggcctccacccatcttttttgttctcatttatagatagaaaccatatcaggaagaagacagacaaaatcatcataagtcaaagraggaatatgtgtatttttaattccattttagcttatttaaaattcattaggagtagcaatccaatgtttcacacaatctgtaatatattaagtgccctatgtctagtaggaatcaaagagtaacagaagtaattaaggacaatgatatttatgctgaccccttcataggagaatatttagatattgaagtttaagaaggtgaatatcaagaccatacaatgtcagcagttctttcaaaatcacatgggctgagagtatgaggatggtcagcatggagctcaaccttctaatttgtgaccttcggataacgtgtcaagacatgattgtgccatttgggacttacagtgcaacaactctcagactccatgtgtggactgaaaacatctggcagaaaattgcaactcctctggaccatattgtctaatgctgggtagcacagtcagtgtctgaaattaggccaggaccaatgtcacaatggtgctttat

SEQ ID NO: 955334 - DNA, 380 bp, Homo sapiens
tggggttcctgctcaaatttcatctcttcggagaggctgctccagagagctctgagcgtcacaagtgtgtcttctgccaagcgcctaccccagcctgtgtgactgttcacctgactggccccagcgggacactgagggcagggggtgggtctgtctcgtttcctgctgaatccctcatgcccggaacaggaactgacacctcattggtgcccagcacgcttttgatgaacgcacgaaggtgtctcagcccgctctgaacaagcagctttctgcttatagataacacagatgccagcatgaggctgaagccaagcagagcagtgggaagyggagcgatgggaggtcatgttctgctgctcctcttagggcgacagagggtg

SEQ ID NO: 955335 - DNA, 673 bp, Homo sapiens
ggagtcggatcccaggggttcccgtccccgcgtctcagtccgaggcgattgggggcggccgcggagctgtgggcgagcaacccaggggaggcaggctggagggctgcatggtggtggcggcggcgctggcgagraggctgggcgcagcctttcccggaaccgctcacgctggcagccgggagtgtgtggcgtcccctagctccgttcagggtggagagggacccggggccggctgtttttgtctggggttgtgtctgaaggagggagcgggcagatcggccgtcccgcagtggcagcccgggctctggaagctcctgacgctggcactgcggtgcagtagatcatggctctccacggcctccctgacgccctgggctctgccgggggccgcactggcacccagagccccagcgactggggcagcaagtggctgctgccctccagcctccgaaccttgccaatgcaacgtagctggggtggcgcgctccgaggggtctgccgcctgcgggtgcagcgcgaggcagaggaggaggaggtgcgggtgggcggggacggaggcggtgggtgcggaggctgagaccgtttgcggccaccattcctgcagcaaaggagaaactgcgagttgttagacagtctaaaagggcagaggctcctatgctggggcggagaagat

SEQ ID NO: 955336 - DNA, 632 bp, Homo sapiens
tttattactttaaaaagaagaagaagagaacagaaaatggagaagaatttgtrgtctctgctataacaggtccagaaccccttctggtacatgctgggctaaagacctgatgaatgagaataagattatggaggatgcatattaagtgatctagaaggaagtgttttaccagcaatatctaacatcttcaaacgttcacattgaaaaacagtcctttgccatcaattttatttcaccatttcttcaaatttagtgtaaattccaaccattcttagaaaattcctttattaaatatttttaaatattttcaaagatttacagtaaacaatttctctgaacctactgtccactgtaaccatacttcattgaaaaaatgcaatcaaaatttcttttctctaacggtgtgtatacaaaagggaaacattcaattacattaaataatttgtttcactccctaatccttaaattcaggtctgccactcactagctttgtaaccataagcaggtcagttgatttttccaagtatcaatttctgagtctcatttcctctgtaaaatgaaaataatgcatactgcagtattgttgtggggtttaaatggaataatgcatatatatgtcagtacgtagtagg

SEQ ID NO: 955337 - DNA, 630 bp, Homo sapiens
tactacgtactgacatatatatgcattattccatttaaaccccacaacaatactgcagtatgcattattttcattttacagaggaaatgagactcagaaattgatacttggaaaaatcaactgacctgcttatggttacaaagctagtgagtggcagacctgaatttaaggattagggagtgaaacaaattatttaatgtaattgaatgtttcccttttgtatacacaccgttagagaaaagaaattttgattgcattttttcaatgaagtatggttacagtggacagtaggttcagagaaattgtttactgtaaatctttgaaaatatttaaaaatatttaataaaggaattttctaagaatggttggaatttacactaaatttgaagaaatggtgaaataaaattgatggcaaaggactgtttttcaatgtgaacgtttgaagatgttagatattgctggtaaaacacttccttctagatcacttaatatgcatcctccataatcttattctcattcatcaggtctttagcccagcatgtaccagaaggggttctggacctgttatagcagagacyacaaattcttctccattttctgttctcttcttcttctttttaaagtaataaa

SEQ ID NO: 955338 - DNA, 621 bp, Homo sapiens
caaatgctaaaccagtagctactgttcatctagatatttgaccttggagagccaagaagaaatggagtggaacattaccattggtttttgcaccagatgtggcaggatgccagagctaatgtgtgagggaaagagctctgctgctccaacttcctccacagagagggagctgcaaggcagatccagaaagttttcatgtgacttaagcatctttggaaattttgaaagctactatttcccttgctgcccctctagaggtaatgaaataccctccaatccattttttggctactttacttaaaattgtcgaatggtggccgggtgcagtggctcacgcctgtaatcccagcactttgggaggccgaggcgggcggatcacgaggtccggagatcgagaccatcctggctaacacggtgaaaccctgtctctactaaaaacacacacaaaaaattagccgggcgtggtagcgggtgcctgtagtcccagctactcgggaggctgaggtgggagaatggcatgaacccgggaggcggaggttgcagtgagccaagatcgcaccactgcastccagcctgggtgacagagtgagactgcgtctcaaaaaaaaaaaaaattgtcaa

SEQ ID NO: 955339 - DNA, 710 bp, Homo sapiens
gggtcagggacccacttgaagaggcagtctgcccgttctcagatctcaagctccgtgctgggagtaccactactgtcttccaagctgtcagaggtttctgctgccttttgttcagctatgccctgcccccagaggtggagtctacagaggcaggcaggcctccttgagctgcagtgggctccacccagttcgagcttcctggctgctttgtttacctactcaagcctcagcaatggcaggtgcccctcccccagcctcgctgctgccttgcagtttgatctcagactgctgtgctagcaatgagtgaggttccatgggtgtaggaccctctgagccaggcacgggatataatcttctggtgtgccatttgctgaggccattggaaaagctcagtattagggtgggagtgacccaattttccaggtgccatctgtcacccctttccttggctaggaaagggaattccctgaccccttgctcttcccaggtgaggcgatgccttgccctgcttcagctcacactcagtgcactgcacccactatccttcacccattgtccaacaatccctagtgagatgaacccagtacctcagttggaaatgcagaaatcrtccatcttctgcgtcgctcacactgggagctgtagactggagctgttcctattcggccatcttggaaccacccccccaatccaatgaatattaatgcctc

SEQ ID NO: 955340 - DNA, 434 bp, Homo sapiens
cgagacacagatcaaaactgtataattccacccctggtccctcccaaatctcatgtccttctcacattgtaaaatacaatcataccttcccaacagacccccaaartcataactcattcccacattaactcaaaagtacaaagtccaaattctcatctcagacaagcctagtcccttccacctatgagactgtaagagaagaaacaagttagttactttcaagatacaatgggaggtataggcattgggtaaatactcccattccaagagggataaattagccaaaagaaaggggctatagccatcagggaagtcattaaatattaaagctccaaaacagtctattttgactgcatgcctcacctccagggcatgttggtgcaaggaatgtgctcccaaagccttggacagctctacccctgtggctttgcagt

SEQ ID NO: 955341 - DNA, 738 bp, Homo sapiens
ctcctacaatcaagaaagaggttcaatgccaaatgggcctatttggattttggacccaacatattcctcatatggatatgttacaccagcccatttatcgagtgacctgaaaggctgtcagttttgagtggggtccagaacaggagaaggctctgcaacaggtccaggctgctgtgcatgctgcagtcccacttgggccatatgagtctgcagatccaaggaggtgtcagtggcagatagagatgctgtttggagtttttgacagaccctgagaggtgaatcacagcagaggcctctaggattgtggagcaaggtgctgccatcctctgaagataactactctccttttgaaagacatctcttggcctgttactgggctttggtggaaactgaacgtttgactatgggtcaacaagtcaccatgtgacctgaactgcctatcatggactgggtgctttctgacccatcaagccatcaggtgggtcgtgcacagcagcattccatcatcaaatggaagtgatatatatgtgatcaggctcaagcagatcctgaaggcacaagtaagtgacatgaagaagtgactcaaacgtccatggtctccactcctgccaccttgtcttctctcccccaccctacactgatggcctcatggggarttccctatgatcagttggcagaggaagagaagactagggcctgcttcacagatggttctgcacaatatgcaggcatcaccag

SEQ ID NO: 955342 - DNA, 552 bp, Homo sapiens
aaaacgagtggcttaccattctgcctagtcaccctaagcctgagtactagaatgaacagcacataactttgtgtgagtccacatattttaaaaatctcctaatcctatgagttcatagcttctctacctacatgatgcatttggcactagtttgaatggtcccatcacatcctttttacaattgctctcctcatccagaagaaaacttcacaccataaagaattatgttgcaagagatttccaagtcagagaagatagctttcacagaaatcattttccaaagtgagcttaggttttccaattaacccacagaatcatgtttagtccatagtgtagatgatgtgtagcactattttcaattctggatcttaggaatggggtatcatctagtaaaggaaacttaaatgaaaaagaacttcctctctttttgttctgaaaaaaaaaaaaaaaaaaggcattagtaccccttcctcatgtatcccacaaktattccattatacccttgccttttcaaggccacttatatggaaaaggcaaaagaaaaccaacttc

SEQ ID NO: 955343 - DNA, 577 bp, Homo sapiens
aagtcaaacacccattctacacagataaaaaccttcacaaaggtcaactgaagttatccagagctgaaactgaattgtgmagattttcaatgaagtcatcaaagtcatgtaacacaaacaaaagttgattatatttacacactcagcaagcccgctaagaaatgtgtcccaaaaagtattaacctttgttttgtgccatcctgaagacttgcatattttatttttcagatagcttaacatttttaatcgagtgtgttctctaccatgtggtaatgctttggtactatgcatacagggtctcgcctgtcctaaagacttgccatttccccaagaggagctttgattctgctttagaagttttatatgaattaaaatctttatcaaatattaatatgaagggaggcacaggatgcaacatatatagtcaagttacctctctgtatatttagaaattactttctcctccaaggtatttgcagcagaaagctcagtctgtcctgcttaataatcagtagtacaggtttgaatcatcagaagcttggcaagaccttaatatttcaaaattattaacaactac

SEQ ID NO: 955344 - DNA, 573 bp, Homo sapiens
cacataacataaagttcacaattttaamcattttaaagtatacaatgcagtaaacttttgttcattcacaatgttgtacaatcatcaccacaatctaattccagaatattttcatcatcccaaaagaaaccctacacccattaagcaatcacctctcttctctccacccacctccagtcaatcgttcatttgttttctgtctctatggatttgcttatgcttgacctttcatagaagtggaatcatacaatatgtggtctttcatgactggtttatttcacttagcatgatgttttcaaggtttatctatatatctatatggtggtatgtattaacatcaatactttattgcttgtatagctgaataatattccattgcatagataaaccaccttttatttttccattcatcaggtgatgagtatttgacttgttccattttctggctattatgaataaactgatatgaacatgtgtataacaagcttttgtttgaaaatgtattttcaattctcatatgcctaggagtgaaattgccgggtcatatggtaatggtatgtttaacttcttgag

SEQ ID NO: 955345 - DNA, 314 bp, Homo sapiens
aactttctgataaatatataataatatctgggccccacttgatatctgtttgtattggtgcctccttttttctctgatatggatcagtcttttctgtttatttgcatctctggtgatttttgcttgaagactgaacatcatacataatatgctatagtgactctggattctgtactgttcttcaaaagatgyctgaggtttctgctctaatatacaactaccttgtctggactccagctacgaaatctgaattctcatgaatgacagtttgttgttgttgtttttcctggcttccagctgcttgaaagtttatt

SEQ ID NO: 955346 - DNA, 314 bp, Homo sapiens
aactttctgataaatatataataatatctgggccccacttgatatctgtttgtattggtgcctccttttttctctgatatggatcagtcttttctgtttatttgcatctctggtgatttttgcttgaagactgaacatcatacataatatgctatagtgactctggattctgtactgttcttcaaaagatgtctgaggtttctgctctaatatacaactaccttgtctggactccagctacgaawtctgaattctcatgaatgacagtttgttgttgttgtttttcctggcttccagctgcttgaaagtttatt

SEQ ID NO: 955347 - DNA, 690 bp, Homo sapiens
cagagcataaaagttcagaaaatttgcagcctgacaatgcaatagaaaagagaatctcattttctgaggagaaatacaagcaggctgcagaaatttgcataagtagtaaggagctgaatgttaaccccsaagacaatggggaaaatgtacatgtccccagggcatgtcagaggtcttcatggaagctgttcccatcacaggcctagaaacctaggaggaaaaaatagttttgtaggctgggcccatggtccccatgctgtgtgcagtctagggacttggtgccctgaatcccagccactccagccatgcttaaaaggggccatggtacagctcaggtcatggcttccgagggtgcaagctccatgcctgggctgcttccacattgtgttgagcctgcaggtgcacaggagtcaagaattgaggtttgggaacctccgccttgatttcagcagatgtatggaaatgcctgcatgtccaggcagaagtttgctgcaggggcagggctttcatgaagaacctttgctagagcagtgcagaagggacatgtggggtcagagttcctacacagagactctactggggcaatgcctagtggagctgtgagaagagggccaccattttccagaacccagaatggtagatccactgacagcttgcactgtgtgcctggaaaagccacagacactcaat

SEQ ID NO: 955348 - DNA, 554 bp, Homo sapiens
ttttgtatttatagtagagacgggatttattcatgttggtcaggctgctcttgaactcctgacctcaggtgatccacctgcctcagcctcccaaagtgtttttggattacaggcrtgagccactgtgtccggcctcttttttttttttttttttttaagtcaagtgaagcagtgggagtggagaaggaacaaagaaatctgtaactggttgtgatcagttagttgtaaataccagtgcagcagttggaccagccgaggcctgtaattcttttttttttttttttttttgagatagagtcttgctctgtcgcccaggctggagtgcagtggcgtgatcttgtctcactgcaacctccgccttccggcttcaagcaattctcttcctcagcctcctgagtaactgggattacaggcatgcgccaccatgtccagctcatttttgtatttttagtagagacggggtttgaccatcttgggcaggctggtcttgaactcctgaccttgtgatccacccgcctcagcttcccaaagtgctcagattataggcttgagcc

SEQ ID NO: 955349 - DNA, 436 bp, Homo sapiens
ctgcagtctggtggtggctgggctggagtcagcttgaagatctcytgatagccagttgatgctggctacctgggacctcagatggggcttccagcaaggatatgatatgtggattctccatgtggcctgggcttccacacagcatggtagctgggttccaagggttccaaggataagcatcctaagagagagagccaggcataagttgtatcaccatttatgacctagactttgaagtcatgtggcatcacttccatcatatttagttgaggtagtcacaaagccccacccaagttcaagagaaggggccatacactattgtcttagttcatttatgttgctataaaggaatacctgaggcttggtaacttatcaagaaaagtggttttgaagcagccttgttgtctggggggtgatacctgaggtttgttgtctc

SEQ ID NO: 955350 - DNA, 565 bp, Homo sapiens
ctgtcacttcctccccatcagtccttttaaacaacattccaccgagatagggtgagtgygccccctactggaccccggggccgttcagggatggaggacgtgagctgcggaaaggagctaggcattctgccaagtgctggctttgagacagtgcagactgcggggacccggctccctcctctggacccctgttccctcccccagtcttcttccctcgacgttccacacccgatttctttcaaatgtccctgcacaagctgtggctcccaagccatcactatcccaatcacttgtccagatctgcaggtgctgaactccttgctgcctcggggcctttgcacttgctgttcctggagccggggagggttttccctgaaacactttccttcagggctcacatcaaatgtcagctcctcaggaggccttctctgaccacccaggctgggtcagggcccccataggttgttctttgggcactcaggtttttcctttaaggccaagtcatgacttcaattacaaatgaaggaggtaacaagtaattcagagtcagtctccccagagaggc

SEQ ID NO: 955351 - DNA, 742 bp, Homo sapiens
ggccagtctcccatttctctccctctctttgggcctccctattccttgagatgcaacaatattgaaattaggccaattaataaccctataatggcctctacatgttcaagtaaaaggaagggttgtacatctctcactttaaaaaactagaaatgattaagcttagtgaaaaaaggcatgttgcaaaccaagataggtcaaaagcttggcctcttgtgccacgttgtgaatgcaaaggaaaagttattgaagaaaattaaaagtactactccagtgaacacctaaataaagtgaaacagccttattactgatataaaaaacgttttagtggtctggaaagaagatcaaaccagccacagcattcctttaagccaaagcctaatatggagcaaggccctaactgtcttcagttctgtgaaggctgagagaggtgggaaagcagtagaagacaagttggaagctagcagaggttggttcatgaggctgaaggaaagaagctgtctccataacaaaagtgcaaggtgaagcagcaagtgctaatagagaagctacagcaagtcatctagaagatctattatagctaattttgttgatgaagtctatgctaaaatacagtttttcaatgaagacaaaatagyctcattttggaagaaaatgccatctagaactttcagagatagagagaagtcaatgcctggttttaaagcttcaaagacaggctgactctcttgttaggagctat

SEQ ID NO: 955352 - DNA, 607 bp, Homo sapiens
tatctatctatctatcatctatctatctatctatctatctatctatctatctatcatctatctatctatctatcatctgtctatctaattttcatatattttcccttgttatctaggtttaattttcagtttttggatggtatcctttgtagcacacaagtatttaatttagatttggtccaatgtgtctatttttttttccttttgttgcttgtgcttcaggtgtcaaatctaataaagtattccctaatccaagatcacaaagatgtacatgtatgttttctactacaagttttccattgttaatgtttagctatttgactcattttatttggaattaatttttgtacatgtgtgggggaaggaggtcaaacttcatttttttggattgccaaaaaatagatggtttatttctgaacttcaaattctattccacgtgtttatccttatggcagtaccacacagtcttgattaacatagcttacagtaagttttgtaaccaggaagtgtatatttycttaccttgttcttttttcaagaatcttttggctattctgagtcccttttatttccacatgaattttaagatcagcctgtcaatttcttg

SEQ ID NO: 955353 - DNA, 568 bp, Homo sapiens
gaagagaagacaagtgctaaatyggtgcctcactttggagcctgaaacaggactacttttttttttctttcctgcttttagtccgtaaggagatgatagacattttataatgacacagaggtgccatcatgctattgtgccatcagcatcaaagttaaagaaaattaacttaaaaagctattttatccataaaaataactaaatgctaccgctatttgtatatgcatcatttaagattagggtcttaccttatttccttcttcagataaaagcacagacactcaaatgccatgctatttttatctataattaggttgagtagcttcttccttacctttcctggttaagtgatcagagaggcaagagccacagaaccctgacattggagtggaactcttgctacttactactcagcacttctctttttgaatgggaaaagaaggaaggaaatgaaaatcagacttctaatggttttacttgaaggaaaagtacatggaagaaatagtacatggacgaaatatcagggttgaccaaggtcaggaatggcaggcccttgcttgtattgtgc

SEQ ID NO: 955354 - DNA, 691 bp, Homo sapiens
gggtgaagtggtatctcattgtrgttttgatctgcagcttgttagtgactagtgatgttgagtatcttttcatgtgcttattggacatttgtatatcttctttagagaaatgctgttcaagtcctttgcccactatttttcagatgaggtctcactctatcgcccaggctggattgcagtggcgtgatcacagctcactgcagccttgatctccctgggctgaggtgatcctcccagctcagactctcaggtagctgggacttcaagcacgcaccaccatgactggataatttttttgtatttttcgtagacacggggttttgccatctccaactactgggctcacgtgatcctcctgccttggcctcccagagggctgagattaaagtcatgagccaccgcacctggccctttgcccattttttaattgagttgtttgtcttttgtttgagttttagaaattctttctacaatttgcacattaatcccttaccagctatatgatttgcaaatattttctcccattctttgggttgtctttttattctcttgatattgcctgtctttgtctgtttgtgctgctatagcaaaatgtctgagactggataatttataaaaaacagaaatttattttcttacagttctgtaggctgctaagtcctaaatgaaggcactgccaggtttggtgtct

SEQ ID NO: 955355 - DNA, 558 bp, Homo sapiens
tccttcttaacacttctttagttttgttcaatttggggacacagctaaagcagtkttaagaaggaagtttatagcactaaacacccacatgaaaaaggtagaaacatctcaaattaacaacccaacatcacacctcgagaaactacaaaaacaagctaaatccaaagatagaagaagacaagaaatagccaaaatcagagcagaagggaaggatactgagatgcaaaaaaaaaaaaaaaaaaaaaaatcaacgaatctatgaattggttcattaaaagaataaataagattgatggactgataactagacaaataaacataatcagaaatgacaaagggcacattaccaccaaacccagagaaatacaaaaatcctcaaaggctgccacaaatacctctatgtaaacaaactagaaaacctagacaaaatggataaatgtctgaaaaaaatacagcttctcaagattgaaccatgaagaaattgaatccctgaacaggccaataatggattctaaaactgaatcagtaataaaaagcctgccatccaggaccaggcag

SEQ ID NO: 955356 - DNA, 806 bp, Homo sapiens
acacctcaaatatatgtatataaacatagacataaacactgctataagtgtatgtatttatggagtgtgtacataaaaatgtatgtgtacatgccattgaatcattaaatgatactccaaagtatagcacttgcacatgctaagcactgtgaattaagggaaattgggagaccttagaaactgcctcagaatcaaagtccgaccttcccttgtttttcaacctagcccatggaggggatctctctgaagtttcctcatctgagaaaagttctttcaaaagaaaaaaaattgccttcagctccctgtcagaaatctcatcaaccagggaaaattaatcaccaaagaagaatctgaaggccatcaccacacccacccagagagaattttcatctattctgagtgctattactgacaggcttcatctgcatataagacaacttttgttcccagaatatgtcttccccttaccttcctatagtctgttgccacctccctgcaagccacgaggagctctgtaccagactactgtccattttctggacctattcacctcccctaaagatgatttactcttcctccaaaattgcctacatccctcactttctcctctcccctgtgaagagggtattcaagcacttctttgagtttcctactttgtgtaattcccatgcgcttgcacatgaataacttgtatgccttttctcctgttaatctgtcttctgtcatcttattccagcagactcaagatcaactcttcagagggaaagtttaaacttccccacayagacatacacatatttcccagc

SEQ ID NO: 955357 - DNA, 610 bp, Homo sapiens
gccggtcttgaactcttgggctccagcgatcctcctgactacctgggcttattggcacaggccacagtgcccatttagttttttccttttaaaatacagttttaagaarcaaagatggtttatttatttagagacagggtcttgctctgttgtgcaggctggagtgcagtggtgtcatcataattcactgcagcctcagcctcccaggttcaagcaatccccctgcataactgagactacacagtgaaccaccacgcccagctaattaaaaaaaaatttttttttttttagaggcgggatctcactaggttacccaggttgatcttgaacccctgagctcaagcaatcctcccgcctcagcctcccagagtgctgggattataggtgtggtccaccgtgcccagctcaaaaatggtttctaatctcatcatgtagatattcctcctaatgttgtgttttgtttgtttgtttgtttttgagacagagtctctctcagtcacccaggctggagtgcagtggcaagattatggctcactgcaacctccgcctccctgattcaagcaattctcctgcctcagcctcctgaggagctgggaccagaggcatgcgc

SEQ ID NO: 955358 - DNA, 810 bp, Homo sapiens
acagctttttgctcagggtgggttagaaaagacaggagttactgaaacacagcattactcctcccctctggaggacgagcaacatggcaccctcctggaaaaagagagctgccctcaccagacaccaaacctggcagtgccttcatttaggacttagcagcctacagaactgtaagaaaataaatttctgttttttataaattatccagtctcagacattttgctatagcagcacaaacagacaaagacaggcaatatcaagagaataaaaagacaacccaaagaatgggagaaaatatttgcaaatcatatagctggtaagggattaatgtgcaaattgtagaaagaatttctaaaactcaaacaaaagacaaacaactcaattaaaaaatgggcaaagggccaggtgcggtggctcatgactttaatctcagccctctgggaggccaaggcaggaggatcacgtgagcccagtagttggagatggcaaaaccccgtgtctacgaaaaatacaaaaaaattatccagtcatggtggtgcgtgcttgaagtcccagctacctgagagtctgagctgggaggatcacctcagcccagggagatcaaggctgcagtgagctgtgatcacgccactgcaatccagcctgggcgatagagtgagacctcatctgaaaaatagtgggcaaaggacttgaacagcatttctctaaagaagatatacaaatgtccaataagcacatgaaaagatactcaacatcactagtcactaacaagctgcagatcaaaacyacaatgagataccacttcaccc

SEQ ID NO: 955359 - DNA, 655 bp, Homo sapiens
caactcaccagcattactattaaaatagaaatcacaatgagacatgcaacgtgctagcagcccttgctctcagtgcctcctaggcctctgcccggtgtccactctggctgtgcttgaggagcccttcagcctgctactgcactgtgggagcccttctctgggctggccgaggccgcagccagctccctctgcttgtagggaggtgtagagggagaggtgtgggccggaaccggagctgtgcagggcgcttgcgggcagcacgagttccaggtggtcgccggcttggtgggccctgcactcggagcggccagccagcactgctggccttggacagtgaggggcttagcacccgggccaagagctgcggagggtgcactgggtcccccagcactgccgacctgccagtgccgtgctttaattctcgccaggcctcagctcagccgcctccccagggggcagggcttgggacctgcagctcgccatgcctgagctcccccgcccgccatgggctcccgcttgacccgagcctccctgacgggcactgccccctgctccgtggtgcctggtcccatcgaccgcccaagggctgaggagtaagggcacgtggggcgggactggyaggcagctcccctagctccccgtgcaggatccacta

SEQ ID NO: 955360 - DNA, 600 bp, Homo sapiens
aatctgtcattaccttaacctagtcaccaatcatggcatctctaataacagtgagacagacattatgcatcttttaagatgaataaagtacatggtatcacctattaagtattcttgycagaaatgtttgcacttaattagattaagtcttcacattagctcccagtttatagaaaacacaagagatacagaagttaaatgagataacaaggaaataatcagatgaatccttcaggttggatattctcggtataactgacttggtctcttcaacaagccaatatattaaaaaagaagattggaataggtggtgctgatctaaatttttaaaaatgtaagtgaacaactgaatacaatgaaatcaatggcaaagacatttttggcacaactgaggaaatgtgaacatagactgagtattaggcagtattatggaactactgttaagtggtggaagcaatgtggtaaatgaggcaaattactttatggacatgaatactgatgtattaaagagtgaagtgtcacaatttctgagctttactttgaaaaaaataaatatgacaaaatattaacaatatttactttgaaatactttgaaaaaaa

SEQ ID NO: 955361 - DNA, 640 bp, Homo sapiens
tcagtttgctaagccaccagctccatccaggtctctgcacaggacatgatttcattaatttttayggctgcattgtattccataatgtatatgtaccgcattttctttatccagtctatcatttacagaaatttaggctgattccatgtctttgctattgtgaatagtgctgcaatgaacatacacgtgcatttgtctttataatagaataatttatatttctttggttatatacccaataatggggtttctgagtcaaatagtatatctgtctttaggtctttgaggaatcaccacactgttttccacaacggctgaactaatttacactcccaccgacagtgtataagcaaaccttttctctacaacctagccagcatctgttattttttgactttttaataatagtcattctaattgctgtgagacagaatctcattgtggttttgatttgcatttctctaatgatcagtgatgttgagttttttttttttcatatgattgttggcagcatgtatgtcttttgagaagcgtctgttcatgtcttttgtccacttttttaatggggtaaatttttttaagtttcttatagatgttgcatattagacttttattagatgcataatttgctaaaattttc

SEQ ID NO: 955362 - DNA, 685 bp, Homo sapiens
gtcctgggctttttctttttttttttctttggttggtaagctatttattacttcatcaatttcagaacttgttattgatctgttcagagattcaatttctttctggttcagtcttgggagggttatgtgtcctgaaatgtatccatttcttttagattttctagtatatattcatagataagtttataatattctctgttggttgtttatatttctgtgggggtcagggttatattccccaggttgtttctgattgtgtttatttgaatcttctctcttttcgtctttactagtctatctagcagtctatttcattattttttaccaaaaaaagctcctgtatttattgatgttttgaatggttttttgttcttatttcttagcaaatggagtgacaataaatgtcagcacttgtctcaacagtgacacgtttgaaggtagtgctgggctttggaatctaccttatcttcttgcattgactattgtagacaactcgtataagtggaattatacaatatatgttatttcctttgtgtctggcttatttcacttagcatawtgtcttcacagatcatccacattgtagcatgctccagaatttctttctttttatagttgaataatactccattgcatatatactacatttagtttatccattcatctaccagtggacgctttgatt

SEQ ID NO: 955363 - DNA, 608 bp, Homo sapiens
agctgcatggtattctggacttacaatgtgcagggcagatgtagtgtccccttgaaatacacttaacggtgggcaacaaaatccaaaagcaaacccccacaaatatctaacttaaaaaaaaagaactttytagatctcagtcctcatctggatactgcattaggatcctgagacatctggggaccagcgatggaaagaaggaaagagacttccatatgttgagagcctattatatgcctgcattgtgctaagccctttcccatatgttatccaatgtaatcccccacaaaagccctgccagagtggaattattcttctcattttacaaataagaaaacagtagctcggagcgctaagttactcgcccaaggtcacatagacggtaagtggtagatgctgatttgaatccagacagtgtcattatcaaggggtggtttgggaggctttcgttgtaaccatcatctgtagcagcccccttctccacaattatcccaaataaacacacaatctaagtcggaagagcctacaggaggcaaaaatgtagcttcaatatgtgcttccctgtcatctccctttcattgagattattgctgccccaaatcctgtct

SEQ ID NO: 955364 - DNA, 600 bp, Homo sapiens
aaacccagacagggcgatgatgtagggagccagcatgttcgggggcctcagtagtggcctcctcctgggagcaggggggatcctcgggggcctcccctggtcctgggcagttgccggcgtccaagggagccccactggctgcaggccttgagggcagtacttgggatagtatatctgctggcccaggccaaagccctggacgctgtggttggcactctgcgtgtcgcccatatgcagggacatggaggagttgtcacacttgtgggctcccagtttggtgttgtagatgtgctgcggggtcccgggagccgtcatgcccgctggctggagcgtttgtttgcacccatctggaggctgatggtcgagtggtccagagggcaggatacggttcttggggtggtagagatgcctcatcgtgccctaagttgtcgcgcccgactggcaggcacatatgttggtgcccatctgcagctcagtgaggcactggctggccttcaaggtggcgtcgtcgaagttccgctcctgcttctccgagtatttgacyccgacgtccaccccattctgcagcagctttgtcttgaccttccctgccagggctag

SEQ ID NO: 955365 - DNA, 579 bp, Homo sapiens
agcctgggaggtgaaggttacagtgagcygaatagaatgcaggttacactgcattccagcctaggcgatagaggcagcctttgtctcaaaaaaataaaataaataaataaataaataaataaataaataggaagaaatgttataaccttagaagcatcattttcattttctgtaggttgtattttgcttttgtcatttttccctcattccaacccaaacctgactagacactgatatatttgattgcatgatttggagtatttactgagaatatgcaaataaattaattagataatttattttgtaaataagaaagaatgtttgcatacatctacagtggaaagtgtatgcgttctctgggaatccagtaacttttatttagaaaaatgtacaaattcttcctagctatgtgcacttccacttaacttcatcctgctgtgccctttaattccctcatttgttaacctagacagtaaactccagccttgaagagtttttgagatatttagatgagatggtacgtgtaaagggctgcatagaaaatgtcaggcaagaaatagatcttagttcctctttttt

SEQ ID NO: 955366 - DNA, 628 bp, Homo sapiens
ccccacctccaacattgggaatcacatttcaacatgagatctggagagaacaaacatctaaaccatatcattccacacctggtccctgagatctcatgtccttctcacattgcaaaatacaatattcccttcttagtagtcctccaaagtcttaccttgttctagcagtaactcaaactctaaagtccaaagtctcatctaagactcaaggccgtgtttcttccacctatgagtctgtaaaatcaaacaagttgtttactcccaagacacaatggtggtacaggcattgggtagatattcccattccaaaatggagacataggccacaataaaaggacaataggccccacaggagtccaaaacccagcagggtagacgttaaaccctaaagctccaaaataatccttggctccatgccttgcatcctggacacactggtgtgaggagtgggctccctagaccttgggtagctctgcctctgtggctttgcatggtgaagtcyccatggtggctttcacgggtcggagttgggtgcctgtggcttttccagggttagtgttcaagcttccagtggctctaccattctcaggtctggagggtggcggctcccttcccataactctgccag

SEQ ID NO: 955367 - DNA, 608 bp, Homo sapiens
caagagtatcctttatataagttttgaataccttattcctcatttccatctgagacatcagaaaagcctttactgcccatatttttaccawcattctgatcacagtcatttaaataatgcctcagaagacgtaggctctttctacagcttttttcttctgagatcttaccagaattgccataatacaccattcatggcaatctaggctttttctagcatgctcctccaaattcttccagcctctacccattactccattccaaagctgttccacatttttagaaattggttacagaacaccccacttctggtacctgtttctgtcttcatttgttttgtgttgctataacagaataccaaaaactgagtaatttatgaacaatagaaatttatttctcaccattgtggagactgggaagtctaacatcaaggtgccagcatctggtgaggtccttcttgctacatcatcccctggcaaggcaagagaggtaaagagcaggggagcaaagggtcaaactcacagcctcaaaaccttttataattggcttcattccattcatgagagtagagccttgatgacataaacacctcccattagtagctacctc

SEQ ID NO: 955368 - DNA, 572 bp, Homo sapiens
acaacaggctaatacaataaattggtaacacagagagtagggtactgctgtaaagatatttgaaaatgtggaagtgactttggaattgggtaagaggcagaggttggaacagtttggagggctcattatgagacaggaagatgtgggaaagtttggaactttctagagactcattgaatggttttgaccaaaatgctgataatgatgtggacaatgaagtccaggctgaggtggtctcagatggaaatgaggaacttcttgggaactagagcaaaggtcactcttgccatgctttagcaaagagactggtggcattttgcccctgccctagagatctgtgggaatttgaacttgagagagatgatttagggtatctggtggaagaaatttctaagcagcaaagcattcaagatgtcacctggattattctgaaagcattcagttttatgcattctcaaagagatggtttgaaattggaaattaggcwtaaaagggaaacagagcataaaagtttggaaaatttgcagcctcacgatgcaatagaaaagaaaaattcattttctggggagaaa

SEQ ID NO: 955369 - DNA, 641 bp, Homo sapiens
gagctctttatatattccagaaactagtttttttgttgaatatgtgatttgcaaatattttcactgagtttttaggttgtctttttgccctttaatagggtcttttgcagaaaaagttttaaattttgatgaagtccaatttatcaagttttccttttatggatcatactgttggtattaagattaaaaatctcttcatttagctctaggtgttccatgaattttaaagatcttttatcaggtgtctttacagttgtataagaactctgcttaacctcagatcaaaaagatattctgttttttaaaaaagatttatagttttacaatttacatttaaatcccgtggtccattttgagcttttttaaaggtgtgtgtggttcttcttccccttcctcctcttttcttcttcttcatctacatcttcttcatcttctttctcttcatctttgttttgtctttttttttttttgcccatggatgtccaattgctctagtattatttattgaaaagtctatcctttctccaatgtattgcttttgcacctttgtaaaaaatcaactatccatatttttgtgggyttatttctcagttctttattctgttccattgatctatgcatcaaactcttcactaccatta

SEQ ID NO: 955370 - DNA, 552 bp, Homo sapiens
cagagagtttatgagtattaaaggatgcagtgaatggaaagtgcccagcaaagggcctggcacaggaggggcaaaatagaggtttgctgtgaggttcatctggtgactcgatttttctttggatattttccttttttcgttttgtgatcatgcatgccaccttggctctatgataaattacgttgtgtggacaccataagagaggtatttgtgctggaaaagggtttacagtggaggaaggcccgtctccaccttcagggaggaaggctgcctggatccagcacggctcagacagctctgacactggggctgtcgtgtctctttgtgggcagaaagcacaggtcccaggctgggcagagtgggaccctgtggctcaggaggcaggatgggcttgccggagaccccaccccctccccggggctggagctgaagcacagttgggctttgtgcagagtcacgaggggccgctgagggggaactgcgcccggctgagctcacaggcctcagttcttgtaagtggttttkaaagagtcagcggaaagtgctgactga

SEQ ID NO: 955371 - DNA, 639 bp, Homo sapiens
cgttcccacccctgggtatacacccaagagaaaggcgtgcaggtgctcaccaaacatatataccaatgtgtccacagtaacatggaccctaacagctaaaaaactggaagctgcccagatgtccatcaacagtagaatgaattccagtgcactcacacaatggaatactatatagcaataaataaaaggaatggatatttgcaacaacatggattaacctcaaaaatgttatgttggcagggtatgatggctcatgtacccccagcactttgagaggccaaggcaggtggattgcttgagctcaggagttcaagaccagcctgggcaacaaggcgaaaccccgtctccacaaaaaatacagaaattagctgggcatggtggtgcgtgcctatagtctcagctactggggaggctgaggtgggagaaatgcttgaacccagaaggttgagtccgcagtgagctgtgatcatgccactgcactccagcctgagcaacagagcaagattccatctcaaaacagcaacagcaacaacaacaacacaacaaaaaccctcaaaacattatgttgagttaaagaagccggacaaaaggctatgtactrtatgatttcttttatgtaacgttcaagaacttgcaaaa

SEQ ID NO: 955372 - DNA, 623 bp, Homo sapiens
taaatactgtgcttttccagtggtcttagcaaacggcacaccagaagattatatcctgtgcctggctcagcaggtcccatgcatatggaaccttgctcacygctagcacagcagtctcagatcaacctgcgaggcaggagcctggcagggggaggggcattcgccattgctgaggcttgaatagataaacaaagcatccagggaagcttgaaatgggcagagcccagggcagctcagcaaggcctgctgcctctgttgactccacctctgcgggcagggcatagctgaacaaaaggcagcagaaatttctgcagacttaaccatccctgtctaacagctctgaagagagcagtggttctcccagcacagcgtttgagctctgagaatggacagactgcctcctcaagtgggtccctgacccccatgtagcctaactgggagacacctcccagtaggggccaactgacacctcataaaggcgggtgcccctctgggatgacatttccagaggaaggatcaggcaacagtatttgctgttctgcaatatttgctgttctacagcctccactggtgatacccatgcaaacagggtctggagtaaacctccagcaaactccaacaga

SEQ ID NO: 955373 - DNA, 754 bp, Homo sapiens
tgctatcttaacctgagaatatttcaacagcctcgttcttcctatctgaagtgcatgcactctgaccgatgggccacatttggcctgccactagttttggtaaataaagttttttcggaacatagccaygcccattcatttacgtattgtctttggctgctgtcacactacaaaggcagggttgagtagttgtgactaagactcatatggcctgcaaagctgaaaatatttactctctggctagaattaccatatttagcaaatgaaaatatagaatgcctgattaaatttgaatttcagataaacaatgaataatatcgcatgggtcatacagacactaaaaacttatttgttgtttatctgagcatttacagtcatttattatttgcagattctatatttgcatatttgcctaatgctgaaatttatttgtattccctaaatcaatactcccagtgcttttgtggtcattcacagacatgcagagagcagcaaaaaattgagttgcccagtgcatatgttttcagcaggggctggacaaggtgatgctttaccttcttgttctagctctcctactataaacaactgttctttcctagtctacgtagcatcacagttttttttttgtatttttgtgctttttgttggtgattttgctgtttaaaatagccaccaaacatagtgctgaagccctgcctagcattcctaagccagagaaggctggaatgtgtcttatggagaaaatgcatatgtt

SEQ ID NO: 955374 - DNA, 713 bp, Homo sapiens
tgacgagttaatgggtgcagcacaccaacatggcatatgtatatatatatatgtcacaaacctgcacgttgtgcacatgtaccctaaaacttaaagtataattaaaaaaacaaaaaagaaagaccagtcttcaagctattaaattatttattctgtttggttgagtctgttgataaagctttcaactttattttgaaattcctaagtgagtttttccatttcattacctccaattgatttatttttaagatgtttatctcttcctttgtttcctgcattgctttagaattttctttgtgttgtttttcaacatcatcttagatattgttgaacttccttgaaatccatgttttgaattcttaatctgtcatttctgtttttccatttggttagggaccattgctgtagaactagtgtgatactttggtggtgtgtcaacattcagatttttcatggtgccagatcctataccagtttgttctcatctagaaaggctggcacttctaattattgtaattattttcatgaaaatagactttttttctcttttcctatatattctttctttccctttagggtatgactgkaaagtatattggaaaaagtcttttggctttgtttttatagctctgtgcacttatgttagtaggttttatattgggctgtgcagttcaacctacaggccagcagatagggcttgcaggtaagatcca

SEQ ID NO: 955375 - DNA, 566 bp, Homo sapiens
aggtcggcgtcggagggactggcggggcctgtggtggctcaggcagcagccaccaccctcagagctgcagcagcccccagagctggaaccacagcaggaagagactggaggtgggcatggggctgaayactggggagggcattttgggggacacttgggaggacacttaggagtacacttgggagggcatttaggggtacatttgggaggaggctggcactgctgctggctctgctggcaggacatctctgtagaagctgaataaagctgaaagacaatacaagcccaaggtcacttccttgcccttaaaattgaactataatttcacaagattttatctctaagatgaccagaatttattattatgattattattattatttgggatggagtctcactctgtcactcaggctggagtgcagtggtgctatctcggctcactgcaacctccacctcccggattcaagtgattctcctgcctcagacaggtgtgcaccaccacacccagctaatttttgtgtttttagtagagacgggatttcagcatgttggtcagtctcgaactc

SEQ ID NO: 955376 - DNA, 567 bp, Homo sapiens
tggttggaagacagggcaccaagtcccttggctgcatacagaaaggagcccctgggcctggcccaggaaaccattttttcctcctaggcctctgggcctgtgatggcagggcgctgacacaaaggtctctgacatgcactggagacattttccccactgtcttggtgaataacatttggctctttgttatgtatgcaaatttctgcagcagacttgaatttctcccaagaaaatgggtttttctttcctatcccattgtcaggctgaaaattttccaaacttttatgctctgctttcttttgaacactttgctgcttagaaatgtcttccaccagataccctaaatcatctctctcaagttcaaagttctatagatctctagggcaagggcaaaatgctgccagtctctttgcatagcaacagtgacctttactccagctcccaacaagctcctcatctccayctgtgaccacttcagcctggacttcattgtccatatcactggaattttggtcaaagctattcaacaagtctctaggaagtttcaaactttcttacatctttctg

SEQ ID NO: 955377 - DNA, 597 bp, Homo sapiens
ctccaaggccaccttcacttctgacaccagttgcaatttcaggggtcccaaagattactctcaagkttgataatttgctagaatgagtcacagagtggactgaaagctgttatactcatggatacaatttatagcagcaaaacaatgtaggttaaaattggccaacggaaggagtgcatagggaagagtccaggagaggtccgtgcccagacttttcagttgttctttcccagtggatttgtggacagtgctcacttcttcaggcaatgacctgtaacaatgtgcatgtagtattgccaactaggcaagctcactagagcttgaatgtcttaagtgtttattagggtttaatcatgtagacatgactggccacccacttggctgacctgtagtctccaacccctccagaacttgagctgatgccacatagctcaaagcctctaccatgaatcacattgtttgactaatcacattgttagcccaaggtgcccaaataaacaaaagcactcttgttagataggacatgccaaaggcttagagagtgtctcccaggagctaatggcaaaggccggatctctctttaggtaaaattaattc

SEQ ID NO: 955378 - DNA, 587 bp, Homo sapiens
tgaggttctttccttagctaggtctattttgctgataatatttctgatggtacactaaaattcctgtagtgagtttttcagttctatcaatcagtttggttctttctcaaaatggctatttygtctttcatctcttgtatcattttactatattccttagattctttcgattgggtttcaactttctcttgaatctcagtgatcttcattgacaaccagattctgaattctaagtctgtcatttcagccatttgacctggtgaaaaaccattactgaggagctagcgcggtcatttgcaggaaagaagacactctagctttttgagttgccagttcttgtgctggttctttctcatctatgtgggctgacggttctttaattttggaagttgctgtcttttggatggggcttgttgctatgatattctctgaggtccttgagggtttgattgtggtattagttgggttcagtcgactggcttcatttctggatgatttctggggtcccaggttcagctcaccactcctgggcttcatgctctaacactggggtgctgggaccaggcttgtcctctggccctcgaggt

SEQ ID NO: 955379 - DNA, 568 bp, Homo sapiens
gcacaatacaagcaagggcctgccattcctgaccttggtcaaccctgatatttcgtccatgtactatttcttccatgtacttttccttcaagtaaaaccattagaagtctgattttcatttccttccttcttttcccattcaaaaagagaagtgctgagtagtaagtagcaagagttccactccaatgtcagggttctgtggctcttgcctctctgatcacttaaccaggaaaggtaaggaagaagctactcaacctaattatagataaaaatagcatggcatttgagtgtctgtgcttttatctgaagaaggaaataaggtaagaccctaatcttaaatgatgcatatacaaatagcggtagcatttagttatttttatggataaaatagctttttaagttaattttctttaactttgatgctgatggcacaatagcatgatggcacctctgtgtcattataaaatgtctatcatctccttacggactaaaagcaggaaagaaaaaaaaaagtagtcctgtttcaggctccaaagtgaggcaccratttagcacttgtcttctcttc

SEQ ID NO: 955380 - DNA, 618 bp, Homo sapiens
ccctgcaagcacttgcatacacattttcagccccaaaccccatagtcatggttatgattgctgctggcatctgcctccatggatgtacctacagtaggccccagcccctgccaccatgttcatgcacactgctaatccaagccactcttgcctttagccttagttctccactgctgggcccagaggcactgtggaggactccaacagccctcacattccctacagaccctccatagctctcaccaacaaggacctcacagttgccaacatcataaacatcagttgcgtgagctgacaaggcaccatgttcctccagacctagaagcaaccacatccctccacacatggtataaggtgctatagcactctctagcatgcctcccaacccctgcagttgaaggtctttctttaccaagcccagtccgtaagtcaggaagaggtgactgcttcttcaaatgtgcagatacctatgcaaggccatgatcaggaagaatcaggaaaacatgacaccagcaaaagaacacagtwaacttctaataactgacaccaaagaaatgaagatttggccaggcatcatggctcacacctgtaatccccagcagtttgggaagctgaggc

SEQ ID NO: 955381 - DNA, 597 bp, Homo sapiens
gctcctcattcgccttccaccatggttgtgaagcctccccagccatgtggaactgtaaatcaattaaacctctttcctttgtaaattacccagtctcaggtatgtctttatgagcagcataaaaacagactaatacactgctcaaacaacttcctttagccactctataagagtagatctgctggcaacaaagttttaaaaatttccttaagttgagatatatttatttccccttcattcctgaaggttaaactaatataaaatttgtggttgacagggctggtttttcctgtttgtttgtttggtttgttttctttttattccagcacttgaaaaatgtggacttcttctggactccatggtttcagatgagaaatctgctgacattacattctatattcctctttgagttgtttctctctggctgctttcaagatttatttctttgtctttcaaaatgttcagaagtttgactatgttatctcttggtataaatttctttgcctgtaatgcctttgaatttcactaagtttcttgtagctgtaactctgtgtgtgtgtgtgtgtgtgtgtgtgtgygtatgtgtgtgttgtaacc

SEQ ID NO: 955382 - DNA, 503 bp, Homo sapiens
aaggctaaactgggactggtgaatctgctttcaagctcagttacctgatgattagcaggcttgaattcccrtctggctattgggcaagggctttagttcctcaccatgtgggcctctccatagaactgcacacaatctggcagctagcttcctccagagtaattgatctgagagaacaagaaagcatgaatgagagtgacccacacagaaggtgcagtcttttataacctaatctcagaagtgacataccatcatttccactatttgctagtgatcagagtgcaaccatgctacagtgtgggagagaaccacccaaggatgtgaataccagtagacagaaatcataaaggatcatcttggagactggctgccacaatgcctaataagcccaactgagactagcagaagaaccaaatggctaagcccagccctggttgccaacccacagctttataaatggtgttgtcataaatttcagggtagccagttaaggagaaatagat

SEQ ID NO: 955383 - DNA, 503 bp, Homo sapiens
aaggctaaactgggactggtgaatctgctttcaagctcagttacctgatgattagcaggcttgaattcccgtctggctattgggcaagggctttagttcctcaccatgtgggcctctccatagaactgcacacaatctggcagctagcttcctccagagtaattgatctgagagaacaagaaagcatgaatgagagtgacccacacagaaggtgcagtcttttataacctaatctcagaagtgacataccatcatttccactatttgctagtgatcagagtgcaaccatgctacagtgtgggagagaaccacccaaggatgtgaataccagtagacagaaatcataaaggatcatcttggagactggctgccacaatgcmtaataagcccaactgagactagcagaagaaccaaatggctaagcccagccctggttgccaacccacagctttataaatggtgttgtcataaatttcagggtagccagttaaggagaaatagat

SEQ ID NO: 955384 - DNA, 626 bp, Homo sapiens
acgatgttatccttgatgtctggggttgagatctgcaggcggacactgccactatcaaaggatcgtgtgaaatcaccagaaaacatctcgtagatcatccgagccactactggaatgacctgttcaggacacagaacacaggtgtatcctctgaggaaaaggtatttttaaatagcacaatggacccaagattgaaggacagaccaaagaggccctgaggaagaccccattctgatgtctaaatataggatatgccttcatctctctggaccatccttctgccaaggctcactgtggaagttggttcaaatgaaggtaaagaacctagatgtaacattacatcacaggcctaaataaatgactgcttactttgcaagactttttacaaaatatcatctattgcttgccttgctacacaactccaggggcaaagcccaagtggccttgctgccacttcctagaataaatttatattcctaaaagtaactcaaaaggtttttctaagaaaggctggaaagggccaggtatcgtggcttacacccataatcycagcattttgggaggctgagacaggaggatcacttaagcccacgagttccagaccagcatgagcaacatagtgagac

SEQ ID NO: 955385 - DNA, 739 bp, Homo sapiens
atatcactatagttgtgaatcgaactgaataatgattagaagaacaaacattagagtgaataaactcagcagaaaggacatgttctttcatttctcttgtgtaactatctagatttggacaagctgagccatatggcaggtatatgtttactttttgaaaaatccccaaactgttttccaaaggaattgttccattgtacattaagatcaacaatttgtgagtgttccagttcctttacatccttgctagcacttggagcgttagtcattctaatcagtatgtactggtacctaattatgatttgaatttgcattgcctcataactaatgatgctgagctactttttctgagtttatttgctatcttcacattttctttggtgaaatatttcttaaaatcttttgcccattgtttttattgggatatctgttttcttatttttgagttttgagagttatttatatattcaggatgcaatttatatattcaagatgcaagttttctgatggacatatgatttgtaaatattttctcccagtgtatagcttgtcttttcattctcttaagaggatatcttaaagatttggacataaatgttcatataakctttatctgtaatagccaaaatatggaaacaacctgaatatacacccacaggtgagaagataaacaaatggtggtatctaatccatggaaaactatgcagcaaaataaagcaaagaattgttgatgcataac

SEQ ID NO: 955386 - DNA, 611 bp, Homo sapiens
ggccggtcttgaactcttgggctccagcgatcctcctgactacctgggcttattggcacaggccacagtgcccatttagttttttccttttaaaatacagttttaagaarcaaagatggtttatttatttagagacagggtcttgctctgttgtgcaggctggagtgcagtggtgtcatcataattcactgcagcctcagcctcccaggttcaagcaatccccctgcataactgagactacacagtgaaccaccacgcccagctaattaaaaaaaaatttttttttttttagaggcgggatctcactaggttacccaggttgatcttgaacccctgagctcaagcaatcctcccgcctcagcctcccagagtgctgggattataggtgtggtccaccgtgcccagctcaaaaatggtttctaatctcatcatgtagatattcctcctaatgttgtgttttgtttgtttgtttgtttttgagacagagtctctctcagtcacccaggctggagtgcagtggcaagattatggctcactgcaacctccgcctccctgattcaagcaattctcctgcctcagcctcctgaggagctgggaccagaggcatgcgc

SEQ ID NO: 955387 - DNA, 580 bp, Homo sapiens
aaggggtcaaggtacagcttgggccatggcttcaaagggtgtaagccccaagctttgacagccccaacatgatgtcgagcctgagggtgcacagaagtcaagaattggggtttgggaacctccrcctagatttcagaagatatatggaaacgcctggatgcccaggcataagtttgttgcaggggcagggtgcttgtggagaacctctgctagcacagaagggaaatgtgggtcagagcccccacacacagtgcctactggggcactgcctagtgaagctgtgagaagagggccactgtccttcagaccccagaatggtagatccactgacaatttgcacacttcacctggaaaaggtggctgtactctgcaaagctacagagatggagctgcccaagaccatgggaacccacctcttgcatcagcatgacctggatatgagacatggagtcaaaggagatcattttggagctttaagatttgactgccctgctggagtttggacttgcatggggcctgtaactcctttgctttggccaatttctcccacttggaatggctgtatttacccaatgcctat

SEQ ID NO: 955388 - DNA, 611 bp, Homo sapiens
ggagtctctgttagctcctagaggtgctttcatgccctagccacatgcctctctcacagcatagtgacatgagaatgtctctttaataagggctcacctgattaggccaggcccacacagggcaatrtgccttcttgttaatccaaagtcaactgactagggatcttaattgcctctgcaaatctctttacttttgccacataacataacctaattatgagaataacagtccatcacactcacagattcccgtagcactcaaggggaagggatgacgcaaggtatggttattaggtgtcagaaatctggggaccattttagaattctgcctaccataggtccctaggaagttgattgactctaagatgagattccatgttagacggtccttagtgagggccatcaagatgaacagttgtggccaaaaggaaggacaaagccctgagtggaggcataagtcaggctacggaatagtcacaataaggcttcagtcaactccacgggtagctcatggctggctggcattttagaattgtacctagttgggggaagaggttgtgtttgtataggctgtcttatgctagtcattggatatgagatctcctgggagg

SEQ ID NO: 955389 - DNA, 672 bp, Homo sapiens
gagctaagatcacaccactgcactccagcctgggcgacagagcgagaccctgtctcaaaaacaaaaacaggctgggcrtggtggctcacgcctgtaatcccagcactttgggagacgaaggcggatggatcacttgagcccaggagttcgagaccagcctgggcaacatagtgagcccctgcctctataaaaacaaaaacaaaacctaacaataagactattcactgcttatttaataatttgctattatatatcttaatatagtctcagaatctgctcaataaatactataaaataattgaaagtattatataatcaaccacatcacattaacaaaaaaataaaggtcccaaatagaacaggaaagactaaaaacagagaagtcgatctcaatcaccttgtaggtctgtcacctttattttcatatcataagagcctgttagcaagtagtgagctccaggggagaatcgaacagagcgaacatcactggaatgaggatgataactttgtaccattcttcctcctcttatgtcatacaacatgcagctagaatcttcttgacctgtggctaagagacgaccactgggatctacagctacagatgccactgcactgcctgtagtggtaggaatgaaagtttaaatacagaaaatcaatatacccaaatggcaa

SEQ ID NO: 955390 - DNA, 623 bp, Homo sapiens
aacatacatctgcattttaactaaggtaacagtacaattatcyttccttgacatggagcccaaggtccaacattcctgtgacaacttgtgtgttatgataaagtgttttacgattttataacatctaatgttggtatgaccttagatctaaagatttaaaaccttgagaattcatttagaacttcacggtcctgtttcccaggcagtaaagttctataaacaagaatactcattctcaatattatcaatgactcaaagacatgaacatataattcacagaaaaaagcacacaaaatgttcatatttgctggtaacaaaagaaatgcaagtaaaacatgaatttaaacaaaaattaaatattatttttgtccataaaattgatattacccaaaaatataatattcaataattatgagggtgtagtatagggaaagaagtatacattgatataaactctctggaaaactattcttttgtgatataattccaggcttgaatcacagacacatggagacacatatacagcataatatttagcctatcagaatatatatacacacacacacacacacacacacacatatatatataatgtacacttttgttaaaattgtgaaatcaat

SEQ ID NO: 955391 - DNA, 584 bp, Homo sapiens
ctaccagatgtgcaaagaagagctgataccatttctgctgaaactattcccaaaaaaactgaggaagagggactcctccctaactaaatctctgaggccaacttaccctgatagcaaaacctggcagagacacaatgaataaggaacacttcaagccaatatacttgatgaacatcaatgtaaaaatcctcaatgaaatactgacaaaccaaatcccacagcacatcaaaaagtatatctgccacaatcaaataggctttattcctgggatatcaggttggttcaacatacacaaatcaataaatgtgattcatcacatcaacagaaccaaagaccaataccacatgattatcttaatagatacagaaaaggcttttgataaaattcaacactccttcattatgaaaaactttcagcacactaggtattgaaggaacatacttcaaaataataakagccatctatgacaaaaccagagccaacatcatactgaaagggcaaaagctggaagcattccccttgaaaacctgcacaagaaaaggatgccctctctcaccactcctattctaaatggccttggaaat

SEQ ID NO: 955392 - DNA, 584 bp, Homo sapiens
ctaccagatgtgcaaagaagagctgataccatttctgctgaaactattcccaaaaaaactgaggaagagggactcctccctaactaaatctctgaggccaacttaccctgatagcaaaacctggcagagacacaatgaataaggaacacttcaagccaatatacttgatgaacatcaatgtaaaaatcctcaatgaaatactgacaaaccaaatcccacagcacatcaaaaagtatatctgccacaatcaaataggctttattcctgggatatcaggttggttcaacatacacaaatcaataaatgtgattcatcacatcaacagaaccaaagaccaataccacatgattatcttaatagatacagaaaaggcttttgataaaattcaacactccttcattatgaaaaactttcagcacactaggtattgaaggaacatacttcaaaataataatagccatctatgacaaaaccagagccracatcatactgaaagggcaaaagctggaagcattccccttgaaaacctgcacaagaaaaggatgccctctctcaccactcctattctaaatggccttggaaat

SEQ ID NO: 955393 - DNA, 619 bp, Homo sapiens
ctctcatttcagaactcagacaacataaagatgtccattttcaccacttctactcaacacagcactgaaaatcctagcttgagcaatcaggcaagaaaataaaaggcatctgaattggaagatgggaagtcaaattgtccctttttgcaggtgacaaaaatctcatatctagaaaaatctaaagactccaccaaaaaactcctagatttgacaaacaaatttggtaaggtttcatgatacaaaaatcaacatagaaaactcagtactgtttctcatagaagggagcaactcacactggggcctgtcagagggtgaagggtgggaggaaggagaggatcaggaaaaataactaatggatactaggcttaatacctggataatgaaataatctgtacaaaaaactcccatgacacaagtttacctatgcaacaaacctgcatatatacccttgaacttaaaagctaaaaataaaataaagaagaagcttaaaaaacaaaatttagtattgtttctatatacyttaatgaaatagctgagaaaaaatatcaagaaagcaattccatttacaatcgacacacatatacaaatacctaggaataaatttaactaaagaggtgaa

SEQ ID NO: 955394 - DNA, 571 bp, Homo sapiens
tggaaccaacctaagtgtccatcaacagatgaatgaataaagaaaatatatatttacacaatggaatactattcagmcctaagaaagaaggaaattctgtcacttgtaacaacatggataagcctggagaacattatgttaagtgaaataagacaaacacaggaagacaaatacagtatggcatattctcacttatgtatgaaatctaaaaatgctgaactcatagaagcagagagtggtggttaccaggtgccggaagtggggtgggagttaaggaagattggtcaaaggataaaacatttcagttagacagaaggactaagttcaagagatctattttacaacatgatgactgtagttaataacaatgtattgtatacttgaaagctgtttaagagagtagattttaagtgttctcaccacacaaaaaaataagtattcaaggtgatgcatatattaattagcttgatttagccattccacaatgtatccatatttcaaaacatcatgttgtacacaataaatatatacaacttttatttgtcaattaaaaaattaatattttttaaaa

SEQ ID NO: 955395 - DNA, 658 bp, Homo sapiens
aaactcctttgggtggcacctgacctagatgaaaaagaagcaaaggacactgaaaaggaatagccatagaaagttagaaaaccaacttggtatccaagttaaaatatttaaggagtgtgtgaccgactatgttaactgttgctgatgggacaagttgactgaaattaaccattacattcaacaaggtgggtcattagtgccctttacaagaacaagttcagagtgaaggcctgacttaggagggtttaaaagataagaagagttgaatttctaaaagtaagattacaatcacatggagatttcctataaaaaggagaaaagaaatgtgacagtagctagaaagagaagggtgataaagaacttttatgatgggaaaaataacagtatgtcaatgggttggtgacaataatacaatagcaaagaaacattgatgatgtggaagaaatgagggagaagagctagagagatatgcttgagtagatgaaaggcatccagttcaggagttgtggattatagagaaacatggaaattaatctatgggcaacaggaatggaggyctgtgatgtgggtacagatactgctaaacatgtcaatatggtcttgggactctgtgaaaattgttttccaaaagctttggttttctcagtgaaatcaaggg

SEQ ID NO: 955396 - DNA, 561 bp, Homo sapiens
aaagcagccagactgttttccacgcaggttcacgtccccgccacttctckctaaacaaggcctcccagcccgacagcccagccacccactgctacctgggctatctggccggcagcagctctgcacttccctgggactgagctcccagtggtggcaggtaggactgccatttttgctactctgcagctttgccccctactgccctgagtcttgggagggagaaaagtgattaagaactaaagtgggccctcagcaagcatagctaccttacagaaaggcagccagacagtattccatgtatatccctgcccctgttaacttcactgggcagggcctcttgtcctgggcccccagcacaaccatcgtgccactacctaaacacttcagttggtagaggctctgcatttctctgcaaaggaaatgccagagaaaacctacagccactctcccattgcagttgcatggaaccactcttactgcccatatgctggaaaaggaacaaatggcctggttgtgtcaccggcacctccaacacaccacagcaacaatacagagaggagg

SEQ ID NO: 955397 - DNA, 555 bp, Homo sapiens
gatgggcttccctttgtgggtaaccagacctttctctctggctgcccttaacattttttmcttcatttcaactttggtgaatctgacaattatgtgtcttggagttgctcttcttgaggagtatctttgtggcgttctctgtatttcctgaatttgaatgtgctatggtggtttgctgcatccagcgacctgtcatctacattaggtgtttctcctaatgctgcccctcccctagaccctcaccccttgataggacctggtgtgtgatgttcccctccttgtgtccatgtgttctaattgttcaactcccacttatgggtgaaaatatgtggtgtttgattttctgttcttgtgttagtttgctgagaatgatggtttcaagcttcatccatgtccatacaaaggacatgagctcatccttttttatggctgcatagtattctgtggcgtttatgtgcaacatttttttttatccagtctatcattgatgggcgtttgggtgggttcgaagattttgctattgtgaacagtgctgcaataaatatacgtgtgcat

SEQ ID NO: 955398 - DNA, 612 bp, Homo sapiens
tgcccttttttatctttctcttgtctgattgctctggtaagcacttcctttctatgcagaattgaagtggttaaagtgartgcgtatccttgtcttgttccagttctcagagggaatgctttcaacttttttctgttcagtacaatgttggctgtgggtttgtcatagatggcttttattaccttcaagtatgtcctttctatgccaattttgctgaggattttaattatagaggaatgctacattatgtcaaatgctttttccgcttctattgagacgatcatgtgattttgtttttaattatgatgtatcacatttattgacttaagtatgttaaaccatccctgcatcctgggtatgaaacccacttgatcatggtggattatctttttgatatgctgttggatccagttagctagtattttgttgaggatttttgcatctgtgttcatcagggatatcagtctgtagtgtttttgtttgtttgtttgtttgttcaatatgtcctttgctggttttggtattagggtgatactggcttcatagaatgaattagggaggatttctttctcaataggattggtaccaattcttctttgaatgtctgataga

SEQ ID NO: 955399 - DNA, 378 bp, Homo sapiens
gaccattctatggtcgtttggcatttgaagcaaatkggaaaggtgaaaaaagctccataagtgggtgcctcatgagctgagcaaaaattttaaaaaatcgtcattttgaagtgtcatcttctcttattctacacaacaacaacgaaccatttctcaatcggattgtgacatgagacgaaaagtggattttatacaacaaccagtgattggactgagaagaaactccaaagcagttcccaaagccaaattttcaccaaaaaaaggtcatggtcactgtttggtggtctgctgctggtctgatccgccacagctttctgaatcctgacgaaaccattacatctgagaagtatgcttagcaaatcagtgagatgcaccaaa

SEQ ID NO: 955400 - DNA, 614 bp, Homo sapiens
cattacagagaaatattttatctgagacacttatagatcataaaaaatataattattttaattaattacattgaaaatatttggttatatgtttaagtattaaaatgcattaacttccccatatttttcaggaaaccaacttaaaatttctttgcatggcatagtctgatttttttataacatagtgccaatatacctgttagactcagttattaatgttcatatagaactattttcattcatttacttattcagcaggtatttgttaagaacttggggttaaaaagatgaacaaaacagacaaggtctctgacatttatatgcaaaaaaatacaaataaatctaccacctaccaccaaataaacacaaaatttaaactaccaatagttcatcacactgttacatgtattttacctgcctaaaatacaaataaatctaagactttactcatgcgttaaactcttcataatccttccaaactcaactgattcattcaagcatatacttsttgggacatttccttactaccacctatacacttttctgaagtagttacctcttttttatttactattccacaattttactttagtattattctttgagttctggga

SEQ ID NO: 955401 - DNA, 568 bp, Homo sapiens
ctgaagttaggtaaagagttcttagacatgacagtaaaacacaacctatagatgaaaaaagtgatcagctgactttatcaaaattaaaaacaagtgatctgcagtagacactgtcaagaggacaaaaaagacaacctaccaactggaagaaactatttgccaatcatacatccaacaaaggacctgtattcggaatacataaagaacactctaaactcaacaacagaaaaacaaacaaacaaatgaattaaaaaacaggcaaagcttattcactgaaaaggatacatggatggcaaataagcacatgagaagaaggtcatcatcattaaccattaggcaaatgcaaattaaaaccacaatgagatactacttccaaaccatattagagtggttaaaatgaggccgggcatggtggctcatgtctataatcctagcastttgggaggctgaggcaggtgaatcacgaggtcaggagttcaagaccagcctggccaacatggtgaaaccccgtctctagtaaaaatacaaaaagttagctgggcatagtgacaggtgcctgtaatgccag

SEQ ID NO: 955402 - DNA, 568 bp, Homo sapiens
ctgaagttaggtaaagagttcttagacatgacagtaaaacacaacctatagatgaaaaaagtgatcagctgactttatcaaaattaaaaacaagtgatctgcagtagacactgtcaagaggacaaaaaagacaacctaccaactggaagaaactatttgccaatcatacatccaacaaaggacctgtattcggaatacataaagaacactctaaactcaacaacagaaaaacaaacaaacaaatgaattaaaaaacaggcaaagcttattcactgaaaaggatacatggatggcaaataagcacatgagaagaaggtcatcatcattaaccattaggcaaatgcaaattaaaaccacaatgagatactacttccaaaccatattagagtggttaaaatgaggccgggcatggtggctcatgtctataatcctagcagtttgggaggctgaggcaggtgaatcacgaggtcaggagttcaagaccagcctggccaacatggtgaaaccccgtctctagtaaaaatacaaaaarttagctgggcatagtgacaggtgcctgtaatgccag

SEQ ID NO: 955403 - DNA, 630 bp, Homo sapiens
cactatttcagacagacgattcatcttttaaacagatgatgcaagcttacggtattgataaatgcagtatggtatagtaaawgtattttctcttcctcatgactttcttgataatattgtatttttcctggcatactttattgtactttattgtgagaatacagtatataatgcatataacatacaaaatacacgttgattgactgtttatgttctcagtactgcttctggtcaatggcgggctattagtagttaagttttgggggactgaaaagttatatactgatttttactgtgtgggggcttggcaaccctaactcccatatggttccagggtcaactgaaattgcatcttcgtctgttctattgtagcatttcatacctacattccttgcaatatgtatgatgttgtagagttttatcattgcctataggcttctctttgttgattgtgatctgctcaaaggtagaggccgttatttctttatttctttattgttttatttatttttgagacagggtcttgctctgttaccaggctggagtgcagtggcatgaccacagcccacagcagcctgcatctcctgggctcaagcaatccacttgcttcagcctctcaaatagctggga

SEQ ID NO: 955404 - DNA, 465 bp, Homo sapiens
ctctttaaatatcaagctctgctgttagaagggtctacaatccaattgaaaacttgtcctcacctaaacccaaccactttcctccccgaggaaactgrggaacctgaacatgactgtgagcaagttgtggtacagacctatgcagccagggaggatctcagggacactcccctacaaaatccaggctggacccttttcatagatggaagttcctttgtagagcaaggagtctgtaaggcaggatatgcagtcatcactctgaatggtgtttttaaagtgcatccctctctccaggcacaagcactcaactagctgaactaatagctcttataagagcacttgaattaaggaagggaacagtagctaatatttacactgcctccaagaatgcttccttagttctctatgcttatgctgccatttggaaggaaaaacactttcttactgctaatggatctcctataa

SEQ ID NO: 955405 - DNA, 465 bp, Homo sapiens
ctctttaaatatcaagctctgctgttagaagggtctacaatccaattgaaaacttgtcctcacctaaacccaaccactttcctccccgaggaaactggggaacctgaacatgactgtgagcaagttgtggtacagacctatgcagccagggaggatctcagggacactcccctacaaaatccaggctggacccttttcatagatggaagttcctttgtagagcaaggagtctgtaaggcaggatatgcagtcatcactctgaatggtgtttttaaagtgcatccctctctccaggcacaagcactcaactagctgaactaatagctcttataagagcacttgaattaaggaagggaacagtagctaatatttacactgcctccaagaatgcttycttagttctctatgcttatgctgccatttggaaggaaaaacactttcttactgctaatggatctcctataa

SEQ ID NO: 955406 - DNA, 563 bp, Homo sapiens
ttccttcttagcatttccattttctcacacaaaacccctcttaattttgccatgtttaaaatttctcccttaaccggtttcatcccagtcttccccatccttataaatggcatccagtcccttgtcactctcctctgctccttcagtcctctcccccaacacttcgtcaatgcaaatcatcagcaaattcaagactttttatcttcaagttttgtctccgatccttctacttcttgtcacttccaccactagcagcacactcgtggccaccaccatctctcacctaacctgctacaagagtctactgctggttatgcttctctcaccctgcatctactcaagcctttccccacagcagccagaggaacttttcaaaagtacaaatgtgatcaagcaagtcactattctatttcaaaccttcaattgcttctcagagcacttaaaatacaaacctttcccagtgcctttctccaactcatcttgtggcacttgtctcccygctgctgtgctcccgctattctggcttccttgctgtccttcaaacatgccaagctctgtatcaa

SEQ ID NO: 955407 - DNA, 585 bp, Homo sapiens
agatctgggaaggagtcagtcagagagccttgggccagagttccaggggctctgggagtggctgccaggtgagttgaatagtccgattttcagtggggtcccacamagatgggacgcggcttaggaggaatcccgggctacgggcattccttggcccggtggccagatttccagcacgtgtagcaagctcctgggggaggaggttctggaggaatgcctagctgctgcggttcaggcatttggaagttcttgtgtgctggagatgcggctggggtttgtctcacagtggaggcaaggaattgcaactttttttctgttattgtacaccttgaaggtgaggttaattaagtcctgttgtggggtttgagggccagattccaatttttggagttttatttaatgtcgggagcagattgggtaataaaatgtattttgagaataagacggccttttgaccttttagggtctagggctgtaaagtgtctcagggttgctgccaaacgagccatgaactgggctggatttttatatttgatgaaaaagagcctaaacactatctgatttgggataaacaaaaaggaaagg

SEQ ID NO: 955408 - DNA, 558 bp, Homo sapiens
atctgggaaggagtcagtcagagagccttgggccagagttccaggggctctgggagtggctgccaggtgagttgaatagtccgattttcagtggggtcccacacagatgggacgcggcttaggaggaatcccrggctacgggcattccttggcccggtggccagatttccagcacgtgtagcaagctcctgggggaggaggttctggaggaatgcctagctgctgcggttcaggcatttggaagttcttgtgtgctggagatgcggctggggtttgtctcacagtggaggcaaggaattgcaactttttttctgttattgtacaccttgaaggtgaggttaattaagtcctgttgtggggtttgagggccagattccaatttttggagttttatttaatgtcgggagcagattgggtaataaaatgtattttgagaataagacggccttttgaccttttagggtctagggctgtaaagtgtctcagggttgctgccaaacgagccatgaactgggctggatttttatatttgatgaaaaagagcctaaacactatctg

SEQ ID NO: 955409 - DNA, 636 bp, Homo sapiens
  misc_feature 1, 2, 3, 4, 5, 6, 7, 8, 9, 10, 11, 12, 13, 14, 15, 16, 17: n = A,T,C or G
nnnnnnnnnnnnnnnnnacgtggctcatctgctgagagctgctccagccttgagcccgccctgcactggcctgttgagatggccaggtggggtgggygtggagtgggtggtgcatatccctttgcagacccatggccaggcctgggacctcttggtctccagccttgcaggcacacttgggcagggaccagagcctttcagagggaatggtcgtgtgtctggatggcacaacagccttgaacaccacagcccaccatgttgatctctcagcccagactaaagcaaggcatgcatcccagaggggagctccccacggagagaggctatttacatagacttggggagtaagcagtggagaccgggaggggccgcatccaagcacacaccaggctccatgtgggctctgggagtgccaggtcctgctgcagacaggtctggggctggttcctgcagctcctggcagcagcgaggaccctgcctccttgagagacagcttgccagcacagagcagggtggagagagagtctgggagagcctgggaacgcaacactttaggggagcttccctggagacagagacctctggagtcctggctgccctgcgtctcttggaaaagtcattgaccctccctgagcc

SEQ ID NO: 955410 - DNA, 591 bp, Homo sapiens
ccactggccagagcccgctgcacagagaagtcagcagggaggccccctagtactggggccctgtggctgcccagtgagacggcgtaarcgctgcctggcagcctggtccatcagcagactgagcacagacgtagcggagcctgcgtctcatccacatatcctctggcctggcctttctgcagtgaacatgttctcgatagcgccgccccaccttttctgcatcataagaaacagaaacctgttatctgctttcctaaggtggcttccaggtggctccccaacgtgtccctccagccatcacatctcatttgaatactgttttcattttcttttcatggattttccaaaacttggctgcttgattatctgctgccatgtaacagaccgccctaaacttagcagctttaaaaacacatacgaggtcatagctgtgagtgtctcaggacccaggagtggcttttctggggctctggccctggtcaccttggggcttccagaggactcatctccgagctcactggggctgtgggcaggggtttctgcccctccccctcgggcctctccctggggctgctcagggcaggacatccc

SEQ ID NO: 955411 - DNA, 777 bp, Homo sapiens
tctgtggaccactaaagagcaaggatggactgccccaaccagtttttgtaatttcctaaaaccatacattcattttactagaggattatagaagttaaagacttaaaacaaactttagcaattaagacaggataccacgatgcaaatgcctagttaaaatggatcaaatattccatctgcacgttaaacaaaagcaattgttatgctcgtgcacatggcagaccagaggcccagattgtcccctttccactaaggtggtcctccagtcgaccaggcgtgggctgcatggtagctcttttccaggattctacagtctggagtaacaagacgtgccaagctctctctgctatatcccaaagtccagcaccctgagggtcagcccccgagggccatccagcttccatcttccaacactaagttcatttcgtgtctctcatgacagggaggaaacttagcattccttggatacctgaaaggatgcagtgagcttaagaattttcgagagcttatcaatcagtcagcccttgttcatccctgagcggatgtgtggtggtattgtggtggacctttactgggcactctgctgaataactggagtggcacttgtgctttagtccaattggctatccctttcaccctggcatttcatcaaccagaaggaaaaaaaataagacactgtaaagcgagagaagccccttaygggtctttcgactctcgtgtctatttaaatgcaactggagtcccacgaagaatagcagatcaatttaaagcttgaaa

SEQ ID NO: 955412 - DNA, 651 bp, Homo sapiens
cccttaagccaaaacttaatctagatcaaatccctaactcyctttaattttatgaaggctgagagaggtgaggaagttgcagaagaaaagtttgaaggtagcataagttggctcctgaggtttagggaaagaagccatctccagaacataaaagtacaaggtgaagcagcaagtgctgatgcggaagctgcatcaagttctacagaagatcgagctaagatcactgatgaaggtggctacactaaacaacacattttccatgtaggcaaaacagtcttctattggaagaagatgccatcaaggactttttttttttttttgagatggagtctcactctgtcacccaggctggtgtgcagtggtgcaatctcagctcactgcaacctccatatgctgggttcaaacaattttcctgcctcagcctcccaagtagttgggactacaggtgtacaccaccatgcctgcctaattttttgtatttttagtagagatggagtttcaccatgctgaccaggctggtctcgaactcctgacctcatgatctgcccgcctcatcctcccaaagtgctgggattacaggcatgagccaccatgcccagccagccacctaggacttttatagctaaagataactcattgcctggattcaaa

SEQ ID NO: 955413 - DNA, 646 bp, Homo sapiens
gcactgatcttggttgtggagtaggacgggggctcggctgggagcttgggcagtgatcttggttgyggcgtaggatgggctcggctgggagcttgggcagtgatcttggttgtggagtaggacgggttcggctgggagcttgggcagtgatcttggttgtcgagtaggacgggtttggctgggagcttgggcagttatcttggtcgtggagtaggacgggggctcggctgggagcttgggcagtgatcttggttgtggagtaggacgggggctcggctgggagcttgggcagtgatcttggttgtggagtaggacgggggctcggctgggagcttgggcagtgatcttggttgtggagtaggacgggggctcggctgggagcttgggcagtgatcttggttgtggattaggacgggggctcggctgggagcttgggcagtgatcttggttgtcgagtaggacgggggttcggctgggagcttgtgtgttacttgtgttctgtgacctttcctgggggaggcaggcgtcaggacagatggccccacaggctaagcgtctgtgttctcacaggacatcctaggagaactgggtggtgatgggttctgacagatggccaggctgtggggtcacacggttggcggtggcg

SEQ ID NO: 955414 - DNA, 646 bp, Homo sapiens
gcactgatcttggttgtggagtaggacgggggctcggctgggagcttgggcagtgatcttggttgcggmgtaggatgggctcggctgggagcttgggcagtgatcttggttgtggagtaggacgggttcggctgggagcttgggcagtgatcttggttgtcgagtaggacgggtttggctgggagcttgggcagttatcttggtcgtggagtaggacgggggctcggctgggagcttgggcagtgatcttggttgtggagtaggacgggggctcggctgggagcttgggcagtgatcttggttgtggagtaggacgggggctcggctgggagcttgggcagtgatcttggttgtggagtaggacgggggctcggctgggagcttgggcagtgatcttggttgtggattaggacgggggctcggctgggagcttgggcagtgatcttggttgtcgagtaggacgggggttcggctgggagcttgtgtgttacttgtgttctgtgacctttcctgggggaggcaggcgtcaggacagatggccccacaggctaagcgtctgtgttctcacaggacatcctaggagaactgggtggtgatgggttctgacagatggccaggctgtggggtcacacggttggcggtggcg

SEQ ID NO: 955415 - DNA, 610 bp, Homo sapiens
aaaggtgactgagatttttaaagagagaacagaaagggaacgaaagggggctctagagaaattaaagacagaacaaaaaagagacctgggggcgctatgaggaaatggaaaatttcagaaagggtaagtggagaattattgaaagtggtttggcaaagtggattgggattacgggcattttatggtttggcagcattttgtttgcttgagcaaaaaattcagcatagaaggctggggtcagctttagggacacaacttggtacaggtggaggccaggctcaaatgtagtcaggtctcttggcacggtgttctggtaagttcttcgggccacatgggaggtcacagtaaccagtggtaagggagtggaggggagagtggagctccctgtaggagtacaggaacagtgtttcaggattttgaaatgaccgattatcctgagggtaaaaacattcgtctcctgtccatgtcaaggatatggacaattatccagggctttctaatccaaccaatacaaatattttaaatayaaaggtatttgaaattgaggaacaagctgggcgctgtggctcctgcctataaccccagaactttgagaggccagggcaggcgg

SEQ ID NO: 955416 - DNA, 587 bp, Homo sapiens
ctttgaaaccactaaaatctttagtttatctrtttttgcttttattgcttatctttcggtgtcatatctaagaaaccattgcctcatccaaagtcagaaagatttacattttttaaagagagttttatagttttagctcttacattaggtcaatgatccattttgagttaatttttatgtatgacataaagttcaggtccaactcattattttgcatgtgaatatccagttgtctcagtactgtttattgtaaaaggctattctttcccatagaatcatcttggcattctttgcaaaaatcagttaaccagaaatgtaaggggttctttttggattctcagttctattctgttgatatatttccatcctatgccagtatcacaatgtcttagttactatagattttaagtaagttttgaaatagggttgtgtgagttctccaactttgttcttttttcacataattattttagggattctgggtccttgaattgttatgtgattttaaatattggcctatcaatttttgcaaaaagtcatctggtatttttatagagattgtgttaacaatattaagtcttctaatc

SEQ ID NO: 955417 - DNA, 566 bp, Homo sapiens
ctgctaaaatttgtcaaggatttttgcatttatgtttatgagggatgttagaatacactcttcttattctgtttttgtcttagtatcagggtgatagtggcttcaggaaataagttgagaaatgttttctcttcattttctggaaaagactgtataatttatatcattttatctttacatattgagtagaatttacaagtaaaaccccatgaacctaggtatttcttttttgggaagttttaagcttttaattcacatttattaatacttataggactatgcaggctttatagctcatcttaagtttttgtagcttgtggttttcaagaaatcagcccacttgatttaacttgtcgaatgtgtgtgtgtagagttatttgtggtgctcccttattatcctttcaatgtctacaagatctctaatgatccctccttttcaattcccaatattggccatttgtgtcttctttaagtcttgcaacaggcttgtyaattttattaatctttcaaagatagaggttttagttgcagtggtttttcctattgtttttctgttttcagctgta

SEQ ID NO: 955418 - DNA, 648 bp, Homo sapiens
ccccaacccaaatactattacataaagttaacaatatttaaatgccgatatgaagtcaataaatcttatgtcacatgataaaggaaaaggaaataaagrtattttcttagtacaagtgtatacatgcacaaacatgtttttaacaaaagaaggaggaaatactcatgacaattacagtccccgtttctgcagtggtctcgtggtcgtagatgctattgatgactaacttcttctactacccattctgtattccctttgccttcagcaagcacctcaacaggtcatgtttttttttccttgtggagtgacccaaaccttcattcctgggggatctgggccatttctagtcctgcctggattgggctgttgtagtttcccattgaccttaatcatagggcgtggtaatactaagagacaccctaatggatctcctgtattccatgcatactcttccttacctccgttgtggagtaatagactgatttcatcttgaaagtctgggtcagtcagtcaccccagccaacaatgtaactcccctcttagcctgttgacttaaaggtaggaggagcccaaagtgtccaggtggcaatgttaacatccagtttaatggaatcgttgttgtctctcctggtggcagtgttcctccct

SEQ ID NO: 955419 - DNA, 653 bp, Homo sapiens
tttttttttccttgtggagtgacccaaaccttcattcctgggggatctgggccatttctagtcctgcctggattgggctgttgtagtttcccattgaccttaatcatagggcgtggtaatactaagagacaccctaatggatctcctgtattccatgcatactcttccttacctccgttgtggagtaatagactgatttcatcttgaaagtctgggtcagtcagtcaccccagccaacaatgtaactcccctcttagcctgttgacttaaaggtaggaggagcccaaagtgtccaggtggcaatgttaacatccagtttaatggaatcgttgttgtctctcctggtggcagtgttcctccctctggaactaagacctttaggccagcagaaggtaatgtcgtgggaacattttgctagtggaagaaaaaattttgctagtgaatcactaggggtgatggtgagtggtccacttccacttccacccttgattcgtgaacccgtgaatcctggctatgggagagacagtgccatatattggatgctgattcagagcrtacatggctttctaaagaactttgccccagccctgcaaagtattgtcacctagttggcattgtaattgtgacttaaaaaggccattccaccattctgt

SEQ ID NO: 955420 - DNA, 653 bp, Homo sapiens
tttttttttccttgtggagtgacccaaaccttcattcctgggggatctgggccatttctagtcctgcctggattgggctgttgtagtttcccattgaccttaatcatagggcgtggtaatactaagagacaccctaatggatctcctgtattccatgcatactcttccttacctccgttgtggagtaatagactgatttcatcttgaaagtctgggtcagtcagtcaccccagccaacaatgtaactcccctcttagcctgttgacttaaaggtaggaggagcccaaagtgtccaggtggcaatgttaacatccagtttaatggaatcgttgttgtctctcctggtggcagtgttcctccctctggaactaagacctttaggccagcagaaggtaatgtcgtgggaacattttgctagtggaagaaaaaattttgctagtgaatcactaggggtgatggtgagtggtccacttccacttccacccttgattcgtgaacccgtgaatcctggctatgggagagacagtgccatatattggatgctgattcagagcgtacatggctttctaaagaactttgccccagccctgcaaagtattgtcacctagttggcattgtaattgtgacttmaaaaggccattccaccattctgt

SEQ ID NO: 955421 - DNA, 572 bp, Homo sapiens
ataatcgattctcaattacaggtgaaacaggaggttttcgatgtactttgcccagatccatcaaatgaattactatccatgacagctacagccatatgaaatgtatttcttaaataagacttgaaaatcagaattactccttgatccacaggctgcagaataaatgtattgtcagcaagcataaaaacaacactaaccaccttgtatatttccatcagggttcctgggtgaccaggcatcttgttaatgaacagtaatatcttgaaaggaatctttttttttttctgagcagtaggtatcaacagtgggcttaaaatattcagtaaaccacgctataaaaagatatgctgtcatccagactttgtagttccctttacagagcacaagcaaagtagtttagcataattcttatggtcctagaatttaaaaaatggtaaatgracactggtttcaacttcaagtcactagctgcatcagccctgaacaaaagagtcagcctgctttttgaagctttgaagccaggcattgacttctctctaattatgaaagtcctagatgatgtatttttccaa

SEQ ID NO: 955422 - DNA, 582 bp, Homo sapiens
ctgctcgggaggctgaggcaggagaatggcgtgaacccagaaggtggagcttgcagtgagctcccactgcactccagcctgggtgacagagggagagagggagactcagagacagtctcaaaaaaaaaaaaaaaatccctgaaaatgtggaagtttggaactgggtaacaggcagaggttggaacagttaggagggctcagaagaaggcatgaaatgtgagagaagatgttgcagttctgctgtatcacagatctaattccaaaggttgagtatttcctttaatttactgagacagaggagtacctggctatgagatgaagactggaaatgagaccccagatatttgacatttggaatctatgagttatttctacctcaggaatatgattatctatctatctatctatctatctatctatctatctatatctatctatatctatctatcatatccaaaaaaaaaamaaaaacaaatttggaggaagaaaaccaatgcagaacatgtgatgttttaagggtacaggtttttgtgactataaatatttaaaggagttatatgagctcatgaatttattccaggt

SEQ ID NO: 955423 - DNA, 524 bp, Homo sapiens
tgttctcagtcataggtgggaattgaacaatgagaacacatggacacaggaaggcgaacatcacacactggggactgttgtggggtggggggaggggggagggatagcatttggagataggcctaatgctaaatgacgagttaatgggtgcagcacactaacatggcacatgtatacatatgtaacaaacctgcacgttgtgcacatgtaccctaaaacttaaagtataataataaaataaaaaaatgtatatagggaatgattaaaaaaactgtcattaggcattagctagctgcatcaatcagagacacggaaaacaaacatatgagtacatgtgaaattttggagcaagggccagactaatgtaggaataggtggcattttcctaatatgcttattctatggcagatggttcctatattttacagcctgaatagttccrtcactgtgaattctctatctctagtaaaatacaatcatatttggggactagctgtacataccacagcacctcttatttccac

SEQ ID NO: 955424 - DNA, 620 bp, Homo sapiens
actagttgtgtgatcatggaaaaatcacctaagttacttgggcctcagtttcttcattttaaaataatattacgttttatgtgtgtatatgtatatatatatatatatgtattaagttttatgtgtgtatatgtmtatatatatgtattacgttttatgtgtgtatatgtgtatatatatatacatatacagacatatatgtattaattattcacatccattttaaacatgaagaaactgagggttctggggatctgatgtacagcacaatcattgtagttaataatactatattgtttgcttgaaatttggtaagagagcagatcttaaatgtttttaatacacacacacagtggcaactgtggtgaatgatgtgttagtttgattgggatagtcattatacaatatatacatatattaaatcatgttgtataccttgaatctataccatttttatttgtcaattatacctcaattgagttggaaaaaaattggggtgattattataccacatcaaattgatgttataaatgcttaatgtgctaatctatgtaaacctcttagcacagactgatccatgcttaataaatggtatatatttcacttagcataatgacctc

SEQ ID NO: 955425 - DNA, 570 bp, Homo sapiens
attattcagttcaaagaattttttaatttccatcttgatttcattgttgacccaatgatcgttcaggagcaggttatttaagttccatgtatttccatggttttgagagttccttttggagttgatttccaattttattccactgtggtctgagagagtacttgatataatttcaattttcttaaatgtactggggcttgtttggtagcctatcagatggtttatcttggagaatgttccatgtgttgatcaataaaatgtatattctgtaattgttgggtagaacgttctgtaaatatctgttaaatccatttgttcaaaggtatagtttaaatccattgtttctttgttgactttctgtcttgatgacctgtctagtgctgttagtggtctattaaagtctcccactattattgtgttgccatctatctcatttcttaagtcgagtagtaattgttttataaatttgggagctccagtgttaggtgcatatataygtagaattgcgatattttcctgttgtgttggactagtccttttatcattatataatgtccctctttgtctctt

SEQ ID NO: 955426 - DNA, 652 bp, Homo sapiens
cctacagactaatatcacagggcagcttgcaaagccaaacagacttgctgcctatatggaagggrtcagttaaaggtcagctttcagtccaaaagatctttgggttgacatggaaagttctcaggcggtgattttcaatttggcattgggcagagtagggagttgggagaaggaagtaacatagatgtaagaatcatgtagaagggacttttaaaagtatacccccagtctaccagctaacaagcactgtgttagcaagccacttttactcatggggtgtaccataacccttaggtgtgttggggctaaataaagatgaaaaatcattttgataggatccacataagtacctatgattattcgatagataaagactcagtagaattagcagttgactatggaacctgcctgttgtaccactggggacttctgggtcaagacatacataggcattaatgcacagcccagctctgacaagtttagagggcagcctctttcactttcttctctcctttctcttctggtctctatggccaatatgtactcatttcttgtcaaccaaacaactattatttctattagaatgtaagtttgtttcaggttacaccaccaacataatttaagaactgtcaaatcacacaaataatgctaa

SEQ ID NO: 955427 - DNA, 615 bp, Homo sapiens
gcctagggacaatcaagagaacggacgcagagaagagtaggggctgggcgctggccatatccggggggagagaagccacccttagcaggtgggcagagcctatgaggactctcatagtgttcccagactgaaccaagggtcaggctgcttattctcatggcccaataacaagatgcaggtgaaatgggaaagaagggagtttatttctgtaactgggtacagggagaaggccaggaaaatatcaccagaccaactcaaaattacaaagttttccaaagcttatacaccttctaagctatatgtctacgtgtaagtgtgcattcatctaaagacatatgtgattaacttcttttaatctataactgagatctgagtcctgaagaccttcctctggagcctcagtaaatttacttaatctaatgggtccaggtgctgcggtgattacccttatcatgtctcctgctaaatcatggaggtttgaggagttcctttagtccccaataaagctwgtttgtggaggtctggggagttccttcagacccccaataaaacttgtttaatcctaaagaggtcctgttaagaattccttcattatcttgtcatgcttcaaggtcc

SEQ ID NO: 955428 - DNA, 596 bp, Homo sapiens
cgacttaacaaagggctggattggaagtcagcscggaacaggattgcagagttaacaaaggttcatgttcgatacaaaacgggaactctgatggttacaatagttaagaaagtcctaggattcaagacctctatcagggtgtatggatggagaaaacattaacaaatatcctgcttgaagatcaaatcagaggggcactggtggtgcaatagtaacccaattccaaagttatttcagagaggccttaaatggaaggttaacttagacccaaatctgagccaagaccagagacccattaaagtcacgtgatgtggttaacagagccccggaattcacagcctataccaaaggggtaatgatggtggaagaattaatcaaggtctgacttcaaagtcaaaccaaatggcattcatgataaaaatgttaactgagggctgggcacagtggctaacacttgcaatctcagaactttgggaggccaaggcgggaggatcacttgaggccaggagttagagaccagcctggccaacatggcaaaaccctatctctactaaaaatacaaaatttagccagatgtggtggcacatgcctgtagt

SEQ ID NO: 955429 - DNA, 800 bp, Homo sapiens
atttctgtctggatcgggggctagagttcataatttctggtaatcgctcaaccctgtgattacgggcactttgagggyagctgacagggagaagtagtcaccaaagaaaagctttgctagtttgggaattgccagcccccaatttataaacttggaatgaaagaaagatgaaggcaccatggagatgacaagaaaacggaggttcaagatagtccccatgttctctggcatgttaatcctcatcacctagaagaggtattctgaggggacagagggaaaaagaaagcacaaaatattccaaagttccatattacttttcttttcattagtactgggctgggcacggtggcttaacacctgtaatcccagcactttggaaggctgaagcggccagatcacctgaggtcgggagttcaagaccagcctgaccaacatggagaaaccctgtctctactaaaaatacaaaattagccacgcatggtggcacatgcctgtaatcccagctactcgggaggctaagcaggagaatcgcttgaacccaggaggcggaggttgtggtgagccaagatcgtgccattgcactccagcctgggcaacaagagtaaaacttcatctcaaatcagccaatcaatcaataaaatggtcttcaaatgatcaaaggctttcctgaatttttttgttgttgcagatatgtttcagactcaagccccagcccaaccccagatgaagggattttccgagcagctatcttgatccggtgcacaggcccctgttctgaccagggctgaacgcttggccca

SEQ ID NO: 955430 - DNA, 608 bp, Homo sapiens
tataaaataaaaaacaaattatttacttcctatataaaatggtggtataagcctaaggtacacatccccattccaaaagggagaaattggccaaaataagggggcaacaggcctcaacagagatccagcagagcagacactaagccttaaagctccaaaataatcttccttgattccatgtcccacatcctgggcacaccagtgcaagggttgggctcccaaggccttgggcagcctcatccccatggctttacggggtgcagcccatgtggctgctctcacaggttaaagtcaaatgcctgcagcttttccaggttgaaagtgcatgctgctggtggctctaccattctgggatctagagggtgatgatcccattcccacagctccactaggcagtgctccagtgaggactctgtgagggctccaatctcacatttccccttagcactgccctagtagagtctctctgcaggggctccacctttgtggctggtttctgcttgggyactcaggctttccaatacatcctctgaaatctaagtggaagttgccaagcttctttcactcttgcattctgcatgcctgcaggcttaacaacacaaggaagc

SEQ ID NO: 955431 - DNA, 668 bp, Homo sapiens
gctagaatataaagcaggcagaaaaatgtgaaaagactacactggcctagccctccagcctacatctttctcccatgctggatgcttcctgccctcaaacatcgaactccaagttcttcagttttgggactcagrctgggtctccttgctcctcagcttgcagacagcctattatgggaccctgtgatcgtgtgagttaatacttaataaactcccttttgtatatatatcctatatatagataaaattagttctgtctctctagagaaccctaatacaccaatgttttttaaaaagtaaaccacatctgtaatcccagcactttgggaggcagaggcaggaggactgcttgagcccaagagtttgaaaccagcctggcaatatagtgcaaccctgtcgctacagaaaattagaaaaaaaacaaaaaacacttagccaggcatggtgtgcttgcctgcagtcctagctactcaggaggctgaggcaggaggattgcttgagcccaggagttcaaggctgcagtgagccatgatcataccactacactccagcctggatgacagaacaaagactgtctcaaaaaaaaaaaaatgaaagaaaagatttgttcatacactttaccaggaggatgcgtggatggcaagtaaacacaggggaaggtgctctat

SEQ ID NO: 955432 - DNA, 668 bp, Homo sapiens
aaagaagtctgctttcattcttatctttgtcccttattcttatccctattttggtcttttttctatgttcgcttttaagaatatttttcattattactagttttcagctgctatgtgattttgctatgcctagggatgattttcgttacacgtttactccacttaaggttcgtgaaactctttggagctgtggatttatatttttaatcaaatttggaaaacttttagctactattttttgaatcactttttttcctttaccacctctttctttctggaactccaattacatttacgttagactgcttgatattgtaccacagttccctaataccattttttccatctattttctttctttgtttcattttggatggtttctattgctatgtgtccaggtaaaatgaccttttcttctgcggtgtctaactgctattcatcccatgtggtatatatacatatttcagatatcatattttccaactctacattttctatttgggacatttttgcctttcctttctcccttcatcatgtttatttttcctccactttttaaaagaatatggaacrtaactataataataattattatagttataataacataactataactataatataatcataactgtaataattattatatttatatataataacta

SEQ ID NO: 955433 - DNA, 689 bp, Homo sapiens
gtgggtgcccctctgggacaaagcttccagaggaaagaacaggcagcaatctttgctgttctgaagcctccactagtgatacccaggmaaacagggcctggagtggaccttcagcaaactccggcagacctgcagcagaggggcctattagaaggaaaactaacaaacagaaaggaatagtatcaacatcaacaaaaaggacatccacacaaaaaccccatccgaaggtcaccaacatcaaagaccaaagttagataaatccacaaagatgaggaaaaaccagcaccaaaaggctgaaaattccaaaaaccagaacacctcttctccaaaggatcacaactcctcaccagcaagggaacaaatctggatagagaatgagtttgacaaattgacagaagcaggcttcagaaggttggtaataacaaactcctctgaggtaaaggagcatgttctaacccaatgcaaggaagctaagaaccttgaaaaaaggttagaggaattgctaactagaataactagtttagagaagaacataaattacttgatggagctgaaaaacacagcacaagaacttcataaagcatacacaagtatcaatagccaaatcgataaagtggaagacaggatatcagagattgaagatcaacttaatgaaataaaatgtgaagacaagattagagaaaaaagaa

SEQ ID NO: 955434 - DNA, 424 bp, Homo sapiens
tcgcaacccaagatgccagtggcataggcaccctagggaatctcctggtctgcaggttgtggagaccatgggaaacgtgtagtatttgggtcagagtgcactkttcctcatggcacagtccctcacagcttcccttggctaggggagggagttctctgaccccttgttcttcccaggtgaggcgacaccccatcctgcttcatcttgccctctgtgggctgcactcactgtctaaccagtcccagtgagatgagccaggtacctcagttgaaaatgcagaaatcactcactttctgcgttgaccttgctgggagctgcagacgagagcttttcctattcagccatcttgccagccaccaggtatttctttatagcagtgtgacaatggactaatactgtaaattggtacagaggaagtggggca

SEQ ID NO: 955435 - DNA, 424 bp, Homo sapiens
tcgcaacccaagatgccagtggcataggcaccctagggaatctcctggtctgcaggttgtggagaccatgggaaacgtgtagtatttgggtcagagtgcacttttcctcatggcacagtccctcacagcttcccttggctaggggagggagttctctgaccccttgttcttcccaggtgaggcgacaccccatcctgcttcatcttgccctctgtgggctgcactcactgtctaaccagtcccagtgagatgagccaggtacctcagttgaaaatgcagaaatcactcactttctgcgttgaccttgctgggagctgcagacgagagcttttcctattcrgccatcttgccagccaccaggtatttctttatagcagtgtgacaatggactaatactgtaaattggtacagaggaagtggggca

SEQ ID NO: 955436 - DNA, 593 bp, Homo sapiens
tatagccacaacggcttcctgctgtttcsaccctctccaatgcccctggcaaccactaatctgttctccattattataattttttatattgactttttaaaaagaccaaatccattttctcactgattgtcccacatcctaaatgtatttgatagtttcctcttgacgtttatcttttttctttatctcctatttctggaaaactgaaaggttgatctaaagacttgactagatatacagtaaacattttggacaatatttaataagtaatgctttgtatttcattttacatcatatcaagaggtacacatgttggcatacccaaatgttagtgaggctaagtttgatcactctgttgatgtgatgacgagcaaacctttccacttaaaggtatgttttcctttggcaactgtgtatatcttatactctagcaacattttacctaattgttttaatctttacaaataatttttgcctgaattacttatttcaatgtgggggggtcagaaaaacatgattttaaaatattattacgctttctatgtttattaactatcattcttttgtagaaaaagtgtttcttctccaaaaat

SEQ ID NO: 955437 - DNA, 774 bp, Homo sapiens
  misc_feature 261, 262: n = A,T,C or G
ttaatagaaagtttaatgacagccaggagtsgttgctcatgcctgtaatcccagcacttttagaggccgaggcaagcagatcacttaagtcaggagtttgagaccagcctagccaacatggcaaaaacctgtctctactaaaaatacaaaaattagccaggcatggtggtgcgtgcctgtaatctcaggtactggggaggctgcaggaggagaattgctcgaacctggaagatggaggttgcagagagctgagatcatgcnnctgtactccagcttgggcaatgaaaaaaaaaaagaaagtttaatgaagtacagtttgccaaggtgtgggcagaactatagaagccaatacaaggtgttaaggcatccagggattagcaacattggaaagctgttatcttctttaatcctgtagggacaagcaaaaggaacccagggaaagcctgaagccatagaacaaggtccatccaattgaagtagcaatcccagaatgcagtgactggcagaactggagtgagacagggagggtctaaaggaataaattctcctacttgtttcttattcagcctcttgctggtacctcatattgccttatgccatttgaaatcagacgacaagagcacaccctggccataaagcagagcagagaagtgtgggaaatagatgggtgtgtgcttgtgtgtgcacattgtttgtggaagtggggggttggcacaacttctactattaccaatccccattctccaaataaacacacacatctcattctttctt

SEQ ID NO: 955438 - DNA, 633 bp, Homo sapiens
taccttcagtaactattttcaaataatattaatgtactaattccaaagcacaatgctggacattggaaagaccagaaagacataaaaagtacaatgcctggctgcaagtctcttacattctgttraaggataacatagttgatcaaaaagtggtataaaatgcaataaatgccatctgcacagtgaaagcaaatactattattcaaaagagggcacaattcctttcacttaggagagcaagagtgatcaatattttgtaattgactcttaagtaatataaagactttaatagacaaaagcctcagtgggtagcatttcaggtgaagaaaggagtattaaaaaaaggtaaaccaaacaaaaacaaaacaaaacaaaaccaggagaggatacacataaattaatgtgtagtttagctcaaaatccaaagcctaacataggacattgttcaggtacgctattgctgtgtaatctgtagcatatcacctgaaaactcaatggctcaaaacagcagtgatgttattgtctataatggtttctgtaggtcaaaaattggaggcaggcttggctagacagaacaggctcagagtctctgctgaggtttcagtcagagagaggctggagctggaaagtggg

SEQ ID NO: 955439 - DNA, 642 bp, Homo sapiens
tattctcattattggtgccacagaggcactgcctcagggcagggtggtttgtgatggatgccatttaactccccttaaatttggagggtataatatcctctgcccccatgtcccatagacagagaagtcaccccmcaatcaactcttttcccttctgtaggaacctattccacaattccacagtggcacaaccctgcattgtggtgtgcagccctacaagacttgccccctttcagatgaaagcaagtcttgtagggctactccctataggtgcagttggtctgtctttatcttggcagtaactatgggacaggtggagagcatgggaacttctgcagactcataaaggtcctcactctcctccccactagacatctccatggagtccctggacataagatccaggacaattcagccatgaaagccccaacttattgacatggcagccttcaaacaggctacccaacaagccagggtctcctttccattatcctggtcccacaggtggggcaccaaggtctctgacatttcagcctgaattaatgtggcatctctttctagtcacaactcatcctgtaactgatgaactcttgcctatgattgaagctcagcttcagtggctgctcagagtgcagtcagaag

SEQ ID NO: 955440 - DNA, 560 bp, Homo sapiens
ataaaagccattttaactggggtgaggtatttcagtgtagttttgatttgcatcttctgatgctcagtgaccttcagcatttttttaaatatatctattggacatytgtatatcttcttttaagaaatatctatttttgcccatttttaaattggatttttttttttttgctagtgaactgttagagtttcttatatattctggttatcaatcccttgtcagatggtagtttacaaatatttgtccccattctgtgggtttgctctacactttgttgattgtttcctttgctgtgtagaagctttttagcttgatgaaattccatttgtctatttttgctttagttgcctgtgtttttggggtcttaatcccaaaaagcctttgcccagaccaatgtcctggagcatttccccaatattgtcttccagttatttcatagttggggccttagatttaagtctttaatacatttggatctgatttttgtgtatggtgagagataagggtgtagtttcattcttctgcatatagttatgcaattttcccaacaccatgtatta

SEQ ID NO: 955441 - DNA, 608 bp, Homo sapiens
cagtgtagttttgatttgcatcttctgatgctcagtgaccttcagcatttttttaaatatatctattggacatttgtatatcttcttttaagaaatatctatttttgcccatttttaaattggatttttttttttttgctagtgaactgttagagtttcttatatattctggttatcaatcccttgtcagatggtagtttacaaatatttgtccccattctgtgggtttgctctacactttgttgattgtttcctttgctgtgtagaagctttttagcttgatgaaattccatttgtctatttttgctttagttgcctgtgtttttggggtcttaatcccaaaaagcctttgcccagaccaatgtcctggagcatttccccaatattgtcttccagttatttcatagttggggccttagatttaagtctttaatacatttggatctgatttttgtgtatggtgagagataagggtgtagtttcattcttctgcatatagttatgcaattttcccaacaccakgtattaaaaagactggcctttccccattgtatgttcttggcacctttgcaaagatgagttgtctgtaaatgtgtggacttatattt

SEQ ID NO: 955442 - DNA, 606 bp, Homo sapiens
gtgtttggtaacgagtgtgggggwgtgagtatgagtgggttctgcgctgggatggcatcctgtccagggctggttcctgctttgcatcctgagctgctggaatgggctcagctaccagagaccctaaattggaacaagtggggtggaaaatgaatgaatgaatacaaattaataaaaatttgtaaagtctatgataatcatacaaatgcatgacaaaaaaaatgtagtatgaaagcgctcagtgagcccaccctaattgtaaatgttttgaactgcatggtggcaggaggtgctccttataatttttgctttgcaaacattttattccttggtttaacccaccaccaccacaactgccatcacttgctgattcaccaaacttgggtaaataatgatcttacctgtgcttattaatctttaagtgtatgtgtatagctcttgtttatttcagtgtttactattagaagtgttttggtctttatttagatgtatgatgtttttgtgaccagaaatatgcagtaggaacttactttttgcttatatcaattagcctattgtaaaattagtagcattatacattgttttgtttaaagttacaatttccaa

SEQ ID NO: 955443 - DNA, 575 bp, Homo sapiens
atcctctccttggcctcccaaagtgctgggattacaggtgtgaatcaccatgccccacctgcattacatttattgtggactttatttctattattattacattgtaatatgaatacaactcaccatagagtagaatcagtgggacccctgagcttgtttttctgcaactaggcagtcccatctgggggggtgtgttggtagacattgacacccaaagtgtgtttgcttatgtccagcctacttcatagtctcattttggttgctgtcactgcagaagaccctgcttcacaaagataggatgttggaaatggaagcaggcttttcggtgcttttgtggcaatttcaggatactttgccttgactttaatccagaatgtatggatatttgaagttgtcttaaacatacttctagggcccggtcatttgctatctcaaacagttggtcctcttctagcatggacaaagtcaattcacctggcttattcacaaatggrtctaggatccttcccagttcgggtgtcttttgtagttgggaagtaatgctcaaactcttttgaaagctgagataggtgatc

SEQ ID NO: 955444 - DNA, 619 bp, Homo sapiens
cttctttacaatgtggcaggtaggagaatgagagaatagccaagcaaagggggaaaccccttataaaattatcagatcttgtgagaactcattcactatcacaacaacagtatgaagaaaactgcccccatgattcaattatcttcaccctgatcccgcccttgacatgtggggttattacaattcaagatgaggtttaggtggggacacagccaaatcatattattccacccttggcccctttcaaatctaatgtcctcacatttcaaaacacaataatgtctttccaacagtcccccaaagtcttatttcagcattaactcaaaagtccaccgtccaaagtctcatctgaaacaaggccagccccttctgcctatgaacctataaaatcaaaagcaagttagttacttccaagatacaataggggtacagacattgggtaaatacatccattccaaatgggagaaattggccaaaacaaatgggttacagtccttgacagattggataatgccacccaggttagtgaaggcaatcttctttattccatctattyatccaaatattaatctcttttaaaaataccctcacagacgtactcagaaacaatgttttacca

SEQ ID NO: 955445 - DNA, 449 bp, Homo sapiens
aagcagtctggatgctcctgaaaaagttaaactaccaaacgatctagcaattctgcttctcggtatatgcccaaagcaaacgaaagcagcgactcaacagatacttgcccaccaatgttcatcgaacattattcaatttccaaaaagtggaaacatcccaagggtccgtcatcagatgaacagaaaaaatgtggtgtagacagaaaataatattttgccgtaaaaaggaaaggaattctaataatgctacggcacagacaaaccttgaagagattatgttaagtggaagaagccagacacaaaaggacaaatactgtgtgattccacttacgagaggttctgagagtagtcaaactcamagagacgcaaaacagattggtggtgtccagggttgaggtgaaaggggagtggatgattgtcgcttcacggggtaggaatttctctgaggt

SEQ ID NO: 955446 - DNA, 628 bp, Homo sapiens
tcccagcttcaggcagtatgttcatgtgcatgggctgattagtactccgtggaatatttaaggctgaccttctgcagatttgttgatttctctccctgtacacttctttcctctctggtattctgtcctgtaaactctagccttttttggtctccctatactctcaactttgtcaccttaactcagggcctccttcaggctccgcctggcttctacttgttgtgagcgtgactggctaaggctggcttcacgggaagtaaataatttactgaaacaggtgcgagttaaaaccaagtttaggccgggtgcggaggctcacgcctgtaatcctagtactttgggaggccgaggtgggcagatcacgaggtcaagagatcgagaccagcctggccaacatggtgaaaccccgtctctactaaaaatacaaaaatgagccgggcgtggtggcgggcgcctgtaatcccaagctcctcgggaaacggaggcacaagatttgcttgaacctggtaggcagaggttgcagtgagccgagatcacaccacagcactccagcctggcgacagagtgaaacttcatctcraaacaacaacaacaaaaacgagaacaagtttattagcgggaagcaatg

SEQ ID NO: 955447 - DNA, 523 bp, Homo sapiens
atgtgaggttgtcaactaggcaaactctagaagatttgtgttccctatggtaggcgctctgtgtggctggcaccattgkgtattccgcttttcacttctgaggccaagagcatcagaatcacttggaaagttcatgtgaaatcacatgttccaaggctccacagttagacgtcttaattcagtaggtctgggatgaataccagaatttttttttaacaggcacaccagttaattctgatgttcagaaaggtttagaagccccccagattctatcctcacactcaagtagtttatgattataagcctcccatacagattgaactgttggtgatttttagcagtggaaggacatttaagaagtcatctatctttagagaactcttttttttaagggttttattctaggaaatttcaagaatatgcaaaaatagggagaattgacaggtacctgtcactcagcttcaactatgatcaacacatggccaatcttgtttcagtgattcccccccatttacatccccag

SEQ ID NO: 955448 - DNA, 571 bp, Homo sapiens
ttgatatggtcatgtggttttatctttcagtctatttatgtgatgtatcacactgactgatttgcatatgttaaaccagccttgtgtgccagggataaatcctacttgatcatcatgtataagcttcatgttgtgttgttgaattcaatttgctaatgttttattgaggacttttacatcaatgctcatcagaaatattggcctacagttttcttttcttgtggtgtctttttttttctgttgcccaggctggagtgcagcagcgcatgatctcagttcactgcaacctctgccttctgggttcaagtgattcttctgcctcagcctcccaagtagctgggattacagtcacgtgccaccatgcctggataatttttgtatttttagtagagatggggtttaaccatattagccagactcatcttgaactcctgacctcaagtgatcsatctgccttggcctcccaaagtgctaggattacaggcatgagccactgtgcctggcctctttggtgtctttatctggcttaggtatcaaaggcgatgctggcctcgtagaatgtgctaggagg

SEQ ID NO: 955449 - DNA, 695 bp, Homo sapiens
ccacagcacagccctggagagctgctccaagagtgggtgctgggaaggaacggggctcaggacttaccagtgagaggcgactcaggaaayacagactccagtggctgagtctttctggaccctggcaaaaaagtgtattggtcattgccagaaggacacgggtgaccaagaggccagagcgccctctgggtggcatgactgtagtggggctttcgtggtgctcacactcccagcaccagaagagccccaggaaagggtcccaggcagggatctctctgcagaggcacctctgccaccctgcacaccccggagagcgccatccctgcagtgtaagtcacctggggctttgtggtcagggtgctcttcctctgagtcctgcttctgcctctaaggacaggtcctggcctaggttgctcaagcctctgagcatcagttttcccatctgtaaggtgggcacaatcacagcacccacaacaggactgggaaggccacacagcccccagttgcaacccaggggtgggaagtgagcagcacaatgcccagcaccctgcctggtacagcacccaggccagggagcctgtgggtggaccagcttctctcctagaactctcgctctgccatggtccctgcccccgccccccatcctgctggggacccctgaacaagccagcttccttttccaaacacagtgcaag

SEQ ID NO: 955450 - DNA, 609 bp, Homo sapiens
caacgacaaccttagttcaagttacactcgctacttaaatcttcagtctactcatagaaatacatgtcattggcttctattccaaagactttcgaacttaatggttcctaaaatgtgtaattgtctttcccaaccacctttttaaagatcattgaacttgatggaaatcttgaattctgttatattcttgggactattataatatttaactcttacagatatttaaaatgtttccatttggattttggatgtcccatataaattgatctaacttgctgtttcaacgtataaagtcactctactgaaagaagaaaatctgaaatgcattaccgatttccatgacctaatcacataattctgaaaataacttaaaccttttttgatgactcaagagtactactatgaatgcatgttatgttaaaatcctttcaatgtgaatatcaggttgtaactgaccccagtgtataggacaattcctattttttttttagatataactttttttgagacggagtttcactcttgttgcccaggctggagtgcaatggtgygatctgggctcactgcaacctccgcctcccagggtcaagcaattctcctacctcagcc

SEQ ID NO: 955451 - DNA, 590 bp, Homo sapiens
gcaggccctcctgctgtttctgagcccccgagggccctctgaccccagacaccttccctgcyagctgaacaccattccagagtcagatcttggttttgttttctttcttttaaaaatattttattataaggtgaaaagaaaaggagagtacactaagtcttagccatggttggccctttagtctgaattagtatatcagctattttaccaagggcaggtttggacggtgcagagacaggaagagagtatcagagtgcccagcaccacagagaaggggtggctggccagggcgcccattgcaggcagatgaaaagggtgcccccgaacaggcacgatgggtagggcacccccaaacaggagcaatgggaagggcacccccaaacaggagcaatgggaaaggcacccccaaacaggagcaatgggaaagggcacccccaaacaggcacaatgggaacggcacccccaaacaggcacgatgggaagggcacccccaaacaggcacaatgggaagggcacccccaaacaggagcaatgggaaagggcacccccaaacaggcacgatgggaagggcacccccaaacaggagcaat

SEQ ID NO: 955452 - DNA, 621 bp, Homo sapiens
gggatacgggctatggaggaatactgagtattgtgtctggctagaaatcaggacatggaaggacgaacaggtttttcacggatggagggaagagtgttcagacagagggaaaatatgagcaaagccacaaaggtaagatagtgcaaactgagctcatggaatgcccagggtgccagttttactgcgggctgggatacacacagagggccgtagaaaagagaggtctgggccgggtgcagtggctcacgcctgtaatcccagcactttgggaggccgaggcgggcagatcacgaggtcaggagatcgagaccatcctggctaacacggtgaaaccccgtctctactaaaaatacaaaaaattagccgggcgtggtggcaggcgcctgtagtcccagctactcgggaggctgaggcaggagaatggcatgaacccgggaggcggagcttgcggtgagccgagactgcgccactgcactccagcctgggcgacagagcgagactccgtctcaaaaaaaaaaaaagaaaagagaggtctggctgctaggcctgtgtctaattgtggaggatcttcaatratatattgaagaatgtgcactgtattgggaacccagttttgttttt

SEQ ID NO: 955453 - DNA, 457 bp, Homo sapiens
ctaaatttttgtatttttagtagagacggggtttcaccgtgttagtcaggatggtctcratctcctgacctcgtgatttgcccgccttggcctcccaaagtgctgggattacaggcacgagccaccacgcccgaccgtcattttaaccattttaagagcacaatttagtggcactaattacattcacaatgttttgcaatcatccccactatttctatttccaagacttttccagcaccccaaacagaaactctgcacctgttaactacccatctctcctcactcccaacccctggtaacctattatttactttctgttgctataaatttgcctattataaatattataagtggaataatacaatatttgtctagcttatttcacttagtataatgttttcaagattcacccatgatgtagcatgtatcagaatgtcattccttttttgtggctgaa

SEQ ID NO: 955454 - DNA, 763 bp, Homo sapiens
ctgcctgtaatccctgctacttggaaggctgaggcatgagaatcacttgaacctgggaggtggaggttgcagtgagtcaagatygcgccactgcattccagcctggatggcagagcaagactctgtctcaaaaatatagatagatagatagatgatagatgatagatagatagatagatagatagatagatagataatagcatctgcttcttaatgttactatgatgattaaatgagattagaatagtgcttggcatacagtaaaaactcattaaatgctgtctagtgttattgtcgttgctgttgttataagttaaaatccacaagctttaacttagagtagaatttggaaattggaaaaagtaatttcaaggcccaagtttcaccagaaaggaacttccctgagaaacccttatcaatacacatccaagtaagtgaaggaatgcagtattatatcttatttggcagaacgttttccttctgggtctatttcactcatttatagccccaatgagagaatgctgattgggttgcagggaaagttgggtaaagttttcatagcctagaatattcttgataataactagaatttatccaagaaattaaaatataagatcatccacaggttatatatcagtaatcaaaagtgagtatattattctcactcggtttgctaatggttgaaattgctcagcggggtagtggaatagtagagaccagatgctaagattctctggtcctggggaagcaggttttccatagg

SEQ ID NO: 955455 - DNA, 569 bp, Homo sapiens
tatcacacattcaaagaattggtaccaatcctattgacactattccacaagatagagaaagagggaatcctccctaaatcaytctatgaagccagtatcaccctaatagtaaaaccaggcaaggacataacaaaaaaagaaaactacagaccaatattcctgatgaacatagatgcaaaaatcctgaaaaaaaaaaaaaaactaacaaaccaaattcaacaacatgtcaaaaagataatccaccacgatcaagtgggtttcataccagggaagcaggaatggtttaacatatgtaagtcagtaaatgtgatatgccacataaacagaattaaaaacaaaaatcacacgattatctcgatagacacagaaaaagcatttgacaaaatccagcatccttttatgattaaaacccccagcaaaattggcctagaagggacatagcttagttgtctaaaaattgcttgccttttcatatttttgacctatttgtatttcttccttttctttttttctatatctgtcacatatatatttacaatacaggtttttatttgtctcttactgatatt

SEQ ID NO: 955456 - DNA, 445 bp, Homo sapiens
ctaggaatggggtgacacaagcacccctgtggccacaagcatcagagtgctctcgatcagacctgaaaccagcacaggactgagcctggctcatggcctgctataaacactacctggctacttccartgttttctcaaggccttggggctctataaccagcaggtgagaaagccagccaggcctgtgtctttcccctcagggcacagacttcccacaggcccctgccaagtccagaggtgccattcagtagccagggactagagtaaaatccttagaagtctacctggtgttctattgtactgtggctttgctggcattcaaaccacgagatgcagttctatcccctcttccccccattttccacaggcagaggagcctcaatctgtgaccactaccaccacggcccacagggagtattccaggatactgaaagtatttccttaa

SEQ ID NO: 955457 - DNA, 612 bp, Homo sapiens
aggggagggagtgtgcgaataggtgtgggtcacagacatcaagtactttacaaggtaatagaatatcacaaggcaagtggaggcagggggagatcacaggaccacaggaccgaggcgaaattaaaattgctaatgaagtttcaggcaccattgtcattgataacatcttatcaggagacagggttttgagatcaaccggtctgaccaaaatttattaggcaggaatttcctcttcctaataagccggggagcgctatgggagactggagtctatttcacctctgcagtctcgaccataagagatgaccacgcccaggggtgccagttcagagacccacccccaggtgtgcattctctttctcagggatgttccatgctgaggaaaagaattcagtgatatttctcccatttgcttttgaaagaagagaaatatgactctatcccacccagctcactggcggtcagagtttaaggttatctctcttattccctgaacaattgctgttatcctgttcttttttcaaggtgcccacatttcatattgctcaaacamacatgctgtacaatttgtgcagttaatgcaattattacagggtcctgaggcgacataca

SEQ ID NO: 955458 - DNA, 524 bp, Homo sapiens
agccagaagatattcggggcctgtattcaatattcttacagaggccaggcrtggtgcctcatgcctgtaatcccagcactttgggaggctgaggcgggaagatcatgaggtcaggagatcaagaccatcctggccaacatggtgaaaccccatctctaccaaaaatacaaaaaattatccaggtgtgatggtgcacacctgtagtcccagctactcgagaggctgaggcagaggaatcacttgaacccaggaggcggaggttgcagtgagccgagattgggccactgcactccagcctagtgacagagtgagactccgtctcaaaaaaacgaaaaacgaaacaaatattcttacagaaaaaaccttcaaacaagaatttcatatctagccaaattaaactttctaagcaaaggagaaataagatttttttccagataagcaaatgttgagggagggagtttgtttactaccagacctgccttacaagaaatcttgaaaagattactaaaggctgggtgcggtgg

SEQ ID NO: 955459 - DNA, 690 bp, Homo sapiens
aggtaaaggtaaaggtttaggagcagaggacagtttttgtcacgcaaatgaatatcaaaggttactctaaactagctagttgccaggcacaccattatctrtaaagggactggtccagcgaagttcattcagaggtaccacaggtaatggatctgttctttcaaagagactgtttctaaaatgcttcatgtaaataggtgattgaaaatgtgacaacaatcaattcgttttttttgttttttgagatggagtctcgctgtgtcgcccaggctggagtgcagtggcgcgatctcggctcactgcaagctccgcctcctgggttcacgccattctcctgcctcagcctccggagtagctgcgactacaggcgcgcaccaccacgcccagctaattttttgtatttttagcagagacggggtttcaccgtgttagccagaatggtctcgatctcctgacttggtgatccgcccgcctcggcctcccaaagtgctgggattacaggcgtgagccactgcgcccagccaatcaattcctattttgaaaatattagttaagtgtatgtcaaataataaagatgccagcaatttctaacaaactttagagaggaaaacctaacttggaaggcctggtgttagcaagcaaaacagggttcatagcctgttagctaaaacagactgacgttatttgaca

SEQ ID NO: 955460 - DNA, 449 bp, Homo sapiens
tgggaaatagaaaaaagaaaaagaatcagtcacaacccttccctcctcccayaatcactactgctttttgttatttctatgtaaccattttcatatatgtgttttatgaggctgtagttctgttgggcatgtgatttggggtattgctttttcacttaatcataagcatcatccatgttgctgtatggtcatgataatcattatttttaatggttgtaaaaatatttcagtagctgtcacaccacctacttaaccgttttcttattaacagacaatttgctatttctaagccttgttgttataattaaggttgccataaacatcttcatgcatacaatcttttccccattttgggttaatttctttagacagatttctagaagtgaaatatcaaaatacaaacaatttaaacctttcctttttatggttttggatgcatactatcaaat

SEQ ID NO: 955461 - DNA, 574 bp, Homo sapiens
aggcttgtagcctgggacaagctttcagccctgctcactggctgcctggaaataaacttggtgctgttgcagggagcacagtgggagtgagactggactttcaggctgygggctgagtgggagctgggtgaggcatgtggctgccagctttcccccacttccctggcaacctgtgtgaggcagcagaggaagcctaatttccctgggaacataactccattggcctgggaaccacagcaccatcacccacagcatctgcagcaagctccgcctaaaaagacatacctaaccctgccctacctgatgatctttctctatgtgccctggtagccaaagacaaacaaagtaatctcttgggagctctctggcctgtccaccatctaaccttagggcaagcttatattcccctatactactacaactgacgcactcttgaaagcaccacctcctggctggaggccatccaacacaaaaccagagcacttaagaaaaatacaaccaaggaccctcacagagtccacttctctcctctgctacctccactgaagcacgtgctggtatccaaggacgagag

SEQ ID NO: 955462 - DNA, 591 bp, Homo sapiens
gtttctcacagcacagccctggaccaacagtgtccgaatcgcctgggagctctcaggcctygccccagatccactacctcaatatctgcttcgtaacaagaccctgtgggaaaccaggatatgccacccccaaaataggaaggattgttgagatgaagacaattcagaagaaacagaggcagtaaagctctctgccctccctctatttgtctaaaagcaggacgtagatttacaaagacaaaacgtatcttgcctccccccttctaccagggagaaccactgaaaacaacttaagacgcttatgctcctggagatggccctgcaggaatctacattgaacaagctttgctaactggcctttatctgccattcatttgctatcccccgaagttgctgcccctagagactcaaagtgttttttcccttgtcacatctctaaaagtttactgtcctttgatgaggatgctgtgaaactagaattcaaagccatctctttgagaactcctcattatagaaaatatacatgttaataaacttctgcttgtttttctcttgttaatctgtcttttgttacaggggtcccttccaact

SEQ ID NO: 955463 - DNA, 600 bp, Homo sapiens
attccacccccatcgcccagattgcttccttccgtgtgccactccccttctgggcacttgtggtgataggacatatgaggggaggagctggtttgggaggcgcaaaggcatgataaactcgattttgaatgtgtcaaatatgacttacaggcaggttgacaggatagagatggattgtcggcatttggttagacgtgtgtggagctcaagaggggagcctgagctggtgtcttagtctgttcaggctgctataacaaaatgccttagatcgggtaactcatagacaacagaaatgtatttcccacggttctggagggtgggaagtaagtccaaggtcaaggtgctgatggatttggtgtccggtgagggctgctttctgattcacaggtgagtcttctctctgtgtcctcacgtggtggcagaagtgaggcagctctccggagccttctgtataagggcactaatcccattaatgggggctccaccctcaagatctaatcacctcccgaaggccccacctcccaaygccatcaccttgggcatttggatttcaacgtgtgaattttggagggacacagatattcagaccatagcagctgt

SEQ ID NO: 955464 - DNA, 581 bp, Homo sapiens
ttttcctaacttttatgctctgctttccttatgaaactgaatgcctttaatagtacccaagtcaacccttgaacactttgctgctgagaagtttcatctgccagagaccctaaatcatctttctcaagttcaaakttccacaaatctctagggcaggagcaaaatgctaccagtctctttgctaaaacttaacaagagtcatctttactccagttcccaacaagttcctcatctccatttgagaccacctcagcctggaccctattgttcatattgccatcagcattttgggcaaagtcattcatcaaatctctaggaagttccacactttcccacatttttctgtcttcttctgagccctccaaactgttccaacttctgcctgttacccagttccaaagtcacttccacattttcgggtgtcttttcagcaacacctcactcctggtaccagtttactgtattagtctgttttcatgctgctgataaagacatacctgagactgggaagaaaaatacatttaattggagttatagttccagatggctggggaggcctcagaaccatggcaggaggcaaa

SEQ ID NO: 955465 - DNA, 581 bp, Homo sapiens
ttttcctaacttttatgctctgctttccttatgaaactgaatgcctttaatagtacccaagtcaacccttgaacactttgctgctgagaagtttcatctgccagagaccctaaatcatctttctcaagttcaaagttccacaaatctctagggcaggagcaaaatgctaccagtctctttgctaaaacttaacaagagtcatctttactccagttcccaacaagttcctcatctccatttgagaccacctcagcctggaccctattgttcatattgccatcagcattttgggcaaagtcattcatcaaatctctaggaagttccacactttcccacatttttctgtcttcttctgagccctccaaactgttccaacttctgcctgttacccagttccaaagtcacttccacattttcgggtgtcttttcagcaacacctcactcctggtaccagtttactgtattagtctgttttcatgctgctkataaagacatacctgagactgggaagaaaaatacatttaattggagttatagttccagatggctggggaggcctcagaaccatggcaggaggcaaa

SEQ ID NO: 955466 - DNA, 588 bp, Homo sapiens
attggtgcatttacaaaccttgagctagacacagagtgctgattggtgcatttacaaaccttgagctagacacaaagtgctgattggtgcatttacactaggatagcatggtagggtcctcattggcttgggtccttgactgattttgaggagaagcagcctcgtttgacatgtgatatgagtgaaaaatacagtttttgattgtgaaccccctgagatttcaggttaatttattgcctcaacctaacttgcttattctggctaacatggaaagcccatgattaagaagctaatgagcaaggatcttagtaaacatgtaaggaaacctaaacaaacagatttgtaattctgtattaaaagtgtctaatttgtagggttacaaaaatcagaactgaggttgtattgtaggtaatcaacaaaacccactgcctctccttcctgacacctagctagactacaattctcagctcttcttgtacttatttgtggccatttaaataggatggtctccataatgtttccctcrtagctacacaaaatggagattacttacaaactgaccttatgtcacattttttaaatgaagga

SEQ ID NO: 955467 - DNA, 581 bp, Homo sapiens
gaaaatgaagtctttttcattttgcagaaggaaatgatggaatttttctgtacttcagtatgtgtcaactgagagtcatatacattagttttaatctcttaatattgagaatcaggttgcaaaayggatgagttattatctatggaaatgtgagaaatgtctaatagcccataaagtctgagaaataggtatcaaaatagtttaggaaaatgagaggagaacagtaggattgctgtggcctagacttctgagtaattaataaagaaaaagaagtaccctttggcctacagatcagagttttatttattttttattttttactttttattatagtttaagttctggggtgcatgtgcagaatgtgcagttttgttacataggtgtacaagtgccatggtggtttgctgcacccatcaacccgtcgtctacattaggcatttctcctagtgctgttcctcccctagccctccatcccctgacaggccccagtatgtgatgttcccctcgtgtccatatgttctcattgttcagctcccacttatgagtgagaacatgctgtgtttggttttttgttcttgtgt

SEQ ID NO: 955468 - DNA, 603 bp, Homo sapiens
aaatgaagtctttttcattttgcagaaggaaatgatggaatttttctgtacttcagtatgtgtcaactgagagtcatatacattagttttaatctcttaatattgagaatcaggttgcaaaacggatgagttattatctatggaaatgtgagaaatgtctaatagcccataaagtctgagaaataggtatcaaaatagtttaggaaaatgagaggagaacagtaggattgctgtggcctagacttctgagtaattaataaagaaaaagaagtaccctttggcctacagatcagagttttatttattttttattttttactttttattatagtttaagttctggggtgcatgtgcagaatgtgcagttttgttacataggtgtacaagtgccatggtggtttgctgcacccatcaacccgtcgtctacattaggcatttctcctagtgctgttcctcccctagccctccatcccctgacaggccccagtatgtgatgttcycctcgtgtccatatgttctcattgttcagctcccacttatgagtgagaacatgctgtgtttggttttttgttcttgtgttagtttgttgagaatgatggtttc

SEQ ID NO: 955469 - DNA, 579 bp, Homo sapiens
tcattccatgaattcttcagtttcaggattcctgtttgtttgtttgttatgatacctctttagtaaatttctcattcatattctgaattggttttstgatttatttgtattatctgaattctctcatatcttactgagtttcttgaatatcattttgaattctttctctaggatttcataaatttctttttctttggaatttcctgctagaccataattttgtttctttggagatgtcgtatttgcttgctttcttcatggttcctatatccttatgttgatatctgcacatctggtataattgatgctacttctaattttttgaatttgcttttgcagtggaggatacttttatgaagatatgtctgtggtgtttgttgggtagggcactttggcctgattctgggtgcatgcagtagtgtactctctatataatttcttaagctttaaacagcatcagttgtatccatgatttcctcagcagcttagggtgtagttgtttgtggaggctgtagtaaagttttgttggagatagagatgccaggtgggccagtcctttgggctctgtggtggcaatgg

SEQ ID NO: 955470 - DNA, 579 bp, Homo sapiens
tcattccatgaattcttcagtttcaggattcctgtttgtttgtttgttatgatacctctttagtaaatttctcattcatattctgaattggttttgtgatttatttgtattatctgaattctctcatatcttactgagtttcttgaatatcattttgaattctttctctaggatttcataaatttctttttctttggaatttcctgctagaccataattttgtttctttggagatgtcgtatttgcttgctttcttcatggttcctatatccttatgttgatatctgcacatctggtataattgatgctacttctaattttttgaatttgcttttgcagtggaggatacttttatgaagatatgtctgtggtgtttgttgggtagggcactttggcctgattctgggtgcatgcagtagtgtactctctatataatttcttaagctttaaacagcatcagttgtatcyatgatttcctcagcagcttagggtgtagttgtttgtggaggctgtagtaaagttttgttggagatagagatgccaggtgggccagtcctttgggctctgtggtggcaatgg

SEQ ID NO: 955471 - DNA, 579 bp, Homo sapiens
ggtccaggctgctatgcaagctgctctgccacttgggccatatgacacaacaggtccaatrataggtttagtggcagacagcgatgctttttagagtctttggcaggcccccataggtaaatcacagaggaggcctctaggattttggagcaaggccctgccatcttatgcagataactaccctccttttgagagacagcaagcagctcttggcctgttactgggctttggtggaaactgaatgtttaactatgggtcatcaagtcaccatgtgacctgaactacctataataactgggtgcttcctgacccatctagccataaagtgggtcatgcacagcagcattccatcatcaaatggaagtggtgtatacgtgatcaggctcgagaaggtcctgaaggcacaagtaagttacatgaggaattggctcaaatacccatggtctccacctctgccagcctgccttctctcccccaacctgaaccaacggcctcatagggagttccctatgatcagtcgacagaggaagagaagactagggcctggttcgcagatggttttgcacgatatgcaggcac

SEQ ID NO: 955472 - DNA, 618 bp, Homo sapiens
ctcagtatgcacccttgttgaacaaagggttcccctctttaaagtcctgcacacaaaaataactctggccaccatgagkacccttttgggagtttataatcaaatacagcacttctaattagttctagtgtggtctaattgatcccactgacccaaatgtcttgttaaatattattgccaaataaaaaagcacaaattgccaccgcctactcatctagggacatcataatgttagctcagtccctccactggctcagaggacttggagaagctatgtgctcttatcacacttgagatgcaatagaagcgaagtgcaggcttttctctggtctctaagcaggctgcttgccttctctgtggttctggtttcagtccctctgccttgtgggtagagttgtcaatcactgaccacccccaggcctgctggggagaaggggcctcccacagcatctgctgaacagttggccgaggcagccatgtctcaggacccctcccttcttccaatgctggcttggccggggctttgcccctgactgggtgccaatactgtggcacagtgacatgcagaggcagcctcttggaaatgtgagtaagacacacccagcaaaggaggagagg

SEQ ID NO: 955473 - DNA, 624 bp, Homo sapiens
ctggtggtgcctgcatattgtgcagaaccatctgtggaccaggccatagtcttctcttccactgtcaactgatcataaggaactcaccatggggccatygatgtaggccgaggaagacaaggcagggtggcaggagtggagaccaggggcatttgagccacttcctcatgtaacttacttgcgccttcaggacctgctcgagcctgatcacgtacataccacttccattttgatgattgaatgctactgcgcatgacccactttatggctagatgggtcagaaagcacccaattcatgttaagcagttcaggttgcatggtgacttgatgacccataatcaaatgttcagtttccaccaaagcccagtaacaggccaagagctgtctctcaaaaggagagtagtcatctgcagaagatggcagggccttgctccaaaatcctagaggcctccgctgtgattcacctagagggacatgtcaaaggctgcaaacagcatccctatctgccactgacacctcaagcaccatcggatctcctgggtcacatggcccaagtggcagagcaacttgcacagcagcctggacctgttgcagagccttctcctgttctggaccccgctcaag

SEQ ID NO: 955474 - DNA, 230 bp, Homo sapiens
taaatgcacatggttatatctatttcttctcaaaatgycaaatttctaaaatgactacaaattatttttaaaatataaattcacaaagacaaagatcatggaagtagagactatagtaaatgagaaatatcacataatctttgaacctggaaagcagatgggaaacaactgatttcccaggacagtgaaacttaagttccatggtgaagaaacaatgagaggcatcccac

SEQ ID NO: 955475 - DNA, 611 bp, Homo sapiens
ctcataactatgacttttaatcatctgccagatcaataaactgctccctgggactggattcttcaagacagcgtctggtatggattctctgygtggtataaagtccattggctggaataggctcaggcttgcagcacgctttccagcccagccagccaaggcactgagctgagctttcaatttgcccctgccctggacgtggggactctgggtcaaagcccctattgcagtgccccaagtgtacccacacaggatgaatgaagcttcttacatgctcctgccaaaggtagtaaggatggatggaggtactgaggtggcttcccagacagaggacttgcctcagggactgtaaggatcaagtcaggcttagctaccgtcttgcaactgtgacaacacctgatactcacacttgagtttccctattcccaacacatacccaggatattctggaattcaactgatctctcaggctgaatgcctttattagtgttactattattttgagagagagagagagagagtctttctctgttgcccaggctgaaatgcagtggtgtgatcgtatctcattgtaactttgacttcctgggctcaagcaatcctcctgcctc

SEQ ID NO: 955476 - DNA, 603 bp, Homo sapiens
agacagagttttgcccttgttgcccaggctggggtgcaatggcacgatctcggttcacagcaacttccgcctccccagttcaagccattctcctgcctcagcctaccaagtagctgggattacaggcatgcaccactatacctggctaattttgtatttttagtagagacagggtttctccacgttggttagacggggtttctccatgttggttgggctgatctcgaactcccgacctcaggtgatctgccgcctcggcctcccaaagtgctgggattacaggcgtaagccaccacgctggcacatctctcttttttaaacttttattttagatgcaaggggtacatgtgcaagtttgttacctgggtatattgtgtgatactaaggtctgaggtatgaatgatcttgtcacccaggtactgagcatagtacctaatagtttttcaacccttgccctcttctcctcctccccctctwttagtccccagtttctattgttgccatctttgtgtccatgtgtattcaatcttgatctcccacttctaagtgaggacatgcagtattcagtggttttgtttctgcatcagttggcttaggataacg

SEQ ID NO: 955477 - DNA, 735 bp, Homo sapiens
gattcaaaggaagcatgaaagagcattagcgaaattcataggaacaaggaacactttttagagagcagaagaaaagcagtagatgttcttgattctatacaatgcaacaaatgttgccrtgtgaggcactgggattggcactgcaggaaatcaaacacaggaaagattgttattaggcatggggcgtggggaatgtggggaggggaagcaagacccgcacaaaccatgtctcactccctcagttctctgcctcaatgttacagtacaagaaaggccatcttgtgcacttgataaaaaatgaccaccgtgctgcctgagtcatggtcccacaggaaacagaaagtacgttccatagggattttgaagagcattcaggaaaaggtggaagcaggaaaagggaactaactagggacactgaggctcccagggaccagcgtcattgagaagccattcccaatcctgggctggaggggtaggagaagggaatggtgtatgtgcatctagttgcaagtggatgatggaagaggctcttctggatagagctgtaatcctcgagggatgcagccctgcctgaactgagggtgggaggaagtaaggaagacgctcctggatctccctcccctctcaccagtggtgtattggaactggcccataccggtttatgaggactgattgtatgcagtgcattctaactccagtgtcaagatggcagtttggaatctctcatggtgggag

SEQ ID NO: 955478 - DNA, 475 bp, Homo sapiens
gagaattgaaaatggcttatcagaaaagacagtaattaagcagaccttagaagataaaacatatttataggaggacaaggtaaagatgagattaaaggaaagattttccaagttgaaggacttctaggaccaatgatatagaaatatgaaaattttaagaaacaggtagttttgctagctaaaatatataaaggataaaaagagagctctaaggctgaaaattctagaagtattcccaaagtattgagcaccatgctttaagaaaagaacagtttttctataattattatataattctataattactaaagttttgccaaaggtttggagggatatttttgagacratttttttttttttttttgaggcaggatcttgttctgtcacctaggctggaatgcagtggtgcaaatacagctcactgcagctttgacctcctgggatcaagtgatcctcccacctcagcctcccaggt

SEQ ID NO: 955479 - DNA, 657 bp, Homo sapiens
agctaattttttatgaattttttgtagagatgagggtctcrccatgtgttcccaggctcatcttgaattcctgggctcaagcaatcctcccaccacagactcccaaagtgctgggattataggcatgagccaccacgcccagccaagacgatcttaaatgtggcttggggagaaaattccaatggctgtgtgaaggatgaaatgaaagaggaaatcatggaagcaagaggactaatggcgggttactacagcagtccaggaagcagacagtaaaactacaagccaagtcagagatagtgacaatgcaacaaagagaatgaaagaggtacgtcaaagatagaatcagaagtacctggagatcagtagcagtgaacatattagcacccaaatcttgatttctagatctattcctactaaaaggaaataaagctcttttgagaaatgatgaaatgcatgaaagtatgaatggagaacatcttgttacaccagaaacaaagacatgctcaaaagtggtggagacacatcaaaagggcacagaagcctgcttgaaagggctcccattggccgaattggcgtcagtatgaccctgtgaaagaatgaatggtggtaataaactacaacacaatggacaaaagaaacccattagtccacagtgtt

SEQ ID NO: 955480 - DNA, 657 bp, Homo sapiens
agctaattttttatgaattttttgtagagatgagggtctcgccatgtgttcccaggctcatcttgaattcctgggctcaagcaatcctcccaccacagactcccaaagtgctgggattataggcatgagccaccacgcccagccaagacgatcttaaatgtggcttggggagaaaattccaatggctgtgtgaaggatgaaatgaaagaggaaatcatggaagcaagaggactaatggcgggttactacagcagtccaggaagcagacagtaaaactacaagccaagtcagagatagtgacaatgcaacaaagagaatgaaagaggtacgtcaaagatagaatcagaagtacctggagatcagtagcagtgaacatattagcacccaaatcttgatttctagatctattcctactaaaaggaaataaagctcttttgagaaatgatgaaatgcatgaaagtatgaatggagaacatcttgttacaccagaaacaaagacatgctcaaaagtggtggagacacatcaaaagggcacagaagcctgcttgaaagggctcccattggccgaattggcgtcartatgaccctgtgaaagaatgaatggtggtaataaactacaacacaatggacaaaagaaacccattagtccacagtgtt

SEQ ID NO: 955481 - DNA, 725 bp, Homo sapiens
gaaacagggtggggtgtcacctcacccaggaagcacaaggggtcagggaactacctcctctacccaagggaagccatgagggactgtacctgaggaacggtgcactccrgcccagatactgcacttttcccatggtctttgaaacctgcagaccaggagattccctccggtgcctacgccactggggccctgggtgtcaagcacaaaactgggcagccatttgggcagacactgaactagctgcaggagttttattttccataccccagtggtgcctggaatgccagcaaggcagaaccattcactcccctggaaggggggctgaagccagggagccaagtggtctagcttggcgggtcccacccccacggagcccagcaagctaagattcactggcttgaaatcctcattgcaagcacagcagtctgaggtcgacctgggacactcgagcttggagggaggagggccgtctgccattgctgaagcttgagtaggcattttaccctcacagtctaaacaaagctgcctgggagttcgaattgggtagagcccaccacctcagctcagcaaggccactctggccagactgcctctctagattcctcctctctgggcagggcaactctaaaaaaaaggcagtcagggactaatagataaaaccccatctccctgggacagagcacctgtgggaaggggtggatatgggagcagcttcagcagactta

SEQ ID NO: 955482 - DNA, 550 bp, Homo sapiens
tctcactcataagtgggagctgaacaatgagaacatatggacacaaggaggggaacatcacatactggggcctgtcaggggatggagggctaggggaggaacagcactaggagaaatgcctaatgtagacgacgggttgatgggtgcagcaaaccaccatggcacttgtacacctatgtaacaaaactgcacattctgcacatgcaccccagaacttaaactataataaaaagtaaaaaataaaaaataaataaaactctgatctgtaggccaaagggtacttctttttctttattaattactcagaagtctaggccacagcaatcctactgttctcctctcattttcctaaactattttgatacctatttctcagactttatgggctattagacatttctcacatttccatagataataactcatccrttttgcaacctgattctcaatattaagagattaaaactaatgtatatgactctcagttgacacatactgaagtacagaaaaattccatcatttccttctgcaaaatgaaaaagacttcgtt

SEQ ID NO: 955483 - DNA, 581 bp, Homo sapiens
gcttattttgtccttatcactatcttctttccagcctggcaccaatgcctgcatcagagaaccctgaaatgcagggcagaaggggcttcactggctcctgaagtcaaaacaaagcaagatgtccacccaggcaagggtggacaccccactcacccattcccagaggccacctggacactctccaaagaagcagaaacagtcaggctttgtttttagctctccttgtgggcccctgaggcctgccccactttctagaaacagggagcttggggcccatgccatctggagggactgggcagcctttgccttctcttgccactcatggggaaaagccaagggaatgcagccctctccatgtgcacagcttccaggaaatccacgtggtagggcctctggtgggactggagtctatcagaaccacagtggtcagtctgtgcacagggctgtgtcccttgcaggagctccaagagccttgctatggaaaccccaaactccggrgactgttctgattctctcatccactccacagaccccagctagcatttttctgagctcaacttgagctcaggtctaggaaaaaa

SEQ ID NO: 955484 - DNA, 581 bp, Homo sapiens
gcttattttgtccttatcactatcttctttccagcctggcaccaatgcctgcatcagagaaccctgaaatgcagggcagaaggggcttcactggctcctgaagtcaaaacaaagcaagatgtccacccaggcaagggtggacaccccactcacccattcccagaggccacctggacactctccaaagaagcagaaacagtcaggctttgtttttagctctccttgtgggcccctgaggcctgccccactttctagaaacagggagcttggggcccatgccatctggagggactgggcagcctttgccttctcttgccactcatggggaaaagccaagggaatgcagccctctccatgtgcacagcttccaggaaatccacgtggtagggcctctggtgggactggagtctatcagaaccacagtggtcagtctgtgcacagggctgtgtcccttgcaggagctccaagagccttgctatggaaaccccaaactccggggactgttctgattctctcatccactccacagamcccagctagcatttttctgagctcaacttgagctcaggtctaggaaaaaa

SEQ ID NO: 955485 - DNA, 452 bp, Homo sapiens
agaaattcacatgggatctggagtacttttgtctaaaaggaaaagaattacactgagtccagctatgggcaaatatatgattctgtsttatatctagaggtagaaaagttctaattgtattcatagagagacactttaaactgcaatattgtaaaagttgggacctgaaaatttaatgcctgggacttgaacgtattgacatatctttattgttcagtatagatctgaaggaacatttcagcagaaaggaaagcatgaggaataggaaaccttgtgggagtataataacaagagtattggttgagtagtcttttgaaaaatataaattatattttcgcaaatagaactccttgagtccccttatggcagtcaagctgaagcagcatgagcgtcatatcatagtgatgtattttaaggtcacaacggcggaaagacatagaaagtatctgacc

SEQ ID NO: 955486 - DNA, 594 bp, Homo sapiens
tttttagtagagatggggtttcaccrtgttagccaggatggtctagatctcctgaccttgtgatccgcccgcctcggaaatactttgcattgttggattgattgggtttgagcccctgttgtacttaagtgattatgaacaagtcttttataatctgaatttccctttcctagtttgtaatattgaggataataatttctaacttgcatgattgttgtgaagattaaataagacaatgatattggtaggagctctttataatctttctctcttatgtacaattcaaatatatgtcggtttaaataccaaaataccactttaaaaaatctgggctgaaatggacacttctaatgtaggagtagtgctttagaaaataatgctttgtttcgtattcttttcctagtattttatgtctagtaactcataaggaaaaaatgatcagataagtatattttttagatgctgattacagcattatttaaatagtagaaataacaactgttcagtgataagacaatgaataaattctgttcataaacattacaaatgttttttaaatatttttcatatgtgtgaaaagtaggattaaaaata

SEQ ID NO: 955487 - DNA, 594 bp, Homo sapiens
tttttagtagagatggggtttcaccgtgttagccaggatggtctagatctcctgaccttgtgatccgcccgcctcggaaatactttgcattgttggattgattgggtttgagcccctgttgtacttaagtgattatgaacaagtcttttataatctgaatttccctttcctagtttgtaatattgaggataataatttctaacttgcatgattgttgtgaagattaaataagacaatgatattggtaggagctctttataatctttctctcttatgtacaattcaaatatatgtcggtttaaataccaaaataccactttaaaaaatctgggctgaaatggacacttctaatgtaggagtagtgctttagaaaataatgctttgtttcgtattcttttcctagtattttatgtctagtaactcataaggaaaaaatgatcagataagtatattttttagatgctgattacagcattatttaaatagtagaaataacaactgttcagtgataagacaatgaataaattctgttcataaacattacaaatgttttttaaatatttttcatawgtgtgaaaagtaggattaaaaata

SEQ ID NO: 955488 - DNA, 646 bp, Homo sapiens
ccctaaattttggtcatactctcacctaagtgagaacctgaccaaaaggggggaattattaaacaaaattatgagaggccattgttttggactaagctcatgcagtaggccctaacagaccagaccaaaccaaaatggagtcacttgtgctaaatatgactaatcaaactaagagtttaaagaaacacatagattctagaacagaccgggttttgttttttcctcctgtaaacaggacattctagcatataaggaggtacctctactctaaccctcacaaaaaaggtaacctaaattccttgttcccaccttacaaaacccatgtctgctatttcccagtgagtttaaacaccaaagaagtatatttatgatggtgattgtgacatcaatgactaaagttttggccaatctctcaaaattgagaagatgaccaaaaggggggaattgttagaccaagtttagcctaaatctgcctccttacatattttaaatttggcctaaaggtttctctgtactttgcraactatagcctaaatggagttatatacaaactgtagtctactcttgtgtcaatcactgagttttggctgatcaaaggtggccaactgttcaaaccgtgttcaaataaggaaaagccgagctataa

SEQ ID NO: 955489 - DNA, 548 bp, Homo sapiens
gtttgctggaggtccattccagaccctgtttgcctgggtatcagcagcggtggctgcagaagagtggatattggtgaaccgcaaatgctgctgcctgatcgttcctctggaagttttgtctcagaggagtacccggccatgtgaggtgtcagtccgcccctactggggggtgcctcccagttaggctactcgggggtcagggacccacttgaggaggcagtctgcccattctcagatctcaaactgcatgctgggagaaccactgctctcttcgaagctgtcagacagggtcatttaagtctgcagaggttattgctgtcttttgtttgtctgtgccctgcccccggaggtggagcctacagaggcaggcaggcctccttgatctgtggtgggctccacccagttcgagcttcctggctgctttgtttacctaagcaagcctgggcaatggcaggtgcccctcccccagccttgctgctgccttgcagcttgatctcagactgctgtgctagcaatgagygaggctgcatgggcgtaggaccctccga

SEQ ID NO: 955490 - DNA, 598 bp, Homo sapiens
tgagcttagatgttcaatctaatacagagaggtttcaagcatartttcttcctggctgtgtcaaaatcattagcgattggggttctttctggctgtgtcaaaatcattagcgattgggggtgctggagaaaatacagattctgactcaataagtctgaggttaaagcccagaaattcttgtttttaatgagctcctacattaattctgattagcatccaagtttgggaaaccatgtgtataatatatcattggtatcaactaaaacacaatgaggagggatagtgctgtgctattttacgactcagccccaactatgttgtctccagtatctcaaactcatagcatgtagtaccaatatctgagagaccaagaaatcattgaatagcattattgtgtttttcttaatccttcacatagttattttaagatatataatgtacagcatgagttaaatgtagccttttgaagagtggatcctcttttttaacgaagattaatcttttgcgttggaacctgcttcgtaatactaatcccagtgttttattttcaggaaatgtccgtgtcgattgaagacatgtaaatcagcacatacagtgc

SEQ ID NO: 955491 - DNA, 550 bp, Homo sapiens
  misc_feature 1, 2, 3, 4, 5, 6, 7, 8, 9, 10, 11, 12, 13, 14, 15, 16, 17,18, 19, 20, 21, 22, 23, 24, 25, 26, 27, 28: n = A,T,C or G
nnnnnnnnnnnnnnnnnnnnnnnnnnnntggaaataaaaatacatttcctataaagaactgrataatctgtgagcgagcttgctaggcaatggccctaagcactgaaaggacatgcaataatttatttttctctattcccaaattttgaatagtttttgttaacaagagttaggagagaaatgtgacctctaagaactttctctttcttccttcccttcttttctctcataaacacttctatagcattcttgtgtataccttttcttttctttttttattttagactgagtcttgcactgttgcccaggctggagtgcagtggcacattctcagctcactgcaacctccgcctcccgggtttaagcgattctcctgccccagcctcccaagtggctgggattataggcatgcgccactacacccagctagtttttgtatttttagtagagatggggtttcaccactttagccaggttggtctcaaactcctgacctcaagtgatctgaccgtctcagcctcgcaaagtgctggcattacaggcgtaagcc

SEQ ID NO: 955492 - DNA, 573 bp, Homo sapiens
atggctaaaagggtccaaggtacagcttgggccattgcttcagagggtacaagccccaagccttggtggcttccacatggtgttggctgcaggtgcacagaaggcaagagctgaggtttgggagcttctgcctagatttcagaagctgtatggaaacacctggatgtccaggcagaagtctgctgcaggggtggagccctgatggagaatctctactaaggaagtgcagagtggaaatgtggggtttgagctcccacacagaatctccactggggcactacctagtggaactgtgagaagaaggccatcatcctccagaccccagaatgttagatgcattgacaacttgcaccatgtgcctggaaaagctacagacacataacaccagcccatgaaagcagccatgggggctatatcctgcaaagtcactaggttgtagctgccsaagtccttgggagtccactccttgtatcagtgtgccttggatgtgagacatggagtgaaatgagattattttggagctttgagatttaatgtctgccttgctggcttttggacttgcatggggcctgt

SEQ ID NO: 955493 - DNA, 575 bp, Homo sapiens
ttcaaagtttagacagttcacaattctactttgactttcactttctgcttgcacagagtctcatggtcagccaaaggccctggggccctctttagtctttcctgagtgtaawtgcaatcctgtgcatgtgtacaatcttccagatccccaggaatatatcagagcttttcaaaatcctcatggctgtctcattttcccccttatgcctcttaaattctgatcggtctttcacttatccctaccagcactgcaggcttaggcagttggctttcccaatgttgggtttcccaattgtttgtcactacttgctatcagatttgaccatgtcccaggcatggggcttttctggggagtttcaaatcagttcaaccccctccacgacagtgaggctgctagccttcattgactactgtatcattgaccaagggggaaggatgagaacagctccaaactgaaatgtcacagatcccattgttcctaccaagattcagtagtttttcttaaataaatgtatttcaatttatctatgtgtttggttattttcagagttctgaaatgactgcttttgataattt

SEQ ID NO: 955494 - DNA, 607 bp, Homo sapiens
ctgaagtgggagaatcccttgaatctgggaggcagaggctacagtgagctgagatcacaccactgcactccagcctgggtgacagagcaagactgcctcaaaaaaaaaaaaaaaaaaaaaraaaaaaagaaaaaaaagagcagcaaagagtttgcttccatgtttaacatgcaacttaaatatagagtcttttaatcatctctgaggtctcaacacctcaaatagtatacacaaagaacaaatatttgttcatttacatttaaactgacaaattatatgggatggagattatgtctggaacaactttaatggcctccacttactctcttgaaatctcttggtatcttttactccaaatgacgtaaatgtgttttccaaaaatacctcttcctgcttatctgaagtttctgtctggatctctttataaatcaggaatacatcagcacaatggtataatgaaatggaaaattttccagtatggctggaaaaggtgcccggtagcaatctcagccttctgaaattctatcccttagtctctattaaagtctacaatttaataacaatggcttccctgaagtgggaagaatcagctctcaaaatactcttg

SEQ ID NO: 955495 - DNA, 564 bp, Homo sapiens
aaaaaatatatatggttaaagactagtttaccatatcaggaagtctggacttgatcctgcagataatgggaaaccagtgaaggtatttaaacactaatggtgatttttaaaaaactcagtgtgtttaaaagggaatggatagtgcataatctcttttttatctctccttggttttgtttaagtgggctgctatgggaatccttagagtatcattttttaaaattaaaaaaaaatttattatactttaagttttgtgatacatgtgcagaatgtgcaggtttgttacataggtatagacgtgccatggtggtttgctgcatccatcaacctgtcatctacattaggtatttctgctaatgctatccctcccctagcccccccaccctccagtaggccccagtgtgtgatgttctcctccctatgtccatgtgttctcattgttcaacwcccacttaggagtgagaacatatggtgtttggttttctgttcctgtgttagtttgcagagaataatggtttccagcttcatccatgtccctgcaaaagacataaaattatcctattt

SEQ ID NO: 955496 - DNA, 616 bp, Homo sapiens
gctgtttttaaggaatgtaaagaggagtggggaaagaatttaggatctatggggtcaactaggttyccttttgtgagtttatataatggtttaatcagatggcaaaacaaggtatccaaaggcgaaagtatccgaccacgaccaggaaggaaaggagttgttgttttgtagaaggggttggggtttgagagaccagccagacatgattggcagggagagcatgcgtgttttcatgaagaattatgctgaggtaggtaatggatggggaagaaatttgagctttggagggggataactgatgtcctttggagaataaatgttgaaggagcaggagggtatcttgttgagaagactcaaaggagggactacagagtagaaagtcatcaatgtattgaataaggtgggaagcagagaggtggaaagaaagtaaatcatgagaaagggcttggctgaagtaatgagggctgtcccagaagccttgtggcagtaaagcccaggtaagttgctgggactgatgggtttcagggtcagtccaggtaaaagcaaagaggggctgggacaaggggtgcacgggaatcatgaaaaaagtgtctttaagatcaagaatggaatagtg

SEQ ID NO: 955497 - DNA, 541 bp, Homo sapiens
tattttctctgtttatatctttattctataagctttattctattatcttaaatttttaattttttctttttttttgttaaaaactaggacacaaagacacacattagcttaggcctacacagggtcaggatcatcaatatcactgtcttccacctccacatcttgtcccactcggaggtctttagggacaataccatgcatagagctgtcatctcctatgattacaatgccttcttctggaatacttcctgaaggacctcccagaggctgtttaacagttaccttttttttttcaataagtaggagtacactctaaaacaacaaaatatatagtaaatacataaaccagtaacatggtcatttattatcattctcaagtattatgtactgtatataactgtatgtgctagactcttatatgactggcagcaagtggrtctgtttatactgggcatcaccataaacacataagtaatgcattgtgctaggactttatgacagctacatggttattaggctacaggaatttttcagctccgtg

SEQ ID NO: 955498 - DNA, 569 bp, Homo sapiens
gaaaccagcagttctgttcagagttttatttayatctaattgaactaaggagtgtcagcctcccctccagaatgcttgtcccggacttccaataccaaggtagctggactctgagcccacatccaggcccaatcctcgggtcatccaactttctaagttttgccagactgcctggtgtaaagtggtatctcagcattgctttcgttttcattgttctgggtattcataagttcaagcatctctacctgagcttgatagttttcggatttcttctcctgtgtattgcctgttcatatcctttgctccaacattgtttatagagcactccctccctactttggcatttggggtcccctaaactggcccccattgctaaagcttacttctcatgactgacctttgcccatgctgcatgtggtccaggaacaattcttctgtctttgtttttgctgtcccctcttgcctggattacatcatcttctccaaacccccaatctaaacatgtcccgaatcctaaatattctttagaaccaagctcagatatcacctcctcctggaagggttccttt

SEQ ID NO: 955499 - DNA, 439 bp, Homo sapiens
aattggtttgtaggttgatgargccctatgcctgatttgaatttctcttgaatggtctgcagccctggaccaagttgaagaagccatgagagtctcagcttttttccttaccccattatgagataaactcattccttaaatatcttgctcatttgataaaacttggcacccttctcctttctactggtccctaatacttactacctgtactgtaagctcaaattttttacaatttctgcctttattatgtaacgtattccactggaatatgtgttacaggaaaggggtcccgatccagacccctagagagggttcttggatatccggcaagaaagaattcagggccagtccataaagtgaaaacaagtttactaggaaagtagaggaataaaagaatgggctctccatagagagaacagcctgaaggctgcttggttgc

SEQ ID NO: 955500 - DNA, 586 bp, Homo sapiens
aagttgaatccaatgctcatttacygttctgaaatttctagggttcttaggaattatgccaaatatactttgcctgtgcgctgtcaatgaaacaacaaagcctggacgacagcaaatctgtttacagcatgttttactaactattttaagcccattgttaagacctactgctcagaaaaatccctttgaaaacattactgttcattgacaatgcacctagtcactcaagagctctgatggcattgtacaaggagataaatattgctttaatgccttaacataacatctatttggcagcccatggatcaagaagtaatttaatctttcaagtcttattatttaagagatagatttcataaggctatagctgccatagatagtaattcttctgatggatctgggcaaagtacattgaaaacctggaaaagcacattcctgattcatgggaggaggtcaaaatatcagtcttaacaggagtttgaaagaagttgattccaaccctcatgggtaactttgagaggttttagacttcagtggaggaagtaactgcagatgtggtagaaatagcaagaaaactacacttaga

SEQ ID NO: 955501 - DNA, 537 bp, Homo sapiens
gttgaatccaatgctcatttactgttcygaaatttctagggttcttaggaattatgccaaatatactttgcctgtgcgctgtcaatgaaacaacaaagcctggacgacagcaaatctgtttacagcatgttttactaactattttaagcccattgttaagacctactgctcagaaaaatccctttgaaaacattactgttcattgacaatgcacctagtcactcaagagctctgatggcattgtacaaggagataaatattgctttaatgccttaacataacatctatttggcagcccatggatcaagaagtaatttaatctttcaagtcttattatttaagagatagatttcataaggctatagctgccatagatagtaattcttctgatggatctgggcaaagtacattgaaaacctggaaaagcacattcctgattcatgggaggaggtcaaaatatcagtcttaacaggagtttgaaagaagttgattccaaccctcatgggtaactttgagaggttttagacttcagtggag

SEQ ID NO: 955502 - DNA, 587 bp, Homo sapiens
ggcctataaaacaataacataatgaagaaaacaaagtatctaggtaacaacatgatgactggaatggcatctcacatctcagtattaacactgaatgtaaatggtctaaatgctccacttaaaaaatacagattggcagaacgggtaaaaaaaaaaaaatcacaaagcaaatatctgctgtgttcaagaggctcatctaatatctaaggtatatgatagactcaaggtaaaggggtgaaaaaagatattccaggcaaatggaaactaaaggtgagcaaaagtaacttttatatcttacctaatatctgactttaaggcaaaaaaagtaaaaaatgacaaaggtcattatataatgataaaagagtcaacccaacaagaatatattacaatcctaaatatatatgcacctaactctggagctcccagatttataaaacaattattactagacctaagaaaacagccaggcatggtggctcacacctgtaatcccaccactttgggaggctgaggcgggcagataacctaaggttgggagtttgagaccagcctaaccagcatggakaaaccctgtctctacaaaaaat

SEQ ID NO: 955503 - DNA, 561 bp, Homo sapiens
aggcaaggaactgctggtatcacccctcccctaatcccaggctgcatggctcacagctcaaaagagacacatcctttcgcttgaggagaggagasggaagagtggggaggactttgtcttgcatcttggataccagctcagccacggcaggatagggcactggtcagagttgtaaggcccttgttctagaccctagcccccagatgacatttctagacacacctgggtccacagggaaccaaatgccttgaaagaaaagactcagttatggcagcactaatcacctgctaactgaataaccagcagtgatacccaggtattacgtcgagggtcttgggtgagcctctgagacttgctggcatcaggtgagacttggcacattactagctatgatggctatggggcaaaactcctcctgcttgagaaaagcagagggactagtaaaggggacttagtcttgcattttaggtaccagcatggccacagtggggtagatcaccaagcggcctcttggagtcctcaattccaagacttgacccttagatggcatttccggacctg

SEQ ID NO: 955504 - DNA, 556 bp, Homo sapiens
caataccttgctttcagtaatggataaaacacataggccaatgatcaacaaggtaacaaaagacctgaacaacactataaaacaactaaaccgaacagatattwatagaacattttacccaacagaagaagcatacacttttcctcaaatcacgtaaaacattcttcaagatagattacgtgctagcccataacacaagcctcaatatactgaaataatacagtgtgttcactgacctaaaccaattaaattagaaaccaacaacctaaggttttgggaaaattcagttttaaaaatcaaaaacacactattaaataaccagtgggtcaaagaagaaatcacaagagaaattagaaaatattctgaagtaaatgaaaatgaaacacaaaataccaaaacttttgagatgcagcatcagttattgaagggaaatatatagatgctaatgccaatatcaaaaaggaagaaagatcttaaatcagtaatctcactttccacattataaaactaaaaaagaaaagcaaataaattcaaagcaagcagaaagaagacacaa

SEQ ID NO: 955505 - DNA, 629 bp, Homo sapiens
cctctctttgtactatttctctttatttctcagactggctgacacttaggaaaaatagaacctacattgaaatattgggggygggttcccccgatattacttcttcaaaaagaataataaaattgacaaccctagagctatatggactaagaaaaaaagaaagatgaattactaaaataagaaattacagtggagatattgttcattactccagatgaaaaaattatttaaaatactatgaattatcatatgccaacaaattggataatctagattaaatgaataaattcctagaaacatgaagccaacaaaaactaaattacaaagaaatagaaaatctgaaaagacctatttactagtgaggagattgaatcagaaaccaaaaatttcccaacaaacaagagccctggacctcatagcttcactgatgaattctagcagatatttaaagaagcactaatagagttgggaaaactaaccttttttaagttttccaaaaacataaagaaggaaaacacatcctaattcatgttgtaaagccagcattgccaggatatcaaattgtctgtaggcaaagacattgcagaaaaataaaaatagaaaccaatatcctgtatgaacattgacgc

SEQ ID NO: 955506 - DNA, 613 bp, Homo sapiens
ggtgaggcagtccctaggtccacaggtggtatgtgtaggtgcatgtaagctgctgtggtagtggcaggttgggtggatccatcttgaagcccaaggaggaatgcttagatgcaaatggtggtggagtgggctggataatccctaggcttctggacagcatgctttggcactgggattgcagggggtagaaatacagaatatacattctcagcacatggaaatttctccaggatagaccatatattaggacatgaaacaagtctcaacaaatttataaattcaaagttatatcaagtatcttctcaaaccacaaatgagtaattctagaaattagtaaataggagaaattggaggaaatttgcaaactgtaaaaacacacggaaattaaacaaaatgctcctgaatgaacactggttcaaggaagaaattaaggaagtacccaaaaatttcttaaaacaaatgaaaatcaaagcaacgtatcgaaagctatgggatacagcaaaagcattgctaaaagggaagtcttaacagtaaatacctttstcaaaatagaaaaatttaaacgaacaatctaacgatgaacttcaaggaattagagaagcaagaacaaaca

SEQ ID NO: 955507 - DNA, 564 bp, Homo sapiens
gatctactaagaggaagacacacattcgaatatagtagatttgtccatttcttcactctgctattaaaatcttcatagtatctataaattcaatttctttgtcttaaaaatggaagccaataaaaaccaaaattttgtcaatgcagaggtgacctcactcaataccataagcagagtgcaataatcaatacagaaattcattccgagatctcaaggtcagtgtttatttctataaaatattcaacatttgagttacttatttgaggtcactgcatagaaggtgctacataaataggaactatcattctggcagccttaacgattgctacttaaatgtttgaacactgaatgatatttagagagtaaagtgatttaataaactagcaattgctcatgcaagggcaatcacccccatttcagtttaattattaagatgaaatttttaaaatattcccaactttagcaagcaatcttgcaatgaaaaagaaattataaaatgttacatgatattatgatataaaatgctcattttatcaactatwatgagcacctaggaagattcag

SEQ ID NO: 955508 - DNA, 588 bp, Homo sapiens
ttgctttgcaaaacaaaaaagggagacatgttgggaacaggcccccaaaactggccataaacaaaatctctgcagcactgtgacatgttcttgatggtcatgacgcccacactgaaggttgtgggtttaccagaatgagggaaggaacacctagcccacccagggcagaaaactgcttaaaggcattcttaaaccacaaacaatagcatcagcaatctgtgccttaaggacatgttcctgctgcagataactagccagagcctatccctttgttttggcccatccctttgtttcctgtaaggaataattttagttaatctatagtctatagaaagaatgcttatcattggcttgccatcaataaatatgtgggtcaaactccgtttggggctctcagctctgaaggctgtcagctccctgatcccactccacactctatatttctgtgtgtgtgtctttaattcctctaatgccrctgggttagggtctccatgaccaagctggtctcggtatgcatatatataaattccaaaagtagctgcctgcagtggttcacaactataatctcagcactttgggaggctgagg

SEQ ID NO: 955509 - DNA, 596 bp, Homo sapiens
caatttgattttcccatgacatrcgtggcgctgtagatgcagtttatcctacctccagtcaagtgggtccatgaatagaaactctcaggtataaaccactcctctaccacttcaccccagggcattctagtgacttccatggtgatttggtttggctgtatcctcacccaaatctcatcttgaattgtaatcctcataatccccacgtgtctagggagaggcctggcaggaggtgattggatcacagggcagtttcccccatgatgttctagagatggtgagtgctcaggagatctgagggatttataaggggctcttcctcctttgctcctcactcgctcgtgccaccttgtgaaggtgcctgctttgccttttgccatgattgtaagtttcctgaggcctctccagctacatagaattgggagtcaattaaacctcttttctttataaattaaacaggctcaggtatttctttatagcagtgcaaagacagactaatacacatggttacgtttctctcaactactgacacttggcatgtccagctattataatttcatttctatctcccaaatgttttccatctgtcccattcc

SEQ ID NO: 955510 - DNA, 575 bp, Homo sapiens
tcaattaatttaatacaggtacagattaatctagactaatctaatgataaatttagtttctatttaacayataaatgcttttaaaaccacattgctagaattggtggtactttcatttctgtgacatgatagagaattaaacataggcaattcctatgcagaaacaaaagctaatttattaggaagacaaatcaacaaatcaattttgcacattttaattgtatttaaccttctagagcaataaaaagggacacaaaagaaatggctgtgcagagcacatggagcccatactggtataaggcaggcaaatgaaagagaactgttctcaaaacagagacgattgtgaagaaaaatgaaaaaacagatggaaaagtgcctgaaactttagaagaaaatacataaagtcatagaaagttattatttgggccaggctcggtggctcacgcctataatcctagcactttgggaggccgaggcaggcaggtcacttgaggtcgggagttggagaacaacctggccaacatggtgaaaccctgtctctaccaaaaatacaaaaattagccaggcgtggtggc

SEQ ID NO: 955511 - DNA, 641 bp, Homo sapiens
atcacatcagggtgaatggggtatctatcacttcaaacatttatcctttctttcaaacacttatcctttattgctagggctttgtttcttaaattgtcaaccatccatttcctaagatgtccattaycacagacacaggctggaacagcacgacctctctgatgctaagtattaaagttagattctgctccctagtgttgaagaaaagtcagattttaagatttatttctcaccagaaaagagaacttctaccattgcttggaaacagaagcactgaaataaaaggtgagtgggcagaatactgacacacacagctctgttcagagcatactctggggtttaggttgaaagaaaaaaaaaactgaaaaccactctgctgtctacggacaaggtaaagaggacttcaaggttacttaccatatttgaacccctcaactaccccttcaacaagaagtagagagcaggagtacctaggaaggacacgggtgactggcgcacggccataaatcttggataaatcttgggaaagttgattacagaaactgggtcattcttgtcatacccaactaaatcagagtcaagggaccaaggggaaaaagtgctcggggcacacaacacctgctccaagaattcagtttatt

SEQ ID NO: 955512 - DNA, 559 bp, Homo sapiens
gtattgtcttgataaacatcttaaacaacagaaaacagggttcaagagcagagaacckctctgacctcaaatttaccaggaagtggttttttcctcaccctaataagcctgagggtactgcaggagaccagggtgtatttcagtccttatctcaaccgcataagacagacactcccagagcagccatttatagacctccccctaggaatgcaattcctttcccagggtcttaattattaatattctttgctaggaaaagaatttattgatatcttccctacttgcatgtctgtttataggctttctgcaaggagaaaaatatggctctattctgcccgaccccacaggcagtcagaccttatggttgtctttccttgttccctaaaatcgctgttattctgttctttttcaaggtgcactgatttcatattgttcaaacacacgttttacaatcaatttgtacagttagatacaattatcacagtggtcctgaggtgacctacatcctcagcttacaaagataacaggattaagagattaaaataagacaggcatggcc

SEQ ID NO: 955513 - DNA, 691 bp, Homo sapiens
tttggaggcaacacattcttcatttkggtgtgttacttcaactcatttattgagtgaaccaaaaggctgctaaatttgagtgaggcccggaagaggggaaggctctgcaacaggtccaggctgctgtgcaagctgctctgccacttgcaccatatggctcagcagatccaatggtgcctgaggtgtcagttgcttatagagatgctgtctggagcctttgtcaggcccccataggtgaatcccagtggaagcctctaggattttggagcaaggccctgtcatcttttgcagataactactctcctttggagagacatctcttgacctgttactaggccttggtagaaacagaatgtttgactatgggtcaccaatttattatgtaacctgaactgcctatcataaactgggtgctttctgacccatctagccataaagttggatgtgcacagcagcatttaatcatcgaatggacatggcatatacacaatcaggcttgggcaggtcctgaaggcacaagtaagttaatgagacagtggcccaaatgcccatggtccctactcctgccaccctgccttctctctccagtcctgcactaatgacctcatatagttcaccatgaaaagttgacagagaaaggaagactaggtcctggtttatagattgttctgcatgatatgccagcaccacc

SEQ ID NO: 955514 - DNA, 691 bp, Homo sapiens
tttggaggcaacacattcttcatttgggtgtgttacttcaactcatttattgagtgaaccaaaaggctgctaaatttgagtgaggcccggaakaggggaaggctctgcaacaggtccaggctgctgtgcaagctgctctgccacttgcaccatatggctcagcagatccaatggtgcctgaggtgtcagttgcttatagagatgctgtctggagcctttgtcaggcccccataggtgaatcccagtggaagcctctaggattttggagcaaggccctgtcatcttttgcagataactactctcctttggagagacatctcttgacctgttactaggccttggtagaaacagaatgtttgactatgggtcaccaatttattatgtaacctgaactgcctatcataaactgggtgctttctgacccatctagccataaagttggatgtgcacagcagcatttaatcatcgaatggacatggcatatacacaatcaggcttgggcaggtcctgaaggcacaagtaagttaatgagacagtggcccaaatgcccatggtccctactcctgccaccctgccttctctctccagtcctgcactaatgacctcatatagttcaccatgaaaagttgacagagaaaggaagactaggtcctggtttatagattgttctgcatgatatgccagcaccacc

SEQ ID NO: 955515 - DNA, 718 bp, Homo sapiens
agaaaggcacaatgcctagtgggcctgtttggattttggaggcaacacattcttcatttgggtgtgttacttcaactcatttattgagtgaaccaaaaggctgctaaatttgagtgaggcccggaagaggggaaggctctgcaacaggtccaggctgctgtgcaagctgctctgccacttgcaccatatggctcagcagatccaatggtgcctgaggtgtcagttgcttatagagatgctgtctggagcctttgtcaggcccccataggtgaatcccagtggaagcctctaggattttggagcaaggccctgtcatcttttgcagataactactctcctttggagagacatctcttgacctgttactaggccttggtagaaacagaatgtttgactatgggtcaccaatttattatgtaacctgaactgcctatcataaactgggtgctttctgacccatctagccataaagttggatgtgcacagcagcatttaatcatcgaatggacatggcatatacacaatcaggcttgggcaggtcctgaaggcacaagtaagttaatgagacagtggcccaaatgcccatggtccctactccygccaccctgccttctctctccagtcctgcactaatgacctcatatagttcaccatgaaaagttgacagagaaaggaagactaggtcctggtttatagattgttctgcatgatatgccag

SEQ ID NO: 955516 - DNA, 463 bp, Homo sapiens
gagaaaagatgcaaccctggttatttgagttatcagagtttttgtgctggttctttctcttctttgtggattgacrtttatttcaatctgtgaagtgctgtctttcggattaaaaaaatattctattttattaccttaatgattggattgtggtataaagtgtgttcagttgactggcttcatttctggaatattttatggggccaaggctcagctcacagctcctgaactttgcactctaactccggaggacttgtatcaggccttgactttgttatctggctcctggaggttaagaacccactgcactggggagagccaaggtgctcctagaccattggtcataacactctgatgtgtgatgccagccaaagcatttcacagagcagtggcagtggaatccatcattgttcacatgtgtgagtggcagtagaagtggcagcagcagcacaatggggtgcac

SEQ ID NO: 955517 - DNA, 604 bp, Homo sapiens
ttaacttggcttttttccttttccactacagsgggtaatggtaatgtttggggaactcaacatgactatataagtctgttaatggaataaggggaactttagtcagaaagccaatgggatggatttttttttctttgctgttaaaaggcatacattatgtgattacttaaaaataaaccaggacactctattctggatagtttttattatgactatatttaacaatataaaaaccaaaaccctgttcatattacaaattactagaaagactttttttttattttaatggtggtttcagagaggatattttttcttctcatatttttgaattttcaaattttctataatcgagcatgcattacttttgtactagaaacattgtataaaaattaaaaataagaaaatagtatcaccaatgacttatatttgggcacatatgtgtgcacaatgagatgaggtaccactcattaaaaatagtgaggggggtactttgtagattgaaggtagatgaactttggtgccaatgtcagcagtttttttacagacttctcacaaatctatgaggcatgcagtgataattcttagtacaagcaattaaggttat

SEQ ID NO: 955518 - DNA, 503 bp, Homo sapiens
cctgaggcttcactcagcaggggatctgtgggcccagtccaggaaaccatttttctctcctaggcctctagacctgtaatgggaggggctgctgtaaaggtctgtgacataccctagagacattttccccattgtcatggtgattaacatttggctcctcattgcttatgcaaatttctgtagctggcttgaatttctctccagaaaatgggcttttcttttttattgcattgtcaggttgcaaatttttcaaactttaatgctctgcttcctcttgaatgctttgctgcttagaaatttcatctgccagataccctaagtcatctctctcaagttcaaaattacacaggcctctagggcaggggcaaaatgccaccagtctstttgcatagcaagagtcacctttattccagttcccaagttcctcatctgtatctgagaccacctcagcctagaccttattttccatatcactctcagcattttgatcaaagccactcaac

SEQ ID NO: 955519 - DNA, 707 bp, Homo sapiens
agcgtctgcatcatctcctctgggaagcctgcttgatatacgtctgcatttggggtgatgtgtggaatcgatattgaatgaaatcgtgttcaatgccatgtgaggactgtggtgccaacccatggtaaaggtcctacatgcaacgcccagagtaacttttctcagctatcccagtgccactttcttccttattttctggggcctggcgaagcaaatccaagcttctcagttttgcatttgggactctccctttcccaatttcctcttccctcctgacactcattgccttcccagcctcggcagtagtcagacaccgccctgctctccctctgcacctggctcgttaccaccttcatatgcctttgttcctgactcaggtttccccagctctctccaccaaaccaagcaaacaaaacttttctctttttcaggagccagaggtcactggtcttgttgtagattcatagcaacaaagaagcattacctaacttctctttctacacaaactctcttgctagaatgatactgtatttgcaacctttatgtgtgtccagcttcctagtactctactcatttaagtaaataacagcaatacaacttttttttttttttgagactgagtctcgctctgttgcccaggctggagtgcaatgacgtgatctcagctcsctgcagcctccgcctcctgggttcaagtgattctcctg

SEQ ID NO: 955520 - DNA, 734 bp, Homo sapiens
ctccagcctgagtggcagagcaagacaagactccgtctcaaawaaataaataaataaaaatccccacaatgagactggttaaggacaaaagtgctaagaaagtaccattgtatgttttctatcaatttgtatgtttattcaacaactgtgtattgagtcccagcctctgcagatgcggtgctgggcagcggaagctcagggcagggtggggccgctctgacgccctgcaagggaggagctgacctcactacctcctccccacttgaattcctgtagactcctgtcctttctctttctgtgtgagttgaagggaggtgcccatcagtgacaggtatactcagcttttctggtacaggtcacacttctcagattccttcctggctggtgtttgggctcaactagttcacacgtaatagttataaaccagaaagatttaggtttctggtctctgttagacatctcaggtgggctgttcctgaggaagaagccttgtgtttgagcattcatccacctagaacctgacgggaaggcaggggctgtcttgctcattccttgcttcccactgcccagtattgccccgataagaaagattggtttgggtgctgacacttaactcaggggcttctcccttcatcttctggggaggaaggatcttctcacccatttacctttttgccaggcctcttctctaagggatggggcaggacccagtgctccccaccccagggtagcag

SEQ ID NO: 955521 - DNA, 502 bp, Homo sapiens
aagcaattctcctccctctcttcctttctttcttcctaactgcttaccttcccawaagaaaagaatcaagttcatcgatttgcaaccatgatcaatttgtaagtatttcttttggccaggctgcttaaaaaaaaaaaaaaaaagatgatctcagggattagtttatgaccatggttcctaaactttgccacacattggaatcacttggaaagctttttaaaatcctaatgccccagtcacaccccatagcaattagtcaaacatctgagggtgggaaccaggcaatagtattgctttacaatccccaagtgattctagtgtgcttcaaagtttgagagtcactggcaaatgtagggaaatgggcctgtggccagttaatttcatggactggagcctgatgcaaataaggctgaagtgttggattcttgtccagaacatgaaagttctttacactttcacagacccataaagcttatcccttctccttcaaccctccatcagc

SEQ ID NO: 955522 - DNA, 502 bp, Homo sapiens
aagcaattctcctccctctcttcctttctttcttcctaactgcttaccttcccatwagaaaagaatcaagttcatcgatttgcaaccatgatcaatttgtaagtatttcttttggccaggctgcttaaaaaaaaaaaaaaaaagatgatctcagggattagtttatgaccatggttcctaaactttgccacacattggaatcacttggaaagctttttaaaatcctaatgccccagtcacaccccatagcaattagtcaaacatctgagggtgggaaccaggcaatagtattgctttacaatccccaagtgattctagtgtgcttcaaagtttgagagtcactggcaaatgtagggaaatgggcctgtggccagttaatttcatggactggagcctgatgcaaataaggctgaagtgttggattcttgtccagaacatgaaagttctttacactttcacagacccataaagcttatcccttctccttcaaccctccatcagc

SEQ ID NO: 955523 - DNA, 651 bp, Homo sapiens
tagtgcaagaggttgaaagtattaaaagtagtttcttgatattctgctgttaatcctcagatatttattggtgatcttccagctttttcatagcaaatgaatattttttccatgtagctacagtgttgcaccactagtgtcattgtgtatcatagcttttgtctagttaaaaaaacttaaagggaggagccaagatggccgaataggaacagctccggtctacagctcccagcatgagcaacccagaagacgggtgatttctgcatttccatctgaggtactgggttcatctcactagggagtgccagacagtgggcgcaggacagtgggtgcagcgcaccatgagccagccgaagcagggcgaggcattgcctcactcgggaagcgcaagaggtcagggagttccctttcctggtcaaggaaaggggtgacagacggcacctggaaaatcgggccactcccacccaaatactgcgcttttcagacgggcttaggaaatggcgcaccaggagattatatcctgcacctggctcagagggtctgacgcccacggagtctcgctgaytgctagcatagcagtctaagatcaaactgcaaggcggcagcgaggctgggagaggggcgaccaccattgcgtaggcttgcttaggt

SEQ ID NO: 955524 - DNA, 582 bp, Homo sapiens
acacacactcaccacaagacaaagaacgggtatggagggcacacacacacttttaccatttatagtaagccaaaatcacgaaattcaraatccgagttccaaaagattcaagacaagtcaaaaccaaaaccaaagtatctagcaattcaagtcaagtcaaaaccagaacaaaagtgccaatgcaggcacactgtgggtgatcaggccactcttccactcagatggagtggggcaagttccaaagactagtcttaccaagtttcagatgtccggactccaagtgccagttccttcccagtgttcagccactgtgttaatcctccacgggggcctgctatgcgctgctctggcaaggcgttccactggggcaatttcctacccgggagtgctctttggatcctgtcactcaggctggccggagtcccccgcaggatgctccacagggcaggcctaagccgcctaaggggctgcctcggctgtccatcagttacctcgtttccccgtcagggaaccaagaaacgtagcaggattagccgcagacaaaacttctcagacaccgagttgtagaaggaagggctttat

SEQ ID NO: 955525 - DNA, 582 bp, Homo sapiens
acacacactcaccacaagacaaagaacgggtatggagggcacacacacacttttaccatttatagtaagccaaaatcacgaaattcaaaatccgagttccaaaagattcaagacaagtcaaaacsaaaaccaaagtatctagcaattcaagtcaagtcaaaaccagaacaaaagtgccaatgcaggcacactgtgggtgatcaggccactcttccactcagatggagtggggcaagttccaaagactagtcttaccaagtttcagatgtccggactccaagtgccagttccttcccagtgttcagccactgtgttaatcctccacgggggcctgctatgcgctgctctggcaaggcgttccactggggcaatttcctacccgggagtgctctttggatcctgtcactcaggctggccggagtcccccgcaggatgctccacagggcaggcctaagccgcctaaggggctgcctcggctgtccatcagttacctcgtttccccgtcagggaaccaagaaacgtagcaggattagccgcagacaaaacttctcagacaccgagttgtagaaggaagggctttat

SEQ ID NO: 955526 - DNA, 613 bp, Homo sapiens
tgaggtaggagaattgcttgaacccgggaggcagagattgcagtgagccaacattgtgccattgcactccagcctgggcaatagagcaggactctgtctcgaaggaaaagaaaagaaaagaaagagagasaaaggaaggaaggaagaaaggaagaaaagaaggagggagggagggagggaggaaaattagtggtgcctttgtttgtaccctgagttggtaaagcacccatataagctatagaatgagtcagttttatctacactctgccaccagtgaccacaactatccaaactgacaagtaacacacgtgggagagttcttttctacagcagaatatctttaaaattaataacagcaattgcatatacatacacagcatgctacagattacaaagctcttatccatctctgcccgcctctgagcctcatgccagccctgtgagatagcagggcagaatgactgtccctaggaaatggaggctcagagagggatatgacctgccaatggtcaccaagtcagcaagtccccgtcccacccctgttatgggtccctaagctgcctcccaggcatgtcagatgccaggtccctatgctgtctattcaaagcagcat

SEQ ID NO: 955527 - DNA, 554 bp, Homo sapiens
gcacagggagatttgtgaggcatttcatattaaaattagtcagtagccggtgaatccctttagataattctcttccgttttacagtgctcctgaatagatttgtgatttatttttgcctaagtagctttgtgtttttttggaattattaaaagagggttggacatctatacactttttttaaccttgtttttcctcatattctctgtgtttaacagtttagtattggccttagcaaaaaacatcaaatatatttgcgtggtacattgacctgacacttgattaacacacgttgaacttgatgtttttcccgtatgaaggaagttatacaagaagttggccttgcttttttcgttgattttaaccgtggacagggttggggttgttaattgttaggtggctggtaggatttcagctcctcgattgaaawagaaaaacagcccatctcgtgaacctcagtgaccaaaagaaatggtcactgtgtcatttgggtgcttgttgtgtctcatcccagtgtagtgtgatggctagggagcaaagagaaggcgagcctctg

SEQ ID NO: 955528 - DNA, 853 bp, Homo sapiens
ctgtctgagtcaggaagttcacctttatcctgatgggacttgtcttttagattcgcttcccttctcctgagtttmtttctgtggttgccatagctttagttgatgcatttttctaagcagaatacaggtgagctgtgctattagtgttttctttttaaaatccttttgattgtagaataaaacacagatacatacagccacacaaaacatatgtatagcttaatgaattataatgtgtaattacctcccaggtcaagaaacaggacgtggccagccatcttcgaggtcctctgcaatgacaattccttctttccctaaggaattcatcactatcttgatatacagtaattatattccattatagttttgtcacccaggtgtagatgtctgtacactatagtttagttatgcatatgatatgtcttctgaatctattataaaatactctgcagatctctcgctgcgttgctttactttcctaaattttgtttgttgttgattccaagtcatttgacctagataatctactgcaatctggattttattgattgtgtagtacagttaaagatgtgcctctgacccctgcatttcttgtgtattagtagctggatccagaggtttgatgagactcaggtctgttccatttgggcaagattacaggtggtgtaggatatttttatcaggaagtgtataatgtctgatttttgttagcctgtatccattaattccttgagattttcaaaattgtaagattttaattatatgatttcagtttcatttattagctagaataattttatatggtagtgttgtctgtcatctactgtcttgttacccagttgcacaatttata

SEQ ID NO: 955529 - DNA, 853 bp, Homo sapiens
ctgtctgagtcaggaagttcacctttatcctgatgggacttgtcttttagattcgcttcccttctcctgagtttctttctgtggttgccatagctttagttgatgcatttttctaagcagaatacmggtgagctgtgctattagtgttttctttttaaaatccttttgattgtagaataaaacacagatacatacagccacacaaaacatatgtatagcttaatgaattataatgtgtaattacctcccaggtcaagaaacaggacgtggccagccatcttcgaggtcctctgcaatgacaattccttctttccctaaggaattcatcactatcttgatatacagtaattatattccattatagttttgtcacccaggtgtagatgtctgtacactatagtttagttatgcatatgatatgtcttctgaatctattataaaatactctgcagatctctcgctgcgttgctttactttcctaaattttgtttgttgttgattccaagtcatttgacctagataatctactgcaatctggattttattgattgtgtagtacagttaaagatgtgcctctgacccctgcatttcttgtgtattagtagctggatccagaggtttgatgagactcaggtctgttccatttgggcaagattacaggtggtgtaggatatttttatcaggaagtgtataatgtctgatttttgttagcctgtatccattaattccttgagattttcaaaattgtaagattttaattatatgatttcagtttcatttattagctagaataattttatatggtagtgttgtctgtcatctactgtcttgttacccagttgcacaatttata

SEQ ID NO: 955530 - DNA, 675 bp, Homo sapiens
gagaacgaaaagactgcctcctcaagtgggtccctgacccctgagtagcctaactgggaggcaccccccaggaggggcagactgacacctcacacggccgggtrctcctctgagacaaaatttccagaggaacgatcaggcagcgacatttggtgtccaccaatatcccctgatctgcagcctccgctgctgatacccaggcaaacagggtctggagtggacctccagcaaactccaacatacctgcagctaagggtcttgactgttacaaggaaaactaacaaacagaaaagacatccacaccaaaaccccatctgtaggtcaccatcatcaaagaccaaaggtagataaaaaccacaaaggtggggaaaaaacagagcagaaaaactgaaaattctaacaatcagagcagctctcctcctccaaaggaacgcagctcctcaccagcaatggagcaaagctggacggagaatgactttgacaagatgagagaaggcttcagacgatcaaactactccgagctaaaggaggaagttcgaacccatgacaaagaagttaaaaaccttgaaaaaagattagacaaatggctaactagaataaccaatgcagagaagtccttcaaggacctgatggagctgaaaaccacagcacgagaactacgtgacgaatgcacaa

SEQ ID NO: 955531 - DNA, 570 bp, Homo sapiens
ggcagcaatatttgctgttctgcagcctctgctggtgatacccaggcaaacagggtctggagtggacctccagcaaactccaacagacctgcagctgagggacctgactgttagaaggaaaactaacaaacagaaaggaatagcaccaatatcaacaaaaaggacatccacaccaaaacccaatctgtagttcaccaacatcaaagaccaaaggtagataaaaccacaaagatggggagaaaccagagcagaaaagctgaaaattttaaaacccagagtgcctcttctcctccaaagaatctcagctcctggccagcaatggagcaaagctggacggagaatgactttgacaagctgacagaagtaggcttcacaaggtcggtaataacaaacttctccaagctgaaggaggatgttcaaacccatcgcaaggaaattgaaaaccttgaaaaaagattagataaatggctaactagaacaaacagtgtagagaagaccttaaatgacctgatggagctgaaaatcatggcacragaactacatgaggcacgcacaagcttcaatagccaa

SEQ ID NO: 955532 - DNA, 620 bp, Homo sapiens
tctatcagacattcaaagaagaattggtaccaatcctattgagaaagaaatcctccctaattcattctatgaagccagtatcaccctaataccaaaaccagcaaaggacatattgaacaaacaaacaaacaaacaaaaacactacagactgatatccctgatgaacacagatgcaaaaatcctcaacaaaatactagctaactggatccaacagcatatcaaaaagataatccaccatgatcaagtgggtttcatacccaggatgcagggatggtttaacatacttaagtcaataaatgtgatacatcataattaaaaacaaaatcacatgatcgtctcaatagaagcggaaaaagcatttgacataatgtagcattcctctataattaaaatcctcagcaaaattggcatagaaaggacatacttgaaggtaataaaagccatctatgacaaacccacagccaacattgtactgaacagaaaaaagttgaaagcattccctctgagaactggaacaagacaaggatacgcaytcactttaaccacttcaattctgcatagaaaggaagtgcttaccagagcaatcagacaagagaaagataaaaaagggcatccaaatt

SEQ ID NO: 955533 - DNA, 799 bp, Homo sapiens
tgatgagacttttttatctggttgtttgaagattctctctttttggacttgaaaatttgattacaagcatcctagagtattttgttgttattgttgatcttgcttagagtcctttgagtttcctgactctgtaagtccatacaccctttaagatttgtgaaattttcaattattttcttttggttgatcttgctcagtgtcttttgagcttactgaccctgtatgtccatgcatccccagagatttgtaaaattttcaatgtttatttatttaaataacctttttttctgcttctgaaattttcataatttgtgtatttgtgtgcttcactatgtctctttatattttctttcttctttttgatcttctgttattgttcctctaagtagctaatttcaaatgaactgtctttgagtttactaattctttctttctatgattccatctcttttggagctctttgtacaattttttagttctgtcattgtattcagctctaggatttttgcttggttctttttatggttcctatttctttattaaacttttcattttgcccacattgcttttctaattttattttgttttatatctgtgttttcttgcatctcactgaacttaatgcagataattatttgaattctttttttaaacaattcatagttctctatgtcattgaaattggttattggagctttatcttagtttcctctggtgaagtcatgtttggttgattttttactatgcatgyaatgtcagcatttgaaggaggaaacacctcttacagtcttgacagatt

SEQ ID NO: 955534 - DNA, 492 bp, Homo sapiens
gctctcttcaaagctgtcagacagggacatgtaagtctgcagaggttactgctgtctttttgtttgtctgtgccctgcccccagaggtggagcctacagagtcaggcaggcctccttgagctgtggtgggctccacccagttggagctttctggctgctttgtttacctaagcaagcctgggcaatggtgggcgcccctcccccagcctcgctgctgccttgcagtttgatctcagactgctgtgctagcaatcagtgagactctgtgggcataggaccctctgagccaggtgcagggtataatctcctggtgggccgttttttaagcgcgtcggaaaagcgcagtatttgggtgggagtgacccgattttccaggtgccgtgtgtyacccctttctttgactaggaaagggaactccctgaccccttgcgcttcccgagtgaggcaatgccttgccctgcttcggctcacgcacggtgcgctgcacccact

SEQ ID NO: 955535 - DNA, 643 bp, Homo sapiens
aagttaccctatatggtctaagggagaactctcggttccggaaattgcccacccctttcccagaaaactcwtgaaaaatccacctgttgtttagcatataatcaggaaataaccataaaatagacaaccggcagtcctgagggcctgtggagtagccattccttattccttcactttattaataaataaacttgctttcactttactctatggactcacctcaaattctttcttgtgtgggatccaagaaccctctcttgaggtcctgattgagacccctttccggtaacattttgagccagggaaatgttcgaacatgatatcctcatctttcctacctatgtttagtttataaacctagattccaggaagttttggctcactgggacttgaaaatctctttttctctcaaaaaagtctagctctagctttttgcaactattgtctctgaaaagggcttcaagagtgctttgaatgccaaaagggggccatttaattcccttgctcttgtttagattttatcttcttttgaagcaaggagcataactcagccttaatgtctggacagcctcaggacagcaaaaatgctaggaatagcaaatgccctaaggttgtacttcagaatagcagctctcagactgga

SEQ ID NO: 955536 - DNA, 727 bp, Homo sapiens
ctggaccctgcactgacttgctcacacacccctcacagctccatgcctgrctcacccttggcaggtgtgggttctgggctggcagcaagagccaagtgcagcctgcccggccaagtgggtggaaggagcccagcaggcccaagcaaaactcgggcaaaagcaccaccagccacagaggtttccggctggaaaagtgacacctgaatgatcccgagacaccagcaccatttattgaataggaagtcctttccccattgcttgtttttgtcaactttgtcgaagatcagagggttgtaggtgtgtggcattattttagggctctctcttctgttccattggtctacatgtttgcttttatatcagtatcatgctgctttggttactgtagccctgtagtatagtttgaagttgggtaatatgatgtatccagttttgttcttttttgttaggattgtcttggctatttgggcattatttggttccacatgaagtttagagtagttttttctaattctgtaaagaatgtcattagtagttttataggaatatccttgaatctgtagattgctttgggtagtatggccattttaatgatattgatttttctatctataagcatgaaatgttttcttgcttgttgagttcttgttgttgagatctttcacctccctagttagctgtattcctaagaattttattatttatgtggctattgtgaataaaattg

SEQ ID NO: 955537 - DNA, 577 bp, Homo sapiens
ggagaagcaaattgtggtatatccttataatgaaatgttatttgcccataaaagtaagtaaaatactgatttgtgttataatatggacgaatcttgaacatgtactaagtgaaagaaactaggttcaaaaggccacttactgtatgatttcatttatataaaatgtccataattggcagatcaatagagacagaaagtggatgagtgctttccaaaggctgggggtggtttgagggtggggagcggctgctaataggtacggggtttcttttggggggtgataaaagggttccaagtatccaagattagataaattgtggtgatggttgtgcaaccctaaagtatactaaaaactacttaagagtagaaatgaaacttcagaaactttaaagagtgttgagaggctgggtgcagtggctaacgcctgtaatcccagaactttgggaggctgaggtgggtggattgcttyagccagaagtttgagaacatcctaggcaacatgcaaaaccctatcttcacaaaacaaaaaaatacaaaaattagccaggcgtggtggcgcctggtcccagctatttga

SEQ ID NO: 955538 - DNA, 577 bp, Homo sapiens
aagctatctagaggcccaccaagagtagactcattagaacaaaagacacttttattacccttatggctcaggaaattccaagggttttaagacctctgtgccaaaactcagggacaaagaccagatatctttctgtgataccacatctgcccttaccatctcaaattgtaaagtttctttcacaattatttctccttttccaaatattgatcacattccaggcgctcatgaaaccacattactctcttaactggtctctctgcattcatctggtttatcccctttgatatggtttggatttatgtccttgcccaaatctcatgtcaaattgtaatccacaatgttagaggaagggcctggtggcaggcgactggatcatcgggcggatttcccccttgctgttctcatgatagtgagttctcaggagatctggttgtttaaaagggtgtagcacccccscttcgccctcttcctcctggcgccagccatgtaggacgtgcctgcttcccctttgttttccttccaccatgactgtaagtttcctgaggcctccccagccatgtttcctgtacggcct

SEQ ID NO: 955539 - DNA, 656 bp, Homo sapiens
gcttttaatagagacggagtttcaccatgctggccaggctggtcttgaactcctgacctcaagtgatccacccaccttggcctcccagagtgctgggattacaggcatgtgccactgygcctagccagatagtagttaaaacatttggggagcatgactgagcctgtttagccatattggagattaaaaatctgatatgtcaggagactactcgtgtatagtctgattcttggattgggttagaatacagaaagaagctttttttttttttttttttttgacatggagtctcgctctgtcactgaggctggagtgtaatggtgcgatcttggctcactgcaacctccacctccgaggttcaagcaattctcctgcctcagccttctgagtagctgggattacaggcatgtgccaccacacccagctaatttttgtatttttagcagagatggcatttcaccatgttggccaggctggtctcgaactcctgacctcaaatgatctgtccgcttcggcctcccaaagggctgggattacaggcatgagctattgcgcccggcctccttttctaatatatgattcattttgaacttccacagcgtggcccatggttaacttttattcagagtcaaaaatcaagaataaatagtgactac

SEQ ID NO: 955540 - DNA, 579 bp, Homo sapiens
aattttcacataacataaagtccacaattttaamcattttaaagtatacaatgcagtaaacttttgttcattcacaatgttgtacaatcatcaccacaatctaattccagaatattttcatcatcccaaaagaaaccctacacccattaagcaatcacctctcttctctccacccacctccagtcaatcgttcatttgttttctgtctctatggatttgcttatgcttgacctttcatagaagtggaatcatacaatatgtggtctttcatgactggtttatttcacttagcatgatgttttcaaggtttatctatatatctatatggtggtatgtattaacatcaatactttattgcttgtatagctgaataatattccattgcatagataaaccaccttttatttttccattcatcaggtgatgagtatttgacttgttccattttctggctattatgaataaactgatatgaacatgtgtataacaagcttttgtttgaaaatgtattttcaattctcatatgcctaggagtgaaattgccgggtcatatggtaatggtatgtttaacttcttgag

SEQ ID NO: 955541 - DNA, 603 bp, Homo sapiens; identical to SEQ ID NO: 954875

SEQ ID NO: 955542 - DNA, 603 bp, Homo sapiens; identical to SEQ ID NO: 954876

SEQ ID NO: 955543 - DNA, 605 bp, Homo sapiens
ataaacagtgggcatggcagacggacatatagtggggatttcatgttccatataatccacaggctgctggcatgattgaacaatataatggactcttgaaaagtgggttacacttgcatgttactcccccgtctttgcagggctggagttcaagtttggacctggtgctccagaacttgaatgagcggccatgaaaaggtggcccagccatggtggagatactgctacaccaggctgctgcctccattcagttacagatgcacaccaaggatgacctcctccaaccaggtatggggacaaacagtaatctattgttgcctgccccaacacccctaaaggtaagagaacaaaaaacctggctttggccatgggccctcaaagacccccactgcaagtggttggccatcgtagccccctgggagaaaggtctacagtatgatttacatgtcactccttgggtacttgatatatagtatccacaattgaccattcatgggggaacaaccaagaaaagaaccctcctgtagggsacatatgtgctgtctgtgtagcctattataagctccccagtaactttagcatgaatacagaaccgaaaggaacca

SEQ ID NO: 955544 - DNA, 647 bp, Homo sapiens
tccatctcaaaaaaaaaaaaaaaaaaaaaaaaagagagagagagagaattcagacatattgtaaagtatagaaaaggaaatgaaaatctctagttatcctatgattcaaagctcagatacaaccattatttgtttttggtgattttttttgtactcaactactagtatttgctatgcagctccttccccctttcatctaggaaaggtttccccacccttcctttgggaaatgtcctctccctgccagtgctcaggctggtggtgcagagattgactcactctcagctctgtggttgggtcctcaatggtttaagtcaatcatcatagcccactgccctggccaaggaatttggttcgggatcagtcatgccacccaagccagtccaattaaagtgacattcatgtctgtttctaggatgttgaagcaaagatattctctactccccctgaatgaggaaatatgtagccctaggaactgttgaccaccaccttgggatcatgagaggtgaagcaacycccaagcatgcagaagagacagaaagaaaccagcccctctgagacattattgagcccctggaagcctcaacttttcagtttcatgatcaataacttcctgtattattaaatgagctttgagacgggttttc

SEQ ID NO: 955545 - DNA, 588 bp, Homo sapiens
cccacggcagtgtctaggggtgaatgcttacagttcctgaagccccaatgggtgtgtgttamagagcgctcttttagttttgctatctgtaggcagcttgtgttaatcagctcgattagatcctctgccttatcacaaggacagagggctttctgtatcccagggtttttgccttggtgtactggaggaatcagatcacacgtgggcttagggaccgagtgcaagtttttattgagtggaagtagctctcagcagatgggggagccagaagggagatggagtgggaaggtgaactatcaagataaaatcagtctactactccataacagaggtaaggaagagtatgcatggaatacaggacatcctttagagcatctcttagtattaccatgccctttgattaaggtcaatgggaaactacaatagcgcaatccaggcaggactacaaatagcccagacccctcaggaatgaaggtttgggtcactccaccaggaaaaaaaccacaacctgctgaggtgcttgctgaaggcaaagggaatacagaatgggtagtagaagaaggtaatcatcaataccacctatgacca

SEQ ID NO: 955546 - DNA, 588 bp, Homo sapiens
cccacggcagtgtctaggggtgaatgcttacagttcctgaagccccaatgggtgtgtgttacagagcgctcttttagttttgctatctgtaggcagcttgtgttaatcagctcgattagatcctctgccttatcacaaggacagagggctttctgtatcccagggtttttgccttggtgtactggaggaatcagatcacacgtgggcttagggaccgagtgcaagtttttattgagtggaagtagctctcagcagatgggggagccagaagggagatggagtgggaaggtgaactatcaagataaaatcagtctactactccataacagaggtaaggaagagtatgcatggaatacaggacatcctttagagcatctcttagtattaccatgccctttgattaaggtcaatgggaaactacaatagcgcaatccaggcaggactacaaatagcccagacccctcaggaatgaaggtttgggtcactccaccaggaaaaaaaccacaacctgctgaggtgcttgctgaaggcaaagggaatacagaatgggtagtagaagawggtaatcatcaataccacctatgacca

SEQ ID NO: 955547 - DNA, 565 bp, Homo sapiens
caaaggctgagtcctaattcttctttctcttaacacccctcagattgcttgccctcctcccctgctgaaaccccatctcatcacactgaattccttcatctccacctggcccactgtccccctcctccctgctctccgtctggagagtctgcccagcctctcccaccacaaggcctttgccgtcgctgtgccctccctctgacaagttccttcccagcatctccgcacaggcagcgcctcttcagtattcagacaggactcctgcggagccctgggaacctgaactacggcagccctgcacctgccagccacccacctttcagcccacaccctctttcatgttccacattgcaatattacccaaaatcacctcactgggcctagtcccctgttgcctgtccttccccacccctcaccacacatgcacataaaaacatgaacctgaactctgtgattaagagcacaggcagctaggcatggcggctcatgcctgtaatcccagcgctttgggaggctgaggcrggcagatggtttgaagtcagaagttcaagaccagcctggccaa

SEQ ID NO: 955548 - DNA, 640 bp, Homo sapiens
tcagctgaaccaatggaatccagtacagatgaccatcgctgctccccagagttcttcccctccattaagccatttctatggtataggggcagaagtctcagggaacaacccccataggatcctttgaaatgcrcttcattgccgcctcacctcctccacccccttctccctctcttaagttctccgctaaccaaaccttctcttgttatatacccaatgataaaaccaaagtagttgtagaggttaaagatttaaaacaaactatagcaattgacacagggtatcaggacacaaatgcttggcttgaatggattaaatattctgttctcatgctaaacaaaagtgactgttagacttgtgtgacaggcagcccagagacagagattgtcccctttccacttgggtggtcctctcacggaccgggcatgagctgttatggtagctctcttccaaaaccccacagcctggggtgatgagtgatggaagactctttcactgctgttccctgaggttaagagccctgcgggtcagcccctgaggtccatccagcctccagcccctggtgtttacttcacctcctgcctttcatggcagaggaaaaagttagcattccttggagacttaacagggtgcagtgaaa

SEQ ID NO: 955549 - DNA, 538 bp, Homo sapiens
acacctgctcagttcatacctagctggtgtcagtttacatccttaaattcatcctgccgctcctccccgctttttatttattcatgcccttgccttgtcccagaaagcgtttctataaaattcatcaacatatcatagtggttaagagcatgtcactggaataaggaagaactgggctcaaatttaggcaccactgctactagctttgaatttgggcaggttaactaacatagttgaactctagttttccttgtaaaatagtggtaataataataactttaacttccccgtagggttgttgggattaagagagggatgaatatatcgtttagggccagcttttccttcggccaccctgttcttgctggctctcctcctggagtctagatgtcacagagactccaccgtgcatcctgggtcttttcagagagtgttggtagggtgtcccactcaggccaagccaggatgtgtgcccgatgctagggggacaggggargcaggcacagacccagtctttgagttgtcctcaggcctgtgg

SEQ ID NO: 955550 - DNA, 648 bp, Homo sapiens
tcggaaggctgaggaaggagaatggtgtgaacccgggaagtggagcttgcagtgagccaagatcacgccactgcactccagcctgggcgacagagtgagactctrtctcaataaataaataaataaataatcagaccatcttcactcttttcctatttttaaagtttttgtgtattattggaattttttgttccttgaatggttggtaggcctacatataaagcttcttaggctttatgttttctctgtaaaaatgtttgaaaaatgatccaattcctttgatagttatagaataattcagatttcctattttttcttgattttgtccaggtaaagtctgtattactagaacaacaccggcatttcagatgttaatgtttgctggcatctctttctctaggctttcactttcaattgcatggttgcttgtctttcagttgagtccacagcaaatagaatataggaaaattctgtatttctaaacaaaataatggtttgtgttttttaacttgagaatttatttaatttttattaatagtaatttttttagatttatttgtattatctattttagtgctttccatttttatcacattttagcccctaatttcttgctgtttttggattaatgttttttccttcttgtac

SEQ ID NO: 955551 - DNA, 585 bp, Homo sapiens
ctttatcaattatcttacctagatctggataacttgttgcggcttctacacaatcacttgctacttcgccttgcacttrtatgttatggagagagcttcttttatgaaccaacctctactagcttcaaacttttattctgcagcttcctcacctctttccgccttcatggagttgaaatgtgttagggccttgccctagattacattttggcctaagggaatgttgtggctgggttgatcttctatccagaccactcaaactttctccatatcagcaaaaaggttgttttactttcttatcatttgtgtgcttgatggagtactatatttaatttcctgcaagaactttttcttgcattcacaacttgtctaactagtgcaagaggcttagctttgggcctatctcagcttttcaacatgccttcctcactaagcttgactatttctagttttttatttaaagtgagagacatgcaattcttcctttcacttgaaagtttagaggccactggagggttattaattggcctaatctcaataatcttaagtctcagagaatagaaaggcctgaaaaaagggaggaag

SEQ ID NO: 955552 - DNA, 631 bp, Homo sapiens
gtgaaaattctccacaatgcacatggtacagactggtgtaaagactcactcagaatccctgagttgaaaccacctttgcaaagattatgacagtaagagaaatctgatatgrctgactccatcttgcttctagcctcaccggttggctgtcttcactcattcctgggcataggacaagctaacatattcttacttttaaccaaattaaaatttatagtttaacttggaagcaaggatgataatagtttctccctgaaacgaatcctctccttgttggggccagggggcgggctgaaactactttcataagactaatgaaaggccataagattaggattatgggagggccctgaattctgctaaaatgtcggtatagtttttatgatcccttacttctcaggaatcgtgtggccagaggtcacaagatttatgacttccctaattgctcatatagataatatcactattgtagaacttaagattggtcttttgagatgtttttcagactgatgccacccagactcatgactcataactcaactatttctgtgccctcctctcccaccaagaggtggactcagtgcacagatggtgaccattttccacacccctatgattgcattgccaacca

SEQ ID NO: 955553 - DNA, 781 bp, Homo sapiens
ggacacacacacaaaaagattgttacctatcagatattctttttacattttggggagacaatgtagttcttgtatttttttcattctctaaagaaaatacacacattaaaaattttaatttttttaaataagggaaatccttgggatttatccagtaatttcagcatctgtgggcattactcagacattttgttttgcatattataaggctttgaacggcaatgtccttctatcctagcagagatggattcactgctttgaggaatagaactgcctgtactctaaaccagacagaaatcaatgctttaacccaaatgaatgagtggaaaacttgttagccaaatttgcacaagtataaattttaatactagaatatactgtagaaatgacaaaacatattgctcagcataaataacaaaatcttgttattattcagaacatctctttccaaagcgtatgataattttatttatgctttttcatatcaaccgcatcagcctgccccattttacacatagaaatgtgaaggagaaatcaaataccttgtgtactggcactagcaaggcaagaacatgttggcaatattctcttgcgggcgtcataggcaccatgctgaagactagaacggcctgtactttccctggcctcagctagctcgagagccacgatctgaatgaattaaagccatttctacctgtttggggtgtgctwtgcagaattcatagttctatcgccattttaatagtcagggaaaataaaaaagattctttccgtgagcaaa

SEQ ID NO: 955554 - DNA, 489 bp, Homo sapiens
ttctatatttaaatctgtgtggtaaagacttctagttctccctcagtattcatcctctccttattcaatagtggttttaaatctcaatttttggtygagtgcatgattgcccagaataaaggctatattttctagcatcctttgtagatggatgtgaccacatgactatgttctactcagtaggatgtagctggaagtggtccaatggcaggaggatctgcatttttttgtacactacttcctgtctgctgggtagaatgagtatgtaatcactggagccacagcatccatcttgcactacgaggtgatttttagaatggaaatcccacagtgtagttgagcctgatcttttacctctcgaagttctgatctgactaccactgtgattcttgaatgtgaaagagaaatgcacttctatttttattgaagccactgtaactttgggctattctgatgctcacattctaatattatcattaacacctactt

SEQ ID NO: 955555 - DNA, 489 bp, Homo sapiens
ttctatatttaaatctgtgtggtaaagacttctagttctccctcagtattcatcctctccttattcaatagtggttttaaatctcaatttttggtcgagtgcatgattgcccagaataaaggctatattttctagcatcctttgtagatggatgtgaccacatgactatgttctactcagtaggatgtagctggaagtggtccaatggcaggaggatctgcatttttttgtacactacttcctgtctgctgggtagaatgagtatgtaatcactggagccacagcatccatcttgcactacgaggtgatttttagaatggaaatcccacagtgtagttgagcctgatcttttacctctcgaagttctgatctgactaccactgtgattcttgaatgtgaaagagaaatgcacttctatttttattgaagccactgtaactttgggctattctgrtgctcacattctaatattatcattaacacctactt

SEQ ID NO: 955556 - DNA, 702 bp, Homo sapiens
gaaagtctgcatatacactgcmacaggcaggcagccactgtgatcatgaaggaccttggagaagaggtccttgttctccccaggactccactatagacatagctggggcatcccctacaggaatgcagcatggaggcacctatagaaagccattctggaataatccagggtaagtgcagcctgacaggaggagcaccccccagattcaggcctgcacaagaggcagagtcacaatcactccctgtttggaataacaacattcctatagatgaaaagaggtgcctgtctgatcagaatagctgaaacactagtataggagtgaggctgtgaggtaaatagttttcccgctgacttggtagggaagctgtggtagttcccactcttcactctgataaatcctcagcacatctaattgagagccgccccagctaccctcatcaaggctgggactttggcccaccattgggtattacatctactcacctgccttagcgacatctgctgcctatgcagggataccccctctatgggcctgaagccggaatcatcaacttaggaaaaaattaaataaataaggtgtacaccacgagagaacaagataagcttcaagagatccctgccattccaactctataggagacagtgaactcacccacacactaataatataactactatagccagcattagggaaagccagca

SEQ ID NO: 955557 - DNA, 702 bp, Homo sapiens
gaaagtctgcatatacactgcaacaggcrggcagccactgtgatcatgaaggaccttggagaagaggtccttgttctccccaggactccactatagacatagctggggcatcccctacaggaatgcagcatggaggcacctatagaaagccattctggaataatccagggtaagtgcagcctgacaggaggagcaccccccagattcaggcctgcacaagaggcagagtcacaatcactccctgtttggaataacaacattcctatagatgaaaagaggtgcctgtctgatcagaatagctgaaacactagtataggagtgaggctgtgaggtaaatagttttcccgctgacttggtagggaagctgtggtagttcccactcttcactctgataaatcctcagcacatctaattgagagccgccccagctaccctcatcaaggctgggactttggcccaccattgggtattacatctactcacctgccttagcgacatctgctgcctatgcagggataccccctctatgggcctgaagccggaatcatcaacttaggaaaaaattaaataaataaggtgtacaccacgagagaacaagataagcttcaagagatccctgccattccaactctataggagacagtgaactcacccacacactaataatataactactatagccagcattagggaaagccagca

SEQ ID NO: 955558 - DNA, 617 bp, Homo sapiens
atgaatgcattttttttttttttttgagatagactctttctctattgctcatgctggagtgcagtagcagattcatagcttactgcaggcttgaactcttggactcaagcgatccttctgtctcagtctcccaagggactacaggcatgcattaccacacctggctttttatttttttatagcgatggagtctcattatattacccaagctggtctagaactcctggcctctagtgatcctcctatctcggcctcccaaagtgttgggattacagatgtgagccaccacacccagcctgaatgcaccttgtggtggcctcagaggtctacacagaagagtgggactgctggaaaagatctacagagacaggaatgacaagtaggcttagtggcttctaggcccagctgtgctcctgactgtgtgatgttcagtaagcacagttgttttgggcttgttttctaaccagtgaaatgtgggatggtgtgctagaacttcctacccttcggtgtgcctgtgaarcttggggatcttgttaaaatgcagtttctgattcagtaagagagatctgagattccacatttccctaatgccacaggttcttgcccctgctccttgt

SEQ ID NO: 955559 - DNA, 584 bp, Homo sapiens
tcggaagaaataaaagctaagtgtcttccgtaatcccatgttctatccattgattgtataaaaataatatgcactataatgtgtgccattttgtgaaagtcgtgttatatagaacagcataaaaagtaccactggggaccaggcgcagtgactcacacctgtaatcccagcactttgggaggccgaggcgggctgatcacctgaggtcaggagttcgagaccagcctggccaacatggtgaaaccccgtctctactaaaaatacaaaaaaaaaaaaaaaaaaaaattagcagggcgtggtggtggccacctataatcccagctactcggcaggctgagacaggagaatcacttgaacccaggaggcagaggttgcagtgagccgagatcatgccacactgcactccagcctgggcaacaaagagagaaactccatctcaaaaagaaaaaaagtactactgggtgggtgcagtggctcacacctgtaatctcaactttagaaggccsaggagggagtactgtttgagggcaggagcttgagaccagccctggcaacatagtgagaccccccatctctaaaaaaat

SEQ ID NO: 955560 - DNA, 685 bp, Homo sapiens
atttagtcctttcaactcaagccagtcaaaaactactcaaagggctgggtgaggtggctcatgcctgcaatcccagtgttttggaagaggctgatgggggaggatcccttgaggccaggagtttgaagttacagtaagctatgattgcgccactgcactccagcctgggtaacagagaatttgcctgaggccaggagttggagaccagcctggctaacatagcgaaactctgtctctacaaaaaaaaaaacaaaacaaaacaaaacaaaaacaaaaaaaaggctctaggaaactgggcttttacatttgtcattctaataaattaaatattacactaaaacgcccaggtctgttgtgccccttgaagatgtggggaggtggcttctcaactctttaagcgaccatgaggtccactgttgggcgggcatctttgttactgagtttgtcaaagaagaccacagtcaggtcattttccagtggtggctcagtggtgccacagcaggcaaggagaggggccggcggggcaggcaggatggggcggagtggagaaggcccatcaaccttgagggaggctggagccccagaaaacagaagagccctttgcacacatgcttcagcttggtgctattcccagagctcttttgagggcaccttctcatctkccctcaagtgcattcattattcc

SEQ ID NO: 955561 - DNA, 665 bp, Homo sapiens
gatgaagctggaaaccatcattctcagcaaactaacacaaaaacaaaaaaccaaacacaacatgttctcactcataagtgggagttgaacaatgagaacacatggayatgggaggggggcatcacacgctggggcctgttgggaggtggggagctggggaagggagagcattaggagaaatacctaatggagatgaagggttgatgggtgcagcaaagcaccatggcacatgtatacctatgtaacaaacctgcatgttctgcacatgtaccccagaactctttatatactttatacatatactatatatattatatatataaagtgtacatatataatatatatatataacttaggcccaggagccctaagttatcttgcgacctcaagaggagaggagtttacccaactcacaggtatttgataatacaaatccatggctgggctcagctttaaaaaagtattgtttgaggatccttctatggaacaaagttccatcaaagctaatttaaaacacctatgtaaaaaataattatttttgctgcactttacacaaataatctggccaagtataatgcaacaaaacaaaaccctacaaaatttaggagttgtctcccaactcatgtcacaactggatcttcagcagcctaaccattgttcagtca

SEQ ID NO: 955562 - DNA, 589 bp, Homo sapiens
gtcgttcccagttgattggttcttctttgtggaggagtcaagtgtcwtgtgcctctagtcagccatcttgaaagactctaccaattccctttttgtaacaaatattttgtaccaatttctttattaaccagaagtgaaattcatagatagcataacctacctatacacatatttaaaatatgagcacaatgtcctaactagaatttaaaggaaaaattaaatgcgagtgatttataataatgtatttaaatatgtaaatgctgaaacatgactacctgaagtagccaaatatttacacctatacattgatcgccatgaatgtgacggctacaaatataataccacaaagtgtaattatcattggtgacatgattttctaaaaaaattattttggataaatttctgaacaaaagaaaatatactgttctctcaatttacttggtagatttactcctagaaaattcagtatatagtaaattcatgcaaaaataccatgtttatatgtaacaaaaggaggtaggttctggcctctggtaattataaacaggtttttcatttgtaggcatgtcaaggttaatattaaaaagtt

SEQ ID NO: 955563 - DNA, 532 bp, Homo sapiens
gctaggctaaaagagtaaggtccagtagtttggacagaaaggctacaggatgcagtcccggctcttgtgtaagaattctgaccgcactaaccatgcctaggaaggaaaggagttgttgttttgtaggagggattggggtttgggagattagccagacacgatcagcagggagagcacgtgtgtttttatgagaattatgccgagataggtaacagatgaagaaatttgggcttgactgaagtaatgggggctgtctctgaagccttgcctaggtaatttgctgaacctggtgggtgtcagggtcagtccaggtgaaagtgaacagaggctgggatgaagggtgcaaaggaatagtaaagaaagcatgtttgagatctagagcagaataatggtgtgcagagggaggtattgaggataggagagtatatgrgtttggcaccacagggtagataggcaaaacaatttggttcataaggtgcagatcctgaactaatctgtaagccttgtctggttttaggacaggtaaaatggg

SEQ ID NO: 955564 - DNA, 606 bp, Homo sapiens
tctggctgggatctagcccagacccctcccagatgggcaattcttcctaggctcttccaagcctcagtttcctcacctgtgaggcaatatcttcctcttactgattttgtgtgggttaagaaccaaggtrtgtaaagacccagtactgtgcctgacacattcccagtgagcccccagccagtgggacctcacaggtcagtgctctgccatggcacagagaccctgttggtaaaggtcaggttgtgctgtgccccacatagctccagagcatgcaggttactcagtagggcagtaaggtgtaagcacatggtcttgagggaccttcccaaactcccccatacataatttccttagcaaatgccctctgctttcccgggccctatggcaggtctgattttgttctactgattccccacgggccacgtgcatcagcttcagaaacacaggagctggtgttcacacacacagagtccttggggaggctctcccagcccacaggcagtgagattcacaggtgccttggaatttatcaatcacacagtggctcgtaggaaccatggccatgacagtcccttctctgaaggacgaaagtgcctagtgcaagtt

SEQ ID NO: 955565 - DNA, 627 bp, Homo sapiens
caactcaggggtctgtgtgcgcttggcacgaaaggcaccaggagcctcctccgccagctacattcttctcaagggaaggcctcgattcagacagcaaggggggctcatcccccgacccccgggatttcttagatgaccaaccacctttttcctgcccacacccttcaactagaagccagggtttcgccctctgggtctcaacagcacatctggggaggaaagtccgatgctaggatgcctcgttccctctctggcctcaccatcccctgggtccttcaggagggagaacagggactctgggttgggggagagatctcactgcatcatctacccgatccctctccactggtagcccaggaagaattctttttttttttgagacgcagtcttgctctgtcgcccaggctggagtgcagtggcgtgatctcggctcactgcaacctccacctcctgggttcaggtgattctcctgcctcagctacgattacaggcamccaccaccatgcctggctaatttttgtatttttagtagagacggggtttcaccatgttggccaggctggtcttgaactcctgacctcaggtgatccacccggcttggcctcccaaagtgctggccaggaagag

SEQ ID NO: 955566 - DNA, 702 bp, Homo sapiens
ctccaggtgcctctccctcctggaccttgaggacagccagcccaggctgttgtgttgctgttcaaacccaacatcctcagactgtcccggcaaacagacctgcccagagctccacctgtctktctttcatatcttccgtgtttctttcttcaaaatccaaaagtacctttgctaggataatcgggcctgcaatctgcctggtccctggctccatgggacctacaaacaacccacaaatgacaccacataccaagaaggaaacagggtgggagggctggaagaactaagaggcaacagtaccaacaggtaactccagacatcatggctcttccccagcccagggcggagataggaaggagttgccagaaaggggagaggagtctcccagcctcgctggggatggggccaagtccaggtagagaagggcaagcgccggcccgctggcttcagcaggggcaggaccccctccaattctgctctaggctctctgcaccaggtgcagctcacttctctgaagatgaagcaggcataggcccagcacacgtgcctgctgggagatcaggcacagacgggcacggggggcaacccacggccagcgccctggctgaggactgggagggaaatttggaagggctggaggacgattccctgagacccatgaaggctcactgcagggggtagggcctcttttctgctgtgggt

SEQ ID NO: 955567 - DNA, 692 bp, Homo sapiens
gcgctttcctcatctttctgctcccagccgaaacgtcttttccatcaggatggaatcacgttctgcactgatccccagggtggacagatgctcctgccaggcagtcccacggcaccctccgcatggcccagcttggccctgccccttggggctgccatcccttgggcccttgtctgtgtccccgccaggccaggagccctgggcagtgtcttcctttgtgctaccaccccgtgtatcccagcaccaggcacagtgcctattacacaataggtgctcaataaatacttgtggtgggatgtgaaatcagtctgtggcacttgctgaacttctaattcaaggcccccacatgatggagatccttcctgactccctaacctccttcccccaacacggaaccgcagtctctgcccagagccctgtggctccgacccaagtgctctcgctacatctgccacccctgagaacgctccttgcctgtcatttcctgagtgcagggccatgtcttggtcatccttgcagaagacaaagccctggtatgtgagagcctgcggtgggcagatgaacaggtgcacatgcagacacacggccctgcccccaccaagtggtgctgcrggtctctcgctcggaccccgggagctcatcgtgggccctatgataaagtcctctctgtgcgcctcttttctggaaagcag

SEQ ID NO: 955568 - DNA, 645 bp, Homo sapiens
ggagtttcttcataccccagtggctcctggaatgccaacaagacagaaccattcactcccctggaaagaaggctgaagccagggagccaagtggtcttgctcagcagattgcacccccacagaccccagcaagctaagatccactggcttgaaattcttgctgccagcacagcagtgtgaagtggacgtgggactctcgagcttggtggggggaggggcgtctgccattactgaggcttgaataggcagtttttccctcacagtgtaaacaaagcctccgggaagttcaaactgggtggagcccacagcagcttgccaaagccgctgtagccagactgccttgctagattcttgctctctgggcggggcatctctgaaagaaaggcagcagccatagtcaggggcttatagataaaactcccatttccctgggacagagcacctgggggaaggggcggctgttggcgcagcttcagcagacttaaatgttcctgcctgccagctctgaggagagcaatgtatctcccagcacagcgctcaagctctgctaagggacagactgcctcctcgagtgaatccctgaccctcatgtctcctgatrgggagacacctcccagcaggggtcgacagacacctcatacagga

SEQ ID NO: 955569 - DNA, 578 bp, Homo sapiens
tagaaaaacagctattttatattcgatgaagattaaaaagaaagtttgttgcactgtcagaaacatctctaggatgctctaggtatctgtatgttcaaagcatacacayaagtttaacaggtggggaaagatgtatttttgaaatctggtgtttgacttccaacttgagaaggcgaggctcagtgggagagacggagagcaggaaggctgagcagggtcagacacccggggtctcacgctggctctgccacttacctgctgtgtgaccttggccaagttatttaacatttacatatgtaaatattattctgaaaagtgagaaacaataatagtcgcctttaggtctataaatgtctctttttaaaaattccttgagaataagaactctacacagagttgtagtagaagcaatcaaaaaggggaagctatttatattaaatatgaataatgaaaacataatttttcatgaaatgaaatacaatgattgttgggtgtggtggtgcacacctgtaatcccaggactcaggaggctgaggcaggagaatcgcttgaacctaggaagctaaggttgcagtgag

SEQ ID NO: 955570 - DNA, 578 bp, Homo sapiens
tagaaaaacagctattttatattcgatgaagattaaaaagaaagtttgttgcactgtcagaaacatctctaggatgctctaggtatctgtatgttcaaagcatacacacaagtttaacaggtggggaaagaygtatttttgaaatctggtgtttgacttccaacttgagaaggcgaggctcagtgggagagacggagagcaggaaggctgagcagggtcagacacccggggtctcacgctggctctgccacttacctgctgtgtgaccttggccaagttatttaacatttacatatgtaaatattattctgaaaagtgagaaacaataatagtcgcctttaggtctataaatgtctctttttaaaaattccttgagaataagaactctacacagagttgtagtagaagcaatcaaaaaggggaagctatttatattaaatatgaataatgaaaacataatttttcatgaaatgaaatacaatgattgttgggtgtggtggtgcacacctgtaatcccaggactcaggaggctgaggcaggagaatcgcttgaacctaggaagctaaggttgcagtgag

SEQ ID NO: 955571 - DNA, 569 bp, Homo sapiens
tcactgaggctggagtgcagtggtgcaatcatagctcactgtacttgaactcacttgaactcctggactcaagcaatccttccactccagcctcccaagtagctgggactacaagcatgcaccactatgcctggtgcgcgcgcgcacgcacgcttgtgtgtatagagatgagatctcactatgttgcccaggctgctatcaaactcctggcctcaagcaattctcccacttcggcctcccaaagtgctgggattacaggtctctgtcaccacacctggctggaatgttcagtttctgattcacacacatcaagatagaagaggaattagctcagaaaggaccaatgggatccaagcctgactgatgagccagcagcaggtgggttttcacagagccacaacctgcatgatgagaaagcttcaagcagatgtcggctctacccttggagttcttcataaaygtggtctggaatctcccagaacttgttcagggaagctctggatgggactctggggccatgccaagtggagatggagggatcaaagatggggaggagagcttggaggaga

SEQ ID NO: 955572 - DNA, 621 bp, Homo sapiens
tttgtgctcattgagtttaattaattcagtgagagcctagccttctttagaatctgaataattttcatctgtcagatgcttgcgatggaaagaaaaagccaaaggtcatgacacaatagaacttgattggctggagttcagacttctattggcctctgtaatatctgttaatatatacacaactcttcctgttgtggcgttcatcttcttattttttaaagatattctttgtcagtttaataaactgccctttcacaacttgtcagtaaaaaatatgtcaagaaactgcacctcaaagaaagaagtagcatttggagtggtattaaagtaatccgtccattgtgaaactaacaatacatgtaatccaatatgtattttctaattgtgctaagttgattacaggaggaagttaaaatattttcaaatttacttaaagtatgcatttaaagttctgactcaaaatcataactaaaatatctgtttacttcttgactcagaattttatcaaacatctctggtttcaaaagctcatcatagacgccattgttgttgccgttgtttttgttgttgttgttgataaaaaagaaagtaggtttgyagttggcttttacgtattttcac

SEQ ID NO: 955573 - DNA, 576 bp, Homo sapiens
agcccagctaattttgcatttttagtagggacgggttttctccatgttggtcaggctgacctcaaactccaaggggagttgggatgtgaaatcaggggcccaaaagagtacaggatacaagggtgcacccagtgaccaggagattcacacgcatcacacaccatgctttttgttttgtttcccttttttccttttttttttcctttatgcatcaagcttcatttctaagctcttgccaggtgtctggcagtaaccaaaggaagctttataatacatggggtgcactcctagtaaacaatgtcaaagacactgtaaaaggagaacaactaaggaacatcagttgtcccacaaaattgatctgacccaatatgatatttttcatggtctgaatccttctagggctagactaataatagcaattacaattttcttatttctcagatgcaagggttgtgttttgtgtttctsttttgagagacaaggtctcacattgtcactcaggttggcacgcagtggcatgatcatagttcactgcagcctcaaacttctgggctcaagggatcctcctgactcagc

SEQ ID NO: 955574 - DNA, 443 bp, Homo sapiens
tatccacaatttgccctcatctctttcaggtctttgctcaaatgtcacattaataaaagcttccttgacaaccatattaaaaacttgcgacccgactcccagcaacactctctattctacttctttagcacttgttgcatctaatacgtggtatcttttactcatttattacatctaatctatataagtttcatgagggaagggatttttgtcagtttttattgctgctatactctccagagttgacacatagctaaatattttcttttttttttttgagatggggtctcagtgtgtcacccaggctggaatgcagtgacacgatcttgtcttgctgctgatacggttccaatgagtggaggaacaccagggttcttcgtctcgagtcaaattagataaaacrgcatggacacacgtagtggttttcaggagcagagagttta

SEQ ID NO: 955575 - DNA, 813 bp, Homo sapiens
aaggcatatgactcacagaaataaaggtcacaaacaacatagctctttaaagtatatttaaaatagctgtcagtattctttctcgtgtgtgatcattgaagtctgtactctgttagaatagtgttagcttactgaatgattagacagatattttattaaatgcgagaagctgcaaaatctcccagtctttgctgagggactttatgtgcatatccaggcaggtttttaatagtcagcaaagcaaaaaattctgcttttgtcttcactctatgctcatgtagagcttcaaagtaagccagaagtgatagctttcagctttctcaggtctttctcaggtaagtgcatagtgtgttctatgtgtgtgtggtgttctagatttccaggatatgtcatgacttttcaaagtccctgcagacaactcattccccagtttaccctttttatctgtttggttagtatgctgtttataccaactattattcctccttatattagccaacatgaggttaaaacgcttgcctgtaattgcttttgacaaacacctctcagatagagaatttttgctctgattgagtttcacatcaggccaaatatagataatcttgttaaatgaagtcttccggggaactaccggtaggtcaaataacgatgattctttgggaattagagtttgaaaggactccattactgtatcctccttcyggtagctttcaggatgtgttgtgattgtgagctgttatttttcaatgctattacagacctggagagcaggagctgggactagagcaagttaaaatgccacaaaagttcata

SEQ ID NO: 955576 - DNA, 642 bp, Homo sapiens
ccctgctgcagccaatagtatctctctctctgtctctctctctttctttctgtctcyagtctctctgtctcctctcctctcccctctctcctctttcctccttctccactccctctccctgagtcctctttttttgttaatttaacttttattttaaggtcaggggtacatgtgcaggtttgttctataggtaaacttgtgtcatgggggtttgctttacagattattttgtcacccaggtattaagcctagtacctattagttatttttcctgatcttctcccttctcccaacctctgccctctgataggttcgtgtgtgttgttcccctctatgtgtccatgtattgtcaccatttagctcccacctataagtgagaacacgcagtatttggttttttgttcctgcattagttcgctaaggatcacttggcctgggaggtcaaggctgcagtgagccatgatagtgccattgcactgcaacccgggcaaaagagcaagaccctgtctaaataaataaataaataaataaataaataaatatgagacttcagtttaaaagaaaaaaaaagcaatcggaggtcaaggctgcagtgagccttgatagtgccactgcactgtaacctgagcgaaagagcaagac

SEQ ID NO: 955577 - DNA, 562 bp, Homo sapiens
tccctgggctgggtttaccctcttcccaggccccagagatggaggagtccsaccctggcccaggaagttcctggctcctgctcacagccaggcttgtgtggccaatggcaggctggggatatatccaactcaggacagggactggccccttctttcagctcctcctgcacatccctgctccctggcatttcaccccactctccttgctggcccgattcctctgcacggctgagatcctgatgccctggagggccatagacaacaggactctcaaggtgcctcatggcaggcaccccctcccctgttagcctgcctgacccttagcgttactcagaagccagtggccaagaccctagtaaggtcaaggacactcaagaggagggggtggggtcagagtcctgaaccccaagcatcccaagctgacaccccaaggcctcctgtaggttttcctggagtatcacacccaggacaggaaagtgattaggggcaaaaatcaggcagagagaattgacagactgcttgcaccatgccggccaaggcctcctaaacccatgctctttgg

SEQ ID NO: 955578 - DNA, 537 bp, Homo sapiens
ttctggtcctggacttttttcttggccatttttaaaattattatttcaaccttgctgcttgttgttggtctgttcagagtttctataccttcctggtttaatctaggagtgttgtatatttccaggaatttatgagtttcctctaggttttcttgtttatatgcataaaggtgtgcatagtagccttgaataaacttttgtatttcaagggtagcagttgtaatatctcctgtttcatttctaattgagcttatttggatcttctctcttcttagttaatcttgctaatggtctatcaattttattcatcttttcaaagaatcagctttttgtttcatttatcttttgtattgtttttcttgttgtttttttaacttcatttagttctgctctgatctttgttatttcttttcttctgctgggtttgggtttagattattcttgtttctccacttctgtgaggtgtgaccttagctctatttgtgctctttygaactttttgatgtaggcatttaatgctatgaactttcctcttag

SEQ ID NO: 955579 - DNA, 537 bp, Homo sapiens
ttctggtcctggacttttttcttggccatttttaaaattattatttcaaccttgctgcttgttgttggtctgttcagagtttctataccttcctggtttaatctaggagtgttgtatatttccaggaatttatgagtttcctctaggttttcttgtttatatgcataaaggtgtgcatagtagccttgaataaacttttgtatttcaagggtagcagttgtaatatctcctgtttcatttctaattgagcttatttggatcttctctcttcttagttaatcttgctaatggtctatcaattttattcatcttttcaaagaatcagctttttgtttcatttatcttttgtattgtttttcttgttgtttttttaacttcatttagttctgctctgatctttgttatttcttttcttctgctgggtttgggtttagattattcttgtttctccacttctgtgaggtgtgaccttagctctatttgtgctctttcgaacttttygatgtaggcatttaatgctatgaactttcctcttag

SEQ ID NO: 955580 - DNA, 557 bp, Homo sapiens
aaggatatgaacagacacttctcaaaagaagawatacacacagctaacaaacatgaaaaaatgctcaacatcactaattactagagaaatgcaaatgaaagctacaatgagataccatttcatacccatcagaatgactattattaaaaatccaaaaaatagatgctggctaacttgcaggggaaagggaatgcttatacactactgataggtaagtaaattagttccgccattataaaaagcagtttggtgatttctcaaagaacttgagaattaccctgagactcagtaatactattactgagtatataccaaaggaatataaatcattctaccataaagacacatgcacacatatgttcatcacagtactattcacaattgcaaagacacagaattaacctaagtgcccatcaatggtgaactgaataaaaaaatgtggcatacatataccatggaatactatgcacccataaaaaaaactatcatgtcctttgcagcaacacagatggagctggaggccatccaactctaagttaaaaaatattctaaggaaa

SEQ ID NO: 955581 - DNA, 651 bp, Homo sapiens
cagcaggaccatacacagttactacacccgtaaatgcaatatgcctgattttaatttattctatagattattctcctggaatgactatgaaaataataaaacaaagccctcctggttcaaagaaacctacaaaaaattaaatttgccctgtaaaacactagtctgaatcgccaaacaagtttcgggtgtctcctttcttacagaacattaaaacagaggaatgggtctagcttaactggtcacagaaatctggtctagcttaattacagaccacatgaactggacacacattctttccagctttccaataacagtatagtttaaaacagaccttgtccagttacatgtatgctctgttttgaatgagccataaccaatgttttattcccttcaatttgcttaaaaatgttttgcaaagaggaaatacaaaatctacttaaatacttttgtatttgtattccgttctccaccattcattttctccctttatgaggataaaagtacttcttaaaataaatgctagaaccaaaagaaagrctataatttcctttaaaaaaaatctccatctttaaaaggtggtgttagtgagcctccaaaaaactttaagtcaccagatcattactttaagttttagtataaacctaaaagtca

SEQ ID NO: 955582 - DNA, 597 bp, Homo sapiens
ggacacagccaaatcatgtcattctacccctgacccctcccaaatctcatgtcctcacatttcaaaaccaatcataccttccccaaagtcccccaaagtcttaacccatttcagcacctaatttaaaaatccacagtccaaagtctcatcagagacaaggcaagtcccttccacctatgagcctgtaaaattaaaagcaggttagttacttcctagatacagtgggggtgtatgtggcttttccaggtccacagtgcaagctgccagtggatttaccattctggggtctggaggacagtggccctcttcttacagccccactagtcagtgccccagtagggactctgtgtgggggctctgaccccacatttcccttctgcgctgcctagcagaggttctccatgaaggcccactcctgcagcaaacttctgcctgggcatccaggcatttccatacatcctctgaaatctaagcagacattcccaaasctcaattcttgacttctgtgcactcacaggctcaacaccacatggaagctgccaagacttggggtttccaccctctgaagcgacagcctgagctgtaccttggcccctt

SEQ ID NO: 955583 - DNA, 597 bp, Homo sapiens
ggacacagccaaatcatgtcattctacccctgacccctcccaaatctcatgtcctcacatttcaaaaccaatcataccttccccaaagtcccccaaagtcttaacccatttcagcacctaatttaaaaatccacagtccaaagtctcatcagagacaaggcaagtcccttccacctatgagcctgtaaaattaaaagcaggttagttacttcctagatacagtgggggtgtatgtggcttttccaggtccacagtgcaagctgccagtggatttaccattctggggtctggaggacagtggccctcttcttacagccccactagtcagtgccccagtagggactctgtgtgggggctctgaccccacatttcccttctgcgctgcctagcagaggttctccatgaaggcccactcctgcagcaaacttctgcctgggcatccaggcatttccatacatcctctgaaatctaagcagacattcccaaacctcaattcttgacttctgtgcactcacaggctcaacaccacatggaagctgccaagacttggggtttccaccctctgaagcracagcctgagctgtaccttggcccctt

SEQ ID NO: 955584 - DNA, 646 bp, Homo sapiens
gcacctgattaaagccttcttccttggcaatacytgttgtctcagtgattggctttccttacggtgagcagcagttcgtagacagaaccccttgtgtttcagaaacacctttacacttatgttgtgtggttgctgggaagattaaatgacatgaagattttggcctaagttgtgctacccagttttatcatccagcttttcttacctaagtgactctgaatgaatcttgggtattcaaaaataaaaaaaagaaaataagttaaatctatctgtgattccatgtaatctttataaccatctgccactcctccagatagaatccaccatcgaatagtgaagttgatttaatattttgaagagtattgaaaagatgtgtttactatacacccagaagatagatctaagagtggcttagcaagggcactattgttgaaataagcagctcccctcctgagttgtccatttagaagaggaaaattcattttgatgtttatgttcttacacagttatataaaagtcagtaacattactatgtagtaatgacttttatttttaaatatgagacacattatttcaaagtcatgaaccgaattaaattaaacacaacattaaattacattcactctgtgctgaggtgccagtgagg

SEQ ID NO: 955585 - DNA, 605 bp, Homo sapiens
gaatgtaaattcattcagccactgtrgaaaacagtttggagatttctcaaagaacgcagaactaatttgacccagcaatacaattattggatatacaaccaaaggactataaatcgttctaccataaagacacacacacatgtatgttcatcacaatttattcacaatagcaaagacatggaatcaacaggtacccatcagtggtaaactggataaagaaaatgtggtacaaacacaccatggaatactacccagccataaaaaatgagatcacgtcctttgcagtaatatggatggagctggaggccagtatcctaagtgaactaacacaggaacagaaaaaccaaacacaacatgttctcacttataagtgggagctaaacattgagtataccatagacacaaagaagggaacagtagacaccagggcctacttgagggtggagggtgggaggagggtgggatcaaaaaactacctcctgggtactacaattacctgggtgaaataatatgtacaccaaacccctgtgacacgcaatttatctatataacaaacctgtacatgtaaccctgaaactaaaataagagttaaatatatatccaca

SEQ ID NO: 955586 - DNA, 612 bp, Homo sapiens
ttgggaggccaagtagggaggatcacttgagctcaggaattcaagaccagcctggggatcatggkgaaaccccatccctatgaaaaattcaaacattagctgagcgtgaagatgtgcgcctgtagtcccagctacttgggaggctgaggtgggaggatcacctgaacccaggaagtcgaggctgaagtgagccgtgattgcaccactgcgctcagactaagtgacagaaccagaccctgtctcaaaaaaaaaaaaaagaaaagaaacagaaaaagaaatctgttcaatcaatttatgacaactcacctcagtgaacccccttttgcaaaccaaacaatcaggatctgccccttcacttctgaatatcaatcattcaggagtttgagtcctgcctgggcaacatagaaagacattgtcaaaagaggctgggcgcaatggctcacacctgcaatcccaggcagaggtgggtggattgcctgagatcaggagcttgagaccagcctggccaacatggtgaaaccccgtctctactaaaaatacaaaaattagccaggcatggtggcacgcatctgtagttccagctacacaggagggtgaggcaggagaatcgct

SEQ ID NO: 955587 - DNA, 589 bp, Homo sapiens
tattctaggggttgtaaatacagcagtgaaaaaaaaataggcaaagtccctgcccttttggagcttacattctagtctgggtggtacgaggtagacatgcctacatacaaatgtaagtatataatgtgtgggaaggggaaagagaggggaacaggaactaaaggacgaagggggagaaggagaactggggatgacatttggcttctattttatatgagatggttggggaacctgacttatccagtaaggtgacattgagtagagacctgaatcacacacaggaacaagccagggagatttctagggagggcaaaggctcagagatatgagaggccctgacttgtctgagaaacagtggggcaggcatggagtggaatgaagggaggtgtgggcagcagatgaggccagagagaagtaggacccgatcaggtccccttggggactgtgaggtcttgtagggactttggctcttattctgagtgagatgggggacactgacyggtgttgagtagaggaacgacacgagatgatttatgctttggcacgctgtgtggcaaaggctgtccagagacaaaagtgaaggcaggaa

SEQ ID NO: 955588 - DNA, 745 bp, Homo sapiens
tctcctccaaatctcatgttgaaatgtgatccccaatgttggaggtggggcctggtgggaggtgttttggtcatgggggcaaattcctcatgaatgccttggtgccctccccatggtaatgagtgagttgtcactctgagttcacatgacttccggttgtttaaagagcctggcacctcctcctctctctctctctcgctccctttctcacgatgcaatgtgcctgatcccccttcaccttttgccatgagtggaagcttcctgaggcctccccagaagcagatgtcatcaccatgcttcctgtacagtctgcagaaatgtgagccaattaaacctcttttccttataaattacccagtctctggtcaggcatggtggttcatgcttgtaatcccagcacgttgggaggctgaggcaggaggatcacttgaacccaggaatttgagacttgggcaacatggcgaaaccttgtctctacaaaaaattagccaggcatagtgctgtgcacctgtagccccagctactcaagaggctgaagtgggaggatcacctgagcctgggaggtctaggctgcaccgagctgtgatcgcaccactgcactcaagcctgggtgacagagtgagaccctgtctcaatcaatgagtcaatgaatcaatcagtaacccagcctcaggtatttctttatagcaacacaaaaatggactgacrcgcatctcaattgcagagtgtaaacatcccatccact

SEQ ID NO: 955589 - DNA, 714 bp, Homo sapiens
agcagagtaagactgcaggggtgcagccctccctcccatgcccttctgttcagacacccaaggggcccatgtgcaccmctgggatcacacgaccagaaaacaggaccccagaggtttcttgagtctctgcttaccagggaggctgggtacagccctgccagcccatccctgagcagggcacccccagatggggcagagcagggtatggctgggcagggcagggctgggcggggcagatgggctctggaaggggctgatggtagcagatagggtgttgcctcctgcctgcaggtggggagcaccctgattgagtgggctgagaaaggttggtcaccaggcctggaccccccagctcctttggttataggctgacatcagagtagtggctcatgggaagcggttagctggaaggtctgaggcctggcccatggggtcagggaggagctgggggaaggggacagtaccgtgaaggcagataaaggggcagcagcctcaggtttctgccccccatccccctggggttttccaagccaaagcctgcaacttactttaaaaaagaaaaggaaaaaaagcacttaggaaagttacagacaactacccccaaaaaataccctcccacacacaaaatccaaaccgtttcctcatctccctcccgcctcccccgacacaatacagtttcctgttttctttctttttaaaaacgttgcctgctac

SEQ ID NO: 955590 - DNA, 623 bp, Homo sapiens
aaaagtcccttataaaaccatcagatctcgtgagaactcactatcatgagaacagcatgggggaaaccaccccccacaattcaattacctcccactgggtccctctcattatgtggggattatgggaactacaattcaaaatgtgatttgggtggggacacagcaaaaccatatcattctgccctggcccctcccaaatctcatgtcctcacattttaaaacacaatcataccttcccaaaagtcccccaaaattttaactcatcccataattagctcaaaagtccaagtccaaaatctcatccaaaggcaagtcccttctgtctatgagcctgtaaaatcaaaagcaagttagttacttccttgatacaatgagagtacaggcattgggtaaatacagccactgcaaatgggagaaattggccaaaacaaaggagctacaggccccaggcaagtccaaaattcaatagggcagtaattaaatccttaagctccaaaataatatcctttgactccatgtctcaaatccagatcacactgatgcaagaggtggrctcccatgatgttgggcagctctgaccctgtgactttgcagggtacagccctcttcctggcagctttcac

SEQ ID NO: 955591 - DNA, 559 bp, Homo sapiens
attgagtgtctgagtcttttccaggtgcatggtgcaagctgtcagtggttttactawcctggggtctagaggatggtggccctcttctcacagctttactaggaagtgtcccagtggggactctgtgtcggggctccaaccccacatatcccttctgcactgccctagcagaggttctccatgagggctctgcccttgcagcacacctctgcctgggcatccaggcatttccatacatcccctgaaatctaggttcccaaacctcagttcttgtcctctgcacacctgcaggaccaacaccatgtgaaagctgccaaggcttggggctcgcacccgctgaagtcatgactcaaggtgtaccttggccccttgtagccatggttggagtggctgggacacagtgcaccaagttcctaggctgtacacagcagggaggtctctgacatgccctgaagaccttttccccactgtcttggcgattaacatttggttcctcattacttatgcaaatttctgcagccagcttgaatttctccctagaaaacaggtttttcttttc

SEQ ID NO: 955592 - DNA, 631 bp, Homo sapiens
tctagatgaccttgggtttggtgatgactttttatttattttatttattgatctaaagattcaatgcaataccaattttaatttagagacagagtctctaaataaattaattattttatttayttgttggagggcatgatcatggctcactgaagcattccttgggcatgatcatggtgtgattatggctcactgcagccaaactcttgggctcaagtgatcctcttgcctcagccttccaaagtgctgggattacaggtgtgagccaccgagcccagctatatgattatttttcagatataacacaaaaggcatgatccacaaaagaaataattgataatctggacttcattaaaattaaaaacttctgctctgcaaaaggcacatcaagagaatgagaagacaacacactgggagaaaatatttgcaaaagatatatctggtaaaggactattaagccaaatacacaaagaactcttaaactcaacaataagaaaatgaaccacacaataaaaaatgggcaaaaaaccctgaacagacacctcaccaaagatgatggcaaataagaatatgaaaagatgctcaacatcatatgtcattagggaattgcaaattaaaacaacaagatacc

SEQ ID NO: 955593 - DNA, 613 bp, Homo sapiens
aagttacaaagttttctactctggctgatgggaacaggcatttttcctggctctgtgtgtggttaagtaattattacctctaatcttttccggtatttatttccctggcccctgctccttcccttaatcacagatacagatcactacttaactaagaatttaaagatttcaggtgttctgtctctgtatagctccatcttccttaggactcaacactgagaattctagctgccttagtcaaactatacttccagccccattttttcagctcagggagactgccaagtttatttaggttccctgtccctatgctgtggcccagatactcttcccaggcagtaatcttggaaaatcatagggtttaactcatttgcttcctgtctctgaggtttccttgtcctttgttgtctcatatttaatgtcttgaaatctgttcatatattgtgtctggtattttatttgtttcaaggggcgggtaartctaatccttgttattccaacttgtctagaagaataattctcacaatgttatcttgaccagaagtcagagagaaattgaatatgccaaaaattattgagttataatgtagagattgaagccacgtattaaaca

SEQ ID NO: 955594 - DNA, 647 bp, Homo sapiens
cctagtagatgcctgaaattaastatagtgctgaacccaattgccatcagtcagaacatgtttctaattttgtctcccatccacaaatttaatgttatttccatcttaaccaagcccttatcatgcactatggctgtaactttgcaatttgaggttcaaaagcaaaactatcacaaatttcttttttctatttcccaatttcatggatagaagattcattcttagtgtatatcttagcaacctcagcatatatttattttctttctttatcaattcaataaattttacattgtcacttaatggaagcactttacagcttctatttggcatctccaaattgccaacatcactactgttctactttggagccattattaagtaaaataagagttacttggtgataccatgacagccaatctaataccatggatggctactcagtgactaatgggcatgtagtatatacagtatagatactctggacaaacagatcatttctgtcctctgtgagacagagcagaatggcatgatatttcatcatggtattaagaatggtatgcaattgaagacctataaatgatttatttctgaatttttaatatttttgggtgacagctgaccctgggtaactgaaactgtggaaaatg

SEQ ID NO: 955595 - DNA, 630 bp, Homo sapiens
agggaagcaggatcacatttaaggaagtgtgtggggtccctggatgacaccagcacccagtrcggctctgtctggcaactgctcccaaggtggcaggagtggttgtcccctgtgtgtcagtgggcagctcctgctgagcccgcagcttactggggagcctgacagcagggatatgtacctgacactcctctctgcttgtggacctgatgaggcagggagcagaaaacagagccacttgaaggctttctgtctgcgtcttgtgcagtgtggatttagttgtgcttttttcttgctgggagagcacagccaccatttacaagcagtgtcaccctcatgggtggtgaggacagaacaggagcctctgctctctgtacctatctgggcccagtgggctcccctgtcctggcttccatctctgtctcagtgaccattcagccctgtgcaggaacacatgttgcttagaaaagccaaatccagcccttgtctctgcctcctctggtctcatgatgtgcatctattaccttcaaactggaaaccagtctatcaatgtctgtgccagttttttattccctccccaacctccttccccatacgactttttatttatgtaggatgtgtgctgtctaatga

SEQ ID NO: 955596 - DNA, 615 bp, Homo sapiens
agtgacagaaatgtacgccatgtccatgagagacaattgactgatgaaaaagtacatggggctgtggaggtgggcgtcacagtgtatcagaaggatcaggacagcatttycagacaacgccttcaggaaaaccacaaagatgaccacactaagtagagctggatgtttggatcgtctgaagagtcccatgaggatgaaatccaactttccagtgtggttggccatcctggtgatgttggccatgaggtttcacctaggccaccaaggagagttttggagtcagtgtaacgcgtccctttgtaatgagtgtttcgtgagtactcacatttgtgtatgctcattgtgctaacctgagtcccgtgggtctggggatttgagtatataaatgacatataacaaattcacaaaacaaactaagaattcacaactataggccagaagaattggtaactgatagtaaggttgtcacggttcaaattcataaactttcctgatgataatgccatttatcaacaagtactgaaaatttgcagaacctccctcctctgctaacacaaacagtgactcattgaaagaaagataaagcaaactccttattgtagagtttttgtcata

SEQ ID NO: 955597 - DNA, 629 bp, Homo sapiens
cgtcattcctgacagctcagaccacgagctgcctggagaggctcatgaacaagttctttgtcttcaggggatgaagaaagtccaggcgtttgtttactctagagctaccggtcagaaaggggtttcagcmtcggagtctgcaacctttgtataaaagaacacaaagtcagtgatggaaaattaagctctttagaaggctgatttggctgggcgcggtggcttacacctgtaaatctggcactttgggagactgaggcaggaggatcacttgggcccaggagtttgagaccagcctgagcaacatggcaaagccctgtctccacaaaaaataaaaaataaaaaataaaaaaatagcggggcaatggtgttgggcacctatagtcccagctactcgggaggctgaggcaggagaattgcttgagtccaggaggttgatgctgcagtagtgagccatgatcgcaccactgcactccagcccagggaattgtgtgagactctgtctaaaaaaaaaaggaaagaaaaagaaaaaagaaggctgattaattagccttaaactcagctaaactagcgtcatctttaccaccccttagctgcaaaaaatgtttcaaaccaaatggcccccagtgagt

SEQ ID NO: 955598 - DNA, 574 bp, Homo sapiens
ggaatttgagcttgccctatgttgcccaggggaggtattctggtttctcaggcaatgagctgggccataatgctccccaaaatttatgtatttcttttaagctatgagggctgatggagagacacaagtgaaggctgggtcaggtaggtctgtgctctgactctccatatgcagtgcaagcagcagcccctacgtgggtctgggtgggattctccagtgtctgaggtaatgttccagaggggaatataactgtctctgctgcacagaagaattctcacagggagtggagagtagcaggcagcagtaagcctcacccagctcccatgcagttgacaaggctggtctcattcccacagtgctttgctaacagcacaaggcaaagttctagcagtctgaactaagaactcagagctttcccaggccacaagctttcctcttggagatagcaactgtgatttgttgtccacacccttccccatccacttacaaggccggggcagctcytgtgctcatgtctgcatcacatatccccctcgcaccctgggttcttgcaaagggagttcattcccacttg

SEQ ID NO: 955599 - DNA, 587 bp, Homo sapiens
taattttttaaaaagataaattggttctttctgaattatagcatattcataatattttgtagcctcctttactcaagatatwatagaaattgctctactattttcagatatatgtggtagagataaaatgtataatgaacatgaattttatttttcctgtaactatcttgctttttgttttctttctgatatgtagttataggattcttaacttataattcagacatttcccccaggacatgtagatgtcagtttatttttttaatggacatttgttgagcatattgacagtgccataacattttcacaaattttcattttattcagttgtgctgattgtattttatcacctttcttcattcttttgcctgactttttccttctcctggtaagaatgctttttcaaatttccttccatatactttttacttatttccttgatgagtctgcatattacaatatttaatattaacctgaattttaatttttatagtttatattatttttctcttactctctccttttctcatctgtctgtcgtagtttgttcttttagccagatttttaaaaatgatcttttcttgtta

SEQ ID NO: 955600 - DNA, 628 bp, Homo sapiens
caaggtgatgctggcactctccaatagtgacaagatggcagaaggtgccaggtcctcyctcggggctctcctgaacgcttcttgagtgtcctcctgacatggcggatgccttaacccagaacaagagatccaccagggagccaggaaggaagccaaaagtctcttctgatgcatcctcagaaatcacacgccgttttctttttttcttttttttttctttttgttgttgttgttgttgaaatggagtataactctgtcgcccaggctggagagcagtggcatgatctcgactcactgcaacctctgcctcctgggttcaagtgattctccagcctcagcctcccaggtagctgggattacaggcgcccgccaccatgcccgactatttttgtatttttagtagagatggggtttcaccatgttggctaggctggtctcgaactcctgacctcgggtgatccacccacctcagcctcccaaagtgctgagattacaggcgcgagccaccacgcccagcctccatctctctctcttttttttttttaacttttatttttgttttaggggtacatgtgcaggttggttccatagataaattccatgtcatggggattcagtgtccatatta

SEQ ID NO: 955601 - DNA, 666 bp, Homo sapiens
gaggggctcctcacttctcagacggggcrgttgccaggcggagggtctcctcacttctcagacggggcggccgggcagagacgctcctcacttcctagatgggatggcggccgggaagaggcgctcctcacttcctaggtgggatggcggccgggcagagaggctcctcactttccagactgggcagccaggcagaggggctcctcacatcccagacgatgggcggccaggcagagacgctcctcacttcccagacggagtggcggccgggcagaggctgcaatctcggcactgtggggggccaaggcaggcggctgggaggtggaggctgcagggagccgagatcacgccactgcactccagcctgggcaccattgagcactgagttaacgagactctgtctgcaatcccggcacctcaggaggccgaggctggcggatcactcgtggttaggagctggagaccagcccggccaacacagcgaaaccccgtctccaccaaaaaaatacgaaaaccagtcaggcgtggcggcgcgcgcctgcaatcgcaggcactcggcaggctgaggcaggagaatcaggcagggaggctgcagtgagccgagatggcggcagtacagtccagcttcggctcggcgtgagagggagaccgtggaaagagagggag

SEQ ID NO: 955602 - DNA, 548 bp, Homo sapiens
cttgtttggcaagagacagttgccagcattgtgaagggaaattggcacgtagtcccttccagcttgctgggggataaaataaatgcattcctatgagtagctgcagaacatcacatctggcttctacttctaaggcctgtcacctcgaacctctttagaataagtgggaacatacataaatgaacaggcaaataatagtggaggtcaaacagcacaatgttaaaataaggtacaagtcttgccacagaaatgtctagcaatgtgtaagagacagtcattcctcctgacagttcgtcaaatatctaatcctggaatgaaaagccacggaggttagcccagcaatctgttacaaaatcagtgcgttgcctaagatactgcttcccccaacctctaggggatacattcagcaaactttgaacatrcatgtcagatgaatgcaagagcaaatcatgcactcgcttttcttcaggaaatgaaccttttctgggatcagggtcaattcctccaagacgggactcatcctaacattgtagtgggtgtgatggaac

SEQ ID NO: 955603 - DNA, 732 bp, Homo sapiens
actcccagcacctgctaacccaaatcttctttctgtcactaccattttaccttttccacaatatcatatacattaaccagccatttcatttggcttcttttgcttagccatgttatttgtacacacatttataatatataacctcaatagttggttcatttttattgccaagtagtattccattacatggctatttcatagtttgtttttctaagtgaaggatatttgagttgttttctagttttggtggttgtcaaagccactgtgaacattcacatacaggttattgtgcaaatataagttttcattttatttggacaaatacctaggagtggggttgctgggctctatggtaaatatatgtttaactttataagaaattgctgcactttttttcaaagcagcccctattgttttgaattcccaccagcaatgactcagagttccagttaccccaaatcctcaccagcacttgtttttgtcagattttctttttgtttttcatcctcctaatacatttagtgtggtaacattgcattgtggttttaatttgcagtactgtaatgtgttttctcacgtgtttgtgtgccacatgtacatcttaattgttgatatatctsttcaaatcttttgcctattttaaaaattgggtgttttcttactgagttttgagagttctttatcctgtacacaggtcttttgttggacatatgttttatacatgtttttttc

SEQ ID NO: 955604 - DNA, 569 bp, Homo sapiens
ccccttctgctgtctctgaacattgtatacataactctgttaaatgctgttgtcatcttgaatccacagagaagaawaagcctgatgacacactgacacacaacaaaggacactggcaagagaatcacagagaagaggaccagctccttgatcgcgccacacatggcccagtcctgtgctggagcttcctgtttgtgaaatcacatactcctctctggctcaatgagccagggattcagttacttgtagtcaaaaacatcttgatgttgacttctgcatattctgaggagagcattagaaaataaggattaagaaactgagagtacatatagatcttgggtcattattactcccactgcattttacaaccctcataactaagagctatggttgtcaaagtattccattttttccaaatgatgttcaatttttaaaaacctaatacttgagttaatattagtgagataaatcactaattctttactctaacaactctaaataagaatgaaaccaaaaaaaatcttactttatcaacatatgagtccctttcttcatatgttggagacagg

SEQ ID NO: 955605 - DNA, 587 bp, Homo sapiens
ttatggtgctctttctaggcccacccatggctgcccatggaccaatcagcatgtacttcctcccctctgaagcccttgaaaacatcatagtcagccagactcaggcaaatgaagggatgaaatgcttacagagaggaaatatgtattgtgggtctccgctccactgagagctggacacttggggatgacctacctgtggagaggagtgatccactttgggtctcctctgagctgttcttttgctcgacataaagcacctctttgccttgctcaccctcctcttgttcaggtacctcatttctcctggatgcaggacaagaactctaggcctgctgaatggcaggactgaaagagcgataacacaaacagggctgagacataccccttgcttgccacattatgggccatgagaaggagaaaagagtgaaggagagaagagctgcagctcttctgggagcccagatstaggagctccccaggccaagtctgtgacacactctttggggctttgtggttcctggcatctccaagctttcgggtgccactgcatttcccaatgccagctgtggaagctgcttgcagtatgc

SEQ ID NO: 955606 - DNA, 563 bp, Homo sapiens
aattcaactttatgttccttccaccattaccctatrcccttaatatctattctatgtatgtcccccagatttttgcttgtgtgaattagaaaattcaagtagttaagctgagcgcggtggctcacgcctgtaatcccaacactgtgggaggctgagaagggtggatcacgaggttcaggagttcaaaaccagcctggctgacatggagaaaccccatctgtactcaaaatacaaaaattagccagatgtggtagtgtgcacctgtaaacccagtttctcaggaagctgaggcaggagaatggcttgaacctgggaggtggaggttggtgagctgagattgcaccactgcaccccagcccgcgcaacaaagcgagactccatctcaaaaaaaaaaaaaagataaagaaaattcaagaattcaagtagttcttttggcatgtagtacatctccgcataagtcatattttgtaccttatctttaggggtctgctgagacttgagtcttgttacaagtctagaagaaaagagcggtagcagggtggatactgaggataatcagcatt

SEQ ID NO: 955607 - DNA, 603 bp, Homo sapiens
gtgtcttcttttgagaagtgctgttcatgtcctttgcccactttttaatggggttgtttggtttttttcttgtaagtttgtttaagttccttttagattctgtatattggacctttgtcagatggacagattgcaaaaattttctcccattctgtaggttgtctgttcactcttatgagtttatatatatatacatatatatgtgtgtatatatatgtatatatgtatacatatacatatatttttttttttttgctgtgcagaggctctgtagtttaattagattccatgtttcaatttttgcttttggggccattgcttttcacgttttcatcatgaaatccttgcccatgcctatgtcctgaatggtattgcctagattttcttccagggtttctacaatttggggttttacctttaagtttttattctatcttgagttaacctttgtataaggtatatggaagggatccagtttcrattttctgcatatagctagccagttctcccagtaccatttattaaatagggaatgctttccccattgcttgctttttcaggtttatcaaagatcagatggttgtagatgtgtggtcttatttc

SEQ ID NO: 955608 - DNA, 637 bp, Homo sapiens
catgacacgtgtatacctatgtagcaaacctgcacgttctgcacatgtaccrtagaacttaaagtataataaaaaagtacatatagttgcaacttatctaaataataaaaaatattaaaaaacagaatatagaccttatttagtgtctatatgcaacatgccacagcagccatagcatatgttttacttacattacctcttttagcctccatcacaatcttgcaatgtggctactatgaccattttacatatgaaggcatataagctttgagaggttaaggagtggcttcaagttcactcagctattgtatattaattttatttgtttgcataatgtgttcctacaaacttagcagctgaaaataacacccatttattagctaacagttctgtaaattagaggcttagtcatggtaagggtggtttttctgttcacattcttgaaagtctgaaatctagatgttgcccaggctgccatttcttttctggagtctctgaaaaagaatctggtcccaatatccttcttgttgttggatgaattaaattcttcatggttgtagcttgctgtcagctggggcgactctcaagtcctatcttctgtattccttgccacatggcttcctccattttcaaagct

SEQ ID NO: 955609 - DNA, 637 bp, Homo sapiens
catgacacgtgtatacctatgtagcaaacctgcacgttctgcacatgtaccayagaacttaaagtataataaaaaagtacatatagttgcaacttatctaaataataaaaaatattaaaaaacagaatatagaccttatttagtgtctatatgcaacatgccacagcagccatagcatatgttttacttacattacctcttttagcctccatcacaatcttgcaatgtggctactatgaccattttacatatgaaggcatataagctttgagaggttaaggagtggcttcaagttcactcagctattgtatattaattttatttgtttgcataatgtgttcctacaaacttagcagctgaaaataacacccatttattagctaacagttctgtaaattagaggcttagtcatggtaagggtggtttttctgttcacattcttgaaagtctgaaatctagatgttgcccaggctgccatttcttttctggagtctctgaaaaagaatctggtcccaatatccttcttgttgttggatgaattaaattcttcatggttgtagcttgctgtcagctggggcgactctcaagtcctatcttctgtattccttgccacatggcttcctccattttcaaagct

SEQ ID NO: 955610 - DNA, 712 bp, Homo sapiens
ggctagatatatgcagaaggttaaaactggacccctttcttaaatcatatgcaaaaattaactcaagatggattataatcttaaatgtaaaacccaaaactatataaactctggaagacaacctaggcaataccattcagaacatcggtacaggaaaagaattcagggcgaagacaccaaaggcaattgcaacaaaagcaaaattgtcaaataggatctaagtaaggtaaagagattctgcacagcaaaagaaactatgaatgaagtaaacagacaacttaaagaataggagaaaagttttgccaactacgcatctgacaaaggtctaatatccaacatctataagaaatgtaaacaaatttactaaaaaaaatgacaaccccataagaaactgggcaaaggacataaacacagacttttttctcatttatttatttattcatttatttatattttaattatttagaaataattcagtggtcatctgaaagccttattgttattttcttttttaatttttgtttttctttatttcttctaaaaaatacaggatacatgtgcaaaacgtgcaggtttgctaygtaggtatacatgtgccatgtggtttcctgcacctattgacctgtcctctaagttccctccccttgtcccctacccctcaacaggccctagtgtgtgttgttcccctctctgtgtccatgtgttctcaata

SEQ ID NO: 955611 - DNA, 624 bp, Homo sapiens
  misc_feature 218: n = A,T,C or G
cagaagacttactagacttttctgggacacagaaatgttaaagaaatcagatatgccaaagggacacatcacactttaaaacaaattctatttatggaaagtaamctatataccatttgttatttgctaatttctcacaaaactctagcatctcaatgtactctcagaaaatatatattaacacaggattttagttacatatttaaatctcaaaattntatttcatagtatactagcagctagtcattaacataatgtgaagtatctcatatatcatttaaaccgtagttgtctaaataagtaaaaaaaatacatttatgtctcattttccttaattttttattatgtgtgtaattgcttgcttactaatctacataatccagtatatcagagtccctgtcactttagtgaattaatctgcattatttcaacttgactgattaaactaaaagaatagcatcaagaattttaggctgtcatttaaatatcatttaaaaatgcacgtagaaaatactcaaaacatataaattcaaaaacctcaggaagtactaaagaaaaattatagagacaatattaaaattgatttcctagcactaagataattctacagcaatgaatttaggt

SEQ ID NO: 955612 - DNA, 564 bp, Homo sapiens
ggttataagttcagaaattctgtagtggagcccaggaaactttctgtctagtgtaaccctggggattgcgatttataatagaccaaacattaataagcaaaagaatattttggacattttcaagggttaaatatttttactttgataactttttaaaaaattgtattgtcttattttattattatatttataatttaagtatctctttccctaaacgacaagttttctgcttttagtggtctttaatccattttacaaaatgtttacacatttttcagacattaattcttgtgatcaatctacaattgcattgacttttatattgagaactttcataacttttagtaccattctatgtatttagttgtaaccaacccttttgttgttgtgtttaatatcttttccaattggcttctgctattttattgttttattcttcaatataatttattttgtctcttaaaattttgccattaaatttttaattttatatagttggtcttttaaattatttttaagtttaaacttcattttaattktaaaattttaatttattgtatagct

SEQ ID NO: 955613 - DNA, 571 bp, Homo sapiens
gggccactgtgagaattagttgagtgtgtgtgtacatatcccacagaggctgacctactaagtactagacatgagcaaatcgcaccacatgcatcactgtcctgggccttcccattggttctgtgagcattatcattttattggcgaggaaccctaggcttagagaaattgcggaaatagctcaatataactcagctaatatgtgccagaggtgggatttgaacccagactgtctggctacagaatttgtgctcttaatcaatgtgattcacaaagtaggctcttgacaaatgtctatgaaatgacaaaagggcaacccaaaggcagagtgagcaaaagcaagggaggctagcaagagtcattctagagctctgtgctaagggaaaggaaaacagaaagctagaaactgtccaaagaataaccccaaacccaaacacccaccrgccaccgccatgggccctgggggactaggctcccgagaaacctccggggctctggaatgagagctgggcccagactgcggcctgagatagacgaggccaggcggaggtttggggcagagtcccttggt

SEQ ID NO: 955614 - DNA, 693 bp, Homo sapiens
catcagccctctgcgcccctcgtccttggaaagagcagtggcctgccccgcttctaaaagccctggggctccggaaagctgacsgctctttacaggactcgagcaaacaggaacaggggcgaatccgagggggagaccatgtgaccacacgcggcactggcatatcccacagcggatggtgtgaacgtgtgtcaccggaggcatacagggccaccgtgaaacaaacggtggtgtccaggcatgtgccggtggaaggggggatcgagggaactttccctcaatgccaaggaaaatcaaagaacacctgggacctggggggtaggagtcctgttcctgacccaagccacgttttccagtgcctaccagggagcaaagaggtttctgcaaaattcgccccacccccaaccctccaccgccccggtagccctgacgcaacttcggctgcacccagccccagcccagtccctttggttccctgatattcgtttcggccagaagatcaagggagtcagtgcaccctggagcggaggagaggatgtcccacaagaatgagacaggaagtgctgaggaaatgcgacaccacctgtcctgtaagacaaggccagtcacggtcgcccagcgctcattgtaggcaatccacccacccatgaggggaaacgtggagaagaaggaagcttccctgcctgagacagg

SEQ ID NO: 955615 - DNA, 636 bp, Homo sapiens
ggctggcattgagtacctgtggctttgccaggtgcagggtgcaagctgacagtgcacctaccattttggggtctggaagatggtgtccctcttgtcacagctccattacgcagtactgcagtggagactgtgtggaggctccaaccccacatttcacctccacgcctccctagaagtggttctccgtgtggcctctacccctgcagcaggcttctgtctggacatccaggcttttccatgcatcctctgaaatctaggcagaagcttccaagcctcaactcttgcatttcgtgcacctacaggcttaagaccatgtggaagccaccaagtcgtctatggtttgcaccctctgaagcagaggcctgagctgtacctgggcccctttgagccaagactggagctagagctgctgggatgcagggagcagtgtttggaggctgtgcagtgcagcagggccctgggcctggcccataaaatcattcttccctcttaggcctttgggcctgtgatgagaggtgctgccagaaagttctctgaaatgcttttggggccttcccccattgtcttggctgtcagtacttgccttgtstttacttatgcaaatttctgcagcctgcttgaattcctctcctgaaa

SEQ ID NO: 955616 - DNA, 606 bp, Homo sapiens
tccagtcttttctcaaactttacccaaggctgtgaggtcataatgaagaaaatagtataacacacttgcagatcttttcattaaactattgatagatatttgatacaaatcactaagcagcatgataaataaaaacgtttatcatttagaaaagaggaaaagaggccgggcgcggtggctcacacctgtaatcccagcactttgggaggccgaggcgggcggatcacaaggtcaggagatcgagaccatcctggctaacacggtgaaacccccgtctctactaaaaaatatataaaaaattagccaggcatggtggcgggcgcctgtagtcccagctactcaggaggctgaggcaggagaatggcgtgaacctgggaggcggagcttgcagtgagccgagatcgcgccactacactccagcttgggtgacagagcgagactccgtctcaaaaaaaagaaggaaaagaagtctcagattgatgctcaaattttgcagtaataatattaagtaatcttgatattcacctggatagcrtgtctcttgattgcctccaaagtaaaatccccattctggttggcttctttgaatgcagtgctgctcctaac

SEQ ID NO: 955617 - DNA, 611 bp, Homo sapiens
tgttccttctgtagccattcttctacttttgtttctctagcagctctatcaacgggctttgcccctccaaagacaaaakaagctcgaccggactgggaggtactagcagaagaatcatctcccttaggagtattatgaggctttagattcagtttgggtctttgagggggacgggggacgtctatcattatacctataatcatcccgagagaaatcatctctggagctgcacgacccatcatcccatctgttgtatcggtcttcatagcggtccctgcctcctctgtagtcattgtccctgggtacccactgccaaatgcccttctgccactgcctatccaggaatgatagcctctagcatagtctctgctgcctcggtcatcatagcgatccctaccgccagccatatcgatccatatcccggcatgggccatcccgatactcataccaatacccacggccagactggtctgaatcataacgatctcgatacttgtctccaaacctatcatcaccccttctaggcgggtagtcatcaaagctgtctgtggcagaacgagccctccagtctgtatctgttttgtcagaatcccgatttctatcacggccaa

SEQ ID NO: 955618 - DNA, 611 bp, Homo sapiens
tgttccttctgtagccattcttctacttttgtttctctagcagctctatcaacgggctttgcccctccaaagacaaaataagctcgacyggactgggaggtactagcagaagaatcatctcccttaggagtattatgaggctttagattcagtttgggtctttgagggggacgggggacgtctatcattatacctataatcatcccgagagaaatcatctctggagctgcacgacccatcatcccatctgttgtatcggtcttcatagcggtccctgcctcctctgtagtcattgtccctgggtacccactgccaaatgcccttctgccactgcctatccaggaatgatagcctctagcatagtctctgctgcctcggtcatcatagcgatccctaccgccagccatatcgatccatatcccggcatgggccatcccgatactcataccaatacccacggccagactggtctgaatcataacgatctcgatacttgtctccaaacctatcatcaccccttctaggcgggtagtcatcaaagctgtctgtggcagaacgagccctccagtctgtatctgttttgtcagaatcccgatttctatcacggccaa

SEQ ID NO: 955619 - DNA, 608 bp, Homo sapiens
ggatgaagggaagcacggtaaaaccactgaattccatgagcataagcccacatccacacttctttagccattaagtgagtgccttggtcagaggaaatgctctgtggaatatcacaacagkggataatgcattccatgagtccacgaatggtagtcttggcagaagcatttcatgcaggataggcaaacccatatctggaataagtgtctattccagtgaggacaaacttctgccctttccatgatggaagaggtccaatataatcaacctgccaccaggtagctggctgaccaccctgaggaattgtgccatatcaagggctcactgttgttctctgctgatagcaaattgggctttcatcagtggccatagccaggtaagatttgaggagtgaaagtccgtgttgctgatcccattcataacctccatccctgccaccacagccactttatttatgggcttattgggcaatgacaggggtggctggggaaaaaggctgagtggtgcccacagaacaggtcatcctatccacttcaatattaaaatcctcttctgctgaggtcacccactggtgagcactcacatgggatacaaatatcttcacagt

SEQ ID NO: 955620 - DNA, 563 bp, Homo sapiens
gtacctctggggatatctgaatgcttcctgtctacacctataaatggctataggaatcctgaacactaggtttgtctgaaagttggaccagacatagcaagaagtattgctaaytggaattcacaagggtagctgcttagtgagtcagtgtatcagaggaaagggagttacatatcactcctctgagaaatacctttgacagaaatacctatcattatttatgacttggattccaggatacacaaagaagggatgggggacagagtgtttgcagatggaagaaataacactgcttcagagttgaatgttcaattcttctctgacaccaatcaatatgtgatttgattgccatagttagtgctaatgtttattcagtgacaatctaggagaggtttctacctgaagaaaggaaaaaaagtatatatacttttacacttttataaaaatgtaaatacacacacatatacatatatatatgaatatgtacttattcaccttattaaataattcagattcctttgttgtcaataatcaattggaaaatctgttctgggtccagttag

SEQ ID NO: 955621 - DNA, 586 bp, Homo sapiens
ctgtaatcccagctactaggaggctgaggcaggaaaaatcgcttgaaaccaggaggcaaaagttgcagtgagccgagwttgctccactgcactccagcctgggcgacagaactagactccgtcttgaaaaataaataaataaataaataaataaataaataaataaataaataaatattaaattaaattctccttccccaggagaattggccctaatttatctggtcatgtctactaccaactcatcccccgccagtcttattcactccaccagtgccactggctttcttctgttccctgacctaggggacaggcacccccagtctctctgcctggaatggatttccctatctctaagcctctgatctttgcctggctaaccattgcttgaacttcagggctctcagctttaatgtgacaacctgtcaatctaaatgaaatccctacccacacctgctagtatctaacaccagtaccatagtttgccggattttttccttcataatcctcatcacagttgatagttatatttttatttgtgtgatgatatgtttcacatctgctggcctcactgaactgtaagctc

SEQ ID NO: 955622 - DNA, 645 bp, Homo sapiens
caaacctctgccctttccatgatggaagaggtccaatataataaacctgccaccaggtagctggcttattacctagaggaatggtgccatatcgaggaatcagtgttggtgtctgctgctggcaaattgggcactcagcggtggccgtagccaggacagccttggtaagtggaagtccatgttgctgagtacttgtaaagcctctgtacctgccaccatggccagtttgttcatgggcccattgggtgatgacaggggtggctggggaaaggggctgagtggtgtccacacaacaggtcatgctatccacttgattattaaaatactcctttgctgaggtcacccgtcatagagcactcacatggtatgcaaatatattcacagttttagactactcagagaggtccatccacataccttttccccaaatttctttgccaccgatgttttgatcatgcttcttataagtccctgaccatccatccaaaccattgtctacagcccacgaatcagtatataatcacacatctggccatttctcctttcatggaaagtgcacagccgggtgcactgctcraagttctgcccactgggaagatttcccttcaccactgcccttcagggatgtcctagaaagtggctata

SEQ ID NO: 955623 - DNA, 599 bp, Homo sapiens
cttgtcttttttttctgcaatagataatgtgataacagagagggaaggaaaaaacaattgttcttastgggtttggatcttaggcagataaaggaacttaagttcctttaggagagacagtggggactggtagtggggcggggggaatggtcagtggttaagggagaccctgaggcttctctagtttagcatgtcaaaatgccagattttggggtactgatttcggagccccaaaagcaaaagtagcaaatcctgaaagacaggaatacgtatttgtaaaggtgctgatatgcaattcacactgaaaagcaaaagtgtattgctgacatcctagaattgacagtgaccaaacatgagttgtggtgcttgtcttagttatttaaggcttctataacaaaatatcattaagtctgtggcttataaacaacagaaattggtcgggcatggtggctgacacctgtaatcacagcactttgggaggctgaggtgggtggatcacttgaagtcaggagtttgagaccagcctggccaacatggtgaaaccctgtctctactaaaaatgtaaaaattagccatgtgtggtggcatgcgctagtagt

SEQ ID NO: 955624 - DNA, 596 bp, Homo sapiens
caagaagttcttgaaaccaaggagaacaaggagaccacataccagaatctctagaacacaggtaaaacagcattaagagggaaasttgtagcactaaatgcccacattagaaagctgaaaagatctcaaattgacaccctaacatcacaattaaaagaactagagaagcaagatcaaacaaacccaaaagctagcagaagacaagaaacaactaagatcagagcagaattgaaggagagacacaaaagatcaattaatccaggagcagttttttgaaaaaattaacaaaatagatagaggctagatagactaataaataagaaaagagagaagaatcaaatatacccaataaaaaatgataaagggatatcaccactgaccccacagaaatgcaaactacaatcagagaatactataaacacttctatgcaaacaaactagaaaatctagaagaaatggataaattcctggacacatacatcctcccaagacaaaaccaggaagaagttgaatccagtaataagttctgaaatagaggcagtaattaaaagcctaccaaccaaaaaaaaaaaaaaaaaaaaaccaggaccagatgc

SEQ ID NO: 955625 - DNA, 608 bp, Homo sapiens
tggcctgtgactatgtttagtgatgatgatgaacaagatagtgactttaaagaattttgtatgtcaagtgagaagawaaaatggcatccgacatctttacatatgtgaaaatataccttcacagcttgtcagtaagctgtaagaagtggatgctgaagaagtttttaaaattaataacaagtgtccatttgctcattcattgactgatggtgaaattgccaaaatgcttctgaatcaaggtgataatgataacagagatgatgaagacaatggtgttatcactgcagaaaaagcgcctagagataacgatatattttgtatatttgtccccacccaaatctcatgttgaatgtaatccccaatgctggaggtgggttcaggcaggaagtgtttggatcatggggcagatcactcatggcttggtgctgtcttcatgataatgagttctcacgagatctggtgatttcaatgtgtgtggcacctcccctcccactgtctctcttttgctcctgcttcagccgtgtgagacactggctttcctcttcatcttctgccattgaaagttccctgagacttcatcagaaatcaggcagatggcagcaccatac

SEQ ID NO: 955626 - DNA, 646 bp, Homo sapiens
agccttagttgtttcatactgagcaaccaattttatggagaaaacattttgtgtacaagttgaattattgtgaccaaggatcccagcctcaaaatgcattttcaaactttttttttctttctttctgaatctcagaatgtagccttgtgttgtaagactttgtctccctttcccaccaggtacattcatacacagtgtttcttatctaattaaggacttgcttagaaatcctaggggccgattttgaaacaaacaaggcagggaaacctggctgcagaatcctcccttgagaggggaattacttacagttaacccaccactaccaggccaaagtcaggaaaaggcaaatcaggcctcaggacagaccatcactcaagataaccttcagaacaaaacacgcagacctgcacgttcctgcactattcccacatatttcccatatcttttccgtcttaaactcctttacttagcccccaaacggggaatggtctgttaaaggcatgagcctggccatcccccacctgcttgcatttgaataaaattgctttccttttaccacwccttgctgcacttgttttcagcctctgagcggggaggtgggcatgggtgggtgtgttgggggctcggggtggggggaggcggggga

SEQ ID NO: 955627 - DNA, 593 bp, Homo sapiens
ttatttaaatacttgaagaattttgtcaaaatcatttttttcttcttcaagatggggtcttcccaggctggagtgcagtggcgcgatcacgactcactgcaaccttgacttcccaggctcaagcaatcctcctaaccacagcctcctgagtagctgagaccacagtcatgcaccaccatgcctggctaatttttttttttttttttttttggagagatggaggccttcctatgttgcccaggctgatcttaaactcctgggttcaagcaatcctcctgccttggcctcccagactgctaggattacaggcatgcaccactgtgcccagcctcaaaattcttaaaaggaatttattaatgatatttttaaatgcttaggataattgtaatgtataagttaggtctaagaagttataaagcttttcttagaagtaattgttgacatttcctacatttatatgtaaagtcagaatattttaagctaaatggaaacttttaagaaaaaaactattatggatagttattactttaatgagtcaaagattaattttaaamtccagtataactctaaataatatttattttgtgtgaaag

SEQ ID NO: 955628 - DNA, 578 bp, Homo sapiens; identical to SEQ ID NO: 955109

SEQ ID NO: 955629 - DNA, 588 bp, Homo sapiens
ggctgccttgcagttttagaaccagttaaacacggcaatactgtaggcctctgtgatggctggttcttccggtcagaatatccttgccccaaatattcaggtaattcccgccctcacttttattcaggtctctgctcaactgtcactattttggaaagcccctctctaagcatcctaagcagaatagcacacctcataattcagtttcttcataccacgtatcattacgtgacatttaattctgtctatttatttgcttactgtctatttagaaaactgtgagagcagccgggtgcagtggctcacgcctgtaatcccagcactttgggagcctgaggcgggtggaccacttggggccaggagttcgtgaccagcttggccaacatggtgaaaccccgtctctactaaaaatacaaaaaattagctgggcatggtggtgcacgcctgtagtcccagctactcgggaggctgaggcaggagaattgcttaaaaccgggaggcagaagttgcagtgagccgagatcgygtcactgcactccagcctgggcgacaagagcgaaactctgtctcaaaaaaaaaaaaaaagaa

SEQ ID NO: 955630 - DNA, 560 bp, Homo sapiens
taatttccaagacaatgggaaaaatgtctccagggcatattagatgtctccattgcagcccctcccatcacaagcacagaggcccaggaggaaaaaatggttttgtgggctggacctagcrtccctgtgctgtgtgcagcctaggaacttggtgccttgtgtcccagcaacttcacctgtgactaaaagggtccaaggcacagcttgggctcttgcttcagagggtgcaagccccaagccttggaagcttccatgtggtattgagcttgtgggtgcatggacgtcaagaattgaggtttgggaacctctgcctagatttcagaggatgtatggatatgactggatgcagaggcagaagtttgctgcagaggcagggccctcatggagaacctctgctagggcagtgcagaagggaaatgtgagatcagagtctctacttgggtactgcctagtggagctgtgagaagagggccactgttctccagaccccagaatggtagatccacctatagcttgcactgtgtgcctggaaaagccacagacactcaacagtggcccat

SEQ ID NO: 955631 - DNA, 782 bp, Homo sapiens
tccttctcttgcacagacaatgcctaaagctgagtgaaatccggaagcagcaacataacaggttaaccagggatatgaagttaatactaaagaaccagataaaagagcaraaagtgacgtgcagggcgccatcggggaccactgtttttcaacaagcactttggttctgtaaactctgtgtgttacgtgcatgcacgactttgattaaacatacaaggactgatgaaatatttgcaacaaatgtgacaggaggcttgaatattattaatatactataaagactagatgggtgaaaatggttcattttagttgcccttgcgtggtggcattgtgggtaattattttttcctgctagtctataattttctgtactttccaaattaaaacataatagaagcatgcataatttttaaaacaaagaaatgatcatacaatctaataaaaaataagaaaagaattaggtaggctgggtgcggtggctcacgcctgtaatcccagcactttgggaggccgaggcgggcagatcatgaggtcaggagatcgagaccattctggctaacatggtgaaaccccgtctccactaaaaatacaaaaaattagctgggcgtagtggcgggtgcctgtagtcccagctacttgggaggctgaggcaggagaatggtgtgaacccgggaggcggagcttgcagtgagccgagatcctgccactgcactccagcctgggcgacagagcgagactccatctcaaaaaaaaaaaaaaaaaaaaaaaaaggattaggtagc

SEQ ID NO: 955632 - DNA, 613 bp, Homo sapiens
actctccaggagatcctcagtgtcatcagaagctgaaaaaaacagtgctgagaaacgtggcctgccgtctttccagctaagggagatggcccattcgaccctgggttgtcctctgcaaacgygctgctgcaggttgcatggcaccatctcctgattgcaatttgctttcctgagggagtgaactgactgaaattggatggtaataagttgctaggttattttccactttttagtttatgaggcttattcattttgctttaacattaaccactgccttccttttaaggagctggtgaggcagcgcatggcaacaggttcagggtgaggagtggcaccacctcctttcagtgaggatttgggaagggtgaaaagcaccctaatcttctcagccgcatgtgaacaaaccacctgtcaaggtgggtccttcctatagggaggttgatgtcagcccttcagggaggtctcagttttcttcctccacttcctaatcccttcattataattccttccacaacagaataagtttcttgagcaatgcagcaatatccagcaattttagatagacatttaccttttgacctagaaatctcacttctacgaatccatcctaaag

SEQ ID NO: 955633 - DNA, 591 bp, Homo sapiens
ggtggcggtgttagctcaggtgcaaggtgctggcaaatgcaggtctggttgccttctctgtgctctgcaaacaggagggatcgctcagtgttgcagaggatctgctgatctctcatagtgttagcacgagastgggcactggtgggggaagggctggctggctctgtgcccaccaaggctctctctgcaatggcagttggtggggatgggaggttggactgcactcctgcacactggtgggcaaggaaagcaaacctgcctctgcagacattgccagcaaagtgatgtggggagttgccatgggcctggggggatgctgcagtatggggagggagcaggtgggctggtgtgtggccataggggctgcccggctggagctgccagtcaggcatggtcttccaggcacagaagcaatggtgtgggccgccagggcactagagactgctctgcaagcaggtgtaaccaggctggggctcctagagagaccagcagaccaaggggtgctcaggttggaccagccccacctgatggggaagaccaccctgcagagatcatgtctgacagttcccctagggctaaagtcttctatgg

SEQ ID NO: 955634 - DNA, 607 bp, Homo sapiens
gctggatttgaaatctgttctttgatgttagactccctttatttgctcccttaatacatataatgggtgggtctgacacaattactgtgtttaaaatatatcactcattaaattctgctttaaatgagattatctatcaacaagggaatacctgactctggtagcatacattattacgtcagcactcttttgtgatgattctgtaactacaatgacagatggacctattaaaaaaaaaagtagtaagaataaaaaaatctcacttaattttttaaaaatttcatgtactgtgttaactatcataaaatgcaacagaaacaaagaacagtatagtgtcaagcgtgtacatactgtcttaaaaacagtgacaaaatatattcaaaagatctgcaatgcagcagtccaggagggttgacattagaaaaaaattattaaacccagtaagttaacgaaaccttagaactactccgagtttgggaaggaattaaaaaatmattaaaatgttaagaatttataaaacagcagttaaatttttaaataagaatagtatctatacataccgattaagctttaagtactttttccgtactttaagtattttgaagta

SEQ ID NO: 955635 - DNA, 578 bp, Homo sapiens
ttggatggataagccaactgaattttgaagcaaccaagaatggtggcaattgaaagaaatgagacgatggtaaagtcattcatgaaaggagtgagacagggtgggcaggagatggcagcaactcagaggcrcaaagtccgatgacatatacttcaaaggaagaggggttgaagaagggaacgaatggcttagaagtggcaatcggaggccaggtgcacacctgtcccatctccagatacatggggagggtatgagaagaaaaaaaaagccaacctgctgttaagtagctgcaatggaagttttaggacaaatcaggcactagacggggtaagcggtgagggaaacattctgagaagggattaagaatagagaagaggaggctgctgagaggctggacagtgtgggggagattggttcagattaccagatgtgcagagccaccatggggctaagggttggggtgatgccagatgacttgggatgggaacttgaccttctggaggtgactgaggtgaacagggaggtgggacatggtgggattagtgctgatgatctcataagaatctggttttgtagca

SEQ ID NO: 955636 - DNA, 540 bp, Homo sapiens
  misc_feature 503, 504, 505, 506, 507, 508, 509, 510, 511, 512, 513, 514,515, 516, 517, 518, 519, 520, 521, 522, 523, 524, 525, 526,527, 528, 529, 530, 531, 532, 533, 534, 535, 536, 537, 538,539, 540: n = A,T,C or G
caaggagtctgtctgctccctgtggctgtttttaggaagtcagagaggcacagaccaaacctcttattatggagtgcagggtatgtatgtgtttttcctttccactgaaaaacagacaacagaagaagaaacgtgtttatttgaatctctctctgcagagggtgtgccaccggccaccccctctcccaagatacctgaagacccttgcctggtatctttatccttccaataatttaacaaattaagccgtgcctaattttctaagctgatttcctgagggctctaacttgggaggcccctttcctgtcataggaaccagcagactgacttggttttcctttcttgctctattgctagagccatggaggtgggagtccctttcctggctccataccaccctctccccrggctgccaaatgtccctctgggccctctattccccctgctccttggtgtcctgactcattttcaccggatttcatctggacagcagtagggtgagnnnnnnnnnnnnnnnnnnnnnnnnnnnnnnnnnnnnnn

SEQ ID NO: 955637 - DNA, 458 bp, Homo sapiens
tggtaaatgcccctcaagtggacattctctagtccaaaatcccagtagtcatcactgggaggtgttcataggcttttgccatgagccccagtatgggctctacaaagggcagtcaagtggagaatttgtccctaccagcactccagcttctactctacactctgtgggctcagacagtcttacttgttcccatttagtgtgcccaattaacattgctcaaagggcagatgaacatgccttctgtttcacagtagtaggtagggaaagcatcccctagtcagatacaatattcattatcaaaaaacatttaggtaaagaggttaaagctaccttacataaagcctgtttaaacttttcaactttcattttagctattactgataaaaataaccaagagattgaatatttagctttgtgcttattggtttgcatctccttrtgcatctaatgaaccaact

SEQ ID NO: 955638 - DNA, 638 bp, Homo sapiens
aggggtgacatcacctatcagtagaactgtgatgcccgcctgagtctcagaccagcaagtttttattaaaagtttcaaaaggggaggggatgtaagagcagggagtaggtacaaagatcacatgcttcaaaaggcaaaaagcagaactactagtaagggtctaacaaagatcacatgcttctgagggaacaggacaaagggcaaagcagaactactgataagggtccaacaaagatcacaaggcaaagggcaaaagcagaactactgataagggtctatgttcagcggtacatgtattgtctttataaacatcttaaataacagaaaacagtgttcgagagcagagaaccggtctgaccacaaatttactggggcagtttttcctcaccctagcaagcctgagggtactgcaggagaccagggcctatctgaatccttatctcaactgcataagacagacattcccagagcggccatttatagacctccccccaggaatgcattcctttcccagggtattaatattccttgctaggaaaataatttagcaatatctctcctacttgcacgyctgtttatagactctatgcaagaagaaaaatatggctctttttgcccaaccccacaggcagtcagac

SEQ ID NO: 955639 - DNA, 613 bp, Homo sapiens
aaacctgtacaacatgttgctatactgaatactgtaggcaattgtaacacaatggcaagtatttgtgtatctaaacatatctaaacctagaaaatgtacagtaaaaatatagtataaaagataaaaatggcacatctgtaaagggcatttatgaagggagcttggagaactgaaagttgctctgggtgagtcagtgagtgagtggtgagtgaatgtgaaggcctaggacattcctgtacactactgtggattctataaataatgtacacttgagctacactaaatttatttaacattttttctttcttcaataataaattaaccttaacgtattgtaacttttttacttttaaacttttagatttttttttattttgtaataacacctagcttaaaacacaaacacattgtatagctatacaaaaatattttctttatatccttattccataaacatttttctatttttatttttttacattttaaaccttctggttaaaaactaacacacaagcacacaatttagcctagacctacacaggattagaatcatcaagatgtcactaggtgatagractttttcagctccattataatcttatgagactaccat

SEQ ID NO: 955640 - DNA, 819 bp, Homo sapiens
ggcttcacaaatttccttttcttttttcacaatggctcttatgctggattcacttaacttgaaatggcaggcaactgaagctgcagacctcaatccgcagtacatatcaagcaattcaacatcttcttataatgtcatgacttgtctttgcttgttagaagcatttccagcatcagcagtggcactcagtataggtcctacggttttattcaaggtttctgatattgccccaaacatgatgaaaaatatgcaagagctgtgagagatcacttttgactacagtatgcaatttactggagagaactgctcacgtggaggttgttagtgtcatgtggcattttcagcagatattcacaagacttgagctcacctcaatggtgacaaaaggtggctataaaattattacagtagtacagtattactacagttaatttaatgcagttatgacttagtactgcatatttatgtttgtttatatttcttgactgtgaatggcaccatgtttggtctatgtttgtatatgtaaattttgatgaattttaactttttataatagatttgtgcatagtttagggcagcaaatgaaaaaatagactagtatctacatatattgtatgcattcataatgtatctaactttttcttaatttttaaaaatatttctaggctatgtggttcatctgtgagttttttttttcaaattgtcaaaaatctccccctaaattttccaacatatgtttttaaaggcctgcatacayatagacccatgcagttcaaacccaagggccaaccgtattatataaaatgaaaacgcctgcag

SEQ ID NO: 955641 - DNA, 586 bp, Homo sapiens
actggttagacagcggatgtagcccatggagggcgtgccaaggcagggtggggcattacctcacccaggaagcataaaggttgggggaactccctcccctagccaagggaagccatgagggactgtgccatgagggatggtgcactccagcccagttagtattattttcccatggtcttcacaacccacagaccaggagatccccttggggcctatgccaccagggccctgggtttcaagcacaaaactgggcggctgtttgggcagacaccaagctagctgcaggagtagtttttcataccccagtggtgcctggaacgccagcaagacagaaccgttcgctcccctggaaagggggctgaggccagggagccaactggtctagctcagcagatcccacccccatggagcccagcaagctaagatccactagcttgaaattctcactgccagcacagcagtctgaagtcaatctgggatgcttgagcttggcaggcagagaagcrtctgccattactgaggcttgagtaggcagttttcccctcacagtgtaaacaaagccaccaggaagtttgaactgggtgga

SEQ ID NO: 955642 - DNA, 599 bp, Homo sapiens
  misc_feature 323, 334: n = A,T,C or G
aaagaagtttcagaaggctgctgtggagtaggtasccaaggatattagttttcttcctgtccctaacttcatgcttgaaatcgaagcctcttcctgggttttggtaaaaacaaaaccagggatgttcaggagtggctcaacctgggtcttctgtggctctaggtgggtgttcctgaccccagaaccccagggaattcagcttcctgtgagtacactgcagaggggagaggctcactgggtcctcagacccaaaacccttggagaagggacattcgtgaccacagcagcctctaaccaaaggtggcaccatcaggcacccaggnctgggagctgnaggtggttcctgggtgtgagtggcccctcagtcccacctgggcctcctgttctcctccttcgacagagggatttccgtgctgtgtgaccctggttttcccagcatgctcaaatctattcctctgtacatgaagaatacttgcctccccctgaaaagacgggcactgcttaccctgacattgaggggagatggtttcttctgagaaggtggggagctgcctaagaagtcagtgccatggaagaagcccaatggccccagtggtgtc

SEQ ID NO: 955643 - DNA, 584 bp, Homo sapiens
cgggctgcttcgacattttggctaatgtaaataatggtgctgcaaacatggtgtacaagtrtctgtgcaagacgctgctttctgttctttggggtatatatgcagaagtggaattcctggatcatatggtaattctatttttaattttttgaggaatcaccataactttttcttaccgttttagctggataagggagctgaggcatccagcagagtgcccacccctagaaagtatacaatgaacattgttgcctggatgaggcccatggaggttgagtcacttgcccaaggtcccagagttggtggcagattgggggaacatccagattcgaatccagagggcaactccagggcccaaaggctatttacctccaggttgtatagctccctgagagggcctggctccatcagtttcatgatgttttctcttccctttcctccccttggggaagaagctgaggttacagcccttaggggagcccccactgccttcgctgcagtgagttgtaaaggtggccaaactgctcatggctaataaaaacacggagtcttcgccacatgcccacaccaacccccgagaccag

SEQ ID NO: 955644 - DNA, 576 bp, Homo sapiens
gaccacaggtgcacaacaccacacctggctaattttttgttttgttggtagaggcagggttttgctatgttgcctaggctggcctcgaactcctgggctcaagcaatccacccgccttggcctcccaaagtactgggattccaggtgtgagccaccccttccccctggccaatcttaactgagaaaattaatataaagaattattagagatatcacaggtattggagaattaaaaagggaaaatggaacaaagaagtagtgactgtaagaagtagacaggggaaataaaaggtcaagattgagattactgggaccaaacacttgaaggaggagcccagctaatttttgtatttatagtagagaccgtgtttcaccatgttagccaggctggtctcgaactcccgacctcaggtgatccacctgccttggcctcccaaagtgctgggattacaggcatgagccaccgtgcccagcccagaacaatttctttataaccagcamagttaggcaatcattgttcagattacatacaacgacatgagggagaagcaagagtctaggacatttcacaggttt

SEQ ID NO: 955645 - DNA, 709 bp, Homo sapiens
gcagtggcagccttgacctcctgggctcgagtgatcctcctgcctcagccccccaagtagctgggactacaggtgtgtaccaccacactggctaatttttgtattgtttatagagatgargtttcaccatgctgcgcaggctggtcttgaactcctgggttcaagtgactcacccgccttggccttccaaaatgctgggattacaggtgtgaaccaccacacgcagctccaaatcattttttaatggctttattgagaagtaattcacacaccatacaattcttcaaagtgtacaatttaatgattttagtatattcatagagtcgtgcaaacatcaccgtagtctaattttagaacatttttatcaccccaaaaagaaacccataccaattagaagtcagtccctatccctgactcccctgagaccccagccctaggcaaccactaatatttctgtctttcgagatctgggtgttttgtgtaaaaggaatcatacaatgtgtagtcttttgtgactgactgctttaacttaggataatgtactgaagattcttccatgctatagcatgtttcagtacttcattctttttattactgaatgaaatttcatcctgtggtatatttattttgtagggctgtggtcaaagtaacacaaactgctgacttaaaacaacagaggtttattctctcgcagttaaggaagctagaa

SEQ ID NO: 955646 - DNA, 709 bp, Homo sapiens
gcagtggcagccttgacctcctgggctcgagtgatcctcctgcctcagccccccaagtagctgggactacaggtgtgtaccaccacactggctaatttttgtattgtttatagagatgaagtttcaccatgytgcgcaggctggtcttgaactcctgggttcaagtgactcacccgccttggccttccaaaatgctgggattacaggtgtgaaccaccacacgcagctccaaatcattttttaatggctttattgagaagtaattcacacaccatacaattcttcaaagtgtacaatttaatgattttagtatattcatagagtcgtgcaaacatcaccgtagtctaattttagaacatttttatcaccccaaaaagaaacccataccaattagaagtcagtccctatccctgactcccctgagaccccagccctaggcaaccactaatatttctgtctttcgagatctgggtgttttgtgtaaaaggaatcatacaatgtgtagtcttttgtgactgactgctttaacttaggataatgtactgaagattcttccatgctatagcatgtttcagtacttcattctttttattactgaatgaaatttcatcctgtggtatatttattttgtagggctgtggtcaaagtaacacaaactgctgacttaaaacaacagaggtttattctctcgcagttaaggaagctagaa

SEQ ID NO: 955647 - DNA, 632 bp, Homo sapiens
atggttctgcaggctttgcaggaagtatggtgctgccatctgcctgatttctgatgaagtctcagggaactttcaatggcagaagatgaagaggaaagccagtgtctcacacggctgaagcaggagcaaaagagagacagtgggaggggaggtgccacacacattgaaatcaccagatctcgtgagaactcattatcatgaagacagcaccaagccatgagtgatctgccccatgatccaaacacttcctgcctgaacccacctccagcattggggattacattcaacatgagatttgggtggggacaaatatacaaaatatatcgttatctctaggcgctttttctgcagtgataacaccattgtcttcatcatctctgttatcattatcaccttgattcagaagcattttggcaatttcaccatcagtcaatgaatgagcaaatggacacttgttattaattttaaaaacttcttcagcatccacttcttacagcttactgacaagctgtgaaggtatattttcacatatgtaaagatgtcggatgccattttwtcttctcacttgacatacaaaattctttaaagtcactatcttgttcatcatcatcactaaacatagtcacaggcca

SEQ ID NO: 955648 - DNA, 590 bp, Homo sapiens
gtttgctggaggtccacaccagaccctgttttcctgtgtatcagcagcggaggctgcagagcagcagatactggtgaacagcaaatgttgctgcctgattgttcctctggaagttttgtcttaaaagagtacccggccgtgtgaggtgtcagtctgcccctactcgggggtgcctcccagttaggctactcgggggtcagggacccacttgaggaggtagtttgtccattctcagatctcaagctgtgtgctgggagaaccactactctcttcaaagctgtgagacagggacatttaagtctgcagaggtttctgctgccttttgtttggctatgccctgcccccagtggtggagtctacagaggcaggcacgcctccttgagctgcggtgggctccacccagtttgcgcttcctggccgctttgtttacctactcaagccttggcaatggtgggcacccctcttccagtcttgctgccaccttgcagttcgatctcagactgctgtgctagtaatgagcaaggctccgtaggcataggacactccaagccatgcaygggatataatctcctggtgtgctgtttgctaag

SEQ ID NO: 955649 - DNA, 725 bp, Homo sapiens
gctacttgtgtatgctttatgaagttctcrtgctgtgtttttcagctccatcaggtcatttatgttcctctctaaactggttgttctagttagtaattcctctaaccttttatcaaggttcttagcttctttgccttggattagaacatgctcctttagctcagcatagttttttttattacccatgttctgaagcctacttctgtcagtttgtccatctgattctccatccagttctgtgctcttgaaggagagacgttgcagtcatttggaggaaaagaggcactctggccttttgggttttcagcattttttgttgattctttctcatcttcatgagtttgtctagttttggtctttgaggctgctgactcttgcatggggttttttttttggcagcttttttgttgttgatgctgttgttgttgctttctgcttgtttgcttttctttcaatagtcaggtcccgcttctgtagggctgctgcagtttgctgggggttcacttcaggccctattcatctgatttactcctgtgcctggagatattactcaaggagactggagaacagtaaaggtgggtgcctgctccttcttctgggaactctgaccttgaggggcaccaatctgataccagtaagatcactccagtgtagggtgtctgacaacccctgttggagggtctcacctagttgggtggcacagggaacaggacccatttaatgaa

SEQ ID NO: 955650 - DNA, 599 bp, Homo sapiens
ggacctgaccctgtgtgctagaagaataggtaggaatagaagagggagggcataaagtgtgaataagcccttaaatgctatgctacataatccaattttattcatgtcttctttctggactatattgtgggcattttaaggctctagcaatttaaaaatctgctttagcatgtgatcgctaataagctttttatatacagagaggactaaataaaagtttgttgatatataaagttgataaattacattgagacttaaagtctttgagagttcatactctaccgtgaattgctttcttctctaaatgtggcatgaatatattgaaccatctgattttaaaaacatgggaaatcatcgcaccttccctctaaacagcagtagaaagactgtgtatactaatttagcaaacattagtatacatagattttgcagaaaagaaacattcagcaaatacttattgagggcctggtacacacacacacacacacacacaygtatatatacacatacatatttatagacaaatataattgatgtattatttaattaaggaagtgataaccatttgggaataaaagtatgaaaacatatatcctcaa

SEQ ID NO: 955651 - DNA, 599 bp, Homo sapiens
ggacctgaccctgtgtgctagaagaataggtaggaatagaagagggagggcataaagtgtgaataagcccttaaatgctatgctacataatccaattttattcatgtcttctttctggactatattgtgggcattttaaggctctagcaatttaaaaatctgctttagcatgtgatcgctaataagctttttatatacagagaggactaaataaaagtttgttgatatataaagttgataaattacattgagacttaaagtctttgagagttcatactctaccgtgaattgctttcttctctaaatgtggcatgaatatattgaaccatctgattttaaaaacatgggaaatcatcgcaccttccctctaaacagcagtagaaagactgtgtatactaatttagcaaacattagtatacatagattttgcagaaaagaaacattcagcaaatacttattgagggcctggtacacacacacacacacacacacatgtatatatacacatacatatttatagacaaatataattgatgtattatttaattaargaagtgataaccatttgggaataaaagtatgaaaacatatatcctcaa

SEQ ID NO: 955652 - DNA, 627 bp, Homo sapiens
gcaagccagccagccagacactgagtctttgctgtgttccaggcaccctgctaagccagrgagatgcaagggtgaataggaactgatcccttccctgcaggagctcaccatctctaagaaaagcagtcacataaacactgtgcaacgtgaccagggctccagaagagatgcgttcatgctgctgtgggaattcagctagtggagccaagagctctgcctggagagagaaggcttctagggggcgggatcttaaaagctggggcttgaatgacactggggaaagtcaaggtgggggaaatcatctcctggacaggacatgaactaacactctttggattcaagcagcagaacatcttttcatacacttactggacatttgtacgtcttatttgaagtaatgtctattcatatccttgcccatttttaaattgggttatttgtttttttttattggtgagctgtaagaattcttggccaagctcagtggctcatgcctgtaatcccaacactttgggaggctaagtcaggaggatggcttgagcccatgagcccaggaacgtgagaccagcctggataagacagcgagatcccatctctacaaaaaattagctaggtatggtggtacac

SEQ ID NO: 955653 - DNA, 510 bp, Homo sapiens
atatatttgtttcaggtagtattctgttccattccagtccaaaatactaatatactgactgttaatgaccaaagtaatgtattattattattttwtttatttatttatttatttatttatttatttatttatttatttctgagacggagtcttgctctttcacccaggccggagtgcagtggcgctatctcggctcactgcaagctccgcctcccgggttcacgccattctcctgcctcagcctcccgagtagctgggactacaggcgcccgccacgacacccggctaattttttgtatttttagtagagacggggtttcactgtgttagccaggatggtctccatctcctgacctcgtgatccgccctcctcggcctcccaaagtgctgggattacaggcgtgagccaccgcgcctggcatattatttatgtaaacagtataggcacaagaacaattaaaatttaaaattaggtaatacatgttattgggtaaccactgtagaccagct

SEQ ID NO: 955654 - DNA, 823 bp, Homo sapiens
gaaatctgaagtttaatcattattctaaaacatttctgtcctttattttaaagaagaaaaaattagttttcaacgtattcaaaatcaattctgttkggctgtatttcgtgtatggattttttcatatataatatcaaacagaagaagtttccctaaattattatgcccaatagttttatgttttcaagactaattctcaacagaaataaaatagctcatactccttaatggtaagttttttaaaattcccagcatattcaattatctttctcatttctactcaagtggtattgtaactaataggaattcaatatttttatttccttggttaatgtgtcaaagatggctgctttccatctcttttttaagcactctaaactgtatataccatccatatgctaacaaagaggcatgagtgctttcctatgccattttacggtggattttgttttacagtcatggtgctaatggtcattttaccgtttagctttgcaatcttatttcttctcaagctattctcacccccagcttgaattatcataaaaaacaactgaagccactttttcaacgatgtcaggagaccagagagatgattgcataactgtcaacattattaagtgctcacaaatgcattgagacaggacaaatgtacctgaacctatgttgggctggtaaaaattcttaccatttttggtggtgtgaacagttcacgcgcctgcaatcttagctcaatgcaaacatgagctgtagctttgatttgtttctatggtttcaaatcatcacaaatgacacccgtgacgcagcttactgtgatgtaatgcct

SEQ ID NO: 955655 - DNA, 497 bp, Homo sapiens
acataaattcaactatatcaataataagtttaaacatgactaaacacacaaacaatccacatcaaaggtggagattgtcagattgggactgaaaattatccaagtatatgctacctaaaggagacacattttatttatttatttatttatttatttgagatggagtcttgctctgttgcccaggctggagtgcaatggcacgatttctaaaggagacacattttagattcaaatatacaaatatgttgaaagtcaaagataaaaaagatacattatgcaaacagaaaccccaagaaagctagagaatcttatagttatatcaaagtagactttgtaacaaaagaagttactagagataaaaaggratattttataaagataaatgggtcaacacatcaataagttataacaattatgccaacataagcactagtaacagagcactaaaatacatgaagcaaaactgacagaaatgaaaaaaaaaaagacaaatcaag

SEQ ID NO: 955656 - DNA, 690 bp, Homo sapiens
cagcctgagcaacatatcgagaccttgtctctacttaaaattaaaaaaaacaaatcagtcaggcatgacggtgtgygctggtagtctcagctacttgggaggctgaggtgggaggattgcttgagcctaggagatagaggctgcagtgtgccatgatcatgccactgcactccagcctgacagagtgagaccctgtctcaaaaataagtaagaataataattttaaaaagacagaagcaaaacatctagtgggtcctcagaaatgaaacacgatgcagtttgttccagggaggatggttacaatggtgtcagagggttagtcatgtaaggccctgagtagactggtgagataaaagatcttgcctgggtgataaagcatggaagggcctaactggcctgccaaggggcttgattccaacccatctgtgatggaatactatggaggccacggagtatctggatcagactgacacttcaaaacagtaaccctctttgcagtatgaacggtggattgaagggagaaaagggtagacttagggatgccagctagacgaatattatactaaaacaagctgcaggtgatcaaggaaaggtaggacaatgatggagatgtcaaagaaatattttagaggtggaattgatgagacttagttacaaactgaaagtaattgatgaggtaaaggaggaatc

SEQ ID NO: 955657 - DNA, 586 bp, Homo sapiens
ctgatcctcgcttttattggttggtgggctattractactgcctcagtttcagaacttactggtctattcagggattcaactttttcctgatttagtgtttggagggtggatgtgtcctgaaatttatccatttctcctagatgttctagtttatttgcatagaggtgtttatagtattctctgatggtagtttgtatttctgtgggatcagtggtgatatcccctttatcattttttattgtgtctatttgactcttctctcttttcttctttattagtctggttagagtctatctattttgttaatcctttgaaaaaatcagctcctagattcatggattttttgaggagtttttcttgtctctatctccttcagttctgctctgatcttagttatttcttgtcttctgctagcttttgaatttgtttcctcttgcttctctaattcttttaattgtgatgttagggtgtcgattttagatctttcctgctttctcctgtgggcatttagtgctataaatttccctctaaacaccactttagctgtgtcccagagattctggtttgtcgtctctttgttctcat

SEQ ID NO: 955658 - DNA, 637 bp, Homo sapiens
ttctgttaatgtttgttaggtccatttggtctatagtacagtttaagtctgatgtttctctgttgtttttttgttgagattgtttgttcattgctgagaattggatgttgaaatcctcaactgttaytgtattggattcagtctcttcccttagactgaatatttgctttgtacatttggatgctttgttgtaggtgtgtagatatttacaattgttatatcctcttcctgcattgattccttcgtgattatgtaatgacctttttggtctttttttaaaagtcaatttaatcttatataagtatagttcttcctgctttgttatttatttatttatttgagacagagtctttctttgttgcccaggttggtatgcagtggagcgatctcggctcactgcaacctctgcctcccgggttcaagcgtttctcctgtctcagcctcctgagtagctgggattacaggtgtgcaccaccacacctggctaatttttgtatttttagtagagatagggtttcaccatgatggccaggctggtcttgaactcttgacctcaggtgatctacccacctgggctcctaaagtgctaggattacaggtgtgagccactgcgccccacccctgctttgtttttatt

SEQ ID NO: 955659 - DNA, 589 bp, Homo sapiens
ggtgcctgtaatcccagctactcagggggctgaggcaggagaatcacttgagcccaggaggtggaggttgcagtgagctgagactgcgccattgcactccagcctgggctacaagagcgaaactccatctcaagaaaaaaaaaatcaaaaatactctatgtttacttctataaaggagttagattctaggctcagatcattagaaacaggtttttcacaacatgagtgttcatcaggagatatgaaagtcacatgggttgtgggacaatttttctttctgtacaacttcctacagtgcattagaagacattaatatccttggcacccccaaataccactatccctctcaactattacaacgaacaaaatgcttcccccacaaatttccaaaccactgtctaggcggaggtgccacacctgccgagaaccactgccctaaaacagattcatggatgatatactcaaaataaccgcatttggcaattktataattgcatgctgtggtgggcagacaaatggcaccccaaagacgtccacatcctagtccccagaatctgtggctgttaaccttctatggccaaagggactt

SEQ ID NO: 955660 - DNA, 594 bp, Homo sapiens
  misc_feature 594: n = A,T,C or G
tgtaaattagtcagggggaagatgaatattttccagattaaatgcaaggttaaggacctatgctgattttctccattaagataccacatctgaaacaacaactaatattggaataatctctggttactttaattatatgtgcagttagaatctctaagatcattatttactgcaaaggaaagcaggaaaattaaatagaattctgagatgaatcaccattctcttgcatttttaacccttcactgtggtcacagtctctgtggtttgtccagagccacagtactgctctctgtgtacaatacttagagcagagtcatttcatgccgttgacttttctctccctactgtgacagtcttcactccttggttcagagagtcagtacaggggttctgtcagttaccaagtacagctactcaaattatatttaggaactgaggaaataaccactgtgatccaaacctctgccaaaactccattcatcacctgacracctggtgtgattaggctttgtgtgcccacccaaatcttatcttgaattgtgatccccaaaattcccaggtgtcaagggagagaccaggtggaggtaattgaan

SEQ ID NO: 955661 - DNA, 567 bp, Homo sapiens
gcaatgttctatgaagaatgtgtctgtatttataagacatgtttggtcttcagttaaccattcttgtaatgctgttggtattggtgtcaggataattctgacctcataagataagtttggatgtggtccttttattttttctggaaacaattttgtgaatttggtattattcatttttaaatatttggaatacttcccagtatagccatctgggtctttagtttacttagtttaattttattagatcttgagctattcagcttatctatttgttcttgagtgagctttggcagtttgtttatttcaaggaattggtccaataaatttttcaaaatcacaagtttagtttttttcatagttatttatttttttccagctttattgaggtaaaattgacaaatacaaattgtacatatttaagaggtacaatgtgataatttgatacacatatatattgtgaaatgattgccacaattaagcyaattaacctatccatctcatatagttcctttttttatgtgtgtgatgagaacattcaagatctactctcttaacacatttctagtg

SEQ ID NO: 955662 - DNA, 656 bp, Homo sapiens
ctgcatcctttctctcccccagcatcctcattcctgtttccttgtggatgtcatggtctgctgtgaagtctgcttggtgacccgtccagacctgacttggtataaatgattttgttgcagagaataacaaagtctcagtgtttatttggcatctgttgggatatctggaaccctaaacagaacggaggggagctggggtcatgtcccttctttaatgattgggaagactgaggcttagactgtgctgagtcactgctcccaggtcacccagcctgaaggggtttcttagtctgggttcccctagaagcaggctctgagaccagagtttgagtctaagtaatttatttgggagctgggcccagaaaacacaaatggatggtgagacaagcaggaaggcagcccacaaagggcaggttttcaagccacctatccctggtggcaactggagcctaatccccctgggaaaccatcaagcctcagaatgggaccacctgaggagtgagtgagcaggggtatttatacctgtatgctgaggcaatggttgaagacttctttttttttttttttttttttgakatggagtctcactctgctgcccaggctggagtgcagtggcacgatctcggctcactgcaacctcctcctccctggttcaa

SEQ ID NO: 955663 - DNA, 594 bp, Homo sapiens
gcccattgagagaaaagagagaaaaaaaatggctttgctattgtgaggttattgctgtggcctataatccaaatttcctgagattatgataatctggagtctggtagggatggaaaagtgatgctattgtatgtgagcaaagataggtggtgggaaccacagtgaaacataagattgggctcaccaggaagtgtgaatccccagaccatgcacaaacaactgttgaaataatccctctgccaggagtggtggctcacacctgtaatcccagcactttgggaggccgaggcaggcggatcacctgaggtaaggagttaaaaaccagcctggccaacatggcaaaaaaacccatctctactaaaaatacaaaaattagccaggcatggtggtgcttgcctgtagctacctgggaggctgaagcaggagattctcttgaacccaggaggtggaggttgcagtgagctgagattgtgycattgcactccagcctgggcaagagagaaagactccgtctctaaataaaaaataaaaataaaaataaataaactctcttactctctttctggcagtgaggacaattacttctgttgtgag

SEQ ID NO: 955664 - DNA, 624 bp, Homo sapiens
ttcctctgcaaaagacaaaccacagggagagctgccggggctgggtsggggagcgtgactgtgaacggagttctgggggtgatgtaactgttctgtatccacagtgttgctacatgaatctataaatgtgttaaactcatagaactgtacaccaaaaaatagcagttttgctgaatgttaattcagaaatgaaattaaaattttaaattaacaacaagcaactttacaagagaaaaaaaaaaacctcatttcctccccacaaagccacctcatgagcctgggtggtgcctagccagtcctgctgctgaacctgctctgacctggcctaagggtaggactcgaggctgggagccaagggccaaccacaggacaggcagcaagacccgcttcgctggtctgtcacacacaccgcaccaagtcggtgttcaggataaaccggggcacactctgagctgggcctgtctccggcttcaaccaaaaagcctgagctctggcaggtgaaggaccagacgtttctgtggggctatggacttgtctgggaggcagccacctctaagccacccaggatggtttcggttgtgtttggatggagttctgagttttgccagttaaaattcccccttc

SEQ ID NO: 955665 - DNA, 506 bp, Homo sapiens
atttcctctgcaaaagacaaaccacagggagagctgccggggctgggtgggggagcgtgactgtgaacggagttctgggggtgatgtaactgttctgtatccacagtgttgctacatgaatctmtaaatgtgttaaactcatagaactgtacaccaaaaaatagcagttttgctgaatgttaattcagaaatgaaattaaaattttaaattaacaacaagcaactttacaagagaaaaaaaaaaacctcatttcctccccacaaagccacctcatgagcctgggtggtgcctagccagtcctgctgctgaacctgctctgacctggcctaagggtaggactcgaggctgggagccaagggccaaccacaggacaggcagcaagacccgcttcgctggtctgtcacacacaccgcaccaagtcggtgttcaggataaaccggggcacactctgagctgggcctgtctccggcttcaaccaaaaagcctgagctctggcaggtgaagg

SEQ ID NO: 955666 - DNA, 648 bp, Homo sapiens
ttcctctgcaaaagacaaaccacagggagagctgccggggctgggtgggggagcgtgactgtgaacggagttctgggggtgatgtaactgttctgtatccacagtgttgctacatgaatctataaaygtgttaaactcatagaactgtacaccaaaaaatagcagttttgctgaatgttaattcagaaatgaaattaaaattttaaattaacaacaagcaactttacaagagaaaaaaaaaaacctcatttcctccccacaaagccacctcatgagcctgggtggtgcctagccagtcctgctgctgaacctgctctgacctggcctaagggtaggactcgaggctgggagccaagggccaaccacaggacaggcagcaagacccgcttcgctggtctgtcacacacaccgcaccaagtcggtgttcaggataaaccggggcacactctgagctgggcctgtctccggcttcaaccaaaaagcctgagctctggcaggtgaaggaccagacgtttctgtggggctatggacttgtctgggaggcagccacctctaagccacccaggatggtttcggttgtgtttggatggagttctgagttttgccagttaaaattcccccttcaggagctctctatgggggtaaagt

SEQ ID NO: 955667 - DNA, 504 bp, Homo sapiens
aatgctcaaatgttggacattatgctaagaactaggaatacaacagtaatctaaacagacaagaccctcccctaaaggagtctacgctctcaggagaaaaactaatattaatcaaaaacyaattggtcacatgaataacttattacttaatttttttactatgagctatagtaaatattattaaataaaaataggatgagagtcagcaatgttagcaaaaaccatggagtaaagaaggacctcaacatttcatccctccacaaaagcaatgaaaaaaactggcaaaaacctgtcaaaattaacttttcttattgaagtatgattgacaaataaaaaattgtgtatatttaaggtgtataacatggtgttttgatataaatataccttttgtactgattctcacaatcaagctaattaacatattcatcacctgatgaaggccttttgtgtgagtgtgtggtgagagcactaaagatctactgtcatagttcaagtacataatac

SEQ ID NO: 955668 - DNA, 520 bp, Homo sapiens
tatgatctgccatctataagctagagagccagaaaaactggtggggtaattcagtctgaggccaaatgcctcagaacaaggtgggtgggccagtggtgtaagttccagacttacaaggctgcaggggggcggcrggagaagtggtgtaagtcccagaatcccagggctggaaaactagaagttctaatgtccaagggcagaagaagatggatgttctggctcatgaaaagaaagagacagcaaatttaccctttctctgcctttttgttccattcataacctcaacagactggataatgcttaaccacattagtgggggtgatcttctttgctcactcagtctactgattcaaatgttaatctcttccagaaatgccatcatagaaaatactaaaaatattttaccagctatctgggcatcccttagcccagtcaagttgacacataaaatcaaccatcacagagaaaagaaaatctgtggagaagttggaaagtttatacattggtagtggaaacgtaa

SEQ ID NO: 955669 - DNA, 591 bp, Homo sapiens
gtatttctatgtggaaggcatcttgtaggcatcaacttttaggttctcagatctagaaagaactagaawttatttaatctgaaaattatttctctcatctcactctattttctttatcttaggaatcaccttaaatgctttctagaagtgggtatgcagaagactggaccaggtcttatgaggttgagaggagaaggtgagggaacaacaaaaaaatgggcaggacatggtctcatagaaagatatgacagtccccagacagtgccagatcccatgagaaaacagtcccatgggtagcaccatggtctgaatgctccccaaacttcaaatgctgacattcaacccccaaggggatggtattaggaaggggagcctttgggaggggattgagtcatgagaacagaaacctcgtgaaagggatttggtctgtatacatctatatgcattggtataacggaatacctgaggctaggtaatttataaagtggtagatcacctgaggtcaggagttccagaccagcctgaccaatatggtgaaaccctgtctcaactaaaaatacaaaaattcaccaggcgtggtggcacatgcct

SEQ ID NO: 955670 - DNA, 538 bp, Homo sapiens
tcatggctcactgcagcctcgatctcctgggctcaagcgattctcccacctcagcctctggttgctggaaccataggcwtccaccatgtgtacctaatttttgtatatttgtagagactgggtctcacttatttgcccagattcattttaaccttttctacgtgtgcaatacaagtgtgcattaaggatatccacaaggctgtgtaaccctctccgcgaccattcccagagctttcctaatcagaaaactgtaaccattgcacagtaattgcccttccctgaactcccagcccccggcgagcggggctcatggctgaataacactgcactgcatgtgcagactacattttgtttatccacttatccctccagggtccttgggttgtttccaccctctggctgctgtgaatagcgctgctgtgaacatgggtgtaatgcgcttgcttcagttcctgcattcagcccttctgggtatatactgaggagaggaattgctggggcgcatggtaattctatgtttagggttttgaggatccac

SEQ ID NO: 955671 - DNA, 641 bp, Homo sapiens
tagcatttaccattttaacctttttgtttgtttgtttgtttttggtagaggggatcttgctctgtcacccaggctggagtacagtggtgcagtcatggctcactgcagcctcgatctcctgggctcaagcgattctcccacctcagcctctggttgctggaaccataggcatccaccatgtgtacctaatttttgtatatttgtagagactgggtctcacttatttgcccagattcattttaaccttttctacgtgtgcaatacaagtgtgcattaaggatatccacaaggctgtgtaaccctctccgcgaccattcccagagctttcctaatcagaaaactgtaaccattgcacagtaattgcccttccctgaactcccagcccccggcgagcggggctcatggctgaataacactgcactgcatgtgcagactacattttgtttatccacttatccctccagggtccttgggttgtttccaccctctggctgctgtgaatagcgctgctgtgaacatgggtgtaawgcgcttgcttcagttcctgcattcagcccttctgggtatatactgaggagaggaattgctggggcgcatggtaattctatgtttagggttttgaggatccactgaacttttcc

SEQ ID NO: 955672 - DNA, 596 bp, Homo sapiens
tattacacagagtggtcagggaaggctgccctccaacctcactgggcaggctggttggagtttctccaaggaccccctcccacctggctgactcattcctccctctaaaaaagtacatctaattgccattasattaaggataaggatgaagactgatctcaacttcttcctgctgacaggggttgctgttttggggaaacggaagtcggagctccttcagaggcctatctaagggttcctagcagaaggggccattgtcagaggctccagttgcatgaccatttggagtttgatggcctgaaggcaagaacagacaaacccatttgttagaaaacacatatcaacatgaaacaaggggagggataaggacagctcaaaaattccaaggccttttaccagtttgcacagggagagggaggccaaacacccagctagcaaaaaaaaaaaaaaaaactttacccttttgctagtatgttgggcttctgggttccttttccctgagcccaatcctaaaccaactagttttaaggtttgggaaattaactctttctagtttgaaggatgcatctgaggggaccttcccatagtacagagac

SEQ ID NO: 955673 - DNA, 626 bp, Homo sapiens
tgataacttttcttgaacccatcagagtgctgaggtagtgaggcaaccaaataccctgaaatctaagaaaagacaggtgtttccaaagagggctaggatatgagcacaggctcacctgtaagacagcgtggaaggaaggcagggctaccattcaaatgggttagaagaattcagctaaaatttttaataaatcgctgaaagccagatgtggccaagaactgagagctcatgatacaagggccattcctacgcatttgaagcatcttcatgggcctccaccagagctcatgaaaagcttgtggccagggaatacatacctaggtaatggagcagccatcattctgggaaaggcatgaagcccacctgaatccttttttctaaggaacaaatgtcttaaatcactggaagaagggcccagggcacaggaaaagagcccattacacctggaggaaaggaacaggaaaaaacaacaacaacaacaaaaaacaaacatctctctacccttggggaaggggctggaaaccatcccragcctagatgattacaggtcttctaccattgggtgagatctaggatcactgaaaaagccctatcctcaaaatccagggacagaaggcccgactaaa

SEQ ID NO: 955674 - DNA, 592 bp, Homo sapiens
ggggctgtaccttctgaagccacaggggcagagctgcccaaggctttggaagcccaycccttgcatcagtatgacctagatgtgagacatggagtcaaaggagatcattttggtttacttaaagtttacatagtaaactttaaggtttaatgactaccctattggatttcagacttgtatggggcctgtagcccctctttttggccgatttctcccatttggaatgggtgtatttgcccaatgcctggacccccattgtatctaggaagtaactaacttggttttgattttacaggctcataggcagaagggccttgccttgtctcagatgagactttggacttggacttttgggttaatgctggaatgaattaagactttgggggactgttgggaagacacgattgtgctttgaaatgtgaggatataaaatttggaaggggccaggggtagaatgatatggtttggctgtgtccctacccaaaatttcatcttgaattataatccccataatacccatatttcaagagcaggaccaggtggaggtaattggatcatgcaggcagtttcccccatgctgttcttgtgatag

SEQ ID NO: 955675 - DNA, 652 bp, Homo sapiens
cgcctataatcacagctacttgggaggctgaggcaggagaatcacttgaacctgggaggtggaggttgcagtgagccgagaytgcaccattgcactctagcctgggcaacaagagcaaaaattctgtctcaaaaataaaaaaagagtacttgatagggaaggccaatttcgtgctgagggaggtgcccttcagcctccctgttctgggtcactctttgcccctagcactcacaataacctctgtgccacccctattctccccatcagagaagatgaggaccactcctttccagcccagtcttctgcagctcagtgctgaggtcacctgtgtcctctgagaaacagaggccaaagacagagttaagaatgccaagagatgcatgggggtaatgcctgcaaaggataatggggagagggagcaggagaaaaaaggggagcctttggatgttgacgcaggtctgactaggaaaggagagggggaatgaagaaggattgggtagcaagagcttcagactgtggcgcagctctgagaaggtcttggccagcccaacaggggactctggcacaaagattattcatagagaaatcctatattaggcagaaataacgaaacctcattcacagtgtgtttagctgcaggctgcccaggaag

SEQ ID NO: 955676 - DNA, 583 bp, Homo sapiens
atattaacaacaataactgataataaattagaagaattataacaatatgtcagcatcactactctgtgctttggggccataatgaagtagaataaggttgacttgaacacaagcattgagaaacatgacagtcgatctgataaccaagccagctactgagtaacaggtgagtggccgtaggcagtgtggatacactggacaaaggggtgattcatgtcccaggtgggagggagaaaggcagtgtgagatttcatcatgctactcagaatggtgcacaatttaaaatttacagattgtttatttccagaatttttcatttcatttttttttttttttttttttgagatggagtcttgctctgtctcccaggctagagtgcagtgatgtgatctcagctcactgcaacctctctgcctcctgtgttccagtgattctcccacctcagcctcccaagtagctggggttacaggtgtgcaccaccacgccyggctaatttttttttttttttgagacagtctcgctctgtcacccaggctggagtgcaatggcatccacctcccgggttcaagcaattctcctgcct

SEQ ID NO: 955677 - DNA, 583 bp, Homo sapiens
atattaacaacaataactgataataaattagaagaattataacaatatgtcagcatcactactctgtgctttggggccataatgaagtagaataaggttgacttgaacacaagcattgagaaacatgacagtcgatctgataaccaagccagctactgagtaacaggtgagtggccgtaggcagtgtggatacactggacaaaggggtgattcatgtcccaggtgggagggagaaaggcagtgtgagatttcatcatgctactcagaatggtgcacaatttaaaatttacagattgtttatttccagaatttttcatttcatttttttttttttttttttttgagatggagtcttgctctgtctcccaggctagagtgcagtgatgtgatctcagctcactgcaacctctctgcctcctgtgttccagtgattctcccacctcagcctcccaagtagctggggttacaggtgtgcaccaccacgcctrgctaatttttttttttttttgagacagtctcgctctgtcacccaggctggagtgcaatggcatccacctcccgggttcaagcaattctcctgcct

SEQ ID NO: 955678 - DNA, 556 bp, Homo sapiens
ttccagctgatctgaatatatcagcaattacgataaatgtgacaaacactaagacagggaaatagggcastcagactgaattatgagggtacatggaaaaaggatctaactagatttgaacatctgggaatgtttcctgtaggaagtaacatcttaggtgagacccggcaaattaataaatgttaactagataaaactgagagtggattggggcagttaataggagaggtgctatgcttcatatttatggggttaattatttgtacgctcacttgatagatgaggaaactgaggcacagagtgtaagcaacttgccgacagtcacacagctagtaagcagtagagctgggaggcaaagccagccatctgacttaaccaggttctccatggatggaaatcataactatagccatttaaagcatggaatgggtaagatcacccaaggacagtgcaccgagtgagaaaagggataaggacagaagagttaagcacatttgcttgtaatgagttgtcagaagaagagagtccaaaaggaaactaagaaggcgtagtataa

SEQ ID NO: 955679 - DNA, 600 bp, Homo sapiens
cggtatgaggtgtctgtcgagccctgctgggagatgtctcccagtcaggaggcaggggttcagggacccacttgaggaggcagtctgacccttagcaaagcttgagcactgtgctgggagatccrctgctctcttcagagccatcaggcagggacctttaagtctgttaaagctgtgcccaccacttccccttcccccaagtactctgacccagggagatggtgattgtatctataagcccctgactggggctgctgcctttttttcagagatgctctgctcagagaggaggaatctatagaggcagtctggctacagcggctttgctgagctgtggagggctcctcccagttggaacttccccatggctttgtttacactgtgaggggaaaaccgcctactgaagcttcagtaatggctgacgcctgtccccccaccaaactcgagtgtcccaggtcaacttcagactgctgtgctggcagcaaaaatttcaagccagtggatcttagcttgctgggctccgtcagggtgggatccgctgagctagaacacttggctccctggcttcagccccctttccaggggtgtgaatgattctgt

SEQ ID NO: 955680 - DNA, 467 bp, Homo sapiens
tgtcaaaatttccctcttcttataaaacacataagtcatattggattaaggcccaccttgatgacctcaccttaactaattgtaactgcaaagactatttgcaaataaggttccattcataaggtttggggtagacaaaacttgagaacagagactcattttcttctaaaatgctttctctgaaagatttttaaaaagaaaagggtggaaatttgaaagaaaaataagtctcaggaccccaaaatcagtaagccaaagggaaaagtcaagctgggaactgtgttaggcaaacttgcctcccattttattcccaaataagatagccacaaagatttaaaaaaaaaaaaaaaagctacacacctycctcacaatttatccacaaggaaatttcttgtgggcctcaagatctttaccctaaaacagttctgttgaatttcaccctggcaaagtaaattggtagcttatct

SEQ ID NO: 955681 - DNA, 537 bp, Homo sapiens
cctcgaatgagtcactgagactctcagagcctctgtatgttgacctttgaaaatagtgaagggccctgtcctaccacttcacaggtgattgtgaygatccattgagataaaagagagaggctgctctgtaaactgtaaagtgggaggcacatgagaccggggatcactgcttgctcatggagaggaccactttatctcatcctagctctttaggtttcgaaatcaattttccttcccttccccactgaccatacataggtccatgaatggcttttaaaattatttttcttttcttttttttgagatagaatctcgctctgtcacccatgctggagtgcagtggagcgatcttggctcactgcaacctcctccccgcctcccggattccaatgattctcctgcctcagcctccagaataactgggactacaacacgtgccaccacacccagctaattttgtaatttttttaaatttatttttttgagatggagttttgctctattgcccgggctggagtgcagtggcacaatcttggc

SEQ ID NO: 955682 - DNA, 691 bp, Homo sapiens
tacgagtaggcagtgtgatggaaaaagcgccgtgagtmggggtacctaaattctcttttgttaccagctctgcagcctgggccgcacttgcagctccttaaccttagcctatccagccacaaaagaaaggtgatcagaccaatgcccaccactcaggattgttgtagagacaatttgcatgctgtaaagtactcgcacagttaattgttcctttttaatttttaaattttttgatacataatatttgtagttatggggtacatgagatattttgatacacacaacaaatgtgtcatgagcaagtcaaggtattaaggatatccatcaccttgagcacatcaattgttcttatttttaaacaccactggccaaacggaggtagtgttactggaaaggggtcctgatccagaccccaagagagggttcttggatcttatgcaagaagtagaggtgaatctggccgggcgcggtggctcacacctgtaatcccagcactttgggaggccaaggcgagcagatcatgaggtcaggagatcaagaccatcctggctgacgaggtgaaaccctgtctctactaaaaatataaaaaattagccaggcgtggtggtgggcgcctgtagtcccagctactcgggaggctgaggcaggagaatggcgtgaacccaggaggcggagcttgcagtgagcagag

SEQ ID NO: 955683 - DNA, 578 bp, Homo sapiens
ctccaagttcttcagttttgggactcttgaaccyttgaccacagactgaaggctacactgttgacttccctacttttgagcttttaggactcggactggcttccttgttcctcagcttgcagacggcctattgtgggacctcactttgtgatcatgtgagtcaatactccttaataaactctcctttaaatatacatctatcttgttagttctgtccctctagagaaccttgactaatacgatagggaagccatagtgactgtcactaatattctaataaaagaattattatctatgccaactctggagagccacaggtaagctatacatagatcaaagtgtaaaccaggggttctctgagtgtgattcctggaccagcagtatgtggtgacatttgaaatgcaaattcttgggccccacctcagaccactgaattagaaactccagaggtggagctcagcagtttgttttaactagttctccaggtgatgctgaggcacatcacagttggaaatggtgaggtaagtaaggaatttcagcagttcaactgctgaaatgtagatcttaacaaagtgcta

SEQ ID NO: 955684 - DNA, 577 bp, Homo sapiens
agatagcaccttccttcctctgaggacagactctcactgaagccccggtaggaggctcagcacccatttctctagatagcaccttccttcctctgaggacagactctgaytggagccctggcagggggctcagcacccatccctctagatggcacctgccttactctgaggacagactctcactgaagccccggtaggaggctcagcaaccatttctctagatagcaccttccttcctctgaggacagactctgattggagccctggcagggggctcagcacccatttctctagatagcaccttccttcctctgaggacagactctcactgaagccccggtaggaggctcagcacccatttctctagatagcaccttccttcctcaggacagactctgactggaaccctggtagggggctcagcacccatccctctagatggcacctgccttactctgaggacagactctgacgggagccctggtagggggctcagcacccatccctctagatggcacctgccttactctgaggacagactctgactggagccctggtagggggctcagcacccatc

SEQ ID NO: 955685 - DNA, 805 bp, Homo sapiens
caggctggcttgaaaagtgggcttgaaagtgggtcctgaacccacgttctatcctgtgatactcctttctccattacagaacacagaaagacaaattcttagcacaaagtacaccagatttgctaccacctaaractagtttcacaaatcctttttctattaatcaaacgcttgcagagagacaaatagtgacgtttactgtttacccagacagcgaaagagagagagagagaccagaaacttggctggtaagaatttcttaccctttttgccagcatactaggcttcctggctccccttctctgcagcttccagaacagagtggtttctaatgaccctgctcactgcaccatggctgtgggaatcaagccactttacaagagaaaatcaccctttcctgagctttacggaaccacagacaagattcttaattggcaagatgctgcccaacaggctgcatggggaaccaaattaacattttccatcccagcaaaacacacataacaaaacacacattagccacctcgttcagcacccaatatcagcctggcaaagctcaaaaactttttcccgttggtccctgttgtctttgatccactccaggtggggagggatgaccttagaatagtaattcacaatggggtctctcggcaagacgaagagcagatagtcaccccgagacaggcctgttgagccttctctagggctcatcaaatgtgaccagacaaataaggagggttttgagttaggtctgctggacttccatcagtaacctcttctgagatcccttccacatatacaaaca

SEQ ID NO: 955686 - DNA, 789 bp, Homo sapiens
tatcagcctggcaaagctcaaaaactttttcccgttggtccctgttgtctttgatccactccaggtggggagggatgaccttagaatagtaattcacaatggggtctctcggcaagacgaagagcagatagtcaccccgagacaggcctgttgagccttctctagggctcatcaaatgtgaccagacaaataaggagggttttgagttaggtctgctggacttccatcagtaacctcttctgagatcccttccacatatacaaacacacacaaagatgagaggacacaggccttcccaattagatccctaaccaagacctccaggagtatcccttccaaactatctttctattctccttctgagaaacctcctcaaaatcttcctaattgagaagaagtctcccaaaccagaagtcttcctactagttagaaggagccaaccaagactccccaggagctgaacagacaccctccaatggggctacagacacagacatcccatgatggagctacaaatagacatcccaccacagggctacagaaccagtcaggagaaggaaggaggcattggcagtgcataggatactaaccaatctggattagacaacctgcaatggggttacagacagacaccccaccatggggctacagacagacascccatgatagggctacagttaagggatgtctccccgtgactatttctccactgcaattaaatccatgcacattgggtcagcagtgccccaccagtagtgagagtatcagggtcagcctccagtccaagag

SEQ ID NO: 955687 - DNA, 620 bp, Homo sapiens
actctcaaaagatttctcagacagtttacaagaaataacaaaacctatccttactctacaatcccaaatagactctttggcagcagtgactctccagaactgctgaggcctagacctcctcactgctgagaaaggaggactctgcaccttcttaggggtggagtgtttcttttacactaaccagtcagggacagtatgagatgccaccggccgtttacaggaaaaggcttctgaaatcagacaatgtctttcaaactcttatgccaacctctggagttgggagacatggcttctcccctttctaggtcctgtgacagccatcttgctattactcatctcacacttgggccttgtgtttttaacctccttgtcaaatttgtttcctccaggattgatgccatcaagttacagatggtgttacaaatggaaccccaagtgagctcaactacaacttctatggaggacccctggaccaacccactgaccctttggctggcctagagarttcccttctggaagacactaccactgcagggccccttcttcacccctatccagcaggatgtagcttgagtgatcattgcccaattcccaacagcagttggggtgtcctgtttgtt

SEQ ID NO: 955688 - DNA, 623 bp, Homo sapiens
ggcacccctagaccccaagccatcaccgtttaaggaagggtaccccccattcctgatggggcatggtayacagatgggtctagccaaggatctaatgctgcctggaccgctgttgcagtccaacctagtacagacaccatatggtttgaaaccaggtgtgggcaaagtagccaatgggctgaacttacagcagtatagatggtgatcactaaggagcagatatctatggtgatttgtaccgatagctgggcagcctaccgaggcttaaccttgtggttaactacttggaaaatacaaaattggctagtcagccactgacctatgtcatggagccaagtgatgtggcaagacctctgggaaatggatcatcagaaagatgtaattatttatcatgtgtcaggccatatgcctttggccacctttggcaatgatgaggcagatgtcttggccaaggtccaatggttagtcggcaccaacacaagatgtggccttctggctacaccagaaactgggacatgccaggggcaaactgatgtaacagggcaataagtgttggggtctgtccctgcccatgcaaggtatttgggaggctcgtcagaaatgcccagtatgtgcttggtcat

SEQ ID NO: 955689 - DNA, 643 bp, Homo sapiens
aagttcacctgaatggaggtatcaggacttgttaaatgattgtgggaagagatgtacctggacgtgaatgaggaagactatacctrtaaatgagcccagaagccatcttggtgcaatgaaagaatcagcctgagatgaaggcaacacaaggaagtgtctagagtcaagggaagttacagaaacattgccagagacccttcttgttctttgcctaaagtatgagctctctatctttatatttaaaaccagaaaattctcaccctcaccagaaacactgaagtgacacaagagcaggaaataagccttttttgtgtttagccactgagaatttggagttttcatcaaagaaagtagcttaccctgactaataaaagcatttatcccaacattgtaaggatggcttaatatagagggggaaatatatataggacatcacagcattaaattaaagagaaagaaaaaagtcacaaaattatttcaatagatgcaaaaaaactgataaaatttaatattcattactgatttaaagctgtttttaaaaattcagagaaactaaataaatggatgcatccttcaaattggtagcaaatacttgattaaaagctatattcaaaccaattgtttaatacaatggtacaattct

SEQ ID NO: 955690 - DNA, 643 bp, Homo sapiens
aagttcacctgaatggaggtatcaggacttgttaaatgattgtgggaagagatgtacctggacgtgaatgaggaagactatacctatraatgagcccagaagccatcttggtgcaatgaaagaatcagcctgagatgaaggcaacacaaggaagtgtctagagtcaagggaagttacagaaacattgccagagacccttcttgttctttgcctaaagtatgagctctctatctttatatttaaaaccagaaaattctcaccctcaccagaaacactgaagtgacacaagagcaggaaataagccttttttgtgtttagccactgagaatttggagttttcatcaaagaaagtagcttaccctgactaataaaagcatttatcccaacattgtaaggatggcttaatatagagggggaaatatatataggacatcacagcattaaattaaagagaaagaaaaaagtcacaaaattatttcaatagatgcaaaaaaactgataaaatttaatattcattactgatttaaagctgtttttaaaaattcagagaaactaaataaatggatgcatccttcaaattggtagcaaatacttgattaaaagctatattcaaaccaattgtttaatacaatggtacaattct

SEQ ID NO: 955691 - DNA, 445 bp, Homo sapiens
gccatcaaataaatgaaatatctaagcatatactaaagaagttgaattatctcaaaaaggagaaatacaaacactgctgaaaaaaattaaagatgacacaaatgtatggaaatgcatcccatgctcatggattggagaatcaatattgtgaaaatgaccatatggcccaaagcaatttacagtttcaatgcaattcctatcaaaatactgacataagtttcacagaattagaaaaaaaaaatcctaaaattaatatggaaccaaaaaagatcccaaatagccaaagcaataataaccagaaagaacaaatctggaggcatcacattactagacttcaarttctactacaaggctgtaagttaccaaaacaacaatgatactggaataaaggtaggcacatagactggtggaacagaatagagagcccataaatgaagccaaacat

SEQ ID NO: 955692 - DNA, 634 bp, Homo sapiens
ccttgtctttctttactaagttacagcttgtcatggcatgcttttttcttgttaaaatatttatttttgttctaaagttgttgaggatagtaggatatttatgctttaaaatactagggtgtacttgaaatgamataaaatgcctagattcaagctccaagcttcaacaattaggtaattttattagtattaggcaaaaatgaacaacacttacgtctaccttgggtcagctctatgttaaaacaaaaatgctaccatattagcttggatatatagccctccccaaaaggatggcaattaggacaatgtgctaagtatattaaagcaacccacccgccatgaacaaacacaaaaggtccagcatatgaactgtagtcccccgtcaaggtgttatagggttacacaattagaaaatgccactatcctttttctacattcaacaaggccacaaatatatagatgattctattactattgctacaaatggcaaatgtcatcaataaacaagcaataaaaagcaaaggactgcctaactagatggagaaattagagccaacacccatgcaagagtaatgaaggaagaggaagctgattcttgggttttgtctttaatatgttttaactttatttttat

SEQ ID NO: 955693 - DNA, 623 bp, Homo sapiens
gccatagtttataatcctgtggctagtttcttggtctggtctccaggtaagagggaaatatatcttggaaagctgctgttaccatctttgttttagactatagactgtaaacccggctgctcccaaarttggttcagtctatggccaggaatgggcaagaacagcttgggggctggaaacaaaatggagttgtttgggtcaaatctctttcactctctcagtgacagttttgcattgacagtttcaaaagctgcctatcacgccttaaaaaatatcttgtacacttgtggttaagtcataacctaattaaggctcattggtttcacccagaagggtactttttgtaaagttcaaaaggtgaaaatctgaactgcttggtgtggctaaagtcaagtaacaagagatataaaaggatttttttaaagaatgcacagcttaattaaaagtagatattcaagttttaggtatattttaaaggtctttatgtttttcttttctcgaatcttgtttttctagaaaaaggctcttttcttctcagttaactgaattatttttctccattttttgtcttaccactcttaatgcatgcataaaaggccctaaaataacttctggtagtgtag

SEQ ID NO: 955694 - DNA, 462 bp, Homo sapiens
tttttggtggaacagagtttcatcaaagcgaatccaaaaggcctatgtaaaagtaacattcttgctgcactttatgcaaataatcaggccaagtataagacttaagtttactgataawtagtttttagcaaaaatgaggactggagagaaaaattttgctccaaagcttatcatacatttgtcattaaatcctagtctcattaattgtttttaagccttttgcctacattttagactaactctgcttattcctgtcaatcaagtggtgatcttctgcaggttgggaaaaaaaaaaaagggatgggtaatgtaaaaatgtgaatcaatatgctagttctgggcaattatcttgcaaattctgccaggtaatgaaagtgagtaaggtgcccataacccggaggtttctttgggaaaataaaaccaaggaacttcatagacccccaaaggggaattctatatctt

SEQ ID NO: 955695 - DNA, 605 bp, Homo sapiens
agcttcataaaaatttttcagcattgtgtgctgggcacttccagttctgtgaactcatgaaagtcaaccaaccaggtctaaagacagagactgcttccacagagaacaggaycacagaagggtaccactctttggagatgctgccaggaagttaaagacacctccaactcttttttttaaaattttttatttttaaatcttctacctccaacctgctggctctctctgtactaccactctagaagacaggatgggatagaagaactgtgtgtattaggtctgtctctctacaaccccagagactgagtagcctgcttggagatagatccgtgattagaggaaattttcccttgtcttctttttctcaagtgtgtatttctttgctccagattcccatcttcctctctactttgaatattaagagctaagcttaggtgattttgtactactaaaacaataaagatgtacaactcaatatccagtttaaattgaagaaaaatacaacaagactaacttactgttttgctggacacaaaatccatagaaaacttgtcattgtaacactgagggagagacagctttatctatgtaaaccactgacaaat

SEQ ID NO: 955696 - DNA, 748 bp, Homo sapiens
caaatttaacattattcttaagggccctaggatattccaaatggtaaatgagcactggcttcagcttgccaggcactgacttctcctctctagctatagaagtcctagatggtgtcttcttccaatacaagactgtttaatgcacactgaaaatctgttgtttagtgaggccaccttcgtcaatgatcttagctagatcatctggatcacttgctgcagcttctccatcacacttgctgcttcagcttgcactttcacgttatagacatggcttctttccttaaacctcatgaaccaacctcggcctcttcctaagctttcttctacagcttcctcacctctcgcagccttcatagaactgaagacagttaggccttgctctggatcacgctttggcttaagaaaatgttgtgactggtttgatctcctatctagcccactcaaactttctccatatcataaataagcctgttttgctttcttatcattcctgtgttcagtggtgtagcatgtttaatttccttcaagaactttacctttgcattcacaccttggctaaccatttggtgcaagaggcctagctttcagcctgttttggctttcaacacaccttcctaattaaacttaatcatttctagcttttgatttaaagtgagagacatccaactattcctttcactcgamcactttgaggccattatagagttactaattggcctaatttcagtatcattgtgtctcaagagtg

SEQ ID NO: 955697 - DNA, 606 bp, Homo sapiens
gatatatcccaaaattactatgcattcaaacaacaatcaggctatttctaggaataaggcaataacaaatcaaaaatattgcatttctataaccaatatattttgaaaatgaaaaactaatgcataaacacacaaatgcagtatttcttaaagtaacaaatttttacgtatttaaatatatgccattatatacacagaatggataaaatttaaaagactcaccatatcgagtgttgaagataatgcagatcatacactgctgattagaaacatataatggtaggccgggctcggtggctcacgcctgtaatcccagcactttgggaggccgaggcgggcagattacaaggccaggaaatcgagaccatcctggctaacatggtgaaaccccgtctctactaaaaatacaaaaaaaaaattagctgggcgtggtagccggcgcctgtagtcccagctactggggaggctgaggcaggagaatggctgaacccgggaggcggagcttgcagtgagccgagatcgcgccactgcactccagacccggcggaagagggagaytccgtctcaaaaaaaaaaaaaaagaaaagagacatataatggtacaac

SEQ ID NO: 955698 - DNA, 701 bp, Homo sapiens
agcaatatacttttactgtcctacctcaggggtatatcaactctccagcttttgtcataatctgattcagagagacsttgatcagttttcacttccacaatatatcacattggtccattacattgctgacattatgctaattggatccagtgagcaagaagtagcaaacagactggactgattggtgagacattagcatgccacagcattgaaaataaatgcaactacaattcagggactttctacctcagtaaaatttctaggggtccagtggtatagggcatgttgagatattccttccaaggtgaaggataagttgctgcatttggccccttctacaaccaagaaacaggcacaacacctaatgggcctatttgcattttggaggcaacacattcctcatttgaatatgttcctctggcccatttattgagtgacccaaaaggctgccagttttgagtggggtccagaacagaagaaggctctgcaccaggtccaggctgctatgccagcttctctgccacttgggccatacgacccagcagatccaatggtgcttgaggtgtcagtggcagaaagagatgctgtttggagcctttggcaggcccccataggtggaccacagcagaggcctctaggatttttgagcaaggtcctgccatcttctgcagataactaatctcattttgagagacagctct

SEQ ID NO: 955699 - DNA, 576 bp, Homo sapiens
atgtgagtgctcagcaacaggttacctcagcagaggaggattttaataatcgagtggataggatggcctgttctgtggacaccacccagcctctttccccagccacccctgtcatcacccagtgggcccatgataaaagtggccatggtggcagtgatagaggttatgctcagcaacatggacttctactcaccaaggctgacctggctacagacactgctgagtgcccaatttgccagtagcagagaccaacactgagccctcaatatggcaccgttccttagggtgatcagccagctacctggtggcaggttgattatattggacctcttccatcatgaaaagggcagaggtttatcctcactggaatagacatttactccagatatggatttgcctatcctgcacacaatgcttctgccaagactaccatccgtggacacacagaatgcgttatccaccgtcacgrtattccacacagcattgcctctgaccaaggcactcactttatggctgaagaagtgtggcagtgggctcatgctcatggaattcactggtcttacgatattccccatc

SEQ ID NO: 955700 - DNA, 589 bp, Homo sapiens
ctttttatttctttcaagaacttttcctttgcattcacaagttggctgtttggtgcaagaggcacctatagcttttggcttattttggcttttsacataccttcctcactaagcataataatttctagcttttgatttaaagtgagagatgtgcatgttttccttgcatttgaacatttggaggccactgtagggttattatttggcctaatttaaacagtgttatgtctcagggaatagggcggtctgacgagagggagagagatgagggtatagctgacggatggagcagtcagaacacacacagcatttttcaattaagttcaccaccttctatgagcgcatttgtgatgccccagaacaatgacgatcgtcacatcaaagctcactgtgatgtaataatgaaaaagcttgaaacattgtgagaattatcaaaatgtgacagacacgaactgagcacatgctgttgggaaaatggtggtaacagacttgttcaacacaaggttgcttcaaaccttcagtttttaaaaaacgaggaatctgcaaagtacaatacaataaagcaaaataaaacgagttatgcctgtat

SEQ ID NO: 955701 - DNA, 596 bp, Homo sapiens
ggctgtttgtacttctttttttgagaaacatctgttcatctcctttgcccagtttttagtggggttgtttkttttttcttgtttacttgtttgagctacttgtagattctggatataagtcctttgtcagaggaataatttgcaaatatcttctcccattctgtgggttgtctgattattctgttgattatgtctcttgctgtgcaggagcattttagtttaattgagtctgtttgtctgtttttgcttttgttgcttgtgcttttgggtttcatcataaattctttccttagaacaatatccagaagagttttttctagattttcttctagaatttttatagtttctagtcttatgtttaggtcttcaatccatcttgagttaatttttttatatagtaagagagagggatccagctttatccttccacagatagctagccagttttcccagcatcatttattgaaaaagatgtcctttccccattgtttatttttgtaaactttatcaaagatccattggttataggtatatgactttatttttcggttctctgttttacttcactgatccatgtaccatttttgtgccagtac

SEQ ID NO: 955702 - DNA, 636 bp, Homo sapiens
tcactttgaactccttcaggctgagagtgtgatttctggaagagtatttatcacttcacagttcctctatgaataamccgtttgggcaagcaagggtggtgggggatgtcctatagagttcattatacagagattttcttttttaggaaagaaatgcacatggaggctccaataaggcaataaaagcaaatacaccttagctctagacttgtgcttctaaaactttaatgtgcatacaagtcacctgggatcttgttaaaaggtggatgctgattcatttggtctggagtggggcctgagactcggcatttctaataagctcccaggtgaagcagttaccactgatccaaggaccacactttgattagccatgcttgagaccaaggcattccttaaaataagttgcttctgctccagactttctgccatcattctcaattactgaatgcaaatggcctgtgaggagcagaagtctcacccaatatctaatcttcaggtgatacacagagctgaaaatcagccctcggagagtgcttttttttcatccacaaaaaagtgtatatttaatggacactgttctgaaatgtggattttcatttttgattgctttcaatggaaaaggaacaccgcaatggc

SEQ ID NO: 955703 - DNA, 580 bp, Homo sapiens
ggaccccttccttacaccttatacaaaaattaactcaagatggattaaagacttaaacgtggctgggcrcggaggctcatacctgtaatcccagcactttgggaggctgatgcgggtggatcacctgaggtcaggagttcaaggccagcctgaccaacatgcagaaaccccgtctctattaaaaatacaaaattagcctggcgtggtggtggatgcctgtaatccctgctacttgggaggctgaggtaggagaatcccttgagcccaggaggcggaggttgtggggagccgagatggcgccattgcactccagcctggacaacaagagtgaaactccacctaaaaaaaaaaaaagacttaaacgtaagacctaaaaccataaaaacaatagaagaaaacctaggcaataacattcaggacataggcatgggcaaagacttcatgactaaaataccaaaagcaatggcaataaaagccaaaactgacaaatggaatccaattaaacaaaagagcttctgctcagcaaaagaaactagcatcagagtgaacaggtaacctgaagaatgggagaaaaatcttt

SEQ ID NO: 955704 - DNA, 580 bp, Homo sapiens
ggaccccttccttacaccttatacaaaaattaactcaagatggattaaagacttaaacgtggctgggcgcggaggctcatacctgtaatcccagcactttgggaggctgatgcgggyggatcacctgaggtcaggagttcaaggccagcctgaccaacatgcagaaaccccgtctctattaaaaatacaaaattagcctggcgtggtggtggatgcctgtaatccctgctacttgggaggctgaggtaggagaatcccttgagcccaggaggcggaggttgtggggagccgagatggcgccattgcactccagcctggacaacaagagtgaaactccacctaaaaaaaaaaaaagacttaaacgtaagacctaaaaccataaaaacaatagaagaaaacctaggcaataacattcaggacataggcatgggcaaagacttcatgactaaaataccaaaagcaatggcaataaaagccaaaactgacaaatggaatccaattaaacaaaagagcttctgctcagcaaaagaaactagcatcagagtgaacaggtaacctgaagaatgggagaaaaatcttt

SEQ ID NO: 955705 - DNA, 637 bp, Homo sapiens
atgtaccaccaatgggccaggtgactaatccacccaacctgtcatagccactgccaacaccatcataaactacttgggttccaataggttgctccaccatcactactgccrttgtgcacatcataaccactctctagagactcaagaagtcaccaacatgcccagattatcattgctactaccagcaaatgagcaagccacttagaggaccaggaatcagcccacctgaacctacatacacagatgccaacatatgccaccctgaggcccaaatacaggcatgttcaacccaccactgacactactggcacctgaagactggcccatcaggcatacaagaacttcaccacagcctccattaataactatactctaagccactgagttcatcacaaatactactaacactgtttatagctgaaaataatggctattactaaaaagacaaaaaataacagatattggtggggatgtggagaaaagggaatacactgatggtgagaatgtaaactattatagccactatggaaaacaatatggagatttctttaaaaactaaaaatagaattaccattcaattcagcaatctcactactggtcatccagccaaaggaaaaaaaaatcaatatatcaaatg

SEQ ID NO: 955706 - DNA, 574 bp, Homo sapiens
gcagtcacagatggcctagtctcattggcaagcccccttgcctgattgctgtaatgttctrtgtccttgaccctgcttgagcccccacacattctcatttctcctccctacttccttattctccctttaaaacacccagtcacctctacctgaattggagttgagctcagttctatactgaagtctctttctctcactgcagttgtactgggtaaaatctgtctttactgcctttaaccagtgtctagcttttttttttttttttaaacaccatccaacaaaaaagtttgagtgtctccataggccaggcacttttacatattaggtatagagcagcaaataaaacagacaaaaactgcatccttgaggaacttacagtgtaatggaatgaatcagatgaggttaagtacttaatatatcaggtatggatactgctatggagaaaataaatcagagatgggggagcaggagtgggttatggggaattgctatttcaagtagtgtggtcagggaatgcctcactgaaaggagatgttgagcagagccctaaaggagatggaagagtgagccacct

SEQ ID NO: 955707 - DNA, 575 bp, Homo sapiens
caaatgacatgatttcattcctttttatgtctgtggtaatttcttaaaataagaacaatgaagtttgctgcatcaattgattcttcctttaataaaagatttctatatagcacgcaatggggyttgatagcattttacccacaataaaacttctttcaaaactgtagccagtcctttcaaatccagatgctactttatcaactaagtttatgtaacattctaaatcctttgttgtcatttcaacaatgtttatagcagcttcatcatgagtacattgtatttctttgcttgtccgtaagaagcaattcctcatccattcaagtttatcatgagatttcagcaatttagcctcgtcttccagctccacttataattctagttctcttgattcttccaccacattggcagttccttcctccactgaagccttgaacccctcaaagtcatccatgaggattggagtcaatttcttcaaaactccttctaatgttgctattttgacctccttccatgaaccatgaatattctgaagggtatcctaaaatggtaaatcctccccaaaagttttcaattta

SEQ ID NO: 955708 - DNA, 604 bp, Homo sapiens
atataattacacaggtaaatatttcaataygtacactaaaagataaggggtatgtaaaaatatatactcataataccattttatgtctaacattagcaatgattctttaatatcatcaaggatgcaggacatctaaaaatttatagtggtctcagaatgtcataattttttaaatagttcatttgaatcaggatccagtaagttccccacatcgtaattttaatgtatatgtttcttctccaacttgttttcttccttttgtaatttatttgttggaaaaaaaaacaaaacaggttgtttgcctgtagtgtttcccattctgggttttgctgattgtacctctgtggtacagtttaacatgttcttctgttttctgtagttcctgaaaattactagttgtaactagaggtttgatcagattcaggtttaatttttttattttaacaagacaactttataggtggcactgtgttcctcctcagtaggtacataatctctacttgtttttcgtgatgttagcagccattgatgcttaaagccttaattcattgtgggctgcaaaatggtaatattctaattctatcacttgtctggaatttttttc

SEQ ID NO: 955709 - DNA, 800 bp, Homo sapiens
gaaaagcactttgctgaaacctctctaggcataaaaccttcagttttatggaaagatgtcaacggtaatgtacggtgtggtccaagtgaattattaacgtggggaagagggtatgcttgtgtccacacacyctcaggtcctctttggattccagcatgacacatcaaaccatatcacagcgtggctaggacccaacctggtaccagaaatgaaggaactaaccctgcaggacccgcagccctggacaatgtggcttcctcggatgacacaagccccggacattacctgggggatgctgaagaggacaactcaggaggctgaatgaatcctgctcctgacacagacaccattcactccagataatttgcttcttgctatgctttctgttgtacattgcaaatcacttagggtattgttccttttttatgctctcgctttgtctgcaacctgtacctgctaaactctactgggctcatatcttagatctgcctctctttcgccctgtcacttgggcagacactccctttccagcctttaataacgtgattgcttggctaggagggttagatttacacccaatggggtctctcaataatggcacacattggactaaggtgccagataacactacatatcactccactatccttccactgtgtgtaagttataaaggttctaacccttaatgtgtacctgcccaaacccaattgtggctacatcatggcaaaagaaatgccttaacagtcttagctgcaggcagcctcaaactgggtaatgcaattaatgccgctttcccaaac

SEQ ID NO: 955710 - DNA, 764 bp, Homo sapiens
ggcacacattggactaaggtgccagataacactacatatcactccactatccttccactgtgtgtaagttataaaggttctaacccttaatgtgtacctgcccaaacccaattgtggctacatcatggcaaaagaaatgccttaacagtcttagctgcaggcagcctcaaactgggtaatgcaattaatgccgctttcccaaacattccttcctgtgctcacaatagcaaagacttggaaccaacccaaatgtccaacagtgatagactggattaagaaaatgtggcacatatacaccatggaatactatgcagccataaaaaatgatgagttcatgtcctttgtagggacatgaatgaaattggaaatcatcattctcagtaaactatcgcaagaacaaaaaaccaaacagtgcatattctcactcataggtgggaattgaacaatgagaacacatggacacaggaaggggaacatcacactctggggactgttgtggggtggggggagggggaagggagagcattgggagatatacctaatgctagatgacgagttagtgggtacagcgcaccagcatggcgcatgtatacatatgtaactaacctgcacattgtgcccatgtaccctaaaacttaaagtataataataaaaacaaaacaaaacawaaaaagccaggaaagtaatgaattccactttagctgggaggtctgtcatggggaacaagcctatagcctccaactaggcaattataacatcttaga

SEQ ID NO: 955711 - DNA, 677 bp, Homo sapiens
ttagtgtatgtttaaagttctcttaactgtatctcgcaagggctttatttttagttacaaaatttttataagttgttttggccactactagaagcagcctttcagggaggtagcaaaggcatttttagggaacatttttaggagtcttcatctgggaatcaccccaagcagggagctcctcagaaacattctcatgccccggaccttcgtgctcaccacgcttgactgtgtagggagtttgagataaaatggtctacagtcattcatttcgggtaccttcctctggactctacatttctggtcacttttctgtcatcacccagcttcttaggtcagtacccggtgatactcatggtgatccgggaaggctggaccagggaagtggaggacaggctgtgctgatggtttattaaagtctgtggcttcttactcctccacaagactcctcatcagagggtgcggcttgggtcatgctgggcactcagcagctttgtggtgggtatcggtttgtgcttcctcccctttgctttcgattcaatgctttcctgttgcagtctgagcagctctatttaaccgcagcctcacagcaactaccactgcatgcaaactggatccatctaggggcaagtatagggcaaccagagkgtaaggggttgagaggtaagaaaggagactgc

SEQ ID NO: 955712 - DNA, 622 bp, Homo sapiens
tagaaattcaagcaggctttgaaatttgcatacctaaaaaggaagcaagtctgatagccaagacaatgggaaatggcctcaaaggmatttaggggatctaagaggcagccccttccaccacatgcccacaagtttaggaagacagaatggtgtcctgggccaggcctgaagccccactgccctgtacagcctcaggaaacttctccctgcatcccagacactccagctccagtctcagctgtggcttaaagggcccagttgcaactccagccactgcttcagagagtgcaagctgtaagccttggagacttctatgtgttaatgttgtgggtgtgcagaatgcaagagatgaggcatgggagcctccacctagatttcagaggatatatctgaaaagcctgggtgtccaggcagaagcctgctgagaggggttgtgccttcacaggaaacctctactagggcagtatggagtggaaatgagtggttggagcccccacacagtgtcttcactgggtcactgcctagtagaactatgagatgaaggccaccatcctccagatcccagggtggttgagccaatggcacatccatgtgcccatgtgccctagatgtgaggcatgaa

SEQ ID NO: 955713 - DNA, 574 bp, Homo sapiens
ccagaggtacatagaggagctgacaccatttcttctaaaactattccaaataatcgaaaaggagaaactcctccctaactcattttacraagccagcatcatcctaataccaaaacctggcaggaatacaacaaaaaaagaaaacttcaggccaatatccctgatgaatatcattgcaaaaatcttcaagataatactagcaagcaaaatccagcagcacatcagaaagcttatccaccatgatcaagtcggacacatccctgggatgcaaggctggttcaacatatgcaaatcaataaatgaattcatcgcgtaaacagaactaaagttgaaaaacacatgattatctcaatagatgcagaaaaggccttcaataaaattcaacgtggcttcatgctaaaaacactcaataagctaggtattgaaggaacataactcaaaataataagagctgtctatgacaaacccacagccaatatcatacagaatgagcaaaagctggaagcattccccttgaaaactggcacaaggatgccctctctcaccactcttattcagcatagtagtggaagtt

SEQ ID NO: 955714 - DNA, 541 bp, Homo sapiens
tgggccttttttggttggtaggctattaattactgcttcaatctctcaccactcctattcaacatagtattggaagttctggccagggcaatcaggcaagagaaagaaataaagggtattcacataggaagagaggaagccaaattgtctgtttccagataacatgattgtatatttaaaaagctcattgtctcagcccaaaatctcgttaaactgataagaaacttcagcaaagtgtcaggatacaaaatcaatgtgcaaaaatcacaagcattcctatacatcaataatagacaagcaaagagcaaaattatcagtgaactcccattcacaattgctacaaagaacttacaagggatgtgaaggacctcttcaagaactacaagccactgctaaaaaaaataagagaggacacaaacaaatggaaaarcattccatgcacatagataggaagaatcaatatcgtgaaaatggccatactgcccaaagtaatttatagattcaatgctattcccatcaaactaccattgactttcttcac

SEQ ID NO: 955715 - DNA, 759 bp, Homo sapiens
tgggtagcccctttctgcagccaaggtgttccgatgagtgttcagccctcagcagagaggacgaggcactggtgttggtggctcctctctgctcctggttgtcccctcatctctgcagttcttagcagagaggccctggagtgagttgctcctctctgcaggcaggtcatccctggagtgggaagctcctctctgctgctggtcacctgggtgtctgctctgctctgctgagtccagggtgtttatgggcttgagtggggaagtgcatactgactggtccatgggcagccatgtaggggcccaggaaaaagcactatgagttccccctcctgtaggcaggactggtagcctggcccccaggtcacaggacttccttagcttgaaggtggggcttcaccgggactgccctcttctgcccaggagccattgcctcctgccaccaacatccatggcactcaggttacttgtgccaacgggcatctgcaggccagcactgagctgccctcagcaccccctcagcttccctcctgtgctcattggtgcccaaagtctggagggggacgaggcagcagggggctggcatgtcagtgcgtcctgagtgtgcacccacccggcagggctgccacagcatccaggctcagccccacccttgctccrtgatcggagctggtgctggaagcggggagagggcaggcagcagcagcaggcacttctgagcctgcagggaggaggggggccttccaggcccccaagagcaca

SEQ ID NO: 955716 - DNA, 577 bp, Homo sapiens
ttctaacagccctgcagtcaggaacattaaaagtagttataggctcatttttattccaaaaattcttagcactgctaaatcaacatcccccttttcaagcccagaaacaaaggtaacaactgaccamtttctagaatataagttctcatataaattctgatataaaagtatattcaggaggtagcttttgttgaaaataagggtaatgtcatttctaagatgcatgtgtagtatgtaaaatatatgcagtgaaagaaactaaaagaagcatattttattctattttatcgttttgcttgatgcttcagtgacaattatgttgaaaactttctcttgcaattcatctgtgtaaaatatcagtaagattacaccttcaggatgaaatcaggagaaaaatcttttcatttttactactttaagatgtatttcttgtcccagagcccaccatttttcaaggtatgtagtttgaagaaatagcattaacaactttttgcataaaaaaactttcatgaatgcaaactttgagtgattttctggtaaatctaatttatttaaattagctttatttaattaccca

SEQ ID NO: 955717 - DNA, 753 bp, Homo sapiens
atcccagtactttgggaggctaaggtgggaggattgtttgaaccagaagttcgaggccagtgtgggcaacatggcaagacccccatctctaaaaacattattttttttttwaaaaaaaaaaaaaaggacagtagtgtgtgaggtgggcctggtggctcatgcctataattttagcactttgggaggccaaggcaggaggactgcttgagctcaggagtttaagatcaacctgggctacacagtgagaccttgtctccacaaaaaataaacaaaattagccacgatggtggtatacacctctggtcctctactcaagaggctgaggtgagagcatcacttgagccccagaagtcaaggctacagtgagctatgagccattattgtgccaccacactccagcctgggtgtcagagcgagagcttatctctacaaaaaaaaaaagaacaatagtgtgtggaagaagctcattgttctagggaagcacagagtgcaaggcaactccatcaccccatggagaggactttccacagcctatttctttgcactgaatgattccactcttaggatgaaatgtgcagtcttcttgatccaatattgtattgatttgaagtgtccattccaagtggcttccagaaggaagtaaaacaactcaaattaaaaaatatctccattctttcttgcttatgttctttgatcaagttgtctttgtgctcttatgaaatggctacagcccagtcctcacagcccaacata

SEQ ID NO: 955718 - DNA, 633 bp, Homo sapiens
catttaactctcataataactttatgaggtaagtactatttacatccccattttgcagatgaggaaactgagtcacaggctgactagcttgtcccagggcacacctctttgtaagygatggggccagattcaaacccagacgatctggctccagagtctgtgctgtaatcacagtcctctgcttgcttccctctacctctattgaaaagtaaagacctttctttcctgggagaatagcttaatcttaataagacttccctggcaaataagggaactgctgtcctgtgagtcactgttatttgtaattaattgtaacctgctgagacaacaggcaaagaaacatctaggcagaatgggcggtgtgagctctgcagcccagagaaggtgactccaggaggggctgtagacttgaatccaaccaggctgaggtccaggttactcacccactggcagaacccaagtgactctgcctcccctgaagctactgtaattgcctcacacccacctgagatggtctttcctttgcattctactacaggagctgcttcatctgacccaagctggcctggagaaaggaggaagaggcaaggtaggaagtggcctggccccctgctgctctgccccagagtgcag

SEQ ID NO: 955719 - DNA, 657 bp, Homo sapiens
gagccagtgtcagtatcaacagattcccacaaaccactatccatatcttctgaaaatatcaaattcataatttgaacacatttccagaaagaaaacmcatatcctagataaatttactagataatgttattaaatatttatggaggaaataacataaatcttcacaaacttttccaaagaatagaactttctaatttgttctatgaggccagggttttctaacattatgagaaaataaattataggacaatgtctttcaaatacagttgcaaaaattctaaagaaaatatcaagaatctatcaaaacatcatgttgtacaccataaatatatataatttttatttgtaaattaaaaaataaaaacatcaacaatctgaattcaacgagtataaaaatgacatgtcagaaaaagtgcaacttatgttaggaatccaaaattaatttggcattcaaaaccaatgtaaattagcatattaatgaaataatagaagaaaattacataatgatctcaatagatgagaaaatatttgataacaatttaatgttaatagtaattgtggactaaattcttagcaaacaatagaaggaaaaaattcttaatgtgataaaaatgtctatacatacttagaaaataatcacaaaattatagaaactct

SEQ ID NO: 955720 - DNA, 657 bp, Homo sapiens
gagccagtgtcagtatcaacagattcccacaaaccactatccatatcttctgaaaatatcaaattcataatttgaacacatttccagaaagaaaacccatatcctagataaatttactagataatgttattaaatatttatggaggaaataacataaatcttcacaaacttttccaaagaatagaactttctaatttgttctatgaggccagggttttctaacattatgagaaaataaattataggacaatgtctttcaaatacagttgcaaaaattctaaagaaaatatcaagaatctatcaaaacatcatgttgtacaccataaatatatataatttttatttgtaaattaaaaaataaaaacatcaacaatctgaattcaacgagtataaaaatgacatgtcagaaaaagtgcaacttatgttaggaatccaaaattaatttggcattcaaaaccaatgtaaattagcatattaatgaaataatagaagaaaattacataatgatctcaatagatgagaaaatatttgataacawtttaatgttaatagtaattgtggactaaattcttagcaaacaatagaaggaaaaaattcttaatgtgataaaaatgtctatacatacttagaaaataatcacaaaattatagaaactct

SEQ ID NO: 955721 - DNA, 634 bp, Homo sapiens
cgtgtatgtatgtttgtgtttgtgtgtttatacaccaagtgtaaaataaaataaagtacaagtcataaaattggacatgttacggatagttttgtattgtcataaacacatttacactcaataaatgtggaacgaataaatcaaaggacaaaaagctttgaatacctaatggaacctgagggtgttcatcctgaaggtaactagaagatataagttatttctctctttgtggccagaaaggctagaattccttttatagacagagcaatgttactagttttcagacagatgggaattgaaacaacttttatctttaaagacaaaatcctacccaacattgtacatatttaaatttatgtgaagttgcccacaggcagtggaatgagttaatcaaatgataaagaaatgtcaaaacatcttatacttgtatataaacctggtagttcagtatcctataaagtacaaccaatccatctgtccgaaagcctaataccactatttttggtgacactaaatgctttaaattttgtcagcaagatttgaggcaatgtcaaatgctagagtgatcaatatcaaatrctagagtgataaaaccccaatattattatatataattatatgtgtgtatgtatat

SEQ ID NO: 955722 - DNA, 796 bp, Homo sapiens
tcttgtcacaggactgcgtgtggggctgcacacactggcactcctccgagcagcccggcccaaaggcccacggcgggcaggctgcacccacagaaccgttgaggsgggctcccgtctgaagccccaccctcccagaccgcttccaccagccctgggtcagccaggacgacagccaagatcatgtagggagctgtcctcctccacctctccccctgcagcccaccgccccttccctgagtgtctgaaccccagggatgggtgaccccaccagggactcagagcttggccttgctgccaggaatctccaaaagccaagataggcctcatcccccggaggcttctgcaaaaggcctggccctgccctcatctgcagccctaccacccatcaaggctgggaggcacaaggttggggaccatccacccagacgccctggatgccagcacagtcacagtcgagaggatgtggcttggagtccacagactcatggcggaccccagacctacatcccagtgggtgacctggctgggccccgatagcctcatcctaacccagactacaggtaacaggacatggaccatcccttccacccgctgccaccaccgtggacactggaaggggcagtgagactcactgaggtggcagaagcggccgtagagccctgggtcgcagaggcaggccccgtagaggcggtggcaccggccccggttggcacagttgcatttcttgcgacagtgcttgccatagtagcccttggggcagcctgggggcagcggggctccatgtgaaccttggtgg

SEQ ID NO: 955723 - DNA, 672 bp, Homo sapiens
gctccgttgcccaggctggaatgcaagggcgccatctcggctcactgaaagctctgcctcccgggttcacgccattctcccgccttagcctcccgagtagctgggactacaggcacgtgccgccacactcggctaattttttgtatttttaatagagacggggtttcaccgtgttagccagggtggtctcgatctcctgacctcgtgatctgcccccctcggcctcccaaagtgctggaattacaggcgtgagccactgtgcctggccaatttttctatttttagtagagacggggtttcaccatgttggtcaggctggtttcaaactcctaacctcatgtgatccacctgcctcggcctcccaaactgctgggattacaggcatgagccaccgcgccagccctcattgtggttttaatttgcatttttctgatgactaatggtgttgagcatcttttgatgtgcttactggccatccatataccttttctgttcctcgttattgccactcttccacatataggcttgtgatggttaatattgtgtgtcaacttgattggatcgaaggatgcaaagtattgtgcctgggtgtgtctgtgaggatgttgccaaaggasataaacaattgagtcagtggactgggagaggcagacttaccctcagtctgggtgg

SEQ ID NO: 955724 - DNA, 557 bp, Homo sapiens
tccaactgccctccccaaccctgcccccacagcccccggccaaaataaaacacaacatagaaagcttcacttaaagactccattytggtgtacacaaatgaaagttggacaggtggaaaccttaatttggaagcctcttgactgaatgataaaacaggccagaaattgattaatctctttcaactacaaaatggaatgcaatgtgctattaagcatattaaagcaacaatttcatttcctccagtgcaaactaaggaggaaaagctgcttttccagaaaattatctattttgtaggcataggaggtttcagttgagtgacctgccttaccctttttggagtgggtaaattatcgtaagactcacaacaaaacatccaaatgtgttccaatgatatttcacatagctttgcccacggtagaggtaaacagaagtcacatttctgcacttatggaaacctttctgtgttaaaaataatggaaaactgaccttgaagaatatttgtgccttgtaaagtgttagagaatatcattcaggtaaaatagttatagctacatga

SEQ ID NO: 955725 - DNA, 628 bp, Homo sapiens
gtggaatgggatgagaacccaagtctttgacacttagtctagggcagtggttctcggagtggggtcccccaccagcagcctcagcaagccctggaaacttgttggaaacataacttctcaggccccactgactctgaaactctggggacagggcccatagtctgggttccactgagtcctctgggggattctgatgtgcgctgaagctgagaaccatcaaccagagtgcttttgtgtttcagcattcactgactggaggcccatgaatgaggcccctcctgagatgtgcctggcaatatcctgctttctaagccataagaggaaacatgacccctcctggcttataggctacatgtgttttatctcaatgaggttgacatccccaagctcagatatgtggaatgacccggcaaggtcacacggcagtgtggtagtttctctggaattagaactcacatcttccaagttttcagccagcattcaagtgcatcttttggacctgatyccccttaccccagcccacctgacatcatagggccctcacccctccctgaaccatgcagaaaaccctgggccacagcactccctgccctagccagcaacaggcttttctccaagagccctggct

SEQ ID NO: 955726 - DNA, 612 bp, Homo sapiens
tgtgcagttgcagacacttcttgttacagatggataaatacatctggtattaaagagactcaggtacaaaaaattaacaaaaggcracttggttaaaatgggtagacttctaatatagctcattctttgatctatctgatttgattgctttggttcatggggaccctgcttagggaacatactccaaactcttcatactatccttctgatagtagtagtctccctatgcactgtattctctcaaatgctttgaatgtttacatgcagccatccgtgaaacgtcaaatggtctctcttggctggaacaacaaaaactcaaagaaatgagtgaccatgaggaccctgtaatccatgaatggcatgttgaaactggcaatgcagaatgatagaaactgaaagtagcactaatgccctaagttttggtcagactctcacctaggggtactaaaggatctcacctaggtgagactgtgaccaaatggggggaattgttaaacaaaaattatgggaggccattgttttggactaagctcctgcattaggccctaacaaaacagaccaaatcaaaatacagtctctgtaatgttaaatgccatattatctaatagatgc

SEQ ID NO: 955727 - DNA, 632 bp, Homo sapiens
gctgtcacagtttcagggtcaaacttggrtgaagcacagcatacgtgtgacatttctgatgtgactgctcctggattcagagtgtgtggcaggtaagtagtggtaactgctggtgtgatgatagacagccacaaggaaatgtcaaacgtctgcagcttgcaacatcttcaagatgtcttggctgggcgcggtggctcatgcctgtaatcccagcactttgggaggccgaggcaggcagatcacgaggtcaggagatcaagaccgtcctggctaacacggtgaaaccccgtctctactaaaaatataaaaagttggccgagcgtggtggcaggcgcctgtagtcgcagctactcaagaggctgaggcaggagaatggcgtgaacccaggaggcggagtttgcagtgagctgagatcatgccactgcactccggcctgggtgacagagcgagactctgtctcaaaaaaaaaaaaaaagacgtcttagaggacccctcaatccccaccttgggaataaaaagaccccaaagaaagagagattttaataaaaaagagtttaggctgtacatgatggtgtcaggcacttcaaactaaaggtgccagacagatgcctctttgccttgcccacccgact

SEQ ID NO: 955728 - DNA, 604 bp, Homo sapiens
gttggagtttgctggaggtccactccagaccctgtttgcctgggtatcaccagtggaagctgcagaaagcaaatattgcagaayagcaaatgttgctgcctgatccttcctctggaagcttcatctcagagggtcacccggctgtatgaggtgtcagtcagcccctactgggatgtgtctcccagttaggctacttgggggtcagagagccacttgaggaggcagtctgtccattctcagatctcaaactccatgttgggagaacaactactctcttcaaagctttcagacagggacatttaagtctacagaagtttctactgccttttgttcagctatgccctgcccacagaggtggagtctacagaggaaggcaggcctgcttgagctgtggtgggctccacccagttcgagcttcccagccactttgtttacctactcaagcctcagcaatggcagatgcccctcccccagcctcgctgctgccttgcagttcgatctcagactgctgtgctagcagtgagcaaggctccgtgggcgtgggaccctccgagccaggcgtgggatataatctcctggtgtgccatttgctaagaccattgga

SEQ ID NO: 955729 - DNA, 669 bp, Homo sapiens
gggatcagagtgctaatgggaactgtgaaattcccttccatgaaarcctttagaagtaaaccaggtagccaggtgcggtggctcacgcctgtaatcccagcactttgggaggccgaggcaggcggatcacgaggtcaggagatcgagatcatcctggctaacacggtgaaaccccgtctctactaaaaatacaaaaagttagctgggtgtggtggcaggcacctgtagtcccagctactcaggaggctgaggcaggagaatggcgtgaacctgggaggcggagcttgcagtgagccaagatccggccacagcactccagcctgggcgaaagagcaagactccatcttaaaaaaaaaaaaaaaaagaaagaaataaaccaggtacctcccccccgcaatctggtgacaatgataatgatagcaaaaatcaaggcactaagctaagtactttaattacattctctcatttatcctcccaataaccctacaaggtaggcatgactataattcccattttacagatgaagacaccaagatacagaggccctaacccttccaaagctccagagtttagtaagtatcagaaccaggttgcaaaggcaggacaccaacctgggatcccagggccttagccagataccccactggggactagatggagacaggcccc

SEQ ID NO: 955730 - DNA, 598 bp, Homo sapiens
  misc_feature 1, 2, 3, 4, 5, 6, 7, 8, 9, 10, 11, 12, 13, 14, 15, 16, 17,18, 19, 20, 21, 22, 23, 24, 25, 26, 27, 28, 29, 30, 31,32, 33: n = A,T,C or G
nnnnnnnnnnnnnnnnnnnnnnnnnnnnnnnnnctctttgtctggattagttccaacgatgctttgttcctgaagtcaggaaataccttgccagtaagggagtgcctttcaaagttcctttgataatggacaatgcccctggccactcagagcctcatgccttcaacattgaaggtgttgagtggtctacttgccccgaagcacaatgtctctaattcagtctctagatcaaggagtcataggacctttaagcctcattacacatggtaccctttgcaaaggactgtcaatactgtggaagagagcccaagagaacatcatgaaggtctggaaggattacaacattgcagatgccattgttgttatagaagaagccatgaaagccatcaagcttgaaacaataagtttctgctggagaaaactgtgtccagatgttgtgcatgacttcacaggatttatgatggaaccaacccaggaaatcrtaaaagagactgtggataaggcaaaaaaggtggaagatgaagggtttcaagatatggatcttgtttctccaattatccaattctatagctaatagacaccacatcagagaaattaa

SEQ ID NO: 955731 - DNA, 569 bp, Homo sapiens
ctgggccattcaactgacacagcagggccagcttttctccatgtcgggaattctttcaaggcccatctcagaatgatgttttggccaaaaaaattgtctggaagaggacagccacttttgtttttacagtgtgatcctatttatgtaaaacttaataagttcaaatagtattatatattgcagacttcatactatacaaaaaaaaaatctcacaggagattgaatttctaaatgttgaaacgaaaaccttaactttaggggaaagtataggagaatattatcaccttgaaactgataaatactaaaatgtaaaacttcagcagaagaaaataaataaaaaagaaccaaccacagtccagaagaagatattcacaacgcacatgactgaaaaaatgatttttatattctcatatattaaaaaacagccactttttagaagtaccatttgatccagcagtctcactactgggtgtctatctagaagaaragaagtcattatacaaaaaagatacttgcacacccatgtttatagcaacacaattcacaattgcaaaaatatggaaccagct

SEQ ID NO: 955732 - DNA, 602 bp, Homo sapiens
atctcattgccacccttttcccaatccaaagcctcctttgtattctcctcttgwatccccccaccttaacccacaagtataagatacctctcctccctccttggcgaccgatcatgcaccccttactatctcattaaaacctaatcccccttaccccgctcaatgccaagatcccatcccacagcactctttaaaatgattaaagcctgttatcactcgcctgctacagcatggccttttaaagcctatgaactctccttaccattcccctattttacctgtcctaaaactggacaaggcttacgagttagttcagaatcttagccttatcaaccaaattgttttgcctatccaccccgtggtgccaaacccatatactctcctatcctcaatacctcactctactacccattattttgttctgggtctcacacatgctttctttactattcctttgcacccttcatccaagcctctctttgctttcacttagactgaccctgacacccattaggctcagcaaattacctgggctgtactgccacagggcttcacagacagcccccattacttcagtcaagcccaaatttcatcctcatctg

SEQ ID NO: 955733 - DNA, 443 bp, Homo sapiens
ctctaccacagtatattttgtcagttttctgttgatggatatttgaagttattttgagtttttggttattatgaataaggtggtaattactatcctcttgcatacatyttttcattattctcttttttcccctggaataaattagtagaatgattgcatcaaatattatgtgtactctaaggcttttaatacacattctccaattgcccctgaaaaagataagatggttccactttaccccctgcaagacttctattagccctttaattttctttttaaagtgtggttctttaatttctgataatagaagaaagttttttcctctttttataattttggtcttccctgaatttgcagacatccattcttactaggtccttattttacacagagttgctaagttttagtctaagagattctccttggtgaagtaaagaggatac

SEQ ID NO: 955734 - DNA, 443 bp, Homo sapiens
ctctaccacagtatattttgtcagttttctgttgatggatatttgaagttattttgagtttttggttattatgaataaggtggtaattactatcctcttgcatacattttttsattattctcttttttcccctggaataaattagtagaatgattgcatcaaatattatgtgtactctaaggcttttaatacacattctccaattgcccctgaaaaagataagatggttccactttaccccctgcaagacttctattagccctttaattttctttttaaagtgtggttctttaatttctgataatagaagaaagttttttcctctttttataattttggtcttccctgaatttgcagacatccattcttactaggtccttattttacacagagttgctaagttttagtctaagagattctccttggtgaagtaaagaggatac

SEQ ID NO: 955735 - DNA, 443 bp, Homo sapiens
ctctaccacagtatattttgtcagttttctgttgatggatatttgaagttattttgagtttttggttattatgaataaggtggtaattactatcctcttgcatacattttttcattattctcttttttcycctggaataaattagtagaatgattgcatcaaatattatgtgtactctaaggcttttaatacacattctccaattgcccctgaaaaagataagatggttccactttaccccctgcaagacttctattagccctttaattttctttttaaagtgtggttctttaatttctgataatagaagaaagttttttcctctttttataattttggtcttccctgaatttgcagacatccattcttactaggtccttattttacacagagttgctaagttttagtctaagagattctccttggtgaagtaaagaggatac

SEQ ID NO: 955736 - DNA, 443 bp, Homo sapiens
ctctaccacagtatattttgtcagttttctgttgatggatatttgaagttattttgagtttttggttattatgaataaggtggtaattactatcctcttgcatacattttttcattattctcttttttcccctggaataaattagtagaatgattgcatcaaatattatgtgtactctaaggcttttaatacacattctccaattgcccctgaaaaagataagatggttccactttaccccctgcaagacttctattagccctttaattttctttttaaagtgtggttctttaatttctgataatagaagaaagttttttyctctttttataattttggtcttccctgaatttgcagacatccattcttactaggtccttattttacacagagttgctaagttttagtctaagagattctccttggtgaagtaaagaggatac

SEQ ID NO: 955737 - DNA, 747 bp, Homo sapiens
gtagtcctagatactcaggaggctcaggcaggaggatcccttgggcccagaaatttgaagctgcagtgagctatgattgcaccactgtactccagcctggrtgacagagacagagagcccttatctcaaaaaatataaaataaaataaaaataaatgtaactaagagaatctaaatgccaggaagagttggcccttaccataatacatttttaaaatacatgaacaagctcttccttaacaatcagaaattctgccttatttgttttctccaatatctcatatttccattgcccttctgctacttaatttattgcaatatggaacttactatcctatcataattttctaaaataaaaatatatatacatatatataaattaaaattgaagccaagcatggtggtatacatctataatcccagctacacaggaggctgaggcaggaggatcccttgagcccaggagttcgaggtcaccttattttcaagctaacaaatttcatgaatgttggcaaaaaacacaagactcctgggtgagagacaagggactttaacactcacggcacaggagacagcaggagcttcatatgcactacagttcctcttgctccccaagtcccatggaggtgacacagagtgacctaggctaatgctgtgcatgtaatgggtttgtgtcatagctgaggaatccagaacttaggaagcccaaatcttttataataggctgaaaacaaacctgctcaatctt

SEQ ID NO: 955738 - DNA, 571 bp, Homo sapiens
atctgatgaacttaatctcccactcacctgaatgactatttctcattttctccgcttctcaaataaccaatatcttctcaccttcctccatctcaattgatagtcttgcttatttcactaaatagtagcaagcagaaaataatttttacatacatctactaccaaatctaccaacctacctgcaactgtacccatatactctgccttccctcctgttacaatgcctgaactgtttgtgccaaccttcctccccacttctgtgcattggatcccatccctttcatcaactcagagacttgacatctgccaattgtgccttccctcattatcaagatttttttttctttcattcgttgaatcattccccttaccacacaaacacattgaattacccctcatcttaaaacaaaaacctcccttgacccctaaatattgctcctgctccaactcaatgtacctgcttgcctttcataaaaactgtctttaacagaactcactttctctttaacagactgcagtcggactttgwctcaactactccatcaaaacagtcccttcaaggtcatcagtt

SEQ ID NO: 955739 - DNA, 410 bp, Homo sapiens
tagcactttaaatatgttgttcccttytcttctggtttgcattatttctgacaagaaatacgtgttcattttacctttgtttgtctctatgtaatgtgtctttttttcccctcaggttttgtaaaggttttctttacaaattttaatttttaatttttaatgtttgtggaaacttaatagggtatgtgtatatatttatggggtacatgagatatttttatacagacattcaatgtgtgataaccacatcatggtaaatggggtatcccctgcaaccgtttatcctttgtgttgcgaacaatccaattatactctttcagttatttttaaatgtataattaaattgttattgactgtagccacctgttgtgccgtcaaatactaggacttattcaatctttctctctgtt

SEQ ID NO: 955740 - DNA, 410 bp, Homo sapiens
tagcactttaaatatgttgttcccttctcttctggtttgcattatttctgacaagaaatacgtgttcattttacctttgtttgtctctaygtaatgtgtctttttttcccctcaggttttgtaaaggttttctttacaaattttaatttttaatttttaatgtttgtggaaacttaatagggtatgtgtatatatttatggggtacatgagatatttttatacagacattcaatgtgtgataaccacatcatggtaaatggggtatcccctgcaaccgtttatcctttgtgttgcgaacaatccaattatactctttcagttatttttaaatgtataattaaattgttattgactgtagccacctgttgtgccgtcaaatactaggacttattcaatctttctctctgtt

SEQ ID NO: 955741 - DNA, 589 bp, Homo sapiens
tctggtcttgggctttttttggttggtaggctatttattactgcctcaatttcagaactcattataggtctattcagggattcaatttcttcctgtttcagtcttgggagggtatatgygtcaaggaatttatccatttcttctagattttctagtttatgtacagagaggagtttctaatagtctgtgatggttgtttgtatttctgtggggtcagtggtaatatcctccttatttctgattgtgtttatttgaatcttctctcttctttattagtctacctagtagtctgttttattaagtttttcaaaaagccaactcctggatttgttgatcttttgaatggtttttcctgtctctatctccttcagttaaactctgatcttggttatttcttgtcttttgctagctttggggtttgtttactcttggttctcaagtccttttagttgtgatgttaggttgttgactcgagacctttgtagctttttgatgtgggcatttagtgccataaacttccctcttaacactgctttagctgcatcccagagattttggtacattttatctttgttctcattagtttcaa

SEQ ID NO: 955742 - DNA, 589 bp, Homo sapiens
tctggtcttgggctttttttggttggtaggctatttattactgcctcaatttcagaactcattataggtctattcagggattcaatttcttcctgtttcagtcttgggagggtatatgtgtcaaggaatttatccatttcttctagattttctagtttatgtacagagaggagtttctaatagtctgtgatggttgtttgtatttctgtggggtcagtggtaatatcctccttatttctgattgtgtttatttgaatcttctctcttctttattagtctacctagtagtctgttttattaagtttttcaaaaagccaactcctggatttgttgatcttttgaatggtttttcctgtctctatctccttcagttaaactctgatcttggttatttcttgtcttttgctagctttggggtttgtttactcttggttctcaagtccttttagttgtgatgttaggttgttgactcgagacctttgtagctttttratgtgggcatttagtgccataaacttccctcttaacactgctttagctgcatcccagagattttggtacattttatctttgttctcattagtttcaa

SEQ ID NO: 955743 - DNA, 612 bp, Homo sapiens
atgccagtatctttttctcaatttctatccatacattctgggctccctgtggacccagctaatgttagtgtattattcacataagcatcatttattggataaaaacaatgtgcattaatttgaagcaaaaaataattaagaattgagggagaggagaaatgtgtcatatgacagtcaagtttattttttacaactattttcttatgatttccaaaattaggctcatctctctcataatagtctatcagttaaaaagaaagcatttcagaggttatctgctctgaagccgtaacaggaggatggaaaaactgtggcccaggaaagtcgcatgcttctccaaaattgacacctacttagaagcaaaacttggactgaaacccaataatcttgattcccagtttcatgctctttcaatctactctaccacttatgatagtgggaagcagagactatattttaaactggaaagaaccttggagtttacacaaaacataaaattcagaaccatttattaaacataacatccttatgaagtagatcrtatctgcagtttacagataagtggaatactcagatgggctgagtaacttacctgagatcacaaaaagtggt

SEQ ID NO: 955744 - DNA, 503 bp, Homo sapiens
attttcccgggtttctaagctgggtttttccgagttccaaacacggcacagtgtatcagtttctgtgctggttacaagcctactggttatccctatcgagtatggcaggcagtgagggacttcagaggagtaygtcttaggacaagtggcatagtactgacattatttccgaagggctacatttcaagtgcttggggagactactgccacataactgaaaattagaaaccgacactgcagaaaaatacttggtccttaaatgtggcatttggatggattaaggacttgccgaaacgtaaaactgacagacttggggggggggatgtcccaattagcacggcttctgtatgcaacgagtcccatactttgttaaaggaagaaaggaatgtgagttctcctaatctgttaagtatctttcggtgtaagttctgacaccacaatgttaaaaaagtcggatctcaaaaaccaactgctccaagcgaagtgcacagctgtcttgccta

SEQ ID NO: 955745 - DNA, 556 bp, Homo sapiens
tggtttgtgtattcattatctattactgtgtgacaatttacttcaaatgtagcggcttaaaaatataatcagcatttgggttttttttaacacagtttctgtggattgagtatgcaaggaagaattagctgggtggttctgctcaaaacctgttctcagaacagttttgtggttgcgaatagctgggtggttctgctcaaaacctgtcatgatactgtagcctagggttgcagtcacctgaaagtatgacggaggctagggaatcttatttgtaaatggctcactcacacagatagggagctggtattggctatttgtagaagacctgagttccttaccacaaggaccgatcatcggactgcatgacacagcagttggctttcctcagagtggtctaaaagacagcaaaacaaaagctgcaatggcttttaatgcttaccctatgaggtcacaygctgttatttctgttatatcttgttggtcacacagttcagtcctattcagtgtgaatacaagaaggtaggaattattatggccactttaaagtctggctacc

SEQ ID NO: 955746 - DNA, 573 bp, Homo sapiens
actatgcagccataaaaaggaacgagatcataacctttgcagggacatggttggagttggaagccattattctcagcaaactaacacaggaacagaaaaccaaataccacattttctcacctataagtgggagctgatcaatgagaacacatggacacacatggtgggggagcaatacacactgggcacctgggggctggggaggtgggggatggaagagcatggggaagaatgacgaatagatgctggatttaatacttgcatgataggacaatctgtgcagtaaagcaccatggcacacatttacctatgtaacaaaactgaacatcctacacatgtacccctgaacttaaaataagaatttgaacaacttgccaaatattacacagggaataaatttcagagaccacattcaaacccatgcagtctggctgcagagtctgagagcttaaccycctcatattgcctctttgctggttattatgactatgtaacaaattactcaaaacctccgtgacttaagaaaacaactacacttattttgctcacacatcttcaatgtggatagggatt

SEQ ID NO: 955747 - DNA, 634 bp, Homo sapiens
gcctcagcctcccaagaagctgggattacaggcctgcaaccccatgctctgttacttttttttttttttttttcatttttagtagagacggggtttcgccatgttggccaggctggtcttgaactcttggcctcgagcaatccgcccgcctcggcctcccaaagtgctaggattataggcgtgagccacagcgcccggcctaattttcgtattttcagtagagacgaggtttgccctgttgcccaggctggtctgaactcctgggctcaagcgacccacccacctcggcttcccaaagtgctagggttacgggcgagcgtgagtcaccgcgcccacccgggagtctgtatttctaatttgtattcagctctcagcatatcctcaacgtgaccccacccaggttcagggtactggaacctgagcgaggaatgcgtgtgccggggagagtaggtagtgtgaggggccagagtgcaaaggtcagaaggcatctggtggaagcggtgtgcaaagaagcctgaggggaggwccttagatctcggttaccttggcgatctctatcagagggttagagttgccgagaggcgccagctgccgcttcctctctcccgccctccgtttggcttagctcgccggg

SEQ ID NO: 955748 - DNA, 594 bp, Homo sapiens
attttatctcttcctttcccattttttgtttcttcttattaaactagctaggacttctggtataatattaaataagagtgatgagagtggacatctctgccttatttttaatcttagggagaagcattctaaatactactaaatactatgtttgttgtaggttttacgtttaaaactttatcacactgaggaaatttttttactcctagtttgctgagagtttttatgatgaatggatactgaaatttattgaatgctttttctgcgtcaattcatatgatcatgagaccttcttttttaaaaaaattttatttgttaaatttttgattcagagggtatatgttcaggtttgttacatgagtatattgcatgatgctgaagtttgggtttctagcccaggtagtgaacacagtacctaataggtagcttttccatcctttcccccttcctccatcccatccctttttggagtcctcagtgtctaccattcccatctttgtgtctgtgcrtatccaatgtttatgtcccacttataagtgagaacatgcgatatttgattttctgtttctgtgttaatttgcttagcgtaatggc

SEQ ID NO: 955749 - DNA, 602 bp, Homo sapiens
agcttctacctcctgggctcaagtgactctctcacctcagcctacttagtagctaggagtacaggtgcaggccaccaygcctggctaatttttttgctttttgtagagatgagtatctcaatatgttggccaggctggtcttgaactcatggcctcaagcaatcctcttgcctcagcctcacaaagtgcagcatgagccactgctcccatctgccttttttagtgatactttttaaaagtagcttggaagagtgtagggagaattggcctcagagaaagtgagttcaaatcttgactttgccatttattgcctgagtgattttgaacaaatcacttaatctctgcaaggttcaatttcctcatctgtgaaagaagtataatggcagtgtattagtccattttcatgctgctgataaagacatacccaagactgggcaatttacaaaagaaagaagtttaaaggacttacagttctatgtggctggggaggcctcacaatcatgctggaaggtgaaagtcacatctcacatggtggcagacaagagaagagaacttgtgcagggaaactccccttttaaaaccaccagatcatgtgagactta

SEQ ID NO: 955750 - DNA, 602 bp, Homo sapiens
agcttctacctcctgggctcaagtgactctctcacctcagcctacttagtagctaggagtacaggtgcaggccaccacgcctggctaatttttttgctttttgtagagatragtatctcaatatgttggccaggctggtcttgaactcatggcctcaagcaatcctcttgcctcagcctcacaaagtgcagcatgagccactgctcccatctgccttttttagtgatactttttaaaagtagcttggaagagtgtagggagaattggcctcagagaaagtgagttcaaatcttgactttgccatttattgcctgagtgattttgaacaaatcacttaatctctgcaaggttcaatttcctcatctgtgaaagaagtataatggcagtgtattagtccattttcatgctgctgataaagacatacccaagactgggcaatttacaaaagaaagaagtttaaaggacttacagttctatgtggctggggaggcctcacaatcatgctggaaggtgaaagtcacatctcacatggtggcagacaagagaagagaacttgtgcagggaaactccccttttaaaaccaccagatcatgtgagactta

SEQ ID NO: 955751 - DNA, 733 bp, Homo sapiens
gtgggacagtgcaagatttcatcatgctactcrgaatggcatgtgatttaaacttatgaattgtttatttctggaattttctatttaatatttttggaccacagttgaccatgggtaactgaaactacggaaaacaaaactgtggataagtggggactactatagagttttgagagtaaaaaaaagcagtaatgaaagactacatactgtgaaagttgttggtatcaaaatggactgacttatgtcagacgctggcaaaatggagttaggcagtcatgaagtggggggatgcttacacatatttgccagaaactatcacaaaagattctgccaaacccataagattgcataaaaccaccacaaccttgcacaccgccccctgccaaaataaaaaagagaaaaagaaaaagaaaatacttttgtgaggacatctgcctagcaaatgcctctccagtcttggaccgatgctacccttattattgatccttgtagccaaggataattgtctcacaacttatgtaaccctcctcattttacctttaaaaacgcttgtctttctttgccttcctggatgtgcgtatgatttgtcacagcatgtgtcccacgttgcaatgccctatttgttcctgattaaactaaatatttttagatagcctctctctgtttgttatttaggttgacaatactatatgataccattcaaatatggttttaaagtgaacaaaattaaaca

SEQ ID NO: 955752 - DNA, 659 bp, Homo sapiens
tgtttctgtttggccaaaggcttatgtgtcaaggcttaaaagcaacaaaacaccaggacacttgtaggagcgagatggcacrtgcttgctaattgcactgggcaggctgggtaaacaggacccatcacccgtagccagcacgcctggtgttgatgcttaactggaccctcgcttatctaaagaatggtctttcctcactatgcctcatcatctttgcaatcctgtgctggatagccgtttatttaacttggcttgttttgaggtccctttcacacttgagtatttacttcagtaaatggactttatcaacctaattatcattcaaaaaaggccattagaattgtttttctttttctcttcttatgtaaatcattctcttttttagatccgttataaagaagagtttaaaaagtccaaggataagtgtacatttgtgactgacagtcctatgctaaaccatgtaaaaaatatcggtgcttttatttctgaggtaaggtatcaaaagcttgcaaactggcttgcatttatctttttcttattatatagatgaaagtctgtgcattaaagagatgaagaataatattttcaaaagcactactgaatgttagtaatagctacataattatctaatgtgatgcgctgtcatttaactcatatag

SEQ ID NO: 955753 - DNA, 610 bp, Homo sapiens
tgaggcgggaggatcacttgaacccaggaggttgaggctgcagtgagccgtgactgcgccamcgcactccagcctggggaacagactgagaccctgtctcaaataaaaaaaaagagagaatgtatcttcctcactaatattcatatctcgagctcagcagaaatgggaggaagaggacacaggaagaaagaaaatgagaaggccccagaagccacagaacagacaggcaggaacaaagaggtgctgaggaaggcagccagcaggcccatggccccagacaggccagcacctgcaggcaagcggccccggggcctcctgagcgcccatcacccactagggctatcgtgtgatgatggccaggatgaggcttggggcctccactcacctctgacctctcccggtgtgtgcagacggactccacgttcaggtagatggattccacacggcagcctggagggcgtgggatgggggcagaggaagctgctgttaaagggacagcaccgcttacagcccacggccacaagaagctactgtggccaccttcagggggacagggcttggcaggggttgctactcaccataagcgacaggcgtcagtttcaggacggtg

SEQ ID NO: 955754 - DNA, 604 bp, Homo sapiens
gcctcccaaaccaaagtgctgggattacagacataagccatcatgcgcagccttaatagtggcttttcaattggggtcctgacaggagaaaaaaaawtggcaactcaaattgagtatttagcaaggattaattcagagactacttacaaatagatggatgaggtgtagcaaaacaagatacagtgaaatagcaagtctggtaagaatggggtgcttatatactataagtactactactactactaaggacaaaagtgagagtgtgtccggaattgatgggttcttggtctcactgacttcaagaatgaagccgcgttccctcgcagtgagtgttacagctcttaaggtggcgcgtctggagtctgtcccttctgatgttcagatgtgttcggagttttttccttctggtgggttcgtggtctcgctggctcaggagtgaagctgcagacttccgcggtgagtgttacagctcttaaggtagcgcgtctggagttgttcattcctcccggtgggctcgtggtcttgctgggctcaggagtgaagctgcagatcttcgcggtgagtgttacagctcataaacgcagcgtggacccaaagagtgagc

SEQ ID NO: 955755 - DNA, 580 bp, Homo sapiens
actctacaatcccaaatagactctttggcaggagtgactctccaaaaccaccaaggcctagacctcctcactgctgagaaaggagaactttgcaccttcttaggggaagattgttgcttttatactcaccagtcagcgttagtatgagacaccacccggcgtgtacaggaaaaggtttctgaaatcagacaacacctttcaaactcttctaccaacctttggagttgggtgacatggcttctcccctttctagttgccatgacagccatcttgctattactcgccttcaggccctgtatttttaacctccttgtcaaatttgtttcctccaggatcaaggccatcaagctacagatggtcttagaaatggaaccccaaatgaggtcaactaacaacttctgccgaggacccctgaaccgacccactggccctttgggtagcctagagwgttcccctctggaggacactaccactgcagggccccttctttacccctatccagcagggagtagctagagttgtcattgctcaattcccaacagcagagaatgttgggatgtcctgtttagaggggaaattg

SEQ ID NO: 955756 - DNA, 500 bp, Homo sapiens
ctaatcttcaaaaatatcaaggtcataaatgacaaagactgaagaaggattttagattgaaggagacaaaagagacatagcaactaaaarcaatgtacggtcctgaattggaccttaaactagacaaacatttttttcttttactttaaagtatgttcaatggacaattgacaaaatttaaataagatctgtagattagataatagaactatatcattgtttattttctgatattataattatatacagtgattatatgagaatagccttattttatgagatacatactgaagtatttagtagttaataggcattacatctgtaacttactctcaaaaggttcagaaaaatatctgtatatctataatagaatgcttatgttaaacattgggaaaatccagattaaaggtatctaggacttcttttcattatttttgcaacttttctgtaagtctgaaaaatttttgaaacattaaaaataatcagtcttataggttcta

SEQ ID NO: 955757 - DNA, 692 bp, Homo sapiens
tgggacaaggtaagccccctccacctatgaacctataagatcaaaaacaagtcagttacttcctggatacaatggggttacaggcattgggtaaatacacccattccaaatgggataaattggccaacataaaggggctacaggcctcatgaaagtctaaaatccagcaggacagtcaaatcttaaagctccaaaatgatctcctttaactgcatgtctcacaaccaggtcatgctgatgcaagaaggggttcccatggtcttgggcagctctgcctctatggctttgcagggtaaagtccacctcctggctgctttcatgggctagtgttgagtgtctgtggcttttccaggcacacagtgctagctgttggtggatctaccattctgagatctggaggatggtggtcctcttctcacagctccactaggcagtgccccagtggggacgcagtgttggggttcccaccacacattttccttctgcactgccctagaagaggttcttcatgagggacccacccctgcagcacacctctgcctggacatccaggtgtttctatgcatcctctgaaatctaggcagaggttcccaaacctcaattcttgacttctgtgcacccacaggcccaamaacacgtggaagccaccaaggtttggggcttgaccctctgaagcaatggtctgagctgta

SEQ ID NO: 955758 - DNA, 644 bp, Homo sapiens
agctccttcctttctgagttcttcccccagggagtgcagcccagaccaagctgggattccggattattytggccacaggggtgagatggtcaaatgtgacagatttctgcgtcccccaaataacctgtgcgcatcacccaaagcagctagtcatcttgagaaaatgtcatgagttctgtgtaactgagctgaatgaatttgcaaagaggatgcatccgcacatacaaacctgctgtcctcccctgagcagagtgatactgagagggatactaaaaatagctaaagaattgttttgttttagaaatagggtctcgctgtgtttctcagtctggagtgatcatagcacactacagcttcaaactccagggctcaagccatcctcctgccttagcctcccaactagctgggactacaggtgcaccatcacaccccactattttttgtaaactttcatccaactaaaacacaaaagttcactctttgcttattaaactgcatcagaatctccttatgcctcagcagcagcatcagaacatcctatatccagttttttaaactatgtcttctttttaaaaacatttattgaattttaatacacatatagaaatttgcatagagcataataagtatacagcctgatacat

SEQ ID NO: 955759 - DNA, 658 bp, Homo sapiens
tgttggtgtttgctggaggtccactccagaccctgtatgcctgggtttcagcagcagaggctgcagaacagcgaatactgctgaacagcaaatgttgctgcctgatgattcctcttgaagtttcgtctcagaraggtacccagccgtgtgaggtgtcagtctgcccctactggggcctacctcccagttaggctactcaggggtgagggacacacttgaggaggcagtctgtccgttctcagatctcaaactctgtgctaggagaaccaatactctcttcaaaactgtcagacagggacatttaagtctgcagaggtttctgctgccttttgttcagctatgccctgtccccagaggtggagtctacagaggcaggcaggcctccttgagctgcagtggggtccacccagttcgagcttccccgccactttgtttacctactcaagcctcagcaatggtggatgcccctcccccagccttgctgccaccttgcagttcaatttcagactgctgtgctagcaatgagtgaggctccatgggcatgggaccctccaagccaggagtgggatataatctcctggtgtgccgtttgctaagaccattcaaaaaacacagtattagggtgggagtgacccaattttctaggtgccatctgtca

SEQ ID NO: 955760 - DNA, 729 bp, Homo sapiens
taatccttccctttttctcaggccacatctaatctgttacaagtcacactgattctacctccagaatgtaccaccatgccttttgattcttctgtctctcttctgtttcaagctaatatkctctgtcacttgaaccatgcaataaactcccatcacttgtactttgtaatcctgccccttgcaatgtgttcttcctattgggcttagaagacacagcaaactccttaacaaggctacagaatcctacctaatctggcccctgccttcttctccatcttcagtttgttctgccctcccaccccaacctcacttattatggtccagccactcgggcatttgttccggtccacaaacacaccaaactctgtcctaccaccaggctggtacatttgccagtccctccacctggaacacccctccggatctcagatctcagcttgaatgttcaagtcatcagagagacctttcccactttaaatgtcctcccctggtccctctttgtcacattgtcctgtctacctcttcctaggcagcatcatagtctgagattatcttgcatccttgtttattgggatgaaggcttgagtgagagtagggacttgcctgtcttcctgagctgtgacttcagggactggcagagttcttggcacctaggaaagggataagagagccactgctcctgagttggggacacagaaggagaggatggggagttcttttagattatgg

SEQ ID NO: 955761 - DNA, 815 bp, Homo sapiens
catagtaacttctgagtcacccgaacagctccattgagatgacttgtccgcttctcagggcctccaaaaatcatcatctcctccctgcttaacaaacagtccaggttttgtaatggcaaacatactmcctgcatgaccattcacccctgggacaccctgcagcagcgtccccaccactagtgaatgcttcctcatcccctctttcaatcactctctcgaatggttcctagtagatacagaacaattttttctccaacgggaaaacagaacacagggagccactcggttttctcccaacgcccctttccagccacccaccggagctaccttggcaagtactctaggaatatggggaaaagaaaacaacaaactcacccaccttttttaacatacacaaccagttctgtctacccagctaaggtatattcttcttatgtggaacgtcgacctatatctgcctccccactaactggacaggcacctgcaccttagtttttctaagtcccaacattaacattgcccaaggaaatcagaccctatcagtacccctcaaagctcaagtctgtcagcgcaaagccatacaactaatacccctacttatagggttaggaatggctactgctacaggaaccggaatagccagtttatctacttaattatcctactaccacacactctcaaaggatttctcagacagtctgcaagaaataatgaaatctatccttactctacaatcccaaatagactctttggcagcagtgactccaaaaccgccgaggcctagacctcctcactgctgagaaaggaggactctg

SEQ ID NO: 955762 - DNA, 631 bp, Homo sapiens
gggtctaagtttcctccccttgaatcttcctggcagcttatgacttctttggtcaaatggaagtaacgctgtatgaattcagaggttaggtcatttgaagaattcagtttccacttggatctctctcttgggtttcttgattttagaagcaatccatcctgtgctgaggaagcccaggccacgtagagaggccatatgtgggtgttggcagccaacgactctagctaagctctcagccagcagccaacattaatatcatataggccaggcgtggtggctcacgcctgtaatcccagcacttcgggaggccaaggtgggcagatcacgaggtcaagagttcaagaccagcctagccaatatggtgaaaccccgtctctactaaaaacacaaaaaattagctgggtatgctggcgggcacctgtagtcccagctactcgggaggctgaggctgaagaaccaatcacttgaacccaggaggtggagcttgcagtgagccgagatcgcaccactgcactccagcctgggcgacagagtgagactctgtctcaaaaaaaaaawaataataaaaataaataaataaataaataaataaaataaaagaaagaaaaaaatatacatagtttcaggtccc

SEQ ID NO: 955763 - DNA, 615 bp, Homo sapiens
aggccctgactatctatttgatagttttgaaaaggcctggtccagtaaataataatttagccatctgatagttgctatcaatgcctaagtgaaaggtttggtaaagggttttaagtaatttcaattggttagctgcaggcaaaagtattttttcttctttggtggctagccatcctgaggggaggaaagtatgtcctcttgaggttctccattctatttcttctgctgagtactggggcttggtttcctggagggggttaccccacactaggggtccttctataagcatttctaatggagggtcctgtcttgtggctcttttggcttcaacatctgcttggcagttcccttctacttccctttccttttttttttttttttttatgaccccggcagtgtaagactgccacctctttaggtttctgtacagccaataataatatcctaatggcttcttgatgtttgataggtgttcccttggaagttaggaattccctttctctccatattgctgcrtgggcatggagaactaggtaagcatacttagagcctgtatatatatttaccctttttccttctcctaattctagtgccctagtgagggctattagttct

SEQ ID NO: 955764 - DNA, 572 bp, Homo sapiens
ttagagaaccaattccagaaaccccagaacaaacccagaacactcattctcaaaattctgttcctctagaaccattatctgtaccaaaatctgtattagtcagagtttttgagaaaaacagaaccaatatgatatataatgggctcacacaattatggaggctgagaagtccagttggcagcctggagacttgggagaaccaatgatgtagttctagtctgtgttggaaggcttgagaaccaggagaactgatggttgagttccagtccaaaagtcagcaggctcaagatccaagaatagcctatgtttcagtttaagttcaaagacaggaaaagaccaatgtcccctctcaagcagtcagacaagaggagtcccctcttgctcaggctttttgttgtattcaggtcttcacttggttgaattatcctgcccacattggacagaacaatctactttactcagttcaccaatccaaatactcatgtcaaggagaaacaccccacagacaaacccagaaaatgtttagccaaatrtctgggcaccctgtagcccagtcaagttgacacataaaa

SEQ ID NO: 955765 - DNA, 557 bp, Homo sapiens
ggggtttcgctgtgttggccgggctggtctccagctcctaactgcragtgatctgccagcctcggcctcccaaggtgcggggattgcagatggagtctcgttcactcagtgctcaatgttgcccaagctggagtgcagtggcatgatctcggctagctacaacctccacctcccagccacctgccttggcctcccaaagtgccgagattgcagcctctgcccggccgccaccccgtctgggaagtgaggagcatctctgcctggccgcccatcgtctgggatgtgaggagcccctctgcccggctgcccagtctgggaagtgaggagcgcctcttcccggccgccatcccaactaggaagtgaggagcgtctctgcctggccgcccatcgtctgagatgtagggagcgcctctgccccatctgggatgtgaggagcgcctctgcccggctgcgaccccgtctgggaggtgaggagtgtctctgcccagcagccccgtctgagaagcgaggagcccctccgcccagcagccgccccatctgagaagtgaggagcccct

SEQ ID NO: 955766 - DNA, 557 bp, Homo sapiens
ggggtttcgctgtgttggccgggctggtctccagctcctaactgcaagtgatctgccagcctcggcctcccaaggtgcggggattgcagatggagtctcgttcactcagtgctcaatgttgcccaagctggagtgcagtggcatgatctcggctagctacaacctccacctcccagccacctgccttggcctcccaaagtgccgagattgcagcctctgcccggccgccaccccgtctgggaagtgaggagcatctctgcctggccgcccatcgtctgggatgtgaggagcccctctgcccggctgcccagtctgggaagtgaggagcgcctcttcccggccgccatcccaactaggaagtgaggagcgtctctgcctggccgcccatcgtctgagatgtagggagcgcctctgccccatctgggatgtgaggagcgcctctgcccggctgcgaccccgtctgggaggtgaggagtgtctctgcccagcagccccgtctgagaagcgaggagcccctccgccyagcagccgccccatctgagaagtgaggagcccct

SEQ ID NO: 955767 - DNA, 598 bp, Homo sapiens
gcaaaggacatgatttcattcttatatatgtggctgcatagtgtaccatggcatatatgtaccacattttctttttcagtctgccattgatggacacctgcagaggamatgattttgttgatttttatggctgcatagtaatcagttgtgtatatgtaccacattttctttatccagtccactgttgatggatacctaggttggttctgtggttttgctattgtgaatagtgctgcgaggaacatatgcatgcatgtgtccttttggtaggacaatttattttcctttgggtatatccccagtaatgggattgctgggttgaatggcagttcaactcttagttctttgtgaaatctccacactgctctccacagttggagtagtttactttcccatcaacagttgtttaagtgcctcattttctcttcagccttgccatcatctgttcttttttgactttttaacaaaagctattctgactggcatggggtggtatctcattgtggttttgatttgcatttctttgatgattagcgataataagcattttttcatatgtttgttggctgcttgtatgtcgtcttttgaaaagtgtctg

SEQ ID NO: 955768 - DNA, 532 bp, Homo sapiens
gcagtcaaatcttaaagctccaaaatgatctcctttgactccatgtctcacatccaggtcacactgatgtaagaagtgggttcccatggtcttgggcagctctgcccctttggctttacagggtacagccatcctcttggctgatttcatgagctggcattgagtgtctgtggcttttccaggcacatggtgcaagctgtcagtgggtctaccattctggggcctggaagatagaagccctcttctcacagccccattaagcaatgccccagtgggaactctgtgtaggaactctgaccctacatttcccttccacactgccctagcagaggttctccatgagggctctgcccctgtagacaactctgcctggacatccaggcatttgcatatgtactctgaaatctaggcagaggttcccaaacctgaattcttgacttctgygcactagcaggctcaaaaccacatggaagctgccaaggcttgaggcttgcaccctctgaagccatggcccaagctctatattggcccc

SEQ ID NO: 955769 - DNA, 562 bp, Homo sapiens
tggcaaagaagttaaaaacttggaaaaaaaaattagatgaayggctaactagaataaccaatgcagagaagcccttaaacaacctgatggagctgaaaaccacggcacaagaactatgtgatgaatgcacaagcctcagtagccgatgcgatcaactggaagaaagggtatcagcgatggaagacgaaatgaatgaaatgaatcgtgaagagaagtttatagaaaaaataataaaaagaaatgaacaaagcctccaagaaatatgggactatgtgaaaagaccaaatctacatctgattggtgtacctgaaagtgacagggagaatggaaccgagttggaaaacactctgcaggatattatccaggagaacttccccttttctagcaaggcaggccaacattcaaattcaggaaatacagagaacgccacaaagatactcctcgagaagagcaactccaagacacataattgtcagattcaccaaagttgaaacgaaggaaaaaatgttaagagcagccagagaaaaaggtcaggttacccacaaagggaagcccattagac

SEQ ID NO: 955770 - DNA, 730 bp, Homo sapiens
gccaggcacactagagacacctccacaggacacacctgctgcccacagtcccctggctctttttcagctcatggactatccaggtccagtaaaattataatgtgggccacaaaacattattttttagagacagggtctcactctgtcacccaagctagagtgcagtggcacaatcacagctcactgcagcctcaaactcctggactgaagtgatcctcctccctcagcctcccaagtagttgggactacagacatgcactaccaagcctaattttgtttttcagtttttgtagagatgggggtctcgctatgttgcccaggctggttttgggctcagatgatcctcccacctctgcctccgaaagtactgggattacaatcatgagccgccatgcccaaccatcattattttaaatgttctagtagctatgttgaaacacataaaaataaacaggtgaaattaattttaatactgtatttcaccaaatatattcaaaatatcatttcaatatgtaaccaatataaaaattattgagacattttagattctttttttgtactaagtctttggaatctggtgtgtatcttacacttacagcacatctcaatttgcatgagccatatttcaagtgcccagtagctgtatgtgatgagcggctacaatattggacagcacaggtcyagagggtagggtggttacccggagaatttagaatcctgtttcctgtgg

SEQ ID NO: 955771 - DNA, 575 bp, Homo sapiens
agtgggagtcagaacttttgtcattacccagtggtcctgggtagtacggctacccctctatttttccatgcagagtcagtggagtccgtgtggagagtagtaacaaggcactcctgcccctcccagccaggaaggtatcaatggaggccttgcggagagccagaaataccactcctgcccagcagtagtgaagagctcctcctactgtttgtcaaagaaggccaaggagggaacctagactattacctgcatctggcagtaagaaggcagtgcccccttctccttgcccaagtcatttcagaaaaggccagttaaaacaaaatttaaataaggtccagagtctcataacataataccaaaaacgcccaggttttaactaaaaatccttcatcatagtaacaaccaggaaaacttcagcttgaatgacaaaagaaaatgaatagatatcaacttcaaggtaatagtgatattagttatctttcaaagattctaaaggagccatgattgtaatgcttyagtgaacaattatgaacatacttgaagcaaataaaaaaaagaaagtcttagcaaagaaa

SEQ ID NO: 955772 - DNA, 634 bp, Homo sapiens
tcaacgggcagcactcccaggagaaattcaccaggtgggccttccagcaacccagggaggggaatctgggccaaagcccacactgaggktgtgactgtcacagcactggaggggaacagagctgtcctgcctgtggggctccaggggccaccatgcctaccccaacaggacaggacttccaggcagctctcctgtcttctcttggccagaggggagcactctcactttataaacctgtgtggtcatttgcagactgaatcacttccggtggatcgtgccagccaatggcgaggtaacgttgcaggtgcacttctcttctgatgagttcgggaactttgaccaaacctttaactttgagatcctaggaacttgctgccagtaccagctctactgccgaggcatctgcacttacccatacatttgccaagacccaaagtaagtgtgtttcattttaaaagaaaaggttgacagatgtcttttcattttactccatggcactttgaacaaggtggctcttaccataacgtggagctggggcagcaccccagcccctcttgtcgtatcagcttccatgtcttgaatattgaccaagagccacagggaggacatgatactaccaggattcccagactgc

SEQ ID NO: 955773 - DNA, 465 bp, Homo sapiens
tcccttttaaaactgaatgcttttaagagcacccaagtaacctcttgaacgtcttgctgcttagaaattttttatgccagataacctaaatcatctccctcaagttcaaagttccacaaatatctagggcaaggccaaatgccaccagtctctttgctaaaacatagcaagagtcacctttgctccagttcccaacaagtttctcatctccaggaatcatctcagcctggatttcattgtccatatcatcagcattttggtcaaagccattcaacaagtctctaagaagttccaaactttcccacattttcctgtcttctcctgagccctccaaacagttccaacygctgcctgttacccagttccaaagtcacttccacattttcaggtatctttacagcagtgcccactcactataccagtaccaatttactatatttgttcattttcacgttgctgataaag

SEQ ID NO: 955774 - DNA, 588 bp, Homo sapiens
caggatttccaaggccatttagaataggagtggtgagagagggcatccttttcttgtgcaggttttcaaggggaatgcttccagcttttgccctttcagtatgatgtyggctctggttttgtcatagatggctattattattttgaagtatgttccttcaatacctagtgtgctgaaagtttttcataatgaaggagtgttgaattttatcaaaagccttttctgtatctattaagataatcatgtggtattggtctttggttctgttgatgtgatgaatcacatttattgatttgtgtatgttgaaccaacctgatatcccaggaataaagcctatttgattgtggcagatatactttttgatgtgctgtgggatttggtttgtcagtatttcattgaggatttttacattgatgttcatcaagtatattggcttgaagtgttccttattcattgtgtctctgccaggttttgctatcagggtaagttggcctcagagatttagttagggaggagtccctcttcctcagtttttttgggaatagtttcagcagaaatggtatcagctcttctttgcacatctggtag

SEQ ID NO: 955775 - DNA, 588 bp, Homo sapiens
caggatttccaaggccatttagaataggagtggtgagagagggcatccttttcttgtgcaggttttcaaggggaatgcttccagcttttgccctttcagtatgatgttggctctggttttgtcatagatggctmttattattttgaagtatgttccttcaatacctagtgtgctgaaagtttttcataatgaaggagtgttgaattttatcaaaagccttttctgtatctattaagataatcatgtggtattggtctttggttctgttgatgtgatgaatcacatttattgatttgtgtatgttgaaccaacctgatatcccaggaataaagcctatttgattgtggcagatatactttttgatgtgctgtgggatttggtttgtcagtatttcattgaggatttttacattgatgttcatcaagtatattggcttgaagtgttccttattcattgtgtctctgccaggttttgctatcagggtaagttggcctcagagatttagttagggaggagtccctcttcctcagtttttttgggaatagtttcagcagaaatggtatcagctcttctttgcacatctggtag

SEQ ID NO: 955776 - DNA, 606 bp, Homo sapiens
ctgttcctcataaatgccaccttctaggtgtcctcacacagcagaagagcagaacagagaaataaagcccttcctcaagcccttttataaggagtctaatcccatccttgagggtttcaccctcatgaattaatcacctctttaaggcctcacctctaaatatgatgacattggctgtaaagtttcaacatgtgaattttggaggacacattcagaccactgcacacactgaaaggggagtagagggtaatcaatataagcaacttaggagcttccgtatttaactacagctaacccctgaacaatgcgggggttaggggtgccaacccccacacagttgaagatctgcatataacttttacctcccctaaaacttatttactcatgtctattgctgatcagtagccttaccaataacataaacagtaaattaacatgtattttgttttatgtattatataccatattcttacaataaagctagaaaaagaaaacattattaagamaatcataaggaagagaaaatacattcaccgtactgtactgtatttatccatatggcaagtttacacttcctgtttacaagatgaactatctgtctgaaat

SEQ ID NO: 955777 - DNA, 635 bp, Homo sapiens
aggacattatctcattcccttttatgaytgtgtcatattccatgtgtacacgtaccactttttaaaaatccagtctaccattgataggcatttaggttgattccatgtctttgctattatgagtggtgctgcgatgaacttatcagtgcatatgtctttacggtaaaatgatttctattcctttggatgtatacccaataatggaattgcttggtcaaatggtaattctgttctaagttctttgagaaattgccacactgccttccacaatggctgaactaatttatattcctgccagcagtttataagtgttcccttttctctgcaacctcaccagcatctgttattttttgactttttaatactaaccattctgactggtgtgagattgtatctcatgtgggttttgatttgcatttctctaatgattaatgacgttgtgcattttttcatgtgtttgctggccacatgtatgtcttcttttgaaaaatgtctgttcatgtcttttgtcagctttttaatggggttgtttgttttctgtctgttaatttatttaagttcctggcaaagattccatgatgaagatgccaaaagcaattgcaacaaaaccaaaaattgacaaatgggacctaatt

SEQ ID NO: 955778 - DNA, 569 bp, Homo sapiens
tgagggacaattgggtagtttctgagttttggtgattataaataacgcacctctatgagttatatgatttgcaaatattttctcccagtctatggcttgtcttttcatccttaatccttttaacagtgtcttttgcaggtcaaatgttttctattttgataaaatctgatttattttttcttttatgaatcatgtttttggtattgtatctaggaattctgtgcctaacttaaggtcagattttcttatatatttttttcgagaagttttctacttttatgtcttacatttaggttgatgatccattctaattttttataaggtgtgaattatgggttgagactctttttttgtatatgaacatccaatttttcaagcactatttgttgaaaagactatgctttttgtctttaattgtctacatctgtttcagagataagagttacttctgagctttctattctgtttcattgatttctttgctatcctcttacaggtataacactgtcttaatcatagcttaagtaytgaaataaaatagtgtgagtcctctaccttctaattcaaaa

SEQ ID NO: 955779 - DNA, 638 bp, Homo sapiens
ggtctctattcaaacattgtacttttgtttcttgattacatcttcaattattttagttatttctgagattctcccctgyagtttctccagttatctagagaagagtgtggcaaggtacaaagagtgcctgaataacattatgaaggctgtgagacttcaaataaatgagtagcctctctgagcattaggtttgtcctctgtaaaccaggaataatttttactgaaccagggttgttctaaggattagtgaaatgtatgtaaagcctttagcatttaataggtgatcaaatggtaagtgatgcttatagaatgtttttatcatggtaaaatatacaaaacataaaacttaccagccttttaatctaaattgtcttattgtgataggcttgcttatagtaaaacaaactctttttagtatctgtaggatctatagtgataactcttcactccttatattctaacttgtgcctaattagttaggcacaactctaattagttatctattgctgcataagaaattacctgaaacttaatgtcttcaaacaacaacaagtatttattatctgtgataggcagacttctaagatgtttcccatgatctcaatgtcctggtgttgtactctgtatgatctcttcct

SEQ ID NO: 955780 - DNA, 611 bp, Homo sapiens
ttaaaagttctctgataagtcattgccaccactacttccaaatagcatatgttaactttgagttaattttacataaacctgggttaatttamaaaattttggcaccaacaacatggttaggcaaggcagcatggatgggtattggaatctgtcaatctgggttgctgtataccagctctgggactgggggcaagttgtagcagccctgagcctcctgcttcacctgtatcaggggaggctgagacccaccttgcaggggtcttgtgatgttttattgcagtgctgtgggaatggtgggctacttcgtgcccggcctgtcaagaccaggcagcttacacaaaaacacttgatattgactatgaaacaagatccggaagagaacaaatataaatacagatggatcagctaaatgaaggactgtcgagtaaaaacacaaagaagatgtttgtgagtggagggggatggatctccttctccacccagcagtgaatatcatgggaatctctctctacctgaatctacctcttataattcttaaattaagaaccattagaactcttctaaactttctaagtactcattacagtatgaaaccctgcccgcctcccaga

SEQ ID NO: 955781 - DNA, 611 bp, Homo sapiens
ttaaaagttctctgataagtcattgccaccactacttccaaatagcatatgttaactttgagttaattttacataaacctgggttaatttacamaattttggcaccaacaacatggttaggcaaggcagcatggatgggtattggaatctgtcaatctgggttgctgtataccagctctgggactgggggcaagttgtagcagccctgagcctcctgcttcacctgtatcaggggaggctgagacccaccttgcaggggtcttgtgatgttttattgcagtgctgtgggaatggtgggctacttcgtgcccggcctgtcaagaccaggcagcttacacaaaaacacttgatattgactatgaaacaagatccggaagagaacaaatataaatacagatggatcagctaaatgaaggactgtcgagtaaaaacacaaagaagatgtttgtgagtggagggggatggatctccttctccacccagcagtgaatatcatgggaatctctctctacctgaatctacctcttataattcttaaattaagaaccattagaactcttctaaactttctaagtactcattacagtatgaaaccctgcccgcctcccaga

SEQ ID NO: 955782 - DNA, 585 bp, Homo sapiens
ctgtaatcccacctactcgggaggctgagacaggagaatcgcttgaacccaggagacagtagttgcagtkagcaccaccgcactccagcctagatggctgagccagactccgtctccaaaaaaaaaaaaaaaaagaaagaaaaagaaaaaaaaaacctaatgaatatggtgttctcaactcttccttcaacacttgtaacaaaaccaatggactctgaaatatgcacatccaccagtgcaactttgagcacactaagcccacactatctataagaagctctctgtgaggaataaagcagcattgaaactggcagaaaaataatcaaatacagtaagatttgaaaataggtacaaaatcttttagctgtacatcccatttttggtgatttttttttaaattgtgatgaaatatatgtaacataaaatttatcattttaactatttttttggagatcgagtttcactcttgtcgcctagatgcaatggtgcgatctcagctcactgcaacctccgccttccgggttcaaatgattctgctgcctcagtctcccgagtagctgggattacagacatgcgccatcacgc

SEQ ID NO: 955783 - DNA, 657 bp, Homo sapiens
tttatcttccatgttcttttgcatcttgtggttttaactgagaattttacatgattccattttctctgacataaaacatatcagttataattatttttttctccttttttatttattcaattgagtttgcaatatagatttaaaactaatccaagttcattttcttttcttttttaaaatagagacagggtccctctatgctgtccaggctgtgtctccaaatcctgggctaaagggatcctcttgccttagactcccaaagtgctagaattacaggcatgagccagcacgccgggcacaagttcactgtcaagtaacactgtaccacttcatggatagtgtgagttccttataataataaaagaatcttagtatctccctcccttcccttctataattgctgtcattcatttcacttatatataaacatatatatttaaacatatatatgaacatattgatattatttttagcaaacttaactgttagattaagtgtaagaaaataaaagttttaattttaccttcacttattgattttccmatggtcttccttttgttatgtgaatccaagtgcctaacctataattttcatttttctgaagaacttcttttaacagttgttttccccccaagaggtttaaagtttttattttta

SEQ ID NO: 955784 - DNA, 552 bp, Homo sapiens
acagggttggcgaccttggcagtgacaatggcagagggcctttcgcttgttccttggggctctgccccaggcaaatgcagagctgctgtcagtcagaacgatcagcctaatgtggagtggctgtgttgcgggcccaagccagagttccctgcctggtgctgggcagaggaggtcagaggctcacagagaagtcattgtggcctcttcttcataggagagctgtggcatgctggatgtgtgagtgaagcactcaggatctttgttccttccccagtccgagggcagcaaggccggtagtactgtagtagcagtggcagaggctgaggggctgtcagtggccactgataaactccaccccagagaaacacagagccactaacaatgggaatgttcagccaagtgtggggaagctacgcgcagccccaagcccggggccctgcctggtgaagaggaggggtggggactcacaggkaagagaaattgggctcctctgtatggtggctgcagtgtcacggaggtatcagtgaagtgaccaggctcttttttccttct

SEQ ID NO: 955785 - DNA, 597 bp, Homo sapiens
gtaaattccctagattcagtgacattgctaatattgtcagtactgtagtgttaggaatgggtwatctccattccaccacttacaggctgtatgaacttgaacaaataagcctctctaagcctcagtttctaatctgtaaaatgggaaaataataatagtattagctaccttgtagggttgcagtgagaatgaaatgagataatgtagtattgggcattagaatagccaaataataagtgctcagtgagtggtagccactgttgttcattactaaaaatgattatgtgatagctgttactaatttgcattgttgtataatgtaaaaataccttagcaagccaaaatcaaaacaaaaatacgaaaagtggtaaaatactaactaccctggccttcagcgaaccctctatactgttctggactaagcatctttaggggtaaactaatagtgaaagggtttccttgtgggtggatgatggtgggaaggtagtcaaaatatatatatatatattatatatatttattatactttaagttctgggatacacgtgcagaacgtgcaggtttgttacataggtatacatgtgccatggtgatttg

SEQ ID NO: 955786 - DNA, 610 bp, Homo sapiens
tgctcactaggaaccagacacctcttaggaaaatctttctatctttcaaactcatggataaatccctgtcattcaacttcatttcttatatgcacataacacaatttctcattatgaatttcatttattttagttgcttgtaaattctttctcattagcctgtaagtctctcaagggcaggattatatctgtccccttcccacagacaatatgtgacccagggcctacctactccagtgcttaacacaaaagaggtacccaataaacacctgaagaattaatcagtcaattcactatagactaagtattgttctacaaccatattttccttcttaaaaatatatattggagattttctcatgatggtatttaaagaactacaacatttcacttaccgtcttattaaaccagaaacatactgcatgaatattccaacatttgtttatctattttcctattggacatttggagttttttcaattatttaataaaatcatgttcacacagttttgcacctcctttctaatctctctgcctgagtctttttctcaccttatttaaatgatttccattataaacgttgagtraaagtgatgatagcatacattct

SEQ ID NO: 955787 - DNA, 558 bp, Homo sapiens
ttcaaaaaaccagctcctggattcattgatttttttttaaggattttttgtgtctctatctccttcagtctgctctgatcttagttatttcttgccttctgctagcttttgaatgtgtttgctcttgcttctctagttctttcaattgtgatgttagcgtgtcaattttagatctttcctgctttctcttgtgggcatttagtgctataaatttccctctaaacattgctttgaatgtgtcccagagattctggtatgttgtgtctttggtctcattggtttcaaagaacatctttatttctgccttcatttcgttatgtacccagtagtcattcaggagcaggttgttcagtttccatgtagttgagcggttttgagtgagtttcttaatcctgagttctagtttgatcgcactgtggtctgagagacagtttgttataatttctgttcttttacatttgctgagtgaggagtgctttacttccaactatgtggtcaattttggaataagtgagatgtggttctgagaagacygtatatactgttgatttggggtgg

SEQ ID NO: 955788 - DNA, 698 bp, Homo sapiens
caataccatcaagaggcggagaccggtagtggccccgaatggctgggcgcactgatatttattgcatacaggatragggggcagggtgaggacggtgaatcctctaagtgattgacaaggtgaagcaagtcacgtgatcatgggacagggggcccttccctcttaggtagccgaagcagagagggaaggcagcaaatgtcagtgttttcttctatgcacttacaagaaagatcaaagactttaagactttcactatttcttcttccactatctgctacgaacttcaaagaggaaccaggagtacgggaggagcatgaaagtggacaaggagtgtgatcgttgaagcaccacagggagggggttaggcctccggatgactgtgggcaggcctggagaatatccagcctctcacaagaagctggtggagcagtgttccctgactcctccaaggaaaggagactccctttcatggtctgctaagtaatggttgccttcccagacactggcgttactgcttgaccaaggagccctcaagcggcccttatgcaggtgtgacagaaggctcacctcttgccttataggtctcttctcacaatgtgccttcagcacctgaccctatacccgccagttatttcttggttatattagtaacacaacaaagagtaatattaagagctaatgattaataatgtttatac

SEQ ID NO: 955789 - DNA, 680 bp, Homo sapiens
cctgcaaagcaacaggggtggagctgcccaagaccatgggaacccacttcttgcatcagcatgacctggatgtgagacatggtgtcaaagaagatcattttggagctttaagatttgactgccccactggatttcagacttgtatagggcctttagaccctttgtttttgccaatttctctcatttggaatgtatatatatatatatatatattcatacccaatgcctgtacccccattttatctaggaagtaactaacttacttttgattttacaggctcatgggtgtaaggaacttgctttgtctcagatgagactttggactgtgagcttttgagttaatgatgaaatgagttaaaactttgagggactgttggtaaggcatgattggttttaaaatgtgaggacatgagatttgggaggtgccaggtgtagagtaatatgatttggctgaatccccacccaaatctcaccttgaactgtagctcccataatccccaagtgttgagggagggacccggtgagagataattaaatcatgggggtgacctccccagccacrtggaactgtgggtccattaaacccctttttctttataaattacccagtctcaggtatgtctttatcaacagcgtgaaaacggactaacacaacaataaagcaaaaacagatcctgttc

SEQ ID NO: 955790 - DNA, 619 bp, Homo sapiens
agttctgaatatcctttttttgagcataaagcaagracatggctttttttccccttcatgcactcaagggactcactcaaacacctaataatgctgttcaacctttaatacattcataatggaattccccagttagcgtgttttcacttgcctgggtagaggcaccagctacaacctcttcaaatacttaaaagaaaatactgttcacattaattgtaagaatcttcaaaagaatgctagaatacctcaaatggaaaattcacaagtagtagcagacaagaagacatagagcataggagtgaatagtagctataaatcagatacaagccacattaatgaattgagataagaagtgtgaaataaaatcgatccccgctcatcagagaaggaggagagggttatttttaatcttgggatgaatttaaaatcaataaaaaagtataatagtctcataaacagaaatcgaacgacaatgcaaggagttggaaaaaaattaaaaacaaagggaaaaaagtacaccaatttacttcaacagttacaagaagccttgtttgatagtgttaactgtattcataatgaacatgtgtatagagccttttaaaacatcccatcaagcact

SEQ ID NO: 955791 - DNA, 736 bp, Homo sapiens
actgagttactgctgtaagtaaggtttatggctagatgccaagaggcctaccaagctgattatgacatagctcctgtttttttttttttttggtggaggagggagmttgtaagtacacccataactgaaaggcatggcagaatgtgctagagattctcagaggagtacaaagaaatagattcaaaaagaagggagaaacatttgtttagaagatgtggaaaaattgcatgaaaaaatatcttttgagatgtgcactgaaagatgagtaggatttgaaaagacagagcttgttcagggtaaaggaattccaggaaaaaggaacatcatgaattcagctataaaatctgggaaagtgtgaagtacaattgaagaagaatgggtagtcatggctgaggccttgggggcttatagaggaatagacagatctttgcccatctaagcctcctactcccctctctagtgtatatgagttataacccaatcaaagactacgtttcccatattactttggaatggaggcagaaatgatgggttatttccaggcctcatgtgccagttagatattaaattatgggataaccttgaaagcctcatattgaagttgatatagcttctgtcagcttggatgctgaatgactgagtggagcagagcactccctacctttcctttcctaccttgagtaggaaaaggaaaaaaaaatcccttcagtgtgttaagccactgagatattgagtt

SEQ ID NO: 955792 - DNA, 439 bp, Homo sapiens
tattatttctcatcatttatgacacaccagatgggtattctggcttggggactcacatgaggtcacagtcacatgttggtrttggtttggtcatatgaaggcttggtgggggctggaggatccactgtgagatggctcaatcccttggctggaaagttggtgctggctgttgttggcaggccttgcttcctcttcacagggcttcttgagtgtcttcatgacatggcggctggcctctcccaaaataagctgtccaagagagcagggcagaagtgtccatgccatttatggcctcaccatggaagtcacacacaatcacttctgcaatatatactgattacccagatctgcatcgttcagtgtgggaggggaccacaaaaaggcacaaatgccaaaagacaaggaccattggggccattttggaggctatttaccacag

SEQ ID NO: 955793 - DNA, 552 bp, Homo sapiens
attgtctgtttactctgctgattatttcttatactctgcttttcattttaattaagtccgatctatttatctttgttgttgttgttgcacttgctwttgggttcttggtcatgaactctttggttaagccaatgtctagaagagtttttctgatattatcttctagaatttgtatggtttcaggtcttagatttaagtctttgatccatctcgagttgatttttgtaaaaggtgagagatgaggattcagtttcattcttctacatgtggcttgcaaattatctaagcaccatttgttgaatagggtcttcctaggattgtttttctagttctgtgaagaacgatgatggtattttgatggaaattgcattaaaattatagattgctttttggcagtatggtcattttcacaatattgattctacccatccatgagcatgggatgtgtttttatttgtttgggttgtctatgatttctgtcagcagtgttttgtagatttccgtgtagagctcttttaactttttggtgaggtatatttcctaagtatttta

SEQ ID NO: 955794 - DNA, 625 bp, Homo sapiens
ataacttcaggatctacagatactaaaaggatagtaagaaaatgttgtaatcaacggtgtcaataaatttgactatgtagatgaaataaatttcttaaaaaacacaatctactaaagctcactcaaaaattagataactcagatagctttatatttactaaacaaattgaatttgtagttgaaaacctcacaaaacatccttcaggcccagttggcttcattggtgaattctacaaagcaacttaggaagaaataatactcattctactattcctgaaaattgaagaaaaggcaatattactcaatttattctatgaggccagcattactgtgattccaaagtcacaaaatgaagcataagaaaactatagtgcaatattcctcataaacaaagatgcaagcattcttaaaacatgtttgcaaactgaattcagcaatatataaaaagtacaatgcatcatgaccatttgaggtttttcccaggaatgattaaaaaatcagtcactcaccatttaacagatrcagcattgttcataatagccaagatatgatcaacccaggtgtccatcaatggatgattggataaagaaaatgtggtgtctacacacacacacacacacacaca

SEQ ID NO: 955795 - DNA, 578 bp, Homo sapiens
catggtgaaaccctgtctctactaaaaatacaaaaattagccgggcgtgatggcgggcgcctgtaatcccagctacttaggaggctgaggcaggagaatcgcttgaacccaggaggtggaggttgcagtgagccgagatcataccattgcactccagcctgggtgacagagcgagactccatctaaaaaataaataaataaataaaaatgaaatatgcatattcacaaagacacgcaccacagggacacccactgcagtactgttgctaacaggcagtagttgggacaacttatatgtctagagcaaaagatcaagaaggattcaaatcaaattgttcagagtggtgaccctgaaggactaacagtgggagagagaaagaatagaagaggtgtggggagaattttcactttttagttgcataatcccttctgggttgtttatcttatgtctacatgcatttttaattttagaaattaaaaatattatattatttaaaattaaaaagttttttaacaacctgttctgtttggaggactgtttggargaatcatcaagtctcagagttgaaattggtctc

SEQ ID NO: 955796 - DNA, 562 bp, Homo sapiens
gaagaaaccccatctctaataaaaatacaaaattagccgggagtggttgcgtatgcctgtaatcccagctactcgggaggcagaggcaggagaatcgcttgaacccaggaggcagaggtagtggtgagccgagactgtgccattgcaatccagcctgggcaacaatagcaaaactcagtctcaaaaaataaaaagtaaaacaaaacaaaacaaaacaaaaaacagctctcataaaacatgaggggatgtcattagaagaggggagatttaacatattattggagaatcccataaatgatttgaagccagtaagtcagaaaccttggaccaaacaaattcttagaaaaatatgatagaaagctgaagaagaaatagcaagcttaaatagcctaataaccatagaaataaaattagtgttaaaaattatcacaaaaaattaccatcccaaatgactttgtcagtaaattctatgtaactttgaaggaaaggwttcccattattctgcattttccagaatatggtaaaaaatagaaataccctaatatcatgagaccagcagaag

SEQ ID NO: 955797 - DNA, 503 bp, Homo sapiens
ccaggagtggcctgctctttcccgatcagccccctgggcctggctgacccaaggtcacctccagggaggtgacagctctgcccagcatccgctcctcctgggccagccagttgctgtatgcactgggcagtgggcagggaggggcttccgaggagcacagaggctgcagagagagtgagcccagtggggcttagaggagcaggggctctagtacacgtcaggggaactaagaagacaggcagcatggtccggggacgagatgcaggatgggtcaaggccacccccttgtgaacatccacccctggccccaggatgaggcccacctacatgaaaaggccccaggaatagagtgtgcaggcagagaaggtgaacccctgggaccccaggccccartgcaggggctgtggcctgtgtagccaggtggggcagggagtgagtctgagcctcccacacctccagactcctgcaccccggggcctcctgggccacctacttctaccctg

SEQ ID NO: 955798 - DNA, 552 bp, Homo sapiens
aggaagtaaaaatggcctgactaaattaaattaatgttcaagtggtatttctttacagcaccggggaacaagcatttcaaacaattgctttaggtgacatgaatgtcctcaacaacctgcaagaaacaaaacttttgaaactccaccttttttcctctttcctattttgcttatgtgctagtggccattgtactgtgtgcaaatttgtatatgagtaagttgggatgcttataaaaaggatgtctgaccaagttacattgaaaagggatacacagaaaatgccccagacatttccttctcctttcaaaaggcagctcacaaagcttatatttctgtatgaagcaaactaagaaagttggttgtgaaggcttttacttttgtggatgattttccttctacttaaatgacataataagggctagtatctgaatttctgtgttgcaatactgtttwtagtaattctataaaaagtccactggatagggttgcaggtgtttttgttttcctttatgagtcagctaacatttattaagcattttctgtttaaggtac

SEQ ID NO: 955799 - DNA, 559 bp, Homo sapiens
gtcagggttcatctttttgcacatgcatttctagttgtcctagcaccattttcctttgtaattttggtgtgcaggtcttgcactgcttctgttaaatttattcctaactgsatatatttttgatgctattacaaatagaattatgttccggttttatcttttgatagactattgcttgcttatggaaatacaattggtttttgtatattgatcttatatactgtggcctcgctgtagttgtttattagtagttctaatggtttttgggtggattctgtaggattttctacatataagatcatatcatcttaagaataaaagccatttcccaatctggatgacttttctttttcttgtctgattgcactgtgtagaacctccaggacagattgagaatcccaagtcaaaaatctgaaatgctgcaaaacccaaaacatttttgagcatcaacaaagtctttgttgaaagttaacaaagctcaaaggaaatgctcattggagcatttagaatttttgattttcatattaggatgctcagctggtagatataattcacgtat

SEQ ID NO: 955800 - DNA, 652 bp, Homo sapiens
gacccttgatttcactgagaaaaccaaagcttttggaaaacaattttcacagagtcccaagaccatattgacatgtttagcagtatctgtacccacatcacagrcctccattcctgttgcccatagattaatttccatgtttctctataatccacaactcctgaactggatgcctttcatctactcaagcatatctctctagctcttctccctcatttcttccacatcatcaatgtttctttgctattgtattattgtcaccaacccattgacatactgttatttttcccatcataaaagttctttatcacccttctctttctagctactgtcacatttcttttctcctttttataggaaatctccatgtgattgtaatcttacttttagaaattcaactcttcttatcttttaaaccctcctaagtcaggccttcactctgaacttgttcttgtaaagggcactaatgacccaccttgttgaatgtaatggttaatttcagtcaacttgtcccatcagcaacagttaacatagtcggtcacacactccttaaatattttaacttggataccaagttggttttctaactttctatggctattccttttcagtgtcctttgcttctttttcatctaggtcaggtgccacccaa

SEQ ID NO: 955801 - DNA, 559 bp, Homo sapiens
ggagattatatcccgtgtcaggctcggcaggtctcacacccatggagacttgctcactgcyagcgcagcagtctcagatcgacctgagaggcagcagcctggcagggggaggggcatccgccattgctgaggcttgagcaggtaaacaaagtggctggggaagttcaaactgggcggagcccaccacagctcagcaaggcctgttgcctctgtagattccacttcttagggcagggcatagctgaacaaaaggcagcagaaacttctgcagacttaaacgtccgtgtctgacagctctgaagagagcagagttctcccagcatggtgtttgagctctgagaaaggacagactgcttcctcaggtgggtctctgacccccgtgtagcctaaatgggagacgccttccagtaggggccaattgacatctcatacaggcagatgcccctctgggatgaagcttccagaggaagaatcagccagcaatatttgctgttttgcagcctccccgctggtgatacccaggcaaacagggtctggggtggaactcagcaaactcaaa

SEQ ID NO: 955802 - DNA, 601 bp, Homo sapiens
tggcagtactttcgtgggccgcctgccctccccctcagcccgcccttatccgcggctccgctttcagagcagggtttctcacccgcggggcttcgggctcctcacccggcacctctgccagaggggaccgcctcccggcgcgtcgggcattcgtctctttcaccccttccctcttcaggagaaactgaacacgttttccagcctaaactcggcagggcaaaccagaacattccccgtctaagcagttccggggagttttaacaatttcctcgtaaactcgtctacagaactcactgtatactgtttaaatgtcgcctgtgtgtggagcaacagttttattgtgccgtgcaatcctcaacaagaaattgtagtccagggagatgaaaatcccttatttggcattcaggcgttgatcaaggtcgtgcaaccctcgctaaaaggatttaggttcatctccgtcattctcagccggggtgaaggggtgtagtctgacatttggaagcttaagaaccaagtctgctgccgtccaattcttttttaaagccttccatcatgtgtgtactttgcttgaatgattaktttaaagtacatgtcctatttt

SEQ ID NO: 955803 - DNA, 477 bp, Homo sapiens
atgtagttgtgtgattttgagtgagtttcttaatcttgagttctaattggattacactgtagtctgagacactgttatgatttcagttctttttgcatttgctcaggattgttttactttcaaccatgtgattgattttggagtaagtcccatgtggcaccaagaagaatgtatattctgttgtttttgggtggagagttctgtagatacctatcaggttcatctgatccagagctgagttcaggtcctcaatatctttgataattttatgtcttgatgatcggtctaatattgacagtggggtgttaaagtctctcacttttattgtgtgggaggctagcctctttgtagatctctaagaacttgctttatgaatctgggtgctcctgtattaggtgcatgtatatttargatagttagctcttcttgttgaattgaacactttaccattatgtaattcacttctttgtctttttt

SEQ ID NO: 955804 - DNA, 634 bp, Homo sapiens
aggtgctcttgaagctaagaggaatctagaatggatagtgaaggagagagttgcggccctgagaccagctagactagtgagatctgtggttagtcccgcttctaaaattctcccaagaagagacttccatcaaaattcttgaggagcaaaattctggaggtccatctaaattctgaatacatatggaacccaagtgacataaagtgtgaactgtggtagacatagctaagtgccaccaagatcacctttcaaggagggacttgctccccagctataggaaatgtggtcagcagacagcctcctgatggctgctcttttttttctttcttttctatttatttatttatttttgagatagaatctcaccctgtcgcccaggctggagtgcagtggtgcgatcttggctcactgcaaccttcgcctcccagattcaagcaattgtcatggctgagctaccaggtagctggaatttcaggtgtgtgccaccatgtccaactaattttttttgtatttttagtagagatgaggtttcgmtatgttggccaggctggtcttgaactcctggcctcactcaagtgatcctcccacttcagcttcccaaagtgctgggattacaggtgtgagtcactgggcc

SEQ ID NO: 955805 - DNA, 588 bp, Homo sapiens
tgaaatctcacttatggtcatatgagtttctggcctatcaaaaaaggactctaagctcagttataagtgaagatctcataaataytaattttgccaagtaaaccaattctgccttttattctgcaatatctagtctatcaaaaattttacattttcatgagtcaattacatttttaaaattaaccttttaattttcagaatattatagattcatatgcagttgtaagaaaaaaactacagagagatcttgtgtattctttactcattttcccttaatcacagcatctcacaagagtatagtacaattattacatccagggtgttgatgttgaaactgatgagacacagaacatttctattaaagcaagaatccctcatactgctactttatagtcatacccacttccctctcatcccccaccaccatccatgcccatgcggggtactaatctgttcttcatttctaaattttgtcatttcacaaatattatgtacacagtacacaacattttggtcttggggattggctttttcattcagtatgtgtctcaggagattatgtctccaggttgatgtgtgtatcagctg

SEQ ID NO: 955806 - DNA, 563 bp, Homo sapiens
ctggtttttgtttctgctataacaggccagtgctgagttcagtgccttacaattgctgagttcttctgctctgaackcacaaaaatgctctctgcaccatgttgccactgctggaggatgggagaggggtggcattggtgattcaagactatttttcctgccacttcactgcctctttcagccaaatgtgcttaaaaccaggtaccgtgaatgctcacctgatttttggttcctttgaaggtgttttttgggtgcaaatagttgttaaactcgtgtgtttgcagggggaatgatcagtggagtcttctattctgccatcttactctgcctattttagtatttgttgtacgagtttttcaattctttttgggtcattattaaaacttgtattttgttagaagatcatcaattttttctctaggttttcaaatttgttgtgctggaattgtgtattaaattctctttagaaaagaattgtaatatgttaaacttttatgtatctgtaatgatgtttcacttatgactctaatttgtatttttactctcttttctttatctcatga

SEQ ID NO: 955807 - DNA, 516 bp, Homo sapiens
aatatacctttactgtcctacctcaggggtatatcaactctctgactttgtgttataatcttattcagagagagtttgattgcttctcacttctgcaagatatcacactggtccataacattgatgacattctgctgagtggatccagtgagcaagaagtagcaaacacactggacttactggtgagacatttgcatgccagaggatgtgaaatctaactgaaactcgggaactttctacctcagtaaaatttctagaagtccagtggtgtggggcctgttgagatattccttctaaggtgaaggataagttgctgtatttggcccctcctacaactcagaaagaggcataacgcctagcgtgcctacttggattttggaggcaacaccttcctcatttragtgtgctactccagcccatttattgagtgacctgaaaggtttccagttttgagtgggttccagaacaggagaaagttctgcagcaggtccaggctgctgtgcaagctgctctgcc

SEQ ID NO: 955808 - DNA, 862 bp, Homo sapiens
tgcctgtaatcccagctactcctgaggctgaggcaggagaatcacttgaacctgggaggtggaggttgcggtgagctgagattgcaccattgcrttccagcctgggtaacaagagcaaaactgactcaaaaaaaaaaaaaaaaagatgggggtctcaccatgttgaggtttggagggtctcaaactcatggcctcaagcaatcctatcacctggcctcccaaagtgttggaattacaggcatgagccacagtgcccagccaactaaaactcttatatattcctgatgggaatgcaaagtagtagtctctttggaacacagttgggtagtttctcattaagttaaacagatttactatacgacctggcaatcttacctctatatattttcccaagagaaataaaaatgtatgatgacaccaaaacctgtatgcaaatgtgtagagtccttggcatgtaatgtcaactggaaacagcccagacatccttcaataggtgaatggttaaacaaattgctgtatatccacaccatggaacaccactcacccataaaaaggaaggaagtactgatacatgcaactacatggataaatctcaggatcattatgtctggcgaaagaagccagactcaaaaggccacatcctgtatgatttcatttatatgacattctggaaaaggcaatgctatagggactgaaaacaggccattcattcccagaggctggagtacgccgagcagcttatctgacaaagaggtgcagtgagtttttgagctgatagaaaccatctccatattgattgtggtggtgatcactggaccaagctgatggaaaccacatacatttgccaaagctctcagaatgg

SEQ ID NO: 955809 - DNA, 619 bp, Homo sapiens
ttatgtgtcaacttgactgggctacagggtgcccagayatttggctaaacattttctgggtttgtctgtggggtgtttctccttgagatgagtatttggattggtgaactgagtaaagtagattgttctgtccaatgtgggcaggataattcaaccaagtgaagacctgaatacaacaaaaagcctgagcaagaggggactcctcttgtctgactgcttgagaggggacattggtcttttcctgtctttggacttaaactgaaacataggctattcttggatcttgagcctgctgacttttggactggaactcaaccatcagttctcctggttctcaagccttccaacacagactagaactacatcattggttctcccaagtctccaggctgccaactggacttctcagcctccataattgtgtgagcccattatatatcatattggttctgtttttctcaaaaactctgactaatacagattttggtacagataatggttctagaggaacagaattttgagaatgagtgttctgggtttgttctggggtttctggaattggttctctaaacagatttcatttaaagttgttaataactctatttccaataatagagca

SEQ ID NO: 955810 - DNA, 615 bp, Homo sapiens
cctggccaacatggtgaaaccctgagtctacgamaaatacaaacaatagctgggcatggtggtgggtgcctataatcccagctactcaggaggctgaggcaggagaatcacttgaacctaagaagcagaggttgcagtgagccaagatcgcaccattgctttctgggcaagagagtgagactcagtctccaaaaaataaagaaaaacaactccaagaatctggaatggatgtctagcacccccagtaaataagcacatttgtttaaatgcatatgatcagctaaagaataagttcactaagaagtgaattaggttggtggttgttccataatgtatgactccttgaagattccatcagcaaaccatttaacacttatttgaagaaggaacacgatttctgtttgttgtctgaaaaccttgcactgattgcaagttctggtaagatcactaaagcactggcatcaacttaaaaatggcatccatgtcttgaaagaaaaaaaaatctcagacaacattgaagcactcttaaacagtgcttcatcacaaattctatcattatcacagagggcatttgagtatgctcaaaagcttgggtaactgactgtgagtgaaaaa

SEQ ID NO: 955811 - DNA, 615 bp, Homo sapiens
cctggccaacatggtgaaaccctgagtctacgaaaaatacaaacaatagctgggcatggtggtgggtgcctataatcccagctactcaggaggctgaggcaggagaatcacttgaaccyaagaagcagaggttgcagtgagccaagatcgcaccattgctttctgggcaagagagtgagactcagtctccaaaaaataaagaaaaacaactccaagaatctggaatggatgtctagcacccccagtaaataagcacatttgtttaaatgcatatgatcagctaaagaataagttcactaagaagtgaattaggttggtggttgttccataatgtatgactccttgaagattccatcagcaaaccatttaacacttatttgaagaaggaacacgatttctgtttgttgtctgaaaaccttgcactgattgcaagttctggtaagatcactaaagcactggcatcaacttaaaaatggcatccatgtcttgaaagaaaaaaaaatctcagacaacattgaagcactcttaaacagtgcttcatcacaaattctatcattatcacagagggcatttgagtatgctcaaaagcttgggtaactgactgtgagtgaaaaa

SEQ ID NO: 955812 - DNA, 789 bp, Homo sapiens
taacactcaccgtgaagatttgcagcttcactcctgagcccagcaagactacgagcccaccaggaggaacgaacaactccagacgtccccccctaagagctgtaacactcaccgcgagggtcagcaacttcattcttgaagtcagtgagaccaagaacccaccaattctggacacagtttccgtgggaaaccttggggaaaaaatccactgggaaatgtcttgtgggctgggcgtggtggtttatccctgtaatcccagcactttgagaggccaaggtgagaggattggttgagtctcgcagttcaaaagcagcaggggcaacacagtgataccctgtctctacaaaaaattaaaaaatattagctgggtgtggtggtgcacacatgtagtcttcgctactggggaaggtgagatgagaggatgagttaagtgcaggagtcggaggctgcagtgagctatgatggcaccactgcactccagtcgagtgacacagcaagactctcttttttttctttgagacgaagtctcactcttgtcccccacgctggagttaaatggcgcgatctcggctcactgcaacctccacctcctgggttcaagcacttctcctgcctcagcctccggagtagctgggattacaggcgcctgccaccacacctggctaatttttgtatttttagcagagatggggtttcaccatgttggccaggctgrtctcgaactccggacgtcaggtgatctgcccaccttggcctcccaaagtgtggggattacaggcatgagcaacc

SEQ ID NO: 955813 - DNA, 588 bp, Homo sapiens
agctgatagagctgtaaagctcacttcaagaatttcagaatatatgcacaagtattagtagcagaattgaccaagctgrggaaagaatctcagagctcgaagactagctctctgaaataactcagtcccacacaaataaagaaaaaaaacaataaagagaaatgaatgaaacctctgaggaaacacattaataagatagaccactagctagactgataaataaaaaaagatagaagatccaaataaaaacaatcagaaatgacaaaggggacctgaccactgatcccacagaaatacaaaatccctcatagaacactaggaacacctctatgcacacaagctggaaaatctggggaaaaaaaaaatgggcgaattcctggacacatacaaccttccaggactgaaccagttaaaaaaaaaaatgaagccctcaacagaccaaaaatgagttccagaattaaatcagtaataaaaagcctgccagccagaatcagatgaattcatagccaaattctaccagatgtataaggtagaactgctactattctgactgaaactatttcaaaaaattgaggaggagggattcct

SEQ ID NO: 955814 - DNA, 613 bp, Homo sapiens
cagctccagatggagtccatggcctagtgtgagacttacgttgctttttccaggcctacccatggctgccccggaccaatcagctcacacttcctcctttctgaccccataaaaaccccagaccgagccagactcaaacagatgtaagaactaccaatagcagaaaggagctacctactgcaggtcccctttccactgacagttggacactatcaggacgacctgcctgcagaaaggagctctacccagtttgggtcttatgagagctgttctgtcgctcaatgaagctcctctccaccttgctcaccctccaattgtctgcatagcccattcttcctggacatgggacaagaacttgggacccatctaatggcaggactgaaagagctgtcatgcaaaaagggctgaaacagtcctcccttctgaccatattgtgggcaatgagaagaagacctgcagccgttcagggagccaagacctgggagctccccaacccagacctgtgaaactctctttggggctstatagttcctggcatctctaagtttcttggcaccaccacattccccttgtccagacatgggtgcagacagcagaagctgtgtgtggtaca

SEQ ID NO: 955815 - DNA, 611 bp, Homo sapiens
ctaaaaggggccaaggtacagctcaggcctttgcttcatagrgtgcaagccccaagccttggtggcttgcaaatgtttttgggccagtgggtgcacagaaggcaaggattgaggtttgggagcctccacctatatttcagaggatgtatgaaatgcctaaatgcccaggaagaagtctgcttcaggaacagagccctcatggagaacctctaatagggcaaaggagaggggaaatgtggggttggaaccttcacacagagtccccactggggcactgcctagtggagtagtgagaagaaggccaccatactccagatcccagaatgttatgtctaccgacaacttgctctgtgtacctggaaaagccgcaggtactcaacaccagcccatgaaagcagccgtgggggctgaaccctgcagaaccacaggggtggagctgcccaaggccttcgcagtccatctcttgcatcagcattacctggatgtgagacatggagtcaaaggagattattttggagctttaagatttattgactgtcacgctgagttttggacttgcatgaggcctgttgcccccttgttttggcaactttctcacatttggaatggga

SEQ ID NO: 955816 - DNA, 611 bp, Homo sapiens
ctaaaaggggccaaggtacagctcaggcctttgcttcatagagtgyaagccccaagccttggtggcttgcaaatgtttttgggccagtgggtgcacagaaggcaaggattgaggtttgggagcctccacctatatttcagaggatgtatgaaatgcctaaatgcccaggaagaagtctgcttcaggaacagagccctcatggagaacctctaatagggcaaaggagaggggaaatgtggggttggaaccttcacacagagtccccactggggcactgcctagtggagtagtgagaagaaggccaccatactccagatcccagaatgttatgtctaccgacaacttgctctgtgtacctggaaaagccgcaggtactcaacaccagcccatgaaagcagccgtgggggctgaaccctgcagaaccacaggggtggagctgcccaaggccttcgcagtccatctcttgcatcagcattacctggatgtgagacatggagtcaaaggagattattttggagctttaagatttattgactgtcacgctgagttttggacttgcatgaggcctgttgcccccttgttttggcaactttctcacatttggaatggga

SEQ ID NO: 955817 - DNA, 545 bp, Homo sapiens
gatttctagcttttcttgaatcactacaaatcatggcgacattgtgttcaaatttcttcacagcaaaattggtaagagccacaaaacaactgctctttttatagaaggcacatatttgttttacttcaacttagaactcttcccttcttatggtcttacaccttccctctttatattacatatgaattggtaacttctagattagagtaacaatttctgctcacatcaaaaattcttagtgatggaataagaagggagggctactaaaatgagattacatgtcaaagatgacttctgacttgaacagactattgcatcagggtaatctgaaagtatgtatgccaggcttcttttaacaaacattatctagggcctgaacactcattcattcaagaaatattcataaaagtctttctatgtacctggcaaaatacatggtacaactataatggtcaccaaatgctagatcagaactaytctgccatgtgttggcagaaatattatttaaatatcttatgaatttttaatttgctaccattggtttt

SEQ ID NO: 955818 - DNA, 451 bp, Homo sapiens
aaaagaaaaaagaaaaacagctaagtagcatttagatgaaactatgactctgaagtagggggtgcggcaagtagagaggaaagaatgtatcataatgccttaaacaaaacttttgagtgagagaagactataaaacaccctttaagcacttattcactggactccatttgtgtttctaagaaataagatatacagactcacttcagaaggttttctcctacactgtatctgagacaccataaatagaaacatacattatgttgccactctatcacaagactgaacctggacacttgtaaggaaaggaacaaccataaagacagttggccaaggacaggattgacattcaccctgggggagctcctcgtagtagctacaasccaacccaaaacagcttctgggtttgtgatgctggtgctggctagtatgctgcataaatgttgtttgtttt

SEQ ID NO: 955819 - DNA, 640 bp, Homo sapiens
ggaggccattatcttaactgaatatatgccagaacagaaaaccaaatatcgcatattctcacttataagtgggagctaaacattgagtattcatggatgcaaggatgaaatcaatagacccagtggactactagcaggaaagggaggaaaggagagttgaaaaattgcctcttgggtactatgctcatgacctggatgacaggatttataccctaaacctcagcatcatgcaatatacctatgtaacaaacctgtgtatgtatattctgtatctaaactaaggttgaaattataaaataataataatagtaatattatcagagtctgtaatttgtcatcaatagaaattatatttctccataacatagaacagaaagtactatttacatttatagtcacttcagagttatagtagttattagaccatctccaatgtcttgcaattttgtgctttaataaagaagcatatatattatcataccgcaaatgcaaatacattttgaatattttgatacctgcacttcaaaattactgtttgtatttacatatmtatttttttgaaacagagtcttgctctgtcgcccaggctgccatgcaatggtgcgatctcagctcactgcaacctccatctcccaggttc

SEQ ID NO: 955820 - DNA, 774 bp, Homo sapiens
gtggcatgcgtctgtggtcccagctactccttctagggaggctgaggtgggagtatcacttaagcctgggagatggaggttgcagtgaatcctgatcccgccactgcactcctgcctgggtgacagagygagaccctgtgtagcaggacgagccgcagacaaaactcctctgacactgggttaaagaaggaaggagctttatttggctgggaacttcagcagacttgcatctcaaaagccaagctctcctcactaagcaattcctgtccattttaagggcttacaactctaagggggtccgtgtgagagtgtcctgatggattgagcaagcagggggtactgcatgcaccagtaatcagaacagaacagaacaggacagggattttcacagtgcttttccatacaatgtctggaatctatagataacataaccggttaggtcaggggtcgatctttaactaccaggcccagggcgcggcactgggctgtctgcctgtggatttcatttctgccttttagtttttacttctttctttggaggcggaaattgggcataagacaatatgaggggtggtctcctcccttacctgtacccgcccccaaaaaagaaaaaaatgatatgtgtgtgtacacgaggcaggatatttgcctgacccctttgtgggactcgagacaggggtgcatcgtttactcagcccacagctctccactcctcacaggagggagtgcacgagcaaacaaggcggggactggagtgcacgaggcctggaactg

SEQ ID NO: 955821 - DNA, 587 bp, Homo sapiens
agaaatacgacttttgagtgttgaaatcagatctaatttttgagagttaaagtcaagactgaatttcgcaacttcattgacttcatttaactttgtgtgtgtgtatatgggtgtgtgtgtgtattcttaggtttttctgcatactaggtaatgccatctgcatacagagatattttacttcttcctttccaatttagatgcttttacaacttctttttcttgaccaattactgtggcttgggcttcctggactatgttgaataagagtgtcgaaagcaggcatccttgtctgattcctgatcttttttttttttttttttttttgagatggagtctcactctgtcacccaggctggctggagtgcagtgatgtgatcttggctcactgcaaccttcacctcccctcccaggttcaagtgattctcgtgtctcaggctcccaagtagctgggatcacaggcacctgctaccatgctctgcgaatttttagatttttagtagagatgggggtttcaccttgttggccaggctggtctcraactcctggcctcaagtaatctgcctgcctcagcctcccaaagtgctggg

SEQ ID NO: 955822 - DNA, 637 bp, Homo sapiens
tggtgctaagcccctcactgccctgggcactccaagtgcaggtccygccgagcccacgcccacccggaactcacgctggcccgcgagtgccctgcgcagccccagttcccacccgcgcctctccttccaggcctctccctccacaccttccggcaagcagagggagctggctcaggcctcggccagcccagacaggggctcccacagtgcaacggcgggctgaagggctcctcaagcgtggccagagtggaggctgaggccaaggaggcacggagagcgagcaagggctgctagcgtgttgtcgtctctcagggggatggagtctggctctgtcacctaggctggagtgctatctctgcttactgcaacctgtgcctcccagctcactgcaacctttgcctcctgggttcaagtgatcctccggcctcagcttcctgagtagctgggattacaaacatgtgccaccatgcccagctaatttttgtacttttagtagagacagggtttcaccatgtgggccaggctggtctcaaactcctgacctcaagtgatccgcccacctaggcctcccaaaatgctaggattacaggtgtgagccactgcacctggcctgttttgggttcttttcttctctttt

SEQ ID NO: 955823 - DNA, 664 bp, Homo sapiens
gccctgggcactccaagtgcaggtcctgccgagcccacgcccacccggaactcacgctggcccgcgagtgccctgcgcagccccagttcccacccgcgcctctccytccaggcctctccctccacaccttccggcaagcagagggagctggctcaggcctcggccagcccagacaggggctcccacagtgcaacggcgggctgaagggctcctcaagcgtggccagagtggaggctgaggccaaggaggcacggagagcgagcaagggctgctagcgtgttgtcgtctctcagggggatggagtctggctctgtcacctaggctggagtgctatctctgcttactgcaacctgtgcctcccagctcactgcaacctttgcctcctgggttcaagtgatcctccggcctcagcttcctgagtagctgggattacaaacatgtgccaccatgcccagctaatttttgtacttttagtagagacagggtttcaccatgtgggccaggctggtctcaaactcctgacctcaagtgatccgcccacctaggcctcccaaaatgctaggattacaggtgtgagccactgcacctggcctgttttgggttcttttcttctctttttgaaagtgcaaaagttgttgggaattgaatagtttcgcctaaagga

SEQ ID NO: 955824 - DNA, 620 bp, Homo sapiens
accaatatgatgcatatatcaatatatacttatgtagaaagagatttattataaggaattggctcacgggattatggaggccaagtcctaagatcagcagaatgtgtcaacaaggacccaggggagccaatgtgttggttcaaattttttaaagggaccaaataaaagtggccaagacatgtttggacatcaggcaatgaagatcagtgacccccctgagagatgggaaacaaaagaagcaagccccaagatcgccccatctgaccacctcccattgcctactgtggcacagacggagcacagaggatggcctcagctaaggaggcttagctgagtcttgggagaccaaggcagcaagagtttgcaagactggggaccacggaagagagctacatagagacagagagggctctggagatttgcaggtggcccccttgagtattcagctgagaagtgactggcacatgcttgggagaagatgactcaagtctatagaaagactcacccaaggattagagagaacagagcccactggtgggtatgctgcctgttaacaccaactagactggaaaacctcatsatttgtgggactttgagtcgactacccagaagagtcttgc

SEQ ID NO: 955825 - DNA, 549 bp, Homo sapiens
caggtccttcccctccttgcgggtcccctcccctgcctcctgcccctgctgggaaggctgccctgtgcagtggtgctgagtctgggtggggtgaaatgatggaagcccccaccctctgctgctgctggaggcccagggtgggatcttcatctgtctgaaattcaggtccatgctggacaaacaccttagagggtcccttagttcagagctgcctccctgtttattctcctgcagtgactgaggagcttggggccgtgacagggcatttgcctggtggtcctggctaagccgcgttcctttccccaggagagggtggcggggactgtgttggggtgggagagggagcactgtgacccccgtgtggccagccctgcccactccctgtgcagtcttcagctcatctgatcacagggcttcaagggatgagggccacagctctgcaaattgtcagagaggtgggtaataaggagaaggttacattccttygacactgcttgcttgaatgggagatgggaacctaagattctgaaaataaacaggttaaagaaa

SEQ ID NO: 955826 - DNA, 511 bp, Homo sapiens
attgggcctccctgccatccattctctcacttcatctcctctcccctccttcactcgctctagtcacactcacctttttgctgttcctccacccatgccaggcatgcccctctctcatatgtttactgtttcaccagcctggaagacattttccccaggcagccacatggctggtttccttacttccttttaaggcctggatgaaatgttaccttctctgtgtggcattctctggccatgctatttaaaatgacagccaacttcccaatctgtaccagtacttcctgtcccccttccctgctgcgttttctctgtggccttgatcatcattcgacacactagatgttttcttgcatgttctatctctgtctcaacactggaaccccaggagggcagggctttgtctaytttgctcacttctgtatctctagccccaaaaacaatttaatctgttgtacgaatatacaaatgattgttcctgctggaaaattttcaaaccacctcacattac

SEQ ID NO: 955827 - DNA, 555 bp, Homo sapiens
ggtctccttggaatgagtatggaaggtgatcagtgtaagtgcacatgggcaggacacctaacctagtgttgggaagggaagggaagscttcagagaggatgtatccttgaaaccaggagctaaagcacttgatcagagagaccctactcagaagtccagggcaggtttggagtcagatgggctgtgggtttgaaatgcaattatatggtttggatgcttgtcccctccaaatctcgggttgaaatgtgatttccagtgttgcaagagggccctggtgggaagtgattggatcatgggggcggatttgtccctcgctgttctcatgatattgagaaagttctcacaagaccaggttgtttaaaagtgtgtggcagctcctccctcatgctcttgcgcctgctcctgcttcaccttctgccatgattgtgagccccccgaggctctcaccagaagcagatgctggagccatgttggtacagcctgcagaactgtaagcccgttaaacctcttttctttctttttctttttaaactttatcctttcttttaaaatttt

SEQ ID NO: 955828 - DNA, 555 bp, Homo sapiens
ggtctccttggaatgagtatggaaggtgatcagtgtaagtgcacatgggcaggacacctaacctagtgttgggaagggaagggaagccttcagagaggatgtatccttgaaaccaggagctaaagcacttgatcagagagaccctactcagaagtccagggcaggtttggagtcagatgggctgtgggtttgaaatgcaattatatggtttggatgcttgtcccctccaaatctcgggttgaaatgtgatttccagtgttgcaagagggccctggtgggaagtgattggatcatgggggcggatttgtccctcgctgttctcatgatattgagaaagttctcacaagaccaggttgtttaaaagtgtgtggcagctcctccctcatgctcttgcgcctgctcctgcttcaccttctgccatgattgtgagcccccygaggctctcaccagaagcagatgctggagccatgttggtacagcctgcagaactgtaagcccgttaaacctcttttctttctttttctttttaaactttatcctttcttttaaaatttt

SEQ ID NO: 955829 - DNA, 555 bp, Homo sapiens
ggtctccttggaatgagtatggaaggtgatcagtgtaagtgcacatgggcaggacacctaacctagtgttgggaagggaagggaagccttcagagaggatgtatccttgaaaccaggagctaaagcacttgatcagagagaccctactcagaagtccagggcaggtttggagtcagatgggctgtgggtttgaaatgcaattatatggtttggatgcttgtcccctccaaatctcgggttgaaatgtgatttccagtgttgcaagagggccctggtgggaagtgattggatcatgggggcggatttgtccctcgctgttctcatgatattgagaaagttctcacaagaccaggttgtttaaaagtgtgtggcagctcctccctcatgctcttgcgcctgctcctgcttcaccttctgccatgattgtgagccccccgaggctctcaccagaagcagmtgctggagccatgttggtacagcctgcagaactgtaagcccgttaaacctcttttctttctttttctttttaaactttatcctttcttttaaaatttt

SEQ ID NO: 955830 - DNA, 575 bp, Homo sapiens
tgcatttggtgtgtgggcaagtttactgtctcctatagggtcggaataacagggatctattgaagcttatctcattctcctgtggtgtacactttatttatttattcagtttttctccagtattttatttactgagtagatacttcaggtttcaggccagtagggaggtatccctagtttggcaccagttgtagctaaagcagttgggtagatgtaatactcaatggtgggcagaggtcccagccttgatgaagatggctggggaagctctcaattagatgtgctgatgatttatcagggtgaagggtggaagccacctcaaatctcctgccaggccagcaggaaagctatctacctctgtgctttactcctgtcccactgttctggctattcagatcagacaggcatatcttttcatctgtaggaatgttgatgttccaagtagggaggaactgtgactttgcctcttgtgcaagcctgaatctgragagtactcctcctgtggggcttcaatcatcctgaattattccaagaaggctgtctataggtgcatacatgctatattcccatgggag

SEQ ID NO: 955831 - DNA, 578 bp, Homo sapiens
tcacttctcctgacagccctcaaattgtttgaagacagcggtgcctacaaaaacatctcaaagttgcacatcccaagaggctgcaggaagaaggcagatggtaggcagggctaacatgaatctcctacttggatggtcagaacagtgtgtggagattcacactgtgaacttttgttccaagaactactacaggaaaaccaaaagaatttaccaggaaaaccaaaagaatttacagatcctttgaaagaaatggcatgccattgcaaactcagtgagacagaagaaaaactgtgagttcccaaagtgtgagtggggaataacctgcctccaaacacacatccccactggggaatctgaaaactcagatggtgggggaaggatttaaccctgcctagagctggaatggatttagggagctgtgcaaaatataaaaggagaagcagcaatgggaatagccttttaggcacccccagtctccagcttgagcccagggaagtcatccctgactatatctcacagggccccttggggaaggcrgccagcagaattagggaggggtcacagggtgaatgaaactg

SEQ ID NO: 955832 - DNA, 633 bp, Homo sapiens
atacaggcgggcacccctctaggacgaagcttccagaggaaggatcaggcagcaatatttgctgttctgcaatatttgctgttctgcagcctctgctggtgatacccagaaaaacagggtctggagtggacctccagcaaactccaacagacctgcagttaagggacctgactgttagaaggaaaactaacaaacagaaaggaatagcatcaacatcaacaaaaaggacatccacactaaaaccccatctgtaggtcaccaacatcaaagaccaaaggtagattaaaaccacaaagatggggagaaaccagagcagaaaagcagaaaattctaaaaaccagagggcctcttttcctccaaaggatcacagctcctcgccagcaaagaaacaaagctggatggagaatgactttgacgagctgacagaagtaggcttcagaaggttggtaatgacaaattcctccaagctaaaggaggatgttcgaacccatcgcaaggaagctaaaaaccttgaamaacgattagataaatggctaactagaataaacagtgtagagaacaccttaaatgaccaagctgaaaaccatggcatgagaactatgtgacccatgcacaagcttcattagccaattc

SEQ ID NO: 955833 - DNA, 584 bp, Homo sapiens
aatactaatgcccatcccaaccctcagagattggaatttaattgagtttggggtaggtttcagccacgtttttttttaaaggccaagatgattttagagtgctgccagagcattaagaagatctggattcaattctttttgtctgatcttagacaagttagcgagcccttctgaaccccaatgtatccataaaataaaggtcttttttttaatctacttcacaaagccatgttggaggtaaaaaagagaataaatatgtgagaactcccaacacagactctggcacataggtggcactcagtaagggtgagttctcttcctcttcactatgcactaatctatgttcagattaaacaaaacattgccttttgtacttgtgtctcttgctttttccccctctgatatcttccacttatttttcagaagtaacctaacggtacttgaaggaaatgagagtcaaagtcctttcccttctayagcacaaagggcctctccaccccttttcccaaagttaagtgattctatgtattcaaccagcagctgtgggactgaggccatgttgggagagggagtgaagtatgaca

SEQ ID NO: 955834 - DNA, 619 bp, Homo sapiens
aaactagagtatttacatagtgttagtgagagtgctaaatagcacagccagtttagtagtttcttacaaacctaagttcctgtataccacattctcggccatggaacaagcctcaataaactgaaaagaactgaaattatgcaaagtatgttctccaatcacaataaaattaaattagaaactctcaaaaagtatcttaaaaaccccaaaattgtttttggaatctaagcaacacacttctaaatgagtcaggagtcaaaagacaaaatcaggctggacaaggtggctcacgcgtgtaatcccagctctttgggagtcggaggtgggaggatcacttgaggccaagagttcaagaccagcctggtgagttttgaactcctggtgagaccccgtctctacaaaaactaaaaaaactagccgggcatggtgatatgcacctgtagtcccagctactaagggaggctgaggtaagaggattacaggagcccaggaagtcaaggctgcagtttgtgacactgcacttcagccttggtgagagtgaaacaaygtctcaaaaaaagaaaaaagaaaccaaacaggaaatgtgtactgaatgaaaatgaaaacatgtaatttcaaa

SEQ ID NO: 955835 - DNA, 641 bp, Homo sapiens
aaaatctgggaatcactaaaaaaaggattaccgaactctgtatctcccaaattcccaagcacccaactgcaactgtcgtctttttttttttttttttttgagatggagtttcactcttgttgcccaggctggagcacaatggcatgatcttggctcactgcaacctttacctcccaggttcaagcaattctcctgcctcagcctccccagtagctgagactacaggtgcccaccaccatgcctggctaatttttgtatttttaatagagatgggatttcaccatgttggccaggctgatctcaaactcctgacctcaggtgatccacccaccttggcctcccaaagtgctgggattacaggtgtgagccactgtgcctggcccaactgtcatctttttgtgttggtgttcatgtagtgttttctaatggaaacacttgctttgaatccttcatggttagagtaaaattcttccagatgtctgcaatcccattattttcacattcttccygtctcttccaatgaggtgacatggaaaactaagaatagaaacaaatgtgcctttggaagatgtgttagtccagatgcacggagacgtggctgccaagatgggataaaatgtgcaagggtcttattaaggaaa

SEQ ID NO: 955836 - DNA, 578 bp, Homo sapiens
tcacctgaggtcaggagtttgagaccagtctggccaacatggtgaaaccccatctstactaaaaatacaaaattagctgggtgtggtggtgggcgcctgtaatcccagctactcaggaggctgaggcataagattcccatgaacccaggaggtggaggttgcactgagctgagatcacaccactgcactccagcctggcacagagcgagactctgtctcaaaaaaaaaaaaaaaatcattgttacattacaggttgtactgatttttgaaaaaagtgcaaaagcaattcaatggaagattaatcttttcaacaaaaggtgctagagcaactggatatccttaggcaagaagaaaaaaaatggcgacctaaacctcacacctgtacaaaattaactcaaatggatgacagattaaaatacaaaagttaaaattataaaacttttagaagaaaacaaaggagaaaatctttgggatctaggacttggtatgttagatatgatgccaaaaacatgatccattaaagaaaaaaaaaaacttagtaaattggatatcaacaaaatttaaaatttttgctctgt

SEQ ID NO: 955837 - DNA, 590 bp, Homo sapiens
agcatttaattatatggtgctgagtattactattatattaattccttttgaaaatgaaaatgcagtaaagtacaagaggttcacrtgtcattggtcattgggtttgtttagtccttagaatttgtcttatcaataaattgtcttatttcttacatgctaggtaatacacacaagtgtagtacttatttctagcacctaataaaataactggcatacagtaggcatttaataaatacttaataactactctgaagtagttcatcatcttccagtttgctgttagggaatattctgaaaactaaagttgttcgttaacagtattctagtaattatttccctaaaattccatttcatcttaatactcccctaacaaagaacccataatgcctgttacttactacattaaatctaaattcctctgcctaactttgggtgtaaattcctctgcctaactttgggtagtaaaatacacataagatttgccattagtgacatttagcacattcacagtattgtacaaccatcaccacaatttagttccagaatactttttatcaccctagaaggaaactctgcacccattaagtcat

SEQ ID NO: 955838 - DNA, 614 bp, Homo sapiens
ggccctgactatctatttgatagttttgaaaaggcctggtccagtaaataataatttagccatctgatagttgctatcaatgcctaagtgaaaggtttggtaaagggttttaagtaatttcaattggttagctgcaggcaaaagtattttttcttctttggtggctagccatcctgaggggaggaaagtatgtcctcttgaggttctccattctatttcttctgctgagtactggggcttggtttcctggagggggttaccccacactaggggtccttctataagcatttctaatggagggtcctgtcttgtggctcttttggcttcaacatctgcttggcagttcccttctacttccctttccttttttttttttttttttatgaccccggcagtgtaagactgccacctctttaggtttctgtacagccaataataatatcctaatggcttcttgatgtttgataggtgttcccttggaagttaggaattccctttctctccatattgctgcrtgggcatggagaactaggtaagcatacttagagcctgtatatatatttaccctttttccttctcctaattctagtgccctagtgagggctattagttct

SEQ ID NO: 955839 - DNA, 552 bp, Homo sapiens
cacctgaggtcaggagttcaagaccagcctgrccaacatggtgaaaccccgtctctattaaaaatacaaaaattagctaggtgtggtggctagcgcctgtaatcctagctactcaggaggctaagacaggagaattgtttgaacgcgggaggtggagtttgcagtgagccaagactgcgccactgcactccagcctgggtggcagagtgagaccctgtctcaaaaaaaaattttaaaaaaacaaaataaccaatgttgatggaggcaactgtgtatatgcttttgccttttctctggtttgttgcgtcaccttctaaacttagcactaagtgtcagcagagcatggcctagttgtggtgcttctcggaacacacgcagaagggcctgaggatgacagaacagagtttaaatgaggagctgctcatgtctgcttcttcagattgtttcctagttctttgcctctgtttctcggtacctctggctttccagtgctccacactagcaatagcaaaggccctgctagcatctacaccccaagcttcacctagcctt

SEQ ID NO: 955840 - DNA, 552 bp, Homo sapiens
cacctgaggtcaggagttcaagaccagcctggccaacatggtgaaaccccgtctctattaaaaatacaaaaattagctaggtgtggtggctagcgcctgtaatcctagctactcaggaggctaagacaggagaattgtttgaacgcgggaggtggagtttgcagtgagccaagactgcgccactgcactccagcctgggtggcagagtgagaccctgtctcaaaaaaaaattttaaaaaaacaaaataaccaatgttgatggaggcaactgtgtatatgcttttgccttttctctggtttgttgcgtcaccttctaaacttagcactaagtgtcagcagagcatggcctagttgtggtgcttctcggaacacacgcagaagggcctgaggatgacagaacagagtttaaatgaggagctgctcatgtctgcttcttcagattgtttcctagttctttgcctctgtttctcggtacctctggctttccartgctccacactagcaatagcaaaggccctgctagcatctacaccccaagcttcacctagcctt

SEQ ID NO: 955841 - DNA, 545 bp, Homo sapiens
tcactcctgtaatcctagcactttgggaggccgaggtgggtgaatcacttgaggtcaggaatttgagaccagcctggtcaacrtggtgaaaccccatctctaccaaaaatataaaaaaattagccaggtgtggtggcgcacacctgtaaccccagctacttgggagactgaggcatgagaatccaggaggtggaggttgcagtgagccaagatcatgccaccgcactctagcctgggtgacagaggaagaccttgtctaaaaatatatatataaatcaaaatagattaaaatcttaaatctaagacctcaaactatgaagctactaaaggaaaacactgggaaaaatctttaggacattggtcttggcaaaaatttcttgagcaaaaccccccaacaaacagacaaccaaagcaaaaatggacaaataggatcacatcaagttaaaaaacttctgcacagcaaaggataaaatcaacaaagagacaacccactgaatgggagaaaatatttgcaaactacccatctgacaagggattcataacca

SEQ ID NO: 955842 - DNA, 649 bp, Homo sapiens
tcctttcacttccatttcaccacagagacaagtcggagtgcrttccacccacctgcaaccctcccctgcggacagatgggagcactcgtttctgcaaagatgggcactccgggatgcctctagaaaaggaggctttcccccagaagctcaaaatgcatctgcatcaacaactacattttatcttgcatccctgcagcccagggatgtgtttgcagactacaggtggggtacacatcggggccagagatgtttggggacgtgggccaggcagcacggtagatacctagggctggaggcctgtgtgtcctcactcagtgctgccatttggaacagtgctcaggggcgccccgcaccaagtcctctgacatttagcatttgggaacaaacccagcagtatctccgggcctccagcttccccacttaggaaatgggacagctccttgtcttcctccaagggaactgatgaggagagatgatatgttaggtgtggctctctcggaaggaaggcgctgataaacttacggtggtgggggagtgaggggcttgggggtgggggttcccttgtccgcatcctctccagaagccccgtctggactgtgatgtttgtggggagaaggctcagtgttaaaggggtgggatcacagctgca

SEQ ID NO: 955843 - DNA, 587 bp, Homo sapiens
caaagagacaacatacaagaatctctggaagatagccaaagcagtgttaaagggaaatttatatcactaaatgcacacatcagaaagcttgaaacatctcaartcaataccctaacatcacaatttaaaaagctagagagttgagaaccaaatcaatccaaaagctagcagaagacaagaaataactaaaatcagagaagaattgaaggagatagagaaacaaaaaaccctctaaaacatcaatgaattcgaacgctggttttttgaaaaaattaacgaaatagatagaccactagctagactaataaagaatagagggaagaatcaaatagacacaataaaaaatgataaaggagatatcaccactgaccccacagaaatacaaactaccatcagagaataatataaacacctccatgcaaatagactagaaaatctagaagaaatggataaattcctggatgcatacactctccgaagattaaccaggaagaagtcaaatccctgaatagaccaataacaagtttggaaattgaggcagtaattaatatcttactaacgaagaaaagcccaggactagaagaatt

SEQ ID NO: 955844 - DNA, 582 bp, Homo sapiens
caaagagacaacatacaagaatctctggaagatagccaaagcagtgttaaagggaaatttatatcactaaatgcacacatcagaaagcttgaaacatctcaaatcaataccctaacatcacaatttaaaaagctagagagttgagaaccaaatcaatccaaaagctagcagaagacaagaaataactaaaatcagagaagaattgaaggagatagagaaacaaaaaaccctctaaaacatcaatgaattcgaacgctggttttttgaaaaaattaacgaaatagatagaccactagctagactaataaagaatagagggaagaatcaaatagacacaataaaaaatgataaaggagatatcaccactgaccccacagaaatacaaactaccatcagagaataatataaacacctccatgcaaatagactagaaaatctagaagaaatggataaattcctggatgcatacactctccgaagattaaccaggaagaagtcaaatccctgaatagaccaataacaagtttkgaaattgaggcagtaattaatatcttactaacgaagaaaagcccaggactagaa

SEQ ID NO: 955845 - DNA, 715 bp, Homo sapiens
aggccactggccaccgccccactgaagctctgtgtgcttcacttctcctccttcttcaggctggataattgtattgatccatcttcaaatgcgctgaccctttctcctgcctcagcaatccacttgtgaacccatccagtgagttttccgttagagatactgtacttttcagttttatcatttctatttggttatatttttagagtatcaaatttttttttctgctgtgattccccatctatccatctatccatctattctgacccttgaacatactataaagcattatgttaaaggccttgctgctagttccaatgtctgggtgatctcagggttcctgggttcctttctctgggcagtttttttcttgattgtggatcacattttctctctttttgacatgtctaataatttttgtgtgtatactgatcactgtgaatgcaaccttgtagagaccctggttctgttatctttccctgagggtgtttatttttcattacagcagggagttcacttggctggaggcatatctcaatgtgtttcccctggaatctctgcttagttctttccgtctgctgactgttgctttcactgggtccttcggtgcctctctgtgcatgcacakttccggggcagccaaggatctgggcagagcttacatgcgtactggggagtccctatctgtggctatgtattttctagaatttatcccctc

SEQ ID NO: 955846 - DNA, 580 bp, Homo sapiens
aggacaccaagtccctaggctacacacagcatgtgaccttgggcccagcccatggaaccacagttttctcctagrtttctgggactgcaataggagaggctgccataaagtcctgtgtcatgccctggagacattttccctattttcttggtgattaacatttggttccatgttacttatgcaaattatgcagccagcttgaatttcttcaactaaaatgggattttcttttctatcgtattgtcaggcagcaaattttccaaatttttatgctctcctttcctgataaaattgaatgcctttaacagtactcaaatcacctcttaaatgctgtgctgcttaggaatttcttctgccagatactttaaatcatctctctcgagctcaaagtttcaaaatctctagggcaggggcaaaatgccagtagtctttttgctaaaacataacaaaacctgcctttgctccaattgtcaacaagttcctcatcttcatctgagaccacctcagcttattgttcatatcactatcagcatttttgtcaaagccattcaacaagtttctaggaagttccaaactttcc

SEQ ID NO: 955847 - DNA, 604 bp, Homo sapiens
attaaacattcaggattgctagatagcaagctaaataagtcastttattcaagctaatgaaaaaggatgtttcacagcctgcagcactgacatttgaatcaccactggctacatagagcttaaaacctagggctttgtttcaatggtcaggaaacttcaaagagaactctaattggaatgagagaaaaatagagtaaattaattggcaattatacttgtggaaataatggaacaataaagcagaactaaattctacctggtagataagtgatttggttgctttaaataaagttcaaattagcattcttttaaaataatttgtagaggttgtaaggtgataatatttgctcattcatattatatattaaagtggagactttataattgaataaaataagtggtagaaagggtattgtttctacctgaaatgagaatagacattaccagcaaactatttttattacttaaagtaactctaacagcatctaccagaacatcagacataaaatatgcagaaaacgtggattcaaaattcaataaataacagtgactgccattatctatcagcaattagtttgtttattttgttgttgttgttgtttaa

SEQ ID NO: 955848 - DNA, 604 bp, Homo sapiens
attaaacattcaggattgctagatagcaagctaaataagtcagtttattcaagctaatgaaaaaggatgtttcacagcctgcagcactgacatttgaatcaccactggctacatagagcktaaaacctagggctttgtttcaatggtcaggaaacttcaaagagaactctaattggaatgagagaaaaatagagtaaattaattggcaattatacttgtggaaataatggaacaataaagcagaactaaattctacctggtagataagtgatttggttgctttaaataaagttcaaattagcattcttttaaaataatttgtagaggttgtaaggtgataatatttgctcattcatattatatattaaagtggagactttataattgaataaaataagtggtagaaagggtattgtttctacctgaaatgagaatagacattaccagcaaactatttttattacttaaagtaactctaacagcatctaccagaacatcagacataaaatatgcagaaaacgtggattcaaaattcaataaataacagtgactgccattatctatcagcaattagtttgtttattttgttgttgttgttgtttaa

SEQ ID NO: 955849 - DNA, 632 bp, Homo sapiens
tcccactaacagaaaaagttaggcacgcagaaacattaaaagatgaggaggccgggcacggtggctcacgcctgtaatcccagcactttgggaggcccaggcgggtggatcacgaggtcaggcgatcgagaccatcctggctaacatggtgaaaccctgtctctactaaaaatacaaaaaaattagtcgggcgtgagcgggcgcctgtagtcccagctactcaggaggctgaggcaggagaatggtgtgaacctgggaggcggagcttgcagtgagccgagatcgcaccactgcactccagcctgggcgacagagcgagactccatctcaaaaaaaaaaaaaaaaaaaggtgaggagagcaaaatttattaaaagaaagctctcagtgaaaaaaaggagtcctgccaacagggtctcacctcccagattgaataccaggtcaccacacacacgtgccgaagagaccaggctccttcctggtgcacaaggcaccatcttcccagtgtctccaccccactctcccagtgtgcaggtgggtctcccagtgtkcaggtgggtcccccagttcgttgtgggtatgcccaaacaaggccctgggtgggttccctcgtctgtacaaaagcatctgatgc

SEQ ID NO: 955850 - DNA, 596 bp, Homo sapiens
ggtgtcaatggaagttagggctcttgaggcagaaataattaataaagcttcattggaagctaaatgtgaggatcgacctggaagacacacactgacaaagtgggtgtgtcccaaagtctgttacaagttrgaatgtttttgtgagaaatgttaaaagaagggaatggggctcctcctatcagtttgtttgtttgttttaatttgcttctgtttcttgatctggcaagcctcaaatagagttgttttttcagtgtgtcttttccattggaagtataatacagaggctacaatcattggctttagatgacaacataacaggcttacattttccttgcaagacaaccagcaaaacttcatgatcagaatcaaatcagtgtccttctcaccgtctgtaggtgaagccttcatcagtacttgaagagtttgagtcactcatgaactcatgatcagattctttactcagggacaggatgtaagccaatcgtaagaccttccgcaggtggttaatttggaagcctgcccaatgtgacctgcaggttttcactggcaatatgcaggtgcagatatgacaaagaataaccatgaccttcatatca

SEQ ID NO: 955851 - DNA, 428 bp, Homo sapiens
ctgtgtctatgtagaaaaggaagacataagaaatttcattttkatctgtaccctgaacaattgctttgccctgagatgctgttaatttgtaactttagccccaaccttgagctcacagaaacatgtgttgtatggaatcgaggtttaagggatctagggctgtgcaggatgtgccttgtttacaaaatatttacaggcagtgtgcttgataaaagtcatcgccgttcttcattctcaagtaaccaggggcacaatgcactgtggaaagctgcagggacctctgccctggaaagccaggtattgtccaaggtttctccccatgtgatagtctgaaatatgacctcatgggatgggaaagacctgaccgtccccaagcccgacacccgtgaagggtctgtgctgaggaggattagtaaaagaggaaggct

SEQ ID NO: 955852 - DNA, 683 bp, Homo sapiens
tagcagctgccaggaagaagagaagacgtggagattaaagctgggcgggtggttaggaggcaagcgggacccaagatctggccctttgtgtgtctacctcaaacaggaggtaagacagcagcagagggaaactttccttcttcaccatttgctgggtgtggaccaaaaataccaagacttgtattcacacacacaacctctaaacacacgtgcttctatatgtattaaataaatattggcacatacacatgcttaaacacacatccctggacactttacactccatacagacacctacacaatcacaggcatgtatactgcatcagtcaggataggcaaggctatgcttcattaacaaataactccaaaacctctactgcttaaaaccaaagggcttgcttcttgctcacgcgacatgccagtcacagcttctgcacatcatatcaccccaaggcccagactgatggagaagccactagctcaaagcttgctggtcatagtgccagagggaaagaaagacctctggaagatgttgcattggcaattacrttcttctgccgggaagtgacactttctcttctgcccattggccagaactggtcatatggccccatccaaccacaagggggccagggagtgcaattcggaagaggagacccagaaatatttagcaaatagcacta

SEQ ID NO: 955853 - DNA, 695 bp, Homo sapiens
gggaggctgaggcaggagaattgcttgaacccaggagttggaggttttggtgaactgagattgtaccactgcactccagcctgggaaacagagtgagactctctttcaaaaacaaaacaaaacaaacagatttaatttaaatattttaaatgacaataaaaaagaatatctcagtaacgtggattagaaaaagatattttgaacagaatagcataacaaaccttaatatttttaaaaatggcaaattgaattacattaaagttaagaatgtctatcaaaaatgctattgaaataaagaaagtacaagccacagagtgagaggtaatacttgaaatatatatatccgggaaaaaactatacctagaatatataaaggacttttactaatcaactaaagacaggtcatctgatagaaagatgggcaaaagacttgaacaggcacctcacaacatataatggtcaaatgatgaataaacattaaaaagccattcgccacctttagtcctgagggaaataaaaattaaaatcatatttcaataccagaatggctgaaatgaatagtgcctaccatgtatkgttaaaaatatggagcaactagaactcaccttcatgtttgggaagaatgtaaactggtacaaccactttggaaactgttgggtaacactagatgatagtgaacataggcatagcctaca

SEQ ID NO: 955854 - DNA, 553 bp, Homo sapiens
tcgagaccatcctggctaacacggtgaaaccccgtctctgctaaaaatacaaaaaattagccaggcgtggtggcgggcgcctgtagtcccagctactcgggaggctgaggcaggagaayggcatgaacccgggaggcggagcttgcagtgagccgagatggtgccactgcactccagcctgggcggcatagcgagacaccatgtcaaaaaaaaattgtaatatatatcttaaaataaaaatgaatgttcacaatctcaaagaggtcttaagatccctcactacccccaaagagatttttacatttttattaaacttctcactttggagtaactttagatttatagaaaacttgcaaaaacaatgcagtcttcatgtgccccttgtcccattccccgtgatgtgaacgtgttacttgaccgtggtgaggtgtcaagtctgcggggtttttcaccctgagagggttcggtctgtggcatctgcagggtttggggcacggttctcagtgctctgtgtggtgctgccgggggcccgccctgtaccccaggccggtgg

SEQ ID NO: 955855 - DNA, 634 bp, Homo sapiens
tgacatgatcttatattgagaaacacctaaaaactctgtcaaaaaactgttagaactgataaatgagttcagtgtgaagtcacagaatataaaatcaacatgcaaattcagtagcatttttatataccaaagcaaataatctgaaagagaaatcaagaaaaaaatgccatttgtaatagctacaaaaagtaaaataaagtatctaagaataaacttaaccaaagaagtgaaagacctctacaatgaaaactgtaatacttcgatgaaataaattgaagatgacatttaaaaaatggaaacatcttctgtattcctggattggaagaattaattttgctaacatgaccatactgcttgaaggaatttacagattcaaaaaaatccctatcaactaatgatgttcttcacagaaataggaaaaaacattctaaaatttgtatgaaaccacagaagattccaaatagccaaagcaatcccgagcaaaaagaataaagctggaggcatcacattacctgactccaaaatatattacaaagctatagtaaccaaaacagcatggtactgacataaaaacagacacatggaccarttaaacagaatagagaacctagaaataaattcatacattttcagc

SEQ ID NO: 955856 - DNA, 476 bp, Homo sapiens
ggaagctgaggcaggggaatctcttgaaccagggaggtggaggttgcagtgaactgagatcatgccactgcactccagcctggcgacagagtgagactccatctcaaaacaaaaacaaaaaacaaacaaaaaacmaattaaaccaaaagttagtaataataaggatataatagatatctcagtataaatcaatgaaatagaaaacaaaaaaattgatgagccataaaaatgaaaagctgctttttgagatcaataaaaatgataaacctcgagatggattgatagacaaaataagagagaagacaaattatccatatcaggagtgggagaagggacatcactagagatcctacagatattaacaggataagaggaatattatgaataaattaataccaataaattctacaacttagattaagtggacaattttatttcaagacataaatttccaagctcactaaaaaaagacagct

SEQ ID NO: 955857 - DNA, 570 bp, Homo sapiens
atacagggcccatggatgtccgaaatccagcggggcactcaaatctcaaaggtccaaaatgatcttctttgactccatgtctcacatctgggtcacactgatgcaagaggtgggttcccatggtcttgggcagctccacgcctgtggttctgcagggtacagtctctctcctggctgctttcacaggctggcattgagtgcctgcagtttttccaggcacacagtgcaagccctcagtggatctactattctggggtctggaggatggtgatcctcttctcacagttccactaggcagtgccccaacagggactctgtgtgggggctctgactccaaatctcccttctgaactgccctagcagaggttctccatgagggccctgcccctgaagcacacctctgcctcagcatccaggtatttccatacatcttctgaaatctaggcagatgttcccaaacctcaatccttgatttctgtgcacccacaggctcaacaccacatgggagctkccaaggctgtggcttgcaccatttgaaaccatggtctgagttctacgttggcccctttc

SEQ ID NO: 955858 - DNA, 610 bp, Homo sapiens
aaatctcgtcttgaattgtaactcccacaattcccacatgtcrtgggaggaacccagtgggaggtgattgaattatgggggcaggcctttactgcgctgttgttgcaatagtgaatgagtctcatgagatctgatggtttttaaaacaggcgtttctccacacaagctctctttgcctgctgccatccatgtaagatgttacttgctccttcttgccttctgccatgattgtgaggcctccccagccatgtagaactgtgagtctgattaaacctcttcttttgtaaattgcccggtctcgggtatgtctttatcagtaacatgaaaacagattaatacaccacctccaagcccagcaaggaagccacttcctttattttaatgtccactaattactgtataaatgaacctcatcaccagaagatttgttaattgaggtaaaatttgctgtttttctgcatcaactaatgggcaaaataacaagcgagcatcataatgacggatcaaattcacacataacaatattaaccttaaatgtaaacaggctaaatgccccagttaaaaggctggcaaattggataaagagtcaagacccatcggtgtgctgtat

SEQ ID NO: 955859 - DNA, 575 bp, Homo sapiens
agagggtattttcccctatcatgaacaggatgttgatttaatcaaatgcttttcctgcttctgttcggggaataaattggtttttattttcataacttattgatataccacaatattttaatagattcacaaatattaaacatcccttatattcatgaactattctttttttttttttgagacggagtctcgctctgtcgcccaagctggagtgcagtggcgcgatctccgctcactgcaagctcgacctcctggattcacactgttctcctgcctcagcctcccgagtagctgggactacaggcgcccaccactgcgcccggctaattttgttgtatttttagtagagacggattttcaccgtgttagccaggatggtctagatctcctgacctcgtgatctgcccgcctcggcctcccaaagtgctgggattacaggcatgagccactgcgcctggccgactattctttacatagtcatgttgtatatttacttgaatatattttgaattcaacactaccaataattgcatttgtattagwtaactgatttatggttttcctttattttgtac

SEQ ID NO: 955860 - DNA, 611 bp, Homo sapiens
ttttgaggttgatttccagttttattccactgtggtctgagagagtgcttgctataatttcaattttcttaaattyattgaggctcgttttatggcctatcatattgtctatcttggagaaagttccatgtgctgttgaatagaatgggtatgctgcagttgttggatgaaatgttctgtatatgtctgttaagtccatttgctccaaggtacagtttaaatccattgtttctttgttgactttctgtcttgatgacctgtctagtgctgtcagtggagtattgaagtccccactcttattgtgctgctgtctatctcatttcttaggtctattagtaattgttttataaatttgggtgctcctgtgttaggtgcatatttattcagtctttaaaaggaaggacattctaacacatgctacaacgtggatgaatgtggagggacattatgccatataaaataagtcaatcacaaaacagacaaatactgtatgatttcacttatacgaagtgcctgtagtagtcaaattcatagagaatttggttgccagcagctggggagaggggataataagaaattttgttcaattggttttacaacatggaaagact

SEQ ID NO: 955861 - DNA, 539 bp, Homo sapiens
ctccacagaaaaaaaaaattaattaggcatggttttgcatacctgtggtcccagctatttgggaggctggagtggaaaaatcactggagtcygggagttcaaggctggagtgagccttgattgtaccattgcactccagcctaagcttgtctaaacaacaacaacaacaataacaacaacaccgctatgaaatcacaatcaacttctaagaaatctgaccactttctactcttaagtgttgtatggcaaactgctgctgctgattccctttctctgaaaccatgttgtcaaaatgtaggtctcagaacatgaataaaagtctaaaattatctaggctccaaagagttttgtttatacaagttatagttgtcgctattaactttattagaattaaaactaaaaaatgtaaacatatccacttatttaaaatgaacaatattacaaaaatattttataaaaataattatatttcccgaaagaaaaaatttgtgagaaaagtgatgatcttttccatttttgcaaatctctttaatgtctga

SEQ ID NO: 955862 - DNA, 802 bp, Homo sapiens
tgtttagaaaagtcttttttgtttcttttcttttctttcttttttttttgagacagaattttgctctttttgcccaggctggagtgtagtgacacaatcttggctcactgcaacctctgcctcccagattcaagcaactgtcatgcctcagcctcccaggtagctgggattacaggcacgcgccaccatgcccagctaatttttgtatttttagtagagacgaggtttcaccatgttggtcaggatgctctcgaactcctgacctcaagtgatcggctccccttggcttcccaaagtgctgggattatagacatgagccacctcgccccgcccttttttgtttcaatatgcatttctttcataagcgttcccatctcagtctttttgcaaaaataatgcaaatcacattgtgtaaagatacctgcaactacaaaaagaggactggaattcagcaacgttttgtggattgaagtgtccctcaatctcaccatttccaccatccaggtagtttcacgaaccaagtggctttggagaaaaaaatccaacagggtagaccagaagatggcttatttataaaccagtgtgctgatgaaaaagcattgatgttggcatccagacacagctcagactctcactgctcttgctggctctgtccacaggacactgattacatagacgtggtgacagcagggacactctgccatccctatgctaacctggcattgcaacctgagcaaagccaggctcatgtgaggagcaacytcctaaagcaatcttttgtttttacttttttggggttggc

SEQ ID NO: 955863 - DNA, 764 bp, Homo sapiens
ttccaaattgagtgcccgcaagtcttgacaccacgggctaaagtgcttcagggcctcatataaacttgaaaggcagtctacaccatgagggctacaacacctaagggagtsctagtcttgaaatggacccagagccagtggattttggggggtatgtgtactactgagacactatctgggatggctaagggagtgctgccatcactcttccccaaaccccaggatgcacaactcatgattccaaaagagacccctcctttctgcttgaggaaaagagatgaaagagtgcagagaactttgtctcatatcttggataccagctcagccacaacaggatagggcacccgtcagagtcatgagattccctctccaggcactagtccttggatgatatttctagatgcaccctaggccagaaaggaacccactgccttggaaggaagaacccagtcctggcataattcatcacctgctaattgaagcatccttgggccctgaataaccagcagtgataacccaggtgctatgttgagggccttgggtgagactctgagtcttgctggcttcaggtgagactcagcgcatttccagctatagtggctacagggtaagactcctttcacttgaaaaaaagttcaaggaaaagtaaagatgactttgccttgcactttaggtaccagctcagccacatgggggtagagtaccaaacaggcacttggggtccccagtttcgggacttggctcttagatggcatttctggacc

SEQ ID NO: 955864 - DNA, 646 bp, Homo sapiens
ccatgcctatgtcctgaatggaattgcctaggttttcttctagggtttttatggttttaggtctaacgtttaagtctttaatccatcttgaattaatatttgtataaggtgtaaggaagggatccagtttcagctttctacatctggctagccagtattcccagcaccatttattaaatagggaatcatttccccattgtttgtttttctcaggtttgtcaaagatcagatagttgtagatatgcagagttatttctgagggctctgctctgttccattggtctatatctctgttttggtaccagtaccatgctgttttggttactgtagccaccctgtgtgagcagaaacagggcgaggcattgccgcactcaggaagtgcaaggggtcagggagttccctttcctagtcaaagaaaggggtgacagacggcacctggaaaatcgggtcactcccacctgaatactgcacttttccgatgggcttaaaaaatggcacaccaggggattatatcccgcacctgactcggarggtcctacacccatggagtctcactgattgctagcacagcagtctgatatcaaactgcaaggtggcagcgaggctgggggaggggagcccaccattgcccaggcttgcttaggta

SEQ ID NO: 955865 - DNA, 590 bp, Homo sapiens
gggcaggaagtgtgaggaggaaaatagattttgaaagttatgggaactgtagagggtwagtggagcatagcttgtgatttttagggcctctaaaagtattaaagcggcagcagtgaggtgtggctgtagcctaggaatagtcagggaagcggataatttagttaaaatgtctcaatctaataagggagctgggcaggtggggataactaaaaaagagtgcataaaagaatgttgtccaagttggcaccagagttggggagttttaaggggtttagaagccttgctgtcaatacccacaacagttatggaggaaagggaaacagtcccttaaaaagaaggtaatgtggagtgggtagcctccatattgattaagaaggggacggacttaccctccactgtaagagttacccaaagtgtctgtgatggtccaggaggtttccgaggcgattaggcagtgtcagtcttcaactgctaagccacgaagatctgggaaggagtcagtcagagagccttgggccagagttccaggggatctgggagtggctgccaggcgagttggacagtccaatttccagtggggtcccgcacag

SEQ ID NO: 955866 - DNA, 590 bp, Homo sapiens
gggcaggaagtgtgaggaggaaaatagattttgaaagttatgggaactgtagagggtaagtggagcatagcttgtgatttttagggcctctaaaagtattaaagcggcagcartgaggtgtggctgtagcctaggaatagtcagggaagcggataatttagttaaaatgtctcaatctaataagggagctgggcaggtggggataactaaaaaagagtgcataaaagaatgttgtccaagttggcaccagagttggggagttttaaggggtttagaagccttgctgtcaatacccacaacagttatggaggaaagggaaacagtcccttaaaaagaaggtaatgtggagtgggtagcctccatattgattaagaaggggacggacttaccctccactgtaagagttacccaaagtgtctgtgatggtccaggaggtttccgaggcgattaggcagtgtcagtcttcaactgctaagccacgaagatctgggaaggagtcagtcagagagccttgggccagagttccaggggatctgggagtggctgccaggcgagttggacagtccaatttccagtggggtcccgcacag

SEQ ID NO: 955867 - DNA, 590 bp, Homo sapiens
gggcaggaagtgtgaggaggaaaatagattttgaaagttatgggaactgtagagggtaagtggagcatagcttgtgatttttagggcctctaaaagtattaaagcggcagcagtgaggtgtggctgtagcctaggaatagtcagggaagcggataatttagttaaaatgtctcaatctaataagggagctgggcaggtggggataactaaaaaagagtgcataaaagaatgttgtccaagttggcaccagagttggggagttttaaggggtttagaagccttgctgtcaatacccacaacagttatggaggaaagggaaacagtcccttaaaaagaaggtaatgtggagtgggtagcctccatattgattaagaaggggacggacttaccctccactgtaagagttacccaaagtgtctgtgatggtccaggaggtttccgaggcgattaggcagtgtcagtcttcaactgctaagccacgaakatctgggaaggagtcagtcagagagccttgggccagagttccaggggatctgggagtggctgccaggcgagttggacagtccaatttccagtggggtcccgcacag

SEQ ID NO: 955868 - DNA, 572 bp, Homo sapiens
cttgattttgtcttgccactctcgatgcatgtatgaggcaagagacctctattttyctcataagaaccccaggaattaaaagtggatagatccttctcctctgatggaagattttatggcaactggattttcttctgcctgtctgtatagttatatatgtgttgtatatgtgatatctgtaaaaagaactctaattaatttggcctaaaggaagataagcacttggatcaaatattttttaaaggtaagataaaagtggtaccttttagttcatgtgactttaatctttgagaaataaaaacagctataaagattattggtaaaatgcagatgtcattaaaatataaataagtggactaaattatgcaggtaagatgaaaggtttgctgagtgttttaaggttatacactgctttttggtttttgttcaacttggtaatgcctgttcaacttggtaaggcctggggacatatggaactaaccatgcccctaattctactgaaaggagtcaaatcttggctgtactagaaaaataaaaacaacttaccaggttttacattaaagttaaaaatt

SEQ ID NO: 955869 - DNA, 759 bp, Homo sapiens
cagggaatgcggtggcgcccagaagcttggagacttcaggaaccacagagcttcaaagagggtgtcacagccttggctgggggaggtcctaagtctcggctccccaaggggccacagctyttatctcctctcttctctccttctcatcacccacaacgtggtgagttggggggtgtgcttcagcctgtttgtattacagctctttcagtcccaccattcagtgggtcccaagttcttgtcccatgtccaggaagaatgaggtacacagacaactggagggtaagcaagaagaggtgctttattgagtgacagtacagctctcaggagacccaaaatgggtagctcctttctgcaggcagatcatcccatcgtctgtgcagccctcagaggagaggagacctggagtgggtagctcctatctgcaggcaggttgtcctgatgagtatacagccctcagtggaaaggagacccacagtgggtagcacctctctgcaggcaggttgtcctgttttctgcccaagtctggctgagtctggggtttttataagcttcagaggggaggaagtacatgctgattggtccgtgggcgggcccagaaaaaccaccataagttctcactccagtctgcagaactggcagcccggctgtcaggcttcagtctatccctggcttgaaggtgaggtttcactggggaccctgcccctttctacccaggagcctgtctgcctcctgcccttgttcatggtgccctggctgttt

SEQ ID NO: 955870 - DNA, 387 bp, Homo sapiens
aaatttgcataaattataaggagctgaatgtcaatccccaagttgatgggaaaaatatctccagagcatgtcagaagacttcatggcaattcattccttcacaggcctggaggcctaggaggaagaattggtttcatgggctgggcctagagtcccagtgctttgtgcagcctagggacttggtgccttgtgtcccagccactccagccatggctgaaaaggcttaaatagaactagggctgttgcttcagacrgtgcaagcctcaaggcttggcagcttccatgtggtgttgaatctgcaagtgcacagaaatcaagaattgaggtttgggaacctctgcatagatttcagatggaagtgcctggatgcccaggaggaaatttgct

SEQ ID NO: 955871 - DNA, 718 bp, Homo sapiens
aacaagtggcagtcaacctaatcagaggaggccagtccacctcccgctggtcccacacccccatcacttctcatcaccagagagggcccctggcttgggcccacagcacagacctttcatcctgtgctgattctgctgagcaattgctgacctgcatctctctgggatggagcctcccaggagacaatcaaatgacccttgaccaaaaccactactaagatcccttcctctgctgcctccaagttggggaaggaacataaacaataagattgccccagagctgcagcaggcagctcaggagtgccaagtcacaatctacagccagcattcaaggggaagaggaacccatgctttcagagcattgagaggaaacatggctgcaactgtgaggaaacagggaagccacacaacaagcaagagtttaccaactgactaataagcctacgtgccacctgctggatcatactgtaaaggtttatcaccaaaaacacctcactaacatacctctgccgaaaccagagacaagaaggtagcttcaaataaagaccctgcacaaagcctaggcctggcaaaaaacatccagaaragaagtctattgactacccaatctacactgcagctaaaacaacagccacatgtagagataagaaagaatcaatgcaaaaacacaaagaaatccctgtttgagggtctggagtgaatctccaggaaactccaa

SEQ ID NO: 955872 - DNA, 607 bp, Homo sapiens
aaaccatccgccacgggttggacaaacttcttctagattaagttactgttaaaattatttttggtatccaagtggttaaaattgtatactaaatttaaaatatagttttaaataaacagtcactaaacttaaaggtaaaatattgctggaaatgcatctcttaatgatattgatggggttggtatttttttttctactagttcatatatccatgaacgaatattattgctagaaccacaaagctgaccataaattcccttaatatttttcattgttttgatattaatgttgaaaaactctgtttagacaaataagtagataaagatggaagatgtttttatagcaatgacaatcaattctttaaaccccctctgaattatgtgccccaattcacacactgatacatgctgatatggtaattcccagtgttggaggggggacctagtgggaggtatggatcatgggagtggatccctcataaatggctggatggsattctccctataatgagtgagttcttgctctgagttcactgtgagatctggttgtttaaaagaacatggcacctcccgcccttgctcccactcttgctattaaactattttta

SEQ ID NO: 955873 - DNA, 747 bp, Homo sapiens
gaaatggttactataagcttgaaatggtgataatttcttggtaaaaataaagaagtcttagaattctaagctttctgatttcctggggaatcttgctcacccctgggagggtgacaggactttaattcatggyagatgcagggacaagaggggataatggaaggtactggaagtaataggtgttcagcagtcagcctgagtgctcagataagcttatgttttgcctgctaggggagtttagatttaacctcatgctttgcttttccagagaaatctctaaagcaagtggtctctgtacctcatggtgcatcagaaccttaaaaaaccttaagaaatgcagaggcctgggccccactgactaatttactgaatcccagtctctcagggtggggtgtaggcacacctattttaaagttttatttatttttattttagtttatttatttatttatttgagacagtctcactctatcacccaggctggagtgcaatggtgcgatctcagcccactgcaacctccgcctcccaggttcaagcgattctcctgcctcagcctcccaagtagctggaattacagatgtgcaccaccatgctcagctaatttttgtattttttagtagagacagggtttcgccatgttggcctggatggtctcgaactcctgaccttaggggatcccaccgccttggcctcctaaagtgctgggattacaggcatgagccactatgcctggcatgtctgtttttt

SEQ ID NO: 955874 - DNA, 605 bp, Homo sapiens
cttagtgaatgaatggatggatggatggatgaagtgccctgcgcagtaggctacctgcttcctagagcaggcattttcccctgtaaagataatgacatcaatcaaaacatgttttgaacataaagtcttagagaacataaaggctttgaacataaagtcttagaagcctgtttatgaaaagcaaaataattctaacctgaggctccaaaagattcccaactgagacatcaccatgctgaccagaccatattgagcagaatagaggttgacaagttcagatggactacaatgaaaatggctgtaaaatgagtttactggctgaccctaaatccaattagccagacatctttctcaaaagactcaaagttgtatattacatttcactttgttcagatatgtggaatttctgcagacttatttatcgtgattctcgctattcattattaaggacaggatttgcgaaggaagagaaatatattttgagtatttggaaaagacatgaaataccyttctgaattttttttgtagtagtgggtataatgttgccagtactatgaggaaagtaatcctttggttacttttaaaaattagaccaaatcctaaag

SEQ ID NO: 955875 - DNA, 776 bp, Homo sapiens
gtgagaaatagtggagggaatgagaggtggtcagccttaaactgccatttgctctctgtatcmgggctcagggactttcagactctccagggattccatacagtttttacattcgtttcccagttgcaaacataatctcttcactctatgagaactctagatctgaatccttgttatgagtcaggagtctactctagtttactctcttgtcagtaactagacttgaaatgttttgttattaattgatatagtaataagattggttagagaaatagcaaagagcgagcatccccatcctatgaccatatcagcaccagaagagaaaaacacttctacacagtttttcccttggcataggccctggtattctgttagggaacaggttataaagtaaatacaaagggtctttgtacttactttcagaatgtattttctttaacatgaaaagaatccaaggcctttttgcttctaattgctttttgtgtatctactaccatccattgctaaattattgatacgtttcctcaaatctcggcatgatgtcctacattccaaattttcaatagctgaaaatttcaccttttcagtgccttcatgtttatcttagtaaaaagttgagaaagactgtaatagagttatttaatccgatttttttcatctaccataatttttgaataaggaaaaacatcaacagtttttctccttacttggcaaataatttccatagagaggaaaaaaaaccaatcaaaacaggtacaaaatgtaacaaaaccaaa

SEQ ID NO: 955876 - DNA, 587 bp, Homo sapiens
caatcccctctggccctgggaaggtccagaaatattttctaggcatgaaggcctggatgcagggaacccaagagcccacrttgtgctctaatgcacagtggccaagctgatgcccaagctgtaagacaaagtcccctttacccttccctctcctttcctcaaggtgagtttgtctctatgactgtcaaatctgggaatgctctgggtcacacctgaagtcagcatagtctttagtctccccgaaagcccacagcgagtactgtctgggtaccactgatgtttattcaagacccaagtctctttagtcagcaagtgggaatcctgcctgaattgcattcttcccttcaaagcggtaagttcccttctgacctagggtatgtctaaaaatgttctccaggagctgagttctggaacggggactccaggactctactcattgccctatatccttctgtgatcgaggtgatatccaagtttcaaaacaacatcctctttactctttcttctcctctcttcaagcagaaggaaggagtcttttctggaggtgcaatctgtgctgctgggatagggggaggagtgatgtgaaa

SEQ ID NO: 955877 - DNA, 560 bp, Homo sapiens
gatgtcctgatgtgcaagctcacaaaggaggataccagtgagttttatgctctgtrccataaccctctaccaccaagtagtgaataagcaggtttctgactatactaaaggcctatcttcattaggactcttggttgcaggagacaaaatcccaccttgatgtagcttaggcagaaccaaaggaatttattaaaagagcactgatctttctcacatcagcaaactgcagcacaggcgcagaaataactgggccttgggaactgtgaaagccagagaaatagatgccattaaaatgcatactcccactctatttctctctctctctctctctctctcctttcctctcctctctccctctctctggttttggctaggtctctctcttcacatcctcctactgcagaccagaggaaggcacatagccattatcagtgcccaagaatatatcttgcaatggccaccaccaagagagaataattcacattttttcttgacccaattcaaaaattcctaagatgtcatccagttggcccaaaatgggccaggaatctaaccctgga

SEQ ID NO: 955878 - DNA, 600 bp, Homo sapiens
atcatgatgataggatcaaattcacatatatcactactaaccttgaatgtaaatgggcyaagggcccccaattaaaagacacagaatggcaagctggataaagaaccaaaacccattggtatactgtcttcaagagactcgtctcacatgcaatgacacctataggctcaaaataaaggaatggagaaaaatctaccaagcaaatggaaaacaaaaaagcaggggttgcaatcataatttcagacaaaacagactttaaaccaacaaagatcaaaaaagacaaagaagggcattacataatggtaaaaggttgaattcaacaagaagacctaactatgctaaatatatatgcatgcaatgcaggagcacaaagatttataaagcaatttcttagagaccttcaaagaaacatagatcccaaaaaactaatagtggaggacttcaatgtaccactgacagtattagacagagcattgagacagaaaattaacaatgatattcaggacctgaactcagcactggatcaaatagaactcatagtcagctacagagctctccacccaaaaacaatagattatacattttcctccttaccatatg

SEQ ID NO: 955879 - DNA, 632 bp, Homo sapiens
cattgctacagacaggcccatttctttaccttcccgacctctgaagcaagaatgacccaaaatacacgttccaggagccctttcattttgcagcaccgcccgcagcacctgcccggtggtgtcctccatcacttcgcgagtgaatgaggacccacctcaagggggaaaagatctacttcatctgccagagaaacatgtctggaatggaacaagcctgccagtagtcagagagtatatccagggaatggcccctgagcagcacagctcgtggtcaagcctccaggattaacagtcttatgaaacaaacagcatctggtatttagtagagagcagcatcattgtgttatgacggctaccgacaacttccccctccttacacctggctccgggcggggctgcggggctgtgggtcacaggccatctctgatgcagcccaggggaattgcaaatgcctacatgtcccggtttgggtgagtcttggccctatggggagccctggggtccctcctgagcttctcaccttgaaggctctccagtaggaactgagaacatgtgtcagcctctcaagggctcagtgttggtggctggttttakaccccctccctctgcctccctcccacccgatcatgaga

SEQ ID NO: 955880 - DNA, 562 bp, Homo sapiens
tccaggacacagctaaagcagtgttaggaggcaaatttatagcactaaaatgcccatatcagaaagctggaaacatctaaaatggacatcctagcatcacaattaaaagaacaagagaagtaagagcaaacaaatttaaaagctagcagaagacaaaaagtaactaagatcagaactgaaggagatagagataccaaaaacccttccaaaaataaatcattgaatccaggagctggctttttggaaaggttaccaaaatagattgaccactagccagactaataaagaagaaaatagagaagaatcaaatagatacaataaaaaatgataaagtggagattaccactgatcccacaataatataaactagcatcagataatactataaacacctctatgcaaataaactagaaaatctagaagaaatgaatacattcctggacacctacaccctcccaagactaaaccaggaagaagttgaattcctgaatagaccaatarcaaggtctgaaattgaggcagtaattaatagcctaccaaccagaaaaagcccaggaccaga

SEQ ID NO: 955881 - DNA, 562 bp, Homo sapiens
tccaggacacagctaaagcagtgttaggaggcaaatttatagcactaaaatgcccatatcagaaagctggaaacatctaaaatggacatcctagcatcacaattaaaagaacaagagaagtaagagcaaacaaatttaaaagctagcagaagacaaaaagtaactaagatcagaactgaaggagatagagataccaaaaacccttccaaaaataaatcattgaatccaggagctggctttttggaaaggttaccaaaatagattgaccactagccagactaataaagaagaaaatagagaagaatcaaatagatacaataaaaaatgataaagtggagattaccactgatcccacaataatataaactagcatcagataatactataaacacctctatgcaaataaactagaaaatctagaagaaatgaatacattcctggacacctacaccctcccaagactaaaccaggaagaagttgaattcctgaatagaccaatagcaaggtctgaaattgaggcagtaattaatagcctaycaaccagaaaaagcccaggaccaga

SEQ ID NO: 955882 - DNA, 576 bp, Homo sapiens
aaaaaaaaaattagccaggtgtgatggtgcatgcctgtggttccagctactcaggaggaggctgaggtgggaggatcccttaagccaaggagaccaaggctgcagtgagctatgatcgaaccacggcactccagccttggctacagagtaagaccctgcctcaaaaatatatataagtaagtaaataaatatggacccagataaacctattcaggagatgacctcccttcaatgcagaaggaacatgttaagagagaaatcaggatacctcaagttaagggctatgagagtaagaaaaaagtacttgaggaaataagcaaggaggtggctaattctgcctgggggaccagagaagttatacctaaagaggtgatattttatttggaactcagggtgagtaggcattcccagggttgattaggggtagaagccattataggaaccaagcccggagcttytgtaattcaagaacatgtcctaagacctaaatattgcaggagcacatgacaaaacgctgtaagaccaggatgaaaaagatcaggaccaagttgtgaagattatattgaaactgagatg

SEQ ID NO: 955883 - DNA, 607 bp, Homo sapiens
aggatacagacatttccaagtaactaacagtgtcccagaacaaagctagagaataattaaaagaatattaaaatatacagcactcaacaggataaaattcacaatttctggcattttatcaaaaagtaccaggcatgcaaagaaggaggaaaacatgattgtgatggttaattcatgtgtcaacttgattggccacagggtgccccaatatttgcttaaacattactctgaatgtgtctgtgagagtgtttccggataaatatcaacaattgaatctgtaacctgagtaaagaagattgatctccccagtgtgagtgggcctcacccaattcagtgaaggcctgaatagacaacatagttgagtgacggagaatttgctctcatgacacgactgtcatcaagcaagaacatcagtcttcccttgcctttgggcccagactagaactggaatttacatccacctctcctgattctcaggccttcagacttgggctagaacaatatcgttggctctcctgagtctccagcttgccaactgcagatcttgggactcttctctgcctctstaagtgtgtgggccaattccataaagaaataaatctcctgt

SEQ ID NO: 955884 - DNA, 721 bp, Homo sapiens
cccctgtctggtggcccacatccagtgatgaatcagtgtagcatgtgaaggctatctctatctaacccagcacaactctgaagggacrgagctccctgtggggtcgccttcatcaagcctgtatcacagcttagcatttctgcccacgctgcttcctccttcttcgttccacaggtgttgaacccaagggcagtctggatgcccaactctgtctcagagacagttttctggggagcccaatgtgctacattctccttcaggccttctctgtacacaactgtctggcccattagattgcgagcaacttagtgcaggggtccggtccgtggcctgttaggaactgggacacacagcggggagtgagtggcgggcaagacagcaagcattaccacctgagctccgcctcctgtcaaatcaacagcggcagtagattctcacagaagcgaaccctactgtgaactgcgcatgcgagggatctgggttgtgcgctccttgtgagaatctcacgcgtgatgatctgaggtggaacagttttcatcccgaaacatccccccatcccaccttgctatctgtgaaaaaatttggaaaattgtctttcacaaaaccagtccctggtgccaaaaaatgttggggaccactgcctagaggcaaaagctgtaccttatttatttccagacctacagtgcctaacccagcctggccagcaggtgcttggtagatg

SEQ ID NO: 955885 - DNA, 637 bp, Homo sapiens
aagaccagcctggccaacatggagaaactccattctgtactaaaaatacaaaaattagctgggcatggtgctgtgtgcctgtaatcmcagctactcggaaggctgaggcaggagaatcacttgaacccaggagactgaggttacagtgagctgagatcatggcactgcactccaacctgggcaacagagtgagaagccatatcaaaaacaaaagaaaaaaacaatttagaatttgattttgggaagtttgttgaaaatatcaaaggttgaaaacacttgatttaggccaggcacggtggttcacacctgtaatcctagtactttgggaggccaaggtgggcgaactgcctgagctcagcagttcgagaccagactgggcaacatggtgaaaccccatctttactaaaatacaaaaaattagccaagcatgttggtgtgcacctgtagtcccagctgaggtgggagaatcgctagaacctgggaggcagaggttgcaatgagccaagatcatgccactgcactccagcctgggcaacagcgaggttctgtctccaaaaacaaaacaaaacaacacttgatttaacaggatcacagataattatgaagaaatgccaaagtgactaaacatttcaaaggc

SEQ ID NO: 955886 - DNA, 591 bp, Homo sapiens
aacttttggggctagtcaatcgttagagataataaatggctgagcaggcagcatgtgtttaataygcaaactaaccaattgagagccatatctcttctatctggcccatacacctcaggggaaattattcctctaaattaatcatcccaggaccagacaccaggcaactagagaccatatctttagcttagagcccaccagaagtattcaaactaaccagtcctacactgttcactttgctctgccttgcctttcctgcagaaacccaaataaaggctctggcctaatgctttcccttcactccatcttctgcctcttgactgccccagtgtctttcctgtgctgctctacatggcatgccatgcctcctgtctcaaggattgtgagtataataaagtttgtatacctgagcttctcttatgtctcctcttgtgccttcacacaactagccatcactaatagaacagagatctctatggccaatatgacaaaagaaaaaagagaaaacacacttcataaaattagttgggaaaagtcagtaaacaaacaacaatcacaacaagcagcaaccacacatcatggacatgagtg

SEQ ID NO: 955887 - DNA, 569 bp, Homo sapiens
tgggtataaagtgttatctcatagtggtgttgatttgcatttccctgatgattactaatgttaaacacytttcacatacctactggccatgtttatgtcttctctggtataataatgtctattcagctctttaatatactacaaaatattattaaaccctaaaaaataagaatgattctatcatttgccaaaacatgaatgagcctaaaggacattatgctaagtgaattaaaccagacacagaaagaaaaatattgcatgatctcacttacatgaaaaatctttttttaaaaaagtcaaaaacaacagagatagagaacaaaataatgattaccaagggcatgagtcggggagaaaatggagagatgtagtttggaggacacaatgtacaagacgattggaatgaataagtctacagatctaatgtataacattaggatattggtgataaagttgtactatattttaatttcatgctaaacaaaattctttagcagctctttccaaaaatcaaaatgaatagataaccatgtgagttaatgaatatgtttatttgcttcattctggta

SEQ ID NO: 955888 - DNA, 588 bp, Homo sapiens
accatttgacccagtgatcccattactgggtatatacccaaaggactataaatcatgctgctataaagacacatgcacacatatgtttattgcggcactattcacaatagcaaagacttggaaccaacccaaatgtccaacaacgatagactggattaagaaaatatggcacatatacaccatggaatactatgcagccataaaaaatgatgagttcatgtcctttgtagggacatggatgaaattggaaatcatcattctcagtaaactatcgcaagaacaaaaaaccaaacaccgcatattctcactcataggtgggaattgaacaatgagaacacatggacacaggaaggggaacatcatactctggggactgttgtggggttgggggaagggggagggataactttaggagatatacctaatgctaaatgacgagttaatgggtgcagcacaccagcatggcacatgtatacatatgtaactaacctgcacattgtgcatacgtaccctaaaacttagaaagtataataagaataaaattaaawaataataataataataataatttaaaattctattctacaa

SEQ ID NO: 955889 - DNA, 656 bp, Homo sapiens
ttgaaatttctatagtgaaattttcaattccagaagttgagtttggttcttacttaaaatggctctgttgtctttcgatacttggatcattttttgagttttcttggattgggttttaattttctcttgaatctcgttgagctttcttggccatccatattctgaattctatgtcagttgtttcagacatttcaatctggttaggatccattgctggagagatagtgcaatcctttagaggtaaggaaacactctgactttttaaattgctagagttcttgcactgattgcttctcatatgagggggccagtatttctttttgaaattgccgtcatttggatgggactttttgtttttataataatttttgtgtttgactgtggtgtatgttgtgtatagtactggcttcatttctatgtgcttttagagggccaaggctgtgtagagttcctcagttgtggatcctttcctgcatgggtctccaggcattgagcgctgaagggatgtatttttgcttcccggtgtgattcaggttgcaatccagtagatagtgcttaagagtcagggctggcagataggctcttagccacatgcctcttgtgtgtttcagtgcatgtgcagcrgtgccctggggaggggaatggggggcaaaaga

SEQ ID NO: 955890 - DNA, 612 bp, Homo sapiens
aagaccagcctggccaacatggagaaactccattctgtactaaaaatacaaaaattagctgggcatggtgctgtgtgcctgtaatcmcagctactcggaaggctgaggcaggagaatcacttgaacccaggagactgaggttacagtgagctgagatcatggcactgcactccaacctgggcaacagagtgagaagccatatcaaaaacaaaagaaaaaaacaatttagaatttgattttgggaagtttgttgaaaatatcaaaggttgaaaacacttgatttaggccaggcacggtggttcacacctgtaatcctagtactttgggaggccaaggtgggcgaactgcctgagctcagcagttcgagaccagactgggcaacatggtgaaaccccatctttactaaaatacaaaaaattagccaagcatgttggtgtgcacctgtagtcccagctgaggtgggagaatcgctagaacctgggaggcagaggttgcaatgagccaagatcatgccactgcactccagcctgggcaacagcgaggttctgtctccaaaaacaaaacaaaacaacacttgatttaacaggatcacagataattatgaagaaatgc

SEQ ID NO: 955891 - DNA, 789 bp, Homo sapiens
ccctgtgcatggcaacccccactgactgatgtgcgtcatgtagatgcccagagaccgctgctttggctggaccaaaccccaaggccagtgcgagcaggagaatctgcgttccactcccccgctgcaactcaacaccctttccctccctccctcctttccttccacagtgattcagtgagcatcactctgtgcccagcttctggctggccattaaggattccatggtgaatgaggccatcattccaatcgccagccacagaaaccagtgccccaagaggcctcattccctgggctgagcctaagatgcactctttgcagagcagggaaggaatggctgttgtttccagagcccaggatgaaactgtgtgtgagggaactgtttcaggcctggggataacagggcacacgtggtttcaatgttttattcaagcctagcatatacgctgagaagggcaccactcaccagcagacagacgtccatacccaggtaaccagcgaccagatggagaagcagaacacgccccagaagccgtcccaggctctgttttaaccaccacaccctttccccaccaaatatagccgcgatcctactttggaataatataaaacacctttgcctgtttttgaactttataagtttgtctctgccttcctttgctctacaccgtctttgtgaggttcatccacatttttgcaggtagctgagttagtcatccatccacaatgaggagagtatccacttgtctgaatamaacaggatttatttttcccttcagctgtttttggata

SEQ ID NO: 955892 - DNA, 502 bp, Homo sapiens
gcctgatccctgcagagcagggtgtagggacatggcgcaggtggcccttaggaagatgggctcttgcctcccacccgcgtctccctacctttgtctcgctgccatggcaaaaattcccttgtccccctcgcacggcgtgcgatgggggagtggctcgcttcttcagtgccccgctgctcaaacctccaggggagcatagacgggcaggctgtgggactccgaccccacggcagtgtctaggggtggatgtttacagctcctgaagccccagtgggcgtgtgctaccgggtgctctataggcagcttgtgttaaccagctcagtcagactctctacctcgtcacaaggacagagggctttctgtatcccaggttcttgccctggtgtacgggaagaatcggatcacacgtgggcttggagaatgagtgcaaggtgttattgagtggagrtagctctcagcagatgggggagccagaaggggatggagtgggaaggttttccct

SEQ ID NO: 955893 - DNA, 457 bp, Homo sapiens
aacaatttagttcaatgaatatatgacacatatgaaaatggatatatgaataaatgaaaataaatkaatgacgtgactctgtgcatgtcattcacacggaatcgtggggctcctgttggggaggactatcatagaattattaaacaacctcatcttaaggtgtttcttcctccatagcagcccaaagcctgcgtatggaaatggagcagtaagggacctcgcaggcaaggcctgcttctgtcccctctctaactgtgccacgtgccaaactgtgcccaggtctgctgggctgagctctttgttcaattagtcagtggcctcagccttttgcatcatagccttcaccggacactcgagtgtgccttctcctaaggaagcagatcaagttcatcccatgcctttgggccaatgctggcattattttcatttctacttcccttgtcctttgctgaaatag

SEQ ID NO: 955894 - DNA, 673 bp, Homo sapiens
taattttgaatgaattccattgctatgtctagttcaccaatcttttcttctacattgtttaatttgcttttaatcccatccaggttatctcacatactctcacacattgtaatttgcatcttaacttgtgtcttttacatatttactaaactttttcaacatatggaatacagttgtaataagtgcttaatgtcttggtttgctaattctaacatgtgtgtcagctctgggtcagtttagattgattgtttttcctcccgattgtgggttgtatatttctgcttttttacatgcctggtaatttttaagtgtgtgccagacattgtgaattttacctaaataggggctgaatattttcacatttttacacatattgttgagttttgttctgagatgcagtaaagttacttaaaaacattttaatatcctggtattaagctttttaggtgacaccagagaaatatttagtgttgatgcagttactctccactattaaggcaagaccttctgagcactcaacccagtgattgtgaattataaggttttctagtctgactagaagagttaggtacgaattaattttaragatagggtcttgctctgtcaccgaagctggaatgcaatggcatgatcatagctcactggatcctgaaactccttggctcaagctatc

SEQ ID NO: 955895 - DNA, 673 bp, Homo sapiens
taattttgaatgaattccattgctatgtctagttcaccaatcttttcttctacattgtttaatttgcttttaatcccatccaggttatctcacatactctcacacattgtaatttgcatcttaacttgtgtcttttacatatttactaaactttttcaacatatggaatacagttgtaataagtgcttaatgtcttggtttgctaattctaacatgtgtgtcagctctgggtcagtttagattgattgtttttcctcccgattgtgggttgtatatttctgcttttttacatgcctggtaatttttaagtgtgtgccagacattgtgaattttacctaaataggggctgaatattttcacatttttacacatattgttgagttttgttctgagatgcagtaaagttacttaaaaacattttaatatcctggtattaagctttttaggtgacaccagagaaatatttagtgttgatgcagttactctccactattaaggcaagaccttctgagcactcaacccagtgattgtgaattataaggttttctagtctgactagaagagttaggtacgaattaattttagagatagggtcttgctctgtcmccgaagctggaatgcaatggcatgatcatagctcactggatcctgaaactccttggctcaagctatc

SEQ ID NO: 955896 - DNA, 601 bp, Homo sapiens
accaccatgcccagctaatttttgcattttttgtagagacagggttwtactgtgttgcctaggctggtctagaactcctgggctcaagcagcacgcccccatcagcctcctaaagtgctgggattacaggtatgagccgagaaggctgactgttttaaaaaatatttcctggatataagtcctttgtcagatacgtgccttgcaaatatttttttctagtctgtacttattttttcatcttctaattagagcttttcacagaggaaaagttttttattttgatgatgttcaatgtatatacttttaaagttttatggataatggttttggtattagtcctaaaaacccttctgcacgcactagttcctaaagaatcccttacattttttgttaagttttatacttttacatttacatttaaacctgtgacccattttgagttaattttttagtaaggtatgaaatttattttacctttactttttgcctatggttatctcatggctcctgcaccattggttgaaaaaactattttattacattgaattgtttttgctgcagcattgtgtagttttcaacgtatctatcttacacaggtcta

SEQ ID NO: 955897 - DNA, 599 bp, Homo sapiens
atttgtatttcctgagatattgaaggagagtataggagataaagggttaaggatgaatccttggtttaggcttgagcaaacagaagatgtgagttgatattaactgagatgggaaaggctgaaaaaggaacaggcttggggagagcagttcaggagtttggttttgaacatgtgatgtttgagatctccaatagactaaagtaatatgtactgtagggagctggatatacaattgcaggagttagatgtacagaaggcaatagcagctctggataggtccaagtagattataaatttgaaagtcatcagcatatacatactactgacatccttggggcagacgtgatcagcgagagaacaggaacagaggagttataaagtctgagtccaaagacacgtctattaaaagtttgagtaaataagtaagaactagcaaagaagaataagataaagtggctagttaggagaacaccaagaaggtagtatcctggaaaccaagggaagaaagtatatcggggaagaaggaatgatcartgatatcaagtgctattgatgaggcaagtcagatgaggcctgagagatgaccacagtaacataca

SEQ ID NO: 955898 - DNA, 754 bp, Homo sapiens
tttatcatgagctgggcattatgaatgcaacaaaagaaaaatatggattctttggggccttatattcaaggggtggggtggaataaataaaaatatagcaggcagtggtataatactgcaatagagaaacatgaatacaaaactatgagggaaaatgggccctgggatggggcatggggaaagaggagctgctgttgtaagcagtgggagagggggtcaaggaaagcctcactggtacctgagctttgagcagagatctgaaggaggtgagagagcaagtcctttgtctatcagggtgctatagactgacagtttatattcctctaaaattcttagttgaaatcctatcgccaaaggtatgacattaggaaggagggtgtctaggaggcgattaggtcatgaaggtgaacagagccctcattaatgaaattagtgcccttatgaaagagaccagagagctccctttgccccttctccataacagagcatggtgagaagagagccatctatgaaacagaaaggggaccctcaccagacactgaatgtgccagcaccttgatcttggacttcctagcctctagaaccataagaaatgcatttctgttaattataagccacccattctatggtatttttgtcgtaacagcccaaacggactagaacactagaactttcaggcagagggaatggmaaagacacatataccaaagaaggagccttcttgttttggttcagagaattttacagaggctag

SEQ ID NO: 955899 - DNA, 607 bp, Homo sapiens
tgctctggttccagcttcagctcaagggggtccaggtacagcttgagccaaagctcaggagggcacaatctgtaatccttcatggtttctatctagtgttaagtctgcagatgctsagaatgcaagcatgaaggaggcttggcagcttccccctagatttcagaggatgtactggaaagcctcggtgtccaggcagaagtctgccacagagatggagcccccacagagaaactactagggcaatgttgaggggaaatgtggggttggagcctccacacagagcccccactggggtactgcctaatggagctgtgggaaggggaccactgccctccatactttggaatgctagagccactagccacttgcaacctcagcatggaaaagctgaaagcagtcaactccagtcattaagattaatccattaatccattaagattaaagcagatttcttaacagaaactgtgaaagccaaaaggcagtgtgatgacacattaaagtgctgaaagaaaagaattctatttcaagaattcttttccatcaagactatccatcaataatgcagaagaaattaaggcattacaagataaaagctaaaggactctgt

SEQ ID NO: 955900 - DNA, 657 bp, Homo sapiens
agggccttgctccaaaatcctagaggcctccgctgtggttcacctatgagggcctgccaaaggctccaaacagcatccctgcttgccactgacacctcaagcaccattggatctgctgtgtcatatggcccatgtggcagagcagcttgcacagcagcctggacctgttgcagagccttctcctgttctggaccccactcaaaactggcagcctttcaggtcactcaataaatgggccggagtaacacaccccagtgaggaatgtgttgcctccaaaatccagttaggcccactgggcattgtgcctctttcttggtggtaggaggggccaaatgcagcaacttatccttcaccttagacgaaatattttgacaggccccacaccactggatccctagaaattttactgaggtagaaggtccctgaattttagttggatttatttcccatcctctggcatgcaaatgtctcaccaataagtctagtgtgtttgccagttcttgctcactggatccaatcagcataatgtcatcaatgtaatgtaccagggtgatatcttayggaagcaaaaaggatcaaggtctctctaaataagattatgacacaaaactagagagttgatatacccctgaggcaggacagtaaaggtatattgct

SEQ ID NO: 955901 - DNA, 593 bp, Homo sapiens
agcccccacctcctgccccagggctgggaaggccaaggatgagaaggccaccactttccagagaaaaattccaaggagtccaasaattctatatttgaacttggccttccagccttaggttcctttgaaggacttaaaagggtgaaaccagtgatgacgggggaatctgagagtattatggacagagtaggacggggtgagatgaggaaaaacctgtggcataaggtgtatggctctccctttgtacgcttgtcccaggccttataactgataggaaaggacctatgcacatgtatattttttcaaagagagggtattgtaggtgtcagactcacagtggcctgcaaagtctgaaacacagtggcaagagttgaaaactaaagacagcaccagactagaagtcagaagttctgagttctagccctcttcttccacatacccacgaagtgaacttaggtaaattctcataaccgtgagtcacccatacaataaaatggaaataatcatagcatacattgaaaacttccataaaccataaaggaatgcaagatgtcattttaatagatatttccccaccttggtttttttggcta

SEQ ID NO: 955902 - DNA, 881 bp, Homo sapiens
cagctggctgtcttctaattcaattcaactctgagatgatctacctggaggtaggctcaggccccacatgttgaggccccagtcccacaaggctgcccctacttcagataccagttgyaagccctgggttgttttcccagtgcttctgaccaaatgaccataaattagggtttctatgaccccatccttgggtttcattaatttgctaccacagctcatggaactcagggaagcacttatgtttactggtttattaaaaagggtattatgggctgggcgtggtggctcacggctgtaatcccagcactttgggaggctgatgtgggtggatcacctgaggtcaggagttcaagaccagcctggccaacatggtgaaaccccatctctactaaatatacaaaaatcaactgggcttggtggcgggcacctgtaatcctagctacttgggaggctgaggcaggagaatctcttgaacccgggaggcggaggttgcagtgagccaagatcacaccactgcacttcagtctaggtgacaagagcaaaactctgtctcaaaaaaaaaaaaaaaaggatattatgaaggctacaggggaagagatgcatagggcgaggtatgggggaaggggacatgaagcctccatgccctctccaggcaccatcctccaggaacctccactgtcgtgaagccctctgaaccctgctttgttgtgtttgtatagaagctcattacataggcatgattgattacattactggtcattggtaacttagccttcagccctgtttccttcctcagaggctgatggggtggggctataagttcccgccttctaatcctgcttggtctttctgatgactagcctccatcctgaagctaccca

SEQ ID NO: 955903 - DNA, 527 bp, Homo sapiens
ttgtcttgttgtagttttcaggaggaatgctttcaacttttccctgttcaatataatgttgactttggattcatcaaagatgacataccttaaggtatgtcacgtctatgctgatttgctgagggctttaataataaagggatggtggattttgtcaaatgctttttctgcatctattgagatgatcacatgatatttgtttttaattttgtttatgtgatgtatcacaacaattgactcatgtatgttaaatcaatcctgcatccctggtataaaacccacttgatcatggtcgattatccttttgatatgctgttggacttggttaggttgtattttgttgagaatttttgcatctgtgttcattaggaatattggtttgtatttttttgttgtttttgttatgttttttcctggtttcagtattagggtgatcctggcttcacagaataatttagggataattctgtatttccctgtcttttgcaataatttcagtagaaytgctacttagtaccaattattta

SEQ ID NO: 955904 - DNA, 660 bp, Homo sapiens
ctgaaacctccgcttcccgcgttcaagtgattctcctgcctctgccttctgagtagttgrgattacaggcatgcatcacggcacccagctaattttgcatttttagtagtgatgagatttcaccatgttggccaggctggtctcgaattcctgacctcaggtgatccacgtacctcggccatccaaagtgctgggattacaggcatgagccaccaaatccggcctcgattttatacttttgggggtggaaggtttgttctgttttgttttgtttttgagacagagtcttgctctgtcacccaggctggagtgcagtggcgcaatctcagctcactgcaatctccgcctcccaggctcaggtgaacctcctgcctcagcctcccgagtatttgggactacaggtgcatgccaccatgcctggctaattttttttgcattcttagtagagatggggcttcaccatgttggccaggctggtctggaactcctgacctcaagtgatctgcctgcttgggactcccaaagtgcctggattacaagtatgagccaccgcacccggccagaattatattgtatctttaccgatcaatttcaaaaccctggttgtgatatatactgtgctatagttttgtaagatgttgccattgggagaaactgggt

SEQ ID NO: 955905 - DNA, 660 bp, Homo sapiens
ctgaaacctccgcttcccgcgttcaagtgattctcctgcctctgccttctgagtagttgggattacaggcatgcatcacggcacccagctaattttgcatttttagtagtgatgagatttcaccatgttggccaggctggtctcgaattcctgacctcaggtgatccacgtacctcggccatccaaagtgctgggattacaggcatgagccaccaaatccggcctcgattttatacttttgggggtggaaggtttgttctgttttgttttgtttttgagacagagtcttgctctgtcacccaggctggagtgcagtggcgcaatctcagctcactgcaatctccgcctcccaggctcaggtgaacctcctgcctcagcctcccgagtatttgggactacaggtgcatgccaccatgcctggctaattttttttgcattcttagtagagatggggcttcaccatgttggccaggctggtctggaactcctgacctcaagtgatctgcctgcttgggactcccaaagtgcctggattacaagtatgagccaccgcacccggccagaattatattgtatcttkaccgatcaatttcaaaaccctggttgtgatatatactgtgctatagttttgtaagatgttgccattgggagaaactgggt

SEQ ID NO: 955906 - DNA, 567 bp, Homo sapiens
atttggagctgctctgtcccagtggtgtgggcagctttctgmtggactcttctagccacagggaggatacccttcctcccaggatagcccccaaggcactgtgtctgaaagccccttattttgaagagaagaaaaataaagtcctaaaatgttgaggtgacatcttagcttgggttccccacaaaacagagccagaggcaaaggcttgggtgccagtagtttatctgaaggtgattccagaaaatagaagaaagagtggggggaaagaagcaaggaaagaaggaatgctgagaaataatgtgttctccagattgcaggctggattcttccatagcccccagagaagaggtctaaggccctctgagttggagcattcacccactggttcctactccctctggttgagggttcctccagtggggagggattaacttcctgtacttgcaggctgtgctgatgagtgggttgagctcctgcagtagagaggccgtgggcatcacatgggaaaaaacggttttccaggttgaccctgttagcacaaggtgaatgtcaggcctctgagcccaa

SEQ ID NO: 955907 - DNA, 566 bp, Homo sapiens
atgaaacaaaaagttggcttttgggaaagataaacaaaatttacaaaccattagctagactaagaaaaaaagagagaagactcaaataaataaaattagaaatgaagaaggagacatgacaatggatattacagaaaaagaaaagatcggcagaggctgggcatggtggctcacgcctgcaatcccagtactttgggaggctgaggtgggtggatcacaaggtcaggagttcaagaccagcctggccaacatagtgaagccccatctctactaaaaatacagaaaattagtcgggcatggtgccagatgcctgtaatcccagctactcaggaggctgaggcaggagaatcacttgaacccaggaggcggaggtcgcagtgagctgagatcttgccattgcactccagcccaggcaacagtgcgagactctgtctcaaaaaaaaaagaaagaaagaaaaaaraaagatcatcagagactacaatgaacaactacacactaatagataaatttgaaaacctagagaaaaatggataaattactggatacatacaatctaccaagattg

SEQ ID NO: 955908 - DNA, 700 bp, Homo sapiens
aagcaccacctcctggctgaaggccaaccaactcaggacattacagccacctccactagagcaagtcytggtatctatgtctgggagaccagaagacggatcacatcataggactctgcagacattgcccagcagcagcctgcagcctagtagccccactgggtgactagacccagaagagcaacagcaattactgcagtctggctctcaggaagccccatccctaggggaagtaggacaccaccacatcaagggatcaccccttggaacaaaaaaatctgaacaacagcccttgagtcacagatcttccctctgacatagtctacccaaatgaaaaggaatcagaaaagtaattctggtaatatgacaaaacaaggttctacaacaccccccaaagaccacattacctccccagcaatggatccaaaccaagaagacatctctgaattgccagataaagaattctgatggttgattatcaagctgttcaaggagataccagagaaaggtgaaaacctgcttaaagaaatttaaaaaataaataaataaaggatatggatgaaaaattctccagagaaatagatatcatagagagaaaacaatcacaaattctggaaatgaaagacatactcagaaaaatacaaaagtgcactgaaaagtgtcaataatagactagaacaagtagagaaagaacttcaga

SEQ ID NO: 955909 - DNA, 700 bp, Homo sapiens
aagcaccacctcctggctgaaggccaaccaactcaggacattacagccacctccactagagcaagtcttggtatctatgtctgggagaccagaagacggatcacatcataggactctgcagacattgcccagcascagcctgcagcctagtagccccactgggtgactagacccagaagagcaacagcaattactgcagtctggctctcaggaagccccatccctaggggaagtaggacaccaccacatcaagggatcaccccttggaacaaaaaaatctgaacaacagcccttgagtcacagatcttccctctgacatagtctacccaaatgaaaaggaatcagaaaagtaattctggtaatatgacaaaacaaggttctacaacaccccccaaagaccacattacctccccagcaatggatccaaaccaagaagacatctctgaattgccagataaagaattctgatggttgattatcaagctgttcaaggagataccagagaaaggtgaaaacctgcttaaagaaatttaaaaaataaataaataaaggatatggatgaaaaattctccagagaaatagatatcatagagagaaaacaatcacaaattctggaaatgaaagacatactcagaaaaatacaaaagtgcactgaaaagtgtcaataatagactagaacaagtagagaaagaacttcaga

SEQ ID NO: 955910 - DNA, 564 bp, Homo sapiens
ggcaaaagcatcagataacctataaaagaaaacatatcagaataacagcaaatttctcagcagaaccctgaaagccagaaggtattggggttctatctttagcctcctcaaaaaaagtaattgccagtcaataattttgtatccagcaaaactaagcttcataaatggaggaaagatacagtctttttcagacaaaaaaaaaatgcagagagaattcgccactaccaagcagcactacaagaaatgccacaaggaattctaaatcttgaaacaaaacctctaagtacaccaaaatagaacctccttaaagcataaatctcacagggtctataaaacaacagcacaatgaaaaaaaaacacacaaaaggtattcaggtaacaactagcatggggagtaaaacagtacctcacatgtcaatactaatgttgaatgtaaatggcctaaatgctccgctgaaaagatgcaraatggcagaatagataaaaatctactgaccgagtatctactgtcttccagagactcacttaacacataaggactcacataaacttaaggtaaagcgg

SEQ ID NO: 955911 - DNA, 564 bp, Homo sapiens
ggcaaaagcatcagataacctataaaagaaaacatatcagaataacagcaaatttctcagcagaaccctgaaagccagaaggtattggggttctatctttagcctcctcaaaaaaagtaattgccagtcaataattttgtatccagcaaaactaagcttcataaatggaggaaagatacagtctttttcagacaaaaaaaaaatgcagagagaattcgccactaccaagcagcactacaagaaatgccacaaggaattctaaatcttgaaacaaaacctctaagtacaccaaaatagaacctccttaaagcataaatctcacagggtctataaaacaacagcacaatgaaaaaaaaacacacaaaaggtattcaggtaacaactagcatggggagtaaaacagtacctcacatgtcaatactaatgttgaatgtaaatggcctaaatgctccgctgaaaagatgcagaatggcagaatagataaaaatctactgaccgagtatctactgtcttccagagactcacttaacacataaggacycacataaacttaaggtaaagcgg

SEQ ID NO: 955912 - DNA, 594 bp, Homo sapiens
ttgatttttgtataaggtgagaggtgaagatctagtttcattcttctacacgtggcttgccaatgattccagcatcatttgttgaawacagtgtactttccccactttgtttttgtttgctttgttgaagatcagttggctataaatatttggctttatttctgggttttctattctgttccattggtctacatgcctacttttataccagtaccatgctgttttggtaactatatccttgtagtatagtttgaatttggctaatgtgatgcctccagatttgttctttttgcttagtcttgctttggccatgtgcagtcttttttttttttttttttttggttccatatgaattttaggattgttttttctagttctgtgaagaatgatgatggcattttgatgtaaattgcattgaatctgtagattgcttttggcagtatggccattttcacaatattgattctacccatccatgagagaatgtgtttccatttgtttgtgtcatctatgatttctttcagcagtgttttgtaggtttccttgtagacatcttttgcctctttggttaggtatattcctaagtactttatt

SEQ ID NO: 955913 - DNA, 676 bp, Homo sapiens
ccctagggtccccatgctgtgtgcagcctagggacttggagccctgcatcccagttgctccagccatggctgaaatggacgaaaatagagcttgggtagtggcttcagagggtgcargccccaagtcttggcagcttccacatgatgttgagcctgcaagtgcacagaagacatgagctgtggtttggaaacctccgcctagatttcagaagatgtatggaaatgcctggatacccaggcagaagtttgctgcagggttggggccctcatagagaatctttgctagggaagtgcataagggagatatggggtcagagccccccacacagaatccttactggggcactgcctagtggagctgtgagaagaggaccaccgtcctgcagaccccagaatggtagatccatccacagcttggactgtgtgcctggaaaaggtacagacattcaatgccagcccacaaaggcagttaggagggaggctgtgcccttcaaagccacaagggcagagctgtccaagaccatgggaacccacctcttgcatcagcgtgacctgcatgtgagacctggagtcaaaggcgatcattttggaaatttaagatttgaccaccctgctggatttcagacttgcatgggacctctagtccctttgttttggccgatttctcccatttgga

SEQ ID NO: 955914 - DNA, 598 bp, Homo sapiens
tgatatcaggggctgcctgaataataaatttatcctttaggattagttatcccttgatagaattaggagatagagaggtgtgctttaccaaggcctctcttagcctttccaggaaggcagcgggattctcatcaaattcctggtatatcatggattgcttggtgtaattgagaagcttggttctagttttacctaagccttccattatgcacacctgaaagtgtctcctcttccattctccgatctcaaatttgggatccaatttagggtcattcactgctactgcttctcttccagttggatgcagtttagcctcttccctgatgctatatgttatacaaagctcatccccaaatctctctgctgcttgcagagtggcctgcttcacagtgttaatcagtgtctgcttcgaaagtaacataacatctttccaggagagttaagatacttgagttaaatttctagaaagcctctatatatctgtcagggtcatctgaaaacatgccaggatcccccttaatttgccttaagtcctayagagagaaggggacctggaccttactagggccaaattcaccaagcatctatttacattaaa

SEQ ID NO: 955915 - DNA, 545 bp, Homo sapiens
gtcttcttgccctgtataacattaaccagttttgtataccaccccaaaattctattttaacatcttttattcagtgcctataatacttaatctctcaagttctcttgaaaccarctttaccatcccactcattctctcattaattaggtaaacgagtttttaaaaaaccaggtacataaatctaaacataatgctctctttataaatgtaaataaataaaatacaattttaactcataaaaaattatacccacgctggtgcagagcctctcctttaatcccagcactttgggaggccaaggtgggtggaccacctgaggtcaggagtttgagaccagcctgaccagcatggtgaaaccttgtctctactaaaaatacaaaaattagccaggcgtggtggcaggtgcctataatcccatctacttgggaggctgaggcaggagaattgcttgaaccccggaggtggaggttgcagtgagccgagatcgtgccattgcactctctagcctgggcagcaagagcgaaactgtctcaaaaaaaaaaaaa

SEQ ID NO: 955916 - DNA, 617 bp, Homo sapiens
gtggctcacacttgtaatcctagcactttgggaggtccaggtgggtgaatcatttgaggccaggagttcgagaccagcctggccaacatggtgaaaccccrtctctattaaaaatacaaaaaattagttgggcatggtggcacatgcctgtagtcccagctactcaggaggctgaggcaggagaattgcatgaacccgggaggtggaggttgcagtgacctgaggttgcaccactgcactccagcctgggtgacagagactatctaaaaaaaaaaaaaaattataccctgccacttgaatttaaattggcctccaattccaaatgaccacaatgtgatttattttaaccttccctctttccatatttgtaattctcttctccaacagtgagagatattgctttcatccttctgaatatatttatttatttatttaattcaagaatacacagaaagtagttttagaatcacaaacccatactaccatgaaaattacaactaccaactaggttagggttcaatgtttgtttatagttcgttttgtccttactgagaagatatagtcaaaatgctatagacaaagtctcttgaattacttagtttcccccctattcaata

SEQ ID NO: 955917 - DNA, 607 bp, Homo sapiens
tggtggtttggaagcccctcaaattcaattcagagccatgttgcccataaaatgtaaggattgtccaattcaacgcagaaactcccatctgtgaagccttggtatcgggagggcttatgaaatcaataaagctcatctgccaccaaggagagcctcagtttctgacaatggaggctagaacttacaaaactaaatgaaattatttcttaaaaactcaactgcccctaatttaaaaggaatatgataagttcagaaatgaaggtttttgattacaggatcccaggcctatgaaagaatgtctggctacaaaaataagattcctgttttcttactaattataaaagcacttattatgacagcccataattacttagatatggccattccaaaggacaaattatgtctacttaaaggtaactacaacaaaaacacagtatagcacagatatctactctacgcctgtaatcctggctccttgctctagcattaaagtggttaaatgaactggcaaaatctctcattagggggagccaagaggtagttcyagcatttggacctacagtgaagttccagcatttggactcacagtgaagaatgcagtctcaga

SEQ ID NO: 955918 - DNA, 597 bp, Homo sapiens
taaggattgtccaattcaacgcagaaactcccatctgtgaagccttggtatcgggagggcttatgaaatcaataaagctcatctgccaccaaggagagcctcagtttctgacaatggaggctagaacttacaaaactaaatgaaattatttcttaaaaactcaactgcccctaatttaaaaggaatatgataagttcagaaatgaaggtttttgattacaggatcccaggcctatgaaagaatgtctggctacaaaaataagattcctgttttcttactaattataaaagcacttattatgacagcccataattacttagatatggccattccaaaggacaaattatgtctacttaaaggtaactacaacaaaaacacagtatagcacagatatctactctacgcctgtaatcctggctccttgctctagcattaaagtggttaaatgaactggcaaaatctctcattagggggagccaagaggtagttccagcatttggacctacagtgaagttccagcatttggactcasagtgaagaatgcagtctcagaaacacaaacccagacggacacatcaggtacctaattcactcggt

SEQ ID NO: 955919 - DNA, 834 bp, Homo sapiens
gaacaatcctttcccagatagtggagtcctaagattaccatttcttacctacttaatatttgactgacttccaaacaccaagtaattgtctttcagtctgggaacactgctaatcttatcttagaccagatccagactccacctctgttgtaatcctcattagtacatttttccttcatcaccaccatcctgatgtctcatgttggggctcagaacacaataccccaaaatataccaccttggcatactgagtattttaagctaaaggaaattgagaaaacaatgaaagcccaaaactcactctctgaccttctcccatctttctcccctgaagcaggccatgaaatagttctctgacctatccccctgagagaaggtcacaagaccctcattccagagaggttatgacctataaccagaaggccaagaagaatctgaaagaacgggccttactaagctccccccaccacaaggttattaccattaaataataccttttggttttaccatcacatttcttcatgactgtctataaaaatatggttttccctggatcactgggtcttcatttctgaaggcttctgtgccaaataaaatattaaatgtgtgtgtgtaaagggtattgttagtgtaggggagaaaaagtaatatcttttccttgcccattgcaaggttcatggatgacaaccctgcaacaaaagacacctagcaaaaagagagtacttctacaatgtacccatgagctgatttgtaaactgatgtggtctagaraccacatcattgttccaacggtttagttgctgttctacatcaatcaatcaaacatcaagtgct

SEQ ID NO: 955920 - DNA, 576 bp, Homo sapiens
  misc_feature 109: n = A,T,C or G
tccaactttgtgtgtgtttatcctaaggaatggcttattcatttcaaatttattgatttctgctcttatctccattatttcttttcatctatctattttgggtttgganagcctttgcttttctagttctttcagatgcaacattatgttatttatttgaaatttttcttcttttttgatgtaggcacttatagctataaacttctttcttgtactgcttttgctgtatcccattggtttgggtatgttctgttccatattcttttttttttttttcaagaaatttttattttttctcttaatttctccttccttccttccttccttcctttcttcctttctttccttctttcgagtctcactctgttgccaagctggagtgcagtggcgcaatctcggctcactgcaatctccgcctccctgggttcaagtggttcctctgcctcagccttcagagtagctgtgactacaggagcgcaccaccacrcccagctaattttttgtgtttgagtagagacagggtttcaccatgttggccaggatggactggatctcctgaccttgcgatcctgctgc

SEQ ID NO: 955921 - DNA, 596 bp, Homo sapiens
aagcaaagatttaataaccatggcattttaaaatatcagtaagagacaaataaaaacctgtattgtaaatatatatgtgacagatatagaaaaaaagaaaaggaagaaatacaaataggtcaaaaatatgaaaaggcaagcaatttttagacaactaagctatgtcccttctaggccaattttgctgggggttttaatcataaaaggatgctggattttgtcaaatgctttttctgtgtctatcgagataatcgtgtgatttttgtttttaattctgtttatgtggcatatcacatttactgacttacatatgttaaaccattcctgcttccctggtatgaaacccacttgatcgtggtggattatctttttgacatgttgttgaatttggtttgttagtttttttttttttcaggatttttgcatctatgttcatcaggaatattggtctgtagttttctttttttgttatgtccttgcctggttttactattagggtgatactggcttcatagartgatttagggaggattccctctttctctatcttgtggaatagtgtcaataggattggtaccaattctttgaatgtgtga

SEQ ID NO: 955922 - DNA, 450 bp, Homo sapiens
ctaggaatggggtgacacaagcacccctgtggccacaagcatcagagtgctctcgatcagacctgaaaccagcacaggactgagcctggctcrtggcctgctataaacactacctggctacttccaatgttttctcaaggccttggggctctataaccagcaggtgagaaagccagccaggcctgtgtctttcccctcagggcacagacttcccacaggcccctgccaagtccagaggtgccattcagtagccagggactagagtaaaatccttagaagtctacctggtgttctattgtactgtggctttgctggcattcaaaccacgagatgcagttctatcccctcttccccccattttccacaggcagaggagcctcaatctgtgaccactaccaccacggcccacagggagtattccaggatactgaaagtatttccttaaggcca

SEQ ID NO: 955923 - DNA, 450 bp, Homo sapiens
ctaggaatggggtgacacaagcacccctgtggccacaagcatcagagtgctctcgatcagacctgaaaccagcacaggactgagcctggctcgtggcctgctataaacactacctggctacttccartgttttctcaaggccttggggctctataaccagcaggtgagaaagccagccaggcctgtgtctttcccctcagggcacagacttcccacaggcccctgccaagtccagaggtgccattcagtagccagggactagagtaaaatccttagaagtctacctggtgttctattgtactgtggctttgctggcattcaaaccacgagatgcagttctatcccctcttccccccattttccacaggcagaggagcctcaatctgtgaccactaccaccacggcccacagggagtattccaggatactgaaagtatttccttaaggcca

SEQ ID NO: 955924 - DNA, 610 bp, Homo sapiens; identical to SEQ ID NO: 952632

SEQ ID NO: 955925 - DNA, 607 bp, Homo sapiens
agtgtgtgagtgtctcttcaatatactgattttctttcctttggatacatacccagtaatagtattaytgaatcttatggtaggtagttctatttttagtcacttgagaaacctccatactgtttttttttaataactatactaatttacattctcatcaacagtttgtgagagtttccttttctctgtatcctatgcagaatttgttgtttttttttttttggtctcgttgatgatagccactctaactggcataaaatagctccttgtggttttgatttgcatgtttctcatgattagtgacattgtgtgtgatgtgcatttttccatgtatttgttgtgcatttgtatgtcttttgagaaatgtttattcagacctttttgtcatttttaaattattatttttttgctattgagttatttaagctccttaaatattctaattattaatctcttatgagatgaatagtttgcaaatatttccttccattctatgggctgtccctttacttttttgctcgttttctttgctgtgcagaaggtttttaacttgatttaatcccatgtgtttatttttgctttgattgcctgtattttagaagtctta

SEQ ID NO: 955926 - DNA, 598 bp, Homo sapiens
tttgcttgcatttttacaagcttttatttttaaaataatttccaaatgtattaccttatctaatccgaagtagaagaaacatctttgattttctttttgaaaaattaggctctttgagaaacaataagtcccacaccaatgtaaaaaaaattaattgtatactttgcttatgttttataaaacaggaaaattaatgagatcatctgagaaggatacttgaaagtgtttgacacttagagcaattttttaagtttgaggatgaatacgagtaaattttttaaatttttcatataatcaccatctggaaattttgcgaaaaaccactgtactaattgatgctattagtatgcacaggaaaaaaatagtgcaatggaatatataatggagtctttccttccattaattttcctatatgtgctgtgattacatatatttcaatacatgtaatttaatattctgattttttttttgagatggagtctcactstgttgcccaggctgcagtgcagtggctggatctcatctcattgcaacctccacctcccaggttcaagcaattctcctgcctcagcctcctgagtagctgtgattacaagca

SEQ ID NO: 955927 - DNA, 661 bp, Homo sapiens
ttttgggtggtgcctacatatcatgcagaaccatctgtgaaccagggcctagtcctctcttcctctgtcaacagatcgtagrgaactccccatgaggccatttggtgtaggctggagagaaggcagggttgcaggagtaaagaccataggcatttgggccacttcctcatgtaacttacctatgccttcaagacctgctcaaaactgatcacatacataccacttccatttcatgatggaatgctgctgtgcacaacccactttatgactagatgggacagaaagcacccagtccatgataggcagttcaggtcacatggtgacttgatgacccatagttaaatgttcagtttccaccaaagcccagtaacaggccaagggcggtctctcaaaaggagagtagttatctgcagaagatggcagggccttgctccaaaatcctagaggcctccactatgattcacctatgggggcctgccaaagtctctaaacagcatccctatctgccactaatgcctcaagcaccattggatctgctgggtcatatggcccagtggcagagcagcttgcatagcggcttggacctgttgcaaagccttctcctgttgtgaaccacactcaaaactggcagcctttcgggtcactcaataaatgtgccaga

SEQ ID NO: 955928 - DNA, 555 bp, Homo sapiens
cacttataagtgggagctaagctatgaggatgcrtaggtataagagtgatataatggactttggggagccagggtaggggaaagattgggagggggttaagggataaaagactacatactgggtacagtgtacactgctcaggtgacagatgcactcaaatctcagaaataaccactaaagaatttatccatgtaaccaaaaaccacttgtacctcaaaacttttgaaacaaaaacataaaaaagaagctggcctgtttgaaaaacttaaatagtttaatgagtaaaaggatacctcacttttagcaacaaaagtagaaattacaagaattgagcatttgttacaagaaatgattattcttcagcagatgtgaggtcacacttcccctcagtacccaattttgtctgcctgtaggaattccagtgtatcccagctttccccacttcagcatttctgggacccccaggtaaaggttcacatgttagagaaattgggagtggggagtgttgtcagtttagttatctggctgctgtctgtgctcagtttcccctctct

SEQ ID NO: 955929 - DNA, 545 bp, Homo sapiens
actgttagaaggaaaactaacaaacagaaaggacatcctcaccaaaaccccatctgtacgtcaccatcatcaaagaccaaaggtagataaaaaccacaaagatggggaaaaaacagagcagaaaaactgaaaattctaaaaatcagagcacctctcctcctccaaaggaatacagctcctcaccagcaacggaacaaaggtggaaagagaatgacttcggcaagttgagagaagaaggctacagatgatcaaacttctttgagctaaaggaggaagttcaaacccatggcaaagaagttaaaaatcttaaaaaaagactagacgaatggctaactagaataaccaattcagagaagtccttaaaggaccagatggagctgaaaaccagggcacaagagctacgtgacaaaggcacatgcctcagtagtcgattcaatcaactggaagaaagggtatcagtgatggaagatcaaatgaatgaaatgaagagagaagagaartttagagaaaaaagaataaaaagaaacaaagaaagcctccaagaa

SEQ ID NO: 955930 - DNA, 694 bp, Homo sapiens
tggttgcaagcctaagcttctctgcaggtagaagctcctttaggcgaaactattcaattcccaacaacttttgcactttcaaaaagagaagaaaagaacccaaaacaggccaggtgcagtggctcacacctgtaatcctagcattttgggaggcctaggtgggcggatcacttgaggtcaggagtttgagaccagcctggcccacatggtgaaaccctgtctctactaaaagtacaaaaattagctgggcatggtggcacatgtttgtaatcccagctactcaggaagctgaggccggaggatcacttgaacccaggaggcaaaggttgcagtgagctgggaggcacaggttgcagtaagcagagatagcactccagcctaggtgacagagccagactccatccccctgagagacgacaacacgctagcagcccttgctcgctctccgtgcctccttggcctcagcctccactctggccacgcttgaggagcccttcagcccgccgttgcactgtgggagcccctgtctgggctggccgaggcctgagccagctccctctgcttgccggaaggtgtggagggagaggcctggarggagaggcgcgggtgggaactggggctgcgcatggcactcgcgggccagcgtgagttccgggtgggcgtgggctccgcaggacctgcacttggagtgccc

SEQ ID NO: 955931 - DNA, 625 bp, Homo sapiens
ttggatgtcctttctttctttctcttctctgattgctctggctaggacttctagtactatgttgaatargcatggtgaaagtgggcatccttgtcttgttccagttctcaggggaaatgcttttaacttttccccattcagtataaggttggatgtggatttgtcatagatggcttttattaccttaaggcatgtcccttctatgccgattttgctgagggtcttaaccataaagggatactggattttgtcaaatgctttttctgcatctattaagatgatcatgtgatttttgtttttaattctgtttatgtggtgtatcacatttattgacttacatatgttaaaccattcctgaattgttggtataaaacccacttcattatggtggattatctttttcatatgctgttggattttgttaactagtattttggtgaagatttttgcatttatgttcatcagggatattggtctgtagttttctttttttgttatgttctttcctggttttggtgttagggtgatgctggcttcatagaatgatttagggaggattccctctttctctatctttggaatagtgtcaataggattagtgccaattcttctttgaatgtctgat

SEQ ID NO: 955932 - DNA, 841 bp, Homo sapiens
agggacctgactcttagcaggaaaactaacaaacagaaaggacatccacaccaaaaccccatctgtatgtcaccaccatcgaagaccaaaggtagataaaaccacaaagatggggagaaacmagagcagaaaagctgaaaattctaaaaatccgagcgcctcttttcctccaaaggaacgcaactcctcaccagcaatggaacgaagctggacagagaatgactatgatgagttgacagaagtaggcttcagaaagtcagtaataacaaagttctctgagctaaaggaggatgttcgaacccattgcagagaagctaaaaaccttgaaaaaaagattagaagaatggctaactagaataaacgtgtagagaagaccttaaatgacctgatggagctgaaaatcatggcacgagaactatatgatgcatgcacaagcttcagtagctgattcaatcaagtggaagagagggtatcagtgattgaagatcaaatgaatgaaatgaagcaagaagagtagtttagagaaaaaacattaaaaagaaatgaacaaagcctccaagaaatacgggagtatgtgaaaagaccaaatctacgtttcattgatgtacctgaaagtgacggggagaataggactaagctggaaaatactcttcaggatattttccaggggaacttccccaacctagtgaggcagaccaacattcaaattcaggaaatacagagaacaccacaaagatactcctccagaagagcaaccccaagaaacataattgtcagattcatgaaggttgaaatgaaggaaaaaatgttaagagcaaccagagagaaaggtcgggttact

SEQ ID NO: 955933 - DNA, 625 bp, Homo sapiens
gggaggagaccaatgtgctaactgtcagctcagcagactgtggagtttctgttcttggttgtggtggggggtctctctcaggaatcttcttcaaaattttgcttccctcccccactggttgtccttttcayagacgtctcacccacgatagcagggaatgagcccctctaaactattccctcagaacaataaaaagatgatgaaggtgatgatgaggataaagaggatggtgacagacaccacgacatcatgaacccttactgagggcttcctaaaggccaggctctgagctctgtgctctctgcagcttgtttcatttcatctgcgtagtctcccagttattagtgcacatttcaggattattttacagactagaaaaggagcaacacattttcatataacttgtaccagatcatgaagtcaaaaagggtgaagcccaatttgaaccaggcagtctaaggccagacacatggcatctggccagtcctctccctgcatccaccctgccccctccaatccttgtcactcaggacaatgcccctgctcactgtgcccttccctttgggggttccttgtagaccacagctagaccagtgggtgccacaatcactgtgtcaagtatgga

SEQ ID NO: 955934 - DNA, 444 bp, Homo sapiens
tcctgctggtatttgacacataagacccaggaatgctaaatattctgcaatgtataagacactgcttcacagtgaataattatttctttctaaatgtcaaaaatggatgactgggaatgctgatctaaggagtgctaagtagccactaccaagtaaggcaactgaagtgggcaaagtcttcctcaattgacagcatagtctggtatgtccctacttgagaggcagaaacaggtgtgtggtagtttttaagtactctgggcaagagagaaaaacactgggggtagggagtgataaaggaattttaaatgagttctgctcttgatactatcattaaatgacaccagtatgctcttttttactctaaaatgacaattatacaatttgattaaacattggaaaagwtggtactgcagatctcaaaataatcaactgcttgtttaaatt

SEQ ID NO: 955935 - DNA, 656 bp, Homo sapiens
ctgacaaaaaagctcaacataascataagagttggaactacattaaaggcctgatacaaatcattaagacaaatgagaaccctccctataaactgaatgtttgtgtccccctaaaattcatgtattgaaacctaatctccaatgtgatggtattagtaggtgggaactttgggagttaggttatgaggttgggagccctcatgaatggatgagcgcccttataaaagaggctccagagtactcccttgccccttccacgaaggaaggacacggcaagaagatggcagcctatcaggcataaagcaggcccttaccagccaccaaaagccatcggcatcttcgtctaggacttcccagtctccagaactgtgagaaataaatttccattatttataagccatccagtttatggtattttgttatagaagcctgaacaagctaagacaatgcccaaaagtgagatgtgtaaaagtcatggtcaagtaatttatacacaaaaacaagggcaaatgacaaatacacatacaaagatggctattcttctctataatagaataaattctaattaaaacaattaagtacaattgttttttgtcaaactgaaaaatacttttagaatgaaaaagctaatattattgtttagggaaactttcaga

SEQ ID NO: 955936 - DNA, 570 bp, Homo sapiens
tctccagaactgtgagaaataaatttccattatttataagccatccagtttatggtattttgttatagaagcctgaacaagctaagacaatgcccaaaagtgaratgtgtaaaagtcatggtcaagtaatttatacacaaaaacaagggcaaatgacaaatacacatacaaagatggctattcttctctataatagaataaattctaattaaaacaattaagtacaattgttttttgtcaaactgaaaaatacttttagaatgaaaaagctaatattattgtttagggaaactttcagaactgtttgataataggcacatactttaacccaacacttgcacttgcacttctagaaatgaattttaaggaaatagttaaggatatgcaaaatttgtggcaaacatattcactgtagagtagctcaggcaaggcatggtggctcatgcctggaatcccagcactttgggagggcaaggctggtagatcacttgagcccaggagtttgagaccagcctgggcaacgtggtgaaactccatctctataaaaaatacaaaaattagctagacatg

SEQ ID NO: 955937 - DNA, 438 bp, Homo sapiens
agcttgctagctacaagcatatgaagcatgactagcattactgaaaaactgaattttaatttaatttagtcttaattaacttacatttaaatggacaaatatggccmccgtataggataatgtggttatagaataaacaagctttcttgtgattgttttataattattccagtattatagcatcaccggcccacttttaggtcttccgttccgctcagccactttgaaaccattgttagaaggacagaaaaaatgaattcttgactgtatccatagtaatgagtgttaatggcaatcactttgaaatgtcaatttctaagagcaatattatggcatcacaatgtatctttgttcatgtctagcttcttttcacttaatgtgaaaaaggtaacatttttgtctttaattgagacaattagcatcaaagtgtaatgtaaa

SEQ ID NO: 955938 - DNA, 598 bp, Homo sapiens
cagcctgcccctgtctaccccttgcagcagggagcctgcgagcaaatgagtgcagtaacctgagcgagtgctttggggaattggcaggaayaaaccccatttactcagctcgccaagctcaaccccttgttggagggagcacataagtgagggagtgtgcgatctgactgaccatttttgggtgctggcaggtgcaaactcggtgtgggccacgcggcaatgaccttgtgggggttcctgcgacccctgaagccacagaagtcacgttacaatgatctttctgctctgccctccgcagatggcttaagtgttaatagctcagtgggagggcaaagagccaatgtgaaagccttcttttgggtatcagcactcacggctctctacctcttgtcctgcgtctaggaaaaatgagtttgcacgaacaaattgaaggatggcgaacatggaggattttattgaactatgaaagtggctctccgtgggcaggggagctaaaaaggcgacgggacaggcaggtaatcttcccaagtctagcagtctctggctagacacttctctatcaagtcatccctctgaagtcaagttgcttctttctaat

SEQ ID NO: 955939 - DNA, 587 bp, Homo sapiens
ttcttgctaagcagcttgtgggtttcaccaaaggtctgcccataaaccctacgtaacaactcacctgcagacccctctgtaagctaacaagcacccacagcaccctgcaygccacactgtgcttttcctgttaagacaccctgtgtattccactagatggtatatggaatatcccatcgatagcatatggatattaacaacaggtgcagaattttgcagccgtcttgattcagcttgattgagagaaagcacacaacactgaatattttatggtactgtcctaaataaaataaaataaaaactcagcatcaggtatagcttcttgtaatacagagaaggtacgtgattctaagacttctccctaagacggaataagaggagtggagtaggtgcatccattataaagaaaaaaaaaatctgagataccctcagaatttctaaccaagttgactggtgaaggtcttttactccaaagtcattcagtaaagaatagagaaggtgaatgcttcttcaaatgcaaatatagcaatgcaagttttccggaaacataaatgattaaggaaataagacacgatcaaaggtgtaaa

SEQ ID NO: 955940 - DNA, 562 bp, Homo sapiens
ctggtttttgtttctgctataacaggccagtgctgagttcagtgccttacaattgctgagttcttctgctctgaackcacaaaaatgctctctgcaccatgttgccactgctggaggatgggagaggggtggcattggtgattcaagactatttttcctgccacttcactgcctctttcagccaaatgtgcttaaaaccaggtaccgtgaatgctcacctgatttttggttcctttgaaggtgttttttgggtgcaaatagttgttaaactcgtgtgtttgcagggggaatgatcagtggagtcttctattctgccatcttactctgcctattttagtatttgttgtacgagtttttcaattctttttgggtcattattaaaacttgtattttgttagaagatcatcaattttttctctaggttttcaaatttgttgtgctggaattgtgtattaaattctctttagaaaagaattgtaatatgttaaacttttatgtatctgtaatgatgtttcacttatgactctaatttgtatttttactctcttttctttatctcatg

SEQ ID NO: 955941 - DNA, 730 bp, Homo sapiens
tgactccaccttcaaggccccacsagggaccacttccttctctctgaacctggcctttcaaaggggctttcatttatcggcctttaatgtctcacatgatttaatcggaaacacgtgccttgtaaatattgtctgtcatgttccattaggttcacagggaaaagtacaagtcaataaacaaaggttgtagcataaatctaccttgaacacataatacctcaaataagaaaatcaaaacacatgtggcctctgacccgcagagtttcatgagcaggaactcggggtatactcaggaacatttctaaatgttcataattaatagggaagctggggctggtccgtttgcatagtgcacgaaaagcccttcaacaaaagaatctgcctcaccagcacctgtcaaatcacaaagtgctcctggctggaccaaaacctagatttctcctatgcagaaagactcctagagccccagaagcttcttttttaaaagtaaggacattccccccgacccattttcctcatatgggggatgcaggaaaggataataggataaaagccctccctcatcccttccagtccccttccttccctggcaccttcccaggctgttttgaagccctgaaatggagacaggggaagaggggagaaagaagataaggatgaggtatgggaagtcacataacctagagctcaagtcccggctgccatttaagaccatgaggctgttatctgt

SEQ ID NO: 955942 - DNA, 573 bp, Homo sapiens
aggaagagaaaatatatctactattcattcagtggaagtggatcatcataaaactcttcatccttgtggtcttcamgttgcatatgctgaagaagaggaggaagaggaggggttggtctcgctgtctcaggggtggcagcggcagaaggaaatccaagtatgagtggactcacgctctttaagagtcaattataggctgggcgcagtggctcacgcctgtaatcccaacactttgggaggccaaggcaggcggatctcttgaggtcaggagtttgagaccagcctggccaacatgacgcaaccccatctctactaaaaatacaaaaattagccagatgtggtagctacttgggaggctgaggcaggagaattgcttgagctgggaggcggaggttgcagtgagccatgattgcaccactgtactccagcctgggcgatgtagtgagactcggtatatatataaaaaagagtcaactataatttcacacaaatatatgccttctggcttcttttgaaaagcaggaagaactgccaccctgggcctgccctcctatagagtaatgatggctggcg

SEQ ID NO: 955943 - DNA, 604 bp, Homo sapiens
actactgcctctgctcctgcactcaaggaattagacagattgggtctgtttggtgaagtctgtttccttcttcaaagatgatctgaccttagaatctgagatcatctcamgctgatgttctttctcttacttgtcccaaatttaatgcacaggaaacattcatttgtctcagcagcacctgctaattcaggctatataacactgcagtcacttcttcctcaacttttccaatggaagtcagccagtggatcccatgcctgttacacatcttaggtaggagttggattgtcccctgggtcttctcactttgaggaacatgcatcaatcctcaggattatctcaacgagtcctttcttagtaagttgaggaactgaactcaattaatatctcttattgtgatgaggtgggaaagaagaactcacagaacccatgcaggtctccctaaaaattctctctctctacatgttcccctttctggacccttttatatcctttatttttagggaggaagttaaacgttttctatatggtttttgccacccacttttaaactcttagtttagcaccacttcattttggagacatacaatggtgtctgaaacat

SEQ ID NO: 955944 - DNA, 550 bp, Homo sapiens
atgaatttagaagaaaagtgtatgtcctaaggaattcaaagaagcactgctgatcataccaattagcttccactccaaaaggcaatttccatggtaagagttatatttaaattgtagtgcaagaccacactgataaaagtcaagttacctatttataatataccagccagggtggttttgcggaaaggatggagtagtgacttcccaacactggcaggtaatcctgcatctgttttcatcagtgccttaccttagcatgggtttttcctgccttgactttatcctgtccataccaggggcttggctattgctacaggtttattttcaaaggacaattaatgatcatatctgttacaagagaaaaattcaaatagttgcctccaccctctgcttctcgtggtggcccttggctttagcctgtaacactctatacactcacataccagttctgaaaatgtcctacagatcgaaattttcacagctgctttttktgtgtgtgtgtgtgtgtgtgtgtgtgtgtgtgtgtgtgtgtgtgtgtgtggtggttgtt

SEQ ID NO: 955945 - DNA, 579 bp, Homo sapiens
cttgctctgtcacccaggctggagtacagtggtgcagtcatggctcactgcagcctcgatctcctgggctcaagcgattctcccacctcagcctctggttgctggaaccataggcatccaccatgtgtacctaatttttgtatatttgtagagactgggtctcacttatttgcccagattcattttaaccttttctacgtgtgcaatacaagtgtgcattaaggatatccacaaggctgtgtaaccctctccgcgaccattcccagagctttcctaatcagaaaactgtaaccattgcacagtaattgcccttccctgaactcccagcccccggcgagcggggctcatggctgaataacactgcactgcatgtgcagactacattttgtttatccacttatccctccagggtccttgggttgtttccaccctctggctgctgtgaatagcgctgctgtgaacatgggtgtaawgcgcttgcttcagttcctgcattcagcccttctgggtatatactgaggagaggaattgctggggcgcatggtaattctatgtttagggttttgaggatccactgaa

SEQ ID NO: 955946 - DNA, 565 bp, Homo sapiens
tttgtatttttaatagagacgaggtttcaccatgttagccaggatggtctcgatctcctgacctcgtgatctgcccgcctcagcctcccaaagtgctaggattacaggcatgagccaccgcgcccggccagcactgttttttttatcttggtaggggcagttcaggaactttcatgtagcctttattgcaaaacaggtctcacttttgagaactgaaagtaaaatcctaagcactcccaccaactgaaaagatcccccttgaccaaaggaccccagagaaaccttaaaaactgagttaacagccatgacaggacagaaggtcagacatgcctcgctgtaccctgtcccttttgtggtttaggcacaactgaccaacattaatgttaaaatagagatcataagactgacagaagagactctggcaaaacgataccaaattataaacaggaccaaaggccatgctaggcaaggattaagtcatgcacccctatacttaaagaagaaactatattctgtcacaggtggttttttttycctctaacagttaaacaagcactagcctcaa

SEQ ID NO: 955947 - DNA, 781 bp, Homo sapiens
tataggaagtaggtttactcatattaacctcattttacagatagagaaacagagcttgggagactaagtgacttagccaaagtcacacagcttttaaagtcatggagtgggtatttgaaacctgggcagcatagagttcatgctgtgatattgcacagcttcaagagaagtctctggctgtttttccatctactccttgtctttctccttctgccttttcttttttttttttaatttaattttattttactttaagttccaggatgcatgtgcagaacatgcaggtttgttacataggcatacatgtgccatggtggtttgctgcacctaacaacctgtcatctaggttttaagccccgcatgcattaggtatttgtcctaatgctctcctcccgccttttcaatgtgaaccttcccacccaccctgcttttcttgtcttcttcccatagcttcagcaggctccaggtgccgcagccctgactcctcagggcccacccctgctgtgtccacacaaatgcccccaggaagctgacacttccccgcagcctgttcctgcagtccctgccttggttcttagctgatgctgtcttatcactgccaccccatccccatttctgagcatcaggcaccctcatcagcacttggcatgtaatagctccattaaccttaactgtaaccccattttttggatagagtttttsgtgtgttaaatcttgtgttcaacttaggttttgaaataagagcaggaaatgaagctttcagactgcaaatgtttccttt

SEQ ID NO: 955948 - DNA, 697 bp, Homo sapiens
gaatctcagcttcagttttctcttctttttttgttttattattatttttcttgaaacggagtctcactctgtcactcaggctggagtgcagtggcgcgatcttggctcactgcaacctccgcctcccagcctcgagcgattctcctgcctcagcctccagagtagctgggattacaggtgcctgccaccacgcccggctcatttttgtatttttaatagatacagggttttaccatgttgggcaggctgttctcaaactcctgacctcaggtgatcttgagaggtgacgccacctggacttcttgggtcgggtggggacttggagaaattttgtgtccagctaaaggattgtaagtacaccaatcagcactctgcatctagctaaaggattgtaaatgcaccaatcagcactctgtaaaaaacgtaccaatcagcactctgtaaaatgggccaatcagcactctgtagaatggaccaattagcgctctgtaaaatgggccaatcagcaggatgtgggtggggccaaataagggaataaaagctggccatgcgagccagcagtgcaacctgttygggtctttttccatgttgtgggagctttgttcttttgcttttcacaatcagtcttgctgctgctcactcattgagtctgcactaggtttaaaagctgtaacactcactgcgaaggtctggagct

SEQ ID NO: 955949 - DNA, 565 bp, Homo sapiens
ggttcctgctgctctggcaggagtaacaaagcatcggatgatgcactgtggcctcactctgtgcctccttggtggctgatgaggctgaattcacaagctgcccttcctctcaccggagggtgtgctcaagytctctgcttggtttctcattgggttgcttgtgtttgtcttttattacaacttttccctactaattttttgttggttgtgttgcaaatatcttccccgcatttgtagcttctcatttgtccatcttctttacgataaagtgcttaagtttaatacagtcttattggtttttcactaaaggtttatttatggtttctggtttctgtgactggcttaagaatttattaggtcataagtatattcttccaagtatatactctaaaaataatatattttgcttttttttttttttgagatggagtctcgctctgtcacccaggctagagtatagtggtgccatctcggctcactgcaacctccacctcccagactcaagcgattctcccgcctcagcctcccgagtagctgggattacaggcacctgccatcatgcctg

SEQ ID NO: 955950 - DNA, 614 bp, Homo sapiens
taatctttctgacttttgtcacataagataacctccagttctatccatgttgctgcaaaacacatgatttcatccttttttatggccaaatactattcccttgtgcatatgtatcacgtttcttcagccaaccrtttgttgatggcaatttagggtgattttatatctccactattgtgaatagtgctgtgataaacatatgcgtgcaaataccgtttttatatagcagtttcttttcctttgagtagatacccagtagtgtgatggctagatcaaatgctaattctatttttagtcctttgagaaatcttcatgctgtttaccgtaaagattatactaatttacattctcaccaacagtgtatgagagttctcttttctccacaattttaatttgttgttgtcattgctcagattgttctattgttaaccattgggtgagttttcaattggttcctgtgtctttgtgacataaccttattaatatgggtattttatttatcattttcttacattctggtactacaaggtgctctagtttcatcttatatatttccagtgctgtcttataatcagccatttctctaaggagccctatttccttttattagaaaa

SEQ ID NO: 955951 - DNA, 582 bp, Homo sapiens
aacaccaggagacacaaaagagccaagcagctaagggcctagctatygcctattgttttcaaatgccatctactggatcacagttcaaatgacaacactcaaaaacacttgactaattccaccttctgcaaaaccaaggtcaagaattcaacaatgaataaagaccctgtacagaggcttagctatctgaaaactttcagaagtgaagccaactgattatattcaatttacaccacagttaaagcaatacaaaccctcccagatggaaaagaataagcacaagaactctggaaattcaaaaaaccaaagtgtctccttacctccaaacaagcccactagctccccagcaatggtttttagccagtctgaaatgaaggacataaaattcagattctggatggcaaggaagttctttaagattcaggagaaagttggaactcaatttaaggaagcaaggcaattcagtaaaatgattcaagagttgaaacatgaatagccatttttaaaaaagatacaaactgaaatatctgagctaaaaaattcactctggaatgtcatgattcaatcccaagtattaatagc

SEQ ID NO: 955952 - DNA, 582 bp, Homo sapiens
aacaccaggagacacaaaagagccaagcagctaagggcctagctatcgcctattgttttcaaatgccatctactggatcacagttcaaaygacaacactcaaaaacacttgactaattccaccttctgcaaaaccaaggtcaagaattcaacaatgaataaagaccctgtacagaggcttagctatctgaaaactttcagaagtgaagccaactgattatattcaatttacaccacagttaaagcaatacaaaccctcccagatggaaaagaataagcacaagaactctggaaattcaaaaaaccaaagtgtctccttacctccaaacaagcccactagctccccagcaatggtttttagccagtctgaaatgaaggacataaaattcagattctggatggcaaggaagttctttaagattcaggagaaagttggaactcaatttaaggaagcaaggcaattcagtaaaatgattcaagagttgaaacatgaatagccatttttaaaaaagatacaaactgaaatatctgagctaaaaaattcactctggaatgtcatgattcaatcccaagtattaatagc

SEQ ID NO: 955953 - DNA, 576 bp, Homo sapiens
ggagtcagtgatgtgaatatttgggacaagcatatttcatgcataggagaccccccagtaatagagatgtagaaaaagagcttgttttgtgtgtttgaggaccagccaaaggcaagaatagctggagtgcagtggctaatgtgtaaagactagagagtaagctgcaggacacagtgacagcaaggagaatggtgggaggatcttttaatactccaggggaaagtatgttgcttggactctggtggtaatcatgggtgcaataagaattaatgctgatttagaaaatattttcaagtagagtcaaaaaagtcttatacagtgtgaaaagagaaagaggaacagtggtgccattaactgagataaggaagaccatggatgtattaggccattcttgtgttactataaagggatacctaagactaggtaatttataaagcaaaggggtttaattrgatcacagttctgcaggctgtaaaagcatggcattaatatctgatttgcttcctggcacgcttgaaggtatttcctgaggcccaggcagaaaatgaagcaggagcacacacatcacatggtgag

SEQ ID NO: 955954 - DNA, 576 bp, Homo sapiens
ggagtcagtgatgtgaatatttgggacaagcatatttcatgcataggagaccccccagtaatagagatgtagaaaaagagcttgttttgtgtgtttgaggaccagccaaaggcaagaatagctggagtgcagtggctaatgtgtaaagactagagagtaagctgcaggacacagtgacagcaaggagaatggtgggaggatcttttaatactccaggggaaagtatgttgcttggactctggtggtaatcatgggtgcaataagaattaatgctgatttagaaaatattttcaagtagagtcaaaaaagtcttatacagtgtgaaaagagaaagaggaacagtggtgccattaactgagataaggaagaccatggatgtattaggccattcttgtgttactataaagggatacctaagactaggtaatttataaagcaaaggggtttaattggatcacagttctgcaggctgtaaaagcatggcattaatatctgatttgcttcctggcamgcttgaaggtatttcctgaggcccaggcagaaaatgaagcaggagcacacacatcacatggtgag

SEQ ID NO: 955955 - DNA, 562 bp, Homo sapiens
ctgtgatgtcttggaggaacaatgtaaaccggcagtgtaacaagagcaggtcatttatgagtagttgagaatggtgaataggagtatgactagacagaatatagtaggaatgacaactttttggggcrcagtctaagtagtgggggtgactgtgtaaagccctgttgcaaagagtagggtaaggatggatagacctaatagaatgaagggatgtattaagctcataagggttcttattgttcttcagaaatgtgagtgagtttaagggaagtaggggagagtacttgcgacttccaggaggaagaggagatatcagtctggctggctgacagacacagctttatcctggaatggtgaacccagtggggagggtcctataggtggatagtggttagagtactatagatgactaaatagggtccggttcatcgaggttgtagagtttgaggggtcagattcttaacaagaactgatcgtccagctagggtgtcttcctgtggctgggaatctggagtaggcaagagaagattagcagcagggcgaatttcctgtctagcctgct

SEQ ID NO: 955956 - DNA, 676 bp, Homo sapiens
caaaacatatcaagtaattcaactatttcttgtaatgtcatgacttctctctgtttcctaggagcrcttccaggatctttgtaagggctgacactttgtaagggtccaatggtgttattcaatgtctatggtattacactgaacatcatatacaagaaggcaagagatcactttttaccgcaataagcaatttactagagagaaaagaaaaacagctcggagcagtctgagctatgtgaactatgcaggcccagagaagagacatgaatatgagacttcgggtcgccccactccgtgcccagcggcaactgtttaaagtcatttggttcctgactagctgcctcccccattatcttcatgttcccagaatgtgtgatacaaagaacaacagatgagccaatcaatagcccatgttgttttcatgtgaattcttggtaaacaactcagaaactgcctcttcttttcctttaaaaatccacttgtaactcctgttaatcagagtgtatattcagggcaatttgaacctttgctcctgagttgcagcaagcttggcccaaataaactctctacttacgttaaattttgcctcctcttcttctttttgggtcagcactggaaagaggaactgctcacatagggatgattggtgtcacacggtgttttaagtggatattca

SEQ ID NO: 955957 - DNA, 468 bp, Homo sapiens
ccaactaaacagttattttatgttaactggtatccagatgtttccaaagaatattagtgaaatgcagacatctgcaactatacacagcacaaagcactgatctgatttttaacttaattaccacagatattccttagtatgctcaagtctaatgagcagtgcatgctaagtttctctaggagaaataaaaatcaaaagcagaaactagcttaagttgctacagtgatgaagaaaacaaaccagctcattactttaaaaaagattcagtgaaaaccacaattgactaagcttgaatttttcttccttttcctagctgactcaaaagcaaacacacaaaagcctccagctagagtcactgttttttttttataattaatcattaacaaaacatttatgaaaatycaaatggttttaaaattacttcaacctggttctcttaatagggtttgatttattcatcagaaatct

SEQ ID NO: 955958 - DNA, 468 bp, Homo sapiens
ccaactaaacagttattttatgttaactggtatccagatgtttccaaagaatattagtgaaatgcagacatctgcaactatacacagcacaaagcactgatctgatttttaacttaattaccacagatattccttagtatgctcaagtctaatgagcagtgcatgctaagtttctctaggagaaataaaaatcaaaagcagaaactagcttaagttgctacagtgatgaagaaaacaaaccagctcattactttaaaaaagattcagtgaaaaccacaattgactaagcttgaatttttcttccttttcctagctgactcaaaagcaaacacacaaaagcctccagctagagtcactgttttttttttataattaatcattaacaaaacatttatgaaaatccaaatggttttaaaattacttsaacctggttctcttaatagggtttgatttattcatcagaaatct

SEQ ID NO: 955959 - DNA, 592 bp, Homo sapiens
catgtcctttccagggacatggatgaagctggaaaccatcattctcagcaaactatcacagaacggaaaaccaaacaccacatgttctcactcataagtaggaggtgatcaatgagaacacatggacacagggaggggaacatcacacacggcggcctgtcagggggtggagggctaggggagggatagcattaggagaaatacctaatgtaggtggtgggttgatgggtgcagcaaaccaccatggctcatgtatacctatgtaacaaaactgcacgttcagcgcatgtatcccagaacttgaagtataataattaaaaagaaaagataaaaagatattagaggctggtcacgccaggtagaagatagagttattacttaaatctatctcactgaaaattcagagggtagggtttttcaaggatagtttggtgggacaaggagtcagcttccgggtagggtcacgggacccacgggtgaagtcatcccatgcaaaaacctgaagagatacccaagaaagccaatcttaggtygcacaataatgatgttatctgcaggagtgattggggagttgcaagtcttgtgacctcca

SEQ ID NO: 955960 - DNA, 583 bp, Homo sapiens
ctgtggccttaaggaataaagaaagctattattataattataggtatacctcagagacattgcaatactgcatttttttccacaaattgaaggtttgtggcaactctgcattgaacaagtatatasgtgccattgtttccaacagcatgtactcacttcatgtttctgtgtctcattttggtaattctcacaatattaaaaacttgtttgttattataatatctgttgtgatgatctgtgatcagtgatttttggtgttgctattgtaattgttttggggtgccactagctgtgctcatataaagcagcaaacgtaattaataatgtgtgtgttctgactgctgcactgtcaggctattcccccatctctctttctctccttgggcttttcttatttcctgagacacaaaaatcataaaattaggccaattaataattctacaattgcctctaaatgttcaagtgaaagaaagagttgcacgtttatttaaatcaaaagctagaaaagattaagcttagtgaggaaggcatgttgaaagccaagataaaccaacagttagacttcttgcaccaaacagatagc

SEQ ID NO: 955961 - DNA, 565 bp, Homo sapiens
gtgaaaaaacagcaagctgtttctttaaaaggataacaatgggagcaggaggctaagacataatctttctaacatctcttatgcttatgtgattgacaaatagaagattgttagaaaaaaaccgtgtattctatttttgtgttttttttttcagggtaatatctctttagagatgtaaaatgtgtagaaaccaaatttcgagcaaggtgaagtgacttgctcaatgcacacactataaaagtgacaaaattaaggtttataactcaaactttctgaattctactccagggctttccagcagacatcactcaagtattgataatgttttatttcctatgtgctaaaagcccaggatgtcttactttgattgtaacactgaactgctatcatctgcctacaagccaccataacttgcctaaagcccaggtagacagagctgctaaagaatatattttaagcatgtataagaacctactcccaaaatatrtggttttcctatgaagagaaaaaattatctgatccccatcttcagtgaagcaggaaaattatttaaacaaaccttagc

SEQ ID NO: 955962 - DNA, 569 bp, Homo sapiens
catgtgaatgagaaataaacaccttaaaagatgctcaccatcattcataatttggaaaatgcaaaattaattccataatgtgataccaatacactcccactgaaatagctaaaattaaagaaaaaaactgaacactctaagtgttggcaaggatgtggtacaaatggaacatgcattacaggtagaaatgtaaaaaggtacaagaattttaaaaaacagtttggcagtttctttacagttaagcatatgcttaccatataaccaaaaattctactccaagatatttacctacaaaactgaaagtgttatgtccacattgacctgtatacaaatgcttagagcagaatcatttataatactcagataaccatgttgtgatttgaatgtgttgcggcaaaagcatgttagaaacaatccgctatgcaacagttttggaatgtggggcctaatgggaagtgcttttgtcacgagggctccactctcatgaatagattaatgctgattataaaagggcttgagastgtcagtttgagccctcacacacttactataaatgggatgttttctgc

SEQ ID NO: 955963 - DNA, 412 bp, Homo sapiens
taaaaatacaaaaaattagctgggcgtggtggcaggcgcctatagtcccagctactcgggaggctgaggcaggagaatgtcatgaacccgagaggcggagcttgcagtgagccgagatcgcgcyactgcactccagcctgggcgacagaacaagactccgcctcaaaaaaaaaaaaaaaaaaaaaaaaaaagaactaggatccacacagaatgatagtggggtaaacagcactgaaaaagttaagtatttctatggactcaccatatttgttttcctcacactcttgcacgtggtagaaggcatagagaatttgtgacatttgggactttcttgttaattatgctcatcacctacagtaaaacatatatatttcaaagagggctatggtaaaatctaatagaagatggttat

SEQ ID NO: 955964 - DNA, 450 bp, Homo sapiens
ggagacgcagaacttgttgggaactggagtaaaggtcactcttggtatgctttagcaaagagactggcaagattttgactctgccctagagatctktagaactttgaacttgagagagatgatttagggtatctggtagaagaaatttctaagcagcaaagcattaaagatgtgacctagctgtttctaaaagtgtttgctcatatgcatgaacaaaaattatctgaaactggaaattatatttaaaagggaagcagagcataaaagttagaaaaatttacagcctgaccatggtagaaaagaaaaaccaattttctggggataaattcaagctgactgcagaaacctgcataagtaaaaaggaacctaatgttaatagccaagacaatgtggaaaatgtctgcagggcatgtcagagacctttgcagcagcccctcccatcacaggctt

SEQ ID NO: 955965 - DNA, 575 bp, Homo sapiens
cagaacttgttgggaactggagtaaaggtcactcttggtatgctttagcaaagagactggcaagattttgactctgccctagagatctgtagaactttgaacttgagagagatgatttagggtatctggtagaagaaatttctaagcagcaaagcattaaagatgtgacctagctgtttctaaaagtgtttgctcatatgcatgaacaaaaattatctgaaactggaaattatatttaaaagggaagcagagcataaaagttagaaaaatttacagcctgaccatggtagaaaagaaaaaccaattttctggggataaattcaagctgactgcagaaacctgcataagtaaaaaggaacctaatgttaatagccaagacaatgtggaaaatgtctgcagggcatgtcagagacctttgcagcagcccctcccatcacaggcttggaggcctaggagggaaaaatggttttgtgggccaggcccaaggccccactgctctggcagcctccagacatggmgccttgtgtcccaccaactccagctccaaccatggctaaaaggggacaaggtacagc

SEQ ID NO: 955966 - DNA, 591 bp, Homo sapiens
gatcttacatttggaaaaacctaaagaccccatcaaaaaactatctaaatgaattcagtaagttgcaggatacaaaatcaacatgaaaaaaycagtagtatttctatatgtcaacagtgaacaatatgaaaaagaaatcaaacaagtaatcccatgtacattagccacaaataaaattgaatacctagaaatttcaaataagtgaaatatctctacaataaaaactataaaacactgatgaaaaaaatggaaaaggacacaaaaaaatgaaaagatattccatgttcatggattggaagaatcaatactgttaaagtgttcacactacccagaccaatctacagattcaatgcaatccctatcaaaataccaatgacattcttcctagaaatagaaaaaacaatcctaaaatttatatggaacacagaagatccagaatagccgaacctaccctgggcaaaaagaacaaaactgaaataatcacattacctgacttcatattatactacagagcttgtagtagccaatatagcaccgtactggcttaaaaacatagaccaacagaacaaaatcaagaacaccatgaaacaa

SEQ ID NO: 955967 - DNA, 343 bp, Homo sapiens
tattagagaaatgcagtttaaaatcacagtgagatattatgtcacacctgtataaatggctattatcaaaaagatgaaaaataactagtgttgatcaacatggggaggaaagggagcacttgcatactgttggtggaaatgtaaattagtacagccattatggaggttttaaaaaaaataaaaatagaactgttgtatgctccagcaatttcactgctgggtatatatcaaaaaatgaaatggccaygtctaaaagatatctgcacttttatgtttatgacagcattattcacaataagcaagatatggaatcaatctaactgtccatcaatagatgaatgga

SEQ ID NO: 955968 - DNA, 775 bp, Homo sapiens
ttttttgcctgctgccatccatgtaagatgtgagttgctcctccttgccttccaccattattgtagggcctctccagccatgtggaactgtaagtccaataagcctctttctgttgttgtaaattgcccagtctcaggtaggtctttatcagcagcataaaaatggactaatacagtaaattggtaccagtagagtggggcaccgctgaaaagatacccaaaaatatggaagaaactttggaactgggtaacaggcagaggctggaacagtttggatggagatgaggaacttgttgggaactggagcaaaggtgactcttgttatgttttagcaaagagactggcagcattttgcccctgccctagagatttgtagaactttgaacttgagagagatgatttagggcatctggcagaagaaatttccaagcagaaaagcattcaagaggtgacttgggtgctgttaaatgcattcggtttcaaaagggaaacaaggcataaaagtttggaaaatttgcagcctgactatgcaatagaaaagaaaatcctattttcagaggagaaattcaagccagttgcataaatttgctatagtaatgaggagccaaatgttaatcaccaagacaatggggaaaatgtctccagggcatgtcagagacctttgcggcagaccctcccatcacaggcctggaggcctaggagaaaaaagtggtttyctgggttgggcccagagtacctgtgctgtgtacagcctagggacttggtgccctgcatt

SEQ ID NO: 955969 - DNA, 456 bp, Homo sapiens
tgtttagagataacttttagttgtcacaactggaaagagagtgcaactgatatctggttagtagaggccaggtgtgctgctagataccctacaatgtagaggatagtctaatactgcaaataattttgttttttttttttgagatggggtcttgctctgttgcccaggctggagtggagtggcatgatctcggctcattgcaaggtctgcctcccgggttcatgccattctcctgcctcagcctcccgagtagctgggactacaggcgcatgccaccatgcctggctgatttttttgaattttttttagtagagacggggtttcaccatgttagscaggatggtctcgatctcctgacctcatgatttgcccacctcggcctcccaaagtgctggaattacaggcatgagccaccgcacccggccactgcaaataattttttaaccccaaatggcc

SEQ ID NO: 955970 - DNA, 456 bp, Homo sapiens
tgtttagagataacttttagttgtcacaactggaaagagagtgcaactgatatctggttagtagaggccaggtgtgctgctagataccctacaatgtagaggatagtctaatactgcaaataattttgttttttttttttgagatggggtcttgctctgttgcccaggctggagtggagtggcatgatctcggctcattgcaaggtctgcctcccgggttcatgccattctcctgcctcagcctcccgagtagctgggactacaggcgcatgccaccatgcctggctgatttttttgaattttttttagtagagacggggtttcaccatgttagccaggatggtctcgatctcctgacctcatgatttkcccacctcggcctcccaaagtgctggaattacaggcatgagccaccgcacccggccactgcaaataattttttaaccccaaatggcc

SEQ ID NO: 955971 - DNA, 582 bp, Homo sapiens
ttatgaggacatgtgatattttattacatgcatataatgtttaatgataagttaaggtatttacagtattcatcaacttgaatatttatcatttttatgcattggaaagatgtcaagctcctcccttttagctattttgaagtatacagtacattgttcttaactatagttaccctagtctgctatcatatattagagcacaattctcctatctaacataatggaaataattgtacccattaaccaaccactctttattccccacccccaatacacacaccttttccagcctctggtattcatcattttactctctacctccatgacatcaactttttttaatctcccacatatgagtgacaacacgtcatatttgtttttctgtgcctggcttatctcacttaacataatgacttccagttccacacatgttgctacaaatgacatgatttcattctattttactggccaaatagtattccattgtgtatatgtatcrcagtctctttatcaatttgtctgttgattgatacgtttattccatatattttcttttgtgagtagtgctgtaataaacatgag

SEQ ID NO: 955972 - DNA, 583 bp, Homo sapiens
caactgtatatggagtgtggtgtaggaggaagggaatgaggagttaggtctggaatctataaagtctcaggtgattattaaagttactacattgttagttgtamatggaattttggagttcagaggaaggtggatgaagtttaggctgagcataaaactttatcagtatatagatggtatttttaaaaaaggctccgtgaacagctcttctcaaagggtggtcccaggaatagcagcattgatttgttagacaaattcttgggcctaacctccgacctactgaattagaagcttcagggatggggtcctacaatccgtgtttaacaagccatctatgtgatgtgaaacatgctggaatctgtgaaccttgctctggtgattatgcatagagagagaagattgttgttccaactaaggagccctgggacctgctgaggcactgagggcaagacatggagataagaaggaaaccagccaaagagactgaaaagaagagcaagcaaagtaataccaggaaggtgggaaatctccccagataaagcacagatttaatgcaatcctaaacaaaatctcagaagttaac

SEQ ID NO: 955973 - DNA, 624 bp, Homo sapiens
ctcatctaacacaaagcctattttataataaaatgttgaatatttcatggaatttattgaacactgtactgacattgaaaagcagaatggctggctgcatgggtactcaaagtatggtttctggccaggcacggtggtaatcccagcactttgggacgctgaggcgggtggatcaccagttcgatgccagcctggccaacatgatgaaaccctgtatttactaaaaacacaaaaaaattagctgggcatggtggcatgtgcctgtaatcccagctacttgggaggctgaggcaggagaatctcttgaacccgggaggcggaggttgcagtgagctgagatcacgccactgcactccagcctgggtgacagagtaagactttgtcaaaaaaaaaaaaaaagtactgtttctactgaatgcatatggctttcgcatcatcataaagtcaaaaaaatctaagttgaaccatcttaagttggaaactgtgtgtctgtgtcygggtatttgtgtttctgtgtgtatgctaacttaattatcacaacaaccctgtgatataggtactcttattatctctattttacagatgaggaaacagagtcagagaggttaaataacttgcccaaga

SEQ ID NO: 955974 - DNA, 484 bp, Homo sapiens
gaaccaaaaatcaggttagcaatcatagtacctggttttgacatcaaattaaggaaagaggcactgaagaggagcataaaggtagtcttgaattgcctataccacccctccctgattcccctacagtggctgcatggcacagagccaagttcaatctgcgaacttggggaagggagagtatatgattgtaggactttgcattggagcccagtgtggacctgtcacagcggaaagcaataccaggcagaacttagccagcatatacagaggaagaatttagaccagccctagccagaggcaaatcatccatcccagctattggaacctgagttctgtcaagccctgctactgtgagctaaaattccccggggtcmtaataaacttaaagaccagcctagtccacaaggactgcaattcctgggcaagttctggtgttgtgctggctcagagacagaggacttttggaacacacgacctagtgaga

SEQ ID NO: 955975 - DNA, 585 bp, Homo sapiens
gtgatgattagagggaagataatctgaggcagagggaactgctcattcagaaatcctcatgtcacatgttgatgtgattgaaggaagaccaatgcaagtcaagcatagagattgaggaaagagcgtttgatgtgcctttgtgcaatgtgaatcttcaaggagataatttggtttacaacacttttccaagtttattggacaaagaattgtttttgcatagttaatatctcttgtcaaataatattgcaacaccagcttctgatttatttctgtttttgtttttgtttcattgagacgcagtcttgctctgtggctcaggctggagtgcagtggtgcaatctcggttcactgcaacctttgcctcccgggttcaagcgaatctcctgcctcagcctcctgagtagctgggattacaggtgcacgccaccatgcccggctaatatttgtatttttagcagagayggggtttcgtcatgttggccaggctggtctcaaactcctgactttgggtgatctgcccaccttggcctcctaaagtgctgggactataggcatgagccagcatgcctggcctatttctgcttt

SEQ ID NO: 955976 - DNA, 565 bp, Homo sapiens
ccttgtccaaatcacttcacttccttgagcactgggtttctcatctataagacctacaatacccacctttccaggtcgtttggattagagataaagaatggacagtacctggtgcatgggaggtgtttgctagtggcgtgccccctggtgatgtatgaagtacaagggtcaggggtggtgcgcaggcaaacagtccagcacagcagcacaggtaggacaacatcaaagggtgctgtgtactaggcaaaggcaggttaggttttcatcatgtaggcaatggagagccagcaaagaattgtaagccgaggggaatttataaagagatttgcactgagaaagtataatagcgtggaagacaaattaggggaaactaagtctagaaatgggaagacctgtagggagacgatcataattgtccaagctggtcaggcatggtggctcacgcctgtaatcctaagcactttgggaggctgagrtggacttgaggtcaggagttcgagaccagcctggccaatgtggcgaaaccctgactctaccaaaaaaccccactaaaattagctgggtg

SEQ ID NO: 955977 - DNA, 604 bp, Homo sapiens
ttttacatgttatttcaattttaattggcatacaatagttatatatatagatagtgtacatgtgatattttgatacctttctacaatgtataataaccaaatgacagtaacttcaaatatttatcttttctttgtgtggggaacattataattcttctctttagctatttgaaaatagtttattttttgaatagtctatgcttgttataacaataaattattgtgaactgtaatttccctactgtatgattgaatattagaatgtattccttctaactgtatttttgaacccctcaaataacttctctctttttttttttacccctcaaataactttttacccctcaaataacttctcatacacgctggccccttctcttccttgcctctggtagtcatcattctattctctgtctccatgtgacagagaatagaatggctccactttagttcccacatactagtaaaaacatgcaaaatttgtctttctgtgaccgccttatttcacttaataatctcttgtttcatttgtatttctgcaaatgacagtatttcgttctttcttatggytaaataatattccattgtgtatttatacacattt

SEQ ID NO: 955978 - DNA, 599 bp, Homo sapiens
gggccgggcagaggcacttctcacttcgtagacatggctgcggctgggcagaggcactcctcacttcgcagacaggacggcggcaaggcagagacgctccttacttcccagatggggcagcggctgggcagaggtgctcttcacttcccataccatgaggtggccaggcagaggtgttcgtcacttcccagattgggtggaggccgggcagaggcagtgctcctcctcaattcccagatggttggcggctgggcagaggtgctcctcacttcccagacagggcagtggccaggcagaagtgctcctcacttcccacggtgtaagggggccaggcagaggcactcctcgcttcgcagacaggacggcagccgggcagaggcactcctcacttcccagacagggcggcagcctggcagaggcactcctcactgcccagacggggcagggcccaggcagaggcgcccctcacttcccagactgtgaggcggctgggcagaggtgctcgtcacttcccagatagggygggggcccggcagaggcactcctcactgcccagacggtgtggtggccaggcagaggcgctcctcacttcccagacg

SEQ ID NO: 955979 - DNA, 579 bp, Homo sapiens
ctgtcacttcctccccatcagtccttttaaacaacattccaccgagatagggtgagtgygccccctactggaccccggggccgttcagggatggaggacgtgagctgcggaaaggagctaggcattctgccaagtgctggctttgagacagtgcagactgcggggacccggctccctcctctggacccctgttccctcccccagtcttcttccctcgacgttccacacccgatttctttcaaatgtccctgcacaagctgtggctcccaagccatcactatcccaatcacttgtccagatctgcaggtgctgaactccttgctgcctcggggcctttgcacttgctgttcctggagccggggagggttttccctgaaacactttccttcagggctcacatcaaatgtcagctcctcaggaggccttctctgaccacccaggctgggtcagggcccccataggttgttctttgggcactcaggtttttcctttaaggccaagtcatgacttcaattacaaatgaaggaggtaacaagtaattcagagtcagtctccccagagaggcctctccaacttcat

SEQ ID NO: 955980 - DNA, 766 bp, Homo sapiens
gcaaaagcagactttctctgatgttctcaaaagatccagtcttcaggttctagatgtgaaggggatgattatcctcagtaaaccatgaaaagctttctttgcctggtgaaaatacactgtggcataagaagctgctgtaaaaaaaaaaaatcaacccctttgcatgggaaaccttttctacaacagaaaacatgcatttgagacagcaaggtggatgagggtccttgggaaaactccaagtagcccatacactggggtaggaccttgggaaatttgcaccatttgcaatggggaggagcctggcccctcctcttcctgtgtgaaacctgggattcaagctgccagcgggaaggactaagcagggactgtggcctaaaggagtccctgtttcccctttttcttccttttcacccagtaaatccctgtcttactcaccattcaaattgtctgcaagcctcaattttcatggctgtgggacaaagaaccccatttttaagtgaactaagggaaagtcctgcagtatttttggcacacaatgtgggaactcaagaagtggtgagtgaaatggggactcaaaacctctcactgttgcttctaagccttttcatcctcagatttctgagggtggggaaaaccatgcccccaccttcccatcgctcctgtgccttgtcatggctttttcttttctttttcgggagggaccagcgagcagcagctaccctccaccccccactccctgctrggcctgggacacatggtccaaggg

SEQ ID NO: 955981 - DNA, 594 bp, Homo sapiens; identical to SEQ ID NO: 954240

SEQ ID NO: 955982 - DNA, 588 bp, Homo sapiens
gatggaacatttgtacaattaagttaggtccatttgatctaggttttactttatatctgggtttctttattgattttctgtctgtaygatctgtccattactacatgtagggtgttgaagtcttctgtcttctactattatcctattgcagtttatctctctcttcagagctattaacatttgtttatatatttaagtgttctgatgttgggtgcatatatatttacaattgttatatcctcttgctgggttgatcccattatcattatacaatgatcttctttgtttctttgtaaagtttttgacttaaaatgtattttattggccaggcacggtggctcatgcctgtaatcctagcactttgagagactgagctgggcagatcaactgaggtcaggggtttgagaccagcctggccaatatggtgaaatcctgtctctactaaaaatacaaaaaaactagctggatgtgttggcttatgcctgtaatcccacctgcttgggaggctgaggcaggagaattgcttgaacccaggaggcagaggttgcagtgagctgagatcatgccactgcactccagcctgggcaa

SEQ ID NO: 955983 - DNA, 542 bp, Homo sapiens
agaagattttcatcacaaagaggcagattaagaattttcagttgaaatttctttaaaagtaagtgctcyaagtaaagggaaatcaggagccttgagtcaggaagctgactgtctaaagtttagtcaaaagtttagtcaagcagaggggaatattaagccctcttggacactagaacatttgattatgtgtctgttttttagcctcattcgtttacctggattcactttccaggtagatatagaattggatttaaccaggattgttattttgccaagcgaagatgggtggttgatagagggaatggggcgttgagtgcatatggagagtgattgtaatgattgaccttggaatttaaacagggcaaggaggagacaagcaccagatgggcaatggccagtgagaagtggtaggatcagtgacttttagtctcatgaggttaaagaatttctggagtagggctataagaagggataagttagaaagatagtgaaaatgcttttgtctctaggtactgactataccagtaattctgtgatccata

SEQ ID NO: 955984 - DNA, 706 bp, Homo sapiens
tcaaaaacagaagaatacacattgttctcaagtgcacagggaacattctccaggatagatcatatgttagacaacaaaacaagtcccaataatataaaaaatactgcactcatataaagtatgttctctggtcacctgtgaaaaacccacagaaaacaacatgtttttgcaaaaagactgaaaatcttcccctaagatgaggaacgtgacaaggatgtctgcctttgtgacccctattctgttatactggaggttctaactggagaaattaggcatgggagaaaaaggtatctacatatataaattatataattataattatacatgtatgcagatgacatgacattttatagaaataatactaaaaaattcacacaaaaactattagagccaataaaagagttcagcaagattgcaggacaggaggtcaatacacacacaaaaaatggttgtttttccatccagtaggaatgaaaagtttgaaaataataataaaagacaattccatatataatagactcacaaagaataaaatacttaagaataaatgtagcatgggaagtgtaaggtttacacactgaaaaccacaaaacttaattgaaagatattaaataaaacctaaataaatgaaatgacgttccatstttgtggattttgagacagtatttttagatgccaatactccccaaatttatctacagatttg

SEQ ID NO: 955985 - DNA, 583 bp, Homo sapiens
tgctgtggtcccagctacttgggaggctgaagggggaggattgcttgaacccaggaggtggaggtgrcagtgagctgagatcactgtactccagcctgggccacagagaaaaaaaaattaccacaatgctaaatagcttaaaataacatatattatctcatctctcagtttctgtgagtcaggaatttaaaggaacttagttgggtggttctgcctcgctgactcttatgaggttggacaatgctgcagtcatccagggtgggaggatccacttccaaaacgtctcactcacatgactattggcagaaagcctcagttccttgaaaatgtggacttctctgcaggccttctggagtgtcctcctgacagcaactggcctttcccagagagagtgatccaacagagagagcaagtaggatatagctgcacctttcatgacagcctcagaaaaaaaaaatcaccgtgtctgctatgttttattcatcagaagtgagtcgctgagtccaaccatattcacagggaggcaaagtaagctctacctcttaaaggaaaggagtatccaagaatttgtggatatatttta

SEQ ID NO: 955986 - DNA, 605 bp, Homo sapiens
tgtttataaatttttgaaaaacaaatttaatttggattcatgctattttattagggcttattgtttggaaaattaagtctcctctctcaaagaattaaggttttcaccctttttttgaaatccttgcaktattactttgttcaaatgaatgacttattttacaatgacctgtgatatcaactgttttaaacctttgatatttgacaaactttacaaaatcaaattatcaattctgtctttttctgacagacttaatcctttaagatattaggtttcctagagttcaaaaatgatatcatttggcttctttggtataaaaattatacaagaaatgttgtcaaatatgaagtggtgtttgttttctttgagctgtatttatataaatatgttaaaagaagcattctgaaattaaaaaaactcctataatctaatcgacttaatgtacattatcagaaataattataattgttatgttaaattattgtgtgccactgaggtaacaaatttacttctcaattgtgtctttgattatggctgccctaaaagtttttgtcattcacaggcaattgttatcttgttttggtccaaaatagaaggtcgtttta

SEQ ID NO: 955987 - DNA, 721 bp, Homo sapiens
gcagtcacgtggttaggaaggatgtttctcatggcccaagttcccatggaacgtttcactgtgatcagagtctgcaaaatggctggaggtttacaaaatggtacaggttagactaacagtaacatctcccaggtaaacagttctacaaagtaaacttcccttgagcatctacactgtaccagacatggtgctacgacccaggccacaggaggaacaggacagatgaggcccctgccatcctggtgctcacgtctgacgaaggaagctaacaggtcataagaccaggtcagatggtggtgataatcaaagacattaccagagtgagatgagctagaaagaaaccgaaggagctcttacaaacacagtgacaggtggagacccctccgaaaggtgacttttgagcagaaacctgagaaatgtggagggggctatggagaacgaccagcccctgaagcaaccccaggattgggagggcaaacccagcaccaggagggcaatggaatggcctgacctgtgcgtccttcgtgcttccttcttcagtgatgcacaaacagaaacatggggcaatttcgtgaagggtccatggatgaatcaagaagcagccgcactgcagagctggagtgcrgataaaatctgacccaacagtaaagctagaagcaggtgctgcttaccactgaccacagtgcaggtcatgaagcataaccagaccatgaaggcacgt

SEQ ID NO: 955988 - DNA, 682 bp, Homo sapiens
gtctgctttcaacttgtctttaacagaatttccaatccatataatttgtttctttatcaatcctttcctaaatttattttcttcccttgccmccatgttatcagtcttaaacttttttttttttttttttttttgccagtatcatctaattcctctcccagctttctttttatcaaaccagactgaaaaactctcaactctttatttttctagctgagcactactggcaaaaatcacacaagcagtaacaagcactgtcagtttattgttatcagcctcaaatggacccacacaattggtcgtaattctattatttctagttctctcatttttcgcagagattacttaaggcaaccagccactcttcttacatctccagttttccacgtttcttgtcgcattcagcagatgacttggtatttcatttcacagagaaaatggaaatcttcagatgagaactcccacagtgtccttccaacaaatctactcacatctgcactcattctggtttgtttgttcttagtgtttataatggaaagagtctcgccctcaagggatgggaaaatcatatgcctctagaaaccaggtggataatataaatttgtgaagccgtagggtaagattaggctgtggcctgtagcaaattgataagagctatctaaattattcaagttgttaatac

SEQ ID NO: 955989 - DNA, 666 bp, Homo sapiens
gactgatgttgagtgcctgtggcttttctcggtacagggtgcaagctgccagtggatcttctggggcctagaggacagtggccctcttcttacagctccactaggcagtgcsccagtggggactctgtggggggggctccaaccccacattttccctctgcgctgccttagcagaggttctccatgagggctctgcccctgcagcaggcttctgcctggacacccaggcttttccatacatactctaaagtctaggcctcaactcttgtactctgaacacccacagccttactacaatatggaagccaccaaggcgtacagtttgcaccctctgaagcagcagcctgagctgcacctgggcccctttgagccatggctagagctagagtgactgagatgcggggagcagtgtcccaaggctgcacagggcagcggggccctaggcctggcccatgaaaccattcttccttcctaggcctctgggcctgtgatgggaggagctgctgtgaaggtctctgaagtggcttccaggtcttttccccattgtcttggctattagcacttagctcctttttacttatgcaaatttctgcagcctacttgaattcctcccctgaaaatgggcttttcttttctaccaaatggccaggctgcaaagtttccact

SEQ ID NO: 955990 - DNA, 452 bp, Homo sapiens
cacagaatctcatattactttcctccttaaatcaatatttagtgctcaatgctggtcctagaagctagatggaatcaaataagaaattcaacatttggtctgtttctaccgatgaattaaagcttccgagaaatattttaaacttttctaaaatggaaatggattgtaagctgaacgtgttgatgggtcttctgcttcctccaccgttcctgccaggagcacctaggcttgaacatgtgctattattgttcacatacatccagaagcacctaggtttcatggatgtatgtgaagacggcagttgttccccagttatgcctgggatcccttcacatcctcagaaaggccagaactgtactgacctcagggaagcaaggaatcaagaagccacttgcctgggagttttacccaagtcctgctgtcttatyagataacatcctcgtgaagcttct

SEQ ID NO: 955991 - DNA, 624 bp, Homo sapiens
gcgatccctatctcatgtgtgatcataggatgactcctggcaaattggatggaaagggaaaaaaaagaaaggtttttcttttgcattcaattttctktggttatagagacccaatcattgtatcttttatgatttgttgaaaggactcaaggtacaagggctattgtggcagatgtcatacagtattcataaggcatcatatagggaaatagagagagaggcccaacagtccaaccagcttgcttgatctctctaccccccatcactttcgatatgtcgagtgtctctgtcctggtgtctcttcctcgtgagaaaacacaaaaggcaatgaataacccattatccacataataaattttagactcagtttttgtctgtgaaaatgaatagctatctttggagccaattttagaagtcataagttccaggccctgttgtcacttactatctgaacttggacaagtcatttaacctctctgagctcaaggtgccacatctgtgaaattgaaataataatagctaactcacagggtgctgggggtcaaatgcaatactgtaagtgagcaggtttgggaagctgtaaagcatagtacagtttaaagtattactggccatagtttctct

SEQ ID NO: 955992 - DNA, 601 bp, Homo sapiens
tccgcagtgtttgtgtccctgggtacttgagattagggagtggtgatgactcttaacgagcatgctgccttcaagcatctgtttaacaaagtacatcttgcaccacccttaatccatttaaccctgagttgacacaacacatgtttcagaaagcacagggttgggggtaaggtcatagattaacagcatcccaaggcagaagaatttttcttagtacagaacaaaatggagtctcctatgtctacttctttctacacagacacagtaataatctgatctctctttcttttccccacacttcccccttttcttttcaacaaaaccgccatcgtcatcatggcccattctcgatggttgctgtctcttcggagctgttgggtacacctgcagaaaggctgttgcttcacacttggaagattgcacagcggccaggcagaggtgctcctcacttcccagatggggtggcrgccgggcagaggcactcctcacatcccagatgatgggcggctgggcagaggcgctcctcacctcccagacggggtggccgggcagaggcgctcctcacttcccagacggggtggccaggcagaggtgctcctca

SEQ ID NO: 955993 - DNA, 592 bp, Homo sapiens
tatcttgtattattcattgatttccataaattggactttacatttctatggtacctacttgattagtttaataattgactttctaaatttttttttagacactacatggatttcttcttggtttggattcattgctggtaaacttgcatgatttttgggtggtgctaaagaacattgttttttcatattaccagaattgtttttctggttctttctcatttgggtagactgtgtgagaggggagatctgggggcttaaggctgctgtatagattcttttgtcccacagggtgctccctcgatgtaataccctaaccctttttctagggatgtagcttcctaagagctgaactatagtgattgttatttctcttctggacgcaggtctattagtctctgggctggtacttgagggtgtctgcacagagtcctgtgatgtgaatcatcttcaggtctctcagccatggacaccagcacctgctgtggtggaagttgcagaggagtgaaattgactctgtkgcatccttaattgtaattgtttaatgaactagttttttgctggttggcctcctgccaagaggtggcaccttcaa

SEQ ID NO: 955994 - DNA, 525 bp, Homo sapiens
ggtcactagacagacaaactcaagtcrcaaaacatgtttctccttgaaaagtaagaaatgatgtaatgcatacctcaattgaataactggctttgtttctcacttctgtagtatgcttccctctgcagagatctccccccaccccactaaatgcttaaaaggtaacttaactctttgttcagggctcagtcctttggatgttaatccgacggctggtgcacctaaataattaatgaatatcctcctgaaccccaatggtctctctgattccttaaaaatcccactacatttcttgggggtggggggcttgcctggggttggagatgacagatttactgtctcctttgcctgtgagactagagctctggggctaggagagacccagcatccaaggcacaccacaggggagcttcaactggatagaaaccagctctccccatattctgacaccctgcctggcagtgcaatggaactgggaatggggctgcaggatgataccagcacttcaggaactgcagtaaagag

SEQ ID NO: 955995 - DNA, 743 bp, Homo sapiens
tgtatttcctgcccttctgaatagccatcttgaaatttgtcaaaatactttcttttagagtatggacccccaaaatctgagagaggtctcagttaatatagagagtttattttgccaatattgaggacaaatgaccatgacacaccctcaggaggtcctgaggatatgtgtccaacgtggtcggggcacagcttggtatcatacattttagggagacatgagacatcaatcaacacatgtatgatgaacattggttcagtccggaaaggtgggacaacttgaagtggggagggggcttccaggtcatagatagataagagacaaatggttacattcttttgagtttctggttagcctctgcaaaggaggcaatcaaatatgtaattatctcggtgagcagacgggtgactttgaatagaatggggggcaagtttgtgctgagcagttcccagcttgacttttttctttagcttagtgattttggggccctaagatttatcttcctttcccaagagtgaaatattttggtttccttcaagctcaactctgccttcaaccaagacaagtggggatttacaaccacagaacagggtgaggtcaaggaggaagaattactaacaagaagcacccaaggtgagggtgatgttcttgatagcagcaaggcagaaactctggaataccaaamtacagtcatggcagtcttttcatttttctcatgtctccttggtactaatcaaatatgt

SEQ ID NO: 955996 - DNA, 566 bp, Homo sapiens
agatacttttctgttcatccaactctattataactttcacaaaagaatttaaagtctgttgtttaactgtaggccttacagtaaaatttgctatagagcatataatggggrtacatttctattcattgcttctctactctaaaccatggaaaaagcacttaacaaatgatgcccttctaaaagagtgaaggcctcctggcaatgttctctttaacccatgatgtggattaagaggagtgaatcattgtttgtttgtttgtttgtttgtttttgaatgattattaggcaacatatgtaccattaaagtttcttaagtacattgggcctttgtcctttatctaacaaagtataagtttatccacttataaggctggctgcaaattccttaaacaaaagtacaccccataagtgcacataacagatcccttttccatttctattgttcagagaggcataagcaagaaaaaataataaaagataagaatttcatgacagtagaagtgttaatctgttaacttgggaaaagatattcacatcaaggatgccatcttcattttgggagaaat

SEQ ID NO: 955997 - DNA, 627 bp, Homo sapiens
gaaataaaggatacaattgattttatatatatatattcatatttaatgaaatatatatttcaaattactgatacactaagctgacttggmacctgctgggacttaactgacataggtaagtggataaagagagaatgttaatattctctcattaacattaggcaaaactagggagagaacaggttgactaccaaggtgaggttatcagtggtatcatgtcttcctgaggaacatcataagcacaaatttgaaatggactgatgtttctgttgtattgacttcaagtattggttgaaaataagaaataatttccagcctttttgagggtaagacattactaagagcatcagctaatcacattggagttgagagcacagccccagtgggtgataagaagctgaagctgaaactcacagtgaaggttgggaatgtacaggcaagcactgtggcttcagcatactctgagttctcatcatctcacccatgctctaggtatattgcaacaaaacaagttgtcaactgcattactgtggggttaaaactttctactttgatctgcattcactgaagaacttaggcggagcctggctctgtgaataaagtcgtcattacaagaaatgtaatgac

SEQ ID NO: 955998 - DNA, 522 bp, Homo sapiens
tttgacaaagttaaatttacacatttcttttttattgttgctgaccttttgttgttatttctagtaaactatcacctaactcgaggacacaaagatttactcctatgcttcttttaaartttttatagttttagctcttacatttaggtctatgatctattttgagttaactcttcatatggtatgaggtcaggttccaaatttattcttttggatgtgggtatctagttgtctcagcagtttatttaaaaaaaaattctttcctccactgaattgtcttagcacccatatagaaaatcaattgaccataaatgcaaagatttatttctagactctcaaatctattccattgatctatatgtatattgaaatacaaattccataggtcttgattgctgtgttgattactgcaagtttgtaacaagtattgaaattatgaagtgtgggtcctctgctttgttctttctcaagattgtttggttattctggaatcttgaaattctctacgaacttaggattaac

SEQ ID NO: 955999 - DNA, 460 bp, Homo sapiens
aggtcagatactttctatgtctttccgccgttgtgaccttaaaatacatcactatgatatgacgctcatgctgcttcagcttgactgccataaggggactcaaggagttctatttgcgaaaatataatttatatttttcaaaagactactcaaccaatactcttgttattatactcccacaaggtttcctattcctcatgctttcctttctgctgaaatgttccttcagatctatactgaacaataaagatatgtcaatacgttcaagtcccaggcattaaattttcaggtcccaacttttacaatattgcagtttaaagtgtctctctatgaatacaattagaacttttctacctctagatataasacagaatcatatatttgcccatagctggactcagtgtaattcttttccttttagacaaaagtactccagatcccatgtgaatttctagtgaat

SEQ ID NO: 956000 - DNA, 562 bp, Homo sapiens
gaactactccctaactcattttatgaagccagcatcatcctgataccaaaactgggaagagacacaacaaaaacagaaaacttcaggccaatattcctgatgaatattgatgyaaaaatcctcaataaaaacactggcaaactgaatccagcagcacatcaaaaaacttatccaccaagatcaagtttgcttcattcctggaatgcaaagctggttcaacatatgcaaatcaataaatgtaatccatcacataaacagaaccaaagacaaaaaccacatgattatctcaatagatgcagaaaaggcctttgataaaattcaacatcccttcatgttaaaaactctcaataaactaagtattgatggaacatatgtcaaaataataagagctatttatgacaaacccacagccaatatcatattcaatgggcaaaagctggacacattccctttgaaaaccagcacaggacaaggatgccctctcttaccactccgattcaacatagtcttggaagttgtggccagggcaatcaggcaagagaaagaaataagggtattcaaa

SEQ ID NO: 956001 - DNA, 593 bp, Homo sapiens
atgatggtaaacccatgctaatattttataatatataaattaaacactttaggctttaaaagaaacaaaaataaataaatatagacaatatattcatatttatatagacaatatatatagacaatgtatttattgtctatatttcaaaggcagattaaagtttcaacaattctaggataaatactatcaatattatgtcatgggaattcaatgattgtgtattacattatacaaagttttctgttttttactcacagccaagaaaatgaattttctcaccataattcagtagtgggtataatgttcattatgccaaattagaatctattatgaactaaagagaaataacaaaaagttaaatgcaataaacaaaaacaactaagaatcatgacattatttttcaagattcaacataactccttttgctttgaaaaatgttttctatgagtttcaagacaaagatttacatttstgcatgtatatgagagctgaatatgttaatttatcgtactttttctgtaactggttacttagaaaatacaagaactcttttaatatggttgaaaaagcggacctaaatcagagaaatgatg

SEQ ID NO: 956002 - DNA, 656 bp, Homo sapiens
aattttggagtagacagtgagtatatgggcatatgggaaaaatataaatatttgtgtccaggatgcaagtgttttagattgaaaattgcatatagtattaattcagaggtgtgagtgttaatttgaaaatatatattgtaatactagagcaacaattaaaaaattaaacatagagccgtagttaaaaacgtcaatgagaataaaataatttttttaaaaaaacaacaaaaaatttacaccaaaaattcaggacaagagaaagacaaaaacaaacaacacatgacaaaatttaaaaaaaaaattgaagagatggaatcaagcccaccattatcaataactacattaaaaataagttgaataaggatatgaacagacacttttcaaaagaagacatatatatggccaacaagcatatgaaaaagaaagctcaatatcatcaatcattagagaaatgcaaagcaaaaccgcaatgagatatcatcacacactagtctgaatgtcaattactgaaaagtcaaaaaataacagatgctggcgaggttgcagaaaaagggaacattgtggaaagcagtatggcaattcctcaaagagctaaatgcagaactaccattcaacccagcaatcacrttactgggtatatacccagaggaatataa

SEQ ID NO: 956003 - DNA, 593 bp, Homo sapiens
cggattcactcacacacccctctttgttccatacttgactctcccttggcaggtgtgagactgaggcctctagggtgagctgagcatagcttgatargctgagtgggcaaaacaagccttgcagatccaaggcaaaatgcagccaaaggcgcccctggcttcagaggcacctttctggccagaaaaactataccccaaggatcatgtaacactgtgactttattcctctcttttaatattatgttggctactctgtatttttttccttcccatataaattttgaatccgtttgtcaatgtacattaaataatttgctgggttttaattgagatttcattgaaactatagctcattttggaaataactgacatttttaacctttaaaactcaactataggaaaataaataataagaaaaagatcaaaccaattacactcaacaataagaaaatgaacaagttgaataaaaaatgggcaaaagacataaatgaaaaccttaccaaaaatggtatgtggcaaataagcacatgaaaacatgctctacatcatatatcattaaggatttgtaaattaaaacaacagttattagaatc

SEQ ID NO: 956004 - DNA, 770 bp, Homo sapiens
ttctttgccatttctagaagcttatgaatattccagatgaattcaagttgccagtggcccgtgtctctctcatgaggacatctcctttataaagaagactgagggttcctgcttttcttgtgcttcaaagagcttacctttcaggactttgtaccttgtattggcgataattctttcagttgcaggttgacaagaaacctaatctaaacaggcttaatcaaaaagggaatttagtcaggcacagtagctcaagcctgtaatcccagaactttgggaggcagagacagggggcttcaggccaggagttcgagagtaacctgggaaacagagtaagacccccatctcttaaaaaaaaaaaagaaaaaaaagaaaagaaaagaaaagaaaagggaatttactggcccttgtaaccaagcttcccagggtagactgggtgtgacttccggtatgactttactcaagtctcaaatgataaaacccggccctgttgtctctttttctccagcatctgcctcctacacaatgggctcttccttcacaagatggttgccaatagatctcaagaagaggggctcctggcttcaaaacctgcatagaaagtgaagatctttagctcagcatttctaggcaaagcctcattgcatttcatggtctctgattggactaagggcctatccctgaaccagtcayggcaggaggcttatgagatgctgattggcttagacccaggtcacatgctttacactagagccagctgactcacacaaagt

SEQ ID NO: 956005 - DNA, 590 bp, Homo sapiens
atggacaacaatatgaggttcctcaaaaaattaaaaatagaacttccatgtgatccagtaatctcacttatgggatatatacaaaataattgaaaagaggatcacagagacgtatttgcacacaaraaatagggtcacaaggagatatttgcccatccatgttcatagtaatattctcgataacccagagatagaagtaacccacatgtccagtagcagatgaatggataaagaaaatgtgacagacaacacacataaacacacgggaccatattcaaccttaaaaaacaaggaaatcctgtcatcagctaaaacatggaggaactgtgaagacattgtgctaaatgaaatgcttgggtcacaaaaagacaaatactgtatgattccacttatacgaggtatctaagagtccaactcatagaaacagaaagtagaattgtgatagtcgggctggtggggagcaggaaatggggagttgttaaatggctacagagtttcagttttgcaagatataaaagttctagagatttgctgttgaacaatatgaatacagttaatgtttctcaattatacacttaaaaatacttaag

SEQ ID NO: 956006 - DNA, 578 bp, Homo sapiens
gtagataaaaaccacaaaaatggggagaaaccagagcagaaaagctgaaaattctaaaaatcagagcacctcttctcctccaaagctccttgccagcaacggaacaaagctggatggagaatgactttgatgagttgagagaagaaggcttcagacaatcggtaataacaaacttctccaagcgaaaggaggatgtttgaacccatcacaaacaagctaaataccttgaaaagagattagctgaatggctaactagaataaacagcatagagaagaccttaaatgacctgatggagctgaaaaccatggcacaagaactacgtgacacatgcacaagcttcagtagctgatttgatcaagtggaagaaagggtatcagtgattgaagatcaaatgaatgaaatgaagcaagaagagaagtttagagaaaaaagagtaaaaagaaacmaagactccaagaaatatgggactatgtgaaaagaccaaatctacatctcattagtgtacctgaaagtgatggagagaatggaaccaagttggaaaaccctcttcaggataatccaggagaacttccccaac

SEQ ID NO: 956007 - DNA, 653 bp, Homo sapiens
catgggcagggaagggcgcgcggcagtggcctcgagccctgggtcttctccttcctgaatttgcaaagccaggcgaaggccctcgtgctctcccagagagctgcgctccacccgcgggcctgcctgcgcgtggggagagcggggaggcggggacaggagacctgagcccctgggcgcccctaccacgtgtcccccgtcccaacactggacctcttcagattccttgccgagaggggcctcgtcccaaggctggatgcgccgcgcagcggtgaaagccgccctcgcagcccgcaggcgaccagtgggtgctgttggctttcgccccggggagggaacgggcttgggggcactggcggcggcggagcgcggcggggaagctgtgggggtcgtgcgatggttatggagagtgctccatccgccaggcctgggctctgggcgagctgaggagaccggagtttttccccaggagggagccgcgcaggccggcgacctcttcccaaggctctactgctggaccgcgcccgcggcgccgctcccgccccccttcagcgcactctgcgcctctcgctgggtatggccagctckcagtgcgcgtttatgctgcggtaaacgcattgaaggaacgcacagcttatctaatagggttttgaaat

SEQ ID NO: 956008 - DNA, 809 bp, Homo sapiens
ctcccaaagttctgggattacaggtgtgagccatgagcccagcctttttctttctttctttctttyttttttttttttttttttttaaagagacagggtcttgctctgttacccaggctggaatgcagcagtacaatcacagctccctgtagccttgaactcctgggctcaagtgatactcccacctcagcctcccaagtagctgtgacttgggagtggtgcaccaccactcccagctactttaaaaattttttgtagggatggagtctccctacgttgcccaggctggtcttgaactcctgggctcaagcgatccttctgcctttgcctcccaaagcactaggattacaggcatgagccgccatgtctggcccctgatactttttgatgaaaccaataaaacttgcaccctagctgggcgcagtggctcacacctgtaatcctagcacttcaggagtggtcacgacttcgagaccagcctggccaacatggtgaaaccccatctctactaaaaatacaaaaaactggctaggcgcagtggcttatacctgtaatcccaacactatgggaggctgaggtgggtggatcacaaggtcaggagttcgagaccagcctggccaacatggtgaaacctcctctactaaaaatacaaaaattagccgggaatggtcgtacatgcctgttatcccagctactggggaggctgaggcacaagaatcgcttgatcttgggaggtggaggttgctgcgagccgagatcacgccactgcacttcagcctgggcgacagagcaagactccgtactccccc

SEQ ID NO: 956009 - DNA, 636 bp, Homo sapiens
tcaaccaaagtatcacagattgagttctctgaaaggaaacaccaagatagaatgagaaatgcaacacacttactagggatcaacatctgtgaaagaacggcaacagaagcaggactgggaagaggaagaaatcaaactgcaatgcaggcctgataaaaggctcagccaaccagatttggctctctggagcaggtattgcctgtcggagagttccatgttcgactgaaatagctggaattttttttttttttttttttgttttttttattttttttgagacggagtctcgctctttcgcccaggccggagtgcagtggcgctatctcctctcactgcaagctgcgcctcccaggttcacgccattctcctgcctcagcctcccgagtagctgggactacagacgcccgccaccgcgcccggctaattttttgtatttttagtagagacctcgtgatccgcccgctccttatcctgacctcgtgatccgcccgcctcggcctcccaaagtgctgggattacaggcgtgagccaccgcgcccggccgaaatagctggakctttacgctcctaccttgctcagtcatttgcaggctgcccttagaaaagtatgacctcagatgaagcagatctctgctgc

SEQ ID NO: 956010 - DNA, 607 bp, Homo sapiens
  misc_feature 1, 2, 3, 4, 5, 6, 7, 8, 9, 10, 11, 12, 13, 14, 15, 16, 17,18, 19, 20, 21, 22, 23, 24, 25, 26, 27, 28, 29, 30, 31,32, 33, 34, 465: n = A,T,C or G
nnnnnnnnnnnnnnnnnnnnnnnnnnnnnnnnnnagtcatagggcccttaatgactatttggtgctttaatgccttcctggggagcagaatacatgtctcgaatgcctccccacaaataactggaatacacgtaaacataaagtattgctcatcttagaaagtagcatgaagggtctggggtctagcaaaaatccctcccttattttctactgagaaggatcaatggaagcttactgcctgcctaggctgcaagtggacatctgttacttcaaaaatcagatgagaaaaactagtttttcaaggattcttaaaaatatacacaatgataatttgaaatatagtaataatatctagcattttaacttctgtagaagttaccagctttgtaagtcatatatgtcaaaagaagattgtaatatggaaaaactattttaattcagccataaattacaaacataaaacanatgcttaaatctaaaaatattcaaatactctagttttcgaatgaggtttagactttaaattcccttcttgccctagtctcacgcttcaaaawgcgaacttcagctctctttttctggaaagtggccttttgtgataaaccag

SEQ ID NO: 956011 - DNA, 461 bp, Homo sapiens
aaaaaatttttttaggccgggcgtggtggctcacgcctgtaatccgagtactttgagaggccgaggtgggcggattgcctgaactcaggagttcaagaccagcctgggcaatatggtgaaatcccgtctttactaaaaatacaaaaattagccaagcgtgttggcgcacgcctgtagtcccagctactcaggagactgaggcaggagaattgcttgaaccctggaggcagaggttgcagtgagccgagatcatgccactgcactccagcctggcaacagagggagactccgtctcaaaaaaaaaaaaaattaaattatgtgatatgcctttttcctgcatttttaaaaaactgacactgcagggtttattttagcggaagaataatatatctgatttgctctttgggraggtggctctgacttctgggtggagaacggatggaatgtgagagccctcagga

SEQ ID NO: 956012 - DNA, 569 bp, Homo sapiens
aaggcagcatggaagctggtctagaaaggtagaatcttattatatggctttaggtgataytattctctttgcctcagttccatatatgtaaaatgagataatggaaattgaagcccggtgtggtaagctacactggtgactcacatctattatttgatgtgttcagcactccacttttctgggaacaggcactaactcgctgttttagtcagggttctttcaagggacagaactaatagggtagatgtatatgaaggggagtgtattaaggagtattaactcacaggatcacaagctgaagtcccacaataggctgtctgcttggctgagacgcaaggaagccagtccgagtcccaaaacttcaaaagccgacagtggagccttcagtctgtggccagagatctgagaacacctggaaaaccaccggtgtaagcccaagagcccaaaagccaaagaacatagagtctgatatttgagggcaggaggcatccagcacaggagaaagatgaagtctggaagactcagcaagtctgctcttccatcttctcctgcctgctttattctagctg

SEQ ID NO: 956013 - DNA, 585 bp, Homo sapiens
tagtgaagttttgttatatataatgtatagcgatcagatcagagtaattagcatatccattgtctcaaatatttatcattccctgtggtggggatgttcaatatcctccttccagctatttgaaactattatatattatactactgttaaccctgatcaccctgcagcggcatagaacactaggacttcttccttctgtgtggctgtgactttgcgtgctttaacaaatatctccctatgccccttcccctaacttcccagcctctagtatcctctgttgtgcttgttacttcaattagattcactgtatttttagcttccatatatgagtaagaacatgtggtgtttaactttctgttcttggcttgtttcactttacataatgttctccagttccatccatgatgccatgaatgacaggatttcattctgttttatggctgaatagtgttaacgtgaagtaaatatggcctgagaarggctccgtacttcggtatttgagtcctcgtggatgaaccgtaaaccaacttaacaggtagacaagattgaaaccccaaattaggagtctgcacctgtaacaattgc

SEQ ID NO: 956014 - DNA, 556 bp, Homo sapiens
accatgttgttcaggctggtctcaaactcctgacctcaagtgatctgcctgcctcggcctcccaaaatgctgggattayaggcatgagccattgcacttggctgaaacaggtattttgaatgtggacatgaaagttatcagcatctgagctgtttcaagcctttgatggcactgatatctgcaattcctgtagggatgcagtattgcttttggtttgctattttgatagacaggtttagcccattctaccacaatggtgctcataaacatgtttatgccaattcaggagatagggaaacaaccataggatatttctgtggacaaagcagtcctactttaacttaggctaagattccatctatcacctgtcaccgatagccccactgtgagccacctgtgtcattttggatcccaattacttagcatcaattcagagacagtgcctgttaataccttaaaggtctggatattcctattttttttcctagcttacagccactctagcaaatggcgaaggtctctttggataaggcctagagaaggttttataatgtat

SEQ ID NO: 956015 - DNA, 542 bp, Homo sapiens
tcttcatttgaagaaaagacaaatacttgtcatcaagggtggaccataytgatcagaaggtggacaatatggatcacaaggtaagcattgttgaccagaaggagatttattctaatggagcaaggaaaggtatcaatgtgagttagtcagtggaggttaagagggtcaagtcagtagattcatgaaaattgcacagaccaaaacaacagaccaaaaagggaaactgcagaattggaggctgcttgcttccttgcacccacaaggcagagagcccagagctcaggtgaagtctgactgagcagcattttaggcttggcaaagtcttgggccccactcctagacaactggcagtgggatcctctcctgaggataatgatgcattgagaaaagccactgcaaatcagtaaacagtaaataaaggtggcaatggggcatgcaccaaggacgaatctggactggacttggcaaccttgcgggtcctgctgaccaggtacttttctattgactctgggcagggactgtgtaaatgaagtcagtgtgtg

SEQ ID NO: 956016 - DNA, 558 bp, Homo sapiens
agataaagaaaagagagtaaaaatacaaattagagtcataagtgaaacatcattacagatacataaaagtttaacatattacaattcttttctaaagagaatttaatacacaattccagcacaacaaatttgaaaacctagagaaaaaattgatgatcttctaacaaaatacaagttttaataatgacccaaaaagaattgaaaaactcgtacaacaaatactaaaataggcagagtaagatggcagaatagaagactccactgatcattccccctgcaaacacacgagtttaacaactatttgcacccaaaaaacaccttcaaaggaaccaaaaatcaggtgagcattcacggtacctggttttaagcacatttggctgaaagaggcagtgaagtggcaggaaaaatagtcttgaatcaccaatgccacccctctcccatcctccagcagtggcaacatggtgcagagagcatttttgtgmgttcagagcagaagaactcagcaattgtaaggcactgaactcagcactggcctgttatagcagaaacaaaaaccag

SEQ ID NO: 956017 - DNA, 623 bp, Homo sapiens
gccaccacgcccagctaacttttgtatttttagtaaagacagggtttcaccatgttgcccaggctggtctcgaactcctgacttcaaatgatccacttgcctcagcctcccaaagtgctgggattatacgtgtgagccaccatgcctggctgtaagttactgacatttaaactgtcagagatttcatacaaaaacctggattcctcctgctctggaaaaatcaaaagccctagcaacacttctgattagctgtcatcacttgaggccgaatggtccaacttatttaggccagggcacactgggtacgagagttccaccagaggcaaagataggtttttatcaggcctgaggcttatattagttggaatgacttctctaagaaaaataaattgaaattataaatacaaaattgctaaggcccctccagaggcctgagcaagtcagggctcgggaagcttaaatcatgtacttccacctctggtcccacccacggctaccatttgacacgccccatttgctacatgcctggccatgcacgtgtctgggtctgtgacctcttgccaatatcctatggccacctgygcctgtcactattcctaggccctggccctgatgttcagtat

SEQ ID NO: 956018 - DNA, 565 bp, Homo sapiens
ctcttcccggtgctgctgaagggtaagatgtaaacctagagtgcycaagaatgtaaatgtagagagccagcacaggagccagagacagagcggaagcccagggaaggctgttcacacccggtcccgctgccctggaagctagcgtctgctcctttcagtcatgtgcactacaaatatcccttcgtttttcctttggcacaggcaaatgtgggtttcctgtcttttgcattccctaataatacactgccctacttatttcaaactgtatggttaggcagggtgctgtggctcacacctgcaatcctagcactttgggaggctgaggcaggaggatcacttgagcccaggagtttgacagcagcctgggcaacacagtgagaccatgtctctaaaagtaaaaaaattaaaaacaaataaaactatagttcaacattgctggtaggactgtaaaatggtatagctgctctggaagagtttggcagaagcgaaagcttctgttcacataaaatcctgtaaatgggtgatcatggcagcattattcacaatagccaaaaagtagaaacaa

SEQ ID NO: 956019 - DNA, 584 bp, Homo sapiens
ctcagaaggcatttcttaattttaacagtgtttgctatctggagaggctagacacttcaagactatgaagtcctctttccttttgtttaagggccctttcttcaatgtatatctctcctcttacagcaagaagaaaccaagagacatccgcaacacttgctggaaatctccttaaatatatcattcagttcaataggcacattctatactttccacataactacagatggtaatgttaatgagctctctgctactacacaagaaggaccactgttctccagtttccaataaattatctctcacttccttttgtgccctcactggcagagtctttgaagtccgccagatttctactaacagcctgttcgaggcaatttaggttttcttcaccatgcttctccaaatccttctagcctctgtctgtccgctggttccaaagccactcacacattttcaggttttcattatggcagcaccccactttcaagttccagtatctgcattagtgatctaatgtcatataataaattaacccaaaacttagtggcttaaaacartaatcatttattatctcacaatttctg

SEQ ID NO: 956020 - DNA, 599 bp, Homo sapiens
gcatgttctcataagtgcgagctaaacattgggtatacatggacacaaagatgggaacaatagaatagacactggggacgaaggagggaggaaatcaagggttgagaaactacttattgagtacyatgctcactacctgggtgatgggacaattcgcatcccaaaccttagcatcatgcaatataaccattaacgaacctgcacatacactacctaaatctaaaataaaagttgaatttaaaaaaataataaattttgaccatctccgttccattccaatccattcataggaatgaaaagaagtcatgaaataagaaacatttcaaaggattaaaatatggcgatgaaaaagttaccttctaagaggcctgctcagtttgcacacaattccagtatgctaacaatcctttaattgaacttttgtctgtatattctcctgaccatctaggtcataaacttctccagcaaaggcccagtcttttctattttttgtattactccctagagtacttactatggtgtttctgcccattgttgtcactcaaatcattttgattggcaaacagaaattatttgtccttctaaaaactgtttgacat

SEQ ID NO: 956021 - DNA, 672 bp, Homo sapiens
attcagggctcatcctagagtgagctgtcatctcagggcatctccctgggggatatgtgcaccccrgagctgcagttacagacactgagctcactccaccttcaccacccagccctgctgcttcccgccctaatcctcctggcagagcccctggataaggaaaatatttgtgaaccacggaagctctttggtgctggaattttgcactccaaagcatcgccgcctgttagatgatgtttccctccagcacctaggacactgaagaggagaccagggcaggcaggcagatgcgtaagagggaggattgactgctgtagcacccgacccaggacacctgcctctgggactgtggcgcctccatccggctctctggatcctgggttctggggggtccgacctttcatttttttctccgcctcacaccccaccatgtcgtgtctgaaaggaagcgaagcccagccctggcaggtggagtatttttatttcccctgacagcgcacctcctgacctctatcttcttgccagtgattttttaaatcctaaatgatttggcaataattgctcctccttgcgtgattattgcccttcaccgatagtaaatctgggaatcccctggggtcctgagcgcactttggtatgcggagcccacaagctggcctggacaggcatcac

SEQ ID NO: 956022 - DNA, 611 bp, Homo sapiens
ctaactaagcctatttaataaagggttgaatatctcatataatttattaaatactgtgctggaagtgagaaatagaatgactrtatggtgtttgaagtatggtttctactgaatgggttttgcttttacaccatcttaaagtcgaaaaattgtaagttgaatcatcgtaagtcagggaccatctgtacttcatctaataaaagcagaatacacatttttctcaagctcatatgggatacttaccaagatagattccattctgggtactgaaacagattgaacaaatttttaaaaataaaattcataaaaagtatgctcttggaccataatgaaattagctagaaatcaataatggaaagatagctggaaaagaaccaaatatttggagattaagcaacatacttgcaaataacacgtgagtcaaaagagaaatctcaagagaaattagaaatatttttaattaaatgaaaataaagatacaacttatcaaaatttggggaatacatcaaaaggaatggttagagagaaatttatagcattgaatgcatatatgcatatattagaatagaaggaggacctgaaatcaatagaggaaataggaaaataaagca

SEQ ID NO: 956023 - DNA, 678 bp, Homo sapiens
tttggaatggcttcaggccacctggccctccctctcttctcccaccactttagggcctgtgagagaaattggagggaatgcttaggcacgtgtggcttggtcctaatcctcacgtttcatttgccccccaattctaagaccaagaattttgacttgatcggaattgagttgggagagttggtgtatcacacagacttccaagtatgattttagtaaaggggaagttttctcttcggggcagctacatcttggctttgggttgttggtgctgctgagttctgagttggagtgaattttttgtgagctaaatatggtcttgtgaccaactctcctttcatccaaggcgaggagggtttatgccagtgagcaggccacggattcagttctatttggaaagctagttcacgatcctcacatatgaagtcacagttggcctctggttcagaatagctcctctgacaacaaccttccttcctggatttcagaaagatgtggaatagttcctgaaggctggatggctcccttgacacatctagcctcatgctcaaaatttctttcttcagtagagctaaaaatggagctttttgcttgacagatgtgaggcccagtgaagtggattgacctggccaaggtcatgtggttgatcagcacygatgctgggttctccatctccattct

SEQ ID NO: 956024 - DNA, 612 bp, Homo sapiens
gtgccaccatgcccggctaatttttgtcaaatactgaattctttagctcctgtgacaacgattgatttgcttttcaccaaaccatgttcctctttttctcaggcacatggatgaagtaygtttctcaaaaggtagagcccatgagattgacttccagacaaagggatgtgggcagaaatgatgtgtgtggtttccatgaaggaacaatctgcaaatggcccaccatgcccttcccctcccaccttcttgatgaagatgggtacgaccaccatgaaagccctgatttgacacggcagagccacagggtggaaaaaggagcctgggtcccaaatcactacttaagaggcttcctattaggaatattcatttcagacttcatgtgtacaagaaacaaacttctatcctgtttgagctgttatatagttttgggctttttgttatagtagttcatgctaccttaactgccatagtccctgagaatcttaagaaaaccgtcaggcagcacaacatggtggaaaggtcatgcactttggagcacaacagaatcgggttggagccatggctttggtatttattgctgagtgacctctgacacgttacttaactattctg

SEQ ID NO: 956025 - DNA, 602 bp, Homo sapiens
acatattgtcttgataaacatcttaaacaacagaaaacagggttcaagagcagagaactggtctgatctcaatttcaccagggtggggtttttcctcaccctagygaatctgagggtactgcaggagaccagggcatatttcagtctttatctcatccacataagacagacactcccagagtggccatttatagaccttgtcccaggaatgcattccttccccagggtgttaattattaatattacttgctgggaaaagaattcagtgatatctctcatacttacatgtctgtttataggctctctgcaaggagaaaaatatggctctattctgctcaaccctgcaggcagtcagaccttatggttgtcttcccttgttccctaaaattgctgttattctgttcgttgtcaaggtgcactgatttcatattgttcaaacactcatgttttacaatcagatttcatattgatcaaacgcacattttacaatcaatttgtacagttaatgcaatcatcacagggtcctgaggtcatgtacatcctcagcttacaaagataacaggattaagagattaaagtaatttcttacacctaagaaatta

SEQ ID NO: 956026 - DNA, 620 bp, Homo sapiens
tcaaaagccttgtttttgagctttgaagttctttcttctacttgttctagtctattgttsaaactttctggtgtaatttgtatttctctaaatgtgtctttcatttccagaagttgtgattgttttttctttatgatatctatttttctggaaataattcatctatatcctgtattattttttacatttatttaatttggttttcatctttctctgctatctctttgagtagtttaataatcaaccttctgaattctttatctgagaattcagagatttcttcttggtttggatccattaatcttttgggggtgttataaaaccttgtttcatcatattaccagaattacttttctggttccttctgatttgggtacactatttcagaggaaaagtctggaactcaagggctgctgttctgattcttttgtacaatagggtgatcccttgatgtagtgctctcccactttccctagggatggggcttcctgagatccaaactgctgcgattattattgcttttctgggtctagccacccagtggggctaccaggctctgagctggtactaggaaatgtctgcaaagagtcctgtgatgtgattcatcttcaggtctccca

SEQ ID NO: 956027 - DNA, 553 bp, Homo sapiens
aaactttctggtgtaatttgtatttctctaaatgtgtctttcatttccagaagttgtgattgttttttctttatgatatctatttttctggaaataattcatctatatcctgtattattttttacatttatttaatttggttttcatctttctctgctatctctttgagtagtttaataatcaaccttctgaattctttatctgagaattcagagatttcttcttggtttggatccattaatcttttgggggtgttataaaaccttgtttcatcatattaccagaattacttttctggttccttctgatttgggtacactatttcagaggaaaagtctggaactcaagggctgctgttctgattcttttgtacaatagggtgatcccttgatgtagtgctctcccactttccctagggatggggcttcctgagatccaaactgctgcgattattattgcttttctgggtctagccacccagtggggctaccaggctctgagctggtactaggaaatgtctgcaaagagtyctgtgatgtgattcatcttcagg

SEQ ID NO: 956028 - DNA, 591 bp, Homo sapiens
agagatattgaacattattaaatatacctgttggctatttataatcttcatttgatactggctgttaaaatctattgcttatttttaattggtttatttttttctgttgagtcaattccttatatagtctggatattaatcacttgtcagatgtgtagtttacaaatatattatccaattctgtagtttgtatattcactgtgttaatagtttcctttgctgtgtgaaagctttttagtttgatttaaatcttgtctatttttgcttttgcaacctgtgcttttgaggtattatttttaaaatctttcctcagcccaatgtcctgaagcatttcctcagctttcttgtagtttaatagtttcaggttttacatttaaatatttaacatattttgagttgattttgatacatggtgaaagttagaggcctagtgtcattctttgacagacatatggatatcarattttcctagccccatttactgaagagactcccattttcctggtatatgttcctggcacctttgtcaaaaatcatgtggatataggtacgcaaatttatttctaggctttctattctgtttcattggtc

SEQ ID NO: 956029 - DNA, 573 bp, Homo sapiens
cttgtttctgacattagaggaaaagttttcagctttttcccattccgtgtaatgttagctgtgagtttggcatacatgacttttattatgttgaggtgcatactttatatacctaatttgttgagaaatrttatcatgaagagtttatttttaaaatttttattttaagcctaagggggtacatgtgcaggatgtgcaccatcatttgttacatcagtaaacatgtgtcatggggtgttattatgcagattatttcatcacccaggtattaagcctagtatccattagttacttttcctggccctcttcctcctcccaccctccagcttccgaaaggccccagtgtttgttgtgcccctctatgcatcctaccatagaaaaatttcactgcgattttacttggtattacttcgattctctagatcaattatgaaaggagacatgcatacaagtattgagtcttctaatttataaacattgtacattcctgcatttagatttttcttaattactatcaataatgttgcacagtttttagtgcagagactgtgcatttttttgttttttatagaa

SEQ ID NO: 956030 - DNA, 601 bp, Homo sapiens
ttgtatttttagtaaagagggggtttcaccatgttggccaggctagtctcgaactcctgacctcaggtgatctgcccrcctcagcctcccagagtgctggcattacaggcatgagccaccgcaccaggccccgttgcttattttctttgttcacagcttcctagtacatgtatggtaggttactcctggccagaagccacttgggcttcctgttatatttgagtttctgcttctctgaagggtgactgcaaagctctttaagaacctcaaaagtaaaattgaacttccagagtcaaatggaggcacatcacataactttcattttttaatttttaatttgtatcattattattatttttttgagacagagtctcgctctgatgcccaggctggagtgcaatggcatgatctctatcttcactgcaacctccacctcctgagttcaagtgactctcctgcctcagcctcctgagtagctagggttacaggtgcccgccaccacacctagctaacttttgtatttttgtatttttagtagagacagggtttcaccaggtttcaccatgttggccaggctggtcacaaactcccgacctcaggt

SEQ ID NO: 956031 - DNA, 657 bp, Homo sapiens
atggttttcatcactagcagcaaaaaatgaggctctctggactggaaagkagagaagaaaccacttagtattttggaaccacatccctggccctatctatcaaagtcaacaagtggtctagttggcagtcatgtctagtatttccagtgcaggatgcactggaaatcttatttcccaaccctcacagggaaaaatatgactgttttagctataagaggattgtagccatgtaatttccctttaagaaacatttgtgagtcaatttctagtcccccctcttccctgctcatcactgtagcattctatgaaatgtttctctggaaacagtccttgtgccaaatttccagaccaaggctttccactcagcaatgaaataaatgcgttcgagagctagcattatgcttaaaacttcttgaagtatgttttccaccacaagattcctggacactctggttggctttaacataaatccataccacctgtattccaaaacataccaagttaaaatttaagccaagaaaactaaatcaaatttaaaataatctcccattagaaaccaaaacttctaccatttgtatatgaaggagattaaccaacacactgaaaaatcaagttagaactgggaatttccatctgctaaataaacagcatgaaggt

SEQ ID NO: 956032 - DNA, 594 bp, Homo sapiens
cgggggtgacatcacatatcggtaggaccrtgatgcccgcttgagtctcagaccagcaagtttttattaagggtttcaaaaggggaaggggtgtaagaacagtgagtaggtacaaagatcacatgtttcaaagggcaaaaagcagaactactagtaagggtctaacaaagatcacatgcttctgagggaacaggacaaagggcaaaaacagaactactgataagggtccaacaaagatcacaaggcaaagggcaaaaacagaaccactgataagggtctatgttcagcagtgcacacattgtcttgacaaacatcttaaacaacagaaaacagggttcgagagcagagaactggtctgaccacaaatttaccagggcggagtttttccccaccctagtaagcctgaaggtactgcagaagaccagggcgtatctcagtccttatctcaactgcataaaacagacattcccagagcagccatttatagacctccccccaggaatgcattcctttcccagggtattaatattaatattccttgctaggaaaagaatttagggatatctctcctacttgcacgtccacttataggct

SEQ ID NO: 956033 - DNA, 591 bp, Homo sapiens
gttagttggtgagttcttatccattctgcagttctgtatctttcaagtggaacatttaggccattaacagtcaatgttagtattgagatgtgaggtaccattgcattcattgtgctatttgttgcttgcataactcggttttttttttgtttttgctttttaacttgcatttttgttttataggttctgtgtgatttacgctttaaagagtttctgtttgtatgtgtttccaggatttgtttgaagatttagagctccttttagcagttcttatagtggtggcttggtagtggcgaattctctcagcatttgtttgtctgaaaaagactgtatctttccttcatatatgttgcttagttttgctggatacaaaattcttggctgataattgttttgtttgaggaggctgaagatagggccccaatcccttctagctttgcagggtttctgctgggaaatctgctgttaatctgataggtttcctttataggttacctgagtgtttttgtctcacagctcttaaaattattttctttgtcttaactttagataacctgatgacaatatgcctrgatgatgatcgttttgcga

SEQ ID NO: 956034 - DNA, 603 bp, Homo sapiens
tatttgcatgtctaggtctctagcaaggccagggaagttttcctcgattactcccscaaatatgttttcaaaacttttagatttctcttcttcctctggaacactgattattcttaggtttgttcccttaacataatcccagacttcttggaggctttgttcatattttcttattgtttttctttgtctttgttggattgggttaattccaagaccttgtctttgagctctgaacttctttttctacttattcaattccattgctgagactttccagagcattttggatttctataggtgtgtccaatatttcctgaagttttggttgtttttctttatgctatctatttccttgaatatttctcccttcacttcttgcatcgttttttgtatttccttgcattgggctttgcctttctctggtgcgtccctgattagcttgataagtaacctcctgaattgtttttcaggtaaatcagggatttcttcttcttggtttggatccactgctggtgagcaagagtgatttttggggggtgttaaagagccttgttttgtcatattaccagagttggttttctggttccttctcatttgggtagg

SEQ ID NO: 956035 - DNA, 548 bp, Homo sapiens
ccagggtcatttcatctcatgattcttaaactaatcacatctgcaaaatctttttagccatgacaggtttttacagatttctagaattaggatgtggatttttttttgagggggkgaagggggtgcttactctgtcaaccacatggggattaggatgtagacatccttggggccattatcctgtctgctacctagtattaggacatggacatctttgggaccattattctctgtatcacatgaggattaggacatgggtatctttgggaccattattctgtctcccacatggggattaggatgtggacatctttggggccattattctgtctgccatgtggggataaggatgtgtacatctttgaggcattattctgtctaccacatggggattagtatgtggacatctttggggtcattattctgtctaccacatggggattaggacgtggacatctttggggccattattctgtctgccacgtggggattaggatgtgtacatctttggggccattattctgtctatcacatggggattaggacgt

SEQ ID NO: 956036 - DNA, 571 bp, Homo sapiens
caggtgtctgccagcactcctggctaacttttgtattttcagtagagacgggacttcaccatattggtcaggctggtctagaactcctgtcctcaaatgatytgccctcctcggcctcccagagtgctgggattacaggcatgagccactgtgcctggctggtaacgctctttcatgatagaatctttatttttaaatttatttatttattttgagactgagtcccactctgccactcaggctggagtacagtggcacgatctcggctcactgcaaccttcaccacccgggttcaagtgagtcttctgcctcagtgccccccgagtgtctaggattacaggcatgcgccaccatgccgagctaatttttgtatttttaggagaaatgaggtttcatcatgttggccaggctggtctctaactcctgaccttaagtgatccacccaccttggcctcccaatgtgatggaattacaagtgtgagccaccacacccggctggctcccacttttaaatgaaaacgtgtggtatttagttttctgttcctgcattggtttgctaagcataccatag

SEQ ID NO: 956037 - DNA, 676 bp, Homo sapiens
atggagtttaagctctgagaatggacagactgcctcctcaagtgtgtccctgacccccaagtagcctaactgagagacatctcccagtaggggtcaactgacacctcatacagccaggtgcccctctgagacagagcttccagaggaaggatcaggcagcaacatttgctgttctgcaatatttgctgttctgaagcctctgccagtgatacccaggcaaacagggtctggagtggacctccagcaaactccaacagacttgcagctgaggaatctgttagaaggaaaactaacaaacaaaagcaatagcatcaacatcaacaaaaaggacatccacaccaaaaccccatctgtaggtcaccatcatcaaagaccaaaggtagataaaatgacaaagatggagagaaaccagagcagagaagctgaaaagtctaaaaaccactgcacctcttctcctccaaagtgtcacagctcctccacagcaatggaacaaagctggatggagaatgactttgatgagttgacagaagtaggcttcagaaggttggtaataacaaacttctccaagctaaaggaggatgttcgaccccattgcaaggaagctaaaaaccttgaaaaaagattagatgaatggctaactggaataaacggcrtagagaagaccttaaatgaccaa

SEQ ID NO: 956038 - DNA, 708 bp, Homo sapiens
gctgaatacagtaggccagtagtccccaacacccaagccatggaccagcaccggttcgtgtcctgttaggaactgggcacaaagcaggagatgagtggctggccagcygagcattacttcctgagctccacctcctgtcagatcagcagcagcattagaccttcacaggagcgcaaaccctattgtgaactgcacatacaagggatctaggttgtgtgctccttataagaatctaactaggctgggtgctgtggctcatgcctgtaatcccaacactctgggaggccgaggcaggtggatcacaaggtcaagacactgctggccaacatggaaaccccgtctctactaagaatacaaaaattagctgggtgtggtggcgcatgcctgtagtcccagctactcggggggctgaggcaggagaatcacttgaacccaggaggcagaggttgcagtgagccgagattgtgccactgcactccagcctggcgacagtgggagactcagtctaaaaaaaaaaaaaaagaaaaaatagaatctaatgcctgatgatctgatgatctgaagtggaacagtttcagcccaaagccatccccactccgcggaaaaattatctttcacaaaaccagtccttggtgtcaaaactttggggaccactgctgtaggcagttatatcacaatagtaatatctaaacatggaaaagatacagt

SEQ ID NO: 956039 - DNA, 752 bp, Homo sapiens
aacttcaaaagtctgccttaggcccagagcaaaacttagaaaccctgttgaacttggcaacttcagttttttayaatagagatcaggaggagcaggtggaatgagacaaaactggattacaaaaaggccaccactttagtcatggccctcaggcaagtggactttggaggctccggaaaagggaaagcctggacaaatcgaatgcccaatagggcttgcttccagtgcggtctacaaggacactttaaaaaagattgtccgaatagaaataagccaccccctcgtccatgccccttatgtcaagggaatcactggaaggcccactgcctcaggggatgaaggttctctgagtcagaagccactaaccagatgatccagcagcaggactgagggtgcccggggcaagtgccagcccatgccatcaccctcacagaaccccaggtatgcttgaccattgagggccaggaggttaactgtctcctggacactggtgcagccttctcagtcttactctcctgtcccagacaactgtcctccagatctgtcaatatccaaggggtcctaggacaggcagtcactagatagttctcccagccactaagttgtaaatggggaactttactcttttcacatgcctttctaattatgactgaaagccccattcctttattagggagtgacatcctagcaaaagcaggggccattatacactagaattagaagaagaaaaaagggtaactatatatacaaac

SEQ ID NO: 956040 - DNA, 752 bp, Homo sapiens
aacttcaaaagtctgccttaggcccagagcaaaacttagaaaccctgttgaacttggcaacttcagttttttataatagagatcaggaggagcaggtggaatgagacaaaactggattamaaaaaggccaccactttagtcatggccctcaggcaagtggactttggaggctccggaaaagggaaagcctggacaaatcgaatgcccaatagggcttgcttccagtgcggtctacaaggacactttaaaaaagattgtccgaatagaaataagccaccccctcgtccatgccccttatgtcaagggaatcactggaaggcccactgcctcaggggatgaaggttctctgagtcagaagccactaaccagatgatccagcagcaggactgagggtgcccggggcaagtgccagcccatgccatcaccctcacagaaccccaggtatgcttgaccattgagggccaggaggttaactgtctcctggacactggtgcagccttctcagtcttactctcctgtcccagacaactgtcctccagatctgtcaatatccaaggggtcctaggacaggcagtcactagatagttctcccagccactaagttgtaaatggggaactttactcttttcacatgcctttctaattatgactgaaagccccattcctttattagggagtgacatcctagcaaaagcaggggccattatacactagaattagaagaagaaaaaagggtaactatatatacaaac

SEQ ID NO: 956041 - DNA, 767 bp, Homo sapiens
acaggccccaggatgtagaacgtggtaggcagataggatcgataggataagactggatggcagaggtcagggaacarcaggtgcccatggggaggtgatcttgctctgggatctgaagacacttaggttcagcaaagaggagcagggaaaacactctggaagagggagcagcatgtgcacagcccccacaggcagagagagcacagcaagcccgaaggctgtggactgagcacagggagggatgcagcgctgtgtgtgtgggccatgtggctaggagacaaggcaggagaagcaagctggggctgaaccacacagggcgaccatgcacggagtctgcctggcaaatgaaggaaacctccgaaggtctcaagcaggaaagtgacatgatgcggtgcgagggtgaaaagctcgctctgacggccaggcaggagagagtggcgggccaccatcccggaagcaagagagtcggttaggagggcatagcagaagtccaggacagaggtgatgtggctgggaccaggtgtggggatggagacagagagagtgcaggggttggaggggtttagcggtcaaattggcagaatgtggtgatgggttggctctgggggtaaggggagggtcaaagtcaaggactcttgggtttcttccttgcactgctggggaggatggggctgctactgtggtggagggcggagggcggcggggggagagtctggttcagagcgtgctagattcaagaccccttcattcatgcaagagggggttaa

SEQ ID NO: 956042 - DNA, 436 bp, Homo sapiens
gccaggctggtcttgaactcctgacctcaagtartctgcccacctcggcctcccaaagttctgggattgcaggcatgagccaacgtgcccagacattttttaaaacttcttgacttttttttttttttttttgagacagagttttgctcttgttgcccaggctggagtgcagtagtgcaacctcagctcaccgcaacctctgcatccagggttcaagaagttctcctgcctcagcctcctgagtagccgggattacaggcatgcaccaccacgcccaactaattttgtatttttagtaaagacaaggtttctccatgttggtcaaggcagtcgcaaactcccgacctcaggtcgtccacctgcctcagcctcccaaagtattgggattacaggcgtgagccatcgtgcccggcataacactttgcttaaaaaaata

SEQ ID NO: 956043 - DNA, 657 bp, Homo sapiens
tagttgtgctcaataaatgacaactgtgacagtgtggatgcagtgtgsttacaccaggaatatgtacagtgagacaggtattggtcaggacacagtgggagcaggagctaggtaagcagaaaggggctggtggagtgtgtgagtctgggcaggaaacagattagagtccagagaagcccaatcaaggcaggaagccttgggcatcaaccagagactgagccaggcaggctgagacaagaccctggagaccaggcagttaataagaggctttgagagcagggttgaaaaccccagatcatgggtagaggttctttgctttggggctgatttcattttggctgctgggtcaattctgtttccctttttaaaaaatctttgttgagacataatttgcatgccataaaatttactcatttaaaatatgcaattcaatggggttagtatattcagagttgggcacctatcaccacaatccaagttgagaatattttcatcacccccgcaaaaactgcatacccattagcaatcactacccatttccccttcccaccagcacctggcaaccactaatctattttctgtctccatagatttgcctgttctggacatctcatatcaatggaatcacataatatgtggtgttttgtgactgacttc

SEQ ID NO: 956044 - DNA, 558 bp, Homo sapiens
ttccctttttaaaaaatctttgttgagacataatttgcatgccataaaatttactcatttaaaatatgcaattcaatggggttagtatattcagagttgggcacctatcaccacaatccaagttgagaatattttcatcacccccgcaaaaactgcatacccattagcaatcactacccatttccccttcccaccagcacctggcaaccactaatctattttctgtctccatagatttgcctgttctggacatctcatatcaatggaatcacataatatgtggtgttttgtgactgacttcttacacgtagcataatgtgttcaaggcttatccatgtcatagcatgtatcagttctacattccttttcatggctgaataatatttcattgtatggatataccccttttatttctccatttattaggtgatggacatttggrtttcttccattttttagctattatgaataatactgctatgaacatccatgtactagttttagtttggacatatgttttcattcttcttggatatatactgaggaatgtgattactg

SEQ ID NO: 956045 - DNA, 558 bp, Homo sapiens
ttccctttttaaaaaatctttgttgagacataatttgcatgccataaaatttactcatttaaaatatgcaattcaatggggttagtatattcagagttgggcacctatcaccacaatccaagttgagaatattttcatcacccccgcaaaaactgcatacccattagcaatcactacccatttccccttcccaccagcacctggcaaccactaatctattttctgtctccatagatttgcctgttctggacatctcatatcaatggaatcacataatatgtggtgttttgtgactgacttcttacacgtagcataatgtgttcaaggcttatccatgtcatagcatgtatcagttctacattccttttcatggctgaataatatttcattgtatggatataccccttttatttctccatttattaggtgatggacatttgggtttcttccattttttagctattatgaataatactgctatgaacatccatgtactagttttagtttggacatrtgttttcattcttcttggatatatactgaggaatgtgattactg

SEQ ID NO: 956046 - DNA, 423 bp, Homo sapiens
gcaccaagtccataggctgcacacagcaggggggmcctggacagggcccaggaaatcattttttcctcctaggctttaggtctataatgggagggctgccatgaaggtctttgacatgccctggggatattttccctattgtcttggtgattaacatttggctccttgttacttatgcaaatttctgcagcaggcttgaatttctccccagaaaatgattttttcttttctattgcactgtcaggctgcaaatttttccacactcttatgctctgcttcctctggaatgctttgccgcttagaaatttcttctgtcagataccctaaatcatctctctccaattcaaagttccacagatctctggggcagggacaaaatgctgccagtctctgcacagcaagagtgatctttactccagtttc

SEQ ID NO: 956047 - DNA, 668 bp, Homo sapiens
ggctgcaggcctggacatcccttgttagttccctcmggactgccccaattcaccagctcttcaacaaaacccccacagtgttaggacctgaccactctgaccaagccccctccccttgctctctatccctgtttcagtctcttcatcgcatttatcactatccgaaatgatcttgttcacttgcctttttcctattgtctatctccccctcaaccactggatcctaagctccatgaaagcaaggagcttgaaatgttccctgctttatcctctgggcctaaaccagtggctggaacacagtaagcactcaatagacagcaaagcctgaatgaaccaatgctacattgtctctgctcaaaatatcaccatatcagtaagaccttccctgatcatcttatggaaaatagcaatctcccctccactcccagatctccactccctcctcctgccctccaagtcttattttttcctatagcatcattactttctgatacatttgatatttctttattgcttgtttcccttccaaaaaatgtcaaccctggaggcagaaatgctattttatttactgatgcagcctcagagcctaggacagtacctatcccgtagcgaagtctcaataaatatttgttaaaatgaatagctagcgaagtgggcaaactttcata

SEQ ID NO: 956048 - DNA, 787 bp, Homo sapiens
gttttgtctggcccattaagtaggaatggtgaacactctcgattgatttgatgagagaatactacctctgagccccartgaagtgagattttatcccctctaaaaaaagaattcatttttttctcattagttgaactgtatttttttaatatccttgatttttaataatattgtcatattttaattttcattaataaaaaagtatggaaatgtgctttcactctttttatggaagtaactgctgcagggcatcgtggctcatgcgtgtaatcccagcactctgggaggccgaggcaggtggatcacctaatatcaggagttcaagaccagcctggccaacatggtgaaaccctgtctctactaaaaatacaaaaattagctgggtgtgatggtaggcacctgtaatctcagctactcgggaggctgaggcaggagaatcacttgaacccgggcagggaagattgcagtgagctgagattgcaccgttgcactccagcctaggtgacagagtgaggatctgtctcaaaaaaaaaaaataataataagtaactgcatagtaggtttgattttgcctcttgccctacaacacctgaagtatgcactatctggctcttcaccaaaaagggctactgagctctccctggtctaggtgttggtggagaaaatggatgggttcggatgtattttggagtgagagccagtaggactttaattttaatgctggcagaacatagactatgctgcagggtgggacagagtcacttgatccctaagacaagtctaagac

SEQ ID NO: 956049 - DNA, 820 bp, Homo sapiens
aagagacctagacttgggtgtatatagctgcgccctagaagcttcttttcctggaagatggcctaatgcctagttgtctgacctgtgaccaggagtcytgcacacagggaactcatttatactggcagacacccttgtggcttttgtctaatctgtgtccattttatgcttgctctggtggtagaagtcaaacttcgtgttctccttggtgttccaggaaaaacacagcctggggtagccccttgttcttcaaatagaaggtgcaaattcaatacaccaccacaacaggtgttcaaagattttttacttacagattctggacagggaaggtgcaatgggtagagagggcagtcctccttccccagatgacacaaggcagtaatacacagagtcaggaaagagtgagagagagagagagataaagagagagagagagggagagagagagagagagagagagagagagagagagagagagagagagagaggcaaccagcagtatagaaaagaaaatagggtgtgagtaattttaagtttgtgggcaaatgccttaatattccctttaaaggaagtgacagcccagtctgctagatgagagagttgcctgcaaattcttatttctggctactggcttgaaccatttggatgtggtgtagaactagagacaatgtcaagggtgacacagttctggtgtgagaaagttaaaactggattcaaaatgtatccaacagaaaattgtatgaattcactacaccgtttacctagcaactacatatctatatatttattctacagaaacagtctcatgaatttgcaaagg

SEQ ID NO: 956050 - DNA, 608 bp, Homo sapiens
  misc_feature 12: n = A,T,C or G
ggtaatttactntgcctgtgttctagaaatggaaagacaaaacctagatgagagaatacctgtttacagcatggtttagtgaacgctttaagttcactgttgagacctacagaaagaaaaatgttcctttcaaaatattactgctcgttgacaatgcacctggtcacccaagacctctgtgcaaagagatgaacgttgcttttatgcctgctaacagaacatccattctgtagcccaaggagtgattttgacttctatgtcttattattgaagaaatacactttgtaaggctatagctgcatagatagtgattcctctgatggatttgggcaaagcaaatggaaaagcttctggaaaagattcaccattctagatgccttttagaacattcatgattcatgggaggagggcaaagtatcctcattaacagttgtttggaagaagttgattccaaccttcttggatgactttgaggagttcaagactgtaatggaggaagtaactgcaaatgtagtagaaatagcaaaagaactagaagcgcagctwaattccatcacacatgactgaattgctgcaatctcacgacaaaacttggatgaggagttact

SEQ ID NO: 956051 - DNA, 709 bp, Homo sapiens
aaaaattctctggggacagcaatcatgtgtctcatgtttttggttgtatccaaggccctcccaacatggtagacaaatgatwaacataaatgaatgaaaaagtgaaaaaatccagattggtagggaaaatcacatagtttaagattaaaaaatagagcagaaagagagaaaaggctctgtaagccttgaacactgacgttgcctccaccaactggacatagctcattggacagctcttgagtctctactcgatctcttgacctttgagatcctcacaggatcccatgaagacaccccatgtgggttgaggccagggttaaaaaaattcaggagcagatgccactgagaatggtgcttgtgtttttttccaagaaatttggaacttctgtcttgtatgagagaaaccaagcctgggcaacatattgagacctcatctctacaaaaataaaaataaaaaaatagccaggcatggtggtgcatgcctgtagtcccagctacttggaagggtgaggtaggtggatcacttgagcctaggcgtttgaggctgcagcagtgagcagtgattgagccactgcactccagcttgggtgacagagtgagaacatgtctcaaaaaaagagagagagagggagagaaaggctagacatcaccagagaaaagaaagtccaaagtcttaaataccaagccaagtttctttgttaattgttct

SEQ ID NO: 956052 - DNA, 593 bp, Homo sapiens
gctacaaaggacatgatctcattcttttgtatggctgcatagtattccatggtgtatttgtaccacattttatttatccagtttactgttgatgggcacctaggttgattccatgtctttgctattgcaaatagtgctgtgatgaatctacatgggcatgcatttttatggtagaaacatttatattcctttgggtatatacccagtaataggagtcatgggccagatggtaattctgtgttatgttctttgagaaatctacaaattgctttccacaatggctgaactactttacattcccaccagcaatgtacaagtgttccataaaaggagaattttagaaggactaaagatataatcacagagttaagcactaaagtattaatgatcatatttggatattacagaaattaaatcagtgttatggaaatcaaacttgaaaatatttcagaattgaggaaagagatcaaaatgaaatcctgatgatatwcattgaagaaaaagaataagggtctaacatatagataattgatgtgtctgctgaagagaacaaatcaaacagggttatttaaaatgtgataaacaaaatattt

SEQ ID NO: 956053 - DNA, 622 bp, Homo sapiens
gtttttgaagccaagactgaccattgtaaaagtcctagggcgcttaagaattattctaaatctactgtgcccatgctctataaatggaacaaaactgggatgacagcacatctcttaacagcatggtttactgaatattttaaacccactgttgagacctactgctcagaaaagactcatttcaaaatattactgctcactaacaaagcacctagtcacccaagagctctgaaggacaggtacagggagattactgttgttttcatgcctgctaacacaacatccattctgcagcctgtggatcaactttcaagtcttattatttcagcctcttattatttcaaaatatatttcaaatatattttgtagggctattcactgccatagatagcgattcctctaatggatctgggcaaagtaaactgcaaaccttctaaaaaggattcaccattccagatgccattaagaacatctgtgatccatgggagatcaaaacatcagcaataacgggagtttggaagacaatgattccaactctcatgggtgactttgaggagttcaagacttcagtaaaggatgtcacwgcagatgtggtggaaataacaagagaactagaattaga

SEQ ID NO: 956054 - DNA, 553 bp, Homo sapiens
cttggctgacaggttcgcactaccacgcccagctaatttttgtatttttagtagagacggaagtttcaccatgttggccaggatggtctcgaactcctgacttagtgatccacccgcctgggcctcccaaagtgctgggattgcaggcatgagccactgctcctggccacaatagttaaagtatagaaacagtgaaactgctgagaagtaacttataaaagaaatagaagatggcaggagagaggcaggaaggcaaaatagaaaaatgatgggaagaagaaggaaaaggacaatgagagtgaagaaaagagcggagagctaagaattatacctctagcaagccttaaaattataaagaagaggaaaatggttcattaaaggacagagaaatggagaagataaagtatcaaaaaggcagaawgaagaagagccagtaaaataaagtgttgagaagagagtaggaggtcgattaaacaaggtcaagttcacaattttatgccatactgttactcaaatatatatgaaatcttgacatgtgtatttgaataaggat

SEQ ID NO: 956055 - DNA, 736 bp, Homo sapiens
tcttctttgagctatgttatgaattgttatggctttcatttgggtggtggtagtggggagcagtgtgtacatgtgtgtttgtgtgtgtgtgtgtgtgcactgttttttgtttatttttatttttatttttttgagagacagagtctcactctgtcacccaggctggagtgcaatggcacgatcttggctcactgcagcctccacctcccggattcaagtgattctccttcctcagccacctgagtagctgggactacaggcgtgtgccaccatgattggctatttttgtatttttactagagacagggtttcgccacgttggccaggctggtctcgaactcctgacctcaggtgatccacccgcctcggcctcccaaagtggtgggattacaggtatgagccactgcacccagccgtgtgctgttttaaaataaagcaaacaagcaagatctatgttctatgcagtggttcaataaaataagttattctttccagctcattttcttggtttctctgttcgtgtttttgagtagtcttactgcacagataaaagaactgaggccctgcagggggcagtgatctactcagggtcacctggccctttrctggcagcgatagtaacacaaagtaggtgacctgactctgcgcccagggctctccccacactgcaacctgcctgcaggccttcctggggtgagacttgatgttgcaatttactggactgccaaacatttcc

SEQ ID NO: 956056 - DNA, 745 bp, Homo sapiens
gaaggggtcttgaatctagcacgctctgaaccagactctccccccgccgccctccgccctccaccacagtagcagccccatcctccccagcagtgcaaggaagaaacccaagagtccttgactttgaccctccccttacccccagagccaacccatcaccacattctgccaatttgaccgctaaacccctccaacccctgcactctctctgtctccatccccacacctggtcccagccacatcacctctgtcctggacttctgctatgccctcctaaccgactctcttgcttccgggatggtggcccgccactctctcctgcctggccgtcagagcgagcttttcaccctcgcaccgcatcatgtcactttcctgcttgagaccttcggaggtttccttcatttgccaggcagactccgtgcatggtcgccctgtgtggttcagccccagcttgcttctcctgccttgtctcctagccacatggcccacacacacagcgctgcatccctccctgtgctcagtccacagccttcgggcttgctgtgctctctctgcctgtgggggctgtgcacatgctgctccctcttccagagtgttttccctgctcctctttgctgaacctaagtgtcttcagatcccagagcaagatcacctccccatgggcacctgytgttccctgacctctgccatccagtcttatcctatcgatcctatctgcctaccacgttctacatcctggggcctg

SEQ ID NO: 956057 - DNA, 707 bp, Homo sapiens
caaaactagttgggccaaatgagaggctggcagaaaactcaaaaggaaaatatggaaaacgagatgtccatagggaactttgaaaaatctaaaaggccrtgagcatggctaggatttcatgcatgcccaggaaatatctgagaaaaccctaatctcttaccggtgtctaaccttgaggctttgtacaagcaggaaatgaaggcaaaggcagaattgtaagccactgaacactgaagatataccccgacacacacacacagagcccctcaacttaaaatgagagctatactggttcaaggcatttgaggaaacctctgtctaataatcatatgaacattaagttagtcaagtagaagctttagtggccacacacaacaaagaataaaacttcacggaataagcccaggaaagtcactagaaaaacaaacaacaacaacaataaaaaacaacaacaaaacttgaagagcaaggaagaatctgacttccagagtggctgcattctattatttttaatgtccagtattcacaaaaaagtataagatatgaaaataaataggaaaatatagcctatatataggaaaaacagtcaacagaaactatccctgaataagcccagatattgaacttgctagacaaatactttaaacaaactattataaatatgttcaaagaactaaaagaaactgtatccaaagacttagagaaac

SEQ ID NO: 956058 - DNA, 657 bp, Homo sapiens; identical to SEQ ID NO: 956043

SEQ ID NO: 956059 - DNA, 558 bp, Homo sapiens; identical to SEQ ID NO: 956044

SEQ ID NO: 956060 - DNA, 558 bp, Homo sapiens; identical to SEQ ID NO: 956045

SEQ ID NO: 956061 - DNA, 618 bp, Homo sapiens
cagaggttgttttggaaatactgcctgatgaaaaggaagagaaggaaattgcttcttttaaagtttgctttttatcttcttgcagcatcttctaactggcagaaataatacaatttttgagttgttttgtaagttggatatttttagttttgtgtggaatgtcgtgtttcccattagggcagggggcgtctcacaagatctaggttactgtatgacaactatatccatttactggagtttaagaagctttataacaatacatttccagagactaggcagtacttggttttctgtatttaaattttctgagggtagatgataacatctagtaaacaccacctgcctgttccatccaggaccctaactggccataaagttacccccaaactctcctaggattcatagtattttaagatttcatttttgtgcccttattacgaatataattagtgttttctcccctttagggtgctttaagatcttagtgcctgtyctaatctgagcataccacagtaagacaagaaagggcaatgctgtggtaggcagttagctgctgaagttaggccacttagttatgaggtagatgaatttctgtcctcagctcaaaatgataatatt

SEQ ID NO: 956062 - DNA, 618 bp, Homo sapiens
cagaggttgttttggaaatactgcctgatgaaaaggaagagaaggaaattgcttcttttaaagtttgctttttatcttcttgcagcatcttctaactggcagaaataatacaatttttgagttgttttgtaagttggatatttttagttttgtgtggaatgtcgtgtttcccattagggcagggggcgtctcacaagatctaggttactgtatgacaactatatccatttactggagtttaagaagctttataacaatacatttccagagactaggcagtacttggttttctgtatttaaattttctgagggtagatgataacatctagtaaacaccacctgcctgttccatccaggaccctaactggccataaagttacccccaaactctcctaggattcatagtattttaagatttcatttttgtgcccttattacgaatataattagtgttttctcccctttagggtgctttaagatcttagtgcctgtcctaatctgagcataccacagtaagacaagaaagggcaatgctgtggtaggcagttagctgctgaagttaggccacttagttatgaggtwgatgaatttctgtcctcagctcaaaatgataatatt

SEQ ID NO: 956063 - DNA, 618 bp, Homo sapiens
cagaggttgttttggaaatactgcctgatgaaaaggaagagaaggaaattgcttcttttaaagtttgctttttatcttcttgcagcatcttctaactggcagaaataatacaatttttgagttgttttgtaagttggatatttttagttttgtgtggaatgtcgtgtttcccattagggcagggggcgtctcacaagatctaggttactgtatgacaactatatccatttactggagtttaagaagctttataacaatacatttccagagactaggcagtacttggttttctgtatttaaattttctgagggtagatgataacatctagtaaacaccacctgcctgttccatccaggaccctaactggccataaagttacccccaaactctcctaggattcatagtattttaagatttcatttttgtgcccttattacgaatataattagtgttttctcccctttagggtgctttaagatcttagtgcctgtcctaatctgagcataccacagtaagacaagaaagggcaatgctgtggtaggcagttagctgctgaagttaggccacttagttatgaggtagatgaatttytgtcctcagctcaaaatgataatatt

SEQ ID NO: 956064 - DNA, 618 bp, Homo sapiens
cagaggttgttttggaaatactgcctgatgaaaaggaagagaaggaaattgcttcttttaaagtttgctttttatcttcttgcagcatcttctaactggcagaaataatacaatttttgagttgttttgtaagttggatatttttagttttgtgtggaatgtcgtgtttcccattagggcagggggcgtctcacaagatctaggttactgtatgacaactatatccatttactggagtttaagaagctttataacaatacatttccagagactaggcagtacttggttttctgtatttaaattttctgagggtagatgataacatctagtaaacaccacctgcctgttccatccaggaccctaactggccataaagttacccccaaactctcctaggattcatagtattttaagatttcatttttgtgcccttattacgaatataattagtgttttctcccctttagggtgctttaagatcttagtgcctgtcctaatctgagcataccacagtaagacaagaaagggcaatgctgtggtaggcagttagctgctgaagttaggccacttagttatgaggtagatgaatttctgtcctyagctcaaaatgataatatt

SEQ ID NO: 956065 - DNA, 551 bp, Homo sapiens
atttttcaaagatgctctttataagtttgagggaggtcacttctatccctagtttgctgagatttttttttttttaatcaggaatggctrtggattttgttaaatgctttcatttgtgtttgttgaaatgatcatatggtgtttcttttttagtttgttaatatgttttaatttgaattacattttttttcaaatgttaagccaatcttgcattcttgggataaagcctgcttggtcatggtatattgtattttttaatatatgatagtagtgaatttgctaaaattttgtttagaattttaaagtgtgtattcttgagggacattcatctgatttcttgtaatgtctttggtttgggtatagggtaatgctggcttcacagaacaaattgagatgtgtcttccttttttctcggtgaatttgtatcagaattggtatttttgtcagatgagtaggttgcgaaaattttctcccattttgtaggttgcctgttcactctgatggtagtttcttttgctgtgcagaagctctttagtttaattagatcccat

SEQ ID NO: 956066 - DNA, 437 bp, Homo sapiens
gcaccaagtccataggctgcacacagcaggggggmcctggacagggcccaggaaatcattttttcctcctaggctttaggtctataatgggagggctgccatgaaggtctttgacatgccctggggatattttccctattgtcttggtgattaacatttggctccttgttacttatgcaaatttctgcagcaggcttgaatttctccccagaaaatgattttttcttttctattgcactgtcaggctgcaaatttttccacactcttatgctctgcttcctctggaatgctttgccgcttagaaatttcttctgtcagataccctaaatcatctctctccaattcaaagttccacagatctctggggcagggacaaaatgctgccagtctctgcacagcaagagtgatctttactccagtttccaacaagttcttca

SEQ ID NO: 956067 - DNA, 666 bp, Homo sapiens
ggctgcaggcctggacatcccttgttagttccctcmggactgccccaattcaccagctcttcaacaaaacccccacagtgttaggacctgaccactctgaccaagccccctccccttgctctctatccctgtttcagtctcttcatcgcatttatcactatccgaaatgatcttgttcacttgcctttttcctattgtctatctccccctcaaccactggatcctaagctccatgaaagcaaggagcttgaaatgttccctgctttatcctctgggcctaaaccagtggctggaacacagtaagcactcaatagacagcaaagcctgaatgaaccaatgctacattgtctctgctcaaaatatcaccatatcagtaagaccttccctgatcatcttatggaaaatagcaatctcccctccactcccagatctccactccctcctcctgccctccaagtcttattttttcctatagcatcattactttctgatacatttgatatttctttattgcttgtttcccttccaaaaaatgtcaaccctggaggcagaaatgctattttatttactgatgcagcctcagagcctaggacagtacctatcccgtagcgaagtctcaataaatatttgttaaaatgaatagctagcgaagtgggcaaactttca

SEQ ID NO: 956068 - DNA, 785 bp, Homo sapiens
gttttgtctggcccattaagtaggaatggtgaacactctcgattgatttgatgagagaatactacctctgagccccartgaagtgagattttatcccctctaaaaaaagaattcatttttttctcattagttgaactgtatttttttaatatccttgatttttaataatattgtcatattttaattttcattaataaaaaagtatggaaatgtgctttcactctttttatggaagtaactgctgcagggcatcgtggctcatgcgtgtaatcccagcactctgggaggccgaggcaggtggatcacctaatatcaggagttcaagaccagcctggccaacatggtgaaaccctgtctctactaaaaatacaaaaattagctgggtgtgatggtaggcacctgtaatctcagctactcgggaggctgaggcaggagaatcacttgaacccgggcagggaagattgcagtgagctgagattgcaccgttgcactccagcctaggtgacagagtgaggatctgtctcaaaaaaaaaaaataataataagtaactgcatagtaggtttgattttgcctcttgccctacaacacctgaagtatgcactatctggctcttcaccaaaaagggctactgagctctccctggtctaggtgttggtggagaaaatggatgggttcggatgtattttggagtgagagccagtaggactttaattttaatgctggcagaacatagactatgctgcagggtgggacagagtcacttgatccctaagacaagtctaag

SEQ ID NO: 956069 - DNA, 767 bp, Homo sapiens
gcaacaaaatacctgagactaggtaatttataaagaagagaaatttattttctcacagttccggaggctgggaagtccaagatcaaggcaccggcagattcagttgyctggggagaactgctttctgcctccaagatggtaccttttgatgtggcatcctccagagaggagcagcgctgtgttctcacctggcagaaggtggaatggcaagagagccaaatgccgcgtaaagtctcctttataagggccttaatgccattcacgacagaggagcctccacggcagaggagcctccacagcctaatcgcctcttaaaggccccacctcccaacaccatcatactagaaacacctgaattttggaggggccacattcgaaccacagcaatacattcatgcactgcacgatgacatttcagtcagtgacagtggtctgaaccatatacgacagtgctcttattacaatggaggccaggcgcagtggctcacgcctgtaatcccggcactttgggaggccaaggcggggcggggggatcacctgaggtcaggagttcaagactagcttggccatagtgaaaccccgtctctactaaaaatacaaaatttagccaggtgcaggggcaggcgcctataatcccagctactcaggaggctgaggtaggagaatcacttgaacccaggggttggaggttgcagtgagccgagatcgctccactgcactccagcctgagtgacagagtgagggtctcaaaaaaaaaaaagattaca

SEQ ID NO: 956070 - DNA, 473 bp, Homo sapiens
tgggagagaacccatgagatctttaaggacggtagggatgttctgattagcatatatgctacagccatctgcgatgccaaagccatactgtgatgggactrtgccagttatgacaccttcataaccatgagaactgcactcatggccttttcatacccatctgctgatttgataaccacaataatcttccttagtgggatcactactcccactgacagttgaacaaactgacatccatcctgagaagtatacttaaaactagcaagtggcagaactgaaatctgaacccaagtatcccaattcctaatgcaaccttctcactgttccatgaaaagttccattttatagaggacatggctatattacttggattagaaactaatattaaagaagcatatcacgcctgtaatcccagcactttggaatcatgaggtcaggagatcgagagcatcctggctaacatggtgaaaccc

SEQ ID NO: 956071 - DNA, 614 bp, Homo sapiens
gtttttgaagccaagactgaccattgtaaaagtcctagggcgcttaagaattattctaaatctactgtgcccatgctctataaatggaacaaaactgggatgacagcacatctcttaacagcatggtttactgaatattttaaacccactgttgagacctactgctcagaaaagactcatttcaaaatattactgctcactaacaaagcacctagtcacccaagagctctgaaggacaggtacagggagattactgttgttttcatgcctgctaacacaacatccattctgcagcctgtggatcaactttcaagtcttattatttcagcctcttattatttcaaaatatatttcaaatatattttgtagggctattcactgccatagatagcgattcctctaatggatctgggcaaagtaaactgcaaaccttctaaaaaggattcaccattccagatgccattaagaacatctgtgatccatgggagatcaaaacatcagcaataacgggagtttggaagacaatgattccaactctcatgggtgactttgaggagttcaagacttcagtaaaggatgtcacwgcagatgtggtggaaataacaagagaacta

SEQ ID NO: 956072 - DNA, 570 bp, Homo sapiens
tcaaaacactgaacgcaaatgctggtgaggatgtggtgtaacagggatgctcattcattcatttctggtcagaatgcaaagtggtacagccacttttcaagatagtttagtagtttttcacaaacctaaatgtacttttatcatacagcctagcagttgtgctcttggtatttatagaaatgaattgaaaacttatatccacacaaaagcatgtacacagatgtttttagcaagtttcttcataattaccaaaacttggtagcaaataattttttttttgacagagtctcgctctgtcacccaggatagagtacagtggtgcgatctcagctcactgcaatttccatctcccaggttcaagcagttctgcctcagcctcccaagtagcttggattacaggagcacgccaccatgcctgctaatttttgtatttttagtggagatggggtttcaccatgttggccagcctggtctcaaactcttgacctcaggtgatccaccygcctcagcctcacaaagtgctgagattacaagcgtgagccaccatgccccagccccaagtgtttttta

SEQ ID NO: 956073 - DNA, 634 bp, Homo sapiens
ctctccgaaccctgtttaagagatttttatccaggtttcattatgtcattggccattagtgattgaattcaacctccagcccctttcccttcccgcaagasgagtagggacatgttggagctgaatgaaagttacaaccctctgatcacatggtgtgttgcaccagccccaccctgaatccatcctagagcccgcaattagccacctcattagtagaaactgtgatttgactaagggagtcattatgaataacaaaaacactcctattgcctaggaaattccaaggggtttaggagttctgtgtcaggaactggggacaaagaccaaatagattttttataccaaactccctaaaccaataacccagtttaatcgtgagaaaaacatcagacaaatcccagcagagggacattgtacaaaatagccaacctaaaatcggtcaaggttgtgaatgtggtcagaatcaaaatggtggagtcatttgtgttaaaagagagagaaaaaaaaaatgacaaatagagctggggaaagccatgaagaggattcttgttcctaaatgcgtgatgtcacaaatgctcataaaagatcaacactgtccacagaggccatgtcagccttcccaaaagaagattcc

SEQ ID NO: 956074 - DNA, 673 bp, Homo sapiens
agctgtctgtatttttgagctcatgaataggatccatcctgaaaccatggtccctttgttgctgggttcccaagcaagcacaatgatggttggggaggttggtgattgacagtcmtaggtagcagggccttaatacaaatgatcgggacccttctccgcagtaaagacttattggtgagcatttgcgtggaccacaggtattcgcacacccagcgctcattcctaagggtcttctttctgaatttattgacgccaatcatccaactgtgcttcttccaagaccctggctgcccagtcaaaccaatagtcactgcctatgttctggtctagctatttcttcccctaggcaaagtagacaatgagagaacccttgaagttatgtctactaaaaatatttaccttctccaccatctttcagaatcatctctggtttgttttgggaaatgtttaacaacaggctctctggaaaaatagaagctgtaatttgtagtatttgccaatttctgtggtataaatattcccacagtcaccagtctcaagctactggcttgacgtcactgactgcagagttgggaagagaggtgccattgtcttccattagatagcatttccaccaggcatatacaatagatgtcagtgacctcaagaacagagataatagtgaaatacataa

SEQ ID NO: 956075 - DNA, 673 bp, Homo sapiens
agctgtctgtatttttgagctcatgaataggatccatcctgaaaccatggtccctttgttgctgggttcccaagcaagcacaatgatggttggggaggttggtgattgacagtcataggtagmagggccttaatacaaatgatcgggacccttctccgcagtaaagacttattggtgagcatttgcgtggaccacaggtattcgcacacccagcgctcattcctaagggtcttctttctgaatttattgacgccaatcatccaactgtgcttcttccaagaccctggctgcccagtcaaaccaatagtcactgcctatgttctggtctagctatttcttcccctaggcaaagtagacaatgagagaacccttgaagttatgtctactaaaaatatttaccttctccaccatctttcagaatcatctctggtttgttttgggaaatgtttaacaacaggctctctggaaaaatagaagctgtaatttgtagtatttgccaatttctgtggtataaatattcccacagtcaccagtctcaagctactggcttgacgtcactgactgcagagttgggaagagaggtgccattgtcttccattagatagcatttccaccaggcatatacaatagatgtcagtgacctcaagaacagagataatagtgaaatacataa

SEQ ID NO: 956076 - DNA, 671 bp, Homo sapiens
tcttcattaaggggaaagaagtctgtcttgtgcatacactggggactggccttggcccatcacattactgtcctgttgcttctttcattccacaaatgttatttgttcaggtggtcaccaggtagacaatagaaggggaggggtggctcgcaaggatggtggattagtttcctgcagccgcagtaacaaattaccacaaacttggaggcttagaacaataaaaaatcattccttcccatttctggaggccagaagtctgaaatcagggtgtcctcagggctgtgcatactctgaagcctctagaggaaggtcctttcttgcttcttctggcttctcagggagtagtgttagcacgtaggctggtcatttggaacaaaatgcaagctgactgcccagccgagccagcagggtcaaagagctcagtctaaaaattaaactattgaaagcactacaagaaaacaagggagcattattttatattggttttataggaatagaggaggcctttccaagtgtaacgtggtggccccaggcattccttkgctggtggctgcatcactccagtctctgcctccatcttcacgtgaccttcttctgtgtgtctcttataagggcaattgtcattggatttaggggccaccaggataatccaggatgatctcatcttgaga

SEQ ID NO: 956077 - DNA, 771 bp, Homo sapiens
attatcctaggtcctgaaaagtggaagagggagacagcagaagagagggamccagggagatagtagcataagaaggacttagcccaacgttgctggttttttttttttttttttttttttttttttttttttttgacagacagggtcttgctgtggcccaggctagagtttggtggtgcaattagggctcacggcagccccttgacctcccaggctcaagtgatactcctgcctcagccttctgagtagctgggaccacaggtgtgcaccaccatagtcagctagttttgttatgtattatttatttatttatttctatatttattgcagagatgaggtattactctgttgcccaggctggtctcagactcctcagtgcaagtgaatcctcctcccttggcctccccaaatgctgggattacagaggtgagacatcatgcctggccatggttgctggttttgaagatgtgggaaggggaccatgagccaaggagtgcaggtggcctgtagaatctgggaaaggaaaggaagtggattcccccagagcttccagaaaggaacacagccctgatgacaccttggctttagcccagtgagactcctgttggacttctgacctctaggatcttaagtcaatgcatttgtgatattagtccaatcaattttcagtaatttgttacggcagcaaaggtaaacaaaacaggagtaggcagattcccgttcaattcaatttatacacactgaacacctgctatgtgccagatcctgtgc

SEQ ID NO: 956078 - DNA, 757 bp, Homo sapiens
ctgacgcttgacagagacacaggaaaggaatatgcaattctccaattctctattttttttttttgttttaggtagattctcamcctgtcacccagtctagagtgcaatggtgtgatcttggctgactgcaatctctgcctcctacattcaagtgatcctcccacctcagcctcccaagtagctgggacaacaagtgtgcaccaccatgcctggttaatttttgtatttttaggagagaggaggtttcacgtgttggccagggtggtcttgaattcctgacctcaggtgagccacctgcctcagcctcccaaagagctaggattacaggtgtgagccaccatggccggccaggaatatccagttctttaatagtgtttcttttttaaaacattggcattcagattaaatatctgtatgccattgtttaatacaccgcaaaaacaagtcaggtgagagatgaaacctagagagaactagacaacaagttacccagacttgtaagctctgtgcatgattaggtagcttcaaatacaaagctttgaagatgtgcaggggtttcagaggtggagggactcaggcccttctggtagggccacgtgtttgcattgtcttattggactgttacaggagctgtctcttcaaaggcacttgctcctagcaaacttatgcctttccaaagtctcctctaaaaatgagtagaggacactttgttttacttttactgaagtgaaaacaccaaggcatgctttaggggtct

SEQ ID NO: 956079 - DNA, 591 bp, Homo sapiens
gctggccaacatgatgaaaccctgtctctactaaaaatacaaaaagttagctgggtgtggtggtgtgcacctgcaatctcagctactcaggaggctgagacaagagaatcgcttgaacccgggagggggaggctgcagtgagctgagatcgcgccacggcactctagcctgggcaacaagagaaaaactccatcaaaaaaaaaaaaaaaagaagaagaagaatcactttttcttcccagtaggcttctttccttctttggagatgagcaaaaagtataaaaacatctgtggaaacctcctgtttgtatgttttacattggaatgggtgcaaaaaatacactcactattcctttacatccttctaagagggctgtttctactcttgacactcaatacttgtttttgtttctctaatcactgttatacgttactcacgaatattcatcaaaacccttttccttattttttatctagttttaaataattcatttgagataaaaagaagtttttctttgctttttttaatcactcagyggaggatgaacatgaagctgtaccaatggataggagaccgtctggtagagcacggga

SEQ ID NO: 956080 - DNA, 530 bp, Homo sapiens
cattcatatccaaaccatcaaggcctgcccaacagcctggtgacttgaaatcttgacgtgtacacagagtctaaacctcggtctttagattgcctccttactggacctctttacttattaagattcatccttgtggaggaagtgaggtcatggatgttcacatctatctttcccaggaagaaaaggaagcttcaagagctgggaaatgctatgcaccactgtgcaggttctgagcagcacagagccacctgtggggtgggcgggtaggtgagtagtggacatctgaccaccaggcgctgtgcaggactacctccttgcagagcaggtggggccttccaagttgcctactcatccaacctgcacagtaagccttatgggagcgtcatggggctacgcctacttcaaagagcaacttarctaaagggaaagagaatttgcacttgctctcttccactctagcagacttgcacttgtcgctatttatttgtgaacacagactcattttagattgacttaaaaataaaaaaaag

SEQ ID NO: 956081 - DNA, 545 bp, Homo sapiens
atttttcaaagatgctctttataagtttgagggaggtcacttctatccctagtttgctgagatttttttttttttaatcaggaatggctrtggattttgttaaatgctttcatttgtgtttgttgaaatgatcatatggtgtttcttttttagtttgttaatatgttttaatttgaattacattttttttcaaatgttaagccaatcttgcattcttgggataaagcctgcttggtcatggtatattgtattttttaatatatgatagtagtgaatttgctaaaattttgtttagaattttaaagtgtgtattcttgagggacattcatctgatttcttgtaatgtctttggtttgggtatagggtaatgctggcttcacagaacaaattgagatgtgtcttccttttttctcggtgaatttgtatcagaattggtatttttgtcagatgagtaggttgcgaaaattttctcccattttgtaggttgcctgttcactctgatggtagtttcttttgctgtgcagaagctctttagtttaattaga

SEQ ID NO: 956082 - DNA, 439 bp, Homo sapiens
gcaccaagtccataggctgcacacagcaggggggmcctggacagggcccaggaaatcattttttcctcctaggctttaggtctataatgggagggctgccatgaaggtctttgacatgccctggggatattttccctattgtcttggtgattaacatttggctccttgttacttatgcaaatttctgcagcaggcttgaatttctccccagaaaatgattttttcttttctattgcactgtcaggctgcaaatttttccacactcttatgctctgcttcctctggaatgctttgccgcttagaaatttcttctgtcagataccctaaatcatctctctccaattcaaagttccacagatctctggggcagggacaaaatgctgccagtctctgcacagcaagagtgatctttactccagtttccaacaagttcttcatc

SEQ ID NO: 956083 - DNA, 660 bp, Homo sapiens
ggctgcaggcctggacatcccttgttagttccctcmggactgccccaattcaccagctcttcaacaaaacccccacagtgttaggacctgaccactctgaccaagccccctccccttgctctctatccctgtttcagtctcttcatcgcatttatcactatccgaaatgatcttgttcacttgcctttttcctattgtctatctccccctcaaccactggatcctaagctccatgaaagcaaggagcttgaaatgttccctgctttatcctctgggcctaaaccagtggctggaacacagtaagcactcaatagacagcaaagcctgaatgaaccaatgctacattgtctctgctcaaaatatcaccatatcagtaagaccttccctgatcatcttatggaaaatagcaatctcccctccactcccagatctccactccctcctcctgccctccaagtcttattttttcctatagcatcattactttctgatacatttgatatttctttattgcttgtttcccttccaaaaaatgtcaaccctggaggcagaaatgctattttatttactgatgcagcctcagagcctaggacagtacctatcccgtagcgaagtctcaataaatatttgttaaaatgaatagctagcgaagtgggcaaa

SEQ ID NO: 956084 - DNA, 785 bp, Homo sapiens; identical to SEQ ID NO: 956068

SEQ ID NO: 956085 - DNA, 736 bp, Homo sapiens; identical to SEQ ID NO: 956055

SEQ ID NO: 956086 - DNA, 745 bp, Homo sapiens; identical to SEQ ID NO: 956056

SEQ ID NO: 956087 - DNA, 707 bp, Homo sapiens; identical to SEQ ID NO: 956057

SEQ ID NO: 956088 - DNA, 657 bp, Homo sapiens; identical to SEQ ID NO: 956043

SEQ ID NO: 956089 - DNA, 558 bp, Homo sapiens; identical to SEQ ID NO: 956044

SEQ ID NO: 956090 - DNA, 558 bp, Homo sapiens; identical to SEQ ID NO: 956045

SEQ ID NO: 956091 - DNA, 553 bp, Homo sapiens; identical to SEQ ID NO: 956054

SEQ ID NO: 956092 - DNA, 636 bp, Homo sapiens
gcgataccttggggttcccatgattccctccttgggtttaattaatatgctaaggcagctcacagaactcatagaaacacttatgtttactgatttactacaaaggatacagatgaagcgatgcatagggaaagttataggggaaggagtgcatcgtttttatcccctccccaggcactctaccctccaggaagcttcagatgttcagctattcagaagctctccatacagccttctttacaacctcttgggcctttcatgaaaacttcattggctaggcataattgaagcatggacgaccatgtagaaatgtgactggactaaaaagctataacctagtactaatagactgagtagggaaatccagcaaggcctgcctgctcatattttcattggcttttcctctttgtgcagcattccttcccgcagggtatgagcccaagcacctcctgaaattagggtcttatgacctacaatcagacaaggtaggtcagagaatttctttataaccwgttccaagatagaaaagtggggaaagattagagtatatttttagttttatggccagccttggggaaaaataataagagctattggagttatgagccaggaaccatgaacaaaaactatgtctat

SEQ ID NO: 956093 - DNA, 753 bp, Homo sapiens
gcaacaaaatacctgagactaggtaatttataaagaagagaaatttattttctcacagttccggaggctgggaagtccaagatcaaggcaccggcagattcagttgyctggggagaactgctttctgcctccaagatggtaccttttgatgtggcatcctccagagaggagcagcgctgtgttctcacctggcagaaggtggaatggcaagagagccaaatgccgcgtaaagtctcctttataagggccttaatgccattcacgacagaggagcctccacggcagaggagcctccacagcctaatcgcctcttaaaggccccacctcccaacaccatcatactagaaacacctgaattttggaggggccacattcgaaccacagcaatacattcatgcactgcacgatgacatttcagtcagtgacagtggtctgaaccatatacgacagtgctcttattacaatggaggccaggcgcagtggctcacgcctgtaatcccggcactttgggaggccaaggcggggcggggggatcacctgaggtcaggagttcaagactagcttggccatagtgaaaccccgtctctactaaaaatacaaaatttagccaggtgcaggggcaggcgcctataatcccagctactcaggaggctgaggtaggagaatcacttgaacccaggggttggaggttgcagtgagccgagatcgctccactgcactccagcctgagtgacagagtgagggtctcaaaaa

SEQ ID NO: 956094 - DNA, 583 bp, Homo sapiens
ctgtgcccttgctggagaggtgtttcagtcattcgaaggagaagaggcactctggctttttgagttttcagcgtttttgcattgatttttttctcatctttgtgagcttgtctacctttgatctttgaggctgctgacctttggatggggttttgtggggtctttttttgttgatgttgttgttgctttctttcttttaacagctaggcccctcttctgtagggttgctgcagtttgctgggggtctactccagaccctattcacctggatccctcctgcacctggaagtgtcaccagtggaggctgtagaacaccaaagatggctgcctgatccttcctctgggagctcaatctcagagggacaccaacctgatgctggtgggaacgctcccgtataagattcctgacaacccatgttgggggatctcacccagtcaggaggcttgggatccgaggcctgcttaaagaagcagtctggctgccccttgstggagtgggtgcactgcactggagggactcctctttgtccaaactgcccagcctcttcagaaccagcaggcaggaaagattatgtctactgag

SEQ ID NO: 956095 - DNA, 600 bp, Homo sapiens
aacgttcttgtgatttctttgatccctctgtctgcagttattkctgtattttcagtctctatttttatttatattttcctctttttttgctcaatattgtcaaaatcaatatatcttttcaaagtatgatccttggtttttgctactcatattattttattgttctctatttcattgatttctgccagtatctttgtcatttccctttttcttattactttgggatcattttgttacattgctgttttttccaattatttcatttgtatgattagttctatttcttttcttttttttttttttttttttgaaagaaggtcttgctctgttccccaggctggagtgcagtggtgctgtcatagctcactgaagcctcaaactcctagactcaagcaaccctcccacctcagcctcttaagtagctgggactacaagtgctgttagaaataccaaaattgttcgaaatagataatcggtgccgcgaagaaaagtcagcacagacacaaaagatctctcagcaaggccatctttactttctgcagaaagggtgctcagtcacagatggaatgatcgcgagaggtcacctaagcaaaggaaagg

SEQ ID NO: 956096 - DNA, 563 bp, Homo sapiens
actgaacgcaaatgctggtgaggatgtggtgtaacagggatgctcattcattcatttctggtcagaatgcaaagtggtacagccacttttcaagatagtttagtagtttttcacaaacctaaatgtacttttatcatacagcctagcagttgtgctcttggtatttatagaaatgaattgaaaacttatatccacacaaaagcatgtacacagatgtttttagcaagtttcttcataattaccaaaacttggtagcaaataattttttttttgacagagtctcgctctgtcacccaggatagagtacagtggtgcgatctcagctcactgcaatttccatctcccaggttcaagcagttctgcctcagcctcccaagtagcttggattacaggagcacgccaccatgcctgctaatttttgtatttttagtggagatggggtttcaccatgttggccagcctggtctcaaactcttgacctcaggtgatccaccygcctcagcctcacaaagtgctgagattacaagcgtgagccaccatgccccagccccaagtgtttttta

SEQ ID NO: 956097 - DNA, 747 bp, Homo sapiens
atgaaggggtcttgaatctagcacgctctgaaccagactctccccccgccgccctccgccctccaccacagtagcagccccatcctccccagcagtgcaaggaagaaacccaagagtccttgactttgaccctccccttacccccagagccaacccatcaccacattctgccaatttgaccgctaaacccctccaacccctgcactctctctgtctccatccccacacctggtcccagccacatcacctctgtcctggacttctgctatgccctcctaaccgactctcttgcttccgggatggtggcccgccactctctcctgcctggccgtcagagcgagcttttcaccctcgcaccgcatcatgtcactttcctgcttgagaccttcggaggtttccttcatttgccaggcagactccgtgcatggtcgccctgtgtggttcagccccagcttgcttctcctgccttgtctcctagccacatggcccacacacacagcgctgcatccctccctgtgctcagtccacagccttcgggcttgctgtgctctctctgcctgtgggggctgtgcacatgctgctccctcttccagagtgttttccctgctcctctttgctgaacctaagtgtcttcagatcccagagcaagatcacctccccatgggcacctgytgttccctgacctctgccatccagtcttatcctatcgatcctatctgcctaccacgttctacatcctggggcctg

SEQ ID NO: 956098 - DNA, 709 bp, Homo sapiens
caaaactagttgggccaaatgagaggctggcagaaaactcaaaaggaaaatatggaaaacgagatgtccatagggaactttgaaaaatctaaaaggccrtgagcatggctaggatttcatgcatgcccaggaaatatctgagaaaaccctaatctcttaccggtgtctaaccttgaggctttgtacaagcaggaaatgaaggcaaaggcagaattgtaagccactgaacactgaagatataccccgacacacacacacagagcccctcaacttaaaatgagagctatactggttcaaggcatttgaggaaacctctgtctaataatcatatgaacattaagttagtcaagtagaagctttagtggccacacacaacaaagaataaaacttcacggaataagcccaggaaagtcactagaaaaacaaacaacaacaacaataaaaaacaacaacaaaacttgaagagcaaggaagaatctgacttccagagtggctgcattctattatttttaatgtccagtattcacaaaaaagtataagatatgaaaataaataggaaaatatagcctatatataggaaaaacagtcaacagaaactatccctgaataagcccagatattgaacttgctagacaaatactttaaacaaactattataaatatgttcaaagaactaaaagaaactgtatccaaagacttagagaaacat

SEQ ID NO: 956099 - DNA, 654 bp, Homo sapiens
gttgtgctcaataaatgacaactgtgacagtgtggatgcagtgtgsttacaccaggaatatgtacagtgagacaggtattggtcaggacacagtgggagcaggagctaggtaagcagaaaggggctggtggagtgtgtgagtctgggcaggaaacagattagagtccagagaagcccaatcaaggcaggaagccttgggcatcaaccagagactgagccaggcaggctgagacaagaccctggagaccaggcagttaataagaggctttgagagcagggttgaaaaccccagatcatgggtagaggttctttgctttggggctgatttcattttggctgctgggtcaattctgtttccctttttaaaaaatctttgttgagacataatttgcatgccataaaatttactcatttaaaatatgcaattcaatggggttagtatattcagagttgggcacctatcaccacaatccaagttgagaatattttcatcacccccgcaaaaactgcatacccattagcaatcactacccatttccccttcccaccagcacctggcaaccactaatctattttctgtctccatagatttgcctgttctggacatctcatatcaatggaatcacataatatgtggtgttttgtgactgactt

SEQ ID NO: 956100 - DNA, 688 bp, Homo sapiens
tacatttccaccaggagactacgagggtttctatttctcctcatcctcaccaacccttgtaattatctgtggttttgattctagcccatcctggcaagtgtgaggtggtaactcaytgtaattttgatttgcatttccctaagggctaataatattgaacatcttttcatgtatttattggctatgtgtttttcttctttggagaatgtctacttaaaggctttatccatttctaattgacttatttgtctttttcttattgagttgtaagagttctttatatattctggataccagttctttctcacataacatgatttgccaacattctctcctattctgtgggtcatcttttcactttcttgatagtgcagcacaaaaatctaagttgaggtagtccactttatctattttgtccttggtctattcctttggtgtcatgtctaagaaatcattgcctaatccaaggttaaggatttttaagacttttatagtcttggctcttatatttagcactctagtcctttttgaattaaattttgtgtatggtgtgatggagggggtccaatttcattcttttgcatgtggatatccttcgtcccaacaccatttgttaatgtctgtttcagaggtatgtgaaccagagcaactccatcttgaatgggagctgggtaaaatgaggctgaga

SEQ ID NO: 956101 - DNA, 556 bp, Homo sapiens
ccctttttaaaaaatctttgttgagacataatttgcatgccataaaatttactcatttaaaatatgcaattcaatggggttagtatattcagagttgggcacctatcaccacaatccaagttgagaatattttcatcacccccgcaaaaactgcatacccattagcaatcactacccatttccccttcccaccagcacctggcaaccactaatctattttctgtctccatagatttgcctgttctggacatctcatatcaatggaatcacataatatgtggtgttttgtgactgacttcttacacgtagcataatgtgttcaaggcttatccatgtcatagcatgtatcagttctacattccttttcatggctgaataatatttcattgtatggatataccccttttatttctccatttattaggtgatggacatttggrtttcttccattttttagctattatgaataatactgctatgaacatccatgtactagttttagtttggacatatgttttcattcttcttggatatatactgaggaatgtgattactg

SEQ ID NO: 956102 - DNA, 556 bp, Homo sapiens
ccctttttaaaaaatctttgttgagacataatttgcatgccataaaatttactcatttaaaatatgcaattcaatggggttagtatattcagagttgggcacctatcaccacaatccaagttgagaatattttcatcacccccgcaaaaactgcatacccattagcaatcactacccatttccccttcccaccagcacctggcaaccactaatctattttctgtctccatagatttgcctgttctggacatctcatatcaatggaatcacataatatgtggtgttttgtgactgacttcttacacgtagcataatgtgttcaaggcttatccatgtcatagcatgtatcagttctacattccttttcatggctgaataatatttcattgtatggatataccccttttatttctccatttattaggtgatggacatttgggtttcttccattttttagctattatgaataatactgctatgaacatccatgtactagttttagtttggacatrtgttttcattcttcttggatatatactgaggaatgtgattactg

SEQ ID NO: 956103 - DNA, 717 bp, Homo sapiens
tacatttccaccaggagactacgagggtttctatttctcctcatcctcaccaacccttgtaattatctgtggttttgattctagcccatcctggcaagtgtgaggtggtaactcaytgtaattttgatttgcatttccctaagggctaataatattgaacatcttttcatgtatttattggctatgtgtttttcttctttggagaatgtctacttaaaggctttatccatttctaattgacttatttgtctttttcttattgagttgtaagagttctttatatattctggataccagttctttctcacataacatgatttgccaacattctctcctattctgtgggtcatcttttcactttcttgatagtgcagcacaaaaatctaagttgaggtagtccactttatctattttgtccttggtctattcctttggtgtcatgtctaagaaatcattgcctaatccaaggttaaggatttttaagacttttatagtcttggctcttatatttagcactctagtcctttttgaattaaattttgtgtatggtgtgatggagggggtccaatttcattcttttgcatgtggatatccttcgtcccaacaccatttgttaatgtctgtttcagaggtatgtgaaccagagcaactccatcttgaatgggagctgggtaaaatgaggctgagacctactgggctgcattcctagatgtttaa

SEQ ID NO: 956104 - DNA, 659 bp, Homo sapiens
tagttgtgctcaataaatgacaactgtgacagtgtggatgcagtgtgsttacaccaggaatatgtacagtgagacaggtattggtcaggacacagtgggagcaggagctaggtaagcagaaaggggctggtggagtgtgtgagtctgggcaggaaacagattagagtccagagaagcccaatcaaggcaggaagccttgggcatcaaccagagactgagccaggcaggctgagacaagaccctggagaccaggcagttaataagaggctttgagagcagggttgaaaaccccagatcatgggtagaggttctttgctttggggctgatttcattttggctgctgggtcaattctgtttccctttttaaaaaatctttgttgagacataatttgcatgccataaaatttactcatttaaaatatgcaattcaatggggttagtatattcagagttgggcacctatcaccacaatccaagttgagaatattttcatcacccccgcaaaaactgcatacccattagcaatcactacccatttccccttcccaccagcacctggcaaccactaatctattttctgtctccatagatttgcctgttctggacatctcatatcaatggaatcacataatatgtggtgttttgtgactgacttctt

SEQ ID NO: 956105 - DNA, 545 bp, Homo sapiens; identical to SEQ ID NO: 956081

SEQ ID NO: 956106 - DNA, 439 bp, Homo sapiens; identical to SEQ ID NO: 956082

SEQ ID NO: 956107 - DNA, 666 bp, Homo sapiens; identical to SEQ ID NO: 956067

SEQ ID NO: 956108 - DNA, 793 bp, Homo sapiens
gttttgtctggcccattaagtaggaatggtgaacactctcgattgatttgatgagagaatactacctctgagccccartgaagtgagattttatcccctctaaaaaaagaattcatttttttctcattagttgaactgtatttttttaatatccttgatttttaataatattgtcatattttaattttcattaataaaaaagtatggaaatgtgctttcactctttttatggaagtaactgctgcagggcatcgtggctcatgcgtgtaatcccagcactctgggaggccgaggcaggtggatcacctaatatcaggagttcaagaccagcctggccaacatggtgaaaccctgtctctactaaaaatacaaaaattagctgggtgtgatggtaggcacctgtaatctcagctactcgggaggctgaggcaggagaatcacttgaacccgggcagggaagattgcagtgagctgagattgcaccgttgcactccagcctaggtgacagagtgaggatctgtctcaaaaaaaaaaaataataataagtaactgcatagtaggtttgattttgcctcttgccctacaacacctgaagtatgcactatctggctcttcaccaaaaagggctactgagctctccctggtctaggtgttggtggagaaaatggatgggttcggatgtattttggagtgagagccagtaggactttaattttaatgctggcagaacatagactatgctgcagggtgggacagagtcacttgatccctaagacaagtctaagactatgag

SEQ ID NO: 956109 - DNA, 581 bp, Homo sapiens
gtgcccttgctggagaggtgtttcagtcattcgaaggagaagaggcactctggctttttgagttttcagcgtttttgcattgatttttttctcatctttgtgagcttgtctacctttgatctttgaggctgctgacctttggatggggttttgtggggtctttttttgttgatgttgttgttgctttctttcttttaacagctaggcccctcttctgtagggttgctgcagtttgctgggggtctactccagaccctattcacctggatccctcctgcacctggaagtgtcaccagtggaggctgtagaacaccaaagatggctgcctgatccttcctctgggagctcaatctcagagggacaccaacctgatgctggtgggaacgctcccgtataagattcctgacaacccatgttgggggatctcacccagtcaggaggcttgggatccgaggcctgcttaaagaagcagtctggctgccccttgstggagtgggtgcactgcactggagggactcctctttgtccaaactgcccagcctcttcagaaccagcaggcaggaaagattatgtctactgag

SEQ ID NO: 956110 - DNA, 676 bp, Homo sapiens
tccccttgtacatgtagggaccgcatctccaatgccttgctttacacaataacgaatggtgttttgcttacctacttccacacaaactgctgatatggttaggatttgggaaaggggaagaagggaattttgggttttgaggagtagctggggcttgaacaaagaagaggtagtaatgaacattcctggggtgaggcaattagttagctgagggagaagaaggcatataataaattagggattgacagactgtctgtaaagggccagacagtaaatgttttagtcattgaagaccttaaggtctctgttgcatctaatcaactccatcattgtagtgcaaaagtaaccacagccactacagatgtgaatgaatgtgactatgtttcaataacattttctttttttctttctttttttttgagacagtgtcactctgttgctcaggctggagggcagcagcctgatcatagcttattgcagccctgacttcccaggctcaagtgatcctcccacctcagccttccaggtagctgggactacagacacacgccaccacgccccactaatttttgtattttttgtagaggcggtgtttcaccatgttggccaggctggtcttgaactcctgaacttctgggctcaygctatccaccctcttcggccactgaaagtgttg

SEQ ID NO: 956111 - DNA, 573 bp, Homo sapiens
ggtgcacaccgtcatgccccgataatttttatatttttagtagagatgggttttcaccatgttggccaggctggtctcaaactgctgacctcaggtgatcttcccgcctcagcctcccaaagtgctgggattacaagtgtaagccacagcacccagcaaaaagtagatttcaaatgttctcactacagaaaaatgatacacttgtgatgttattgatatgttaattagcttgatattatcattccagaatgtattcacagatcaaaacatcacactctgccccataaacatatacaattatgttcattaaaataaaaaaattaaaattttatcttaggaaaaaaattagtaagaagtcccagacttgtaatttcacctccttaaacctcaacttcttcacctataacagaaaaaggataactccattttcccgtcctttggagctgtaagactsccttagcagaggggctgtccacggggctgctattattattgccatcaagcagtgggaatcgagcggtaccccacacaccacaggttacttttttttgtttttgtttgtgttttgagaca

SEQ ID NO: 956112 - DNA, 573 bp, Homo sapiens
ggtgcacaccgtcatgccccgataatttttatatttttagtagagatgggttttcaccatgttggccaggctggtctcaaactgctgacctcaggtgatcttcccgcctcagcctcccaaagtgctgggattacaagtgtaagccacagcacccagcaaaaagtagatttcaaatgttctcactacagaaaaatgatacacttgtgatgttattgatatgttaattagcttgatattatcattccagaatgtattcacagatcaaaacatcacactctgccccataaacatatacaattatgttcattaaaataaaaaaattaaaattttatcttaggaaaaaaattagtaagaagtcccagacttgtaatttcacctccttaaacctcaacttcttcacctataacagaaaaaggataactccattttcccgtcctttggagctgtaagactgccttagcagaggggctgtccacggggctgctattattattgccatcaagcagtgggaatcgagcggyaccccacacaccacaggttacttttttttgtttttgtttgtgttttgagaca

SEQ ID NO: 956113 - DNA, 610 bp, Homo sapiens
caagtctcagcctctggtgagtgtctttactcccgagccccagttccataygtgggtacttgcggaggggctggacttcacattccctaaggccttccaagctcaaagactgagaagatgcggtgtggccaggaccctgctagagtgagctccctggatgcaggaagggggccctgggcccagcagagaggcagggtgaggaggccagaggtgtggggagcccagtttgacaggagatggaatacacattattttaattttttcttttttgtttaatactgttgatgcaacagtaagaatacacattgttgatcagaaagtgaacagagccttagccccaaatacaacaagcctcttctctttatcttgtatggggtctccacagccagctcaggacaggagttcagtcgatgctgggaaggggctagcatttattgagcacttactatgtgccagggatgctgggctgagctctttatgtcaggcatgaatccatggaatccctactctggtcctatgaagcagatagaatcattcttcccattttacagatgagaacagggaggcaaggagagatgaaggttgcccagggccccatagattgcaggtg

SEQ ID NO: 956114 - DNA, 558 bp, Homo sapiens
tagtgtctattgtcaccatcttcrtgtccatgggtactcagcgtttagcacctacttataagaacatgaggcgtttgttttctgttacattagttcacttagtggcttctagctctagccattttcccgcaaagaacataatttcattcttttgtagctgcatagtattccatggtctatatgtaccacatttttatccagtccactgttgacgggcacctaggttgatcccatgtctttgctatcgtgaatagtgttgcaataaacatacgagtgcgtatgtctttttggtggaatgatttgttttcttttggatacatactcagtaatgggattgctgggctgaatgttagttctgttttatgttctttgagaaatctccaaactgctttccacagtggctgaactaacttacattcccaccaacagtgtataagcatttcgttttctccttatccttgccagtatctgctatttttttttacttttaaaaaaatagtctttctgactggtgtgagataatatctcattgtggttttgatttgcatttctctcatg

SEQ ID NO: 956115 - DNA, 542 bp, Homo sapiens
ctccagcctgggcaccagagtgagactctctctcaaaataaaaagaaaaaagaaacaaattactttgtttatttctctgaatgcctgtggtctgcaattctgcagcctttgcctcccaagtagctgggactayaggcgtgcaccaccatgcccagctaatttttgtattttcagtagagacaaggtttcgccatgttggccagtctggtcccgaactcctgggctcaagcaatcctcccacctcagcctcccaaagtgctgggattacaggtgtgagcaactggcgcccagccaatacctgaagttccagctcatccatattaactgctggagtatgttccatggtgtggattcaccactatccttttcctgttgagcatttaggctgttttcatttttcacttgttcaatcaatgctgccatgtacactccagcagtacactgcagtagtggcttgtgtgagatttctccaggtgtgtcctagggttggagctgctgggttgcagggtctgttcatctccaaggaggttgtccacaccagg

SEQ ID NO: 956116 - DNA, 698 bp, Homo sapiens
agcactggcaggcccaagcctctcagccctcagatcgaggtccacacatggtctgcagcctgccagtattgtcactcttagcaaggtgcatacttaccttccttctttcattccatcattcattctctcatcaaatcctggcccctccagattcttctctcaaggagccctgacctggctgggcatgagacagtatggtcaccccagggggaagagccctacggaaggggcagacaccagaatagggcccttgggaatccagccggaggtgggattggatttggggaggacctgacaggcagaaggaaccacctgagcctgaaggccaggaaatggagccttttccaggaagtgagggctgcaggggacctcttgaccaccctaggcccgtcctgagccccgaggtgtcaaagctggaaaaggaggtggccgagctaagaccttcaaggccaggccagtctggactttgagagccctgggaggctggtcaatgtgtcaccgggcccagtaaaccattaaccctggctcactcattaagaccctggtgggtgtccattagctccttggccggtttcaggagcygggcagagggtaggggtcatgggaagaagggagtgctgattggggtgctaggtagaggctggctgagctggctctctgtgtccttattccttgaggagcgttccagggccaagctg

SEQ ID NO: 956117 - DNA, 708 bp, Homo sapiens
tgtgggcaggtagcccagagtgtgtctggaacatcctgtttattggtcggcagtgacatctactgtcacatttgagaactgcatccacagccacatgrcctcctgtgaagacctcagggcaaactggggaaacctgcccttcttggaaggtgatactaggggggatgagcaacacctttcttggaggtttgaattcttcagggcccctccagcatcttggtcttcctaattcctcccttgatcccccagccctaggggtggtagcttcttgcagtgtttacctccgtgttaatctggattctctctgtcttcggagttctctaatgcctggttaccaattctttatatcaagttctctccgttaaaatcattgtggtggggtccatcccatggatatacatggaggtctgtgtgacaatgtataatcttactatttgcagttattacaaaactgtcctagaagacatgaatgcttgttaaaagaaatcttttaagtttcctagacttcaaagaccgttgctatgccctgtgaaacatcgcctatatcctttaacagtttgcaattcgaattggttacttacttaacattttgttgccctggtgatacaattatgttgactcgttattgtgaggttactttgttattaaccatgatgaggattactagcacatacttttactccatatgtataacacaacaatgtagta

SEQ ID NO: 956118 - DNA, 775 bp, Homo sapiens
taaccttaagcaaaaaactgggaaggatctcggtaaaagatacgtcagaaggaagtaatgtcctttaagatgttcttagaaacccatcagacaggtggggtgtggtggttcacgcctgtaatccctgtactttgggaggcagagatgggcggatcagttgaggtcaggagtttgagaccagcctgggcaacacggtgaagccccgtctctactaaaaatacaaaaattagctgggtgcggtggcacactcgggaggctgagacaggagaatcacttgaaccttggaggcagaggtttcagtgagctgagatcataccactgcactccagccgggccactgagcgagactgtctcaaaacaaacaaacgaacaaacaaaaagaagagaaactcatcagacgaagacacaggaaaaaaatgagcgaaggaaatcagcagaggtttcattgaaggacaaagagaaatggtcaatacatggatgaaaacatgtttaacttcagtaataatcaaggaagcacacaccaacacaacatgcacatactgtttttatttatcaaaggcacacatatttttgaaatgagtactcctaattaatatgtacagagcacttacccagtgcccagcacaggggtggcaccctgtgtgtgagacagcatgaaacaggtagacacgcgccctgctgaaagtaagggaccrcctctctggaggatccatcgggcaataaggaggtttccacaccttaactgtgtctgccttgacctctggggcctgggagc

SEQ ID NO: 956119 - DNA, 594 bp, Homo sapiens
gaaggtggccattctgggctggcattggtgtaggcgagggccagagagggccaggtatgctgggcaagcaggggtgacctttagggcctagctgtgaggactcagtcaggtcctcctcctagaggtctcctgctggctccccccagcatcctcagtggaatgtttgaagaaccagaatggacagttggccaagagatgggccctggcttggcactggctatgtgcaggaagtggcacttcacagaattctgtttgggggactagatacaggggtccaagaaggtaagtgctgtgtccccacagtgaccggtatgctcatgtgacttggttgatttcctcagggcacagcaggtgacacaggtctgggagggagggagtctcatcatctggggctttggtctgtagttcaaggtgcagtgcatgctagcaaacgatggccagctccggcttccctggctgttggtgccacactggagcctggcttgctcactgctcagcctccacttggcagtggaccttacctctgtatcccaggccttctgcwcccaggtggacctgggtcttaataaaccccaaccagcatgtcctcactgc

SEQ ID NO: 956120 - DNA, 576 bp, Homo sapiens
ccagctaatttttgtatttttagtagagacggggttttgccatgttggccaggctggtctcgaactcctgacctcagggtgatctgccagccttggcctcccaaagtgctgggattacaggcatgagccaccgcacccggcctggcttttctcttcttcctgacctgtacgtggaggtgtggcccagagctcaacacagggcctttgttctttgtcctcactttctttgttattgtatcctgtctcatgactttaaatactatttttgtgctgaggactgtcagatttgcatctctcgcctgttcttctctggactctaggttcgtgtatacagttgcctacttgacatcttcccattttgatattgaatattctcagacaatgtctccaggacaagatttcccccactttccaaacttgttctacatgtaatctgccttctccatctccattcatggcagtttcatccttagaaaccttggagtcatccttaactcccktcttcatcttagacttgttcagttgtttaggaaatcccattgactctactttcaaaatatgtccagaataagagca

SEQ ID NO: 956121 - DNA, 568 bp, Homo sapiens
tgccaccaaacctggataatttttgtattttttttagagacagggtcttgcccagactggtctcaaactccygggatcaaactatcttcccacctcagcctcccaaagcgctgggattacaggtgtgtttttttttttgagacagagtctcgctctgttgcccaggctggagtgcagtggcgctatctcggctcactgtaagctccgcctcctgggttcacgccattctcctgcctcagcctcccgagtagctgggattacaggcgcccgccacaccgcccagctaattttttgtatttttagtagagagggggtttcaccgtgatcgcgatctcctgacctcgtgatccgcctgcctcggcctcccaaagtgctgggattacaggcatgagccaccgtgcctggcctgttttgttgatttttaaagcccagggcagtagtcttggaaaatgtcccacatcgtggatttgcctttctgtttccttgagggcagattcagacagaacacctttccctgggattggtcaactaatccgtggggtgttgctgaaactttattttattttat

SEQ ID NO: 956122 - DNA, 568 bp, Homo sapiens
tgccaccaaacctggataatttttgtattttttttagagacagggtcttgcccagactggtctcaaactcccgggatcaaactrtcttcccacctcagcctcccaaagcgctgggattacaggtgtgtttttttttttgagacagagtctcgctctgttgcccaggctggagtgcagtggcgctatctcggctcactgtaagctccgcctcctgggttcacgccattctcctgcctcagcctcccgagtagctgggattacaggcgcccgccacaccgcccagctaattttttgtatttttagtagagagggggtttcaccgtgatcgcgatctcctgacctcgtgatccgcctgcctcggcctcccaaagtgctgggattacaggcatgagccaccgtgcctggcctgttttgttgatttttaaagcccagggcagtagtcttggaaaatgtcccacatcgtggatttgcctttctgtttccttgagggcagattcagacagaacacctttccctgggattggtcaactaatccgtggggtgttgctgaaactttattttattttat

SEQ ID NO: 956123 - DNA, 719 bp, Homo sapiens
tgcagctttggtgtttttgctaagttttatggagtgccaggccttaaaggaagcatgatgtgtgccacatgccttttcagactctgaaagatgaactgactgttgtctctctcattgtagaactctcttcctgccaagatgtctattggtgtgccgattaaagtactgcatgaggccgagggccacattgtgacatgtgagacgaacaccggtgaggtatatcgggggaagctcattgaagcagaggacaacatgaactgccaggtattctgctttgcatgtgaggctgtgtgggaggaatggccctgtgtcttgaaggacagaaaagtgtgtgttgagggtctctggaaattgttctcattcagcagtgatttcctaagtgcctaatgcataccagtcaggtgctgttataggctctgggggtgtgggcatgaacgagacacataatcttgaggcagaaaagccatttggaggtttggaatattttactttgtcctttttgttttttccatccccaaatatgggggtctatttgggagaagtgctacttccttcagtagaatccttcagattcagggccattatccatttgcctccacttgctttgcgattagcagaatcttctcacctactgtatttgtttcccttttctcttggaggaggagtctcakttgattattgcaactaccttgtgaggtaagcaggtttggtgatagtct

SEQ ID NO: 956124 - DNA, 646 bp, Homo sapiens
aaataatttgacttcttcttttgctatttagatgcctattctttctttctcctgcttgagttctctaggtaggacttccagtgctatgttgaataggagtgatgagagtcrgcatcattgtcttgctccatttctcatggggattggttccaacttgtgcccattcagtaggttggtggctgtgagtttgtcgtagatggctcctattattttgaggtatgttcccttgatgccgagtctgttgaggtttttaatgtgaagggatgttggattttatcagaagttgtttctgcatctattcagatgatgatatgatttttcttttagttctgtttatgtggtgaatcacatttagtgatttgggtatgttgaaccagccttgcatccctgtactgaagccttgattgtggtggattaacttactgatgtgctgctggattctgtttcctagtatttggttgagaatttttgtgtctatgttaatcagagtaattggcctgaagttttctttttgtgtgtttctctgccagattttggtattaggctgatgctggcttcatagactgagttagggaggagcccctcatcctcagttctttggaatagtttcaatagaactagtaccagttcttttgtacatctggta

SEQ ID NO: 956125 - DNA, 564 bp, Homo sapiens
tctaactactgagaaactaagtgagataatgagaaaaaaactgtggtattctagaatttaagagtctaggttctatgaggaaagcatcagacatacctcatttaagggacatactacaaaatgcataccaaaatatgtctcaaaactctcaaggtcatgaaaaataaggaaagatggaaaaactatcataagtcagaggaggctaaggaggcagtacaactaaatgcaatgtgggaactgggattggatcctgcaacagataaaggacattaacagaaaaagtggtgaaatctgaatacattcaaatatttactttttaaaaatattaaatatcagtagcataattaagaatttcatataatgttacgtttactctaaagctgcttccttgtaagtttggcctacaggtttctctgtaaatagagaactgtaacctaactggatatgtaaacagtctgtaatctactcttttaacacatggcttkgtctcagccaatgacagaagctatgtttcaaccactcacagccagccaactgtccaaataaggcaaacaccaagctgct

SEQ ID NO: 956126 - DNA, 618 bp, Homo sapiens
tctttgttgctgtatctaaaaaggcatggccataccctaggtaatcttggttttctcctatgttatctcctagaaactttatagttttatacattaaacaacgttaatgtctataatctattttaacttartcactgtgaataatgtaaggcactgtgtctacaaaaatgtatatttttttgcctgtggatgtccaaatgtcccagcaccatttattgagatgatttttttaactttattgttttgattcctttgtcaaagatcaattaactatatttatgtaggtttattttgggtggattgatctatttgtctattctttttcacaaccacactgtattgattgccatagctttatagtatgccttaaaatcaggtagtttcagtcttcctaatttgttctactccttcaatatcaagttggctattctaggtcttttgcctcttcatattaactttaatatcagtttgccaatatccacaaaatagcttcttaaattattactgggggtggattgaatctatacagcaaattggaaaaactgacatagtgacaatcttgatttttcctatccataaatttggaatatctctcaatttatttagtactttaatttc

SEQ ID NO: 956127 - DNA, 584 bp, Homo sapiens
acagggtctatgtgcctgtacctattaggtgcccaaataagattctaaatgacagaatgagtcaaagaatcctgggtttggaccatgggaaagtggtaaaatggtgtcagagggatgtcaagaggaagagctggttttggagggaaagttgttgagttcaattcaacgctacagagagtcagagatagcatgcagacctcagaaccaaagtgttgagacaatagacatggtgggattttactcgctgattattttcagagaccaccctattttggatgtgctagttctcgacttttctagaatcagtattataaaccagataatctgtgaagtaacccaaggaaaggggctccagtaggatagggattgaggatgttcataaactaaggatgaagaaggagaaagaaaatcagttttttacagattttccacctgcgttacaaagcacccaaaacctttcagcttctgggaagtggaaggccatgccttccaggcatgcactgaggtctctggggcatgttacacacatctatgtaagtgactcactgcygttagggcatgcgctaggtccaagaaatcccagg

SEQ ID NO: 956128 - DNA, 575 bp, Homo sapiens
cttcccagtggagttgtatagatagtgctatttctcccagccacaatgtgtgacaatacacatgaagtatcatcagccagggaagctcacctgagcttcagtgtcagggtttttactgggggctattyatgtagatatggctgaccttagtctccagatcctccagaagtggtgctgataatgtgtggtccaagtccaccactataaatattaaataaaatagacttcagatcagagaaaattaccagagacagagagtgctattatataataataaaaggattgatcacctaaaagacacagtaattacaggtgtgcaagcacaaaacaacaaagtgacaaaatatgttaagcaaatcctgatataactaaaaggataataggcaaatccacaattatagttagagaactcaacatcctcctctctcaacaacttatagaacaactatacagaaaatcagcctggatatggaagaacggaacaacatgataaaccaacagggtctactggtcatttatagaacacttcatccaacagtagagtacacattcttttcaagcacccacagagtgaa

SEQ ID NO: 956129 - DNA, 575 bp, Homo sapiens
cttcccagtggagttgtatagatagtgctatttctcccagccacaatgtgtgacaatacacatgaagtatcatcagccagggaagctcacctgagcttcagtgtcagggtttttactgggggctattcatgtagatatggctgaccttagtctccagatcctccagaagtggtgctgataatgtgtggtccaagtccaccactataaatattaaataaaatagacttcagatcagagaaaattaccagagacagagagtgctattatataataataaaaggattgatcacctaaaagacacagtaattacaggtgtgcaagcacaaaacaacaaagtgacaaaatatgttaagcaaatcctgatataactaaaaggataataggcaaatccacaattatagttagagaactcaacatcctcctctctcaacaacttatagaacaactatacagaaaatcagcctggatatggaagaacggaacaacatgataaaccaacagggtctactggtcatttatagaacacttcatccaacagtagagtacayattcttttcaagcacccacagagtgaa

SEQ ID NO: 956130 - DNA, 618 bp, Homo sapiens
gtgctggaattacaggtgtaagccaccatgcctggcctgtatattcttttgatgaaagggatctgtgtttgaaaaccagggggtggcctgatagtttagagtaaaygtttagtaatagagaagtagaacaactaattagaacatcggttgtctagaatggggagataaaatgaagggctggtttacatgccttcacaagtatgtgttaacactcaacatgaagggactaaaggactgtccccatcagtggctggtggtattatgatacatatatattggttttcatccatggttcctggctcataactctaaaatcccatatatatatatataagctaacatcctccccagaactaggtctcagtttacatcagcgtgtggtcagcatacagcttgcacacatccccacatggacatttaagcaaattttacattaaacatttcagttagaaattaccttaagattaccctcaaagtaaaattgagaagagcttggtgttcctaatttgtggaaaaaacaagtaggtgccaacctttggtggtaaaacagtggcaaaatgattctaaaataccaaacaaaggaaaactacaaaagaaaactcagcaatagaggcaagt

SEQ ID NO: 956131 - DNA, 577 bp, Homo sapiens
ttggtttgcatttaatgggagacgttcatgtggttcgtggtcacttccatgcactattaacttattgctggagagtaggaatggcttctgcaaatgctcctgtattagtccattctcacactgctatgaagaaayacctaagactgagtaatttataagaaaagacgtgtgattgactcacagttgaatcacaattctgcatggctggggcagccttaggaaacttacaatcatggcagaaggcacttcttgacagggtggtaggagacagaatgagtgctgagcaaaaggagaagccccttataaaaccatcagatctcatgagaactcacgcgctctcatgagaacagcataggggaaactgcccccatgattcaattatcttcacctggtcctgcccttgacatatgggtattattataattcaagatgagattttgggcagggacacagccaaaccatatcagctcctaacagccactgtgtcaaagtgcccaggtgtggtaacatgaaggagccatagaatatgtgcagcatgcagttcactttaatctcatcagagaaaaaagctgtcttc

SEQ ID NO: 956132 - DNA, 577 bp, Homo sapiens
ttggtttgcatttaatgggagacgttcatgtggttcgtggtcacttccatgcactattaacttattgctggagagtaggaatggcttctgcaaatgctcctgtattagtccattctcacactgctatgaagaaacacctaagactgagtaatttataagaaaagacgtgtgattgactcacagttgaatcacaattctgcatggctggggcagccttaggaaacttacaatcatggcagaaggcacttcttgacagggtggtaggagacagaatgagtgctgagcaaaaggagaagccccttataaaaccatcagatctcatgagaactcacgcgctctcatgagaacagcataggggaaactgcccccatgattcaattatcttcacctggtcctgcccttgacatatgggtattattataattcaagatgagattttgggcagggacwcagccaaaccatatcagctcctaacagccactgtgtcaaagtgcccaggtgtggtaacatgaaggagccatagaatatgtgcagcatgcagttcactttaatctcatcagagaaaaaagctgtcttc

SEQ ID NO: 956133 - DNA, 636 bp, Homo sapiens
aattctatatccagcaaaaaattactgaacttgaagacacagtgatagaaaatgaaggcaaagtaaagccattttcagatatacgaaagctgaaagaattcatcacyaacaaacctgcactatgagagatcttcaaaaagtccttggagtcgccacaggtaagtttaaattagaaaaaaaaaaaacaaaaaacaagtagtccttcaggcagatggaaaaggataccagacggaacacagacctacatgaatagaacatggtaactacatgagtactgaaaatggtaactacataaagtaaatatgtgagattctaagattctaagtatataaatctttagtacataattaaatagatgttttgattgagttagatataaaaatagatatttttgttgaagaaaaaataataataaagtgtaggctttagagcatacgtaaaacactcagtgtggtggcttacacctgtagtctcagctattcagggggctgaggcaggaggattccttgagcccaggagttcaaggctacagcgagccatgatcataccactgcactccagcctaggcaaaagagcaagacccgactcaaccaaaaaacaaaagtaaaagtaaaatgtgtgataaaaattacatac

SEQ ID NO: 956134 - DNA, 617 bp, Homo sapiens
agagacttaaaagtcataaaaatcaagtatgagaagcagctcttgtttggatcttgacctgaacaaaccaaaaaggcaattatcaggcaatgggaattttgagacaactgaatatggactgggatttggcgatattaaggaagtattgttgtcaggtgcggtgactcacgcctgtaatcccagaactttgggagcccaaggcaggcgaatcacctgtggtcaggagttccagaccagcctggccaaaatggtgaaaccccatctctactaaaaacacaaaattagccaggcacagtggcatgcgcctgtagtcccagctactcgggaggctgaggtgggagaatcacttgaacccaggaggcagaggttgcagtgagtcgagatcacaccactgcaatccaacctgggggacagagcgagactctgtctcaaaaaaaaaaaaaaaaaagtattgttaattcagttaggggtgataatgattttgagcttatgtaataaaatgtccttttttattttttagacacacaaatcagaattagttagaggttaactaatatgatgacatgacagggatttaaatactattgcaatytgaaaaaaaaaagaaaaggaaagag

SEQ ID NO: 956135 - DNA, 614 bp, Homo sapiens
cccatatttgtttatctgttcatttgttgatggacatttgagctgtttcccatatcatcttaactatttttaagtgtatgctacagtagtgttaactatatgcatattgttgtacagcagatctctagaaccttttcatcttgcaaaactgaaagtctataccccattgaggaatgactacttatttccccttccctccagcctctagtgaccacattaactttctgtttctatgagtctgactactttagataccttatatacatggaatcatgcagtatttgtctttttttgtgactggcttatttcacttagcataatgtcctcaaggttcatgcacttctagtatatgacaggatttccttctttttaaaaactgaataatactccattgtatgtatataccacattttctttatctagttaactgtcaatggatatttaggttgtttgctcccacctcttggctatcgtgaatattattgcaattaatatgagtgtgcatawtctcttccagatcctgttttcaattgttttgggtaaatacccaggagtaggattgctgaatcacataataattctactgttaatgttttgagaaatctccatactgt

SEQ ID NO: 956136 - DNA, 550 bp, Homo sapiens
ttccttaaaaatgaatggatggatgaataaataaataaataaataaatatttgttgaatgaatgaatcagtggtaccgagttcttaacagccttttcttttactaacagggtaaaaggatgatttaattaagttgccctgtggatgtttagactctctataagaaaatggctttggtttccccagactgttcagcagagattctgctgcttctattctgggttgcttctgatgttgttaacaacctttgcacacactctgggtttgtttctgccttgtggctgctgagctcagatggtgacctggggttaataaaatcatgtctctgcaagcaagagagagcctctctggttatttcaaatagcgggggcttgattgtaaggttgtatgtggaaattaggtagatgggatcttagctgggtaggcagtccactcagacaacagagcactacaaggttgcctggagttaaatgcagctcttgaggcagctcttgtcactgtgtcaatatygcaagttgattgctctctggtgtctggctccaccactaaga

SEQ ID NO: 956137 - DNA, 643 bp, Homo sapiens
cttgctagcagctgaaggaggggtctatgggaaatttaaccttactaattgctgtctacacgtagatgatcaaggacaagtagttgaagatatagttagagataggacaaaactggcacatgtgcccgtgcaagtgtggcatgaatttgatcctggggccatgtttggaaaatggttcccagcactaggaggatttaaaactcttataataggagttttaatagtaataggaacctgcttactgctcccttgtttgctacctgtacttcttcaaatgataaaaagcttcatcgctaccttagttcaccaaaatgcttcagcccaagtgtactatgtgaatcactattgatctgtcttgcaagaagacatggtagtgaaaatgaaagtgagaactcccactcatgagtgagattctcaaaagaggggaataagggaggagaccacccctcatactgtcttatgcccaatttctgcctccaaagaaagaagaagtaaaaactaaaaggcagaaatgaaatctgctcrgcaccacacctgggcttggtagttaaagatcgacccctgacctaatctgttatgttatctatagattacagacattttatagaaaagcactgtgaaaatccctgtcctattctgttcc

SEQ ID NO: 956138 - DNA, 660 bp, Homo sapiens
gacagtgggtactgtgctaggctctgtgccctcaggagctcatagtttagtgagggagccagataaataagtggagaagtacatggcagtggctgggcacggtggctcatgcctgtaatcctagcactttgggagtccaaggtgggtggatcactggaggtaaggagttcgaaaccagcctagccaacagggtgaaacccagtctctactaaaaatacaaaaattagccaggtgtggtggtgcacgcctgtagtcccagctactggggaggctgaggcaagagaatcgcttgaacctggaggcagaggttgcagtgaactgagattgtgccactgcactttagcctgggcggcagagggagactccttctccaaaaaaaaaaagaaaagaaaagaaagaaagaaatacatggtagggatactactacaaaggcattcactagctttagaatacagggttactgttgatccccgacttttttttttggttggttggtaggtttagggttttggttttaaagacagaatttccttatgtcgcccaggctgaagtgcagtggcttgatctkggtccattgcagcctccgcctcccaggccgaagtgatcatcccacctcagcctcctgagtagctgggaataatgtaccatagaataaggtgc

SEQ ID NO: 956139 - DNA, 770 bp, Homo sapiens
agaattgcttgaactcggaaggtggaagttgcagtgagcccagatggcaccactgcaagccagcacattccatctcaaaaaaaaaaaamccaagtatttaacaggattgatatacttaggagttgaagtaatcgcattgggtccttggcctaagaggtaagacctatcatagtgggacagacaaagagatctctaaaacccctccctctcttcagctatgatagtaaatcaaaagcagtatcacatcctggggagggacagagattagtgccaccattaaagacaaaaagaatgcacgggtgtggtgtctgtcacatccagacttagaaatatatctccagcccacataccggctaagctgccaactttgactcaaactctgagcaggaaagggctctgcatcaagtctaggatgcaatgcacacttaagccatgcaatccagcagatcctgggggttcaaagtatcagtagcgaaaaaaagattcagtgtagaacttatggcaagctcctatggcaaaagcacaatgcaagtccctgagattctggagcaaggccaagctgtccaaagcagggaagtaggtgccttttgagaaacagcatcagggctgttactggaaagcttgactatgaagcatccagaactgccccattatgaattgggtcttgtcagacctatcaagtcataaagtcagacagaccctttagtcagatataaagatggaaatggtatattcatgatgaagctgaaagcagaaccagaaaacattag

SEQ ID NO: 956140 - DNA, 610 bp, Homo sapiens
accacctgagaaacctgaatacttaaccaggtgtccctagggcaagtttgcatcctccctatagaactgcagctaatgtgctcttgaaagtgccacctcctggctggaggccaaccaacacaaaatgagtgcactaaacaaaaacaaccaacgaccctcacagagtccacttcactaccctgccacctccactgaagcaggtgctggtatctatagctgcaagactggaagacagttcacaccagaggactctttgcagacactcctcagtaccaggctggagcctggtagctccactgggtggctagactcagaagagcaaaaacaatcactacagtttggctctcaggaaaccccattcccaggggaagggggagaatgctacatcaaaggagcaccccatgggacgaaagaatatgaacagcagctcttgaatcccagatcttccctctgacatagtctacccaaatgagaaggaaccagaaaaacaattctggtaatatgacaaaacagggttctttaacacccccaaaagattataccagctcaccagcaayggatccaaacaaaggcaaaatccccgaatttccagaaaaagaattcagaggtc

SEQ ID NO: 956141 - DNA, 586 bp, Homo sapiens
ggccagaagttccaatactatgttgaataggagtggtaaaagagggcatccttgtcttgtgctggctttcaaggggagttcttccagcatttgcccagtcagtatggtgctggttgtgggtttgtcacagatgactctcattattttgaggtatgatccatcactacctagtttattgagagtttttaaaatgaaggaatgttaaattttatcaaaacacttttctgcatctattgagataatcatgtggtttttgtcttagttttttgcctttgtttacgtgatgaatcacatttattgatttgcatatgatgaaccaacctagcatctaggggatgaatcctacttactcatagtgaatacactttttgatgctgaatttggtttgccagtatttttttggattttttgaattgatgttcatcaaggatattggcctgaagttttcttattttgttgtatctctgccaggttggtaccaggatgatgctgatctcatagaatgagttatggatgagtcctcttcttcacttctttggaatagtttcagtagagatkgtatcagctcttctttgcacttctggta

SEQ ID NO: 956142 - DNA, 592 bp, Homo sapiens
ttgccttatttgaacatggttcaaacagttggccacatttgattggccaaaacttggtgattggcacaagagtagacgatagtctgtttatactttcatttagtctagagtttgygatgtacagagaaacgtttaggccaaacttaaaatatgtaaggagggcagggcgcagtggctcacacctctaatcccagcactttgggagcgcaagtcgggcggatcacgaggtcaggagatggcggccatcgtggctaacacggtgaaaccccatctctactaaaaatataaaaaaaatagcgtgcgcctgtagtcccagctactcaggaagctgaggcaggagaatcgcttgaacctgggaggcagaagttgcagtgagcagagatggtgccactgcattccagcctgggcgacagaacgagactctgtctcaaaaaaaaaaaaaaaaaggaaggagacagctttaaactaaacttgatttaacagtagcattcctaaacgtgaggttaacatcattctcaaagagttgaccaaggattcatttgataaattcggtttttcggaaatagatgattctggtgattcagacaattct

SEQ ID NO: 956143 - DNA, 592 bp, Homo sapiens
ttgccttatttgaacatggttcaaacagttggccacatttgattggccaaaacttggtgattggcacaagagtagacgatagtctgtttatactttcatttagtctagagtttgcgatgtacagagaaacgtttaggccaaacttaaaatatgtaaggagggcagggcgcagtggctcacacctctaatcccagcactttgggagcgcaagtcgggcggatcacgaggtcaggagatggcggccatcgtggctaacacggtgaaaccccatctctactaaaaatataaaaaaaatagcgtgcgcctgtagtcccagctactcaggaagctgaggcaggagaatcgcttgaacctgggaggcagaagttgcagtgagcagagatggtgccactgcattccagcctgggcgacagaacgagactctgtctcaaaaaaaaaaaaaaaaaggaaggagacagctttaaactaaacttgatttaacagtagcattcytaaacgtgaggttaacatcattctcaaagagttgaccaaggattcatttgataaattcggtttttcggaaatagatgattctggtgattcagacaattct

SEQ ID NO: 956144 - DNA, 625 bp, Homo sapiens
cggggtcctctgttaccagtgtggtgggatcgacaaaacacttacttaaatatctcttttcataaatggaaaaaatgagagtagggggttgcgacagtcagatagaaaaattaccattcctaaaaattactcaaatgagtcatatttaccaagcacctaggataaaaaaaaaaactcattgtgctaactgctgtttgaacaacctaagaacgtaagaaaagttaaaagttgaatctagtagtaataacaaaatatatgtagaaagtgaattattatacacacacatacacactcacacacacacacacacacagagccagcttgaaattttatgtactgtgaagcttactaagcagtgaaggtgacaaagggtttagaagaataagtatttgcagataaagatgcttagggaagatttctctctctcccactctctctgttcatcttacccacctccaaccccgtacacacagcacacacacatgtaaacagaggagattcaccggrcccttgaagaatgtcaagcagggcctgtgactcaagagaaaatgttcaaaatgaggagtatcttcttatcattctgtaagagtttgggaaaggtaggcatttctttgataatgaaagt

SEQ ID NO: 956145 - DNA, 642 bp, Homo sapiens; identical to SEQ ID NO: 944485

SEQ ID NO: 956146 - DNA, 611 bp, Homo sapiens
gctgaactgaataagggagcaatgcaaccctatgttgaaggagcgggaggatttacccaatgcgtgctggcagaagratggaagaaactggattcttaggtgctggatcaaggggagtgaaacataaagttggaaaagggagaacttatcaatttgggagcatcctgctgggatctagaatttaatatgctggcaagacccctggaagagacacgctactgggatggctcttagagcctgggaaaagcactgtactacactaagggaagcagaaatgccagaaatgccagaactgccgtggcagacagagaagaaggcctcagagaagtgggcatctagaactcatacacacacaaggctagaaacctcaccaattgattacattgcacacaaaggcacagagggccttccattgtcctaagcaataagaaatgcactagtgagaggggtgctggaagcagtgagaagctcagtggtggttctcccagggctgtagtaggagatgccactgcagaatttggtttattgatataaattgatatgataggacattgaaataacagaggccaggtggcagcactctaccagaagccaggcaggtgcagttaaga

SEQ ID NO: 956147 - DNA, 562 bp, Homo sapiens
gcagtgagccaagattgcaccattgcactccagcatgggtgagagagcgagactccaacttaaaagagaaaaaaaaaaagtatgcagacagaaggttacacaccatttaggaagccaaagcaagataagacaaacaccctatcagtactgatcatcatcacctgcacacactgctttgtggcagttgtcttgtggtctctatatggaggcaagatgggattccccatataaaatccaccgcagttgctgaggtgccacacatatgccaacagggtatgtaaatgtttacgctcaaataataaggctttctagaagagcaagagagctaacaagcaggtctaaaactgggtcgaaagagcaaggtctaaaactgggttgaaagacaagaattggcattgtctgttgttgtggttggagtatgagagcacagtgagggttcccatggctgatctggtgtctgcataggacagagattctaattggcaccaaagaagaaagtaatcaggttttcttattkgttttcatagttatagaaagcagagaagagaaaagagtgggaatt

SEQ ID NO: 956148 - DNA, 472 bp, Homo sapiens
gctgtttctcatagtttgaattctcccggaaacagagcctgaaatggaggytagtgtgcgtgatgtttattaggggatgcgctttgtattaacatctacatagacaaggggaagaaagcaatgtttaacagaggaagaagatgacctgcaaacaacttactgtatctttagccgacctgccatggagcactggaactaaaatgtctttcagagtcatccttcatttagttaaaatggccaagtctttctttatgcccgattaccatcatttattgaatgtgggtgtccttgatggtaggttaccacaggtgcagtaaatatctgtaactgacacaacttttgaaagtgctcacatgggaaaactttttgttaacaagatttccaaccacaaggcaacatgttttttgaagaagaatatggacgatatattcctatgtccaccataccgtatgacttctcaggctatgcttta

SEQ ID NO: 956149 - DNA, 472 bp, Homo sapiens
gctgtttctcatagtttgaattctcccggaaacagagcctgaaatggaggctagtgtgcgtgatgtttattaggggatgcgctttgtattaacatctacatagacaaggggaagaaagcaatgtttarcagaggaagaagatgacctgcaaacaacttactgtatctttagccgacctgccatggagcactggaactaaaatgtctttcagagtcatccttcatttagttaaaatggccaagtctttctttatgcccgattaccatcatttattgaatgtgggtgtccttgatggtaggttaccacaggtgcagtaaatatctgtaactgacacaacttttgaaagtgctcacatgggaaaactttttgttaacaagatttccaaccacaaggcaacatgttttttgaagaagaatatggacgatatattcctatgtccaccataccgtatgacttctcaggctatgcttta

SEQ ID NO: 956150 - DNA, 593 bp, Homo sapiens
tttaatgtcattctctttcagaacatgtatgtccccatgtagtttattaatcaatacagggatttcaaaaaaaaatgatgggtgacaagagtaaggaaaggatatattcttcaggattcttcagagaaccagaaccaataggatacatatggatgcatataagaagatttttattgtggaaattgactcacacaattatggaagctgtgaagttccctgatatgacatctgcaagctggagaatcaggaaagctggtggtataattgagtctggttctgaatacctgagaaccagggaagccaacaagaaaaatcacaatatgaggccaaaggcctgaaaaatagggaagtgaggatatcactggtataagtcctagagtctgaaagcccaagtaccaggggtgctgatgtccaagggcaggagaagatagatgctccagctcaaggagacagagagattaagaactcgcccttcttccacttttttggttctacttgagcccttcataaattggatgatgtctgagttcactggtgaaggcagatcttcctcagtgtatggatwcaaaagctaatctcttctggaagcactc

SEQ ID NO: 956151 - DNA, 612 bp, Homo sapiens
aaactattccagaaaaccaagggggtggaactcytgttcaactcattctatgaggccagcaccatcccaatatcaacacctggcagagattcaacagtaacaaaacttcaggccaatatacttgatgaacactgacgcaaaaatctttaacaaaatactagcaaactgactccagcagtccatcaaaaagctaatccatcatgatcaagtaggctttatcattgggatgcaaggttggttaaacctatacaaatcaataaatgtgattcatcacataaagagaactaaagacaaaaattacatgatcgtttcaacagatacagaaaaggctttcaagaaaatacaacatccctttatgttaaaagctctcaacaaaccaggtattgatagaacagacctcacactaatacaagccatctatgacaaacccacaaccaacatcatactaaatgggcaaaagctggaaacattccccttgaacaccagcatatgacaaggatgccctcttccaccactcctactcaacataggagttttattggaagtcctggccagtgcagttaggcaagagaaagagataaaggcatacaaataggaagagaggaagtcaaa

SEQ ID NO: 956152 - DNA, 612 bp, Homo sapiens
aaactattccagaaaaccaagggggtggaactcttgttcaactcattctatgaggccagcaccatcccaatatcaacacctggcagagattcaacagtaacaaaacttcaggccartatacttgatgaacactgacgcaaaaatctttaacaaaatactagcaaactgactccagcagtccatcaaaaagctaatccatcatgatcaagtaggctttatcattgggatgcaaggttggttaaacctatacaaatcaataaatgtgattcatcacataaagagaactaaagacaaaaattacatgatcgtttcaacagatacagaaaaggctttcaagaaaatacaacatccctttatgttaaaagctctcaacaaaccaggtattgatagaacagacctcacactaatacaagccatctatgacaaacccacaaccaacatcatactaaatgggcaaaagctggaaacattccccttgaacaccagcatatgacaaggatgccctcttccaccactcctactcaacataggagttttattggaagtcctggccagtgcagttaggcaagagaaagagataaaggcatacaaataggaagagaggaagtcaaa

SEQ ID NO: 956153 - DNA, 613 bp, Homo sapiens
agaagagctggtaccattcctgcttaaactattccagaaaaccaagggggtggaactcttgttcaactcattctatgaggccagcaccatcccaatatcaacacctggcagagattcaacagtaacaaaacttcaggccaatatacttgatgaacactgacgcaaaaatctttaacaaaatactagcaaactgactccagcagtccatcaaaaagctaatccatcatgatcaagtaggctttatcattgggatgcaaggttggttaaacctatacaaatcaataaatgtgattcatcacataaagagaactaaagacaaaaattacatgatcgtttcaacagatacagaaaaggctttcaagaaaatacaacatccctttatgttaaaagctctcaacaaaccaggtattgatagaacagacctcacactaatacaagccatctatgacaaacccacaaccaacatcatactaaatgggcaaaagctggaaacattccycttgaacaccagcatatgacaaggatgccctcttccaccactcctactcaacataggagttttattggaagtcctggccagtgcagttaggcaagagaaagagataaaggcata

SEQ ID NO: 956154 - DNA, 583 bp, Homo sapiens
ctgggatttcttggacctagcgcatgccctaacrgcagtgagtcacttacatagatgtgtgtaacatgccccagagacctcagtgcatgcctggaaggcatggccttccacttcccagaagctgaaaggttttgggtgctttgtaacgcaggtggaaaatctgtaaaaaactgattttctttctccttcttcatccttagtttatgaacatcctcaatccctatcctactggagcccctttccttgggttacttcacagattatctggtttataatactgattctagaaaagtcgagaactagcacatccaaaatagggtggtctctgaaaataatcagcgagtaaaatcccaccatgtctattgtctcaacactttggttctgaggtctgcatgctatctctgactctctgtagcgttgaattgaactcaacaactttccctccaaaaccagctcttcctcttgacatccctctgacaccattttaccactttcccatggtccaaacccaggattctttgactcattctgtcatttagaatcttatttgggcacctaataggtacaggcacatagaccctgt

SEQ ID NO: 956155 - DNA, 586 bp, Homo sapiens
tcacttgaccacaaaggaagatagcaagaaaggaagaaaggaacaaaggatctacaaaacaactagaaaacaacaaaattgcagtagtaagtccttacttatcaataattatcttaaatgtaaatggattaaactctccaatcaaagacatggagtggttaaatggatttaaaaaaaaaaacaaaaaacaagacctaactatatgctgcttataagagactcacttcacctgtaaggaccacacataaaatgaaagcaaagggatgaaaaaaattctatgcaaatggaaaccaacacagagcaggagtagactttaagtcaaaaatagactttaaatcaaaaactgtaaaaacagacgaagatcattatacaatgataaagggatcagttcagcaagaggacataacaattgtaaatatatatgcacccaacaccagagaaactaaatatataaagcaaatattaatagatcttatgagagagwtagattgcagtacattaatattagggaatttcagtaccccactttctgcaatggacagatcatccagacagaaaatcaataaggaaacatcagacttaaact

SEQ ID NO: 956156 - DNA, 639 bp, Homo sapiens
gcttccatttgttctcctcctacatctctgaaactctctccagttaggctttcctcccatcgtgccacttcagcagttcttatcaaggtcaccagtgacctccagaaggctgattccaatggccagttctaattattcccattgttctggcctgtctgccatattggacaaaattgatccttcctttcttgagactgtcctctgtgaccatgtgggtgactcctctctcgattttcctcttccttctctagccatgcttttccagtcttgttggctgacacctcctcatcttcaactcctaaatgtgagtcctcatttctatctatactcatttcctagtgatcgtttctagtctgtcccaaatgtatcctagcccagacccctccttcaactccagactcatgcatccacctgcctcaaaatctcctttaaaacccaataggcatttggattttctctgctgaaccttctcaacccagtctttcccatctcaataaatgacaaacttttctcttctagttattgaatccaaaatccttgaagcagtccttgactcctctttttcctaacacccttcatcmagtccatgaggaaaatctgttggcatgacctttgaaatgtgtccagaatatgacccct

SEQ ID NO: 956157 - DNA, 639 bp, Homo sapiens
gcttccatttgttctcctcctacatctctgaaactctctccagttaggctttcctcccatcgtgccacttcagcagttcttatcaaggtcaccagtgacctccagaaggctgattccaatggccagttctaattattcccattgttctggcctgtctgccatattggacaaaattgatccttcctttcttgagactgtcctctgtgaccatgtgggtgactcctctctcgattttcctcttccttctctagccatgcttttccagtcttgttggctgacacctcctcatcttcaactcctaaatgtgagtcctcatttctatctatactcatttcctagtgatcgtttctagtctgtcccaaatgtatcctagcccagacccctccttcaactccagactcatgcatccacctgcctcaaaatctcctttaaaacccaataggcatttggattttctctgctgaaccttctcaacccagtctttcccatctcaataaatgacaaacttttctcttctagttattgaatccaaaatccttgaagcagtccttgactcctctttttcctaacacccttcatcaagtccatgagraaaatctgttggcatgacctttgaaatgtgtccagaatatgacccct

SEQ ID NO: 956158 - DNA, 828 bp, Homo sapiens
atcagaagcaagtgggcctcggaggggccagatgcctctctcctcacactgaccgtgagagcgagtgctcctcatcaacaacgtggggccaggcttgagtcagcagcactgactttatgtgayctagtgcagctcgccagcccacgctgatgtgtgttaatggaggggtgccccttaaggggggggaaggtttaggagggtggtgtgggctataatttcttctgcattctctgcctattgcttgaaggacagtgttgtcagcagtcaactgactgagcttgacttttcagcagtttttttaaacttcactgcagtgtttttggacacagctatgtcagaaatctatttccccttctcagagaccaggaagctcttgaggtacaagctcttattaagcagaaaattttaaagtggttttccttctccttttcttgggtctgctttcttggggcaaacagaatacgagaagccagcttagaaattgcatgggtccttcctgcattttgtgagaaaatggtggcctcctatatttcttccctgacaggttactgtggccaccagcctccttggtgacttctgttttgcagatggggaatttgttgattgtagtgagtacgctgtgtgcggcagaaaggattctgtcacctacagagagctagggaagcgcccaggctgaggaaacccaccccttcgaagcagccatccataggtagcctgggggtcttttcacaagacagccctagccccagttcatgggagttggaacaatggtgggtccaatggtggatgaatagtttattcacatgcatcccaggagatttgtgtgaa

SEQ ID NO: 956159 - DNA, 611 bp, Homo sapiens
gtaatgcagtctagcctgtaatcccagcactttgggaggccaaggcaggtggatcatgaggtcaagagattgagaccatcctggccaaygcgatgaaaccccatctctactaaaaatacaaaatttatctgggcatggtggcatgtatctgtagtcccagctactcgggaggctgagtcaggagaattgcttgaactcgggagacggaggttgcagtgagccaagactgcgccactgcactccagcctgggcaacagagtgagactccatctcaaataataataatattattattaataataatacagtcgatcacaggcagtgtaattatttgaagaccataaggttgggcatacagcatagagtatctagcccttagtggctatgttggctattctctacttcccctctccagatccattctccaccattatccctcctgctttgtgcccttgggaggctgaccttcccctctgcctttaagttgggttcagtcagaggggagcactggaaaaagagggtggaagagtggccagccatagtgaccatggctctctacggaaggccatagcttctgtcaggtggttagttctaataacttaggggttcca

SEQ ID NO: 956160 - DNA, 611 bp, Homo sapiens
gtaatgcagtctagcctgtaatcccagcactttgggaggccaaggcaggtggatcatgaggtcaagagattgagaccatcctggccaatgcgatgaaaccccatctctactaaaaatacaaaatttatctgggcatggtggcatgtatctgtagtcccagctactcgggaggctgagtcaggagaattgcttgaactcgggagacggaggttgcagtgagccaagactgcgccactgcactccagcctgggcaacagagtgagactccatctcaaataataataatattattattaataataatacagtcgatcacaggcagtgtaattatttgaagaccataaggttgggcatacagcatagagtatctagcccttagtggctatgttggctattctctacttcccctctccagatccattctccaccattatccctcctgctttgtgcccttgggaggctgaccttcccctctgcctttwagttgggttcagtcagaggggagcactggaaaaagagggtggaagagtggccagccatagtgaccatggctctctacggaaggccatagcttctgtcaggtggttagttctaataacttaggggttcca

SEQ ID NO: 956161 - DNA, 641 bp, Homo sapiens
cctctcccctttaactgccttcttttgagttatttgagtattttttgttatctcattttatctccactccatatattggttagatctctgtgatggataatgttaaatgctgctcaggttcctcttcaagaagtcattattgtttcccctgctgggagacctgttgacagatagctttctgctgacagacccttcagggattgccacgattgcagagagctaccttgctcaaggtcattcgccttcccaaggtggctaacatccagtgctgaatgcaagaatattaaggtctgaccatctcaatccaactcagcacaattctgaagagtcattctagttctgtagcttcatgtgggcttggccaaggctattattggactagcataacaacctgacttctcatcctgcccacccctgcttgtgtcaccttccttctacaggtatttatcccaagagcactcctttaataaacatccttcacactgaactccatctctgctcatgggaatcaacctgcaacagmttttttgttttagtttttagtggttgctgtaggcattgccaatatgcatattttaagctattacagttgtgttagtttgctagggctgccataacaaaatactacagactgggtggct

SEQ ID NO: 956162 - DNA, 554 bp, Homo sapiens
tccattaacactccttttttttttgagatggagtctcactctgttgcccaggctggagtgcagtggcgtgatctcggctcactgcaacctctgcttcccaggttcaagmgatcctcctgcctcagcctcccaagtagctgggactacaggcacgtgccaccatgcccggctaatttttgtatttttagtagagacagggtttcaacatgttggccaggctggtctcgaactcttgacctcgtaatctgcctgcctcggccttgcaaagtgctgagattacaggaatgagccactgcgcccagcagtactcttttttattttttttattttttttgagatggagtgtcgctctgttgcccaagctggagtgcagtggcacgatctcagctcactgcaattctctggcctcagcctcccaagtagctgagattacaggcctgcaccaccatacccagctaatttttgtatttttagtagagatggggtttcaccatgttgaccaggctggtctcgaactcctgacctcgagtgatccacccaccttagcctccgaa

SEQ ID NO: 956163 - DNA, 788 bp, Homo sapiens
agaaatagagtcttcacaatgcctgggaaaggaagagagatgaggctcactagccacagaaaaacaggcagttaatttttaaagggctccagctctttctctttctcaggggggatttgggttttctyacatacaactgagtttctgcttacacattctttaatttcttttaattcctgttccgcttggaccagggccagggcaccactgccctgtaccacccccaggagggtgttccttgcatcctggcccttctagctccagccttggttcaaagggctccagatgagctcaggccatggcctcagagggtgcaaactataagccttggtggcttccatgtggtgttaagcctgcaggtgagcaaagtgcaagagtgaaggaggcttgtcattctctgcctaaatttcagaggatgtatgagaaaggctggatgcccagggagaagcctatgcccggctggagccctcaaagaggacctcttctaggacagtgccaagtggaaatgtggggttggaggccccacacggggtcctgactgggggggcgggggctgcctagtggagctgtgggaggggggctgctgccctccagatcccagaatgatagagccaccagcagctcatgtcttcagtgtagaaaagctgtgggagcagagctgcccaaggccttgggagcccaccctgtgcatcctgggaatgctctatgttcccaggatgtgggacatgctttcaaaggagattattttggaacttcgagatttaatgactgccttgctgggatttgaa

SEQ ID NO: 956164 - DNA, 709 bp, Homo sapiens
ccaaaatccaacagaaagttggaatccaacaacaaccccataacaacgatcctggatttgaatgacaagatagctatattgaaaaagaaccaagcagagcttcttgaattgaaaaatttactataggaatttcaaaaagagttggcagccttagcaacagactaggccaaatagaagaactaatttaagagctcaaagaccagacctttgaatcaacccagtcagacaaaaataaaaaaggaatttaaaaataatgaaccacacttttgagaaatataggattatgtaaaggaacaaaatctatgacttactattggcatttttttttgagacagaatctcacactgttacccagtctgtagtgaagtggcatgatcttggctcactgaaacctccacctcctgggttcaagcaattcttgtgcctcagcctcccaagtatctgagattacaggcgtatgccaccatgcctggctaatttttgtatttttagtagagatgaggttttgccattctggccaggtaggtctcaaacttctggtctcgggtgatactcccaccttggcctcccaaagtgctgggatgactggcatgagccactgtgcctggctgacttattggcatttctaacagagaagaagwgaaagtaagcaacttggaaaacatttttgaggatataattcaggaaagtgtcctcaatcttgctagag

SEQ ID NO: 956165 - DNA, 401 bp, Homo sapiens
cccaaggtggtcaggatacagcttgcttctatatattttagggagaaaatacatcagcctgtaaacaaaaaattaaattctaaggtcccwgaaccatctgaatgggctttcttctaggccagggcactctaaaattgaagaacctgaacattcctttctattgataatactttcagccagttgagcccattcagaccacagcaaggtgccaggccaggcaagggctgacttgagatacctgccagatgagtcactggcaaaaggtgctgctccctggtgagggagaaacaccaggggctgggagaggcccagaaggctctgaaggagttttggtttggctggccatgtgtgcaattagcgtgatgagctctgacatggccttgcatggacggattgggcag

SEQ ID NO: 956166 - DNA, 549 bp, Homo sapiens
accgtgtattcacccatggcctgatggtcacctggggttgaatgtccaactgtggccagatgtgcacccggaacctgggcatccacctggggcctgatgtttagctggggcctggagttcacctgaggcatgatgtctacctgaagcttaatgttcatctgagtgctggatgttcacctggcgcctgatgtccacctggagcctgaggacccttctcaggcctgatgtccacaattggcctggtattcatctgggacctttgtgttaatgtggcctaatgtactcctgggttctagggtcctcttgggacctgatgtctaccaggatcctggtatccacctggggcctggtatccacctagggcttgatattcacctggggcctgggaatccacttgataactggtgcccatcgcggtcctgatgttcaccttgggactgggtaaccacctgaggcytgatgtccacttagggcataagtgtttatctggggtctagtgttcacatggggcctgatgtcaaccttgagcttaggtattcacaagaggac

SEQ ID NO: 956167 - DNA, 549 bp, Homo sapiens
accgtgtattcacccatggcctgatggtcacctggggttgaatgtccaactgtggccagatgtgcacccggaacctgggcatccacctggggcctgatgtttagctggggcctggagttcacctgaggcatgatgtctacctgaagcttaatgttcatctgagtgctggatgttcacctggcgcctgatgtccacctggagcctgaggacccttctcaggcctgatgtccacaattggcctggtattcatctgggacctttgtgttaatgtggcctaatgtactcctgggttctagggtcctcttgggacctgatgtctaccaggatcctggtatccacctggggcctggtatccacctagggcttgatattcacctggggcctgggaatccacttgataactggtgcccatcgcggtcctgatgttcaccttgggactgggtaaccacctgaggcctgatgtccacttagggyataagtgtttatctggggtctagtgttcacatggggcctgatgtcaaccttgagcttaggtattcacaagaggac

SEQ ID NO: 956168 - DNA, 549 bp, Homo sapiens
accgtgtattcacccatggcctgatggtcacctggggttgaatgtccaactgtggccagatgtgcacccggaacctgggcatccacctggggcctgatgtttagctggggcctggagttcacctgaggcatgatgtctacctgaagcttaatgttcatctgagtgctggatgttcacctggcgcctgatgtccacctggagcctgaggacccttctcaggcctgatgtccacaattggcctggtattcatctgggacctttgtgttaatgtggcctaatgtactcctgggttctagggtcctcttgggacctgatgtctaccaggatcctggtatccacctggggcctggtatccacctagggcttgatattcacctggggcctgggaatccacttgataactggtgcccatcgcggtcctgatgttcaccttgggactgggtaaccacctgaggcctgatgtccacttagggcataagtgtttatctggggtctagtgttcacatggggcctgatgtcaaccttgagcytaggtattcacaagaggac

SEQ ID NO: 956169 - DNA, 579 bp, Homo sapiens
tgagacaggcctgaattggatttatggctctattgcatattkgttttgtgattttgggaaagtcatttaatctctccgaattttagtttctttagggattaatagtaccttttccagggagctgttattaggatgagacaacgaccagaacatagcaagaattcattagtgctctcaccacccttcccccattgcagccctcagtacctgaatggcaatcgtgcatcttctcatcagcctggaattgcttcccctttcatctttggctctgcagtattcagtgtcactagtgaaatgtgtgaaatgaatgaatcgacaactgatgcttaatacctaatgagacaagtgaatgaatccttttgttcattttatggccagaaagatagtgtaattaagtaataacaactggcaaaaaagagaaactcaacctatactttgtccttttctcaagtagcatctaaaactttttccctctgattaaaaaattatcactgaaggatctctttgaatgtgtcttgaattttatataagcagatgatcacagctcagcataatattagaagattatatgattttaaa

SEQ ID NO: 956170 - DNA, 659 bp, Homo sapiens
tagccactcgccatgattgccaacccctttgatgagtactaatttcaaaattattaaggaaaggcaaatatttagaytcatacaggttaaaagaaaatattttcaaaatttcaaatttaagcttataaatgttctaatctacttttgaatgtgtattcgtgacccaagattggttttttccaggccccatcattctaatgacttttttttttttttgagacagagtctctctctgttgcccaggctggagtgcagtggtgttatctcgactcactgcaacctccacatcccaagttcaagcaattctcctgcctcagcctcccgagtagctgggactacaggcacatgccaccatgttcggctaattttttttttctttttttttttttagtagagacagggtttcaccatgttagccaggatggtctcgatctcctgacctcatgatcttcctgctttggcctcccaaagtgctgcgattacaggcatgagccactgcacccagcccagagttttttttaacaaggttcttctcagcaattctagtatccagatataggcccatcatagacatcacacaagcgtgtacttcataatcctggtgaatacagaagtttcctggactccttgatgagctactgctttcgctcctatatcag

SEQ ID NO: 956171 - DNA, 639 bp, Homo sapiens
aaaaaaaaacaaaacaaaacaaaacaacagaacaattgccagacaaaaactgggcaaataaccggattagatatttttctaaagaagacaggaaactgacccaatgtctacaaaaacgtggttaacattactactcatgagaaaaatgcagatcaaaaccacactcagatcttatctcactccaatagaatgaacattacaaaaagatcaaaatatttaaaaagacaattcctggtatgaatttccagaaaggggaactgtttgtggaaacataaattagtattaacactataaaaaacagttggaggtcttgcaaagaataggaaaaaaagaaataccatatcatctagcagtcccattactgggtataaattcaacctacctgttcatccacagataaagagatcaagaaactctcatatacatacactaggaaatattctccagccatcaaaataatgaagcagtgtcatttagagcaacacagatgaacctggaacacattatgttaaatgtaatgrgctaggcctagaagacaaacactgcatgataccactcgtgaaatcttaagatgtttatcttaatgaagtagaaagcacaatattggttaccagagtttgggagatagagggggaatgg

SEQ ID NO: 956172 - DNA, 709 bp, Homo sapiens
acaacacaccctgaggtacaacaattttgtctgttttgagtttccactgttgaaaaaaacctagttattctaattaagaatagttatagatagtacagtgataacatttttttttgagacaggctcttgctctgtccccagattggaatgcagcagcatgatcatggctcactgcagcctcaacctccctgggctcagtgattctcccacctcagtctcctgagtaactgggaatgcaacacatgccaccatgcctaaatattttttggattttgttttcttttgtagagatggggctttgccatgtcacctaggctggtattgaccttctggactcaagtgatcctctctcctcagcctcccaaagtgctaggattacaggtgtgaaccagcatgccatgcctatagtgatatctttaagtaagcctctcctatcttcttttgagcagtttttcaaagcaacaggcaccttattaaattagaaagttgatgtgtttcccgaatgcctgctaataaagtagagaactaaagaacctctgtgatttcaatgaagtccattcagatgttatgggctacttgttactgacaagtatggtaggaaatgtaggtcaagctgtcataggcaaatagatcttgctgaagagraagaattattggctaagataacaccctagaacacctggcatactttagacacagctaaattgaa

SEQ ID NO: 956173 - DNA, 748 bp, Homo sapiens
ggtcatcatgtagtgaagatatttcttttttcagcataggcctcaaagggttccaaatatccacttgcagattctacaaaaagacggkttccaaactgctcaatcaaaagaaatgttcaattctgtgagatgaatgcacacatcacaaagaagtttctcagaatgcttctgtctagtttttatgtgaagatattcccttttccaccacaggcctcaaagcgctccaaatatccactcgtggtttctgcaaaaagagtgtttcaaaacttctcaatcaaaagaaaggttcaactctgtgagatgaatgcacacatcacaacgaagtttctcagaatgcttctgtctagtttttacgtgaagatatttccttttccaccataggcctcaaagcactccaattatccacttgcagattctacaaaaagagtgtttcaaaactgctcaatcaaaagaaagcttcaactctgtgagatgaatgcacacatcacaacgaagtttctcagaatgcttctgtctagtttttaagtaaagatatttcctttttcaccataggcctcaaagtgctccaaatatccatttgcagatactacaaaaagactgtttccaaactgctcaatcaaaagaaaggttcaactctgtgagatgaaagcacatatcacaaagaagtttcccagaaagtttctgtctagtttttatgtgaagatatttcctattgccccattggccacaatggtctcacaaatatccc

SEQ ID NO: 956174 - DNA, 620 bp, Homo sapiens
gctgctccaccactttgcttgtctcctgggtgctccatcccagagacatgtgagttagcaatcactcagtgtaatcggcccaggatggagggtctgtgctgtgggcccaagccagggttccctgtctggtgatgagtagtggagtgtgtgtggtacctgtgggagatggattggcttgttctttgggtcaactgcagcttattggaggtgttgatatggcacttagggtctttgctcccgtgatatatcttctgaggatagcaagggcagttcactgcaaaggcagtggcagaaaggatttcatttgctcctggaagctctgtccaaggaactgctgagttgctactggcttgatagctccagtggtgggctggctagagacacaggccaggaggatctgcccatcaagtacagagtctggccacttttctgaagggctgctgtggaatgctgggggtcccctcaagtccctaattgactcgtattttccagggaagatgatagcctaccccttcctctgggagctctgtaccactgaggtacgaaccygttgccaatctgaacacaccaataagatgtggctggaggcaagttgagaagtcttacctagtcaggaggaa

SEQ ID NO: 956175 - DNA, 620 bp, Homo sapiens
gctgctccaccactttgcttgtctcctgggtgctccatcccagagacatgtgagttagcaatcactcagtgtaatcggcccaggatggagggtctgtgctgtgggcccaagccagggttccctgtctggtgatgagtagtggagtgtgtgtggtacctgtgggagatggattggcttgttctttgggtcaactgcagcttattggaggtgttgatatggcacttagggtctttgctcccgtgatatatcttctgaggatagcaagggcagttcactgcaaaggcagtggcagaaaggatttcatttgctcctggaagctctgtccaaggaactgctgagttgctactggcttgatagctccagtggtgggctggctagagacacaggccaggaggatctgcccatcaagtacagagtctggccacttttctgaagggctgctgtggaatgctgggggtcccctcaagtccctaattgactcgtattttccagggaagatgatagcctaccccttcctctgggagctctgtaccactgaggtacgaacctgttgccaatctgaacacaccaataagatgtggctggaggcaagttragaagtcttacctagtcaggaggaa

SEQ ID NO: 956176 - DNA, 772 bp, Homo sapiens
cttttgcaaaactgcaactaaggaaattatgacagtgaaagaaatcagacctaaccgactctatcttgcttctaacccttaagctgtccttgttcattccttggtgtaagctcaactaactttgggaaggaatttagttcacggtttgactctgaaagcaaattgataacaaccctttcctgaaaagaaccccttcttgcctggggagcagtctgcctttgcaggactaacatattagctacaagattagaatgtacagtttaggggtcatgcagtctctggcttcgaaagtctgaacctccccaaactgctcctgcaggtaacatcacatcactactgtaaaacctaagatcagggcttgatacgtgttgcagaccctgcccaggccagtaatctggcccaaccagttgtgccgtcatacccatgaatagaagacagaaagataacctaacttcaaccccctatgattctatctccaacctgactaatcagcactccccacttcccaagcccctacccaccaaatatctttaaaaactctgatccccgaatgctcggggagaccgatttgagtaaaaactttggtctgccatgcagccggctctgcgtgaattactccttctccactgcacttcttctaycttgataaatcggttctgtctaggcagcgggcaaggtgaacgcattgggctgtcacggtacattttatagattgaagacctccccctttttttctctctcagactttcagattcttggtaacttgtttcac

SEQ ID NO: 956177 - DNA, 772 bp, Homo sapiens
cttttgcaaaactgcaactaaggaaattatgacagtgaaagaaatcagacctaaccgactctatcttgcttctaacccttaagctgtccttgttcattccttggtgtaagctcaactaactttgggaaggaatttagttcacggtttgactctgaaagcaaattgataacaaccctttcctgaaaagaaccccttcttgcctggggagcagtctgcctttgcaggactaacatattagctacaagattagaatgtacagtttaggggtcatgcagtctctggcttcgaaagtctgaacctccccaaactgctcctgcaggtaacatcacatcactactgtaaaacctaagatcagggcttgatacgtgttgcagaccctgcccaggccagtaatctggcccaaccagttgtgccgtcatacccatgaatagaagacagaaagataacctaacttcaaccccctatgattctatctccaacctgactaatcagcactccccacttcccaagcccctacccaccaaatatctttaaaaactctgatccccgaatgctcggggagaccgatttgagtaaaaactttggtctgccatgcagccggctctgcgtgaattactccttctccactgcacttcttctaccttgataaatcggttctgtctaggcagcgggcaaggtgaacgcattgggctgtcacggtacatyttatagattgaagacctccccctttttttctctctcagactttcagattcttggtaacttgtttcac

SEQ ID NO: 956178 - DNA, 785 bp, Homo sapiens
atggaagtactgaaaccacttttgcaaaactgcaactaaggaaattatgacagtgaaagaaatcagacctaaccgactctatcttgcttctaacccttaagctgtccttgttcattccttggtgtaagctcaactaactttgggaaggaatttagttcacggtttgactctgaaagcaaattgataacaaccctttcctgaaaagaaccccttcttgcctggggagcagtctgcctttgcaggactaacatattagctacaagattagaatgtacagtttaggggtcatgcagtctctggcttcgaaagtctgaacctccccaaactgctcctgcaggtaacatcacatcactactgtaaaacctaagatcagggcttgatacgtgttgcagaccctgcccaggccagtaatctggcccaaccagttgtgccgtcatacccatgaatagaagacagaaagataacctaacttcaaccccctatgattctatctccaacctgactaatcagcactccccacttcccaagcccctacccaccaaatatctttaaaaactctgatccccgaatgctcggggagaccgatttgagtaaaaactttggtctgccatgcagccggctctgcgtgaattactccttctccactgcacttcttctaycttgataaatcggttctgtctaggcagcgggcaaggtgaacgcattgggctgtcacggtacattttatagattgaagacctccccctttttttctctctcagactttcagattcttggtaacttgt

SEQ ID NO: 956179 - DNA, 785 bp, Homo sapiens
atggaagtactgaaaccacttttgcaaaactgcaactaaggaaattatgacagtgaaagaaatcagacctaaccgactctatcttgcttctaacccttaagctgtccttgttcattccttggtgtaagctcaactaactttgggaaggaatttagttcacggtttgactctgaaagcaaattgataacaaccctttcctgaaaagaaccccttcttgcctggggagcagtctgcctttgcaggactaacatattagctacaagattagaatgtacagtttaggggtcatgcagtctctggcttcgaaagtctgaacctccccaaactgctcctgcaggtaacatcacatcactactgtaaaacctaagatcagggcttgatacgtgttgcagaccctgcccaggccagtaatctggcccaaccagttgtgccgtcatacccatgaatagaagacagaaagataacctaacttcaaccccctatgattctatctccaacctgactaatcagcactccccacttcccaagcccctacccaccaaatatctttaaaaactctgatccccgaatgctcggggagaccgatttgagtaaaaactttggtctgccatgcagccggctctgcgtgaattactccttctccactgcacttcttctaccttgataaatcggttctgtctaggcagcgggcaaggtgaacgcattgggctgtcacggtacatyttatagattgaagacctccccctttttttctctctcagactttcagattcttggtaacttgt

SEQ ID NO: 956180 - DNA, 630 bp, Homo sapiens
aattacagctcactgcagactcaaattcctgggctaaagttatcctcccacctcagcctcccaagtagctgggatcatcacaggcatgcaccaccatgcctggctaggtttctttttttttttcttttctttttttgtaggggcagtgtcttgctttgttgtccaggctggtcttgaactcctggcttcaactgattctcctgcctcagcctcccaaagttgctgggattacaggtgtgagccacctgcgtccacacttgccatccatttttaataaatgttctcagcaaagttagaaatacaatggaacttcccaattttgatagaggagatctacaaaactctagaataaacatgacgcaaaatgttgaaagttctcctttgaggtcaagaacagggcacacttctagtcagcactgctggaagttctatgcaatagaataagggaagaaacataaataaaagttatacacaattgaaagaaagaaataaaactatttctggacagttttatacctgaaaaactgaaaataatctacaaactattagaattaataaatttatttagcaaggttgctgggtataaggtcaatatmaaaaatggactatattcataaaaactaccatcaa

SEQ ID NO: 956181 - DNA, 572 bp, Homo sapiens
attcagtaaatggatgctcttccacatggtaatcttgattggtcaatttctgtactatataaggttttgggaagcagagatggacaatgatragagagagtagacgaaaggaagatgaggttatagggagaatgtgggaaaggaaagaaggggatatcttcatagagcaggaagcaaaattggaagtcaaagtgtccagtggcagtggtgaaaagtgttgaccaacctcgatttggtgaaggtggcgtcacatcaatttaaacttttcatggggaagcagggtatttctcaacctaatgcttatggagaattggcctctgtatttccctccagactttcacggactactcagcctagcccaaacatgagccagatgccgaatggactgccaatgtgaaaattattcgatttgattaagaaacaatttaatcttattctggtttgtatttaaagcctgctaatatcaaagtacacagaattttcatttttgtatcagcaacttagatgccatttagaagctgtgccaccctgaaattaaaagcacaagtgctagagtcagctttcaccattcc

SEQ ID NO: 956182 - DNA, 572 bp, Homo sapiens
attcagtaaatggatgctcttccacatggtaatcttgattggtcaatttctgtactatataaggttttgggaagcagagatggacaatgataagagagagtagaygaaaggaagatgaggttatagggagaatgtgggaaaggaaagaaggggatatcttcatagagcaggaagcaaaattggaagtcaaagtgtccagtggcagtggtgaaaagtgttgaccaacctcgatttggtgaaggtggcgtcacatcaatttaaacttttcatggggaagcagggtatttctcaacctaatgcttatggagaattggcctctgtatttccctccagactttcacggactactcagcctagcccaaacatgagccagatgccgaatggactgccaatgtgaaaattattcgatttgattaagaaacaatttaatcttattctggtttgtatttaaagcctgctaatatcaaagtacacagaattttcatttttgtatcagcaacttagatgccatttagaagctgtgccaccctgaaattaaaagcacaagtgctagagtcagctttcaccattcc

SEQ ID NO: 956183 - DNA, 572 bp, Homo sapiens
attcagtaaatggatgctcttccacatggtaatcttgattggtcaatttctgtactatataaggttttgggaagcagagatggacaatgataagagagagtagacgaaaggaagatgaggttatarggagaatgtgggaaaggaaagaaggggatatcttcatagagcaggaagcaaaattggaagtcaaagtgtccagtggcagtggtgaaaagtgttgaccaacctcgatttggtgaaggtggcgtcacatcaatttaaacttttcatggggaagcagggtatttctcaacctaatgcttatggagaattggcctctgtatttccctccagactttcacggactactcagcctagcccaaacatgagccagatgccgaatggactgccaatgtgaaaattattcgatttgattaagaaacaatttaatcttattctggtttgtatttaaagcctgctaatatcaaagtacacagaattttcatttttgtatcagcaacttagatgccatttagaagctgtgccaccctgaaattaaaagcacaagtgctagagtcagctttcaccattcc

SEQ ID NO: 956184 - DNA, 763 bp, Homo sapiens
ccttacatattacttcagagttccccactgtgcagactctcaggtattaactgtataaaactctttacatgctattataatctgcaatctcaatctcttctactttaaattaatgtttctagaataggttaaatacacatatacacacacaactatgcctgagaaaagttatgcttttacaaataaaaagaatagattagcattaacaagtagggtgaataacagtaggcagagtcagaatcagaaataaataccagtgaatcaaaataaaagaatgaaaaatattctgtattaaaaattatcaatgtaatgtaaaagtctgataaaagattattctttttcttttacctctgactgttgacctctgtacactgtaataaggtgttgctggatggaacttcttgatctaggtccttggtgaccttagtagtaataacagcattgctggcaccctaattaccctctgctgaaacagaaggtagtttatcaatgtaccaatcccttagtctatacttggtttaaacacgcttgccatcatctggtatcctgctagattagaacctcttaaaagcaaattggttttctttcaaagaccaacctgactccaaagacagatacggaatcctgcttcttctgctgcataaagaaatctcaaccttcattttacttgaacacagaccgaagtgttcctacttctgcrttgtctatgagctagttctatggatgttccactcagatttaaagctttttattgcacaggacg

SEQ ID NO: 956185 - DNA, 763 bp, Homo sapiens
ccttacatattacttcagagttccccactgtgcagactctcaggtattaactgtataaaactctttacatgctattataatctgcaatctcaatctcttctactttaaattaatgtttctagaataggttaaatacacatatacacacacaactatgcctgagaaaagttatgcttttacaaataaaaagaatagattagcattaacaagtagggtgaataacagtaggcagagtcagaatcagaaataaataccagtgaatcaaaataaaagaatgaaaaatattctgtattaaaaattatcaatgtaatgtaaaagtctgataaaagattattctttttcttttacctctgactgttgacctctgtacactgtaataaggtgttgctggatggaacttcttgatctaggtccttggtgaccttagtagtaataacagcattgctggcaccctaattaccctctgctgaaacagaaggtagtttatcaatgtaccaatcccttagtctatacttggtttaaacacgcttgccatcatctggtatcctgctagattagaacctcttaaaagcaaattggttttctttcaaagaccaacctgactccaaagacagatacggaatcctgcttcttctgctgcataaagaaatctcaaccttcattttacttgaacacagaccgaagtgttcctacttctgcgttgtctatgagctasttctatggatgttccactcagatttaaagctttttattgcacaggacg

SEQ ID NO: 956186 - DNA, 632 bp, Homo sapiens
tcctgatttcctttctttcgtatatatacctaccaatggcattgctgggtcatatggtagctctatttttgtttttgttttttttctgagaaacctccaaactgttctccatagtaattgtactaayttacattcccaccaatagtgggttcccttttctccacatcctagccagtatttcttactgcctgtcttttggatataagccatcttaactagggttagatgattcgtcttgtagttttggtttgcatttctctgatgagcaatgatgttgagcactttttcacatgcctgtttgccatttatatgtcttcttttgagcaagatcttttgcccatttttaaattggatgatcagattttttctatagagttgtttgagctccttatatattctagttgttaatcccttgtcagatggatagtttacaaatattttctcctattttatgattgtcttttcaacatcaattgaaatgatcctgtggtttttgtttttaactttatgtgatgaatcacatttattgatttgcatatgttgaatcatcctagcatttctagaataaaactcaattgatcatggtgaattaaatttttaatgtgctgttggatttatccaacacaatatat

SEQ ID NO: 956187 - DNA, 439 bp, Homo sapiens
tattctctaatcctatgtgagtgacaaacattcagacactcgtagcagtgttctggaaacctatatgtaggacaaacactcagaacccagcagcagtgttctggaatcctatttgattggcaaagacacagaacccatcagcagtgttctggaaaaccagcagcagagttctggaatcctatgtgagggagaaatcctcagaatccaccagtgtgttttggaatccattgtgaaggacacacattcagaccctcctagaagtgttctggaatcctatgtgagtgacaaactttgagacccttgtagaagtgttcaggaatcatatgtgagtggcaaacactaagaaccgagmagaagtgttccggaatcatatttgattgacaaacacacagaaccccgcagcagtgttctggaatcctttgtgaaggaaaaaccttca

SEQ ID NO: 956188 - DNA, 436 bp, Homo sapiens
aacctagcagcaatgttctagaatcctttgtgagggacaaacagaaaccaaccgaagtgttctagaatcctttgtgaaggacaaacatgcagaacctcgtagcagtgttctggaattctatgtgagggacaaacactcagtatccagccacagtgtactggaatcctatctgagagcaaacattccgaacctcgtcacagtgttctggaatcctatgtgagggacaaacaccaagaagtctgcagcagtgccctggaattctttgtgtgggaccaaaaaacataacccagttgcagtgttctaaaatcctttgtgaggtaaaaacattcagatcctcgtagcagtgttctgggatcctatctgagggacaamtactcagaatccagccactgtgtactggaataatatattagtgcaaacattcagaacctcatag

SEQ ID NO: 956189 - DNA, 754 bp, Homo sapiens
ttctggaattctatgtgagggacaaacactcagaagccagcagcagtgttctagaatactatgtgtgttataaacactcagaacccaccagcagtgttctggaatcctatatgagggacacaccctcagaacccagcagcagtattctagaatcctttgtgagggacaagcactcagaacccagcagcagcgttctggaatcctttgtgagaaagaaacactcaaaacccagcagcagttttctagaatcctttttgagggactaacattcagaacctcctagcagtgctctggaatcatatgtgagggacaaacattctgaatccagcatcagtgttctggaatcccatgtgagggacaagtgctcagaacccagcagcagtgttctggaatcctatgtgaggtacaacagtcagaacccagcagctgtgctctggaatcctatgtgagggacaaacactcaaaacccagcagcagggttctggtatcccatgtgcgggacaaacactcagaatccagcagtagtgttctggaatcctttgtgatagacaaacattcagactctcgtaggtgtgttctggactcgtatgtgagggacaaaccctcagaaaccagcagcagtgttctggaatcctatgtgagtgaaaaacaatcagaacccagcagcagtgttctagtttcctttatgaggaacaaaatttcagaccctcgaagaagtgttctggaatcrtatgtgagggagaaacactcagat

SEQ ID NO: 956190 - DNA, 719 bp, Homo sapiens
tgaggataaacaaacaaagccagcagcagtgttctggaatcgtttgtgagggaaaaacattcagatccccgtagyagtgttctggaatcctatgtgagggacaaactctcaaaacccagcaacagtgttctggaatcctatgtgaggaataaaagcacagaacacagcagcagtgttcttcaatcctatgtgagtgacaaatattcaaaacttaatagcagtgttctggaatcttatgtaaaagacaagcactcaaagcacagccactgtgttctggaatcttatctgagggacaaacattcagacactcgtcgaagtgttctggaatcctatgtgagggacaaacattctgaatccagcagcaatgctctgagtcctttttgagggacaaacaaacagaacccaagagcagtgttctggaatcctttctgagagaaaaacataaagaccctcgtaacagtgttatcgaatcctttttgagggacagacactcagaacccagaggcagtgttttggaatgccgtgtgagtgacaaagattcataacttcgtagcagtgttcacgaatccaatgtgagagacaaacactcaaaacccagcagcagtgcccaggaatcatttgggagggacaaacattcagaacccagcagccatgttctggaatcctatgtgaggggcaaacactcagatccctgcagccgtgttctggatcctatgtga

SEQ ID NO: 956191 - DNA, 718 bp, Homo sapiens
ggaatcctttgtgaggataaacaaacaaagccagcagcagtgttctggaatcgtttgtgagggaaaaacattcagatccccgtagtagtgttctggaatcctatgtgagggacaaactctcaaaacccagcaacagtgttctggaatcctatgtgaggaataaaagcacagaacacagcagcagtgttcttcaatcctatgtgagtgacaaatattcaaaacttaatagcagtgttctggaatcttatgtaaaagacaagcactcaaagcacagccactgtgttctggaatcttatctgagggacaaacattcagacactcgtcgaagtgttctggaatcctatgtgagggacaaacattctgaatccagcagcaatgctctgagtcctttttgagggacaaacaaacagaacccaagagcagtgttctggaatcctttctgagagaaaaacataaagaccctcgtaacagtgttatcgaatcctttttgagggacagacactcagaacccagaggcagtgttttggaatgccgtgtgagtgacaaagattcataacttcgtagcagtgttcacgaatccaatgtgagagacaaacactyaaaacccagcagcagtgcccaggaatcatttgggagggacaaacattcagaacccagcagccatgttctggaatcctatgtgaggggcaaacactcagatccctgcagccgtgttctg

SEQ ID NO: 956192 - DNA, 589 bp, Homo sapiens
agaacaaacactcacaacccagcagccgtgttcttcaatcctgtttgagggacaaacactcagaacmcactcactgtgtacaggaatcctatctgtgggcctaacattcagaccctcgtagcagtgttctggaatcctatgtgagggagaaactctaaaaaaccaacagcagtgctctggaatcctttatgagggaaaaacattcagacctttctagcagtgttctggaatcctatgtgagggaaatattttcagagcctcgtagcagtgttctgtaatcatatatgagtgacaaacactcagaaaccagcagcagtgttctggaatcccttgagagggaaaaacatttacaccttcataacagtgttctggaatccttactgtgggaaaaatattcagaccctcgtaacagtgttctggaatcctatatgagggacaaacactcaaaaaccagcagcagtgttctggaatcctatgtgagggaaaaacactcagaacccaactgcagtgttctggagtcctgtgggagtgacaaactttcagaaattcgtagcagtattctggaatcttatgtgagggacaaacacac

SEQ ID NO: 956193 - DNA, 564 bp, Homo sapiens
tttctgagtgtttgatcgtcgcataggattccagaacactgacacgagggtccgaatgtttgtccctcacataggtttccggaacatagctgctgggttctgagtgattgtccctcaccttggattccagaaaactgctgcagggttctgagtgtttgtccctcacataggaatccagaacactgctgctgggttctctgtgttcgtccctcacataagactccagaagactgctgctaggttctgagggtttgtccctcacgtagaattccagaacaccgcttctgggttctgaggttttgtacctcacttaggattccagaacattgctaagagggtctgaatgtttgaccctcacataacattacagagcagtgctcggagggtctgaatgattgtccctcccgaaggattccggaacattgccgcggggatctgaaagtttgtccctcacataggattccagaaaaaggctccgagggtctgaatgtttgttcttcasaaaggattccagaacacagcttctgggttctgagtgtttgtccctcacataggattccagaa

SEQ ID NO: 956194 - DNA, 683 bp, Homo sapiens
ccctcacatatgactccagaacactgctatgaatttctgaatgtttgtcatgcacaaaggattccagaacactgctgctgggttctcagtgtttgtccctcagataggattccagaacactgcwgctgcgttcttagtgtttgtctctcacataggatttcagaacactgctacgagggtctgaatgtttctccctcacttagcgttacagaatagtgctctgagtgtctgaatgcttgtcactcacaaaagattttagaacactgctgctggtttcggagtgtttgctcctcacatagaattgccgaacaatgctgccgagtcctgggtatttctccctcacataggattccagaacactgctacagttttctgagtgtttgtccttcacataggattccagaacactactacgagagtctgaatgtttttccctcacaaaggattgtaggacactgaacctgggttctgtttgtttgtccctcaaaaaggattacagagcgatgctccagatttcttagggtttgtccctcacataggataccagaacaattctccgaggttctgaatgtttgccctcaagtaggattccagtacacagtctctggattctgagtgtttgtccctcacataggattctagaacacttctacgagattctgattgtttgtccctcacaaagg

SEQ ID NO: 956195 - DNA, 584 bp, Homo sapiens
gattccagaacactgctgctgggtacttagtgtttgtcgctcacataggattccagaacactgctactgatttctgcgtgtttttcctcacatatgattccagaacactgctgcaggtttctgagtgtttgtccctcacttacgattacagaacactgctatgagtgtctgaatgtttgtccctaacaaaggattccagaacaatgcttagaggatatgaatatttgtccgtcacaaatgattccacaacactgctgctgggttcttagtgtttgtccctcacttaggattgcagaacactgctacgaaattctgaatgtttgtccctaagaaaggattccagaacagtgctgctgtgttctgagtgtttgtcactcctgaatgattccagatcactgctgctggtatccgagtgtttgtccctcacataggattacagaacacttctacgagtgttygaatgtttgtccctcagacaggattctggaacacagtggctgggttctgagtgtttgtcccttgcataggattccaaaacactgctgctgggctctgagtgtttgtcactcacataggattccaga

SEQ ID NO: 956196 - DNA, 574 bp, Homo sapiens
actgctgctgtgtttttaatgtttatcaatcacataggattccagaacactactgcagggttctgagtgtctgtccctcacataggaatccagaaaactgctgcaatgttctgagggattgtccctcacgtagaattccagaacacacatgcagggttctgatggcctgtggctcacatacgattctagaatcctgctacgagggtctgaatatctgtccttcacagagcattccaaaacagtgctatgagggtctgaaagcttgtccctcacataggattccagaacactgctgcaggtttctgagcttttgtccctcacattggattccacaacaatgctccgagggtttgaatgattgtccttcacaaaggattccagaaatctgctgctgggttctgcttgtttgtacctcacaaggcaatccagagcactgcttctggtttctgarggtttgtccttcaaataggataccaccacactgctacgacagtctgaatgtttgtccgtgacaaatgaatccagaacactgttgcagggttccgagtgtttgtccctcacgtaggattccaga

SEQ ID NO: 956197 - DNA, 690 bp, Homo sapiens
tgggttctgtttttcccacacaaaggattacagagcactgctgctggttactgagtgtttgtccctcacatgggattccagaacactccttcgagtgtctgaaggtttgtccctcacaaaggattytagaacactgctgctggattctgagtatttgtccctcacatgggattccagaacactgctgctgggttctgaatgtttggccctctcataggattccagaacactggtgagaggttttgaatgttttatcctcacaaaggatttcagaacactgctgctgggttatgtttgtctctcacaaagtattgccgagaaccgctgctagtttctgagtgtttgtccctcacataggattccagaacacttctcctagtgtatgaatgtttgtccgtcacaaaggattcgagaaaactgttgctggtttctgagtgttgatcactgacataggattccagaacacggctgctgggttctgagtttcagtccgtcacatgagattctagaacactgaagccgggttaagaatgtttgtccctcacataggattccagagcactgatacgtggttctcattgtttgtccctcacagaagattccagaacactcctgctggtttctgaaagtttttccatcacataggattccagaacgctgctgctgggttctgttttttcctcacaaata

SEQ ID NO: 956198 - DNA, 570 bp, Homo sapiens
taccgttttctgagtgtttgatcgtcgcataggattccagaacactgacacgagggtccgaatgtttgtccctcacataggtttccggaacatagctgctgggttctgagtgattgtccctcaccttggattccagaaaactgctgcagggttctgagtgtttgtccctcacataggaatccagaacactgctgctgggttctctgtgttcgtccctcacataagactccagaagactgctgctaggttctgagggtttgtccctcacgtagaattccagaacaccgcttctgggttctgaggttttgtacctcacttaggattccagaacattgctaagagggtctgaatgtttgaccctcacataacattacagagcagtgctcggagggtctgaatgattgtccctcccgaaggattccggaacattgccgcggggatctgaaagtttgtccctcacataggattccagaaaaaggctccgagggtctgaatgtttgttcttcasaaaggattccagaacacagcttctgggttctgagtgtttgtccctcacataggattccagaa

SEQ ID NO: 956199 - DNA, 574 bp, Homo sapiens; identical to SEQ ID NO: 956196

SEQ ID NO: 956200 - DNA, 690 bp, Homo sapiens; identical to SEQ ID NO: 956197

SEQ ID NO: 956201 - DNA, 619 bp, Homo sapiens
ctctcagtgtttatccctcacttaggtttccagaacactgcttcaagtgtctgaagttttgtccctaacaaaggattctagagcactgctgctgggttctaattgtttgtccctcaagtgggattccagaacatcgctgctaggttcttagtgtttgtccctcacatgggtttccagaacactgccacgagaatctgaatgtttttccctcacaaaagattccagaacactgctgcttggttctgtttgtttgtccctcacaaaggattccagagcaccgctgctggtttttgagtgtttgtccctcacatagaattccagagcacttctaagagtgcctgaatgtgtgtccctcagataggattccagaacacagtggctgggttctgactgtttctccctcacataggaatccagaacactgctgctgggatctgagtgtttgtccctcacatagggttccagaacactgcttcaaaggtctgaatktttgtccctcacaaaggattctagaacactgctgctggtttctgagtgtttgtcactcacataggattccagaacaccgctgccaggttttgagagtttgttcttcacataggattccagaacactgcag

SEQ ID NO: 956202 - DNA, 592 bp, Homo sapiens
aaactgtgtccctcacataggattctggaacactgctgggttctgagtgcttgtccctcacataggattgcagaacactgctgcgagggtctgaatgtctgtccctcacrtaggattccagaacacagcaacgagggtctaaatgtttgtccctcacataggactacagaacactgctaagaaattctgaatgtttgtccttcacaaagctttccacaacactgctgctgggttctgagagtttaaccatctcataggattccagaacactgctacgaggtcatgaatatttgcccctcgcgtaggattccagaacactgctgcaggattcagagtgtttgtccctcacaaagaattccagaataccgctgctggattctgacagtttgtccctcacataggattcgagaacacggatacgagggtctgaatatctgccctgacataggattccagaacactgctgctgcgttctcagtttttgtacctaacgtaggattccagaacactgctgctgggttctgagtgtttgtccctcacataggattacagaacactgctacgaggttctgaatgtttatccctcacaaaa

SEQ ID NO: 956203 - DNA, 592 bp, Homo sapiens
aaactgtgtccctcacataggattctggaacactgctgggttctgagtgcttgtccctcacataggattgcagaacactgctgcgagggtctgaatgtctgtccctcacgtaggattccagaacacagcaacgagggtctaaatgtttgtccctcacataggactacagaacactgctaagaaattctgaatgtttgtccttcacaaagctttccacaacactgctgctgggttctgagagtttaaccatctcataggattccagaacactgctacgaggtcatgaatatttgcccctcgcgtaggattccagaacactgctgcaggattcagagtgtttgtccctcacaaagaattccagaataccgctgctggattctgacagtttgtccctcacataggattcgagaacacggatacgagggtctgaatatctgccctgacataggattccagaacactgctgctgcrttctcagtttttgtacctaacgtaggattccagaacactgctgctgggttctgagtgtttgtccctcacataggattacagaacactgctacgaggttctgaatgtttatccctcacaaaa

SEQ ID NO: 956204 - DNA, 584 bp, Homo sapiens; identical to SEQ ID NO: 956195

SEQ ID NO: 956205 - DNA, 578 bp, Homo sapiens
taaagtatcacatgtaatctggaagttctcttttcttcttagattctctttgcatatgtctttctttaaaaagtgaagtctctcatctttgtttactggtcataaaaacccaggctctgccacataatgaatgtttgacaaaatatttatcttggaccagaaagattggtgtcacttgggagcttgttagaaattcagaaactcaggttttacctcaggtttcttgaaacaaaatctgcataaaaagatctccagtttattgttgtacacattaaaatttgagaggtactttataactaagcctgaattttttatctgagaaatatacagaacttatactgtatgattaaatcaagcactcaaaaatgtacatgtctatgttcctgttgttaattttgtactttatcattcaaaaaatatcatcaatacactacactggtattgtgaatcttatgctctcttttctcagagatagagaatacaacagaatatwttttgttgtgagttattttataggacattttcagtcgtataagtcagaatcagttctcttcactcattttatcttgagtcaattt

SEQ ID NO: 956206 - DNA, 578 bp, Homo sapiens
taaagtatcacatgtaatctggaagttctcttttcttcttagattctctttgcatatgtctttctttaaaaagtgaagtctctcatctttgtttactggtcataaaaacccaggctctgccacataatgaatgtttgacaaaatatttatcttggaccagaaagattggtgtcacttgggagcttgttagaaattcagaaactcaggttttacctcaggtttcttgaaacaaaatctgcataaaaagatctccagtttattgttgtacacattaaaatttgagaggtactttataactaagcctgaattttttatctgagaaatatacagaacttatactgtatgattaaatcaagcactcaaaaatgtacatgtctatgttcctgttgttaattttgtactttatcattcaaaaaatatcatcaatacactacactggtattgtgaatcttatgctctcttttctcagagatagagaatacaacagaatattttttgttgtgagttattttataggacawtttcagtcgtataagtcagaatcagttctcttcactcattttatcttgagtcaattt

SEQ ID NO: 956207 - DNA, 584 bp, Homo sapiens
tatggttttctatatacaagatcatgtcacctacaaacagcaacattttaatttttttccctcaatttgaatgtcatttttaggggcattttcttgactaattcttctgcaaagtacttcactgctatgttaaaatagaaacattgaaaatggaactatgtagccttaccctggtgtctataaatttgaagaagaaaacagctctttaactttttataaactagtttcaggaggtacagatcttcttttgttgggtccccagggtaatgggatgccctatgaacttgtagtagggaagagtgtgtaactgtgtcacaaggctgctgggtatgcagtggattccaccttcaagtggctttttaccaggggctttggttgttgtgactcccatctaatgtctgggtgggctggatttccttcaggagttttatttatagggcagaaactaggacagatttctgcagttgggtgtgtatacggtggaccttatatcgggatgtggtaartgtggctaccactgagtatttggaagttttttttccacatcactgtgtgggttcctgtgttggcaggaattgctgtga

SEQ ID NO: 956208 - DNA, 744 bp, Homo sapiens
gaggaagcgggaacgcaggtggcgatggtggtggagcagccgctggcctggccctgcctcttgctcctgctgccctcggcctgggagcacatggcccctcccgcctctgtggcagcctgaatgcccaggrcctgtggctggccagcttgagccgttaggatggagttgagctgcaaggaacagaaccggcctccccgcagtagtggttaagatcatctgtgagtttatcctactgagctgttaggtcccaagagagccaggccacagttgccagggctggccctgctctgtgaaggccccaagtctctaggattttctaccatgtcactctgctgtgtgtggcctccattcccaaagtcacctcatgatccaggagggctgctacagccctcacatcacgtcccaggctgtagaatggaggaagtagaagggaaggggcaaaaggtatgtgccttctatcttttaaggaaggttccagaagccaccatattgaatacttacagttatatctcattggccacaacttagtctcatgctcacacctcaccacaagaccacctgggaagcgtaatctctactctgggtggccatataccctgtcgccacttccagccctgggccgctggggaaggcagcatgggcgagaagacaggaggggccacttctgccgcagcgccccggcccaatggagcagccggctcacctgcttgttcaagcagcccactcgagccttgccaaagtgct

SEQ ID NO: 956209 - DNA, 585 bp, Homo sapiens
cagtgtggcaattcctcaaggatctagaactagaaataccatttcacccagccatcctattactgggcatacacccaaaggattgtaaatcatgctgctataaagacacatgcacacgtatgtttattgcggcactattcacaatagcaaagacttggagccaacctaaatgtccatcaatgatagactggattaagaaaatgtggcacatatacaccatggaatactatgcagccataaaaaggatgagttcatgtcctttgtaaggacatggatgaagctagaaaccatcattctgagaaaactattgcaaggacagaaaactaaacaccacatgttctcactcataggtgggaattgaacaatgagaacatttggacacagggtggggaacatcacacgctggggcctgtcatggagtggggtgagggggggatagcattaggagatatatctaatgtaaakgacgagttaatgggtgcagcacaccaacatgacacatatatacatatgtaacaaaccggcacattgtgcacatgtaccctagaacttaaagtatagtaatagaaaaactatgatactctc

SEQ ID NO: 956210 - DNA, 637 bp, Homo sapiens
tactaaaaatacaaaaattagctgggtatggtggtgtgtaatcccagctattgaggaggctgaggcacgagaatcgcttggacccaggaggcagaggttgcagtgagccaagatcgtgccaytgcactctagcctgggcaacagggcaagcctctgtctcaaaaaaaaaaaaaaaaaaaaaaagaagaagaagaagaaagaaaacaaagaagaaagaaagaaagaaaaagaaagaaagaaagaaaattaaaagaaggaaatgccataaagcatctggagcaaagaacatccaaagaagagcactgatcactgcagcagacagccattcagaatgggcagagagcagagctggcaggaagagaggacaaaaggaagaccaggaagggaagccaggaaaagagattttgcattgtgttattatttcaatcagaagacttaggaacattatttaattatcaaatttgtgtgtctgatgatcctttacaacactgcagcatcaaataaagtgttatcagatttctttcttttttttttttttgagactgggtctgattctgtagcccaggctggagtgcaggggtataataatagctcactgcagcttcaaactcctgagtttgtttgtttgtttgtctgt

SEQ ID NO: 956211 - DNA, 678 bp, Homo sapiens
caatctcagcttactgcaacctcaccttgcgggttcaagcgattctcctgccttagcctcccgagtagctgggattacaggcacacaccaccgcgcccagctaattttgtatttttagcagasatggggtttctccatgttggccagactggtatcgaactcccgacctcaggtgatccgcccgccttggcctcccaaagtgctgggattataggcgtgagccatcgcgcctagccaattattattttttaagagactggggtctcactatatttaccaggatggtctcaaactcctggcctcaagagatccttccgcctcagcctcccaaagtgctgggattacaagcatgagccattacgccaggtctttatctaggtttttctattgtctgtatttcatcatccaaccatcccctaccagagtgtgcctggccaattttcttcccttcttccaccacacgtttctttttgtttgtttgtttgtttgagacagtgtctcactctgtcacccgggctggagtgcagtggcatgatcttggctcactgcaacctccacctcctaggttcaagcgattctcatgccttggcctccagagtagctgggattataggcatgtgccaccacacctggctaacttttgtattttcagtagagagggggtttccccatgctgtc

SEQ ID NO: 956212 - DNA, 783 bp, Homo sapiens
accctggggcagggcctgggtctagggaggaggccagagggagagataggaattcaaattggtggtgctggtggtgggggaaggcgaggccctgggagtggccagcactcagggcttgggcaacagggtgctctgcagagccactgggtggggggaacagcaggggcaggcacagacctgctgagtcagagacgccgcagggactccagggggaggtgtttggcagatggctgtgggctggggcccggcaaaagcaccacagggtggtgggtcaaggagtagaattgggtgctgaggccctagccaggaccaggggatgtaagaaggaggaggccttggagagggcagggggcaacgttttccagaaggagggagtggtcagtctccacaaggtcaggcgagataagcgctactgcacccagcctccctcatgactgtgaccagaggctgttgccccagctcaggggcttcctagcatcttggccatgagggatatgtgtagcccccgccccaccccccgccatctgaggccctgctgggccctggtgatggaggaaggctccccagagaaaagtaggaagatagagtttgcaaattccatgccattaggccttggtccactcccaccctctttttattattattattattattattattattattattttattatttgttttttttttttgagayggagtttcgctcttgttgcccaggctgcagtgcaatgatgtgatctcagctcactgcaacctctgcctcccaggttcgagagattct

SEQ ID NO: 956213 - DNA, 682 bp, Homo sapiens
acctgcctggctactgtccgctccgtgagccccatcgcacgctgaayttcctggctgaccaccgcctcttccctgccctgcaaagcgtggtcagccaggctgtggataagctccgtggcgcccactgccgcgacggccgtcctctgttccccaccagcttggagcccacctcagatctgccgcctctgggctctgagccagctaaacccaccaatggcgggcagccctatgcttccccccgccccacagtctccagccccaagatgcttcagagaaaacgcaaggacagaggaggctccccctccatgtctagtgcccaggtggccaccagattcaaactcaaggtgacacccacggagaagcccaatgtccccagcccctcactccactccagggaggaggcacctgactcagatcccaaattacaaaacccacctgtttccctgagctccagccagagggcccagccctggcagggcctgcacctcaccctgcccacgccagggattgtggtggaggtggcctgcagccagggccacctcaggggccctgtcacacctccactttcctccccctacccccgctcttcctgctaccttctccctgagctctctccagttgcctcttcatctcccgcctcactgtgtccagaggtgacctcctcaaaagtaggaccgggcat

SEQ ID NO: 956214 - DNA, 678 bp, Homo sapiens; identical to SEQ ID NO: 956211

SEQ ID NO: 956215 - DNA, 783 bp, Homo sapiens; identical to SEQ ID NO: 956212

SEQ ID NO: 956216 - DNA, 614 bp, Homo sapiens
ggttgctgagtttcctgtgggctgacggtggtggtggcggcgggagtggcgatggtggcggcgagagcctccgggagccaggggtggaggtgtctggtgaggagggccgctcctcggatttggaggccttggggaggctccgggtgctgtcaagcgagcgggaacacgcaggtgcgaagcaatcaagggagctggcgtgcgtggagagcaggccgtctggggagctggagcacgcagaggacaccaggcctagcgagcgggagcgcacaccgacttcagcactcaggctgtctagagatccgagttggcaggcgggtttgggggcgtggcaagagccgctggaggtctggggcagcggttcttccaaggaatgcacagcttgggggtccggtgatcccgacaaagccgggtgcccgcggaagtgcgccaggatgtacttgaggaagagctggcgctccacctccagcgccgcctgcagayagcggatgcgcgccgcctgctcgccgtcagtctgccagcgaagctgcgccaacacttcctgcaggcgacagcggcactgcgccgcggaaacctcggacgcccccgggcggctacagtggccgcggttcaccagc

SEQ ID NO: 956217 - DNA, 556 bp, Homo sapiens
tccagggttgtgtttcgcactctggatgctagttacaagggcataatcatttgtgaagaactcttggagctgtgcacacttcttacgtaggctgtccttgaattcaatacgtgcacagaaaccttcagaagggaagcagagatcaacttcatcctgatcagcaagtagactcagtccaggcagcaacctctcctggacccccaaccaataacaacaacacaggaagcaaaatattggcaggacagctggcaacgcggcaatgtccaggatggagtgcccatcctagaggagggagctcacacaagccagccaggagcccacaggaaacagagagactactgtaaatccttattaagagcagactcatctctgctatctaaaagataaaaacctgataatgtttttaagttgtcctaaggtccaattgacttttttttttttttttttsagacagagttttcctcttgttgcccaggctagagtgccatggtgcaatctcggctcaccgcaacctccgcctcccgggttcaagcgactgtcctgcctcagcctcccg

SEQ ID NO: 956218 - DNA, 638 bp, Homo sapiens
tccatttgggaactattatatgaagctgttataaacctttgtgtacaaggctttgtgtgaatatatatgttttaatatttttggaggatgaataatagaagtggagyggcacgttcatataggtgaatgattattattttaaaaagtgtcaagttttttcttagaagtaggtatacatttcatattcctaccagaagtgcatgagaatttaggttgctgcacagacttggcaacacttgggatgtttattttattttatctaattaattaatttattttttagatggagtctccatctgttgcccaggctggagtgcagtggtgcaatctcagctcactgcaacctccgcctcctgggttcaagcgattcttttgcctcagcaccccgagtagctgggactacaggtgcacatcaccatgcctggctaatttttgtatttacagtagagacggggtgtcaccatattggccaggctggtctcgaactcctgacctcaggtgatccacctgcctcggcctcccaaattatttttttaatactagccattctaatggatattttagggctaccacattgtggattttatttgcatttttctaaagactcatgatgctaaacatattttaatgtggttatt

SEQ ID NO: 956219 - DNA, 726 bp, Homo sapiens
ttttttcaatttacagatgttaaatctatagttttaaaaagcaaacttatttatcaaggtgaggtcttcagaaagtgcctatatgcacaatacaggaaaacatttgaaatcaaaatgattttaatgccctgctgtgtacaatcgccaaaggactcaaaaaaagagagtgtatgctgatttttagcattttattcacaataacttttatactatttttgactttgcacaccagcttcagaaccttttggttgcaaaatacataagaattaatttcagaaattgagggcacaaaatccatctcctacgcagacttatcagagtagcactttagttttccattcaagtcctaaaactctcctttataattggttttattcaaagtcctggtaaaattgcagattgcatctgcctctgttttgcacattctagtcaattactttctttctttatcatttttcagtagtgtatatatgacctctatttcctttctcatttcagcttttattcttcttcccattttcttaatgtctatagaaacagccaggtagaagtttattgcatacattccctctgtcttccatcgacttatctcaacgcttttttttttctatctcctctttgtattcactgtaacatctttcctgatttttttgtttgtttgttttttgagacggagtctcrctctgtcgcccagtctggagtgcagtggcaccatctcggcttact

SEQ ID NO: 956220 - DNA, 741 bp, Homo sapiens
tttagatttttaattcagaggtctttgattttgggggtggggmacattttggaggacaaggcctgaaggaagttgtttttatagacagcaggtcctcagagattatggtttagaggaacgggtgaagcaggcctggaagtatgtttggacagccgtttggagggggtgttgcacagaagcttggtcttgtctggatgttgccaggagttcatcactggtttagtcctaaaggtgagaaggagtataataggacgaggaatagaagtttaggctgtggggagattttggggcaccggatagtaccatggggttgttagaagcagcaactgcagtatggaatgattggtgatggcctggatgcggttttgtgtgaattgagggactaaatgaaagacaaaaggcccaaataagagaaggaggaaaacaggtaccaggggactaagagtaggaaggagccaagacgcccagttaaaaagtgcccaggtaggtccagcataattatttgcctggctggcgagttttggggccctaactttaagcttttttatgttgtcatatagcaggctggattgatttagataaaaacaacattcttcatttaaaaatatgcagagttctcctttttcagcagtgagtaggtcaaggccttggtgattttggaggacaactgcgactaaggaaccgacctgggcccgaaggactgataaagtttgtgatatatctgtaatgctagcaggaaag

SEQ ID NO: 956221 - DNA, 584 bp, Homo sapiens
ggcctgggatttcttggacctagcgcatgccctaacrgcagtgagtcacttacatagatgtgtgtaacatgccccagagacctcagtgcatgcctggaaggcatggccttccacttcccagaagctgaaaggttttgggtgctttgtaacgcaggtggaaaatctgtaaaaaactgattttctttctccttcttcatccttagtttatgaacatcctcaatccctatcctactggagcccctttccttgggttacttcacagattatctggtttataatactgattctagaaaagtcgagaactagcacatccaaaatagggtggtctctgaaaatatcagcgagtaaaatcccaccatgtctattgtctcaacacttggttctgaggtctgcatgctatctctgactctctgtagcgttgaattgaactcaacaactttccctccaaaaccagctcttcctcttgacatccctctgacaccattttaccactttcccatggtccaaacccaggattctttgactcattctgtcatttagaatcttatttgggcacctaataggtacaggcacatagaccctgt

SEQ ID NO: 956222 - DNA, 714 bp, Homo sapiens
cctgtttaattattacaagctatgtaacattttggccttccaaaaaggtttgtaaactattccctgttgctttccctaatgtttccctttaatatttctggcaccattctgagtgaatcccaacatttccccgtytttgttttcggtatcatgtctttttgatttcagattgcagatatgtacagccataggattgtcaggtgaggtggtcactgctcttattccggctttgcatcctagaattagcaaataatacaagacaattatgagtacaattagcaacatttgtttccagtctaagagtgaccggtagtgttacctggcatcttagtttggtgagtactgttgctaaggaaccccactgagggtatgttaactccttccagccaagcagttatgtcattagaagctggaaagggagtatttgtttaagtaaaagggctgacaaaaggcagattcagaagatgagcttaatagagtgtagcaggtataggtaataggcaaagtgagagaattaaaaatgagtaaattatttggcttagccttctgcttccttagcataatgtgtgaggcctgtgctgttcctggaagccacattgttgaggctgtgggtccttagggtttttcctaggctggcttgagttttttttctttccatccttggatgaggatacagtctccaggctggtgctggtgtactggaaattctagggg

SEQ ID NO: 956223 - DNA, 644 bp, Homo sapiens
aatggaacagaataggacagggattttcacagtgctttctataaaatgtctgtaatctatagataacataacagattaggtcaggggtcgatctttaactaccaagcccaggtgtggtgcygagcagatttcatttctgccttttagtttttacttcttctttctttggaggcagaaattgggcataagacagtatgaggggtggtctcctcccttattcccctcttttgagaatctcactcatgagtgggagttctcactttcattttcactaccatgtcttcttgcaagacagatcaatagtgattcacatagtacacttgggctgaagcattttggtgaactaaggtagcgatgaagctttttatcatttgaagaagtacaggtagcaaacaagggagcagtaagcaggttcctattactattaaaactcctattataagagttttaaatcctcctagtgctgggaaccattttccaaacatggccccaggatcaaattcatgccacacttgcacgggcacatgtgccagttttgtcctatctctaactatatcttcaactacttgtccttgatcatctacgtgtagacagcaattagtaaggttaaatttcccatagacccctccttcagctgctagcaa

SEQ ID NO: 956224 - DNA, 639 bp, Homo sapiens
agccctaacattccctgactctaaaaatcaccaagttaaaatctattcatgggaataaacaatcctcaaagaagttagaaggtgctgggtatgtgtgagcggggtgtgtgtgtgtgtgtstgtgtgtgcgcgcgcatgcgggcatgtgtttgtgtgtgtttaatccttcaacatttatgtgtgtatgcctgtgcttctcagacgcaagccacatgcaaacatttcccctgcaaagtttggtgcttttaagttatttatgtgcaaaagatgcctgtaggcaaagcagggcaagcatgtttctgtgccagcccagaaatgcgctttgcactctgcaggtgagaagacactgctgccctgcggcctgcaaacaagcaaaccaattgagagcaacacaactccaccaggcaggtactcacacccttggtttcctcattttcctgctagccttgtctccactccccaggccttccctgattcctgcccatctctccaagatagaaaaaggaagacagaaaatgcagcccagtaaccgtttcaaaacagtgacatgatgctagaaaacagtcattaagtccactgcagacttgttcaagtttcccaagtcttgttgggttaaacttccagacccagggccatcat

SEQ ID NO: 956225 - DNA, 615 bp, Homo sapiens
tggccttcagttttcagtggttaaactatgtgtcagcttctatatggtaaattaagtttcttcaagactcacacctgccatatgtaacagctattaattctgggaaaaaagcaaaaaaaaaatacacaaaggcacttgagaatgaatgaaagcaggataattcttgaggggagtgaaaacttgaaagaagagtctcatttgaagtacatttctctttttttgacttttatggaaggacaggccaaaactgccaccaaatcatcagtagaaaactcataacctggccgggtgcggtggctcacacctgtaatcccagcactttgggaggccgaggcgggtggatcacgaggtcaggagatcgagaccatcctggctaacacggtgaaacctgtctcaactaaaaatacaaaaaaaattagccgggcgtggtggcaggcgcctgtagtcccagctacttgggaggcagcagaatggtgtgaacccaggaggcggagcttgcagtgagccgagattgcaccactgyactccagtctgggcgacagagcgagactctgtctcaaaaaaaaaaaaagaaaactcataacctttatggcatgtagacgagaggacaaaatt

SEQ ID NO: 956226 - DNA, 590 bp, Homo sapiens
aggctggtcttgaactcctgacctgaggcgatccacccgccttggcctcccgaagtgctgggattacaggcgtgagccaccgtgcctggccacatktttatgtgtttctcccaccagactttaaaaacagggaaaatatcctattcacatcttggtcacaaccacagtgactggcacatagtaggtgctcaatatacatgtgtggagctggacataggcttcatttcacaagtaaacaaatgtacagatggtatacaagcactggctaagtggtgtgactgagacgatgacctgtaggacatgattatttgctttacaaaaagatttgattaacaagaactgaattaacaaatgactattctcaagacacagctatcacattgtgagagagacaccattatctcaccaataaaatagattaactaaatttggggctgcaatctaattctgaagcctgcatggaatgagatgatgaatatgaggggaggaagagaatagaagagaagaaatatatgggcaggatacagggctttctggcaaccataaatagtgccctcagtaatctgagcttttgaccaagaaaatcaatg

SEQ ID NO: 956227 - DNA, 605 bp, Homo sapiens
tgttgtattagacgatcttccatgaatacctaactggaaattccaagattcagggccatgtgaatctaggctggctgcttaaccaaaacttaatttaatttttttcgtttattttakgaaaaaaaattaacgaaaagatgtttcaagcaaccagtttccaatccacgtcagcaactatgacatttaatgaaacactatgagcatttagcatgagagctctggactcagatgcagggagctttgctagagaagggaggaaaaagcaggcatgatgtggcgggttgtgggggactccaaggctctatttccaacttccatcagagaacttctgttttcacctggttttcaaatttgctttccaaaagggatttggtttaagtaaaggatacagaggtttataaaagtttgaaaacttctacattgcaggatgtgcaggctcttgccagatgggacagtgtatgagactcttccagggtgacgtcttaggcaatttcctgtccaatcacagatggtcacatgctgctttcctgagttaacctattaactcacccttgtttcccaggcctcagtggagctaggcttgtcacgtcttcacagtgactaga

SEQ ID NO: 956228 - DNA, 631 bp, Homo sapiens
agccatctaggacatacccaccaccaacattatgcaggacaggaaaaagttgaaggcattccccctgataacgggaacaaaacaaggatgcccacttttcaccacttctattaaaaatagtactaaagtcctagccagaacagtcagacaagagagagaaatcaagtgcatccaaataggtaaagaggaagtcaaactgtcgctattcactgatgagatgatcacatacctggaaaacacaaaagatgcatctcaaagactcctagatttgataaataaattcagtaaatttcaggatacaaaataaatgtacacaaatcagtagcactgccatacaccaacagcaaccaagctgagaaccaaattaagaatgcaacccattttacaatagccaccaaaaaacaaacaaacaaacaaaaacttagaaatatacctaaccaaggatgttaaagacctctgcaaggaaaactacaaaacactgctgaaataaatcatagaagacacaaacaaatgaaagcataacagaggatccaagatggccgaataggaacagctccggtctacasctcccagcgtgagcgacgcagaagacgggtgatttctgcatttccatctgagctttgaagagagc

SEQ ID NO: 956229 - DNA, 537 bp, Homo sapiens
gctgggaagaataaataaactggaagttaaaatactcaaaaaaaagttcttgtatactgtttacactcattggcatcataagtcttctagagtagtaatttcctgttcattgaattgtgtctagtcaatttactatatataaagcaatgttaggtgtgtttggagtgtatagatgcttcctgagggtagagattcctgtattcctttgtcatggaatagattttttaccccaaagctgcactcatgtgggaagtattagtaataatcttagtatctgtttttatggaatccagtggttctgaatatttgttctagctccattataatttcctggggaactcttaaaatactttaaaatatgaatttccccaatctggaaaggcaaaatcatgagatctggacaggcacctggcartccaaatgtcctcataaactgcagacggtttggtacatataggcagatttgaaacaaacactattccagacaggttttttgttttgttttgttttgtttttttaaaaaggaaagttgaaagt

SEQ ID NO: 956230 - DNA, 751 bp, Homo sapiens
ctggtaaagcataatttctgggtatgtctggggatgtttctggaagagacttgcatttgaatcagtaagctgagtaaggaacatccayccttactcagtgtgcagggagcaccatccacttggctgaaggccaggacagacaaaaaggcttgggagggctcaatttgctcgctctctttctcctggaactgggacatccttcttctcctgcccttgaacatcacaactctaggttctctgacctttggactctgagacttgcaccagcagatccccgtttctcaggcctctggctcctactgaaagttaccccattggccccctggttctcagacctttgtgcctggactgagtcacgctaccagcttccctgcttctcctgtttgcagatggcatattgcagggcttctcaacttttgattacctgagccagttcccctaataacgctcctctcatatctatctatctatctatcatctatctatctatttttatccatctatccctctatatatattatgtacacatctatcatctatctatatcccattggttctgtttctctggaaaatcctgattaatatagacatagacatagacgcagacatagacactgacacagacacagatagacacagacacagacacagacagacacagacacagacatagacacagacacagacctagatgcagacgcagatgcagacaaacgcagacgcagacacagacacagacgcagacagatac

SEQ ID NO: 956231 - DNA, 626 bp, Homo sapiens
  misc_feature 603, 604, 605, 606, 607, 608, 609, 610, 611, 612, 613, 614,615, 616, 617, 618, 619, 620, 621, 622, 623, 624, 625, 626: n = A,T,C or G
agttacctcttcttttaccaataccacactgtcttaattactgtaggtttatagtaagtttcgaggtaagattgtgtcagttctctgattttgtttttctccttcaatatcatgttggctattctgggtcttttgcctctccatataaactctagaatcagtttgtcaatctccacaaaataacttacttggattttaactgggttgcagtgaactatagatcaagttgggaagaatggaccacttgaaaatattgagttttcctattcatgaacatggaatatatctccatttatttagctttctgatttctttcatcagagttttataattctcatcatatatatcatatatagagaaagatttatatctaagtagttcatttttttgagtgctgatgtaaatgatattgtatttttaatttcaaattctgcttgttgctggtactaaagtaaaatttaagcacatcaaaaaccaagacagaaagcttccmaaaaaaaatatcacctacaaataaggagaattaaatggacactgaaataataagcaatatctagaaactgttggggaaaaagaatttgaacctagaattttatataccgnnnnnnnnnnnnnnnnnnnnnnnn

SEQ ID NO: 956232 - DNA, 539 bp, Homo sapiens
cacagggcatgtgataggggtggctcatttcttcagtgccccactgctcagtcctctaggggaagcatgcagatgggcaagtcatggggctccaacaccacggcagtgtctaggattgtttacagatcccgaagtcccagtgggcatgtgttaaactgtgctctttctgctgagctgtctgcaggcagcttgtgttaattagctcaattagaccctctgccttattgcaaggacagagggccttctgtatcctggggtacttgccctagtataccggaaaaattggattacacgtgagcttggagaatgagtgcaatgtttcattgagtggtggaagtagctctcaggagatgggtggggagccagaaaggggatggagtgggaagatggtcttcccctggagtctggccgcgtagtaacygggctctcctccaaccaccattggctgaatttccttcggcgtccacgtcattctgccatcgatggcctgctgacctctgtcagtgtgtttttctgccagtgtgttcctctcaacatcc

SEQ ID NO: 956233 - DNA, 604 bp, Homo sapiens
tctagtcactgtgaagacgtgacaagcctagctccactgaggcctgggaaacaagggtgagttaataggttaactcaggaaagcagcatgtgaccatctgtgattggacaggaaattgcctaagacgtcaccctggaagagtctcatacactgtcccatctggcagagcctgcacatcctgcaatgtagaagttttcaaacttttataaacctctgtatcctttacttaaacaaaatcccttttggaaagcaaatttgaaaaccaggtgaaaacagaagttctctgatggaagttggaaatagagccttggagtcccccacaacccgccacatcatgcctgctttttcctcccttctctagcaaagctccctgcatctgagtccagagctctcatgctaaatgctcatagtgtttcattaaatgtcatagttgctgacgtggattggaaactggttgcttgaaacatcttttcgttaattttttttcmtaaaataaacgaaaaaaattaaattaagttttggttaagcagccagcctagattcacatggccctgaatcttggaatttccagttaggtattcatggaagatcgtctaatacaaca

SEQ ID NO: 956234 - DNA, 557 bp, Homo sapiens
ttcacatacaaaaataatgaacctgtaatatcatatgcaaaaaattaactttaaatggttcatggatttaactgtaaatgtaaacactgaagaaaatatagaaaaagttytttatgacattggttaagcagatagttcataaatgcaaaatcaaagcgttacccaaaaaataaaaaagaagataaattagactttatcaaaataaaaaaaaatgttctctaaaggactttatacagaaagaagtaaatcaaaagtaggctgggcatggtggctcatgcctgtaatcccagcactttgggaagccgaggctggtggatcacctgaggtcaggagtttgagaccagtctggccaacacagtgaaaccccgtctctactaaaaacacaaaattagctgggtgtggtggcacatgcctgtaataccagctacctgggaggctgaggctggagaatcccttgaacccgggaggtggaggttgcagtgggccaagattgcacctctacaccccagcccgggtgatagagtgaggttctgtctcaaaaaaaaaaaaaaaaaaaa

SEQ ID NO: 956235 - DNA, 758 bp, Homo sapiens
ccttggacctgtgtaaggactcctagagctattcctgttttttctgtgacatataaagaaaagtcttgccccgttggcaagcttaacactggggcttgggttagggccctctttagggcctggaaagctgcttctgcttcaggggtccatcttactaaatgggtattggctttttgagtttccttaattagtgtatataatggtctggctatttcgtcttacctgggaatccatattcggcagaaacctgttatgccaaggaaccctcttagttgctttagggttttaggatgagattaagccagtataggctggatacgttcctcactgagggccctggtgcctttggataattttagccctaagtacgtaacctcctgtgagcagagctgagcctttggtttggaaaccttgtagccacaggtagtgaggaaatttaagagtgcttgggtggcttgatggcacaaggtttctgaacgggcagctaaaagtaaatcatccacgtaccgaaggacaagagtgtccaggtatgagaattggctcaagttttgggctaatacctggccaaatagatgggggctatccctgaaccctttcggtaaaacagtccaggtgagttgagatgtggggtttgaaggttcttcaaaggcaaacaagaattgagagtcaggatgtacagggatgcagaaaaagkcatccttaaggcccaggactgtaaaccactctgcttcctctggtatttgagaaagcagagtgta

SEQ ID NO: 956236 - DNA, 712 bp, Homo sapiens
tgtggtcttttcttttattttattttcaagacaagtactccctctgtagctcattctggagtgcagtagcaggatcatagctcactgcagcgtagacctcctgggctcaagtatcctcccttctcagcaagkattacacgcgtgagtcactgctcccggcctggtatttcttaaatagaaaggaaactgatattttccaccattttaagggcaaatttttcttagcttagcttcaattgttttcttttaaaatgtcacattaatatatagagacataggccaggctcagtggctcacgcctgtaatcgtagcactttggaagaccaaagtgggcagattgcttgaacttaggagtttgagaccagcctgggcaacatggcaaaaccccatctctataaaaaatacaaaaaacctagccagttgtggtggcacacgcctgtggtctcagctatttgggaggctgaggtgggaggatggcttgagcccaggaggtggaggttgcaatgagctatgatcaccactgcactccaacctgggtgacagaccaagacctgtctcaaaacacacacagacacaaaacagatataaacttatgttacagcttttgaacaactcgcaaataaaccaaaacagatttataaaaattttcttccagaataataaaattgaaattagtaacgtttcctggactactatcagcattgcatggtac

SEQ ID NO: 956237 - DNA, 654 bp, Homo sapiens
caagctggcattgagtgccttttgcttttccaggcacatagagcaagytgtcagtgtatctaccattctggggtctgaaggatggtggacctctttttacaactacactaggtagtgccccagtggggactctgtgtaggggccctaaccccacatttccccttctgcaatgccctagtagaggttctccttgagggctctgcccctgaggcaaacctctgcctggatatccaggcatttccatatgtcctctgaaatctaggcagaggttcctaagcctcagttcctgccctctgctcccacacagacttaacaccatgcggaaactgccaaggcttgcagcttgcatgctttggaacagcagcctaagtcatgtctgggtcccttttagccatcgccagaactggcgtggctgggacacagggaacagtgtcctgatgttgcacaggaaagaagtgccctgggcccagcctgcaaaaccattcttccctcctacgcctccaggcctttggtgggagggcttgctgtgaaggtctccaaaattcttttgaggtatttcccccattttcttggctattaacatttggttactctttacttatgcaattttccacaactggcttgaatttctccctacaaaatgtgtttttttct

SEQ ID NO: 956238 - DNA, 570 bp, Homo sapiens
cactacaaggggatatgtatgctctgcttcatcatttcaatggtttagcatattaatcttgaaaatcccattatcgcctgattattgcaaattagaggaagcttttaaataatacctgatgtgttcagttgctattagaaagtgtgttgtatgcacacaaaatatgcatattttgttttattttttgacaatgtgaaaatacactgtattcaatatttaagacaataataacatcttcctttcctattttctaggcacgtaaagccgtaatctcttatcttttctaagatggtggtatcagaatgcattaccctccttctgaaaagtcatgatatcctaaaactgcatgaatacactttagaaaaacgctgcagttctcgatagctgcttgccttgtgtctagaatgtaacagtatgctgcctgtttacctcaggccaaagttgtcattttcactatctgggccactacatttcctctggctagaggcctgtcttgtatgtactagggacttctgttaaygctggtgtgtgcagttactctacactgaattggatttttgtcatctattt

SEQ ID NO: 956239 - DNA, 671 bp, Homo sapiens
gaggagcacattggcagaggaacacacaagcggctagacgttgagtggaactcaccagcaggcaccagcaggccactgacgggcaaaacaacrcagagtttggctggggcagttggaggagcgctcggcccccaagcggcccaacttatggggaaaatcatctcccttatggctcccccatctgctgagagcttcttccactcaataaaaccttgcactcattctccaagcccacgtgtgatctgattcttccactacaccaaagcaagcaccccaggatacagaaagccctctgtctttgccacaaggtagagggtgtaattaagctagttaacacaagctgcctttggatggctacactaaaagagcaccctgtaacacatgcctactggggcttcaaaagctgtaaacattcacccctagacactgccctggtgttggagccccacagcctgcccgtatgtatgctcccttagaggcctgagcagcagggcactgaagaaacgagccacttccccatcgtacaccctgcgagggggacaaaggaacttttcccatttcacctcctctgtcagtaccaagctggtctgtatgaggacggcagtctttgaaaaacaacatattggccaggcgtggtggctcacacctgtaatcccagcacttcgggaggt

SEQ ID NO: 956240 - DNA, 533 bp, Homo sapiens
aaaccaggaatagcgcatgacttcctgcaagatggggtctctatagttcatcctgaccctggcagaaaatccgcatatcttggaggccctggaatttgagggatccactcagaggctgccaaactggccttggcagccacaaacaggaatgtcataccagagacatgggaggcagggacggccttccctttttggagctgatcataattccaaaagacacaatcctgaatgttgaaatcctgaaagttcaaaatcccaaaaattaggccaggcgcagtggctcacgcctgtaaccccagcactttgggaggctgaggcagatgtatcatttgaggtcaggaatttgagtccagcccgatcaacttggtgaaatcctgcctctaccaaaaaatacaaaaattagccaggcatggtggygcgcacctgtaatcccagcttctcaggaggctgaggtaggagaatcgcttgaacctgggaggtggaggttgtagtgagcagagatcgggccactgcactccagcctgggtaacaga

SEQ ID NO: 956241 - DNA, 617 bp, Homo sapiens
tttgaggtcaggaatttgagtccagcccgatcaacttggtgaaatcctgcctctaccaaaaaatacaaaaattagccaggcatggtggcgcgcacctgtaatcccagcttctcaggaggctgaggtaggagaatcgcttgaacctgggaggtggaggttgtagtgagcagagatcgggccactgcactccagcctgggtaacagaacaaagctctgtctcaaaaaaaaaaaaaaaatcctgaaaatataattctggaaaaaataatgaaaacattcattaaaacatatttatttacatttcaaaggggatttatattggaaacatataaaaacacaacaggacactttatagtgtacattacacaataaaataggcagtgataacatacatatttttgcacgcataaacactcaggtaatgacggttgcatgggtataagagttatgagcagatgaaccatgttcataaagaaataggtcaaaaagggcaagatgtaaatccatgrcaccgtggttgttacttgtgtgcacccagctttataactggtcatctgaaacaacagcatgagcaaccaaagtctctggatgagtttgatcaaaaacttcaatggatcatc

SEQ ID NO: 956242 - DNA, 528 bp, Homo sapiens
aagtaatgtctaagttttttcctccctggaaactccaactcaaattcgcagtcctgatttcactataaaatgtcctccagggactttttatcattatcttaaagatacactctacagactattcattgttttgcacattcatccggtctaaatgataatggcgctgtaaaaaagataaaggaagggaaaaggatatcctcagcagaaaccaaaaagctcagaacaataacaacaagttcaaatgtaaccaagtggcttcctttgattactttcaggtggttttgccaccacgacaccagataatcaacaacttcccagagttagtgggatgtgtaagtatttcttgagtgcctaccatgggataagtactagagtataacaacagtgaacaagctagatatggtcactgccckcacagggcttatagtctggtgacagacaacaggaaacaaaaaacaaacaagcaaatacacaaataagaacttagaaactaattgtacaagttttacctgggtgcggtggctcaca

SEQ ID NO: 956243 - DNA, 613 bp, Homo sapiens
aagagctaaatccattaaatcaggtcttgagtgatctaattttgtcagcctggaaaacccctactattactggccaagagtgtccagaaatgattcatatggctagttaacccaaaggcyttttaagggcaaattaacaaatttcaaagcaataaacaaaaagaaaacaagaatcctcaggaataatgtcacttccaagctaccagtggcccagcaaatctacaaagttcttaaaggcagtgtttcccaaacttgccttaccgtaagaatcacccagtgcatttgttaatagatttctgggccctcctccagacaatagcccaagaatctctagaggtggagctctgtatttttaacaagcatcagaaattattcttaaggtccagcacctttgggaaactaaacggtctgagaggcagtatcacagagttaaaagcacattaacttcgaaataagactgatgggttacaaatctcacttgtggccagacgcagtggctcacacctgtaatcctagcactttgggaggccaaagcgggtggatcacctgagctcaggagttcgagaccagcctggccaacatggtgaaaccccgtctctactaaaaaatacaa

SEQ ID NO: 956244 - DNA, 627 bp, Homo sapiens
ggccttcaaccactttctgagggaagagggagagagggagagagaaagctggggcctcagaggacaatggggagggtgctgggagggaagcrggggcaaaaggaaagagatggaactgccaaagtgccatctgcaaggtgaagggagcatgggagggcttaggccagcaggagtgaaggggaaggacgatgccacagaagacacacaggacagcctagtgccaccacctctaggtgcgcctcttgaagcacagaataggatctgagtcctgttgttgaagcttggccttaccgctttccaactgtgagaactcaggcaagctgtgtaatctttataggcctcggttttcacacctgtgaagtcggagggataatgccacttacctccacaggaggcttttgctggttaaaggagaaaagtcctggcacatactagatgctcagtaatcaacactgccttccttccctctcctagtgttgaaggagagcccagcgacttttaaaccttcccatgttatattacttcctatacaggaaaaattgccaagagctgaacagacacaaggtgcatccctagctgtcaccccaaatgctcctcccccgacagggtaggactcatcccagaggt

SEQ ID NO: 956245 - DNA, 559 bp, Homo sapiens
gttttgttttttgagacagagtctcrctctgtcaccagggtggagtgcaatggcgcgatctcggctcactgcaacctccacctaccgggttcaagcgattctcctgcctcagcctcctgagtagctgggactacaggcatgggccaccacacccagctaatttttgtatttttagtagagacagggtttctccatgttggccaggatggtcttgatctcctaagcttgtgatctgcctgcctcggcctcccaaagtgttgggattacaggcgtgagccactgcacccggcctctgccaggactttttaaactacaaattctccggtctctcctttgtgtgcatggttgtttttttttttttcttttggagaccgagtcttattccgtcacccaggctggagtgcagtggtgcaatctcggctcactgcaacttccgcctcccaggctcaagcaattctccggcctcagcctctggagtagctgggattacaggcatgtgccaccatgcccggctaatttttgtattttgtaaagactgggtttcaccaggttgcccagg

SEQ ID NO: 956246 - DNA, 778 bp, Homo sapiens
tttcttgggcataaacaggaacatagtatctccactgttccatatatgacttgtttttaacaatatatcctgcagatccttacataaatcgactgcatttgtatatgcttataaatctacttcattctttgcctggtgttatatagtatgggtaccacaatttatttgctccatcccctaatgatagatatttaggttgctttcagtctttgttattacaaacaaagctgcaatgaacagtcttgtacaaagacatctgtgctaatataactgaggggtagatttctagaagagaaattgctgcatttgagatatgtacctcgagtttgctagacgttgtttaggttgttttctgactagctaagattgcatatgaagtggtggaagaattggttgtcaactctccatccctgctccccacattctacttcctatcctttgcaagaatgggatacaatgatggggataactcccccagtggggtgactgaaaatcatttttgatgggctttgggaagcacaaagagaggtttttgttttcagaatgacccaccctcctaatgatgtgggctcaggctgagcactacctgagtccctgagcagagccaaaatgaagagggcctgtgagggccagaggtgtcagttggactcctccacagagcagaaccactagcccattcctgggaaactccacgggctccccaacttctkctcacaaaatgctgcaatcacttgtgttgtggttttaacttttcaaagccttttgcagccgacgtttc

SEQ ID NO: 956247 - DNA, 765 bp, Homo sapiens
agaatgagggaaaggccttttgaagtcacaattacaatgccaatgaagtgacagtactttgcaggggtggggcaaagttctccagaaggctatgtatactctgaatcacagtccaatatatggtaccrtttcccccatagccaggattcatgggtccaggaatcaaggggtggaaatggaagtggcatcactcaccatcactcctagtgaccctagcaaaattttttccttcctgttcccatgacattacattctgctggcctagaggtctttattccagagggaggaatgctgccaccaggagacacagcaacgagtccattaaactggaagttaagactgccacctggccactttgggcttctcttacctctaagtcaacagactaagaagtaagttacagtgttggctggggtgattgacctagactgtcagatgaaatcagtctactactctacattggaggtaaggaagaatatgcatggaatacaagagatccattagggcgtctcttagtattatcacaccctgtgattaaggtcaatgggaaactacaacaacccaatccaggcaggactacaaatgacccagaccctcaggagtgaaggtttgggtcactccactgtgtaaaaaactacaacctgctaaggtgcttgctgaaagcaaagggaatacagaaagggaaatagaagaaggtagtcatcaataccagctacgaccatgtgaccagttgcagaaatgaggactgtaattgtcatgagtata

SEQ ID NO: 956248 - DNA, 565 bp, Homo sapiens
atgccacaacctctcctattaacaggccccagggtcccagctttaccccaacctcagtcatagtcagcagaacagagttgggcaagaaaatgtgaaaggcggaaaaaggggataatgcatgccaaagtctgaaaagctgtattttgggttattcttccttggcctgggtaagaacaccctcatcaggtgagcccagcttggtcaggagttagggtcaacatgttttttcccgtcacctatacccatttcccccccagtttttttttagtatggtaaaatacacataccataaaatgtactatgatttttaagtgtacatttcagcagcgaggtaagtatatccatattgttgtggaacgatcaccaccatccatctcaagaactcccatcgtcttgtgaaactgaaactccatacccattaaacactcactccccatttccccccttcccggtgcccctggcaaccaccattctcctttttgtctctgattttgactactctacgtgccycatatgagtggaatcatacagtacttgtccttctgtgactggcttatttcactgg

SEQ ID NO: 956249 - DNA, 581 bp, Homo sapiens
tctaggcatgtgccaccacgcccagctaattttgtatttttagtagatacagggtttctccgtgttggtcaggctggtctcaaactcccaacctcagatgatccaccctcctgggcctcccaaagtgtttgtttttaaataaataagttgggacatttggagatccaaatagataaaaatacttttggagtcttaccctctacatatacaaataaatcccagatagataatagccttaaatatgcaaagaaaaataataaattttttagaacatagcagaggaaaaatctttataactttgggttagaaaataattcattaaacaagactcaaaaagcactaactctaaagaaaataaattggtaaaaataggctacattgtaactaagacttttgttcataaaagtataccatattcttagtaaaaaatggaagccataaaatgggaataattatttgtaatataaatatccaatgaaagttttatatgtrgaatatataaatatcttttacagataaataagaaaaaggcaatcagtccttcacacaggaggaagtttaaacatgtgaaaagtttttta

SEQ ID NO: 956250 - DNA, 570 bp, Homo sapiens
tttttttttttttttttttttgagacagaacctcactctatcacccgggctggggtgtagaggtgccatcttggctcactgcaacctccacctcccgggttcaagggattctccagcctcagcctcccaggtagctggtattacaggcatgtgccaccacacccagctaattttgtgtttttagtagagacggggtttcactgtgttggccagactggtctcgaactcctgacctcaggtgatccaccagcctcggcttcccaaagtgctgggattacaggcatgagccaccatgcccagcctacttttgatttacttctttctgtataaagtcctttagagaacatttttttttattttgataaagtctaatttatcttcttttttattttttgggtaacgctttgattttgcatttatgaactatctgcttaaccaatgtcataaaraactttttctatattttcttcagtgttttacatttacagttaaatccatgaaccatttaaagttaattttttgcatatgatattacaggttcattatttttgtatgtgaacgtccaactgt

SEQ ID NO: 956251 - DNA, 397 bp, Homo sapiens
actttatgtctttgccttgtcgaagatcagttagctataagtatttgggtttatttctgggttctctattctgttccgttgatctatgtctatgtgcctatttttrtaccagtaccatgctgttttggtgactatggcctccctggtgtgaaacccacttgataatggtggattatcttttcgatatgctgttggattcagttagctagtattttcttaaagatttttccatctgtattcatcaaggatattggtattctttttttttgttttgtcttttcctggttttggtattagggtaataccaacttcatagaatgatagcagaaagatttcgtctttctctgtcttgtagaatagtgtcaacaagattagtaccaattatttttcaaatgtc

SEQ ID NO: 956252 - DNA, 588 bp, Homo sapiens
ggacttacagaataccttatccaccatcatggtattctgtatctcattgcatcctatcaaggaactcacttcatggccaaagaagtgtagaaatgggctcatgatcatgaagttcactggttttaccatgctccctaccatccttaagcagttggcttgattggatcgtgatatggcgtttttaagactacgttattgtgttcattaggtgataactggggcacttgcaagtatgggataaaattctgcagaggatcatatatgctctgaatcagcatctgatgaaacaggaaacatggtgctgtttcactgatagccaggattcaacagtctaggaatcaagaggtggaaatgagagtggccctactccctattactcctgttaacccactagcaaaatgtttgcattctgtttctgtgactttatgctctgctagcctagaggtctttattccagaggaaaaatgcctccaccaagagacacaacaatgattccattgaagtgaaggttaaatkgcaacaaggatgctttgggctcttcctgcctctgagtcaacagaacatggagggtgtttcggtgttgggtga

SEQ ID NO: 956253 - DNA, 642 bp, Homo sapiens
tagcccaggcacataggggagggggagcaaggagcccccactcgcctgtctttcccgacccctatacaggggttgggggcattttccccctaatctcagaagttggaggatagaaaggcttataaaccacagtgaaaggttttgagtccccatttcactcaccgcttctcgaacccccacgttgtgcaccaaaaatgttgcaggactttttttaaattcagtgaaagacaaggttctttgtcttagggccgcgaaaattcaggcttacagacaatttgaatggtaagacagggttttatggggtgagatcctgtgaaaaggaagaaaagggggaaacagggactctcgctagaccacagctccgcctagcgcacttcccgccagcagcttgaatccgagggtccacacaggaagaggaggggccaggctcctccccgctgcaaaagtcccaaaggctccacctcagtgtgcgggttggttgaagtttttccggggaccctctctcaactggctgcctcaacaggaatttgactcttgcttatctcaattagcctgaggtaaaattggtttccttacrtgccattttgattaaagacgccgtttcctagaacctctcagggaggttaagtgacgacttactgt

SEQ ID NO: 956254 - DNA, 454 bp, Homo sapiens
aggaagacatcctctgtctattgctcccacaaaggcaaataggccaacgcttcttctcatctcattgggacattattcctgtttccatccttctcatggttgaaatgtctgtggaatgaatgcataaacgagcaaaagagacgctccctgccccttccagttgaagtcctcagttcagcccagaggtactttgccatcagacaaaagtacttggggttctccaagccgacatgctttttccagtgccttccttcgataattacagttcttgtgctcttagttgtgtgtattcgtgaattattagattttttattgacaacttctataagcacaggcctatgcacagtagacaarataaattaataatttttcacaagactccagggacccttctcatttcagcctcttgaattttcctgtattatctcaagtcctcctgggcctgaaaccttct

SEQ ID NO: 956255 - DNA, 528 bp, Homo sapiens
caggccttcttcccaatccctgaacagtgcgtcagggcctctgcatggccctttccatgcctggactgtcctctcccagatcagctcagcaatggttcctgccacaattctgctcacacatcacctcctcagagacaccgtccctccccatcctctctaacacaccctctgctcacccacaccagcgggccctaacttctctctacttcaaactgtgcttctgttactgttttgcttctattattattattattatttgagatagagttttgctcttgttgccccgactggagtgcaatggcatgatcttggctcactgcaacttccacctcccgagttcaagcgactctcctgcctcagcctcccgagtagctgggattacaggcgtgcgccaccatgcccggctaattttgtatttttcrtagagatggggtttcaccatgttggccaggctggtcttgaactcctgacctcagatgatagctcccaccttggcctcccaaagtgctgggattacaggcatgagcc

SEQ ID NO: 956256 - DNA, 625 bp, Homo sapiens
catttgggagctctttgaggccaatggtgaaaaagcaaatatcccaggataaaaactagaaggaaactatctgagaaacagcattgtgatgtgctcattcatctcacagtgttaaaactttcttttcattcagtagtttggaaacactgttttgatagaatctgtgaagggatatttgaaagctcattgaggccataggtgaaaaagcctatatcccaggataaaaattagaaggaagttatcttacaaaccgctttgagatgtgtccattcatctcacagagttaaaccttttattcagcagtttggagaccatgtttttgtataatctgtgaagggatatctgtgattgcatggaatcctatgctgaaaaaggaaatatctttggatactgactagaaagaagctttctgagaaactgctttgtgatgtgtacattattctcacatagttaaaactttcttgtgattcagcagtttagaaacactgctttgtagaatttgtgaagggatatttgatagctcattgaggccactggtgaaaacttgaacaycccaggataaaaactggaaggaagctatttgagaaacctcttagtgatgtatgcgtacatctcacagagttaa

SEQ ID NO: 956257 - DNA, 718 bp, Homo sapiens
atggaccatatggtgagatcagtgaattccatgagctaggcctactgctacattgcatttggtgtcaaatgatttccttgatcagaagaasgctatgaagaataccatgacagcggatacattattctttaagtccacagatggtcattttggcagaagcattttgtacagcaaacgcaaatacatatccaaagtaattaatataccaagtagaacaaagcactgcaccttccatggtggaagtggttgcatgcaatcaaccttccacaaaataactctctatcacacccagcaattataccatattggggaatcagtgctggtctctactattggcagaaagggcactcagcagtggaaagattggccttggtaagcggaaatccacattgtatttcatgcatagcctccatccctgccaccacaggtactttttgttcatgagcacattgggcatgacaggactggctagggaaacaggctcactggtgtccacagaatgagttctcctaatcacttaattattaacatccctctctgctgaaataactttttggtgaacattgacatggggcaaaaataacttcatgttctttacccatgcagagagatctatccacatactttacctcccatactcagacttccttatcatcaattttccaattgtatttcctccaagccaaacctttgaccacagcctattgatataaacgca

SEQ ID NO: 956258 - DNA, 741 bp, Homo sapiens
cttgttcttgcattgtcatgaagaaatactcaaggctgggtaatttatgaagaaagtgatttattttgactcgcaattctrcaggctgtacaggaagcatggtgccagcaactgcttctcgtaaggccctcaggaagcttccaatcataacagaaggcaaagggggaggaggcacatgatgctgtgagagcaggagcaagaaagcaaaagaggggaggtcccagacttttaaacaaccagatctcttgtgaactgagtaagagctcacttttcaccaaggagatggtgctaaattattcatgaggaatccaccctcatgatccagtcacctcccaccagacctcacctccaacacaaggacgcacattgcaacatgagatttggaggggacagacatcccaatcgtatcatttcatccacctacctcccaaatctcatgtccttctcgccatttcaaaatacaatcatgccttttcaatagttcccccaacgtattaactcattccagcattaactccaaagtcccaagtcgttagtctcaactggagatgaatgccttccatccaatagcctgtgagattaaaaaacaaaattatttaattccaggatacaatggtgtacaatctaattccaaaagagaaaaattagccaaaagaaaggggcaacaggccccctatacgtctgaaacccaacagggcagtcactaatcttaaagctccaaaatcaactcctttgactcca

SEQ ID NO: 956259 - DNA, 641 bp, Homo sapiens
gcagtagtgttcactggcccatgggtgccccatctgactcccacaagaagtccatgaaagccacattggcacacactcttccacattggtgcactcttccacatgctttcatttattttttcctcttcttgctcttctcttattctttaatccagcaaatccaaattataaaggaaatatatttcctctctagtctcaagtgagaatatttatcaaaatttcagttcccattacaaaataaaataagtcaacaatggacactggaggctgctggaagcgggaggggtaagcattgaaaaactgttaggtaccatgctcactactagggtgacatgatcatccgtattccaaacctagtatcgtgtaatatacccacataacgaacctgcacatgtacttcctgaatctaaaataaaagttaaaattatttaaagtatcagtagacaatatgacttatcctatagactcttttgtttaacgaagcctaaagctattgtataaagcccgtagctaactataagccaaacttaaatgaataaaataagcacaacatttagctcttatatctatcaatcatctayctatcaatcaatctttctatcatctgtcaatcatccattgagctaggcattcatgaggct

SEQ ID NO: 956260 - DNA, 611 bp, Homo sapiens
ctgccaactcctggcaaggacagtaactcaggacctgccactggcctatcaatggtttttttaaaattatggacaactggtgtgtccaaataataagacttttcaaatgaggataagaaaggtgcactccagacctaatctgactcttttgatctatgttttatgaaaaagtgcaaaccaattgagcaaatttgctttccagaggaaagaaacatttgtgaggacctactgtgtgctgacactgttgggcactccattgttatcctgttttttcttcacaacagtcaggtgtaacaacattatgctcattttacagatgaaaaaatgttaacgcagtttacttatttgcatcatgccacgcataaatatcaagtactgaagctaggaatcaaactttttttttttttaaactgcaaggtcaatattctttgggccacactatacatctcatttaaaattatttccagccgggtgagatgggtcatgcctgtaatcctggtacttkgggagcctgagatggtggattactagagcccaggagttcagaccagcctgagcaacacggcaaaaccctgtctctccaaaaaaaaaaaaaaaaaaacaaaaaaaca

SEQ ID NO: 956261 - DNA, 574 bp, Homo sapiens
aaaaactattctaaaattcatatggaaccaaaaatgagccttaatagccagagcaaccctaagcaaaaagaacaaagtcaaagccatcacactatccaacttcaaactatactataaggctacagtaaccaaaacagcatggtactggtacaaaacaggcccatataccaacagaacagcacagagaaccaagaaataaagctgcacacctataaccatctgatctttgacaggttatctgatctttgacagatatttttgtcaagcatctgattcttgacaaaaacaagcatgaggaaaggactccctattcaataaatggtactgggataactggctagctgtatgtagaagaatgaaactagatccataagtttcaccatacacaaaattaattcaagatggattaaagatttagcctaatacctgaaaccataaaaattccagaagaaaccctaggaaaaactaytctagacattggcctaggaataaatttacgactaagaccccaaaaccaagtgtaacaaaaacaagtaaatgggacctaatttaaaaaaaagaaaccttttgcata

SEQ ID NO: 956262 - DNA, 599 bp, Homo sapiens
ctattctgttccattggtctgtgtgtctgcttttgtaccagtcccatactgttttggttattgtagccttacagtatagtttgaatactgktagggtgatacctccaactttgttctttttgctgaggattgtcttggctatacaggctcttttttggttccgtatgaattttaaaattgtttttttctaattctgtgatgaatgtcaatggtagtttaatgggaatagcattgaatctataaattactttgggcagcatggccattttcatggatattgattcttcttatccattagcatagaatagttttcatttgtttgtgtccttcctccctggctcccttaagaagagttttgtagttctccttgaagaggtccctcacatccctgttaccccagctgttaactctttttattctctttgcagcaactgtgaatgggaattcattcatgatttggttctctgcttgcctgctgttagtgtataggagtgcttttgacttctgcacattgattttgtatcatgagactttgctgaagttgtttatcagcttaagaagcttttgggctgagatgctggggctttctagatatagaa

SEQ ID NO: 956263 - DNA, 601 bp, Homo sapiens
gtattttgttacagtggcctgaacacactaagacagctttaaaaagacataacttattttcttgaaccaaatactgttagcaggaatctgttcagacaccatgacagcggttaagcagcagctatggtctaactcagaattcccttgctgaatctctcatttcctacagtaacccacaaaagtattaataaaattaagtattattaaaattgtagatcagaaaacgcatccatacacgtttaatagactctaacaggtagaaagggacaaataaggggaaatggaataaataaccaactgaccgcactgggcagaaatgtaacaaaaaaagtcaatacaaagcaaacacttggtttccttttaagatgcacaaagtaaatctagttcacaaagtagctctaaaaatggctaagaagccaggtgcggtggcttatgcctttaatcccagcattttgggaggactgcttgagctcaggagacagagatcagcctgggcaacatggcgagactttgtctctactatttctttctttttttttttycccctggcaaatcattccttcaacaacctcatctctattaaaaaaacaaacaaacaaac

SEQ ID NO: 956264 - DNA, 520 bp, Homo sapiens
aaatgcagtggtagtccctgcattcgaaacatagagtcttttactgtgtgcctagtctaggaaggcggacatgttgccacatctaggatgatgatggatccatgcaccaatggtgtccatgtttcaccaaggctccatcagcaacttgattttgcctggtctcatgagggaacaggcgtttgttgtgtcatctctgtgagtggcctaggtggtttgtgggtgcctacacccatcagattcccttcattctgagccccttccctccttatggctccttagcatactttcctgggtgcatatgtcctgcaatacctcttgagggagcaccaagaaataccagcccctctcataatcatctttctctttaaagcagttgaggtcagagtagagggggtaggaaggatcaaggggtgtgaaggtcgagagcagtttcatgccaataagcaaggcacaaccaaacacrtttctaatgttatggactgcacaattgtgtccttccaaaattcacctgttgaaaccc

SEQ ID NO: 956265 - DNA, 744 bp, Homo sapiens
gcctgttacagcatggccttttaaagcctataaatgctccttaccattcccccattttacctgtcctgaaaccagacaaggcttacaggttagttcaggatctgagccttatcaaccaaattgttttgcctctccaccccatggtgccaaacccatatactctcctatcctcagtacctccctttataacccattattctgttctagatctaaaacatgctttctttactattcctttgcacccttcatcccagcctctcttcactttcacttagactgaccctgacacccattaggctcagcaaattacctaggctgtactgccgcaaggcttcacagacagcccccattacttcaatcaagcccaaatttcatcctcatctgttacctatctcggcataattctcataaaaacacacgtgctctccctgctgatcatgtccaattaatctcccaaacctcaatcccttacaaaacaacaactcctttccttcctaggcatggttagtgtggtcagaattcttacacaagagccaggaccgcaccctgtagcctttctgtccaaacaacttgacctcactcttttagcctagccctcatgtctgcgtgcagcggctgccactgctttaatacttttagaggcccttaaaatcacaaactgctcaactcattctctgcatttctcataacttycgaaatctattttctttctcatacctgacgcgtatactttctgctccccgg

SEQ ID NO: 956266 - DNA, 628 bp, Homo sapiens
atcccagcactttgagaggcagaggctggtggatcacttaaggtcaagagttcgagaccagcctggccagcatcaaaatcctgtctgtacaaaaawtaccaaatagctactagggaggctaaggcatgagaattgcttgaacctaggaggcagagtttgcagtgagccaagattgcgccactgcactccagcctgggcgacagagtgagactctgccccaaaaaaaaaaaagtaatttagcaatgttgcaagttgtaagatcaatacaaaaatcaatattatttctatatactgtcaatgaaacactggaaattgaaaatcttaaaacataatacagccaaatgtggtggctcatggctataatcctgtactttgggaggctgctgttggaggattgtttgaggctgggagttcaagctcagcctgggaaacatagtgagacccttgtctctaccaaaaagaaaaagaaaaagaaaaaaattataattctgtctctcaacaaaatcataattttttttttaatttggccaggtttggtggcgggcatctgtagtcccagctcctgagctgaggctgaggtaggaggatcgcttgagcccaggagtttgaggctgcagtgagctatgat

SEQ ID NO: 956267 - DNA, 599 bp, Homo sapiens
aagtgtgccacaggtgcagtagcatgtgcctgtagtgtgagctgcttggtaggctgaggcaggaggatcacctgagcccaggagttcaaggctgcgttgcactatgatcacgcctgtgaatagccactgcactttagcctggaaaacatgagagaccccatctcttaaaaaaaaaaaaaaaaagtaaaaaacttagaacactagttcaggaaattcaacatcaataacaaaataaaaacaaaaaatagagaaaaataaatcgataaaataactcatgagatttcccaaaaacaaaagaacatgaatttccaagctgaaagaccaccatatgttaagtacaattgatgaaaataagtgaacactaagacacatcattatgaagtttcagaacactaaggttaaagataaaattcaaatagaaaaaaaatgggaaggtcacaatgaaagaatcaagaattagaatggttttaaacttttcaacagccatactaaagaaggcaaaggagtgacatgtttaacrttctgaagaaaaacaatttacaaattagaattctgtattagtcaggatgggcttggttatactacaataacagacaact

SEQ ID NO: 956268 - DNA, 599 bp, Homo sapiens
aagtgtgccacaggtgcagtagcatgtgcctgtagtgtgagctgcttggtaggctgaggcaggaggatcacctgagcccaggagttcaaggctgcgttgcactatgatcacgcctgtgaatagccactgcactttagcctggaaaacatgagagaccccatctcttaaaaaaaaaaaaaaaaagtaaaaaacttagaacactagttcaggaaattcaacatcaataacaaaataaaaacaaaaaatagagaaaaataaatcgataaaataactcatgagatttcccaaaaacaaaagaacatgaatttccaagctgaaagaccaccatatgttaagtacaattgatgaaaataagtgaacactaagacacatcattatgaagtttcagaacactaaggttaaagataaaattcaaatagaaaaaaaatgggaaggtcacaatgaaagaatcaagaattagaatggttttaaacttttcaacagccatactaaagaaggcaaaggagtgacatgtttaacgttctgaagaaaaacaatttacaaattagaattctgtatyagtcaggatgggcttggttatactacaataacagacaact

SEQ ID NO: 956269 - DNA, 629 bp, Homo sapiens
aatttgccttctcaccccctttcagagttctcttttggttgcttctggcatcatttccaaggtttatagttacatttggtggggacgagcaaggaaacagttctacatcatgttctccagactgaaatctagattttgttttaaatatgactcttacagaaaatatattgctgggttttgctttttaagataattatatatacatatgatttcccatctttgccataattttgatttattttagtactcctttctgtcatcttatttcatgtctcataattttttacccattctcttttatgactttcattaattagagtctgttttctttttctggtttcaagaatgttccatcctccccacaggaggatgacacgatcctgcctattttcctgtgacttgcagcacttccctgtgggttgatgatactttcctacctcagtaatgtcatgcatggcttaagattggcttggcaggcggggcgtggtggctcacgcctgtaatcccagcactttgggaggccgaggcgggcggatcacgaggtcaggagatcaagaccatcctggctaacccggtgaaacccagtctctaycaaaaatacaaaaaaattagcttggcgtggtggcagg

SEQ ID NO: 956270 - DNA, 621 bp, Homo sapiens
tatctcatggccttcagttttcagtggttaaactatgtgtcagcttctatatggtaaattaagtttcttcaagactcacacctgccatatgtaacagctattaattctgggaaaaaagcaaaaaaaaaatacacaaaggcacttgagaatgaatgaaagcaggataattcttgaggggagtgaaaacttgaaagaagagtctcatttgaagtacatttctctttttttgacttttatggaaggacaggccaaaactgccaccaaatcatcagtagaaaactcataacctggccgggtgcggtggctcacacctgtaatcccagcactttgggaggccgaggcgggtggatcacgaggtcaggagatcgagaccatcctggctaacacggtgaaacctgtctcaactaaaaatacaaaaaaaattagccgggcgtggtggcaggcgcctgtagtcccagctacttgggaggcagcagaatggtgtgaacccaggaggcggagcttgcagtgagccgagattgcaccactgyactccagtctgggcgacagagcgagactctgtctcaaaaaaaaaaaaagaaaactcataacctttatggcatgtagacaagaggacaaaat

SEQ ID NO: 956271 - DNA, 623 bp, Homo sapiens
ccatcatcaacgccactgacacacaaagggcccacctaggtgcctgatgactgacccatttttgctactgccagtgcccaaatgccccactcagggcccaacactaccaccaccagttactgcatgactcacctgaggcgcaaggaatggcctgccaagggcatatttctaccacatctggtgactgcacaaaccacctagctaggtgcctgaagaccagtctgcccagcacccgcatcctcagaaaagcctccacaacctaccacagcctaagccactaaggacaccactgatacttattatagccaaagtaatcatatggagaccacattttgttgcccactcaaaatcaaagcccaagaaccttacccaattgaccttatagatacatctacaggaaaaagtctttccctgtgaatgctactcaataaaagtaaaagaagtgacagttacaccagatattaatataaggacacagaaacatgaaagagcaaggaaacrtgacacctccaaaggaacataataattctccagtaactgaccccaaagaaaaggaaatttattaaataactgaataggaattcaaagtattgcttttaaggaaactcagtgcaatacaaaac

SEQ ID NO: 956272 - DNA, 612 bp, Homo sapiens
gcggtctcaggaaacttacaatcatggtggaagaggaagcaaatmcacccttcttcacatggcagcaggaaggagaagtgccaagaaaaaggggggaaagacccttataaaaccatcagatctcatgggaactaactcactatcatgagaacagcatgagggtaacttctcccatggttaaattacctcccaccagatgtctcccacaacatggggacattatatgaactacaattcaaggtgagattgggtggggacacagagccaaaccatattattctgcccctggcccctcccaaattgtatgtcctcacatttcaaaacacaatcatgcccttccaacagtcccctaaagtcttaactcatttcagttaactcagaagtccaagtccaaagtctcatctgagacaaggcaaaccccttccgcgtatgagtctgtaaaatcaaaagcaagttagttacttcctagatacagtgggggtacaggcatattatacctgtttcaaatgggagaaattggccaaaccaaaggggccataggcctcatacaagttcaaaatccagcagggaagccaaatgttaaagctccaaaatcatctcctttgactccat

SEQ ID NO: 956273 - DNA, 612 bp, Homo sapiens
gcggtctcaggaaacttacaatcatggtggaagaggaagcaaatccacccttcttcacatggcagcaggaaggagaagtgccaagaaaaaggggggaaagacccttataaaaccatcagatctcatgrgaactaactcactatcatgagaacagcatgagggtaacttctcccatggttaaattacctcccaccagatgtctcccacaacatggggacattatatgaactacaattcaaggtgagattgggtggggacacagagccaaaccatattattctgcccctggcccctcccaaattgtatgtcctcacatttcaaaacacaatcatgcccttccaacagtcccctaaagtcttaactcatttcagttaactcagaagtccaagtccaaagtctcatctgagacaaggcaaaccccttccgcgtatgagtctgtaaaatcaaaagcaagttagttacttcctagatacagtgggggtacaggcatattatacctgtttcaaatgggagaaattggccaaaccaaaggggccataggcctcatacaagttcaaaatccagcagggaagccaaatgttaaagctccaaaatcatctcctttgactccat

SEQ ID NO: 956274 - DNA, 592 bp, Homo sapiens
gtctttccctctactgctttgaaagacatatactcttttttaatcttcttagtgttttccttagaaattaaaagatcatccttaatttaccaaaacctaatgtagtaaatatctttatcctcctcttgagcaataaaaggaccttcaaacacatttatcttccactcctaaattgcatgctattgttactgtgtattttaacactgtcttttaaaaaaactttctctcacagtataatatactgcagaaattttcacatagaaaaacgctgacccgatgaactttacaaactgaacacatccatgttatcagcactcagatcaagaaagataacattatcagcaccctgaaagctcctcttcagtcagtactatgacctgccaaatggtaaccactatcgtgtcctctaacaacctaacgtagttttgcctgcctttgtaccttataaaaaaggaatcatacaatatgtatttacttgtgcctggcttcttttgctcaacattatgtttgtgaggtttacacagatggttactaccattgtgattttgcttattgctttgattgrcatctagtttgatattaatatggccgc

SEQ ID NO: 956275 - DNA, 616 bp, Homo sapiens
attgttgatatttgcctctatcaattgtggggtgatggtttgccctgcaacctcagttctttgatgggtcaaaaaaaagtcattgattttcagtttgttctacttttttcttgttgtaaagacaggagtgatgacttctagtttctttatatgtcacagctaaaactgctccattcttttaatgtatccacgtcactatattaaaatgagtttcttgtaaagaacatctacttggatcttattttttatccaatctgataatctctgttttttaattagtgtgttaaacgatttgcattttgtaattcttgatttggctgggttctaccattttattgtttgttttctttttctccttccctctttcctgtcttttttggagtttttgaaattttttagtattccatttaagtttatctattggctttttgactaaatctctgtgtatcatttaaataaaaactggttgttctaagaattacaatatacatttctaaccttttgtkttataataataattaacattttatcactttgggtaaaatatagagacttttgaaccttatagcttcctttattcttcaccatttatgttacaattttcacatgtattaat

SEQ ID NO: 956276 - DNA, 616 bp, Homo sapiens
attgttgatatttgcctctatcaattgtggggtgatggtttgccctgcaacctcagttctttgatgggtcaaaaaaaagtcattgattttcagtttgttctacttttttcttgttgtaaagacaggagtgatgacttctagtttctttatatgtcacagctaaaactgctccattcttttaatgtatccacgtcactatattaaaatgagtttcttgtaaagaacatctacttggatcttattttttatccaatctgataatctctgttttttaattagtgtgttaaacgatttgcattttgtaattcttgatttggctgggttctaccattttattgtttgttttctttttctccttccctctttcctgtcttttttggagtttttgaaattttttagtattccatttaagtttatctattggctttttgactaaatctctgtgtatcatttaaataaaaactggttgttctaagaattacaatatacatttctaaccttttgttktataataataattaacattttatcactttgggtaaaatatagagacttttgaaccttatagcttcctttattcttcaccatttatgttacaattttcacatgtattaat

SEQ ID NO: 956277 - DNA, 611 bp, Homo sapiens
attgttagacagctcagtggggcatcagtgtgactttttttttttttgagacggaatctctctctgtcgcccaggctggggtgcagtggcgcgatctcggctcactgcaagctccacctcccgggttcacgccattctcctgcctcagcctcctgagtagctgggaatacaggtgcccgccaccaccccagctaatttttttgtatttttagtagagacggggtttcaccgtgttagccaggatggtctcgatctcctgacctcgtgatctgcccacctcggcctcccaaagtgctgggattacaggtgtgagccaccacggctggctgcatcagtgtgatcttttgcacccacacccgagttcttgtccggcatcccggaggaatgaggttgcaggaacaaactgaagggtggtgaaagcggaggattttattgccgatgtgaaagaggctctcagtgggaaggggagctggagaggagatggagcrggaaggtcatcttcccccagagtccagttgttcctgactggactcctttctgaaaaaatgccatcaagctgtcccccatgaagccaagctgcttctctcccatgtcgaactgcagtctccgac

SEQ ID NO: 956278 - DNA, 611 bp, Homo sapiens
attgttagacagctcagtggggcatcagtgtgactttttttttttttgagacggaatctctctctgtcgcccaggctggggtgcagtggcgcgatctcggctcactgcaagctccacctcccgggttcacgccattctcctgcctcagcctcctgagtagctgggaatacaggtgcccgccaccaccccagctaatttttttgtatttttagtagagacggggtttcaccgtgttagccaggatggtctcgatctcctgacctcgtgatctgcccacctcggcctcccaaagtgctgggattacaggtgtgagccaccacggctggctgcatcagtgtgatcttttgcacccacacccgagttcttgtccggcatcccggaggaatgaggttgcaggaacaaactgaagggtggtgaaagcggaggattttattgccgatgtgaaagaggctctcagtgggaaggggagctggagaggagatggagcaggaaggtcatcttcccccagagtccagttgttcctgrctggactcctttctgaaaaaatgccatcaagctgtcccccatgaagccaagctgcttctctcccatgtcgaactgcagtctccgac

SEQ ID NO: 956279 - DNA, 576 bp, Homo sapiens
tatcttgacatatatatgaatgtatggaatgtatatatatacatatgggggtgtgttgtgtgtgtatatatatatttacatacataatttataccataaattatattgatatctcttccaacccaacaccacagagttcatcctttcctttcacttttccttatttgtgtaactcctttctcctgagaaaactgactctcactatccataatacatatttatttgctcagtccctgaatacacataaaatcatttcagaactgctaactcatacctggtgaaaaataaatttattaactacaatagagtatttgtataaggttgtccctcattatccatagaggactggttccaggaactcctttggataccaaatccatatatgctcaactgtctgatataaaatggcatagtatttgcatataacctaagcacccttttaaatmatctctagattacttgtaatagctaatacaatgtaatgttatgtaaatagttattaagctgtaatagtttaggacaggcatctggtccatggcctgttagcaaccgggccacagagtgaagcttcatctg

SEQ ID NO: 956280 - DNA, 597 bp, Homo sapiens
tggctcctgtgtagttttgacatgctgcaccccactctcccctttttagcacttccatattttctggaactacargattcttcatgttatttcacctgctacagacctagaattttcatttcttcagggagccctggtttctttacttagagaactatatttagaaaacctgacctggaggcaagatgtgctcattgctactgtatgtcactgcttttagcccccctcaggagacaaagctaagaaatatatgcatgtacactgacccatgcatgcacatgtctatatttattatcatatgtatgtatctatccatctctctctctccatcatgaattcctactgataaattccactcaaatatggccacacagggtccattctagcaacctctcaaccttgcttatttataacctgttttctgaatataataaatctggcaacaatttccacaatttatttccttacctgtttaacattagtatacatgtaaattcatttcagaattgctaaccagtatttttgtgagaaataaatttaccacctagagtacactgtttgtgtacagttctttttatccttagctttaaggtatgc

SEQ ID NO: 956281 - DNA, 456 bp, Homo sapiens
tcaggggtgggtccaggaatctgtgctttacaagctccttggatgagtttgctatatgctgaatatacctatactagagacatccctgagggaagcttatttcccaggccaggccaacaataataagaccatattactatagtaatattataatacatattacagttttgagtcagaagttttgagatcctgtccaggtcagttcttgaatgcctgggtcccctgagggacagggaggtactcagagctctcatatacctctgggcagaagagctaatggcatctggatagcttcttctgtttttgtttttgtttttgtttttgagacagtctcgctctgtcgcccacgctggagtgcagtggcaccatctcggctcactgcaatctctgcctyctggattcaagcaattctcgtgcctcagccttctgagtagctgggattacaggtgcccacca

SEQ ID NO: 956282 - DNA, 754 bp, Homo sapiens
gtggccacatggtgcggagagagaatctgtatgcttgggggaaggagagctcagccattctgggactttgcattggaactcagtgtggccagcaccaagtagaactctgccagtgcccttggagggagcatttagaccagccctagccagaggggaagtatccactctagcagttggaagttgagttttggcaagtcttgtcactacgggctaaatttagtgctctggagtcctaaacaaacttgaaaggctgtttaggccacaaagactgcaactgcagcactaggcaagtcctagtgctgtgctgggctcagagcttgtagacttggaggggtcacatgacctagtgaaaaccagctagggtggcgaagggagtgcttgtgctacccctcccctaatcccaggcagcacagctcacagctccaaaagagaccccctccttctgcttgcggagagaaggggaagaataaagaggactttgttttgcaaattgaatacccactcagtcacagaagaataaggcactgggaggacttatgaggtccccatactaggacctagctgttggatgacatttatggacacatcctgggctagaagagaacctgctgccttcaagggaaggacccagtcctggcaggattcatcacctgctgattaaagagcccttgggtcctagcagtggtagccargtagtatatgccatgggccttaggtgagactctgagacatgatggcttcatgtgtgacccag

SEQ ID NO: 956283 - DNA, 552 bp, Homo sapiens
ttgatggtgagaacccatgcaaccatcttgcttttcctttcagtacggttttcaataaattgcataacatattcaatactttattatgaaataggctttgtgttagataatattgcccaaacataagtcttcagagtatgtttaaggtaggcgaggctaagctctgatgtttgataggttaggtgtcaacttacgatatttttaatttatattagagttattgggagaaaaccgcatcaacaactgaggagcatcttcgtctgtagtaatcaagaaagggtgatactggacaaaagacagatcaatgaaacagaaatggaaccatgcagatatgctcatttgagtttttactaagttgcaaaagcagctactggagggaggagggtctttccagccagtgatgcttgaccaataaacagcatcggggaaaaatgaacctcaacctaaaccacactctttacacaaaaattacctgaaaatggatcaygaatagaattgtaaattgaaaaactataaaaactttaggagaaaacaaagaaaatttttaaaacc

SEQ ID NO: 956284 - DNA, 768 bp, Homo sapiens
cccactttgtagcttcccaagtacttccacccatatcttggagcccctcggggaggccgtgtgggatggtgagagacaggcacyagcagacacaggtatggcgcttggctgtgctgtgtactgtgtggggcttggcaggtcaactgctcagatccttgtttttcttgcctgtgtggtgggataatatccataatgaccttttaaggctgttgtaggagtttgaaaaataataatgatgtaaaatacctattctggagaccggtacacagggcctgccctttaaatatttgccagattttgaataaatgattttattgtttactgaacatttcctgttattccatgttctgtgttgaatggctgcttttgtgactgctcaatgccaggccccgagtcttcttgcttggcgaggaagttgtgctccttgctctaagggacctcagtctagcagagtaagaatgcaggttgcactgtggggtgataaaattccacaatggagagttgttcccaatgccgtggaatctcagaggaggggcagacatctgctgagagatgtctgggaggctccccagaggaggtggtgctggagccgggcctggaaggatcaggcagagagctggggaaaggcattccatttggccagagcaggcggctcctccagcactgaactgtttccagtacaagtggcgttgaagggcaacaaggagtttcatgccattcataggattacagatggagaggaggctggagagggagatgagagagggc

SEQ ID NO: 956285 - DNA, 587 bp, Homo sapiens
caccctgccttgggctcttcagcagacctcatcgagtctataaatagccaagtgataataagaacaatttcctggatgaaactaagacttcgggtagggcgcgcaggggcggggaggtggtgaggagcaggttggtattcttcttctcttctttacatttccgttgtgctaacaagggacatttacataagcttgactctgccaggagcccttccaacggatgggctctgggcggtgggtgccagtggcaggggagggaggggacccagctctaattaggccctctgactgctccccctcctccctgcacccagcgtgctcctccgcctcggaatgatgattaatgacatatttactgggtccaggcgtgtgcttttctgggaaataaaaattctggttcaagttgtttgttccacctaattagagaaaaagggagatgtgttcattaaacaaaaggagggtgaggggaaggcacgtgccccagcaccaacaccctctctgtcccygtggaaggtcccagcacctcctgggcccctagctcgcgggggaccccaggccccgtgcagcgggtatcccagggaggaagg

SEQ ID NO: 956286 - DNA, 607 bp, Homo sapiens
tcctgcctaaatactgtgcttttcccaaggtcttagcaaccagcagaccaggagatactctcccatgcctggctcactgggtcccatgcccacggagccttgctcactgctagcacagcagtctgagatcgacctgcaaggcagtagcctcatggggggaggggtgtctgccattgctgaggcttgagtaggtaaataaagtggccaggaagctcgaactgggtggagcccaccacagctcagccaggcctactgcctttctagattccacctctgtgggcagggcatagatgaacaaaaggcagcagaaacttcagcagacttaaacgtctctgtctgacagctttgaagagaccagtggttctcccagcacagtgtatgagctctgagaatggacaggctgcctcctcaagtgggtccctgaaccctatgtagcctaactgggagacacctcccagtaggggctgacagacacctcwtacaggcaggtgcccttctgagacgaagcttccagaggaaggattaggcagcaatatttgctgttctgcaaaacctccactggtgatacccaggcaaacagggtctggagtggacctccagcaaactc

SEQ ID NO: 956287 - DNA, 554 bp, Homo sapiens
tactagttagaaagaaccaaccgagacctcctcaggagccaaacagacaccctgcaatggagctacagacacagacaccctgtggtggagctacaaacagacaccctgcaatggggctacagacatcccaccacagggctacagaatccatcgagagaaggaaggaggtgttggcagtgtctaggatactcaccaatgcagacacaccacattgaggctacagacagacaccctctgatagagctacagttaagggacatctccccatgactatgtctccattgcaattaaacccatgtacattggattggcagctccccaccagtagagagagtaccagagtcagccaccagtccaagagaactaggcgaccacttgggctggcttctggatccattgctgaagagggggccactgaaccatgggcaggtagccacaagggcaatcccagatgagctcccaaatttgcaaccacccaagggkgagacaccttgtccactgcctagacagagcatattcatcaagacaggggaattgcaatcaagaaagaataa

SEQ ID NO: 956288 - DNA, 596 bp, Homo sapiens
ctgaaatatttttctccatttttttttgtcttgccactcttaatgcacacacgaggggccctaagataatttctggtagcctggaactccttgggaaaaacagaaggtgccacagacaccgtttcggaagaaagctctgttttcctcatgaaaccccaggaattaaaagcggatagatccctctcaaaatgctgtgttctgtttcgcattgtgtcatctgacagttttgagttttaggggtatcagaaattacttttcattatgaaagagcttggtgtgtaataactaggtaggaaatataccttaggggatggctaatagtagttatggaggaacacttgactctttgcacacctggatcagaaaagcatgctcttggctacctggaagatatggaaacatccccaacccccaatgagaaatgagactctcatgggggatggtctaattataagatgggctgattgkctgggttgccttgcaaggaaatgcacagttggtaaaagcaccacactgacttctcccaaagtatttccctccttttagggatccgatccaggatccagtataaaatggcacccctaattttggggatc

SEQ ID NO: 956289 - DNA, 658 bp, Homo sapiens
tacatatgtaacaaccttcacgttgtgtacatgtacccttaaacttaagtataatttaaaaaaaaaaaaattctaccatttttgaggcggccttggccacagatcttgaggcttttgcrccacctagtgacaattgtgtgctattacaatacattgatgatttgttattcactgtccccatgagggaggaatgcctccaaggaatagagaggcttcttcacctgctgtgtgaagctggttataaagtgtccaaggacaaggcaaaagtctgtttttgagaggttggatatctatgattcatggtatcccaaggccagcccaggcttggaagtgcacacaaggaggctgtatgtgcattgcccaccccagttacaagtggcaggtcagggaatttctaggtgtggcaggattctgccgaatctggattccaaacttctcccttatagcaaggctcctcccttatatgaggctatcaaaggaaaggaaagagagcccctcctatgggaaaaggaacaggaaaaggccttcaaggatataaaggaagctctcatccaggccccagcacttgggttgccagatgtaaaaaaagcccttctttttgtatgtggatgaatgaaagggaatggcagtgggagtcttaactcagttgttgggctgt

SEQ ID NO: 956290 - DNA, 594 bp, Homo sapiens
gcaagggaaaaaaactggatgaagaatgagtttgacaagttgacagaagtaggcttcagaaggttggtaataacaaacttctccaagctaaagaagcatgttctaacccatttcaaggaagctaaaaaccttgaaaaaaggttagacgaatggctaaataaaataaacagtgtagaaaagaccttaaaggactggatggagctgaaaaccacagcatgagaactttgtgatgcatgcacaagctaaaatagcctattggatcaagtggaagaatggatatcaatgattgaagatgaaatgaatgaaataaagtgagaagacaagattagagaaaaaagagtgaaaagaaatgaacaaagctgtcaagaaatatgggactaagtgaaaagaccaaatatatgattgattggtgtacctgaaagtgacagggaaaatggaaccaagttagaagatactcttcaggatgttatccaggagagcttccctaacctagataggcaggccaacattcaaatccaggaaatacagagaacrctacaaagatactccttgagaagagcaagcccaagacatgtaattgtcagattcaccaag

SEQ ID NO: 956291 - DNA, 594 bp, Homo sapiens
gcaagggaaaaaaactggatgaagaatgagtttgacaagttgacagaagtaggcttcagaaggttggtaataacaaacttctccaagctaaagaagcatgttctaacccatttcaaggaagctaaaaaccttgaaaaaaggttagacgaatggctaaataaaataaacagtgtagaaaagaccttaaaggactggatggagctgaaaaccacagcatgagaactttgtgatgcatgcacaagctaaaatagcctattggatcaagtggaagaatggatatcaatgattgaagatgaaatgaatgaaataaagtgagaagacaagattagagaaaaaagagtgaaaagaaatgaacaaagctgtcaagaaatatgggactaagtgaaaagaccaaatatatgattgattggtgtacctgaaagtgacagggaaaatggaaccaagttagaagatactcttcaggatgttatccaggagagcttccctaacctagataggcaggccaacattcaaatccaggaaatacagagaacacyacaaagatactccttgagaagagcaagcccaagacatgtaattgtcagattcaccaag

SEQ ID NO: 956292 - DNA, 570 bp, Homo sapiens
ttaacagtaatgcgattttataacccaggactgtaacttaactctaacttttgttagccattcacagaaattacacagcagactgtaaaaaattaagtttattgatatgtatttataatatagaaattcagtagcattgcctaggattaggcttgaaggtagcaaaggaacatttttatatgaaaatcaaagagcaaagtatttttctcaaaagcagatttggttctccataaatacctcatcatatacctgattaaagaaactgatgagtttcataccacaagtttgtttgggcgatgaatttgcttagaaatgagttactagttggctttcttttccataaaagaaccataatgtaatatttacagaatgttttaagttgcagtaagacagcagcttagcctgctctcatgtggagtgcagtggtgcgatctcrgctcactgcaacctccccctctcaggctcaagcgattctcgtgcttcagcctcctaagtagctagaattacaggcatgtgccaccatacctggctaatttttgtatttttcagtagagacggggtttctccatg

SEQ ID NO: 956293 - DNA, 614 bp, Homo sapiens
gtgtgatattggctgtgggtttgtcataaatagctcttattattttgagatatgttccatcaatacctagtttattgagagttcttagcacaaagggtgttgaattttatcgagggccttttctgcatctgttgagacaatcatgtgggttttgtcattggttctgtttatgtgatggttacatttattgatttgcatatgttgaactagccttgcctcccagggatgaagctgacttgatcatggtggataagctttttgatgtgccgctggattcggtttgctagtattttattgaggattttcacatccatgttcatcacggatattggccttaaattttctttttttgttgtgtctcagccaggttttggtattaagatgatgctggcttcataaaatgagttagggaggattccctctttttcttttgtttggaatagtttcagaaggaatggtaccagctcctctttgtacctctggtagaattcagctgtgaatcctcctggtcctgggcttcttttkgttggtagactattaattactgcctcaatttcggaacttgttattggtctattcagggattcgacttcttcctggtttagtcttggggt

SEQ ID NO: 956294 - DNA, 634 bp, Homo sapiens
gaaagattgatatcacaattagttacagtgtcatttgatataaatagagggagagataaagatcttctttatagtagaaaaccaatgacctaatgtggtaagaataattaatttggaaagttattatttggcaattataataataattcagacaagaataatctatggatgctaaaactggcagataaaattgagaagtaataggatatgtacataattgcaaagtttccatccctccaaaaaatcattattaattaggaaggtaaaataatcactttatggttgagtagtctgacagacactaccttaaccaaatgataaaaattaacctcactagtaatggaacaaattcacagcaagtacctcctgatataatatactagaaagaacacagcatcattttggagttggttctgtcaaaaacacattacctgaatctaatcaggagaaaacattagacaaactcaaactgatgtatgttgtacaaagtacccatcttaaaatattcaaaaacaataatgtcctggaatacaaaggactcaggaactattccagtttttwaaaaaaagataaataacattatgcaatatataatcctggacattttgtgctataaaaacattattagaataat

SEQ ID NO: 956295 - DNA, 713 bp, Homo sapiens
ccaggactagcaaatttgctattctactacttctcagggattattcaggccccctccgtccctacacatctgactcaaggatgtgcccctgccccagaactggcaagttgactttactcaacacgccgccgcagttcaggaatactaatgatacctctaggtcgtaggtagacactttcactggataggtatgaggcctttcccacagggttctgagaaggccaccatggtcatttcttcccttctgtcagacataattcctcggtttggccttcccacctctatacagtccgatagcagaccggcctttattagtcaaatcagccaagcaggttttcaggctcttggtattcagtgaaacctttatatcccttatggtcctcagtcttcaggaaaggtagaatggactaaaggtcttttaaaaacacacctcaccaagctcagccaccaacttaaaaaggactggacgatacttttaccactttcccttctcagaattcatgcctgtcctcagaatgctacagggtacagcgcatttgagctcctgtatagacgctcctttttattaggccccagtctcattccagacagcagaccaacttggactgtgctccaaaaaacttgtcatccctactatcttctctctagtcatactcctattcaccrttctcaactactcatacatgccctgctcttgtttacactgccggctt

SEQ ID NO: 956296 - DNA, 732 bp, Homo sapiens
ccaccaaactgtatgtgcattttattgtttgtaaattatgcatcaataaacttgatgttaaagaattgtgtcaaatactattgagatgttaggtaagtcaaggacagaaaagggactattaggaatggcaatattagaagtcataatggctttattaggagtgttttcaacggagggataaagaccaaaacctaaccagtgggttaaaaaagaaggaattgattaagtggaaatacacagttctgttttttgtttgtttgtttctttttgatacaggaattcactctgtcacccagcctgcagtgcagtggcaccgtcacagctcactgcagcctcaacctcccaggctcaagtgatcctcctgcttcagccttccaagtagctgggaaaacaggtgcgtgccaccacacccagctaatttttgtatttttttgtagaggtggagtttcatcacgttgcccaggctgggaaatacacagttcttttaaggacttttgagctgaactgaggcagagaaatggggtggtacttgaggggcatgtggcagccaagggactttttttgaagattggtattgtaaaggcatatttgtatgctgagggaaatgatccagtaaagagagtgagatggatgacacaaggagaaaaagaaggtattgcatgagaaaactgtagagacgtcwagagggtaggggatacaaagcacaagaggaggtgtttacctctgatagga

SEQ ID NO: 956297 - DNA, 567 bp, Homo sapiens
ccattcaaaagatcaataaatccaggagttggttttttttgaaaaaaattaataagatataaggctagctagactaataaaaaagagagaagatccaaaaataacacaattagaaatgacaaagaggatgttaccactgacttcaaaaaatacataaataactatcagagactactataaacacttctatgcaaacaaactagaaaatctaacagaaatggacaaactcctggaaacatacaccttcccaagactgaaccaggaagaaactgaatccctgaacagacaataacaagctccaaacttgaatcagtaatagcctaccaaccaaaataagcccatgaccagattctagcagattctagcacatgtacaaagaagagctggtaccactcctactgaaactattccaaaaaattgaagaggagggatgctctcccaattcattcaatgaggctttcattatcctaataccaaaacctttcagataaacaacaaaaaaagaaaacttcaggtcaacayctttgatgagcattgatgcaaaaatcctcaacaaaatactagcaa

SEQ ID NO: 956298 - DNA, 632 bp, Homo sapiens
acaagcttagccacagtggaatggggttccaggcagggtgctgaggctcccccattctagggcctaactcttggacatttctagacacctggggccagaaaggaacccattctcttgaaagaaaggaacaaatactgacatgattcatcacctgctgcttaaagagcccttgggcactgaataatcagcaaatggtagtgaggcagtactcatcatgggccttgggtgagactcagagctgtgctagccccaggtgtaacccagcacattcccagctaggtggctatggggagagactcttattgcttgaggaaaggacagggaagagtaaaggagactttaccttggagtttgggtaccagctcagccacagtggggtagagaaccaagctgtctcctgcagtccctgattctaggcctttgcactctcgacctgcccagggacagaggagagcctgctgtcctgaagtgagagacacaggcttggcagcatttaacataaactgattgcagagcccttgagcctttaktgaatattggcagtagccaggcagtatttgctgtggtcctggggctgtggtggccacagagagagactcctctgccgtcaagagggagggaaaagtgggaag

SEQ ID NO: 956299 - DNA, 581 bp, Homo sapiens
caaacggcacaccaggagattataycccacacctggcttggagggttccatgcccacagagcctggctcactgctagcacagcagtccgagatcgaactgcaaggcggcagcgaggctgggggaggggcgcctgccattgctgaggcttgagtaggtaaacaaaacagccaggaatcttgaactgggtggagcccactgcagctcaaggaggcctgcctgcttctgtagattccacctctggtggcagggcatagctgaacaaaaggcagcagaaacctctgcagattaaatgtccctatctgacagctttgaagagagtagaggttctcccagcacggagtttgagatctgagaatggacagactgctttctcaagtgagtccctcacccccgagtagcctaactgggagatacctcccagtaggggccgactaacacctcatacagccaggtgctcttctgagatgaagcttccagaggaaggatcaggcggcaacatttgctgttctgcaatatttgctgcagcctccgctggtgatacccaggcaaacagggtctgcagtggacctccagcgaactc

SEQ ID NO: 956300 - DNA, 581 bp, Homo sapiens
caaacggcacaccaggagattataccccacacctggcttggagggttccatgcccacagagcctggctcactgctagcacagcagtcckagatcgaactgcaaggcggcagcgaggctgggggaggggcgcctgccattgctgaggcttgagtaggtaaacaaaacagccaggaatcttgaactgggtggagcccactgcagctcaaggaggcctgcctgcttctgtagattccacctctggtggcagggcatagctgaacaaaaggcagcagaaacctctgcagattaaatgtccctatctgacagctttgaagagagtagaggttctcccagcacggagtttgagatctgagaatggacagactgctttctcaagtgagtccctcacccccgagtagcctaactgggagatacctcccagtaggggccgactaacacctcatacagccaggtgctcttctgagatgaagcttccagaggaaggatcaggcggcaacatttgctgttctgcaatatttgctgcagcctccgctggtgatacccaggcaaacagggtctgcagtggacctccagcgaactc

SEQ ID NO: 956301 - DNA, 453 bp, Homo sapiens
ttcaaatttgaaaaaagaaggaaagaaaaaggccacctaatatcttttcctttgtggagggagaggggtttccacagaacaacaaaaaggaacagataagaccattctaggctgagaagygtaaaactaaaggataataaaatcgagctgatgcagtttaaagactcctcattacctggcctgagatacggcacccattgttgctagtggctggagattatttctcagcctgctgcaggctgataacagactcgtccactggcctgaaggctcattgttctgcaggcaggaatgacgccttggacagaagccgagtccctgtgcagccctgctcctctagccttccgtctcccttcagtgggattacaaaggaaagcaagagttcccgtcacctgagaggtgctctgggactttttcaatcctccctcctcacactccagttacctaatttgg

SEQ ID NO: 956302 - DNA, 519 bp, Homo sapiens
gcccatcaaggatgcagtgatcaccgtgccagtcttcttcaaccaggccgagcgccgagctgtgctgcaggctgctcgtatggctggcctcaaagtgctgcagctcatcaatgacaacaccgccactgccctcagctatggtgtcttccgccggaaagatattaacaccactgcccaggtgagccaggggagccttgaccagacatgcagggtgactgaatctaaggatggaggccacttggtcccttttgcatctggtttgcatggctgggctgacccttggcaaaatgcaccaatagcctcctcccagcccctgttggagctgtttagttttgtgttaagagtcagacagcccattggaagcaggtgggtgggcaggcaggccccctggagtttgagaaggttcctgtgacagttgccttgatatctctacagaatatcatgttctatgacatgggctcaggcagcaccgtatgcaccaktgtgacctaccagatggtgaagactaaggaagctggg

SEQ ID NO: 956303 - DNA, 597 bp, Homo sapiens
gggcagggtggcaggactccctccctttgccatcctgcccatggaaacctactgccatttgtagagcataagcccctggagggcaggggctggggctggggctggatggtcctggtgtatagtctctgtccaacctgagtgattaattcaggtattttcttgaactatgtggctctgcttatttgctcaaggtcacacagcagttagtggtggcaccttctgatctgaaccagtcttctgactcccaagccaggggttgttccactagaaccttcattttgggattaggataagcacagaggcctacactctgtttcttatgtccccgccttgggcacccagggaaggctggcatgagtgcagcagcccgtgtgcttgtcagggagtagacacgcccgggagacatttcatccacgttcactgggtgttgtttatccttctctgcccaacacatgtgcctgcaggtacagcctttgaggagctgatgggttctccaggtcccttgctctcaagcctttgcaagttcttccaaatgtgatcaccttcacaactgaytgtccctggggtgtgctccttattcctcccattctgctaaag

SEQ ID NO: 956304 - DNA, 569 bp, Homo sapiens
gaggccaagtgaaataagccagtcacagaaggacaagtactgtatgattccactcatatgrggcacgtagagtagtcaaaatcagagacaaaaaggagaatggtggttgccaggggcaccgggaaggggggaaatggggagtgagtgtttaatgggtatggagtttcagtttcacaagacgatgggagttcttgagatggatggtggtgatcgttccacaacaatatggatatacttacctcgctgctgaaatgtacacttaaaaatcatagtacattttatggtatgtgtattttaccatactaaaaaaaaactgggggggaaatgggtataggtgacgggaaaaaacatgttgaccctaactcctgaccaagctgggctcacctgatgagggtgttcttacccaggccaaggaagaataacccaaaatacagcttttcagactttggcatgcattatcccctttttccgcctttcacattttcttgcccaactctgttctgctgactatgactgaggttggggtaaagctgggaccctggggcctgttaataggagaggttgtggca

SEQ ID NO: 956305 - DNA, 618 bp, Homo sapiens
agtgtttcagaaatgatttctccctcctataaaacatactgaacacagaactgagttcttcaaactcaacttatgtatgacaaagctatagccccagcttttagctcaccttggtaactccgatggtggagaagacaaggataaggatttcttttctctgaggctagactggtgaagttataggatgacagatacagtctaaaggtcagtccctggctgctcttcccagagaccctctgcctcataccttcccagcctctagtctccagtctgctcggacctctgctatacttctttgtgctagaagagtgatttggtcatgtctctcctctccttgagcaaaccttaatgaattttccctccaatggccagtcctgtcttatcttggcatttgaagctctttattaagtgaccatttctactgtctttttttttttcctccattctcttctgctaggctctaatatgaactcttaacggcaactgatgctatcacagaaggacctctkgtacttgctccagtctggggacttggtcaggtgtctttctgtctccctgtaaagcgtttccactctgcatttttgcctatcacaattgtacagtttcctgaaggcacag

SEQ ID NO: 956306 - DNA, 516 bp, Homo sapiens
gggtttcaacaggtgaattttggaaggacacaattgtgcagtccataacattagaaaygtgtttggttgtgccttgcttattggcatgaaactgctctcgaccttcacaccccttgatccttcctaccccctctactctgacctcaactgctttaaagagaaagatgattatgagaggggctggtatttcttggtgctccctcaagaggtattgcaggacatatgcacccaggaaagtatgctaaggagccataaggagggaaggggctcagaatgaagggaatctgatgggtgtaggcacccacaaaccacctaggccactcacagagatgacacaacaaacgcctgttccctcatgagaccaggcaaaatcaagttgctgatggagccttggtgaaacatggacaccattggtgcatggatccatcatcatcctagatgtggcaacatgtccgccttcctagactaggcacacagtaaaagactctatgtttcgaatgcagggactaccactgc

SEQ ID NO: 956307 - DNA, 532 bp, Homo sapiens
catctgtagagcagcccatcaaggatgcagtgatcaccgtgccagtcttcttcaaccaggccgagcgccgagctgtgctgcaggctgctcgtatggctggcctcaaagtgctgcagctcatcaatgacaacaccgccactgccctcagctatggtgtcttccgccggaaagatattaacaccactgcccaggtgagccaggggagccttgaccagacatgcagggtgactgaatctaaggatggaggccacttggtcccttttgcatctggtttgcatggctgggctgacccttggcaaaatgcaccaatagcctcctcccagcccctgttggagctgtttagttttgtgttaagagtcagacagcccattggaagcaggtgggtgggcaggcaggccccctggagtttgagaaggttcctgtgacagttgccttgatatctctacagaatatcatgttctatgacatgggctcaggcagcaccgtatgcaccaktgtgacctaccagatggtgaagactaaggaagctggg

SEQ ID NO: 956308 - DNA, 617 bp, Homo sapiens
tgccagagaagaggcttgaagtatctcaaatgaaagtgaatggtgtgatttattaactcatactttgtctcctgagcaccaactgtagttctgccctattgtataaatcctaatgcatcctggctttaaacagtttttgagcatgtttacatccctcccatgctttgaagtatttatttgtgatacttactgtgtgccaggcactttttaaggtacttattggatattttataatgaaaataaagtaatataaatttgggtttatggtacaatcacaactctgtaaaatgtataagcactaggctgaagaatttaataacatttgcacaattgaaagtaattatgtcggtatccagatagcagttggttcttttcacttttcaaaattctcttatatgttggtattatactgattttgtaacaaagaaagcaaaaaataggtaaatactcaaatttgcatccagaggtaatttgtttaaactstacgttatatgggtctccgattctttgatgtagcctttttttcttctaatttttaattaggaacttagtttccctaaatgttgaaacttagtgtcatttgggataacagttgggattggtgtgtgccaataaat

SEQ ID NO: 956309 - DNA, 600 bp, Homo sapiens
tagaaattataggttagcataaaaattggtacaactacatggaagggattaacatgaaacaaaagcsttaaacacatatttttacttaaatatttcacttataaaaatttatgaaaaaattactaagcaaaaatatagctatgtggattttatcattagttaaataaataaatgaactatagtgaatattttaaatataatgtatatttgataaggaagatatatatgtgcaatataatacaattctatatacatattttatacacatgtatacacatgtacaataaaaaaatctaaatatcaaaatactggcagtagttatcttaaaattacaggattatgcaagttttaattgtctttttctgtttcaggactttcctaatttttctacaatgagcatggcttttgaaatttaaaaaaaggtaagaaatgagtgcggaaaagcacgtcttacactatgaagggactgtaaggagttgctatgttataaagaataagatataaaccttaccttttagaggttttcaaatgaattataaaaataaaataccggccgggcatggtggctctggcctgtaatcccagcactttaggaggccg

SEQ ID NO: 956310 - DNA, 559 bp, Homo sapiens
acatggaagggattaacatgaaacaaaagccttaaacacatatttttacttaaatatttcacttataaaaatttatgaaaaaattactaagcaaaaatatagctatgtggattttatcattagttaaataaataaatgaactatagtgaatattttaaatataatgtatatttgataaggaagatatatatgtgcaatataatacaattctatatacatattttatacacatgtatacacatgtacaataaaaaaatctaaatatcaaaatactggcagtagttatcttaaaattacaggattatgcaagttttaattgtctttttctgtttcaggactttcctaatttttctacaatgagcatggcttttgaaatttaaaaaaaggtaagaaatgagtgcggaaaagcacgtcttacactatgaagggactgtaaggagttgctatgttataaagaataagatataamccttaccttttagaggttttcaaatgaattataaaaataaaataccggccgggcatggtggctctggcctgtaatcccagcactttagga

SEQ ID NO: 956311 - DNA, 635 bp, Homo sapiens
  misc_feature 454: n = A,T,C or G
cacatggtcaacttttctcatgttagtcattctaatagatatgaagtggtatctcactgtggttttgatttacgtttttgtaatgattaattatgttgatcattaatttttattgcttgttttccatccatatatctcctttggtaaatgtcttcaaatcttttactcattaaaaaaattgtgttatttgttttattattgagtttttaagctctgtgtttatcctggataagtcttttacacatatattctaagattttctccccatccagggcatgtcttttccttcaatcgtgtctttcaaagagcaggagtttttaattttgatgaaggccaattaattaacttgttcttttatgggttgtgttttttgatgtcatatctgagaagtctttgcctaacccccaggtcacaaagatcttcttttatgttttcttttagaagttttattgtnttacattttacatttaggactgtgagtcattctgaattaatttttgtatatggtgggatgtgtgrattgaagttacatttttggctatggatatccaattgttgcagtaccgtttgttgaagactactccactgaatttgttttgcacatttgtcagtggggggggggagggaataatctt

SEQ ID NO: 956312 - DNA, 635 bp, Homo sapiens
  misc_feature 454: n = A,T,C or G
cacatggtcaacttttctcatgttagtcattctaatagatatgaagtggtatctcactgtggttttgatttacgtttttgtaatgattaattatgttgatcattaatttttattgcttgttttccatccatatatctcctttggtaaatgtcttcaaatcttttactcattaaaaaaattgtgttatttgttttattattgagtttttaagctctgtgtttatcctggataagtcttttacacatatattctaagattttctccccatccagggcatgtcttttccttcaatcgtgtctttcaaagagcaggagtttttaattttgatgaaggccaattaattaacttgttcttttatgggttgtgttttttgatgtcatatctgagaagtctttgcctaacccccaggtcacaaagatcttcttttatgttttcttttagaagttttattgtnttacattttacatttaggactgtgagtcattctgaattaatttttgtatatggtgggatgtgtggattgaagttacatttttggctatggatatccaattgttgcagtaccrtttgttgaagactactccactgaatttgttttgcacatttgtcagtggggggggggagggaataatctt

SEQ ID NO: 956313 - DNA, 559 bp, Homo sapiens
caaaccttggaaggccagaaggtttttgcaaaagcctcaggatagagttatggctgaaggcagcctaatcctctttgagctatagcaagggtaattaacataggaatgtagaggagtctatttaaatagcttgtttactcatgtggtcctaagactaacctttgaccatccacgggtccatgattgctgtctactctgggggtcagcaatggtaattaccttctagtggtgtttacttgagacttttgtcatttaatgtgtgctgaataaatgctgggagggccaacgagtaggggccgcagttgcaactctttacagcactctcctgggagtctgtaagcggcccagactctcagccggactgacaagcataatatctgtgtcagtgtatgttactcattcatcattgggttagggtctgcaggatggacccccacatcccaaagttctgggattacaggtgtgagccacygcgccaggacactctccccttttttattcacgaaggtacagcctctttgctctcatttgagagcaggctcttctctgccccagggcc

SEQ ID NO: 956314 - DNA, 613 bp, Homo sapiens
taattgttagacagctcagtggggcatcagtgtgactttttttttttttgagacggaatctctctctgtcgcccaggctggggtgcagtggcgcgatctcgggctcactgcaagctccacctcccgggttcacgccattctcctgcctcagcctcctgagtagctgggaatacaggtgcccgccaccaccccagctaatttttttgtatttttagtagagacggggtttcaccgtgttagccaggatggtctcgatctcctgacctcgtgatctgcccacctcggccctcccaaagtgctgggattacaggtgtgagccaccacggctggctgcatcagtgtgatctttgcacccacacccgagttcttgtccggcatcccggaggaatgaggttgcaggaacaaactgaagggtggtgaaagcggagattttattgccgatgtgaaagaggctctcagtggaaaggggatctggagaggagatggagcrggaaggtcatcttcccccagagtccagttgttcctgactggactcctttctgaaaaaatgccatcaagctgtcccccatgaagccaagctgcttctctcccatgtcgaactgcagtctccgac

SEQ ID NO: 956315 - DNA, 613 bp, Homo sapiens
taattgttagacagctcagtggggcatcagtgtgactttttttttttttgagacggaatctctctctgtcgcccaggctggggtgcagtggcgcgatctcgggctcactgcaagctccacctcccgggttcacgccattctcctgcctcagcctcctgagtagctgggaatacaggtgcccgccaccaccccagctaatttttttgtatttttagtagagacggggtttcaccgtgttagccaggatggtctcgatctcctgacctcgtgatctgcccacctcggccctcccaaagtgctgggattacaggtgtgagccaccacggctggctgcatcagtgtgatctttgcacccacacccgagttcttgtccggcatcccggaggaatgaggttgcaggaacaaactgaagggtggtgaaagcggagattttattgccgatgtgaaagaggctctcagtggaaaggggatctggagaggagatggagcaggaaggtcatcttcccccagagtccagttgttcctgrctggactcctttctgaaaaaatgccatcaagctgtcccccatgaagccaagctgcttctctcccatgtcgaactgcagtctccgac

SEQ ID NO: 956316 - DNA, 578 bp, Homo sapiens
caggcacagtcccaggaaagctcctggtgccgtttgtctattgggctctgcaaattctgagccttgaccttgtgattcctttgaataagcgatcgcttcccctcacgagtcctgttttcagtgtggcccttttcctgctgttccttttgaatgagcctttcaacctccctcctggccctaaagcaccccctttctttgcgcttcctgatcacatcaggctgttgggtgatccactcctacatgcggcacagtttgctaagcaccactgcatgcaccaggagcgcgagaagaacgcagcgtggcgcctggccttggggtgcttggacgggagctggggagcccctacgatagggtggaggggtaactgaggtcctccacagccaggtggcgagaaggccgagcggggcagatgtgagagggtctgagacgcagcatgacagggaagagaccagccaactctaaawatagctttgggagtagaatttcaagcatggtgactgcttggatggacgaagggctgggagaggcatagagagaaaggaggagggaaggggggctcccttgttcctgagccagtg

SEQ ID NO: 956317 - DNA, 614 bp, Homo sapiens
caggcacagtcccaggaaagctcctggtgccgtttgtctattgggctctgcaaattctgagccttgaccttgtgattcctttgaataagcgatcgcttcccctcacgagtcctgttttcagtgtggcccttttcctgctgttccttttgaatgagcctttcaacctccctcctggccctaaagcaccccctttctttgcgcttcctgatcacatcaggctgttgggtgatccactcctacatgcggcacagtttgctaagcaccactgcatgcaccaggagcgcgagaagaacgcagcgtggcgcctggccttggggtgcttggacgggagctggggagcccctacgatagggtggaggggtaactgaggtcctccacagccaggtggcgagaaggccgagcggggcagatgtgagagggtctgagacgcagcatgacagggaagagaccagccaactctaaaaatagctttgggagtagaatttcaagcatggtgactgcttggatggacgaagggctgggagaggcrtagagagaaaggaggagggaaggggggctcccttgttcctgagccagtgcagagtcctccaggacccacttctttctgtgtcctg

SEQ ID NO: 956318 - DNA, 818 bp, Homo sapiens
atccaatgtatttgtatttttcttttgttgctggcccttttggtgtcctatctatcaatccatgctaaatccaggtcatgttttctttaaatagttttatagatttgactcttacatgtaggcctttggaccgattttgaattaattattgtggtgtgaggtaggggttcagctcattcctgtgcatgtggatgtctagtttcccagcaccatttgttgaagtactgctcttcctccattgaataatctggcactctgtcaaaaatcagttggtcatctacacgagggtttatttctggctctcaattctatcccactggtttaatacatctattctaatgccagtactaaactgccttgatgattgcagctttgtagtaagttttcaaattggcaagtgtgagcctccaacattgttcttctgtgttctttcttttttttttttttttttttttttttttgacgaagtctcactctgtagcccaggctggagtgcagtggcacaaccttggctcactgcaagctccatctcccgggttcacaccgttctcctgcctcagcctcccgagtagctgggactacaggtacctgccactacgcctggctaattttgttatttttagtagagatggggtttcactatgctagccaggatggtctccatctcctgacctcgtgatctgcccgccttggcctcccaaagtgctgggattacaggcrtgagccaccacaccccgcctgttcttctttttaacattgttttagctattcagggtcccttgagattccacacgaactttagaatcagcctgtgaata

SEQ ID NO: 956319 - DNA, 572 bp, Homo sapiens
agccattttgtaatgtatacatacttcartcacatcatgttgtaccctcttgtacatattttttgtcaattcaataaattcaacaactccaaaaaacaagacatttttacaaaataattattaaaaataaaattcaaaattctatttaattaatttatttatttttgaaatagagtctcgctctgtcacccaggctggctgaagtgcagtggtgcgatctcggctgactgcaacctctgtctctcaggttcaaatgattctcctgcctcagcctcccaagcagatgggattacaggtgtgtgccatcacacctggctaatttctgtattttcagtagagatagttccgccatgttgtccaggctggtctcgaactcctgaccttaggtgatccaccagcctcgacctgccaaagtgctgggattacaggtgtgagccactgcgcctggacagaatataaaagattgtttaattcaactaaaacattaaaacagattatttctataagtggtaattgttctaacatgttttggtcaaaatagtctccttagtcatccacaattaaatggttaa

SEQ ID NO: 956320 - DNA, 567 bp, Homo sapiens
atacttatcatgcatttaattaggtaattacaaataatccaatattrccagcaactcactagagacgtttaaagttgagtattctaaatttttaagctaataaatgtgaagaaagtataaatcaggtaggagatttgaacccaaaacttttcagctcccagacatcatttatgaaagatagaggtgcaaaaaagaacatcagtattccacacaaatcatgtttcttttcttcttaccatcgcttattggaacacactatatacataagaattaattaatttagtaatgagggataggtgttaataaatgtttaacaactggctgtcttgggagaaaagcctgatttgcagtatttgtggtttctgtggtacaaatatcaccaaaatgggcagtttcaaaacacaaactcaacatcacagaatgtggaagctggaaagagacgcaggaaaagggctctctggagtgagtcttagcacactactgggtgaaagggctgcaagaatattttcagttttagggacactattctattccacaagttattttgaaaattttatttactttaaa

SEQ ID NO: 956321 - DNA, 649 bp, Homo sapiens
aagggtaaccttgagctccttaggaaaaaaacaaaaatgagacaggcattgtagaaggtcagggaaattccctcaacttctatgagtcattcagttttatttaagagtacaaaagaatatcaggtaactgttaagagttagtgtttaaataccactaatatattaatcagaggcttgagtgtcttaggcaagcagtttcaacaataattatgataatagttattaatgtagaaaccatctacagagcacctgtcatgttcaaacacagtattgtgtacattcccaacaatgtggcaagctgagaattatgatcttcattgtatggataaagaaaacagattccccaacattggtaactctgaggttacacgaactagaaagtggtgacctaaaaatttgaactagggtctgtctgacctaaagttcattcatgttcccctgtgcctcagtgaaaagttgtcacacaaatcacaagtgttgtgaactgacagactgtaactctgaaggtagagctgagtgagctctaagtttatgctgatccccactaaaagttgatttagagtattcagaatgyaaaaacatattaaagaagtatgagttggctgggtgcagtggctcatgcctgtaatcccagcactttgggaggctg

SEQ ID NO: 956322 - DNA, 527 bp, Homo sapiens
gtagagcagcccatcaaggatgcagtgatcaccgtgccagtcttcttcaaccaggccgagcgccgagctgtgctgcaggctgctcgtatggctggcctcaaagtgctgcagctcatcaatgacaacaccgccactgccctcagctatggtgtcttccgccggaaagatattaacaccactgcccaggtgagccaggggagccttgaccagacatgcagggtgactgaatctaaggatggaggccacttggtcccttttgcatctggtttgcatggctgggctgacccttggcaaaatgcaccaatagcctcctcccagcccctgttggagctgtttagttttgtgttaagagtcagacagcccattggaagcaggtgggtgggcaggcaggccccctggagtttgagaaggttcctgtgacagttgccttgatatctctacagaatatcatgttctatgacatgggctcaggcagcaccgtatgcaccaktgtgacctaccagatggtgaagactaaggaagctggg

SEQ ID NO: 956323 - DNA, 737 bp, Homo sapiens
tgaatccaccaaactgtatgtgcattttattgtttgtaaattatgcatcaataaacttgatgttaaagaattgtgtcaaatactattgagatgttaggtaagtcaaggacagaaaagggactattaggaatggcaatattagaagtcataatggctttattaggagtgttttcaacggagggataaagaccaaaacctaaccagtgggttaaaaaagaaggaattgattaagtggaaatacacagttctgttttttgtttgtttgtttctttttgatacaggaattcactctgtcacccagcctgcagtgcagtggcaccgtcacagctcactgcagcctcaacctcccaggctcaagtgatcctcctgcttcagccttccaagtagctgggaaaacaggtgcgtgccaccacacccagctaatttttgtatttttttgtagaggtggagtttcatcacgttgcccaggctgggaaatacacagttcttttaaggacttttgagctgaactgaggcagagaaatggggtggtacttgaggggcatgtggcagccaagggactttttttgaagattggtattgtaaaggcatatttgtatgctgagggaaatgatccagtaaagagagtgagatggatgacacaaggagaaaaagaaggtattgcatgagaaaactgtagagacgtcwagagggtaggggatacaaagcacaagaggaggtgtttacctctgatagga

SEQ ID NO: 956324 - DNA, 597 bp, Homo sapiens
ggaggctgtaccctgaaaagccacaggggcagagctgtccaagaccatgagaaccatcttttgcatcagcatgacctggatgtgagacatggagtcaaaggagatcattttggagctttaagatttgactgccccactggatttcagacttgcatggggcctgtagcccctttgttttggccaatttctcccatttggaatggctgtatttatccaatgcctgtacccccattgtatctacgaagttactaacttgcttttgattttacaggctcataggcagaagagacttgccttgtctcagatgagactttggactgtggacttttgagttaatgctgaaatgagttaagactttaggggactgttgagaaggcatggtttgtttttaaatgtgaagacatgagatatgggaggggccagcagtggaatgatatggtttggctgtgtccctacccaaatctcatcttgaattcctacatgttgttggtgggacctggtgggaggtaactgaatmatggaggaaggtcttttccatgctgttcttgtgatagtgaataagtctcatgagatctgatgcctttataaagaggggtt

SEQ ID NO: 956325 - DNA, 845 bp, Homo sapiens
tgtatctgccaacctctaaatccaaggatgtttccttcacaaataaataattttaaaacagctccttgaatcaaaacattttatattgccaaaaccttcaggttctaaactgccatttgtgctgattcataaaacaattagcgatttcatatgtagttagactaattgcttcagatgattgactttgcaaacatatatgcctaagacatgtgttgatttatgagtctattttgacaaacacttcttaagcacttccaatgtcctaggcttctcaggggatccaaaagagagacctaactcagcccctgttttcatggagactgctctttatttatgagccctaaaaccgagagaaatattagattgaaccatatgggattgccatttttacaggttcaacaatttcatgttgttcaacctaatagctataatataagaatatgaaacataactgccgtatcgcacctgaaaatattatgaagttttaaaggtggagaaaacacatctggttggaagtcaccaggaagaacttcttggatgaattgagttgaggtaggattctgtagatggaggaataggggaatgagcatagagaatgcttgccaaaaaggatgggttcttgttcttctagaacctgaagagagatgttgaagattggacaaaaaataaaatatgggctatatttcacataaccttgactaacttggcattgaagtttcattggtggggaactagagaaaaatgtcatgccatagaaggaaatgggaagtctgaagacccggtttggttgggggaaggatgctgcattgttccaacatgaygggagttgatgccagctgagtacg

SEQ ID NO: 956326 - DNA, 595 bp, Homo sapiens
gacatccctgtgctcttggggcccaggaaagtccccctgctcctgcaaactcagaaatgcctgctcctgctgcctggcctctccctgctcctggtgcctgctcaaatcttggaacaaagacaagactgagcccaggggctgtcataacccacctgggtatgtgcatgcttggggctgtgctgacatgctagctccctgccaccttggccacctctggactttgggccagagcatgggagggaggctgagggggaggggagggcagctcagtactgacttgcagggtcccatctggcatgaacagcctgggtgccatgaacagtggcagaaggcagacaggatctggggcagaaaggggcaggtccccagtgaagcctcactttcaagctggggaaggcctgaagcctgggggttgggctgccagtcccacataccaaagtgggaacttatagtgctttttccaggtcctcccatggctgcctatggaccattcagcatgcaytttctcctctctgaagtccataaaaaccccgtactcagccaggctcagggagacgacaggatgactagtcgtagagaggagctcctcacccca

SEQ ID NO: 956327 - DNA, 679 bp, Homo sapiens
ttcaggtggtgcctgcatatcaarcaaagccatctgaaacccggacccaagtttacacttcctcagtcaactgatcatagagaatgccacatgaggccacgggtgcaggctgggagagaaaaggcaatgtagcacgagtaggagccatgggcatttgggccacttcttcatgtaatttacttgtgccttcagatcctgctcaagcctgatctcatgtatcccactttcatttgatgttggatggaatgccgctgtacatgcccagccttatggctttgagggccagacaacacccagttcgtaacagacagtggcccatggttaaacttttagtttctactaagcctagtaacacgccaagtgctgtttctcaaaaggagagtagtcctacgcagagagtggcagggctttgctacaaaaagggcttgtggtgtgattcacctacaggggcctgccagaggctccaaatcgcacctccatctgccactgatacctcaagcaccactggatctgctggatcgtgatgcaagtggcagagcagcttgcacagcagcctggacctaccagaatccttctctcattctgggccccacagaaaactagaagctcttcagtcccatagaaaactagaagctcttcagcagccactcagcaaatgggctagagtagcacatccaaa

SEQ ID NO: 956328 - DNA, 556 bp, Homo sapiens
tggtgcctgcatatcaaacaaagccatctgaaacccggacccaagtttacacttcctcagtcaactgatcatagagaatgccacatgaggccacrggtgcaggctgggagagaaaaggcaatgtagcacgagtaggagccatgggcatttgggccacttcttcatgtaatttacttgtgccttcagatcctgctcaagcctgatctcatgtatcccactttcatttgatgttggatggaatgccgctgtacatgcccagccttatggctttgagggccagacaacacccagttcgtaacagacagtggcccatggttaaacttttagtttctactaagcctagtaacacgccaagtgctgtttctcaaaaggagagtagtcctacgcagagagtggcagggctttgctacaaaaagggcttgtggtgtgattcacctacaggggcctgccagaggctccaaatcgcacctccatctgccactgatacctcaagcaccactggatctgctggatcgtgatgcaagtggcagagcagcttgcacagcagcctggacct

SEQ ID NO: 956329 - DNA, 609 bp, Homo sapiens
caattatgcattctggcaccrgggaaatgaccacaggatgagtccagggacccactgaacccactgtaagtcagacctgagctaaaactccattaattacttggcctccataagctcctactttaactgggggaccacaatgatgttttgggtcccctggaatcaatgtcagctcagagccagcgtccagtggtcccccaaatgtctggtcatttccctttctgcaatgcacagtcacactggtaaaaggctggaggtctctctggggaaggatgggagaaagatccactgcataaattgttggtaatgtagtggggtcctccctcaaggagacccgacctcccctttattcaagggattctgggtccgtaaactggctcaagtctggaaattgaggggccgtgattctctgtttttataattcaaattagccttttgtctattcgacctagaagttttccacttgtataaattaagtaggaatgcagtaggctccctatcaatttcacttctaggaataccatgattaattagccaatgccagagctctacaccagactattctgattgtgactttgcctctgctgtccattacagtagatattccca

SEQ ID NO: 956330 - DNA, 590 bp, Homo sapiens
tgagcaacgcagaagatgaatgatttctgcatttccaactgaggtacttggttcatctcactggggagtgtcagaaagtgggtgcaggacagtgggtgcagtgcactgagcatgagcygaagcacagcaaggcatcacctcaaccgggaagcacaaggggtcagggaattcccttttctagccaaggaaaggggtgacagacagcacctggaaaattgggtcactcccaccctaatactgagcttttccaatggtcttataaaacggcacaccaggagattgtatcccgcgcctggctcggagggtcctacgcccacggagcctcacttattgctagcacagcagtctgagatcaaactgcaaggtggcagtgaggctgggggaggggtgcctgccattgccaaggcttgagtaggtaaacaaagcggccgggaagctcgaactgggtggagcccaccacagctcaaggtggcctgcctgcctctgtagactccacctctgggggcagggcatagccaaacaaaaggcagcagaaacctctgcagacgtaaatgtccctgtctgacagctttgaagagagtagtggttct

SEQ ID NO: 956331 - DNA, 576 bp, Homo sapiens
atggaagtgtagagggggtgcagacctgttcacaccaccattcaggtgtccatcataaacatctgttttgtttgtagctcatcatttgcgtactaggggagggagtcaaaatttcattcagttccatccagtcaacttaggaaatgtttattcgttctctgtaacatattcagtctcagaggctctccccacacccaatttctcctcctgcgagagcatctgtgttagtggaggagctcaccgtggcttctttgcagagggataccttgggtctttgggggcctctggtgctgaaatccacggggaaagaatctggactattcttttggcctaagagatgcttccagaaagcgtcgaccatcacttcttgctggccggctcctaccttggctctcactggttaataaaatttaggtaaaggctgggtgcggtggctcatgactgtaatcccagcactttgggaggccgaggcrggtggattatttgaggccaggagttagagaccagcctggccaatttggtgaaaccccatctttaccaaaaatacaaaaattagctgggcatggtgacaggtgc

SEQ ID NO: 956332 - DNA, 553 bp, Homo sapiens
ttggttatacttctctctgctgcttttgacctgtacattactactcctgccgctccaagcttgaatgttttctatggcactgctggggcaatctgtcttttaccaaagttagattatttggaatctcctttkgtccacattgaatttttcatggtttgacattgatcagcttttgcattatcagtatgagactttatattccacatcttctagaaatttctcactttttgctttttttttttttttcccccgaaacagagtcttactctgtcacccaggctggagtacagtggtgcgatagctcaatgcagtgcaacctccgcctcccgggttcaagcagttctccgcctcaacctcctgagtagctgggattacaggcccttgccaccatgcccggctaatttttgtatttttagtagagacagagtgtcaccatgttggccaggctggttttgaactcttgaccttgtgatccacctgcctcagcctcccaaagtgccgagattacaggcgtgagccaccgtgcctggcccactttttgcttttttgatgg

SEQ ID NO: 956333 - DNA, 586 bp, Homo sapiens
gcctggctaatttttggtatttttagtagagatggggtttcaccatgttggccaggctggtctcaaactccagatctcaggtgatccacccgcctyggcctcccaaaatgctgggattacaggcgtgagctactgtgcctggtctttttaacattaatttttttttctttcttttttttttgagacagagtcttgctctgttgcccaggctggagtccaatggtgcaatcttggcttactgcaacctctgcttcctgggttcaagcaattctcctcccagtagctcagcctcccaagtagctgaaactacaggcacatgccaccacgccgggctaattttttgtattttagtagagacgaggtttcattgtgttgcccaggctggtcgtgaactcctgagctcaggcaatccacccgcctcagcctcccaaagtgctgagataacaggtgtgagccactgtgcccagcctctatatctatatttcaagacaaggtctcatatctgttgaccaggctggagtgttggtggcacaatcacagctcactgcagccttgacctccctgggatcaggtgatcctcccacct

SEQ ID NO: 956334 - DNA, 586 bp, Homo sapiens
gcctggctaatttttggtatttttagtagagatggggtttcaccatgttggccaggctggtctcaaactccagatctcaggtgatccacccgcctcggcctcccaaaatgctgggattacaggcgtgagctactgtgcctggtctttttaacattaatttttttttctttcttttttttttgagacagagtcttgctctgttgcccaggctggagtccaatggtgcaatcttggcttactgcaacctctgcttcctgggttcaagcaattctcctcccagtagctcagcctcccaagtagctgaaactacaggcacatgccaccacgccgggctaattttttgtattttagtagagacgaggtttcattgtgttgcccaggctggtcgtgaactcctgagctcaggcaatccacccgcctcagcctcccaaagtgctgagataacaggtgtgagccactgygcccagcctctatatctatatttcaagacaaggtctcatatctgttgaccaggctggagtgttggtggcacaatcacagctcactgcagccttgacctccctgggatcaggtgatcctcccacct

SEQ ID NO: 956335 - DNA, 636 bp, Homo sapiens
agggaaaatgatggaggatgggttcggcggacaggtaggactggccatctcccatctacccaacctagtgcaggagggaaggatggcttcagccggaggtggaatggctgacctcctctgggcatgcagacctctgggcaacgttacctcggcagagacccctccttgattattccacctaaatcattcccggatctttgtctatttctttatgtctatcttttcacagcagttctcaatggctgacagtgaattattttttatgtgtgttcattgtctgcctgttccgctggaatataagctccattaaggcttggaggctttgtttggtgacagctaatttctcagcacgttgaacaataccagattcatagtaattaataaacaataaaaaaccattgattgaatgaatggatggcatgaaatactgacctaaaaagttaggaggtaaatactggcagataagtttggagaggcggtgagaaggcaggcagagacctccaaccctatttctcagacatagyggctttagccagtgttgacattttctgagctggagacacagcatgagaacaaagtcctccaagttactcattttctgctattctgctacctcaactctctggaattccagaa

SEQ ID NO: 956336 - DNA, 698 bp, Homo sapiens
cacatagaccaatggaacagagtagagaactcagaagtaagaccgcacatctacaaccatctaatctttgacaaacctgacaaaaacaagcaacggggaaataattccttatttaataaatggtgctgggagaactggctagccatgtgcagaaaattggaactggaccccttctttacaccatttacaaaaattaaattaaaatggattaaagtcttaaatttacaacccaaaactataaaagtcctagaacaaaatctagtaatactattctggaaataggcacaggaaaggatttcacggcaaatacataaaaagcaattgcaacaaaagcaaaaattaacaaatgggatctaattaaagagtttctgcacagcagaagaaactatctcagaatgggagaaaacttttgcagtctatccatctgacaaaggtctaatatcctgaatctacaaggaaattaaacatgtttatgagaaaaaaaaccattaaaaagtgggcaaaggatgtgaacagacacttctcaatagaagacatttaagcagtcaacaaacatatgcaaaaaasctcaacatcactgatcattagagaaatgcaaatcaaaaccaaagtaagatgccatctcatgccagtcagaatggcaattattaaagagtcacgacttttttttacaagccaagacatcacttgtcattggt

SEQ ID NO: 956337 - DNA, 582 bp, Homo sapiens
cagatgaagcttcactctgtggcccggttgctaacaggccatggaccagatgcctgtcctaaactattacagcttaataactatttacataacattacattgtattagctattacaagtaatctagagatkatttaaaagggtgcttaggttatatgcaaatactatgccattttatatcagacagttgagcatatatggatttggtatccaaaggagttcctggaaccagtcctctatggataatgagggacaaccttatacaaatactctattgtagttaataaatttatttttcaccaggtatgagttagcagttctgaaatgattttatgtgtattcagggactgagcaaataaatatgtattatggatagtgagagtcagttttctcaggagaaaggagttacacaaataaggaaaagtgaaaggaaaggatgaactctgtggtgttgggttggaagagatatcaatataatttatggtataaattatgtatgtaaatatatatatacacacacaacacacccccatatgtatatatatacattccatacattcatatatatgtcaagataagtaca

SEQ ID NO: 956338 - DNA, 568 bp, Homo sapiens; identical to SEQ ID NO: 947494

SEQ ID NO: 956339 - DNA, 619 bp, Homo sapiens
tcttaaagcccttttcatattttccttatcttcacctcattctcttaatggaaggtgatttgttgaaaaaaggctgatgttttcattgtgtccctgcccattctccaaggtttaccagttgctttgtagaaacttgctcaacaggggaaatgttaggttacatgcaatagaatagaaaaagtggcacttagtacttttgagggtaagtgtccctttaagggtaagtgtcccttctttcagtaagagttctttcgctttgcaagtctgagggaaatcctagtgactatgtatgctgaagtggtttgatacggttttgctgtgtccccacccaaatctcatcttgaattgtaggtcccataattctcacatgtcttgggagtggtcccgtgggaagtaattaaatcatggggacgggtcttttcccgtgctattcttgtgatagtgaataagtctcacaagatgtgatggttttcaaaagggggagttcccctgcacatgctctcttacctagtaccatgtaagaccctgactttgctcctcattcgccttctgccaggattgygaggcctccccagccatgtggaactatgaatcaattaaatctctttcctttttaaat

SEQ ID NO: 956340 - DNA, 619 bp, Homo sapiens
tcgactgtgagggaatctagtcactgtgaagacgtgacaagcctagctccactgaggcctgggaaacaagggtgagtacaataggtaaactcaggaaagcagcatgtgacatctgtgattggacaggaaatgcctaagacgtcaccctggaagagtctcatacactgtcccatctggcaagagcctgcacatcctgcaatgtagaagttttcaaacttttataaacctctgtatcctttacttaaacaaaatcccttttggaaagcaaatttgaaaaccaggtgaaaacagaagttctctgatggaagttggaaatagagccttggagtcccccacaacccgccacatcatgcctgctttttcctcccttctctagcaaagctccctgcatctgagtccagagctctcatgctaaatgctcacagtgtttcattaaatgtcatagttgctgacgtggattggaaactggttgcttgaaacatcttttcgttaattttttttcmtaaaataaacgaaaaaaattaaattaagttttggttaagcagccagcctagattcacatggccctgaatcttggaatttccagttaggtattcatggaagatcgtctaatacaaca

SEQ ID NO: 956341 - DNA, 499 bp, Homo sapiens
tttcactgatgattagttacatttctatgatgattagttattagtttacatttctctgatgattgaacattttttcatatacaggttgaatgtcttcttttgaaaaatatgtattctagtccacattttaattaggctattcattttttgctgttgagttttttgagtttttaatatattttaggtgttaacccccttatcatatgtatggtttgcacatattttctctcattttataggttgtccctttactctattgattgttcctttggctgtgcaaaagatttttagtttgatgtaatcccatttttctatttttacttttgttgtctctgcttttttattcctatccaaaaaaatattgtctagaccaatgtcatgaaacttttccctgtatttttctaktagttttatagtttcaagtcttacatttgaattttaacttatttgagttgatttttgtatgtagtattagatactgatctaattgtattgttat

SEQ ID NO: 956342 - DNA, 499 bp, Homo sapiens
tttcactgatgattagttacatttctatgatgattagttattagtttacatttctctgatgattgaacattttttcatatacaggttgaatgtcttcttttgaaaaatatgtattctagtccacattttaattaggctattcattttttgctgttgagttttttgagtttttaatatattttaggtgttaacccccttatcatatgtatggtttgcacatattttctctcattttataggttgtccctttactctattgattgttcctttggctgtgcaaaagatttttagtttgatgtaatcccatttttctatttttacttttgttgtctctgcttttttattcctatccaaaaaaatattgtctagaccaatgtcatgaaacttttccctgtatttttctagtagttttatagtttcaagtcttacatttraattttaacttatttgagttgatttttgtatgtagtattagatactgatctaattgtattgttat

SEQ ID NO: 956343 - DNA, 499 bp, Homo sapiens
tttcactgatgattagttacatttctatgatgattagttattagtttacatttctctgatgattgaacattttttcatatacaggttgaatgtcttcttttgaaaaatatgtattctagtccacattttaattaggctattcattttttgctgttgagttttttgagtttttaatatattttaggtgttaacccccttatcatatgtatggtttgcacatattttctctcattttataggttgtccctttactctattgattgttcctttggctgtgcaaaagatttttagtttgatgtaatcccatttttctatttttacttttgttgtctctgcttttttattcctatccaaaaaaatattgtctagaccaatgtcatgaaacttttccctgtatttttctagtagttttatagtttcaagtcttacatttgaattttaacttatttgagttgatttttrtatgtagtattagatactgatctaattgtattgttat

SEQ ID NO: 956344 - DNA, 602 bp, Homo sapiens
acagagcaccaagtccctaggctgtacacagcaagggggccctgggcccagcccacaaaaccactttttcctcctaggcttccaggcctgtgatgggaggggctgccatgaagatctctgacatgccctggagacattttccccagtatctcagggattaactttcagctcctcattccttacccaaatttctgcagccagcttgaatttttccccagaaaatggggttttcttttctatcacattgtcaggctgcaaattttccaaacttttttatgctgtttccttttaaaactgaatgcctttaacagcacccaagtcacctcttgaatgatttgctgcttagaaatttcttctgccagataccctaagtatcatctcttaagttcaaagttccacaaatctctagggcaggggcaaaatgcgctagtctctttgctaaaacatagcaagagtcacctttactccaattcccaacaagttcctcgtctccatctgagaccacctcagcctgaatttcattgtccatatcrttatcagcattttggccaaagccattccacaagtctctagggagttccaaactttcccatattttccta

SEQ ID NO: 956345 - DNA, 645 bp, Homo sapiens
gcctatcatttgaagctttgaagccaggcattgacttctcttctgtaactatgraagtcctagatggcatcttgtaatataaggctgttttgtctataatgaaaatctgttgtttagtgtagccactttcttagctagaccttctggataatttgctgtagcttctccactagcacttgccactttaacctgcacttttatgttatcaaaaggtcttcttaccttaaatgtcataaaccaacctctgctagcttcaaacttttcttctgaagcctccttacctctcttagcctttatagaactgaaaagagcccgcttgctctgaattagattttggcttaagggaatgttgtggctggtttgatcttctatccagaccactacaattttctccatatcagcaataaggctggttcactttcttatcattcatgtgctcactcactggagtatcacttttaatttctttcaggaatttttcctggccaggaacagtggctcatgcctgtaattccagcactttgggaggccaaggtgggtggatcacttgggcccagaagttcaagaccagcctgggtaacatagtgaaaccccatctctagaaaaaaatgtttaaaaaattagccaggaatggtgatgcacact

SEQ ID NO: 956346 - DNA, 645 bp, Homo sapiens
gcctatcatttgaagctttgaagccaggcattgacttctcttctgtaactatgaaagtcctagayggcatcttgtaatataaggctgttttgtctataatgaaaatctgttgtttagtgtagccactttcttagctagaccttctggataatttgctgtagcttctccactagcacttgccactttaacctgcacttttatgttatcaaaaggtcttcttaccttaaatgtcataaaccaacctctgctagcttcaaacttttcttctgaagcctccttacctctcttagcctttatagaactgaaaagagcccgcttgctctgaattagattttggcttaagggaatgttgtggctggtttgatcttctatccagaccactacaattttctccatatcagcaataaggctggttcactttcttatcattcatgtgctcactcactggagtatcacttttaatttctttcaggaatttttcctggccaggaacagtggctcatgcctgtaattccagcactttgggaggccaaggtgggtggatcacttgggcccagaagttcaagaccagcctgggtaacatagtgaaaccccatctctagaaaaaaatgtttaaaaaattagccaggaatggtgatgcacact

SEQ ID NO: 956347 - DNA, 645 bp, Homo sapiens
gcctatcatttgaagctttgaagccaggcattgacttctcttctgtaactatgaaagtcctagatggcaycttgtaatataaggctgttttgtctataatgaaaatctgttgtttagtgtagccactttcttagctagaccttctggataatttgctgtagcttctccactagcacttgccactttaacctgcacttttatgttatcaaaaggtcttcttaccttaaatgtcataaaccaacctctgctagcttcaaacttttcttctgaagcctccttacctctcttagcctttatagaactgaaaagagcccgcttgctctgaattagattttggcttaagggaatgttgtggctggtttgatcttctatccagaccactacaattttctccatatcagcaataaggctggttcactttcttatcattcatgtgctcactcactggagtatcacttttaatttctttcaggaatttttcctggccaggaacagtggctcatgcctgtaattccagcactttgggaggccaaggtgggtggatcacttgggcccagaagttcaagaccagcctgggtaacatagtgaaaccccatctctagaaaaaaatgtttaaaaaattagccaggaatggtgatgcacact

SEQ ID NO: 956348 - DNA, 697 bp, Homo sapiens
gcacagggaaacacctgtctcaaggtgactcggctctcgggtggcaagctgtggtctgcactggggaagtctgactcctgcgtcccccatagcacactctgccacctccaasggttgtccccacacatcctttctacaatctagccatcttcctccttctggcctgtgggatcatctacacacacacacgttgctcatcacatgagcacctacacacaggaatgtgtgtgagctggtgctggcacacaccgtgcatgtgcacctgggcgtgtgcctaaatggccacttacacacaggtcaaacgcctcactctccctgcctgccatcccccagggatgtcaagccagacaacgtcctgctggatgtgaacgggcacattcgcctggctgacttcggctcctgcctgcgtctcaacaccaacggcatggtaaggaccccgccccagagtgggagcaggggatacaaggcgggccaagctctcaggaaaatgggaggccccaggcctagtgcagaggcatcaggccccccggggaaggtgggtgagacccaggccccaggtgggcagcagcaggccagcctggcagagtaggggtgacagggccatcgcgaggagccagcagtcccagccaagcccaaagctgtcctcatggcttcaccaccaccacccacaggtggattcatcagtggcagtagggac

SEQ ID NO: 956349 - DNA, 527 bp, Homo sapiens
gggtttcaacaggtgaattttggaaggacacaattgtgcagtccataacattagaaaygtgtttggttgtgccttgcttattggcatgaaactgctctcgaccttcacaccccttgatccttcctaccccctctactctgacctcaactgctttaaagagaaagatgattatgagaggggctggtatttcttggtgctccctcaagaggtattgcaggacatatgcacccaggaaagtatgctaaggagccataaggagggaaggggctcagaatgaagggaatctgatgggtgtaggcacccacaaaccacctaggccactcacagagatgacacaacaaacgcctgttccctcatgagaccaggcaaaatcaagttgctgatggagccttggtgaaacatggacaccattggtgcatggatccatcatcatcctagatgtggcaacatgtccgccttcctagactaggcacacagtaaaagactctatgtttcgaatgcagggactaccactgcatttcacactt

SEQ ID NO: 956350 - DNA, 566 bp, Homo sapiens
ttcagcttcatttttgaaacttcgagtctgtgaaacatgggctgcctggggtgtatcatgtcaatccagccccagcaacactcacatcatgctgtcttgcctctacttaccctgtgccctgtcaagagcacccttcccgccaccctacacctgagctacctgctgaaacctaccaacgcttctgtttgtcctattctccctttcatttctttcttttcgtttcctgccctctttggctttacagcaggcttctctccccaacaagttccattttattgttcaactagtttaacatgcatgtttaattgaacaaggtcaaatgctagtcaatattttgccctcccaccaaataatagacctttcccactctgatcactcctcaccaatttgttattgttttatggttctttagttttatctcattttttttttcttttttaawttttttttctttttttttttgagacagagtctcgctctgtcgcccaggctggagtgcagtggtgcagtcttggctcgctgcaacctccacctcccagtttcaagtgattctcctgcctcagcct

SEQ ID NO: 956351 - DNA, 561 bp, Homo sapiens
tggtgcctgcatatcaaacaaagccatctgaaacccggacccaagtttacacttcctcagtcaactgatcatagagaatgccacatgaggccacrggtgcaggctgggagagaaaaggcaatgtagcacgagtaggagccatgggcatttgggccacttcttcatgtaatttacttgtgccttcagatcctgctcaagcctgatctcatgtatcccactttcatttgatgttggatggaatgccgctgtacatgcccagccttatggctttgagggccagacaacacccagttcgtaacagacagtggcccatggttaaacttttagtttctactaagcctagtaacacgccaagtgctgtttctcaaaaggagagtagtcctacgcagagagtggcagggctttgctacaaaaagggcttgtggtgtgattcacctacaggggcctgccagaggctccaaatcgcacctccatctgccactgatacctcaagcaccactggatctgctggatcgtgatgcaagtggcagagcagcttgcacagcagcctggacctaccag

SEQ ID NO: 956352 - DNA, 601 bp, Homo sapiens
gaattctagaaattcatattactttgcagtaacattttgtatttttataaagttattttcaacatgccagaaagtcagcatcycccgtactaatttaaacagaaaatactcatttggaaacagattttaatttcatgttttctagaagctgtcagtaagtgatatgccctgaggtgaaacactggcttttattcttagggggaatgacctagaataaaaactgatggcaatgttctgggcaatttctcttcttttctttgggatatgtcagattcatcttctttctgggcagaagttgctgaggacagaagttagtctgtaatccttcagggtgttacacaagagctaacggcaggagagctgccctccctaaataggtatggagaagggaatggggagggagggctttctccttagccaagaagtgaaagtctacaatattacaagggcaagaactaactcaagatctgtttttgtttttgtgagacagggtctcgccctgtcgcccaggctggagtgcgggcgtgaccatggctcactgctacccccaccttctgggtttaagtgatcctcccacctcagcccaggcacatgtcaccac

SEQ ID NO: 956353 - DNA, 592 bp, Homo sapiens
ggtgccactgcactccagtctgggcgacagaatgaaatcctgtctcagaaagcaaataaaccaaaatgctaacaatttaaaatagtggggaaaaaaaaacttaaaaaccgaaaagaaaattctacatatgaaaagaagtgtattacaaggaaagatcatggacaattacacaaagtccctaagacctgactaactttcatgatgaccaactctattttgaagttttgcttcatgatgaatagctgcttttattttttagtcttttagaacagtgctctccttacagaatacatttacattcattttctagttggcattgctctttttaaaattcagttatgattttatatacaccaacatatacattctctatgaagtatttccatggctctgtgttgtttgatgacacacagaaatccattctgctttgcactcatatagagcacaggtttgacagaaacagtgctggtgattggatarcagtgccattgcctaagtgtcttcttattttgccaagcacataattattttcaaaccagtcagtaagttgagtggcttcttcaggcaaatgaagctttgaaagttcctagaa

SEQ ID NO: 956354 - DNA, 650 bp, Homo sapiens
gttgatgctgcagtccaagtccgaaggtcatctgctacagattccctttcgcggcaggtagctcagtctttcattctattcaagccatcaactgattggatgagacttacccacattaggaagagtaatctgggccaggcgtgatggctcacacctgtaattccagcactttgggaggccaaggcacgtggatcccttgagctcaggagtttgagaccagcctgggcaacgtggcaaaatcccaattctacaaaaaatacaaaaattagctgggcatggaggcgcatgccttgtggtcccagctattcacaaggctgaggtgggaggatcgtttgatcccaggaggtcgaggctgcagtgagctgagattgtgccactgccctccagtctgggcgacagagcgagactccatctcaaaaaatatataagtaaattaaataaaataaaatacaaacacagaattagccagttgtagtggcacgctcctgtaatcccatgtactcaggaggctgaggsaagagaattgcttgaactcaggaggtgggggttgcagtgagacgagatctgccactgcactccagcttgggcgacaaagcaagaatctgtctcagagggtggaggtggggggtggggaaagaactacctgggac

SEQ ID NO: 956355 - DNA, 622 bp, Homo sapiens
accatcagtggactcaaaccatgtagaaatccccaatttacctgaaaaagaattcagaaggttaattattaagctaatcagggaggcaccagagaaaggtgaagcccaatctaaggaactacaaaaagtgatacaagaagtgaacacagaaatattcaaggaaataggtaacataaataaacaacaatcaaaacttcaggaaagaatggacacacttatagaaatgcaaaatactctggaaagtctcagcaagagaattgaacaagtagaagaaagaaattcagagctcaaagacagggtcttcgaattaacccaatccaacaaagacaaagataaaagcataagaaaatatgaacaaagcctccaagaagtctgggattatgttaaatgaccaaacctgagaataattcatgttcctgaagaacaggaacctaagaagagaaatctaaaagtctggaaaacatagttgggggaataattaagaaaaacttacccagccttgctagaarcctagacatccaaatacaagaagcacaaagaacacctggaaaattcatcacagaaagatcattgcctagccactttgtcatcaggttatctaaagttaagacaaagtgagagg

SEQ ID NO: 956356 - DNA, 748 bp, Homo sapiens
cagagaggcttcactccatagccactacaactccgggctgtgaggagtactgccaaactaccaccgatgtacccttaaggctcaaggaagggctcttaagtcagcttgttgtgaatgatgcctggcctgggactcgcccttcaggtcagcaggctcctttctggcccagggaaggtccagaagttccatgaaaagttcaagtcctggaatcagggacccaaagaggtcacttggtgctctaccttcctgtggttaggctggtacctaaggttcaagataaagtcccctttactttccttctgcttttctcaagcagaaggggttttgccttgtagccactatggccagctatgtactgaatttcacttgaagccatcaagtcagaggttcatccaaggcgctcgatttaggacctgggtattgctgctggttattcaggacccaaggattcttcaattaccaggtgttgaatgctgcccagactgggttctttcctttaaggcagtgggttcccttctggcccaaggtatgtctagaaatgtcatcttggagctaggtcctggaacaatggccctcccaactctaaccagtatcttaacctgttgtggctgggctggtattctagatscaagacaaagtcctccccactcttccttctcttctccttaagcagaagaaaaaggtgttttttggaacttcaagctgtgcagcctggggttagggtaagggtgatgccagctctccctta

SEQ ID NO: 956357 - DNA, 632 bp, Homo sapiens
atgtatgtgtatttgaaaagtcattttatcagttgatatagtttggatatttgtcccctgaaaatctcttgttgaaatgtgagcccccatggccgggcgcggtggttyacacctgtaatcccagcactttgagaggcccaggcgggcagatcacaaggtcaggagatggagacaaacctggctaacatggtgaaaccctgtctctactaaaaatacaagaaaattagccgggagtggtggcgggcacctgtagtcccagctactcaggaggctgaggcaggagaatggcgtgaacccaggaggcggagcttgcagtgggccaagatcgtgccactgcactccagcctgggcgacagagcaaaactccgtatcaaaaaataaaaaataaaaaaaaaagaaatgtgagcccccagtgttggagtgggtcctagtgggaggtgtttgcgtcacaggggccgatccttcgtgaatggctggacgtcctccctgtagttatgagtgacttctcacactactattagttccctgaacagtcagtttttcctctccacaatctccacactcttgctccctctgttgccatgtgacatgccagttccccttgacttctgccatgagtaaaatcttcttga

SEQ ID NO: 956358 - DNA, 619 bp, Homo sapiens
atattagatctttgtcagatatagtttgcaaaaatgttctcctattctgtaggttgtctgtttactatctattctctttcattggtatatatgtcaggttttgtacaatatcatgctattttggtgactgtagccccgtagtatagtttgaaatttggtagcaaattgttctttttgttaggttgcttttttctttttgcttaggtttgccttggctattttggctcttttttggttccatataaattttgaaatagaattttctagttatgtgaagaatgtcactggtagtttgataggatagtattgaatctgtaaattgctccgggggcagtatggccattttaataatatttattcttactattcatgatcatggaatgtttttccatttgtttgcattatctctgtttgtttgtacagtgttttgtagttgtcactgtagagacctttaatctccctggttatctgtattcctaggtattttattctttttgtggcaactgtgartgggattgccttcctgatttggctctcggcttgactgttgttggtgtatgggaattctagtgagttttgtacattgattttatttcttgaaactttgctgaagttgttt

SEQ ID NO: 956359 - DNA, 619 bp, Homo sapiens
atattagatctttgtcagatatagtttgcaaaaatgttctcctattctgtaggttgtctgtttactatctattctctttcattggtatatatgtcaggttttgtacaatatcatgctattttggtgactgtagccccgtagtatagtttgaaatttggtagcaaattgttctttttgttaggttgcttttttctttttgcttaggtttgccttggctattttggctcttttttggttccatataaattttgaaatagaattttctagttatgtgaagaatgtcactggtagtttgataggatagtattgaatctgtaaattgctccgggggcagtatggccattttaataatatttattcttactattcatgatcatggaatgtttttccatttgtttgcattatctctgtttgtttgtacagtgttttgtagttgtcactgtagagacctttaatctccctggttatctgtattcctaggtattttattctttttgtggcaactgtgagygggattgccttcctgatttggctctcggcttgactgttgttggtgtatgggaattctagtgagttttgtacattgattttatttcttgaaactttgctgaagttgttt

SEQ ID NO: 956360 - DNA, 575 bp, Homo sapiens
ctgaagaaccagtcctgcaatatttaaactttatcatcacccatttgctcctgttatttattacatatatacaactgtaattatagtttggaccaaatatccatgtagttaaactcagttgtcactttattttctaaaactccttctggatggcaaaaattttctggtttaaagcaaaataattaagccattgcgttttacataggatagttagggatgattcttaaatttttttttttttttttttttttttttttttttttttttgagacggagtctcgctctgtcgcccaggctggagtgcagtggcacgatctcggctcactgcaagctccgccccctgggttcacaccattctcctgcctcagcctcccgagtagctgggactacaggcgcccaccagcacgcccagctaattttttgtatatttagtaaagacggggtttcaccatgttggccaggatggtctcgatctcttgacctyatggtccacccgcctggtcctcccagagtgttgggattacaggcgtgagcccccgtgcccggccaattcttaaaaattttaaactcaacat

SEQ ID NO: 956361 - DNA, 533 bp, Homo sapiens
tgaacatgatgttgactctgggcttgccgtatatggactttattgtgcttyggtacattcattctatacataatctgttaagagttttttatcgtgaaaagatattgacttttgtcaatttatttttctgcgtctattgatatgctcatactaattttcaataaaagtcccaaaaatattcaatggagaaaggacaggcataaaaatggtgttgggaaaactatatatacacatgtaggagaattgattggatctttatcccttatcacatccaaaaataaactcaaaattaattaaagacaaatataagacacaaaactctaaaacttccaggataaaacaaagggagaaagtttcacaatattggtctgggaaataatattttgggtttgactcaagaagctcatgcaacaaatgcaaaagtagacaaatgtgaatacatcaaattaaaaagcttccaaacagcaaaagaagcaatcaacagactgaagacacaactcagagtgggagaaaatatttgtaaaccacacatt
